United States Patent Application Publication US 2022/0096574 A1 - sequence listing, part 6

SEQ ID NO: 22710 - protein, 132 aa, Micromonospora marina
  misc_feature (1)..(132): tr|A0A1C4VM99|A0A1C4VM99_9ACTN 6-pyruvoyl-tetrahydropte rin synthase OS=Micromonospora marina OX=307120 GN=GA00 70215_103264 PE=4 SV=1
MFSVTVRDHMMVAHSFRGEVFGPAQRLHGATFVVDATFRRAELDDDGIVVDIGLATEQLKAVLAELNYRNLDDEPAFAGVNTTTEVLARTVADRLADAVAAGRLGEGARGLAGITVTLHESHIAWASYERSL

SEQ ID NO: 22711 - protein, 132 aa, Micromonospora matsumotoense
  misc_feature (1)..(132): tr|A0A1C4WZN8|A0A1C4WZN8_9ACTN 6-pyruvoyl-tetrahydropte rin synthase OS=Micromonospora matsumotoense OX=121616 GN=GA0070216_10439 PE=4 SV=1
MFSVTVRDHIMIAHSFRGEVFGPAQKLHGATFVVDATFRRPELDDDGIVVDIGRAIDELKAVLADLTYRNLDDEPAFAGQNTTTEVLCRAIADRLADRVHAGGLGAGARELAGITVTLHESHIAWASYERSL

SEQ ID NO: 22712 - protein, 137 aa, Micromonospora mirobrigensis
  misc_feature (1)..(137): tr|A0A1C4WQX7|A0A1C4WQX7_9ACTN 6-pyruvoyl-tetrahydropte rin synthase OS=Micromonospora mirobrigensis OX=262898 GN=GA0070564_102443 PE=4 SV=1
MFSVTVRDHIMIAHSFRGEVFGPAQRLHGATFVVDASFRRPGLDSDGIVVDIGLATEQLRAVLGELTYRNLDEEPAFHGVNTTTEVLCRTIADRLADRVRAGDLGPGARELAGITVTLHESHIAWASYERSLGEREE

SEQ ID NO: 22713 - protein, 132 aa, Micromonospora musae
  misc_feature (1)..(132): tr|A0A3A9XYE7|A0A3A9XYE7_9ACTN 6-carboxytetrahydropteri n synthase OS=Micromonospora musae OX=1894970 GN=D7044_ 19140 PE=4 SV=1
MFSVTVRDHMMIAHSFRGDVFGPAQRLHGATFVVDATFRRAELDEDGIVVDIGLATDQLKAVLGELTYRNLDDEPAFAGVNTTTEVLARTVADRLVERVHAGQLGAGARHLDGITVTLHESHVAWASYERSL

SEQ ID NO: 22714 - protein, 143 aa, Micromonospora narathiwatensis
  misc_feature (1)..(143): tr|A0A1A8Z9X4|A0A1A8Z9X4_9ACTN 6-carboxy-5,6,7,8-tetrah ydropterin synthase OS=Micromonospora narathiwatensis O X=299146 GN=GA0070621_1053 PE=3 SV=1
MSGPASAGSGPVTAIGPGIYRIYKSFMFEAAHQLGGLPEGHKCGRLHGHGYTVEVTIASRRLTGPGFVVDFAELDLLKRHLDGEFDHRFLNDVVDVEPTSENLARVLFDWCAAHLALPDGAFVEAVRVRETAASWAEYRQDNP

SEQ ID NO: 22715 - protein, 132 aa, Micromonospora narathiwatensis
  misc_feature (1)..(132): tr|A0A1A8ZI05|A0A1A8ZI05_9ACTN 6-pyruvoyl-tetrahydropte rin synthase OS=Micromonospora narathiwatensis OX=29914 6 GN=GA0070621_1809 PE=4 SV=1
MFSVTVRDHMMVAHSFRGEVFGPAQRLHGATFVVDATFRRPELDADGIVVDIGLATEQLKAVLGALTYRNLDDEPAFAGVNTTTEVLARTVADRLAEAVHAGRLGDGAHGLAGITVTLHESHVAWASYERSL

SEQ ID NO: 22716 - protein, 133 aa, Micromonospora nigra
  misc_feature (1)..(133): tr|A0A1C6SYS0|A0A1C6SYS0_9ACTN 6-pyruvoyl-tetrahydropte rin synthase OS=Micromonospora nigra OX=145857 GN=GA007 0616_5029 PE=4 SV=1
MFSVTVRDHIMVAHSFSGAVFGPAQRLHGATFVVDATFRRPDLDDDGVVVDIGLATEQLKAVLGELNYRNLDDEPAFAGTNTTTEVLARTVADRLAARVAAGDLGVGAHGLTGLTVTLHESHVAWAAYERSLP

SEQ ID NO: 22717 - protein, 143 aa, Micromonospora nigra
  misc_feature (1)..(143): tr|A0A1C6R7X1|A0A1C6R7X1_9ACTN 6-carboxy-5,6,7,8-tetrah ydropterin synthase OS=Micromonospora nigra OX=145857 G N=GA0070616_0136 PE=3 SV=1
MSRPALANSTAMNVAGPGIYRIGKAFTFEGAHLLGGLPEGHKCGRLHGHRYTVEITLASRQLTGPGFVVDFAELDPLKRHLDGSFDHRLLNDAINVEPTSEHLAHVLFDWCAAHLALPDGVVIEAVRVRETATSWAEYRQDVP

SEQ ID NO: 22718 - protein, 132 aa, Micromonospora noduli
  misc_feature (1)..(132): tr|A0A328MZV9|A0A328MZV9_9ACTN 6-pyruvoyltetrahydropter in synthase OS=Micromonospora noduli OX=709876 GN=LAH08 _06499 PE=4 SV=1
MFSVTVRDHMMIAHSFRGEVFGPAQRLHGATFVVDATFRRPDLDADGIVVDIGLATEQLRAVLSELTYRNLDDEAAFAGVNTTTEVLARTVADRLVERVHAGELGAGARDLTGITVTLHESHIAWASYERSL

SEQ ID NO: 22719 - protein, 132 aa, Micromonospora olivasterospora
  misc_feature (1)..(132): tr|A0A562IID0|A0A562IID0_MICOL 6-pyruvoyl-tetrahydropte rin synthase OS=Micromonospora olivasterospora OX=1880 GN=JD77_05389 PE=4 SV=1
MFSVTVRDHMMIAHSFRGEVFGPAQRLHGATFVVDATFRRPDLDADGIVVDIGRATDALKEILGELTYRNLDDEPAFAGTNTTTEVLARTVADRLADRVRAGDLGAGASGLTAIAVTLHESHVAWASYERPL

SEQ ID NO: 22720 - protein, 118 aa, Micromonospora olivasterospora
  misc_feature (1)..(118): tr|Q2MFZ0|Q2MFZ0_MICOL 6-carboxy-5,6,7,8-tetrahydropter in synthase OS=Micromonospora olivasterospora OX=1880 G N=fosG PE=3 SV=1
MEIFREFTFEAAHRLPNVPEGHKCARLHGHSYRVTVHVSGDVDPHSGWVMDFGDLKKAVEPIRDRLDHHYLNEVPGLENPTSEVLARWIWDRLAGSLPLSAVGVRETCTSGCVYRGDR

SEQ ID NO: 22721 - protein, 132 aa, Micromonospora orduensis
  misc_feature (1)..(132): tr|A0A5C4QTK2|A0A5C4QTK2_9ACTN 6-carboxytetrahydropteri n synthase OS=Micromonospora orduensis OX=1420891 GN=FH G89_13685 PE=4 SV=1
MFSVTVRDHMMIAHSFRGEVFGPAQRLHGATFVVDATFRRPDLDADGIVVDIGLATEQLRVVLGELTYRNLDDEAAFAGVNTTTEVLARTIADRLAERAHAGQLGAGARELTGITVTLHESHIAWASYERSL

SEQ ID NO: 22722 - protein, 118 aa, Micromonospora pallida
  misc_feature (1)..(118): tr|A0A1C6TCZ7|A0A1C6TCZ7_9ACTN 6-carboxy-5,6,7,8-tetrah ydropterin synthase OS=Micromonospora pallida OX=145854 GN=GA0074692_5411 PE=3 SV=1
MEIFREFTFEAAHRLPNVPEGHKCARLHGHSYRVAVHVSGDVDPRTGWVMDFGDLKRAFEPVREQLDHYYLNEVPGLENPTSEVLARWIWRRLADRLPLSAVTVRETCTSGCVYRGEN

SEQ ID NO: 22723 - protein, 132 aa, Micromonospora palomenae
  misc_feature (1)..(132): tr|A0A561WTN6|A0A561WTN6_9ACTN 6-pyruvoyl-tetrahydropte rin synthase OS=Micromonospora palomenae OX=1461247 GN= FHX75_11340 PE=4 SV=1
MFSVTVRDHMMVAHSFRGEVFGPAQRLHGATFVVDATFRRAELDADGIVVDIGRATEELRAVLAELTYRNLDDEPAFAGVNTTTEVLCRTVADRLAERAHAGGLGPGARELAGITVTLHESHIAWASYERSL

SEQ ID NO: 22724 - protein, 132 aa, Micromonospora pattaloongensis
  misc_feature (1)..(132): tr|A0A1H3JKI5|A0A1H3JKI5_9ACTN 6-pyruvoyl-tetrahydropte rin synthase OS=Micromonospora pattaloongensis OX=40543 6 GN=SAMN05444365_102145 PE=4 SV=1
MFSVTVRDHIMIAHSFRGEVFGPAQRLHGATFVVDATFRRAELDADGIVVDIGLAAQQLNAVLGELTYRNLDDEPAFAGVNTTTEVLARTIADRLADRVHAGDLGDGARGLAGITVTLHESHIAWASYERPL

SEQ ID NO: 22725 - protein, 132 aa, Micromonospora peucetia
  misc_feature (1)..(132): tr|A0A1C6VXU3|A0A1C6VXU3_9ACTN 6-pyruvoyl-tetrahydropte rin synthase OS=Micromonospora peucetia OX=47871 GN=GA0 070608_4522 PE=4 SV=1
MFSVTVRDHMMIAHSFRGEVFGPAQRLHGATFVVDATFRRPDLDTDGVVVDIGLAAAQLKAVLGELTYRNLDDDPAFAGVNTTTEMLARTVADRLAERVRVGDLGVGARALAGITVTLHESHVAWASYERSL

SEQ ID NO: 22726 - protein, 132 aa, Micromonospora pisi
  misc_feature (1)..(132): tr|A0A495JBQ1|A0A495JBQ1_9ACTN 6-pyruvoyl-tetrahydropte rin synthase OS=Micromonospora pisi OX=589240 GN=BDK92_ 0569 PE=4 SV=1
MFSVTVRDHIMIAHSFRGEVFGPAQRLHGATFVVDATFRRPELDADNIVVDMGLAAQELKGVLAPLNYRNLDDEAAFAGVNTSTEALAQVIADRLVERVRVGALGEGAHGLTGITVTLRESHVAWASYERSL

SEQ ID NO: 22727 - protein, 132 aa, Micromonospora purpureochromogenes; identical to SEQ ID NO: 22723
  misc_feature (1)..(132): tr|A0A1C4XVY5|A0A1C4XVY5_9ACTN 6-pyruvoyl-tetrahydropte rin synthase OS=Micromonospora purpureochromogenes OX=4 7872 GN=GA0074696_2880 PE=4 SV=1

SEQ ID NO: 22728 - protein, 141 aa, Micromonospora radicis
  misc_feature (1)..(141): tr|A0A418MTJ2|A0A418MTJ2_9ACTN 6-carboxytetrahydropteri n synthase OS=Micromonospora radicis OX=1894971 GN=D2L6 4_16290 PE=4 SV=1
MFSVTVRDHIMIAHSFRGDVFGPAQRLHGATFVVDATFRRPDLDADGIVVDIGLATDQLKAVLAELNYRNLDDEPAFAGTNTTTEVLARTIADRLADRVRAGDLGPGAHGLTGLTVTLHESHVAWASYERSLPAAGAGDTA

SEQ ID NO: 22729 - protein, 132 aa, Micromonospora rhizosphaerae
  misc_feature (1)..(132): tr|A0A1C6SWL5|A0A1C6SWL5_9ACTN 6-pyruvoyl-tetrahydropte rin synthase OS=Micromonospora rhizosphaerae OX=568872 GN=GA0070624_4851 PE=4 SV=1
MFSVTVRDHMMIAHSFRGEVFGPAQRLHGATFVVDANFRRPDLDADGIVVDIGLATEQLKAVLGELTYRNLDDEPTFAGVNTTTEVLARTVADRLAERVHAGRLGEGARDLAGITVTLHESHVAWASYERSL

SEQ ID NO: 22730 - protein, 118 aa, Micromonospora rifamycinica
  misc_feature (1)..(118): tr|A0A109IPP3|A0A109IPP3_9ACTN 6-carboxy-5,6,7,8-tetrah ydropterin synthase OS=Micromonospora rifamycinica OX=2 91594 GN=AWV63_01570 PE=3 SV=1
MEIFREFTFEAAHRLPHVPAGHKCARLHGHSYRVQVHVEGDVDPVAGWVMDFGDLKKAFAPLRDQLDHHYLNEVPGLENPTSEVLARWIWDRLADQVPLSAVMVRETCTSGCVYRGER

SEQ ID NO: 22731 - protein, 132 aa, Micromonospora rifamycinica
  misc_feature (1)..(132): tr|A0A109ILK2|A0A109ILK2_9ACTN 6-pyruvoyl-tetrahydropte rin synthase OS=Micromonospora rifamycinica OX=291594 G N=AWV63_10875 PE=4 SV=1
MFSVTVRDHIMIAHSFRGEVFGPAQKLHGATFVVDATFRRPELDDDGIVVDIGRAIDELKAVLADLTYRNLDDEPAFAGQNTTTEVLCRAIADRLADRVHAGGLGTGARELSGITVTLHESHIAWASYERSL

SEQ ID NO: 22732 - protein, 105 aa, Micromonospora rosaria
  misc_feature (1)..(105): tr|A0A136PI54|A0A136PI54_9ACTN 6-pyruvoyl tetrahydropte rin synthase (Fragment) OS=Micromonospora rosaria OX=47 874 GN=AWW66_31965 PE=4 SV=1
MFSVTVRDHIMIAHSFRGEVFGPAQRLHGATFVVDATFRRPDLDADGIVVDIGRATDELRAVLGDLTYRNLDEEPDFAGVNTTTEVLARTIADRLADRARAGALG

SEQ ID NO: 22733 - protein, 132 aa, Micromonospora saelicesensis
  misc_feature (1)..(132): tr|A0A328P1K3|A0A328P1K3_9ACTN 6-pyruvoyltetrahydropter in synthase OS=Micromonospora saelicesensis OX=285676 G N=PSN13_00186 PE=4 SV=1
MFSVTVRDHMMIAHSFRGEVFGPAQRLHGATFVVDATFRRPDVDADGIVVDIGLATEQLRAVLSELTYRNLDDEAAFAGVNTTTEVLARTVADRLVERVHAGELGAGARDLTGITVTLHESHIAWASYERSL

SEQ ID NO: 22734 - protein, 132 aa, Micromonospora saelicesensis
  misc_feature (1)..(132): tr|A0A1C4W640|A0A1C4W640_9ACTN 6-pyruvoyl-tetrahydropte rin synthase OS=Micromonospora saelicesensis OX=285676 GN=GA0070561_2401 PE=4 SV=1
MFSVTVRDHMMIAHSFRGEVFGPAQRLHGATFVVDATFRRPDLDADGIVVDIGLATEQLRAVLSELTYRNLDDEAAFAGVNTTTEVLARTVADRLVERVHVGELGAGARDLAGITVTLHESHIAWASYERSL

SEQ ID NO: 22735 - protein, 117 aa, Micromonospora sagamiensis
  misc_feature (1)..(117): tr|A0A562W996|A0A562W996_9ACTN 6-carboxy-5,6,7,8-tetrah ydropterin synthase OS=Micromonospora sagamiensis OX=47 875 GN=JD81_00026 PE=3 SV=1
MEIFREFTFEAAHRLPNVPEGHKCARLHGHSYRVAVHVSGDVDPQAGWVMDFGDLKAAFEPVRDQLDHHYLNEVPGLSNPTSEVLARWIWNRLADRLPLSAVSVRETCTSGCVYRGD

SEQ ID NO: 22736 - protein, 132 aa, Micromonospora sediminicola
  misc_feature (1)..(132): tr|A0A1A9BAN4|A0A1A9BAN4_9ACTN 6-pyruvoyl-tetrahydropte rin synthase OS=Micromonospora sediminicola OX=946078 G N=GA0070622_3230 PE=4 SV=1
MFSVTVRDHMMVAHSFRGEVFGPAQRLHGATFVVDATFRRPDLDADGIVVDIGLATEQLRAVLGELTYRNLDDEPAFAGVNTTTEVLARTVADRLADAVHAGRLGEGARGLAGITVTLHESHVAWASYERSL

SEQ ID NO: 22737 - protein, 132 aa, Micromonospora siamensis
  misc_feature (1)..(132): tr|A0A1C5J1B4|A0A1C5J1B4_9ACTN 6-pyruvoyl-tetrahydropte rin synthase OS=Micromonospora siamensis OX=299152 GN=G A0074704_4020 PE=4 SV=1
MFSVTVRDHIMIAHSFQGEVFGPAQRLHGATFVVDASFRRPGLDADGIVVDIGLATEQLKAVLAELTYRNLDEEPAFHGVNTTTEVLCRTIADRLADRVHAGDLGPGARELTGITVTLHESHIAWASYERSL

SEQ ID NO: 22738 - protein, 132 aa, Micromonospora sp.; identical to SEQ ID NO: 22713
  misc_feature (1)..(132): tr|A0A5D0TM29|A0A5D0TM29_9ACTN 6-carboxytetrahydropteri n synthase OS=Micromonospora sp. WP24 OX=2604469 GN=FXF 53_03075 PE=4 SV=1

SEQ ID NO: 22739 - protein, 132 aa, Micromonospora sp.
  misc_feature (1)..(132): tr|A0A2T3VIA7|A0A2T3VIA7_9ACTN Uncharacterized protein OS=Micromonospora sp. RP3T OX=2135446 GN=C8054_14670 PE =4 SV=1
MFSVTVRDHMMVAHSFRGEVFGPAQRLHGATFVVDATFRRAELDADGIVVDIGLATEQLKAVLGELTYRNLDDEPAFAGVNTTTEVLARTVADRLADAVHAGRLGEGARGLAGITVTLHESHVAWASYERPL

SEQ ID NO: 22740 - protein, 132 aa, Micromonospora taraxaci
  misc_feature (1)..(132): tr|A0A561W1P1|A0A561W1P1_9ACTN 6-pyruvoyl-tetrahydropte rin synthase OS=Micromonospora taraxaci OX=1316803 GN=F HU34_113125 PE=4 SV=1
MFSVTVRDHIMIAHSFWGEVFGPAQRLHGATFVVDATFRRPDLDADGIVVDIGLATEQLRAVLGDLTYRNLDDEPAFAGVNTTTEVLARTIADRLVERVHAGDLGAGARDLTGITVTLHESHIAWASYERSL

SEQ ID NO: 22741 - protein, 132 aa, Micromonospora tulbaghiae
  misc_feature (1)..(132): tr|A0A1C4UWD4|A0A1C4UWD4_9ACTN 6-pyruvoyl-tetrahydropte rin synthase OS=Micromonospora tulbaghiae OX=479978 GN= GA0070562_2406 PE=4 SV=1
MFSVTVRDHMMVAHSFRGEVFGPAQRLHGATFVVDATFRRAELDDDGIVVDIGLATGQLKAVLAELNYRNLDDEPAFAGVNTTTEVLARTIADRLADAVHDGRLGEGARGLAGITVTLHESHIAWASYERSL

SEQ ID NO: 22742 - protein, 132 aa, Micromonospora tulbaghiae
  misc_feature (1)..(132): tr|A0A386WKE9|A0A386WKE9_9ACTN Uncharacterized protein OS=Micromonospora tulbaghiae OX=479978 GN=CSH63_06990 P E=4 SV=1
MFSVTVRDHMMVAHSFRGEVFGPAQRLHGATFVVDATFRRAELDDDGIVVDIGLATEQLKAVLAELNYRNLDDEPAFAGVNTTTEVLARTIADRLADGVHDGRLGEGARGLAGITVTLHESHIAWASYERSL

SEQ ID NO: 22743 - protein, 132 aa, Micromonospora ureilytica
  misc_feature (1)..(132): tr|A0A3N9XCG8|A0A3N9XCG8_9ACTN Uncharacterized protein OS=Micromonospora ureilytica OX=709868 GN=DDE19_31775 P E=4 SV=1
MFSVTVRDHMMIAHSFRGEVFGPAQRLHGATFVVDATFRRPDLDADGIVVDIGLATEQLRAVLGELTYRNLDDEAAFAGVNTTTEVLARTVADRLVERVHAGELGAGARDLTGIAVTLHESHIAWASYERSL

SEQ ID NO: 22744 - protein, 132 aa, Micromonospora violae
  misc_feature (1)..(132): tr|A0A4Q7UH78|A0A4Q7UH78_9ACTN 6-pyruvoyl-tetrahydropte rin synthase OS=Micromonospora violae OX=1278207 GN=EV3 82_2026 PE=4 SV=1
MFSVTVRDHMMIAHSFRGEVFGPAQRLHGATFVVDATFRRPDLDADGIVVDIGLATEQLRAVLGELTYRNLDDEAAFAGVNTTTEVLARTVADRLVERVHAGQLGAGARDLTGITVTLHESHIAWASYERSL

SEQ ID NO: 22745 - protein, 132 aa, Micromonospora viridifaciens
  misc_feature (1)..(132): tr|A0A1C4XJF4|A0A1C4XJF4_MICVI 6-pyruvoyl-tetrahydropte rin synthase OS=Micromonospora viridifaciens OX=1881 GN =GA0074695_3359 PE=4 SV=1
MFSVTVRDHMMIAHSFRGEVFGPAQRLHGATFVVDATFRRAELDADGIVVDIGLATEQLKAILGALTYRNLDDEPAFAGVNTTTEVLARTVADRLAEAVHAGRLGAGARGLAGITVTLHESHVAWASYERSL

SEQ ID NO: 22746 - protein, 132 aa, Micromonospora wenchangensis
  misc_feature (1)..(132): tr|A0A246RMV2|A0A246RMV2_9ACTN Uncharacterized protein OS=Micromonospora wenchangensis OX=1185415 GN=B5D80_131 70 PE=4 SV=1
MFSVTVRDHIMIAHSFRGEVFGPAQKLHGATFVVDATFRRAELDDDGIVVDIGRATDELKAVLAELTYRNLDDEPAFAGQNTTTEVLCRTVADRLADRVHAGGLGAGARELAGITVTLHESHIAWASYERSL

SEQ ID NO: 22747 - protein, 120 aa, Micromonospora wenchangensis
  misc_feature (1)..(120): tr|A0A246RK05|A0A246RK05_9ACTN 6-carboxy-5,6,7,8-tetrah ydropterin synthase OS=Micromonospora wenchangensis OX= 1185415 GN=B5D80_17825 PE=3 SV=1
MTFRISKEFHFSASHSLAGLAAEHPCSRMHGHNYVVELELAADRDALSDVGFVRDYGDLAAFSRWLDQEVDHRHLNDVVDRNPSAENLSRWIYDKWHERYPELSSVRVSETPKTWAEYRP

SEQ ID NO: 22748 - protein, 132 aa, Micromonospora yangpuensis
  misc_feature (1)..(132): tr|A0A1C6UPM7|A0A1C6UPM7_9ACTN 6-pyruvoyl-tetrahydropte rin synthase OS=Micromonospora yangpuensis OX=683228 GN =GA0070617_3112 PE=4 SV=1
MFSVTVRDHIMIAHSFQGEVFGPAQKLHGATFVVDATLRRAELDDNGIVADIGLVTDELKAVLAQLNYRNLDDEPDFAGQNTTTEVLARTIADRLADRAHAGALGESARDLAGITVTLHESHVAWCSYERTL

SEQ ID NO: 22749 - protein, 132 aa, Micromonospora zamorensis
  misc_feature (1)..(132): tr|A0A1C5I5Y9|A0A1C5I5Y9_9ACTN 6-pyruvoyl-tetrahydropte rin synthase OS=Micromonospora zamorensis OX=709883 GN= GA0070619_2950 PE=4 SV=1
MFSVTVRDHMMIAHSFRGDVFGPAQRLHGATFVVDATFRRPDLDADGIVVDIGLATEQLRAVLGELTYRNLDDEPAFAGVNTTTEVLARTIADRLVERVHAGDLGAGARDLTGITVTLHESHIAWASYERSL

SEQ ID NO: 22750 - protein, 143 aa, Micromonospora zingiberis
  misc_feature (1)..(143): tr|A0A4R0GWX5|A0A4R0GWX5_9ACTN 6-carboxytetrahydropteri n synthase OS=Micromonospora zingiberis OX=2053011 GN=E 0H26_01240 PE=4 SV=1
MFSVTVRDHIMIAHSFRGDVFGPAQRLHGATFVVDASFRRPDLDADGIVVDIGLATDQLKAVLGELNYRNLDDEPAFAGTNTTTEVLARTIADRLADRVHAGHLGAGAHGLTGITVTLHESHVAWASYERSLPGANGAGEGTG

SEQ ID NO: 22751 - protein, 132 aa, Micromonosporaceae bacterium
  misc_feature (1)..(132): tr|A0A3D4X1U0|A0A3D4X1U0_9ACTN Uncharacterized protein OS=Micromonosporaceae bacterium OX=1873464 GN=DGT23_321 70 PE=4 SV=1
MFSVTVRDHMMIAHSFRGEVFGPAQRLHGATFIVDATFRRAGLDADGIVVDIARAAEELKTVLGQFNLRNLDDDPAFAGMNTTTEVLAQVIADRLAERVNAGALGEGAHGLAGITVTLHESHVAWASYERPL

SEQ ID NO: 22752 - protein, 136 aa, Microscilla marina
  misc_feature (1)..(136): tr|A1ZQ85|A1ZQ85_9BACT 6-pyruvoyl tetrahydrobiopterin s ynthase OS=Microscilla marina ATCC 23134 OX=313606 GN=M 23134_06895 PE=4 SV=1
MRAIIARKEHFNAAYRLHNPDWSEEKNQDIFGPYNNPNYHGCNFDLEVQVIGEINPITGYVMRTEDLAVLVKTQVLNKFDHKNLNLDLEEFERLNPTIENIAMVIWRILREKLDPKLDLKIRLYETERNFVEFPAS

SEQ ID NO: 22753 - protein, 158 aa, Microscilla marina
  misc_feature (1)..(158): tr|A1ZSU4|A1ZSU4_9BACT 6-pyruvoyl tetrahydrobiopterin s ynthase OS=Microscilla marina ATCC 23134 OX=313606 GN=M 23134_01678 PE=4 SV=1
MVYICRRETFNASHKLYNPNWSKEQNEALFGVCANQNWHGHNFELVVTVKGMPDLETGMVIDYKVLSKIVRREIIEKVHYKNLNLDVDFLAGKMPSCEILIIEFWKRLAPAIQQESPRTTLHHLKLVETKNNSVEYMGEGLEHYQDLRLQEPNVVKQD

SEQ ID NO: 22754 - protein, 158 aa, Microscillaceae bacterium
  misc_feature (1)..(158): tr|A0A349DUA6|A0A349DUA6_9BACT 6-carboxytetrahydropteri n synthase QueD OS=Microscillaceae bacterium OX=2053581 GN=DCS93_25555 PE=4 SV=1
MVYICRRETFNASHKLYNPNWSKEQNEAMFGVCANENWHGHNFELVVTVKGIPDLESGMVIDYKVLSKIIRREIIEKVHYKNLNLDVDFLQNKMPSCEILIIEFWKKLAPAVRAASPRAELHHLKLIETKNNFVEYTGEGLELYQDLTITNQTVNDIV

SEQ ID NO: 22755 - protein, 143 aa, Microscillaceae bacterium
  misc_feature (1)..(143): tr|A0A3C0ICI0|A0A3C0ICI0_9BACT 6-carboxytetrahydropteri n synthase QueD OS=Microscillaceae bacterium OX=2053581 GN=DCM08_08985 PE=4 SV=1
MVYLCRRESFQAAHRLFNPAWSDAENEEAFGVCANPNWHGHNFELIVTVKGQPLPETGCVIDLKRLSRIIRQEVIERLDHKNLNLDVDFLQGKIPSCEIIVIEIWKILAQALRPYANVQLHALKLIETKNNFVEYFGEPVVAQ

SEQ ID NO: 22756 - protein, 167 aa, Microvirga aerophila
  misc_feature (1)..(167): tr|A0A512BM41|A0A512BM41_9RHIZ Uncharacterized protein OS=Microvirga aerophila OX=670291 GN=MAE02_07260 PE=4 S V=1
MNLPVAMPGISPDTIPQAREIFRSTKYYDHNEGLSCCFRQWRATHSHCRLIHGYALAFKFVFATFELDERNWCFDFGGLKPVKAWLKDLFDHTMLVAQDDPELARFEALHRDGLVNLRVLPAVGCEATAKHVFGHVAAFVHEETKGRVWLESVEVKEHGGNSAIYSR

SEQ ID NO: 22757 - protein, 135 aa, Microvirga aerophila
  misc_feature (1)..(135): tr|A0A512BSK7|A0A512BSK7_9RHIZ Uncharacterized protein OS=Microvirga aerophila OX=670291 GN=ptpS PE=4 SV=1
MYAVEVRDHIMIAHSFRDPLFGPAQALHGATFVVDVAFYREHLTEEGIVVDIGRAHDVLKALLTPLNYRNLDDMPEFSGKNTTTEFLCRHVFDAIAAAVRKGELGPGSDRVSHLRVTLHESHLAKAWFEGPLSDD

SEQ ID NO: 22758 - protein, 129 aa, Microvirga guangxiensis
  misc_feature (1)..(129): tr|A0A1G5GEH5|A0A1G5GEH5_9RHIZ 6-pyruvoyl-tetrahydropte rin synthase OS=Microvirga guangxiensis OX=549386 GN=SA MN02927923_01480 PE=4 SV=1
MKTYCEFTFEAAHSVHPYSELHGHTFIAKLTFGGPVDEVYNWPVNLYDVENYIDELKGKHGTGLDHTNLDLKQNEIGLASLENITIYIWRKVKERFPNLEEVELKRGMTGSTEGCVYRGEDLKAADLAA

SEQ ID NO: 22759 - protein, 125 aa, Microvirga lotononidis
  misc_feature (1)..(125): tr|I4Z3X4|I4Z3X4_9RHIZ 6-carboxy-5,6,7,8-tetrahydropter in synthase OS=Microvirga lotononidis OX=864069 GN=Micl oDRAFT_00004430 PE=3 SV=1
MWELTKSFNFEAAHTLTGTTLGPASEEIHGHSFRAEVAVRGLPDPETGMLIDLGLLEGKLAEMRRTLDHKFLNRIEGLERPTLENITRFIFERVQPIGPIARVTIYRDSCGETCTYYAPADHERR

SEQ ID NO: 22760 - protein, 161 aa, Microvirga lotononidis
  misc_feature (1)..(161): tr|I4YK76|I4YK76_9RHIZ 6-pyruvoyl-tetrahydropterin synt hase OS=Microvirga lotononidis OX=864069 GN=MicloDRAFT_ 00070210 PE=4 SV=1
MSWQAKRYHDISCGHRVVGHEGKCGHLHGHNYRVHFTCEADELDNLGRVIDFSEIKSKLCMWLEENWDHKMLLWEHDPVANVLIDNTTGTGDGTTLGDGIVLVPFNPTAENIAQHLVLVVGPQQLKGTGIKLRHCEVEETRKCSAVYTLRPQKNDFGQIER

SEQ ID NO: 22761 - protein, 129 aa, Microvirga ossetica
  misc_feature (1)..(129): tr|A0A1B2EZD3|A0A1B2EZD3_9RHIZ Uncharacterized protein OS=Microvirga ossetica OX=1882682 GN=BB934_11630 PE=4 S V=1
MKTYCEFTFDAAHSVAPYSGLHGHTFIVKLTFGGAVDEVYGWPVNLYDVENYIKEIKGEHGSGLDHGNLDLNPAIGVASLENVTKYVWKLVKERFPGLEEVELKRGMAGSQEGCIYRGEEAARAGSLAA

SEQ ID NO: 22762 - protein, 125 aa, Microvirga sp.
  misc_feature (1)..(125): tr|A0A2T7TSD5|A0A2T7TSD5_9RHIZ 6-carboxy-5,6,7,8-tetrah ydropterin synthase OS=Microvirga sp. KLBC 81 OX=186270 7 GN=DC522_29365 PE=3 SV=1
MWELTKSFNFEAAHTLTGTTLGAASEEIHGHSFRAEVAVRGLPDPQTGMLIDLGLLEGKLTEMRRTLDHKFLNRIEGLERPTLENITRFIFERVQHVGPIARVTIYRDSCGETCTYYAPVDHERR

SEQ ID NO: 22763 - protein, 129 aa, Microvirga sp.
  misc_feature (1)..(129): tr|A0A086MGL1|A0A086MGL1_9RHIZ Uncharacterized protein OS=Microvirga sp. BSC39 OX=1549810 GN=JH26_19125 PE=4 S V=1
MKTYCEFTFEAAHSVAPYSGLHGHTFIVKLTFGGPVDDVYGWPVNLYDVENYIKEIKGEHGSGLDHGNLDLNPEIGIASLENVTTYIWRLVKERFPGLEEVELKRGMAGSSEGCIYRGEAAAAQGSLAA

SEQ ID NO: 22764 - protein, 167 aa, Microvirga subterranea
  misc_feature (1)..(167): tr|A0A370HUF3|A0A370HUF3_9RHIZ 6-pyruvoyltetrahydropter in/6-carboxytetrahydropterin synthase OS=Microvirga sub terranea OX=186651 GN=DES45_101413 PE=4 SV=1
MNLSVAIPALAAENRPRGREIYRSTKAYDHAEGLSCCFRQWRATHSHCRLIHGYALAFKFVFATFELDERNWCFDFGGMKPVKAWLKDLFDHTMLVAEDDPELERFEAMHRDGLINLRVLPAVGCEATAKHVFDHVASFVHEETNGRVWLESVEVKEHGGNSAIYSR

SEQ ID NO: 22765 - protein, 118 aa, Microvirga vignae
  misc_feature (1)..(118): tr|A0A0H1R8Z1|A0A0H1R8Z1_9RHIZ 6-carboxy-5,6,7,8-tetrah ydropterin synthase OS=Microvirga vignae OX=1225564 GN= AA309_18605 PE=3 SV=1
MYTIAKRFAFSASHLIGGLPAEHPCARLHGHNYEVEVILQSAELDRVGFVRDYRELSELKTFIDNTLDHRHLNEVLGHDQTTAEVIAQWLYDWCKARWPEVAAVRVSETPKTWAEYRP

SEQ ID NO: 22766 - protein, 125 aa, Microvirga vignae
  misc_feature (1)..(125): tr|A0A0H1RBS9|A0A0H1RBS9_9RHIZ 6-carboxy-5,6,7,8-tetrah ydropterin synthase OS=Microvirga vignae OX=1225564 GN= AA309_14310 PE=3 SV=1
MWELTKSFNFEAAHTLTGTTLGPASEEIHGHSFRAEVAVRGLPDPETGMLIDLGLLEGKLAETRRTLDHKFLNRIEGLERPTLENITRFIFERVQHVGPIARVTIYRDSCGETCTYYAPADHERR

SEQ ID NO: 22767 - protein, 326 aa, Microvirgula aerodenitrificans
  misc_feature (1)..(326): tr|A0A2S0PD55|A0A2S0PD55_9NEIS 6-pyruvoyl tetrahydrobio pterin synthase OS=Microvirgula aerodenitrificans OX=57 480 GN=DAI18_15685 PE=4 SV=1
MRIVHCAAAGFESARRLASDEAHGHSFTVSAHAATGLASLRARLHEATQALDYRDLNQVLPSPDDAALADWIAARLPMAADLVLRSAPDRGVERDADGTRRIWLKSGFEAAHQLPHVPAGHQCGRLHGHGFGVRLLADADRQDIAALQAAWAPLHAQLNHAYLNALPGLDNPTSENLAAWLWQRLGAVVPGLRAVDVFETATAGSRYDGHRFRIWKEMRFEAAVPFDGHGRYTGHSYLVRLHLAGQVDARGWVRDFGEVKARFKPCYARLDHHPLDQLPGIGATDCAGIAGWIAAQFAAGVPELCRVDVLENDHDGAECRLAGEGA

SEQ ID NO: 22768 - protein, 326 aa, Microvirgula sp.
  misc_feature (1)..(326): tr|A0A329B037|A0A329B037_9NEIS 6-pyruvoyltetrahydropter in/6-carboxytetrahydropterin synthase OS=Microvirgula s p. AG722 OX=2183901 GN=DFO50_12122 PE=4 SV=1
MRIVHCAAAGFESARRLASDEAHGHSFTVSAHAATGLASLRARLHEVTQALDYRDLNQVLPSPDDAALADWIAARLPMAADLVLRSAPDRGVERDADGTRRVWLKSGFEAAHQLPHVPAGHQCGRLHGHGFGVRLLADADRQDIAALQAAWAPLHAQLNHAYLNALPGLDNPTSENLAAWLWQRLGAVVPGLRAVDVFETATAGSRYDGHRFRIWKEMRFEAAVPFDGHGRYTGHSYLVRLHLAGQVDARGWVRDFGEVKARFKPCYARLDHHPLDQLPGIGATDCAGIAGWIAAQFAAGVPELCRVDVLENDHDGAECRLAGEGA

SEQ ID NO: 22769 - protein, 141 aa, Midichloria mitochondrii
  misc_feature (1)..(141): tr|F7XVK3|F7XVK3_MIDMI Putative 6-pyruvoyl tetrahydropt erin synthase OS=Midichloria mitochondrii (strain IricV A) OX=696127 GN=midi_00392 PE=4 SV=1
MISCTRKIEFDAAHRVVGHQGKCYKLHGHRYIVEATFVAKELSDIGMVIDFSDIKEKLGGWVGKNWDHNAILNISDKILGDQISSNIEQTIYYMDQNPTAENMAKHLLHVICPQLFKDSGIKCIKIRLYETPNCYAEAEKQ

SEQ ID NO: 22770 - protein, 120 aa, Minicystis rosea
  misc_feature (1)..(120): tr|A0A1L6LPU8|A0A1L6LPU8_9DELT 6-carboxy-5,6,7,8-tetrah ydropterin synthase OS=Minicystis rosea OX=888845 GN=A7 982_09150 PE=3 SV=1
MKVRLVHEFRFEAAHFLPKVPSGHKCARMHGHSYRIEVAVSGPVNEETGWFIDYQRLYDAWQPLFMQLDHHCLNEVKGLENPTSEILARWLWEKLLPDLPQLERITVFETHDARCEYEGH

SEQ ID NO: 22771 - protein, 373 aa, Mitsuaria sp.
  misc_feature (1)..(373): tr|A0A1A9HP76|A0A1A9HP76_9BURK 6-pyruvoyl tetrahydropte rin synthase OS=Mitsuaria sp. 7 OX=1658665 GN=ABE85_228 60 PE=4 SV=1
MSALPASPASLFTASAGFESACQIDALPPGHRSRSLHGHSYLATVRAELPSGWAPFPGGEVSALRDCLERCIAPLDHALLNQHITQPTDENIARWIRHRLETEFEVPGITQVGIQSTSNSGVDLDANGHAHVWRRYRFQAAHQLPNVPMGHKCGRMHGHGFELILHANQDLGERDLSIDYDHLDELWAPFHAQLNYQCLNEIDGLSNPTSELISSWLWARLKPQLPELSWVTVYETGSSGANFDGERYRIWKEFTLDSAVKLNRAPSEHPLAGIHGHTFTLRLHLSAALDQVFGWAMDFSDVKLLFDPIYKAMDHHPLHELAGLPDSDTASLAAWVLQQAKAQLPPLERVDLYETRGSGVIVSHGPFEELIPV

SEQ ID NO: 22772 - protein, 370 aa, Mitsuaria sp.
  misc_feature (1)..(370): tr|A0A1I6KSC1|A0A1I6KSC1_9BURK 6-pyruvoyltetrahydropter in/6-carboxytetrahydropterin synthase OS=Mitsuaria sp. PDC51 OX=1881035 GN=SAMN05428960_3648 PE=4 SV=1
MSAFPASLFTASAGFESACQIDALPPGHRSRGLHGHSYLATIRAELPAGWAPFPGAEVSALRDCLERCIAPLDHGLLNTHIPQPTDENIARWIRQRLESEFQVPGITQVGIQSTSNSGVDLDANGHAHVWRRYRFQAAHQLPNVPMGHKCGRMHGHGFELILHANQDLGERDLSIDYDHLDELWAPFHAQLNYRCLNEIEGLSNPTSELISSWLWARLKPQLPELSWVTVYETGSSGANFDGERYRIWKEFTLDSAVQLNRAPADHPLAGIHGHTFTLRLHLSAALDQVFGWAMDFSDVKLLFGPIFKAMDHHPLHELAGLPDADTASLAAWVLRQAKAQLPPLERVDLYETRGSGVIVSHGPFEELIPV

SEQ ID NO: 22773 - protein, 125 aa, Mitsuokella jalaludinii
  misc_feature (1)..(125): tr|A0A174BZ42|A0A174BZ42_9FIRM 6-carboxy-5,6,7,8-tetrah ydropterin synthase OS=Mitsuokella jalaludinii OX=18797 9 GN=queD PE=3 SV=1
MYTLKVEGAFEAAHRVVNYPGKCDRLHGHNWKVEALVKGTELDELGMLVDFKAIKGALKEALERFDHRFLNELEPFASGINPTAENLARIIFDELATSPVFVRDSHLAAITVYETPASSVTYTRD

SEQ ID NO: 22774 - protein, 59 aa, Mitsuokella multacida
  misc_feature (1)..(59): tr|A0A356US36|A0A356US36_9FIRM 6-carboxytetrahydropteri n synthase QueD (Fragment) OS=Mitsuokella multacida OX= 52226 GN=DD660_08120 PE=4 SV=1
PRFLNELEPFSAGINPTAENLARIIFGELAGSDAFVRDSELFAITVYETPTSSVTYTRD

SEQ ID NO: 22775 - protein, 125 aa, Mitsuokella multacida; identical to SEQ ID NO: 22773
  misc_feature (1)..(125): tr|A0A414NZI3|A0A414NZI3_9FIRM 6-carboxy-5,6,7,8-tetrah ydropterin synthase OS=Mitsuokella multacida OX=52226 G N=queD PE=3 SV=1

SEQ ID NO: 22776 - protein, 125 aa, Mitsuokella sp.
  misc_feature (1)..(125): tr|A0A412L0G3|A0A412L0G3_9FIRM 6-carboxy-5,6,7,8-tetrah ydropterin synthase OS=Mitsuokella sp. AF21-1AC OX=2292 235 GN=queD PE=3 SV=1
MYTLKVEGAFEAAHRVVNYPGKCDRLHGHNWLVEAEVRGTELDELGMLVDFKLVKQALKSVLDRFDHRFLNELEPFSSGLNPTAENLARIIFEELEPHEAFVRDSHLYAITVYETPKSSVTYTKE

SEQ ID NO: 22777 - protein, 141 aa, Mitsuokella sp.
  misc_feature (1)..(141): tr|U2V3I6|U2V3I6_9FIRM 6-carboxy-5,6,7,8-tetrahydropter in synthase OS=Mitsuokella sp. oral taxon 131 str. W910 6 OX=1321781 GN=HMPREF1985_00486 PE=3 SV=1
MRKAFPSWGRLFYEGEKMYTVKVEGAFEAAHRVVGYPGKCDRLHGHNWVVELSLRGTELDPLGMFLDFKVAKRVLGEILKAYDHRFLNELAPFSNGVNPTAENLARIIYEAVEKKEELPKGSLAAVTVFESPKTSVTYTKD

SEQ ID NO: 22778 - protein, 120 aa, Mixta gaviniae
  misc_feature (1)..(120): tr|A0A2L0IJ24|A0A2L0IJ24_9GAMM 6-carboxy-5,6,7,8-tetrah ydropterin synthase OS=Mixta gaviniae OX=665914 GN=queD PE=3 SV=1
MATTLFKDFQFEAAHRLPHVPEGHKCGRLHGHSFLVRLEITGDVDPYTGWIMDFAELKAAFKPLYDRLDHYYLNDIPGLENPTSEVLAQWIWQQMKPIVPLLSAVMIKETCTAGCVYRGE

SEQ ID NO: 22779 - protein, 120 aa, Mixta sp.
  misc_feature (1)..(120): tr|A0A506V808|A0A506V808_9GAMM 6-carboxy-5,6,7,8-tetrah ydropterin synthase OS=Mixta sp. BIT-26 OX=2562439 GN=q ueD PE=3 SV=1
MATTLFKDFQFEAAHHLPHVPEGHKCGRLHGHSFLVRLEITGDVDPHTGWIMDFAELKAAFKPVYDRLDHYYLNDIPGLENPTSEVLAAWIWQQMKPVVPLLSAVTVKETCTAGCVYRGE

SEQ ID NO: 22780 - protein, 120 aa, Mixta theicola
  misc_feature (1)..(120): tr|A0A2K1Q7Q2|A0A2K1Q7Q2_9GAMM 6-carboxy-5,6,7,8-tetrah ydropterin synthase OS=Mixta theicola OX=1458355 GN=que D PE=3 SV=1
MATTLFKDFLFEAAHRLPHVPEGHKCGRLHGHSFLVRLEITGDVDPYTGWIMDFAELKAAFKPVYDRLDHYYLNDIPGLENPTSEVLAQWIWQQMKPVVPLLSAVMIKETCTAGCVYRGE

SEQ ID NO: 22781 - protein, 119 aa, Mizugakiibacter sediminis
  misc_feature (1)..(119): tr|A0A0K8QJ65|A0A0K8QJ65_9GAMM 6-carboxy-5,6,7,8-tetrah ydropterin synthase OS=Mizugakiibacter sediminis OX=147 5481 GN=MBSD_1580 PE=3 SV=1
MDIFKVFHIEAAHRLPHVPPGHKCARLHGHSFRIEIHVGGEPDPRLGWVMDFGDIKAAFAPLFEALDHRYLNDVPGLENPTSEQLARWVWERLKPALPGLSAVVVHETCTAGARYAGGS

SEQ ID NO: 22782 - protein, 126 aa, Mobilicoccus pelagius
  misc_feature (1)..(126): tr|H5UNZ1|H5UNZ1_9MICO Uncharacterized protein OS=Mobil icoccus pelagius NBRC 104925 OX=1089455 GN=MOPEL_011_00 310 PE=4 SV=1
MYRLTVRDHVMIAHSLPDPFFGPAQGVHGATFVVEATWSRADLDEHGVVLDIGAATAALKEVLGDIDYRNLDDHPAFEGRISTTEVVARHIADELASRLTDPALTSLEVVLREHPDAWASYTRDLP

SEQ ID NO: 22783 - protein, 146 aa, Mobilisporobacter senegalensis
  misc_feature (1)..(146): tr|A0A3N1XQ31|A0A3N1XQ31_9FIRM 6-pyruvoyltetrahydropter in/6-carboxytetrahydropterin synthase OS=Mobilisporobac ter senegalensis OX=1329262 GN=EDD66_104315 PE=4 SV=1
MRYSQYRFKFYLNASHAIFIQGILGDKHPHTWEIQIDVIKQQGEFVKFENVENSIDKFLEQYQNTFLNDCEPFNSINPTLENITEFFLKEIQEVLKPYGWNIFSIEISETPTRSFIISLVENNIITDLQRKNLAQDIIDKSFANKQ

SEQ ID NO: 22784 - protein, 1023 aa, Mobilisporobacter senegalensis
  misc_feature (1)..(1023): tr|A0A3N1XRG1|A0A3N1XRG1_9FIRM 6-pyruvoyl tetrahydropte rin synthase-like protein OS=Mobilisporobacter senegale nsis OX=1329262 GN=EDD66_104320 PE=4 SV=1
MGFRGYKFRFELHASHSGLHNSLKDQHFHNFTIILYISNLETMYDELILYENIESHITQWMDQYQNRHLGDVGPFQYNDTTIESIGEIFFTKIQRDLKNLELELLRLEIFENPTRIYSVSEKILDNSVNELRLEPVSFNLDQKIEKEFPETDVQEEVAAAMAESGYGEISIEPLESFVPKEKDKTGKNMEAVNNKYKVMKLLAAFTLLLFGAGVIMYIIKISGSYPRGSDTLCHIYRADFIYNSFKSGVAYPLYDSRWYNGVEIMRYWGPVPLYVLAFMEFFTNGNVLDAYILFIGLLVVLGGCGWLLFGWKNNRIGIAAILSLLWFLYPENIRVVITDGNLPRALISALVPFLLYCIWEFINEERWHFIISIIFLFSFIGLCHVGIAAMLLFSLLIFILIDSAYRKNFKLHKYILIGLFLSFINGGIWIVPSLHGGAVSKGESTNQVMKYFFNSVFDSLNPAYRMQGDLECFYYGISIFIIIIAGILLGNKKVKPGFLSALLIFFGTSKSAYFIFSNLPFSQFLWMIRFIPFSLAFAFMSFLMWKNLKKSVIGIMCILLILDTIPAYQYIFVKEEYRIRDVEASQYEKADTLSINEAKEITNQRMAVFDLSRYGSFAPYYIARMNPKVQYTFGAGWEGAKTATNIVQINSAFSGGNYYYLFDRCLELGNDTVLIPIEFLNENGTGARIEEMIRAGEKSGYRFVGQNNNSFLFHLDNDFKSFGTIVEYDCIAIGDSARSISLLFPVFKEGNSSNINDYTIEELRKYNKIYLSGFTYGDKAETEQMLSELAKSGIKIYIDMNKIPVNMKTNRHELFGVCAQAISFQEIYPNIHYKNQKYKPKEFSNEPEEKENSLITWNTVYLDGIKNIDGYCTLNDMDLTFSGTMDNPNIHFLGLNLQYHAQISRDMEIMKLLEEILEESKEDLPQRAIVPLDIEFKGDQIVIDSQYDNVNTSLSFIDIFHTEDTVMEENNLLVVNNGRTTINLKYPYWLEGFVVSSIGIVFTIIFIIYIYKRMNKRKSVSIK

SEQ ID NO: 22785 - protein, 122 aa, Moellerella wisconsensis
  misc_feature (1)..(122): tr|A0A0N0ICA6|A0A0N0ICA6_9GAMM 6-carboxy-5,6,7,8-tetrah ydropterin synthase OS=Moellerella wisconsensis ATCC 35 017 OX=1354267 GN=M992_0019 PE=3 SV=1
MSTTIFKDFHFEAAHRLPHVPEDHKCGRLHGHSFMVRLELTGEVDSKSGWLVDFSDVKRIFKPIWQQLDHHYLNEIEGLENPTSEVLAQWIWHKTKPLLPLLSAVMVQETCNAGCIYRGDAG

SEQ ID NO: 22786 - protein, 122 aa, Moellerella wisconsensis; identical to SEQ ID NO: 22785
  misc_feature (1)..(122): tr|A0A0H2Q7P4|A0A0H2Q7P4_9GAMM 6-carboxy-5,6,7,8-tetrah ydropterin synthase OS=Moellerella wisconsensis OX=1588 49 GN=VK86_13895 PE=3 SV=1

SEQ ID NO: 22787 - protein, 150 aa, Moheibacter sediminis
  misc_feature (1)..(150): tr|A0A1W1YBB2|A0A1W1YBB2_9FLAO 6-pyruvoyltetrahydropter in/6-carboxytetrahydropterin synthase OS=Moheibacter se diminis OX=1434700 GN=SAMN06296427_101217 PE=4 SV=1
MNKVRVTKSFNFETAHALYGYDGKCKNIHGHSYKLFVTVKGIPNQNQDDPKFGMVIDFGDIKSIVKSEVIDEFDHAILLNENSPHKQLGDNLMKEGHKVIFTSYQPSCENMLLDMVARISPKLPEFIQLQSLRLHETETSYAEWLAEDNL

SEQ ID NO: 22788 - protein, 136 aa, Moheibacter sediminis
  misc_feature (1)..(136): tr|A0A1W2AJS2|A0A1W2AJS2_9FLAO 6-carboxy-5,6,7,8-tetrah ydropterin synthase OS=Moheibacter sediminis OX=1434700 GN=SAMN06296427_104201 PE=3 SV=1
MKVTISRKAHFNAAHRLFNPTWDDERNYEVFGKCSNPNFHGHNYEMIVSIKGEINPETGFVMNLDDLKAIILTQVEEYLDHKNLNIEVEEFQKLNPTVENIAVVIWNRIRAKLDAGLELKITLFETPRNFVEYDGN

SEQ ID NO: 22789 - protein, 130 aa, Monaibacterium marinum
  misc_feature (1)..(130): tr|A0A2C9CLZ5|A0A2C9CLZ5_9RHOB 6-pyruvoyl-tetrahydropte rin synthase OS=Monaibacterium marinum OX=1690039 GN=SA MN06273572_101378 PE=4 SV=1
MFAVEVRDHIMIAHSLKGDVFGPAQKMHGATFVVDVTFFRETLSPDNIVVDMGRAHDVLKAVLGPLNYGNLDEVFPGEVTTTEFLCRHIHGEIAAAAAKGALGPGSDGLSALRVTLNESHVAKAWYEAAL

SEQ ID NO: 22790 - protein, 139 aa, Mongoliibacter ruber
  misc_feature (1)..(139): tr|A0A2T0WBY4|A0A2T0WBY4_9BACT 6-pyruvoyltetrahydropter in/6-carboxytetrahydropterin synthase OS=Mongoliibacter ruber OX=1750599 GN=CLW00_12417 PE=4 SV=1
MIHVCRKEHFNAAHKLWNPKWSEEKNKEVFGPCSNVNWHGHNFELIVTVKGMPDPETGFVVDLKELSSIIKKLVIDKVDHKNLNMDVDFMEGKMASCENLVVEFWKILQPAINEIVAHGSLYKLTLYETPRNFVEYYGE

SEQ ID NO: 22791 - protein, 136 aa, Mongoliibacter ruber
  misc_feature (1)..(136): tr|A0A2T0WEP4|A0A2T0WEP4_9BACT 6-carboxy-5,6,7,8-tetrah ydropterin synthase OS=Mongoliibacter ruber OX=1750599 GN=CLW00_11535 PE=3 SV=1
MKVAVYRKEHFNAAHRLNNPNWSDEKNQEIFGKCNNPNFHGHNYELIVKLLGPVDPETGYVYDMKVLSDLIKEKVLNRFDHKNLNLDTDEFKNLNPTAENIAVVIWNILRKEIDNKLELIIRLYETERNFVEYDGN

SEQ ID NO: 22792 - protein, 140 aa, Monoglobus pectinilyticus
  misc_feature (1)..(140): tr|A0A2K9P4I6|A0A2K9P4I6_9FIRM 6-carboxy-5,6,7,8-tetrah ydropterin synthase OS=Monoglobus pectinilyticus OX=198 1510 GN=B9O19_02034 PE=3 SV=1
MYTVSCETHFDSAHFLLGYKGGCKNIHGHRWVVSASVSSETLIEEGGNRGMVIDFNEVKPVLNELVECFDHRLVVERDTLRSTTMLMLEEEEFEVAEVDFRPTVENFSKYFYDELKKRGVPVSKVRVYETPESYAEYCED

SEQ ID NO: 22793 - protein, 290 aa, Moorea bouillonii
  misc_feature (1)..(290): tr|A0A1U7MXQ3|A0A1U7MXQ3_9CYAN 6-pyruvoyl tetrahydropte rin synthase OS=Moorea bouillonii PNG OX=568701 GN=BJP3 7_04850 PE=4 SV=1
MECVIKRRAEFSASHRYWLPELTEAENLQRFGLGSRFPGHGHNYVLFVFLTAQLDKYGMVENFSEVKTVIQREVTSQLDYAYLNEVWSEFQQTLPTTENIARVIWQHLVTYLPLLKIQLFEHPKLWADYQGNGMEVYLTISNHFSAAHRLAHPDLSDQENYQIYGKCARPNGHGHNYHIEVTVKGEMDPRTGMIVDLDSLHQVIDEYVLEPFDHTFLNKDIPYFARVVPTAENIAIYICQLLQQPIQELDVQLHKVKLIESPNNSCEVYCTPETTKPAATSSRETLLTLI

SEQ ID NO: 22794 - protein, 131 aa, Moorea producens
  misc_feature (1)..(131): tr|A0A1D8TWM0|A0A1D8TWM0_9CYAN 6-carboxy-5,6,7,8-tetrah ydropterin synthase OS=Moorea producens PAL-8-15-08-1 O X=1458985 GN=BJP34_23355 PE=3 SV=1
MMEEWLIYKEFRFEAAHRLPHHDGKCSRLHGHSWVGRVYVKGNQLIEEGSKQGMIMDYGDIKTYLKPLLDNFLDHYYLNETTGLENPSSEAIAKWVFERLEEAGLPGLYAVEIQETCTSGTRYMKPNIKSG

SEQ ID NO: 22795 - protein, 141 aa, Moorea producens
  misc_feature (1)..(141): tr|A0A1D9G462|A0A1D9G462_9CYAN 6-carboxy-5,6,7,8-tetrah ydropterin synthase OS=Moorea producens JHB OX=1454205 GN=BJP36_23360 PE=3 SV=1
MEEWLIYKEFRFEAAHRLPHHDGKCSRLHGHSWVGRVYVKGNQLIEEGSKQGMIMDYGDIKTYLKPLLDNFLDHYYLNETTGLENPSSEAIAKWVFERLEEAGLPGLYAVEIQETCTSGTRYSRSQKSEVRSQKRCDPGDF

SEQ ID NO: 22796 - protein, 125 aa, Moorella glycerini
  misc_feature (1)..(125): tr|A0A0C7NIZ1|A0A0C7NIZ1_9THEO 6-carboxy-5,6,7,8-tetrah ydropterin synthase OS=Moorella glycerini OX=55779 GN=2 344 PE=3 SV=1
MVALTYIFTFEAAHCLEGYAGDCAHLHGHSYRLEVTVKGPVQADGMVIDFAVLKTLVEESIINRVDHQYLNEVVSFVPTCENLLLWFWKELGAALKPYPHLVLERLVLWETSNARAEITREMESR

SEQ ID NO: 22797 - protein, 202 aa, Moraxella atlantae
  misc_feature (1)..(202): tr|A0A1B8QGV1|A0A1B8QGV1_9GAMM 6-carboxy-5,6,7,8-tetrah ydropterin synthase OS=Moraxella atlantae OX=34059 GN=A 9306_06235 PE=4 SV=1
MRIRKLFKFENAHIVRNCSSTRCKYSIHGHSYQIELILQANRLDHGQMVYDFGLLKGAIKDIIDSFDHAICFWNQDNPDYISACKQFSQRWVSLPVSPSAEQFSRVIFFWAREILKQTQMQNGEADVEVYSVIAHETATGYAQCFAEDVDNAHMGALKLSDFEFSEQVKAEWTDPLMYDKLINGERFVNPQVDLQVIDNQND

SEQ ID NO: 22798 - protein, 202 aa, Moraxella atlantae
  misc_feature (1)..(202): tr|A0A1B8QBZ4|A0A1B8QBZ4_9GAMM 6-carboxy-5,6,7,8-tetrah ydropterin synthase OS=Moraxella atlantae OX=34059 GN=A 9308_07095 PE=4 SV=1
MRIRKLFKFENAHVVRNCSSTRCKFSIHGHSYQIELILQANRLDHGQMVYDFGLLKGAIKDIIDSFDHAICFWNQDNPDYISACKQFSQRWVSLPVSPSAEQFSRVIFFWAREILKQTQMQNGEADVEVYSVIAHETATGYAQCFAEDVDNAHMGALKLSDFEFSEQVKAEWTDPLMYDKLINGERFVNPQVDLQVIDNQNG

SEQ ID NO: 22799 - protein, 198 aa, Moraxella bovis
  misc_feature (1)..(198): tr|A0A1T0A5C4|A0A1T0A5C4_MORBO 6-carboxytetrahydropteri n synthase OS=Moraxella bovis OX=476 GN=DQF64_08435 PE= 4 SV=1
MRIRKLFKFENAHIVRNCTSDRCSRSIHGHSYQVELILEAHALDNGQMVYDFGLLKSHIKDLIDSFDHAITFWDKDDGDYIRACKDFSARWISLPVSPSAEQFSRVIFYWADKVMQNTTTQNGETDVSVYSVIVHETATGYAQCFREDIENDRMGKLSLDMFEFSEQVKAEWGDSELFDKLKRGEKFVNPQPLRQVNF

SEQ ID NO: 22800 - protein, 198 aa, Moraxella bovoculi
  misc_feature (1)..(198): tr|A0A3F3A6K7|A0A3F3A6K7_9GAMM 6-carboxytetrahydropteri n synthase OS=Moraxella bovoculi OX=386891 GN=AAX10_040 85 PE=4 SV=1
MRIRKLFKFENAHIVRNCTSDRCSRSIHGHSYQVELILEAHALDNGQMAYDFGLLKSHIKDLIDSFDHAITFWDKDDGDYIRACKDFSARWISLPVSPSAEQFSRVIFYWADKVMQNTTTQNGETDVSVYSVIVHETATGYAQCFREDVESERMGKLSLDMFEFSEQVKAEWGDSELFDKLKRGEKFVNPKPLRQVEV

SEQ ID NO: 22801 - protein, 198 aa, Moraxella bovoculi
  misc_feature (1)..(198): tr|A0A066UNN8|A0A066UNN8_9GAMM 6-pyruvoyl tetrahydrobio pterin synthase OS=Moraxella bovoculi 237 OX=743974 GN= MBO_01465 PE=4 SV=1
MRIRKLFKFENAHIVRNCTSDRCSRSIHGHSYQVELILEAHALDNGQMVYDFGLLKSHIKDLIDSFDHAITFWDKDDGDYIRACKDFSARWISLPVSPSAEQFSRVIFYWADKVMQNTTTQNGETDVSVYSVIVHETATGYAQCFREDVESERMGKLSLDMFEFSEQVKAEWGDSELFDKLKRGEKFVNPKPLRQVEV

SEQ ID NO: 22802 - protein, 198 aa, Moraxella canis
  misc_feature (1)..(198): tr|A0A1S9ZII0|A0A1S9ZII0_9GAMM 6-carboxytetrahydropteri n synthase QueD OS=Moraxella canis OX=90239 GN=B0180_07 215 PE=4 SV=1
MRIRKLFKFENAHIVRNCSSDRCKRSIHGHSYEVELILEAHRLDHGQMVYDFGLLKHNIKDIIDSFDHAITFWDKDDPGYIQACKDFSARWVSLPVSPSAEQFSRVIFFWADAILSQTIMQNGEQDISVYSVIVHETATGYAQCFRQDVLNEQMGKLSLADFEFSEQVKSEWGDPQMYDKLLKGESFVNPKVDLQVQV

SEQ ID NO: 22803 - protein, 202 aa, Moraxella caprae
  misc_feature (1)..(202): tr|A0A378R183|A0A378R183_9GAMM Queuosine biosynthesis p rotein QueD OS=Moraxella caprae OX=90240 GN=NCTC12877_0 2011 PE=4 SV=1
MRIRKLFKFENAHIVRNCTSDRCSRSIHGHSYQVELILEAHAFDNGQMVYDFGLLKSHIKDLIDSFDHAITFWDKDDGDYIRACKDFSARWISLPVSPSAEQFSRVIFYWADKVLANTTTQNGETDVSVYSVIVHETATGYAQCFKEDVDNERMGKLSLDMFEFSEQVKAEWGDSELFDKLKRGEKFVNPQPLRQVNFKDKL

SEQ ID NO: 22804 - protein, 198 aa, Moraxella catarrhalis
  misc_feature (1)..(198): tr|A0A3A9R9G2|A0A3A9R9G2_MORCA 6-pyruvoyl tetrahydropte rin synthase family protein OS=Moraxella catarrhalis OX =480 GN=EJK53_1025 PE=4 SV=1
MRIRKLFKFENAHIVRNCSSDRCKRSIHGHSYEVELILEAHRLDHGQMVYDFGLLKHHIKDIIDSFDHAITFWDQDDTRYIQACKDFSARWISLPVSPSAEQFSRVIFFWADAILNQTVMQNGEQDISVYSVIVHETATGYAQCFKQDVENEQMGVLSLADFEFSEQVKSEWSDPQMYDKLLKGDAFVNPKVDLQVQV

SEQ ID NO: 22805 - protein, 198 aa, Moraxella catarrhalis
  misc_feature (1)..(198): tr|A0A198WRJ0|A0A198WRJ0_MORCA 6-carboxytetrahydropteri n synthase OS=Moraxella catarrhalis OX=480 GN=AO370_155 5 PE=4 SV=1
MRIRKLFKFENAHIVRNCSSDRCKRSIHGHSYEVELILEAHRLDHGQMVYDFGLLKHHIKDIIDSFDHAITFWNQDDTRYIQACKDFSARWVSLPVSPSAEQFSRVIFFWADAILNQTVMQNGEQDISVYSVIVHETATGYAQCFKQDVQNEQMGVLHLADFKFSEQVKSEWSDPQMYDKLLKGDAFVNPKVDLQVQV

SEQ ID NO: 22806 - protein, 198 aa, Moraxella caviae
  misc_feature (1)..(198): tr|A0A1T0A8M2|A0A1T0A8M2_9GAMM 6-carboxytetrahydropteri n synthase QueD OS=Moraxella caviae OX=34060 GN=B0181_0 2045 PE=4 SV=1
MLIRKLFKFENAHIVRNCTSDRCSRSIHGHSYEVELILEAHRLDNGQMVYDFGLLKSHIKELIDSFDHAITFWDKDDKDYIAACKAFSARWVSLPVSPSAEQFSRVIFCWADALLKNTVMQNGEDGVRVHSVIVHETATGYAQCFLEDVQNPQMGELRLTDFEFSEQVRTEWSDSLMFDKLINGEAIINPKPQRQVAL

SEQ ID NO: 22807 - protein, 199 aa, Moraxella cuniculi
  misc_feature (1)..(199): tr|A0A3S4QQM6|A0A3S4QQM6_9GAMM Queuosine biosynthesis p rotein QueD OS=Moraxella cuniculi OX=34061 GN=NCTC10297 _01741 PE=4 SV=1
MRIRKLFKFENAHIVRNCSSNRCKYSIHGHSYQVELILQANRLDHGQMVYDFGLLKSAIKDIIDSFDHAITFWQKDDPEYIAACKNFSARWVAMPVSPSAEQFSRVIFFWADAILQQTQMQNGESDVMVYSVIVHETATGYAQCFIEDVQNEQMGKLNLADFEFSDEVRAEWHDPLMYNKLINGEKFINPKVALQVDVS

SEQ ID NO: 22808 - protein, 199 aa, Moraxella cuniculi
  misc_feature (1)..(199): tr|A0A1N7FJK8|A0A1N7FJK8_9GAMM 6-pyruvoyltetrahydropter in/6-carboxytetrahydropterin synthase OS=Moraxella cuni culi DSM 21768 OX=1122245 GN=SAMN02745664_11355 PE=4 SV =1
MRIRKLFKFENAHIVRNCSSNRCKYSIHGHSYQVELILQANRLDHGQMVYDFGLLKSAIKDIIDSFDHAITFWQKDDPEYIAACKNFSARWVAMPVSPSAEQFSRVIFFWADAILQQTQMQNGESDVMVYSVIVHETATGYAQCFIEDVQNEQMGKLNLADFEFSDEVRAEWHDPLMYDKLISGEKFINPKVALQVDVS

SEQ ID NO: 22809 - protein, 198 aa, Moraxella equi
  misc_feature (1)..(198): tr|A0A378QML7|A0A378QML7_9GAMM Queuosine biosynthesis p rotein QueD OS=Moraxella equi OX=60442 GN=NCTC11012_003 53 PE=4 SV=1
MRIRKLFKFENAHIVRNCTSDRCSRSIHGHSYQVELILEAHAFDNGQMVYDFGLLKSHIKDLIDSFDHAITFWDKDDSDYIRACKDFSARWISLPVSPSAEQFSRVIFYWADKVLANTTTQNGETDVSVYSVIVHETATGYAQCFKEDIENDRMGKLSLDMFEFSEQVKAEWGDSELFDKLKRGEKFVNPQPLRQVNF

SEQ ID NO: 22810 - protein, 198 aa, Moraxella lacunata
  misc_feature (1)..(198): tr|A0A1B8PXS2|A0A1B8PXS2_MORLA 6-carboxy-5,6,7,8-tetrah ydropterin synthase OS=Moraxella lacunata OX=477 GN=A93 09_00665 PE=4 SV=1
MRIRKLFKFENAHIVRNCTSDRCSRSIHGHSYQVELILEAHALDNGQMVYDFGLLKSHIKDLIDSFDHAITFWDKDDSDYIRACKDFSARWISLPVSPSAEQFSRVIFYWADKVMQNTTTQNGETGVSVYSVIVHETATGYAQCFKEDVENERMGKLSLDMFDFSEQVKAEWGDSELFDKLKRGEKFVNPQPLRQVKV

SEQ ID NO: 22811 - protein, 198 aa, Moraxella lacunata
  misc_feature (1)..(198): tr|A0A1V4GYT2|A0A1V4GYT2_MORLA 6-carboxytetrahydropteri n synthase QueD OS=Moraxella lacunata OX=477 GN=B5J94_0 5250 PE=4 SV=1
MRIRKLFKFENAHIVRNCTSDRCSRSIHGHSYQVELILEAHALDNGQMVYDFGLLKSHIKDLIDSFDHAITFWDKDDGDYIRACKDFSARWISLPVSPSAEQFSRVIFYWADKVMQNTTTQNGETGVSVYSVIVHETATGYAQCFKEDVENERMGKLSLDMFEFSEQVKAEWGDGELFDKLKRGEKFVNPQPLRQVNF

SEQ ID NO: 22812 - protein, 199 aa, Moraxella lincolnii
  misc_feature (1)..(199): tr|A0A1T0CHI9|A0A1T0CHI9_9GAMM 6-carboxytetrahydropteri n synthase QueD OS=Moraxella lincolnii OX=90241 GN=B068 2_03970 PE=4 SV=1
MRIRKLFKFENAHIVRNCSSERCKYSIHGHSYQIELILQAHRLDHGQMVYDFGLLKSSIKDIIDSFDHAICFWNKDDSDYIDACKKFSNRWVSLPVSPSAEQFSRVIFFWVKQILEQTHMQNGEADVSVYSVIAHETATGYAQCFEDDVLNAQMGELRLTDFDFSDAVKAEWSDPLMYDKLIHGEKFVNPTVSLQVNAN

SEQ ID NO: 22813 - protein, 201 aa, Moraxella macacae
  misc_feature (1)..(201): tr|L2F6M2|L2F6M2_9GAMM 6-pyruvoyl tetrahydrobiopterin s ynthase OS=Moraxella macacae 0408225 OX=1230338 GN=MOMA _05916 PE=4 SV=1
MRIRKLFKFENAHIVRNCSSDRCKFSIHGHSYQVELILEAYALDNGQMVYDFGLLKSSIKDMIDSFDHAITFWNKDDSEYIRACKNFSARWVSLPVSPSAEQFSRVIFFWARHILKQTQMQNGESLVKVYSVIVHETATGYAQCFEYDVDNEQMGKLHLTEFAFSDQVKAEWSDPKMYEKLLQGEKFVNPLVKAQVVNAKL

SEQ ID NO: 22814 - protein, 198 aa, Moraxella nonliquefaciens
  misc_feature (1)..(198): tr|A0A1B8PND4|A0A1B8PND4_MORNO 6-carboxy-5,6,7,8-tetrah ydropterin synthase OS=Moraxella nonliquefaciens OX=478 GN=A7456_05115 PE=4 SV=1
MRIRKLFKFENAHIVRNCTSERCSRSIHGHSYQVELILEAHALDNGQMVYDFGLLKSHIKDLIDSFDHAITFWNKDDPDYVRACKRFSARWISLPVSPSAEQFSRVIFYWADKVLTNTITQNGEMGVSVYSVIVHETATGYAQCFGEDVANESMGKLSLDEFEFSEQVKAEWGDGELFDKLKRGEKFVNPQPLRQVRV

SEQ ID NO: 22815 - protein, 197 aa, Moraxella osloensis
  misc_feature (1)..(197): tr|A0A1B8PZZ2|A0A1B8PZZ2_9GAMM 6-carboxy-5,6,7,8-tetrah ydropterin synthase OS=Moraxella osloensis OX=34062 GN= A9299_02230 PE=4 SV=1
MRIRKLFKFENAHIVRNCSSDRCKYSIHGHSYQIELILEAHRLDHGQMVYDFGLLKSSIKDIIDSFDHAICFWDKDDPNYIDACKKFSARWISLPVSPSAEQFSRVVFFWAREILKQTQMQNGETDVKVYSVIAHETATGYAQCFEDDVDNVQMGALTLGDFEFSEQVKAEWHDPLMYDKLKKGEKFVNPTVVLQVD

SEQ ID NO: 22816 - protein, 197 aa, Moraxella osloensis
  misc_feature (1)..(197): tr|A0A0X8K7T7|A0A0X8K7T7_9GAMM 6-carboxy-5,6,7,8-tetrah ydropterin synthase OS=Moraxella osloensis OX=34062 GN= A9Z61_00760 PE=4 SV=1
MRIRKLFKFENAHIVRNCSSDRCKYSIHGHSYQIELILEAHRLDHGQMVYDFGLLKSSIKDIIDSFDHAICFWDKDDPDYIDACKKFSARWISLPVSPSAEQFSRVVFFWAREILKQTQMQNGETDVKVYSVIAHETATGYAQCFEDDVDNAQMGALTLGDFEFSEQVKAEWHDPLMYDKLKKGEKFVNPTVVLQVD

SEQ ID NO: 22817 - protein, 198 aa, Moraxella ovis
  misc_feature (1)..(198): tr|A0A378PPX7|A0A378PPX7_9GAMM Queuosine biosynthesis p rotein QueD OS=Moraxella ovis OX=29433 GN=NCTC11227_009 68 PE=4 SV=1
MRIRKLFKFENAHIVRNCTSDRCSRSIHGHSYQVELILEAHALDNGQMVYDFGLLKSHIKDLIDSFDHAITFWDKDDPDYIRACKDFSARWISLPVSPSAEQFSRVIFYWADKVMQNTTTQNGETDVSVYSVIVHETATGYAQCFREDVESERMGKLSLDMFEFSEQVKAEWGDSELFDKLKRGEKFVNPRLLRQVEV

SEQ ID NO: 22818 - protein, 197 aa, Moraxella pluranimalium
  misc_feature (1)..(197): tr|A0A1T0CV59|A0A1T0CV59_9GAMM 6-carboxytetrahydropteri n synthase QueD OS=Moraxella pluranimalium OX=470453 GN =B0680_00225 PE=4 SV=1
MRIRKLFKFENAHIVRNCSSDRCKRSIHGHSYQVELILEAHRLDHGQMVYDFGLLKGNIKDIIDSFDHAITFWDKDDPSYIEACKDFSARWVSLPVSPSAEQFSRVIYFWVNEILKQTQMQNGEADVSVYSVIVHETATGYAQCFSDDVANEQMGKLELADFEFSEQVRAEWSDPQMYDKLVRGEKFYNPQVSLQVK

SEQ ID NO: 22819 - protein, 198 aa, Moraxella porci
  misc_feature (1)..(198): tr|A0A1T0CWP1|A0A1T0CWP1_9GAMM 6-carboxytetrahydropteri n synthase QueD OS=Moraxella porci DSM 25326 OX=573983 GN=B0681_02605 PE=4 SV=1
MRIRKLFKFENAHIVRNCSSDRCKRSIHGHSYQVELILEAHRLDHGQMVYDFGLLKGNIKDIIDSFDHAITFWDKDDPSYIQACKDFSARWVSLPVSPSAEQFSRVIFFWADAILKQTQMQNGEQDVHLHSVIVHETATGYAQCFGDDVTNEQMGKLDLADFEFSEQVKAEWGDPMMYDKLKSGKSFINPSVDLQVQV

SEQ ID NO: 22820 - protein, 205 aa, Moraxella sp.
  misc_feature (1)..(205): tr|A0A229GRV6|A0A229GRV6_9GAMM 6-carboxytetrahydropteri n synthase QueD OS=Moraxella sp. VT-16-12 OX=2014877 GN =CEW93_07830 PE=4 SV=1
MRIRKLFKFENAHIVRNCTSQRCSRSIHGHSYQVELILEAHALDNGQMVYDFGLLKSHIKELIDSFDHAITFWDKDNTDYINACKAFSARWVSLPVSPSAEQFSRVIFYWVDCVLKNTITQNGEKDVQIYSVIVHETDTGYAQCFREDVENARMGRLSLDMFEFSEQVKAEWSDDKLFDKLKRGEKFVNPSPLKQVKTDDHSDFK

SEQ ID NO: 22821 - protein, 198 aa, Moraxella sp.; identical to SEQ ID NO: 22804
  misc_feature (1)..(198): tr|A0A1E9VU26|A0A1E9VU26_9GAMM 6-carboxy-5,6,7,8-tetrah ydropterin synthase OS=Moraxella sp. HMSC061H09 OX=1715 217 GN=HMPREF2573_07375 PE=4 SV=1

SEQ ID NO: 22822 - protein, 200 aa, Moraxellaceae bacterium
  misc_feature (1)..(200): tr|A0A345P675|A0A345P675_9GAMM 6-carboxytetrahydropteri n synthase OS=Moraxellaceae bacterium HYN0046 OX=228331 8 GN=HYN46_08015 PE=4 SV=1
MLIRKLFKFENAHIVRNCTSDRCRRSIHGHSYQVELILEAHRLDHGQMVYDFGLLKGQIRDIIDSFDHAICFWNQDDEGYIASCKQYSARWISLPVSPSAEQFSRFFFFLADTILRQTITHNGEGDVTVHSVIVHETATGYAQCFRADVENEQMGLLKLQDFEFSEQVQIEWADPQMFEKMKQGLTFENPLVEHSVRVDG

SEQ ID NO: 22823 - protein, 197 aa, Moraxellaceae bacterium
  misc_feature (1)..(197): tr|A0A3D4UEP6|A0A3D4UEP6_9GAMM 6-carboxytetrahydropteri n synthase QueD OS=Moraxellaceae bacterium OX=1889775 G N=DF427_10945 PE=4 SV=1
MLIRKLFGFENAHVVRNCTSDRCSRSIHGHSYKVEVILEAHALDHGQMVYDFGLMKGYIRTLIDSFDHAICFWDKDDAAYIEACKAFSARWIALPISPSAEQFSRLFFVLADAVLKQTDMRNGEADVTLQSIIVHETATGYAQCFREDVLNPRMGEIPLQSIVFSDQVRAEWSDADLYERLKRGERFVNPVAGRQVQ

SEQ ID NO: 22824 - protein, 120 aa, Morganella morganii
  misc_feature (1)..(120): tr|A0A422UDZ2|A0A422UDZ2_MORMO 6-carboxy-5,6,7,8-tetrah ydropterin synthase OS=Morganella morganii subsp. morga nii OX=180434 GN=queD PE=3 SV=1
MSTMIFKEFQFEAAHHLPHVPEGHKCGRLHGHSFLVRLELSGEVDAHTGWLIDFAEVKQAFKPIYDRLDHHYLNEIPGLENPTSEVLAEWIWQQTKPLLPMLSAVLVKETCTAGCIYRGE

SEQ ID NO: 22825 - protein, 120 aa, Morganella morganii
  misc_feature (1)..(120): tr|A0A2C5TNP7|A0A2C5TNP7_MORMO 6-carboxy-5,6,7,8-tetrah ydropterin synthase OS=Morganella morganii OX=582 GN=qu eD PE=3 SV=1
MSTTIFKEFQFEAAHRLPHVPEGHKCGRLHGHSFLVRLELSGEVDAHTGWLIDFAEVKQAFKPIYDRLDHHYLNEIPGLENPTSEVLAEWIWQQTKPLLPMLSAVLVKETCTAGCIYRGE

SEQ ID NO: 22826 - protein, 120 aa, Morganella psychrotolerans
  misc_feature (1)..(120): tr|A0A1B8HAJ8|A0A1B8HAJ8_9GAMM 6-carboxy-5,6,7,8-tetrah ydropterin synthase OS=Morganella psychrotolerans OX=36 8603 GN=AYY18_06290 PE=3 SV=1
MTTTIFKEFQFEAAHHLPHVPEGHKCGRLHGHSFLVRLELSGNVDAHTGWLIDFAEVKQAFKPVYDRLDHHYLNEIAGLENPTSEVLAHWIWQQTKPLLPLLSAVMVKETCTAGCVYRGE

SEQ ID NO: 22827 - protein, 120 aa, Morganella psychrotolerans
  misc_feature (1)..(120): tr|A0A1B8H6E4|A0A1B8H6E4_9GAMM 6-carboxy-5,6,7,8-tetrah ydropterin synthase OS=Morganella psychrotolerans OX=36 8603 GN=AYY16_12940 PE=3 SV=1
MTTTIFKEFQFEAAHHLPHVPEGHKCGRLHGHSFLVRLELSGNVDAHTGWLIDFAEVKQAFKPIYDRLDHHYLNEIAGLENPTSEVLAHWIWQQTKPLLPLLSAVMVKETCTAGCIYRGE

SEQ ID NO: 22828 - protein, 120 aa, Morganella sp.
  misc_feature (1)..(120): tr|A0A3D3HLH0|A0A3D3HLH0_9GAMM 6-carboxy-5,6,7,8-tetrah ydropterin synthase OS=Morganella sp. (in: Bacteria) OX =1912315 GN=queD PE=3 SV=1
MTTTIFKEFQFEAAHHLPHVPEGHKCGRLHGHSFLVRLELSGDVDAHTGWLIDFAEVKQAFKPIYDQLDHHYLNEIAGLENPTSEVLAHWIWQQTKPLLPLLSAVMVKETCTAGCVYRGE

SEQ ID NO: 22829 - protein, 290 aa, Moritella sp.
  misc_feature (1)..(290): tr|A0A2G2IK00|A0A2G2IK00_9GAMM Uncharacterized protein OS=Moritella sp. OX=78556 GN=COA76_15565 PE=4 SV=1
MKLFVKDLTVIDSSVLDYSRGIIGQSWLVDIVLHGDLNEQSMILDFGIVKKLIKSTVDELVDHKLIVPAHAKFCDVMSDGAFTYVDAWREHSESIHLACPDQAFALIPAEQITLASLETYLTEQLMLRLPNNVKKLDVKLREEKIDGADYCYSHGLRKHLGNCQRIAHGHRSTIEILRNDERDTALEFSWAERWRDIYLAEHCDMVSASELSLSRAGMAALTPEHYCFKYQAPQGEFQLALSKSIVEIMPTETTVENIAQYIADTLAKDCNDSLTVFAYEGVGKGAIASA

SEQ ID NO: 22830 - protein, 290 aa, Moritella sp.
  misc_feature (1)..(290): tr|A6FEQ7|A6FEQ7_9GAMM Uncharacterized protein OS=Morit ella sp. PE36 OX=58051 GN=PE36_02454 PE=4 SV=1
MKLFVKDLTVIDSSVLDYSRGIIGQSWLVDIVLHGDLNEQSMILDFGIVKKLIKSTVDELVDHKLIVPAHAKFCDVMSDGAFTYVDAWREHSESIHLACPDQAFALIPAEQITLASLETYLTEQLMLRLPNNVKKLDVKLREEKIDGADYCYSHGLRKHLGNCQRIAHGHRSTIEILRNDERDTALEFSWAERWRDIYLAEHCDMVSASELSLSRAGMAALTPEHYCFKYQAPQGEFQLAISKSIVEIMPTETTVENIAQYIADTLAKDCNDSLTVFAYEGVGKGAIASA

SEQ ID NO: 22831 - protein, 290 aa, Moritella viscosa
  misc_feature (1)..(290): tr|A0A090IEX5|A0A090IEX5_9GAMM Uncharacterized protein OS=Moritella viscosa OX=80854 GN=MVIS_3058 PE=4 SV=1
MKLFVKDLTVIDSSVLDYSRGIIGQSWLVDIVLHGDLNEQSMILDFGIVKKLIKSTVDELVDHKLIVPAHAKFCDVMSDGAFTYVDAWREHSESIHLACPDQAFALIPTEQITLANLEMYLTEQLMLRLPNNVKKLDVKLREEKIDGAEYCYSHGLRKHLGNCQRIAHGHRSTIEILRNDERDAALEASWAERWKDIYLAEHCDMVSASEVSLSRAGMAALTPEHYCFKYQAPQGEFQLAISKSIVEIMPTETTVENIAQYIADTLAKDCSDPLTVFAYEGVGKGAIASA

SEQ ID NO: 22832 - protein, 290 aa, Moritella yayanosii
  misc_feature (1)..(290): tr|A0A330LI51|A0A330LI51_9GAMM Uncharacterized protein OS=Moritella yayanosii OX=69539 GN=MORIYA_0106 PE=4 SV= 1
MKLFVKDLTVIDSSVLDYSRGIIGQSWLVDIVLHGDLNEQSMILDFGIVKKLIKSTVDELIDHKLIVPAHAKFCDVMSDGAFTYVDAWREHSESIHLACPDQAFALIPAEEITLASLETYLTEQLMLRLPNNVKQLDVKLREEKIDGADYCYSHGLRQHLGNCQRIAHGHRSTIEILRNDERDTALEFSWAERWRDIYLAEHCDMVSASELSLSRAGMAALTPEHYCFKYQAPQGEFQLALSKSIVEIMPTETTVENIAQFIADTLAKDCNDSLTVFAYEGVGKGAIASA

SEQ ID NO: 22833 - protein, 140 aa, Morococcus cerebrosus
  misc_feature (1)..(140): tr|A0A0C1E4Q7|A0A0C1E4Q7_9NEIS 6-carboxy-5,6,7,8-tetrah ydropterin synthase OS=Morococcus cerebrosus OX=1056807 GN=MCC93_16280 PE=3 SV=1
MKITKIFTFDSSHMLDGHDGKCQNLHGHTYKLEITVSDDPIRGGAKDGMVMDFTDLKAAVKKHITDPFDHAFIYNGGNERECQIAALLEGWNMKTLCLPCRTTAENMAVEMYDRLQNAGLKVCSVKLWETPTSCAEYEGE

SEQ ID NO: 22834 - protein, 290 aa, Motilimonas sp.
  misc_feature (1)..(290): tr|A0A418YBZ0|A0A418YBZ0_9GAMM Uncharacterized protein OS=Motilimonas sp. PLHSC7-2 OX=2303987 GN=D1Z90_15210 P E=4 SV=1
MKLFVRALTVIDSSFLDVQRGMVGESYQVDVELDGQVNEQNMLLDFSLVKKQIKQIIDAEVDHRLIVPMKVSGIDKQVADDEGQQTELHFPLSSGQYISLSCPEQAFCYLPAEQVNVRTLTTHLESIILAKLPDNISGLTINLSHEIIATPFYHYSHGLKKHDGNCQRIAHGHRSRLDIYVDDLWHKDSVNLWAERWQDIYLGSLEDQVALQKLSIANLNSAESFGFRYQAQQGMFELIMPAHMCDVIDIDTTIESIAEYLCQQVKQSHPDSKVKVLGYEGIGKGAIFEL

SEQ ID NO: 22835 - protein, 118 aa, Motiliproteus coralliicola
  misc_feature (1)..(118): tr|A0A369WQD8|A0A369WQD8_9GAMM 6-carboxy-5,6,7,8-tetrah ydropterin synthase OS=Motiliproteus coralliicola OX=22 83196 GN=queD PE=3 SV=1
MEIYKEFTFEAAHLLPHVPEGHKCGRLHGHSFFVRIYVSGEVDSHTGWIVDFADIKAAFKPIYDRLDHYYLNDIEGLENPTSEVLAKWIWKELKPSLPQLSKILIKETCTSGCVYEGD

SEQ ID NO: 22836 - protein, 285 aa, Motiliproteus coralliicola
  misc_feature (1)..(285): tr|A0A369WBK5|A0A369WBK5_9GAMM 6-pyruvoyl tetrahydropte rin reductase OS=Motiliproteus coralliicola OX=2283196 GN=DV711_10810 PE=4 SV=1
MARLFVNNLTVMDFSFLDVERGLVGESWIVDVELIGDLDDQGMVFDFGDVKKQIKRFFDAQADHRLLVPVRSPGCRIQEDNDRLSVEFPLNSGAIVSHQSPPDTVLLVDSQAIVPDQIAQQLQRQLKTLLPGNVSNLFIGLRPEKIDGPYYHYTHGLQQHLGQCQRIAHGHRSRIEIYIDDERSQQLEQHWASRLADSYIATKSHVVEELDCNGIPHTRLAYTAQQGEFAVSVPSSQVLLIPYVSTVENIARYLAETIAQQQSGQVTVRAFEGVEKGAVAEAGSD

SEQ ID NO: 22837 - protein, 118 aa, Motiliproteus sp.
  misc_feature (1)..(118): tr|A0A1R1MG02|A0A1R1MG02_9GAMM 6-carboxy-5,6,7,8-tetrah ydropterin synthase OS=Motiliproteus sp. MSK22-1 OX=189 7630 GN=BGP75_06125 PE=3 SV=1
MEIYKEFTFEAAHLLPNVPKGHKCGRLHGHSFMVQVHVSGEVDPRTGWIMDFAQLKAAFRPIYDRLDHYYLNDIAGLENPTSEVLARWIWNELKPSLPELSKIVIKETCTSGCVYKGD

SEQ ID NO: 22838 - protein, 138 aa, Mucilaginibacter auburnensis
  misc_feature (1)..(138): tr|A0A2H9VPI9|A0A2H9VPI9_9SPHI 6-pyruvoyltetrahydropter in/6-carboxytetrahydropterin synthase OS=Mucilaginibact er auburnensis OX=1457233 GN=CLV57_3384 PE=4 SV=1
MIHVTRREHFNAAHRMYREEWSAEKNAEVFGKCANPNWHGHNYNLFVTVKGEITHATGYLIDLKELKEIINEHVIEKLDHKNLNMDVDFMKGKMASTELLCIEIFNQLKGPIEAYEGVFLHSVRLFETENNSAEYFGD

SEQ ID NO: 22839 - protein, 123 aa, Mucilaginibacter frigoritolerans
  misc_feature (1)..(123): tr|A0A562TUL6|A0A562TUL6_9SPHI 6-pyruvoyltetrahydropter in/6-carboxytetrahydropterin synthase OS=Mucilaginibact er frigoritolerans OX=652788 GN=JN11_03723 PE=4 SV=1
MYREEWSEEKNAEVFGKCANPNWHGHNYNLFVTVKGEITHATGYLIDLKDLKVIINDYVIEKLDHKNINKDVPFMAGKMASTELLCIEIFNQLKAPIEAHEGVFLHSVKLHETENNSAEYFGD

SEQ ID NO: 22840 - protein, 134 aa, Mucilaginibacter ginsenosidivorans
  misc_feature (1)..(134): tr|A0A5B8UTG4|A0A5B8UTG4_9SPHI 6-carboxy-5,6,7,8-tetrah ydropterin synthase OS=Mucilaginibacter ginsenosidivora ns OX=398053 GN=FRZ54_06755 PE=3 SV=1
MITTICRKFHFNAAHRLHNTHWTDEKNQDVFGKCNNPNYHGHNYELIVKVTGEIDPDTGYVMDIKALKEIVRQVVTERFDHRNLNLDLPEFTTLNPTAENIAGVIYTLLKPQIQNKLTIILYETERNFVEYSGE

SEQ ID NO: 22841 - protein, 144 aa, Mucilaginibacter ginsenosidivorans
  misc_feature (1)..(144): tr|A0A5B8UUC1|A0A5B8UUC1_9SPHI 6-carboxytetrahydropteri n synthase OS=Mucilaginibacter ginsenosidivorans OX=398 053 GN=FRZ54_07085 PE=4 SV=1
MIRITKIFYFEMAHALHGYNGACRHIHGHSYELHVTIASVKGEDTYLQSPGFIIDFKELKKIINLAVIEKFDHKLVLSQAYLSKFPAVMLQENLEILEVEPSVENLLLFSRKAICKVLPPLLSLQGLKLYETRDSYAEWLASIN

SEQ ID NO: 22842 - protein, 138 aa, Mucilaginibacter ginsenosidivorax
  misc_feature (1)..(138): tr|A0A5B8WD93|A0A5B8WD93_9SPHI 6-carboxytetrahydropteri n synthase OS=Mucilaginibacter ginsenosidivorax OX=8621 26 GN=FSB76_13660 PE=4 SV=1
MIHITRKEHFNAAHRMYREEWSAEKNNEVFGKCANPNWHGHNYNLFVTVKGEVTHATGYLMDLKELKVIINEHVIEKLDHKNINLDVEFMAGKMASTELLCIEIFNQLKAPIEAYEGVFLHSVKLYETENNSAEYFGG

SEQ ID NO: 22843 - protein, 118 aa, Mucilaginibacter ginsenosidivorax
  misc_feature (1)..(118): tr|A0A5B8VUU2|A0A5B8VUU2_9SPHI 6-carboxy-5,6,7,8-tetrah ydropterin synthase OS=Mucilaginibacter ginsenosidivora x OX=862126 GN=queD PE=3 SV=1
MIIYKQFTFDAAHFSPNVPEGHKCKKLHGHTYQVTIFLEAAVLESDGWVMDFTELKAIVKPLVAQLDHSLLNDIEGLENPTTENLAIWLWQKIYPQLQILKRIELKETPTSGVIYEGK

SEQ ID NO: 22844 - protein, 138 aa, Mucilaginibacter gossypii
  misc_feature (1)..(138): tr|A0A5C1ISW5|A0A5C1ISW5_9SPHI 6-carboxytetrahydropteri n synthase OS=Mucilaginibacter gossypii OX=551996 GN=DI U38_024780 PE=4 SV=1
MIHITRKEHFNAAHRMYREEWSAEKNFEVFGKCANPNWHGHNYNLFVTVKGEVTHATGYLIDLKELKIIINEYVIEKLDHKNINKDVDFMAGKMASTELLCIEIFNQLKGPIEAYEGVFLHSVKLYETENNSAEYFGG

SEQ ID NO: 22845 - protein, 118 aa, Mucilaginibacter gossypii
  misc_feature (1)..(118): tr|A0A1G8C3U0|A0A1G8C3U0_9SPHI 6-carboxy-5,6,7,8-tetrah ydropterin synthase OS=Mucilaginibacter gossypii OX=551 996 GN=SAMN05192573_109129 PE=3 SV=1
MIVYKSFTFDSAHFLPNVPLHHKCRNIHGHTYHLTVYFEGEVTSPEGWVLDFALIKNAVKPIVDQLDHTILNEVPGLENPTAENLAIWIWKSITDKLDGLNKIELKETPTSGVIYEGK

SEQ ID NO: 22846 - protein, 149 aa, Mucilaginibacter gossypiicola
  misc_feature (1)..(149): tr|A0A1H8A2R8|A0A1H8A2R8_9SPHI 6-carboxy-5,6,7,8-tetrah ydropterin synthase OS=Mucilaginibacter gossypiicola OX =551995 GN=SAMN05192574_101339 PE=3 SV=1
MIKVTIANDPGHMIINKFGLTLQRYYLSNLFMIIYQHFTFDAAHFLPHVPEGHKCRNLHGHTYHLTLYIAGEILEREGWILDFSDLKAIAAPVIGMLDHALLNSIEGLENPTAELLAIWIWRQIKPLLPGLRKIELKETPASGVIYEGE

SEQ ID NO: 22847 - protein, 123 aa, Mucilaginibacter gossypiicola
  misc_feature (1)..(123): tr|A0A1H8QLI0|A0A1H8QLI0_9SPHI 6-pyruvoyltetrahydropter in/6-carboxytetrahydropterin synthase OS=Mucilaginibact er gossypiicola OX=551995 GN=SAMN05192574_10947 PE=4 SV =1
MYREEWSAEKNFEVFGKCANPNWHGHNYNLFVTVKGEVTHATGYLIDLKELKIIINEYVIEKLDHKNINKDVDFMAGKMASTELLCIEIFNQLKGPIEAYEGVFLHSVKLYETENNSAEYFGG

SEQ ID NO: 22848 - protein, 139 aa, Mucilaginibacter gotjawali
  misc_feature (1)..(139): tr|A0A125T1Z5|A0A125T1Z5_9SPHI 6-carboxy-5,6,7,8-tetrah ydropterin synthase OS=Mucilaginibacter gotjawali OX=15 50579 GN=MgSA37_00266 PE=3 SV=1
MMIFITRKEHFNAAHRMYREEWSEEKNAEVFGKCANPNWHGHNYNLFVTVKGEVTHATGYLMDLKELKIIINDYVIEKLDHKNINKDVDFMTGKMASTELLCIEIFNQLKKPIEAYEGVFLHSVKLYETENNSAEYFGD

SEQ ID NO: 22849 - protein, 138 aa, Mucilaginibacter gracilis
  misc_feature (1)..(138): tr|A0A495IXK2|A0A495IXK2_9SPHI 6-pyruvoyltetrahydropter in/6-carboxytetrahydropterin synthase OS=Mucilaginibact er gracilis OX=423350 GN=BDD43_1255 PE=4 SV=1
MIYITRKEHFNAAHRMYRDEWSAEKNNEVFGKCANPNWHGHNYNIFVTVKGEISHATGYLIDLKDLKVIINDYVIEKLDHKNINLDVPFMQGKMASTELLCIEIFNQLKAPIEANEGVFLHSVKLYETENNSAEYFGD

SEQ ID NO: 22850 - protein, 118 aa, Mucilaginibacter gracilis
  misc_feature (1)..(118): tr|A0A495J3M7|A0A495J3M7_9SPHI 6-carboxy-5,6,7,8-tetrah ydropterin synthase OS=Mucilaginibacter gracilis OX=423 350 GN=BDD43_3790 PE=3 SV=1
MIIFKKFTFDCAHYLPKVPVGHKCRNMHGHTYHVTFFIDGPIDDNLGWVMDFTDLKNIVKPVIQQLDHAVLNEIPGLENPTAENLAVWLWNELKPAIPQLDKIELMETPTSGVIYNGS

SEQ ID NO: 22851 - protein, 138 aa, Mucilaginibacter lappiensis
  misc_feature (1)..(138): tr|A0A1N6ZTB9|A0A1N6ZTB9_9SPHI 6-pyruvoyltetrahydropter in/6-carboxytetrahydropterin synthase OS=Mucilaginibact er lappiensis OX=354630 GN=SAMN05421821_106122 PE=4 SV= 1
MIHITRKEHFNAAHRMYREEWSAEKNFEVFGKCANPNWHGHNYNLFVTVKGEVTHATGYLIDLKELKTIINDYVIEKLDHKNINKDVPFMEGKMASTELLCIEIFNQLKAPIEAYEGVFLHSVKLYETENNSAEYFGG

SEQ ID NO: 22852 - protein, 123 aa, Mucilaginibacter lappiensis
  misc_feature (1)..(123): tr|A0A1N6VRA0|A0A1N6VRA0_9SPHI 6-pyruvoyltetrahydropter in/6-carboxytetrahydropterin synthase OS=Mucilaginibact er lappiensis OX=354630 GN=SAMN05421821_103447 PE=4 SV= 1
MYREEWSAEKNEEIFGKCANPNWHGHNYNLFVTVKGEVSYTNGYLIDLKQLKAIIQENAIEKLDHKNLNLDVDFMQGKMATTELLCMEIFNQLKTPIEINKGVFLHSVRLYETENNSAEYFGG

SEQ ID NO: 22853 - protein, 138 aa, Mucilaginibacter mallensis
  misc_feature (1)..(138): tr|A0A1H2BWX7|A0A1H2BWX7_9SPHI 6-pyruvoyltetrahydropter in/6-carboxytetrahydropterin synthase OS=Mucilaginibact er mallensis OX=652787 GN=SAMN05216490_4424 PE=4 SV=1
MIYITRKEHFNAAHRMYREEWSAEKNNEVFGKCANPNWHGHNYNLFVTVKGQVTHATGYLIDLKELKIIINDYVIEKLDHKNINKDVEFMAGKMASTELLCIEIFNQLKAPIETYDGVFLHSVKLYETENNSAEYFGD

SEQ ID NO: 22854 - protein, 123 aa, Mucilaginibacter oryzae
  misc_feature (1)..(123): tr|A0A316H616|A0A316H616_9SPHI 6-pyruvoyltetrahydropter in/6-carboxytetrahydropterin synthase OS=Mucilaginibact er oryzae OX=468058 GN=LX99_03845 PE=4 SV=1
MYREEWSAEKNFEVFGKCANPNWHGHNYNLFVTVKGEITHATGYLIDLKELKAIINEYVIEKLDHKNINKDVDFMAGKMASTELLCIEIFNQLKGPIEAYEGVFLHSVKLYETENNSAEYFGG

SEQ ID NO: 22855 - protein, 120 aa, Mucilaginibacter oryzae
  misc_feature (1)..(120): tr|A0A316HIK4|A0A316HIK4_9SPHI 6-carboxy-5,6,7,8-tetrah ydropterin synthase OS=Mucilaginibacter oryzae OX=46805 8 GN=LX99_00601 PE=3 SV=1
MTIYKQFTFDAAHFLPNVPEGHRCRRVHGHTYHLTVYVSGAVSAEEGWVIDFKDLKAVVKPLVDQLDHAMLNEIAGLQNPTAENVARWLWRGIQPEIPGLSRIELKETPTSGVIYEGGAD

SEQ ID NO: 22856 - protein, 138 aa, Mucilaginibacter paludis
  misc_feature (1)..(138): tr|H1YIP5|H1YIP5_9SPHI Uncharacterized protein OS=Mucil aginibacter paludis DSM 18603 OX=714943 GN=Mucpa_3492 P E=4 SV=1
MIYITRKEHFNAAHRMYREEWSAEKNEEMFGKCANPNWHGHNYNLFVTVKGEVTHATGYLMDLKDLKVIINDCVIEKLDHKNINLDVPFMKGKMASTELLCIEIFNQLKAPIEAYQGVFLHSVKLYETENNSAEYFGD

SEQ ID NO: 22857 - protein, 118 aa, Mucilaginibacter paludis
  misc_feature (1)..(118): tr|H1Y2E8|H1Y2E8_9SPHI 6-carboxy-5,6,7,8-tetrahydropter in synthase OS=Mucilaginibacter paludis DSM 18603 OX=71 4943 GN=Mucpa_3832 PE=3 SV=1
MILYKQFTFDSAHFLSRVPDGHKCKAIHGHTYHLTVYAEGDVKEQEGWVFDFGDMTSVVKPIIETLDHAMLNNIEGLENPTAELLAVWLWKKIKPELPALSKIELKETPTSGVIYEGD

SEQ ID NO: 22858 - protein, 138 aa, Mucilaginibacter pedocola
  misc_feature (1)..(138): tr|A0A1S9PA78|A0A1S9PA78_9SPHI 6-pyruvoyl tetrahydrobio pterin synthase OS=Mucilaginibacter pedocola OX=1792845 GN=BC343_12435 PE=4 SV=1
MIHITRKEHFNAAHRMYREEWSAEKNAEVFGKCANPNWHGHNYNLYVTVKGEITHATGYLIDLKELKEIINEYIIDKLDHKNLNLDVDFMKGKMASTELLTIEIFNQLKGPIEAYPGVFLHSVRLFETENNSAEYFGE

SEQ ID NO: 22859 - protein, 138 aa, Mucilaginibacter phyllosphaerae
  misc_feature (1)..(138): tr|A0A4Y8AEG8|A0A4Y8AEG8_9SPHI 6-carboxy-5,6,7,8-tetrah ydropterin synthase OS=Mucilaginibacter phyllosphaerae OX=1812349 GN=E2R65_09490 PE=3 SV=1
MIHITRKEHFNAAHRMYREEWSAEKNNEVFGKCANPNWHGHNYNLFVTVKGEITHATGYLMDLKELKQIINEYVIEKLDHKNINMDVEFMKGIMASTELLCIGIFNQLKAPIEAYPGVFLHSVKLYETENNSAEYFGG

SEQ ID NO: 22860 - protein, 138 aa, Mucilaginibacter pineti
  misc_feature (1)..(138): tr|A0A1G7DJY0|A0A1G7DJY0_9SPHI 6-pyruvoyltetrahydropter in/6-carboxytetrahydropterin synthase OS=Mucilaginibact er pineti OX=1391627 GN=SAMN05216464_10715 PE=4 SV=1
MIYITRKEHFNAAHRMYREEWSAEKNNEVFGKCANPNWHGHNYNLFVTIKGEVTHATGYLMDLKDLKVVINEHVIEKLDHKNINMDVEFMKGIMASTELLCIGIFNQLKGPIEVNEGVFLHSVKLYETENNSAEYFGG

SEQ ID NO: 22861 - protein, 123 aa, Mucilaginibacter polytrichastri
  misc_feature (1)..(123): tr|A0A1Q6A3L6|A0A1Q6A3L6_9SPHI 6-pyruvoyl tetrahydrobio pterin synthase OS=Mucilaginibacter polytrichastri OX=1 302689 GN=RG47T_4072 PE=4 SV=1
MYREEWSAEKNQEVFGKCANPNWHGHNYNLFVTVKGEITHATGYLIDLKELKEIINEHVIEKLDHKNLNLDVPFMAGKMASTELLTIEIFNQLKGPIEAYEGVFLHSVRLFETENNSAEYFGD

SEQ ID NO: 22862 - protein, 138 aa, Mucilaginibacter psychrotolerans
  misc_feature (1)..(138): tr|A0A4Y8SMZ9|A0A4Y8SMZ9_9SPHI 6-carboxytetrahydropteri n synthase OS=Mucilaginibacter psychrotolerans OX=15240 96 GN=E2R66_03295 PE=4 SV=1
MIHITRKEHFNAAHRMYREEWSAEKNAEVFGKCANPNWHGHNYNLFVTVKGEITHATGYLIDLKDLKVIINEYVIEKLDHKNLNLDVDFMRGKMASTELLTIEIFNQLKGPIEAYPGVFLHSVRLFETDNNSAEYFGD

SEQ ID NO: 22863 - protein, 118 aa, Mucilaginibacter psychrotolerans
  misc_feature (1)..(118): tr|A0A4Y8S7Z4|A0A4Y8S7Z4_9SPHI 6-carboxy-5,6,7,8-tetrah ydropterin synthase OS=Mucilaginibacter psychrotolerans OX=1524096 GN=queD PE=3 SV=1
MTIYQHFTFDAAHFLPHVPAGHKCKNLHGHTYHLTIYIAGELLEKEGWIIDFSDVKATLAPIISVLDHHLLNEVPGLENPTAELLAKWIWDKTRPLLSGLQKIELKETPGTGVMYEGN

SEQ ID NO: 22864 - protein, 138 aa, Mucilaginibacter rubeus
  misc_feature (1)..(138): tr|A0A5C1I9K2|A0A5C1I9K2_9SPHI 6-carboxytetrahydropteri n synthase OS=Mucilaginibacter rubeus OX=2027860 GN=DEO 27_028785 PE=4 SV=1
MIHITRKEHFNAAHRMYREEWSAEKNFEVFGKCANPNWHGHNYNLFVTVKGEVTHATGYLIDLKELKTIINEYVIEKLDHKNINKDVDFMAGKMASTELLCIEIFNQLKAPIEAYEGVFLHSVKLYETENNSAEYFGG

SEQ ID NO: 22865 - protein, 118 aa, Mucilaginibacter rubeus
  misc_feature (1)..(118): tr|A0A5C1I028|A0A5C1I028_9SPHI 6-carboxy-5,6,7,8-tetrah ydropterin synthase OS=Mucilaginibacter rubeus OX=20278 60 GN=queD PE=3 SV=1
MIIYQHFTFDAAHFLPHVPEGHKCRNLHGHTYHLTLYITGDVLEQEGWILDFSDLKAIVAPVIGMLDHTLLNNIEGLENPTAELLATWIWKKVKPLLPGLKKIELKETPSSGVIYEGE

SEQ ID NO: 22866 - protein, 138 aa, Mucilaginibacter sp.
  misc_feature (1)..(138): tr|A0A1Q3ULC7|A0A1Q3ULC7_9SPHI 6-pyruvoyl tetrahydrobio pterin synthase OS=Mucilaginibacter sp. 44-25 OX=189579 4 GN=BGO48_06420 PE=4 SV=1
MIHITRREHFNAAHRMYREEWSAEKNFEVFGKCANPNWHGHNYNLFVTVKGEITHATGYLIDLKDLKKIINEYVIEKLDHKNINKDVDFMAGKMASTELLTIEIFNQLKGPIEAHEGVFLHSVKLYETENNSAEYFGG

SEQ ID NO: 22867 - protein, 139 aa, Mucilaginibacter sp.
  misc_feature (1)..(139): tr|A0A1C2GFU1|A0A1C2GFU1_9SPHI 6-pyruvoyl tetrahydrobio pterin synthase OS=Mucilaginibacter sp. PPCGB 2223 OX=1 886027 GN=BEL04_23530 PE=4 SV=1
MIYITRKEHFNAAHKMYRDEWSLEKNLEVFGKCANPNWHGHNYNLFVTVKGHVTHATGYLIDLKDLKVIINEHVIEKLDHKNINLDVEFMKGKMASTELLCIEIFNQLKAPIEAHEGVFLHSVKLYETENNSAEYFGEE

SEQ ID NO: 22868 - protein, 139 aa, Mucilaginibacter yixingensis
  misc_feature (1)..(139): tr|A0A2T5JEE8|A0A2T5JEE8_9SPHI 6-carboxy-5,6,7,8-tetrah ydropterin synthase OS=Mucilaginibacter yixingensis OX= 1295612 GN=C8P68_10138 PE=3 SV=1
MMIYITRREQFNAAHRMYREDWSEEKNAEVFGKCANPNWHGHNYNLFVTVKGNLSYETGYLIDLKDLKQIIKDYVVEKLDHKNLNRDVDFMEGKMASTELLCIEIFKQLKAPIEAYEGVFLHSVKLFETENNSAEYFGE

SEQ ID NO: 22869 - protein, 152 aa, Mucinivorans hirudinis
  misc_feature (1)..(152): tr|A0A060RDP0|A0A060RDP0_9BACT 6-carboxytetrahydropteri n synthase OS=Mucinivorans hirudinis OX=1433126 GN=BN93 8_1915 PE=4 SV=1
MERQKIRLTREFSFEAAHALDGYDGLCRNVHGHSYKLFVTVRGVPCGDETNPKLGMVVDFSDIKRIVKQHIVDRLDHSLVLADNRDNRQFREQNINKWQRIEIVPYQPTCENMLTEFAHILRQELPKCVELVALKLYETEKSYAEWLAQDNC

SEQ ID NO: 22870 - protein, 120 aa, Mucispirillum schaedleri
  misc_feature (1)..(120): tr|V2QE85|V2QE85_9BACT 6-carboxy-5,6,7,8-tetrahydropter in synthase OS=Mucispirillum schaedleri ASF457 OX=13798 58 GN=N508_01472 PE=3 SV=1
MYKVRIKSHFSSAHNLREYQGACERLHGHNWKVEAYLKSKTLDKLGMVEDFKMFKKHLNVIMDELDHEYINELEYFKTVNPTSENIAKYIFDKLAIHYGEKVDKVIVWETDTSAAEYTKD

SEQ ID NO: 22871 - protein, 140 aa, Muribacter muris
  misc_feature (1)..(140): tr|A0A4Y9JWB5|A0A4Y9JWB5_9PAST 6-carboxy-5,6,7,8-tetrah ydropterin synthase OS=Muribacter muris OX=67855 GN=que D PE=3 SV=1
MFKIAKEFSFDMAHMLDGHDGKCQNLHGHTYTLQVEIRGGLHTEGAKRGMVMDYSDLKSIVKTEILDKMDHAFIYDTTSEKECKVAQLLAELNSKTFGIPARTTAEQMAKHIFDTLSDVGLPVSLIRLWETPTSYCEYQR

SEQ ID NO: 22872 - protein, 140 aa, Muribacter muris
  misc_feature (1)..(140): tr|A0A0J5P3P2|A0A0J5P3P2_9PAST 6-carboxy-5,6,7,8-tetrah ydropterin synthase OS=Muribacter muris OX=67855 GN=RO2 1_09180 PE=3 SV=1
MFKIAKEFSFDMAHMLDGHDGKCQNLHGHTYTLQVEICGGLHTEGAKRGMVMDYSDLKSIVKTEILDKMDHAFIYDTTSEKECKVAQLLAELNSKTFGIPARTTAEQMAKYIFDTLSDVGLPVSLIRLWETPTSYCEYQR

SEQ ID NO: 22873 - protein, 187 aa, Muribaculaceae bacterium
  misc_feature (1)..(187): tr|A0A4Q0IK52|A0A4Q0IK52_9BACT Rubredoxin OS=Muribacula ceae bacterium Isolate-007 (NCI) OX=2489217 GN=ED388_08 020 PE=4 SV=1
MKSITTFDLQYAHRFYGFKGEAQYLHGHTGTLTIEVEDSINEGVNMVFPCNEIKKTAWNLLKNFDHALILREDDPLLPAVLEVYEKQGIVTGHPQNTNKGPAFKTELATAYPEARLVVTKETMTVEGMIKIVYNLLKDKLNISKITFTSGENAATEDYVTRNNIERCPLCGIALNEHGVCIKCGYKK

SEQ ID NO: 22874 - protein, 113 aa, Muribaculaceae bacterium
  misc_feature (1)..(113): tr|A0A4Q0IGE9|A0A4Q0IGE9_9BACT 6-carboxy-5,6,7,8-tetrah ydropterin synthase OS=Muribaculaceae bacterium Isolate -007 (NCI) OX=2489217 GN=ED388_13800 PE=3 SV=1
MYYISKRMEISGSHRLELSYPSKCENIHGHNWIVTVYCKARTLNADGMVCDFKHVKEKIHGVLDHKHINDILPFNPTAENIARWVVEQIPECYKAEVQESEGNVAMYVVDEDI

SEQ ID NO: 22875 - protein, 113 aa, Muribaculum intestinale; identical to SEQ ID NO: 22874
  misc_feature (1)..(113): tr|A0A1B1S9R4|A0A1B1S9R4_9BACT 6-carboxy-5,6,7,8-tetrah ydropterin synthase OS=Muribaculum intestinale OX=17966 46 GN=A4V02_07255 PE=3 SV=1

SEQ ID NO: 22876 - protein, 187 aa, Muribaculum intestinale
  misc_feature (1)..(187): tr|A0A1B1S9K5|A0A1B1S9K5_9BACT Rubredoxin OS=Muribaculu m intestinale OX=1796646 GN=A4V02_06835 PE=4 SV=1
MKSITTFDLQYAHRFYGFKGEAQYLHGHTGTLTIEVEDSINDGVNMVFPCNEIKKTAWNLLKNFDHALILREDDPLLPAVLEVYEKQGIVTGHPQNTNKGPAFKTELATAYPEARLVVTKETMTVEGMIKIVYNLLKDKLNISKITFTSGENAATEDYVTRNNIERCPLCGIALNEHGVCIKCGYKK

SEQ ID NO: 22877 - protein, 187 aa, Muribaculum sp.
  misc_feature (1)..(187): tr|A0A4P7W024|A0A4P7W024_9BACT Rubredoxin OS=Muribaculu m sp. H5 OX=2530393 GN=E7747_01995 PE=4 SV=1
MRSITTFDLQYAHRFYGFKGEAQYLHGHTGTLTIEVEDSINKGVNMVFPCNEIKKTAWAVLKNFDHALVLREDDPLLPAITGVYEQQGILHGHPQNTLKGEAFKTELAKAYPDARLVVTKETMTVEGMIKIVYDLLKDKLNIAKITFTSGDNAASEEYTDRKEIERCPLCGIALTEEGVCIKCGYKK

SEQ ID NO: 22878 - protein, 117 aa, Muribaculum sp.
  misc_feature (1)..(117): tr|A0A4P7VPV5|A0A4P7VPV5_9BACT 6-carboxy-5,6,7,8-tetrah ydropterin synthase OS=Muribaculum sp. TLL-A4 OX=253039 0 GN=E7746_05845 PE=3 SV=1
MYYVTKRIEISASHRLELSYPSKCSRLHGHNWVITVYCRARELNADGMVCDFSHIKELIHGYLDHGNLNELLPFNPTAENIARWIVDRIPECYKARVQESEGNEAIYIDDNATDACI

SEQ ID NO: 22879 - protein, 118 aa, Muricauda antarctica
  misc_feature (1)..(118): tr|A0A1M6X5D3|A0A1M6X5D3_9FLAO 6-carboxy-5,6,7,8-tetrah ydropterin synthase OS=Muricauda antarctica OX=1055723 GN=SAMN05216293_2449 PE=3 SV=1
MILFKQFKFDSAHFLPNVPEGHKCRGLHGHTYQLTLYFEGKIDEKLGWIMDFSEIKRVVDPIIECIDHKLLNEVEGLENPTCELIAIWLWDKIRLKIPQLSRIKLFETPTSGVIFEGE

SEQ ID NO: 22880 - protein, 136 aa, Muricauda antarctica
  misc_feature (1)..(136): tr|A0A1M6YR75|A0A1M6YR75_9FLAO 6-carboxy-5,6,7,8-tetrah ydropterin synthase OS=Muricauda antarctica OX=1055723 GN=SAMN05216293_2903 PE=3 SV=1
MIATICRKAHFNAAHRLHNPKWSKEKNIEVFGKCNSPSYHGHNFDLEVRIKGEVDPDTGFVMDLAVLGSLIKDEVEERFDHKNLNEDCLEFQDLLPTTEHFVKVIYDILKPKLKKGQLLQIILHETQKNSAEYGDW

SEQ ID NO: 22881 - protein, 135 aa, Muricauda lutaonensis
  misc_feature (1)..(135): tr|A0A0D5YVC9|A0A0D5YVC9_9FLAO 6-carboxy-5,6,7,8-tetrah ydropterin synthase OS=Muricauda lutaonensis OX=516051 GN=VC82_2270 PE=3 SV=1
MKVKVSRKAHFNAAHRLYRPDWTFEKNQEVFGRCNNPNYHGHNYELIVSVTGEIDQETGYVMDMKKLKDLIKAHVEEAFDHKNLNEDVPEFKNLNPTAENIAVVIFDKLRPHIGNSKELEIVLYETSRNFVTYNG

SEQ ID NO: 22882 - protein, 136 aa, Muricauda lutaonensis
  misc_feature (1)..(136): tr|A0A0D5YRE4|A0A0D5YRE4_9FLAO 6-carboxy-5,6,7,8-tetrah ydropterin synthase OS=Muricauda lutaonensis OX=516051 GN=VC82_830 PE=3 SV=1
MIATICRKAHFNAAHRLHNPKWSQEKNVEVFGKCNSPNYHGHNFDLEVRIRGEVDQDTGFVMDLAQLGQLIKEKVEDRFDHKNLNEDCPEFEHILPSTENFVKVIYDILKPELKPGQKLRITLHETQKNSAEYGDW

SEQ ID NO: 22883 - protein, 135 aa, Muricauda lutimaris
  misc_feature (1)..(135): tr|A0A3A1N9X5|A0A3A1N9X5_9FLAO 6-carboxy-5,6,7,8-tetrah ydropterin synthase OS=Muricauda lutimaris OX=475082 GN =D2V08_09045 PE=3 SV=1
MKVKASRKASFNAAHRLYRPDWDEEKNNEVFGKCNNPKFHGHNYDLIVSVTGEIDPETGFVMDLKVLKELIKEHVEEALDHKNLNLDVPEFKNLNPTAENIAVVIWNKLRPHIQQTKELEVVLYETPRNFVTYTG

SEQ ID NO: 22884 - protein, 137 aa, Muricauda lutimaris
  misc_feature (1)..(137): tr|A0A3A1N9B9|A0A3A1N9B9_9FLAO 6-carboxy-5,6,7,8-tetrah ydropterin synthase OS=Muricauda lutimaris OX=475082 GN =D2V08_03580 PE=3 SV=1
MIATICRKAHFNAAHRLHNPKWSKEKNIEVFGKCNSPSFHGHNFDLEVRIKGEVDPDTGFVMDLADLGKLIKDEVEERFDHKNLNEDCPEFKNLLPTTEYFVKVIYDILKPKLKKGQLLHITLHETSKNSAAYGDWD

SEQ ID NO: 22885 - protein, 136 aa, Muricauda olearia
  misc_feature (1)..(136): tr|A0A444VP79|A0A444VP79_9FLAO 6-carboxy-5,6,7,8-tetrah ydropterin synthase OS=Muricauda olearia OX=552546 GN=D N53_07785 PE=3 SV=1
MIATICRKAHFNAAHRLHNPKWSQEKNIAMFGKCNSPNYHGHNFDLEVRIRGEVDPDTGFVMDLAVLGELIRAEVEERFDHKNLNEDCPEFADLLPTTEYFVKVIYDILKPKLAQGQLLHITLHETQKNSAEYGDW

SEQ ID NO: 22886 - protein, 135 aa, Muricauda olearia
  misc_feature (1)..(135): tr|A0A444VH81|A0A444VH81_9FLAO 6-carboxy-5,6,7,8-tetrah ydropterin synthase OS=Muricauda olearia OX=552546 GN=D N53_06480 PE=3 SV=1
MKVKVSRKANFNAAHRLHRPDWDAEKNQAVFGKCNNPRYHGHNYDLIVSVTGEIDQETGFVMDLKVLKDLIKEHVEEALDHKNLNADVPEFKELNPTAENIAVVIWSKLRPHIDQANELEVVLYETPRNFVTYSG

SEQ ID NO: 22887 - protein, 134 aa, Muricauda pacifica
  misc_feature (1)..(134): tr|A0A2T0M6N6|A0A2T0M6N6_9FLAO 6-carboxy-5,6,7,8-tetrah ydropterin synthase OS=Muricauda pacifica OX=1080225 GN =CLV81_4067 PE=3 SV=1
MVKVSRKAHFNAAHRLYNPDWSFEKNEAVFGKCNNPRYHGHNYDLIVSVEGEINPITGYVMDMKVLKDLIKEHVEDQFDHKNLNEDVSDFKNLNPTAENIAVVIWNKLRPHIEHSKNLEVVLYETPRNFVTYSG

SEQ ID NO: 22888 - protein, 136 aa, Muricauda pacifica
  misc_feature (1)..(136): tr|A0A2T0M7W9|A0A2T0M7W9_9FLAO 6-carboxy-5,6,7,8-tetrah ydropterin synthase OS=Muricauda pacifica OX=1080225 GN =CLV81_2013 PE=3 SV=1
MIATICRKAHFNAAHRLHNPNWSDEKNIEVFGKCNSPNYHGHNFDLEVRVRGEINTDTGFVMDLADLGALIKNEIEARFDHKNLNEDCPEFENLFPTTEYFVKVIYDILKPKLPQGHLLHITLHETQKNSAEYGDW

SEQ ID NO: 22889 - protein, 135 aa, Muricauda ruestringensis
  misc_feature (1)..(135): tr|G2PMB9|G2PMB9_MURRD 6-carboxy-5,6,7,8-tetrahydropter in synthase OS=Muricauda ruestringensis (strain DSM 132 58 / CIP 107369 / LMG 19739 / B1) OX=886377 GN=Murru_21 77 PE=3 SV=1
MKVKASRKASFNAAHRLYRPDWDDEKNNAVFGKCNNPKFHGHNYDLIVSVTGEIDQETGFVMDLKVLKELIKEHVEEALDHKNLNLDVPEFENLNPTAENIAVVIWNKLRPHISKDKELEVVLYETPRNFVTYTG

SEQ ID NO: 22890 - protein, 118 aa, Muricauda ruestringensis
  misc_feature (1)..(118): tr|G2PJH7|G2PJH7_MURRD 6-carboxy-5,6,7,8-tetrahydropter in synthase OS=Muricauda ruestringensis (strain DSM 132 58 / CIP 107369 / LMG 19739 / B1) OX=886377 GN=Murru_29 04 PE=3 SV=1
MILFKHFNFDSAHFLPNVPDGHKCRILHGHTYRLTLYFEGELDKDLGWVIDFSDIKRAVNPIIGRVDHKLLNDIEGLENPTCEQVAIWLWDKIKAKIPQLCKIKLYETPTSGVVYEGA

SEQ ID NO: 22891 - protein, 135 aa, Muricauda sp.
  misc_feature (1)..(135): tr|A0A418N2L6|A0A418N2L6_9FLAO 6-carboxy-5,6,7,8-tetrah ydropterin synthase OS=Muricauda sp. NH166 OX=2306997 G N=D2U88_18675 PE=3 SV=1
MKVKVSRKATFNAAHRLHRPDWDDAKNQAVFGKCNNPRFHGHNYDLIVSVTGEIDQETGFVMDLKVLKELIQEHVEEALDHKNLNTDVPEFQDLNPTAENIAVVIWNKLRPLIDNQKELEVVLYETPRNFVTYSG

SEQ ID NO: 22892 - protein, 118 aa, Muricauda sp.
  misc_feature (1)..(118): tr|A0A3R7RZ21|A0A3R7RZ21_9FLAO 6-carboxy-5,6,7,8-tetrah ydropterin synthase OS=Muricauda sp. TMED12 OX=1986608 GN=queD PE=3 SV=1
MIICKHFSFDSAHFLPKVPEGHKCKGIHGHTYRLTLYFEGKLDNELGWVMDFTDIKEAVNPIIECVDHKLLNNIAGLENPTCEHIAIWLWNRIKDKVPQLCRIRLYETPTSGIVYEGV

SEQ ID NO: 22893 - protein, 136 aa, Muricauda taeanensis
  misc_feature (1)..(136): tr|A0A3A1NSD7|A0A3A1NSD7_9FLAO 6-carboxy-5,6,7,8-tetrah ydropterin synthase OS=Muricauda taeanensis OX=1005926 GN=D2V93_10310 PE=3 SV=1
MIATICRKAHFNAAHRLHNPKWSKEKNIEVFGKCNSPSYHGHNFDLEVRIKGEVDPDTGFVMDLAVLGSLIKDEVEERFDHKNLNEDCPEFQDLLPTTEHFVKVIYDILKPKLKKDQLLQIILHETQKNSAEYGDW

SEQ ID NO: 22894 - protein, 135 aa, Muricauda taeanensis
  misc_feature (1)..(135): tr|A0A3A1NR80|A0A3A1NR80_9FLAO 6-carboxy-5,6,7,8-tetrah ydropterin synthase OS=Muricauda taeanensis OX=1005926 GN=D2V93_11985 PE=3 SV=1
MKVKVSRKASFNAAHRLYRPDWDEERNNAVFGKCNNPRYHGHNYDLIVGVTGEIDQATGFVMDLKVLKDLIKEHVEDALDHKNLNLDVPEFKNLNPTAENIAVVIWNRLRPHIENNKELEVVLYETPRNFVTYTG

SEQ ID NO: 22895 - protein, 136 aa, Muricauda zhangzhouensis
  misc_feature (1)..(136): tr|A0A1H2Q232|A0A1H2Q232_9FLAO 6-carboxy-5,6,7,8-tetrah ydropterin synthase OS=Muricauda zhangzhouensis OX=1073 328 GN=SAMN04487892_0019 PE=3 SV=1
MIATICRKGHFNAAHRLHNPNWSDEKNIAVFGKCNSPSFHGHNFDLEVRIRGEVDPDTGFVMDLADLGVLIRDEVEERFDHKNLNLDCPEFKDLLPTTEYFVKVIYDILKPKLQSGQQLHITLHETSKNSAEYGDW

SEQ ID NO: 22896 - protein, 135 aa, Muricauda zhangzhouensis
  misc_feature (1)..(135): tr|A0A1H2ZAV2|A0A1H2ZAV2_9FLAO 6-carboxy-5,6,7,8-tetrah ydropterin synthase OS=Muricauda zhangzhouensis OX=1073 328 GN=SAMN04487892_3395 PE=3 SV=1
MKVKVSRKASFNAAHRLHRDDWSDEKNQTIFGKCNNPRYHGHNYDLIVSVTGEIDQETGFVMDLKVLKELIQEHVEEALDHKNLNLDVPEFKNLNPTAENIAVVIWNKLRPHISDKKELEVMLYETPRNFVTYSG

SEQ ID NO: 22897 - protein, 187 aa, Muricomes intestini; identical to SEQ ID NO: 21582
  misc_feature (1)..(187): tr|A0A4R3K499|A0A4R3K499_9FIRM 6-pyruvoyltetrahydropter in/6-carboxytetrahydropterin synthase OS=Muricomes inte stini OX=1796634 GN=EDD59_11634 PE=4 SV=1

SEQ ID NO: 22898 - protein, 150 aa, Muriicola sp.
  misc_feature (1)..(150): tr|A0A411ECD0|A0A411ECD0_9FLAO 6-carboxytetrahydropteri n synthase OS=Muriicola sp. MMS17-SY002 OX=2507538 GN=E QY75_12495 PE=4 SV=1
MSRIRVTKEFSFETGHALYGYDGKCKNVHGHSYKLAVTVIGTPITKEGEVKLGMVIDFGDLKKIVREEVVDPFDHATIFNKNTPHLELAKELEKRGHRVILANYQPTSENMVIDIAERIKTRLPAHLQLHSLKLRETETAYAEWHLEDNP

SEQ ID NO: 22899 - protein, 136 aa, Muriicola sp.
  misc_feature (1)..(136): tr|A0A411E7D7|A0A411E7D7_9FLAO 6-carboxy-5,6,7,8-tetrah ydropterin synthase OS=Muriicola sp. MMS17-SY002 OX=250 7538 GN=EQY75_02815 PE=3 SV=1
MKVKVSRRAHFNAAHRLYRADWSDTKNNDVFGKCNNPNFHGHNYELIVSVTGEIDPVTGFVIDVKILKDLIKAEVEEAFDHKNLNLEVPEFKELNPTAENIAVVIWNKLRPHIKASDALEVELYETPRNFVTYTGE

SEQ ID NO: 22900 - protein, 150 aa, Mycoavidus cysteinexigens
  misc_feature (1)..(150): tr|A0A2Z6EY99|A0A2Z6EY99_9BURK 6-pyruvoyl-tetrahydropte rin synthase OS=Mycoavidus cysteinexigens OX=1553431 GN =MCB1EB_2260 PE=4 SV=1
MLTITRKLEFDAGHRIPDHRSLCCNLHGHRYVLEITLEGEPIITEGAPDRGMVMDFAQVKALALAHLVEHWDHAFLVYAGDTPIRDFLATLPNHKTVVLEHIPTVENLARIAFDRLAAAYNHHYGATLKLKRVRLYETPNCWAEVERPVN

SEQ ID NO: 22901 - protein, 146 aa, Mycobacterium angelicum
  misc_feature (1)..(146): tr|A0A1X0A3J6|A0A1X0A3J6_9MYCO Uncharacterized protein OS=Mycobacterium angelicum OX=470074 GN=BST12_03945 PE= 4 SV=1
MTRTIEKTFRFDAGHRSLGFDYKKEETIHGHTWELKLILESELELDGMRTVFDTNELAVVVRPIIDSLDHSFIIWTEDPIFDEFVKLCELADVADKVYPVDFNPTIEGLVQHIYEQVSGKLQVDGCVLRRAELRCASTLNASYGIN

SEQ ID NO: 22902 - protein, 132 aa, Mycobacterium angelicum
  misc_feature (1)..(132): tr|A0A1W9ZW26|A0A1W9ZW26_9MYCO 6-carboxy-5,6,7,8-tetrah ydropterin synthase OS=Mycobacterium angelicum OX=47007 4 GN=BST12_11185 PE=3 SV=1
MTATAEIFREFTFEAAHRLPNLPGDHKCSRLHGHSYRFSVHVSGPVDAANGWVTDFAVLKDACKPVLARLDHYYLNDIPGLENPTSERLAEWIWCELEHSLPMLTAVTVRETCTSCCIYRGPHGGHPGIEPA

SEQ ID NO: 22903 - protein, 142 aa, Mycobacterium asiaticum
  misc_feature (1)..(142): tr|A0A1A3KZ00|A0A1A3KZ00_MYCAS Uncharacterized protein OS=Mycobacterium asiaticum OX=1790 GN=A5640_27035 PE=4 SV=1
MRKRFSDLACCHRSWSGAGKNFFLHGYEQRFEIEFACAELDPDTGMVVDADCLEQVRNALRRQFDHTTLIAAEDPQRDLFELLAAQGAIDLRVMHCPGMEASAAWVFDTVERIVAKASGGRVWVSRVEARENRNNRVTLMAD

SEQ ID NO: 22904 - protein, 142 aa, Mycobacterium asiaticum
  misc_feature (1)..(142): tr|A0A1A3CJF1|A0A1A3CJF1_MYCAS Uncharacterized protein OS=Mycobacterium asiaticum OX=1790 GN=A9X01_16750 PE=4 SV=1
MRKRFSDLACCHRSWTGAGKDFYLHGYEQRFEIEFACAELDPGTGMVVDADCLEDVRAALRRQFDHTTLIAADDPQRDLFELLAAQGAIDLRVMHCPGMEASAAWVFDTVERIVAKASEGRVWVSRVQARENRNNKVTLMAD

SEQ ID NO: 22905 - protein, 163 aa, Mycobacterium attenuatum
  misc_feature (1)..(163): tr|A0A498QE71|A0A498QE71_9MYCO 6-carboxy-5,6,7,8-tetrah ydropterin synthase OS=Mycobacterium attenuatum OX=2341 086 GN=queD PE=4 SV=1
MPYTIKQTIRLEMGHRTWTHDMRTSRGGSELYTPELVANKCANLHGHTIFVSVTLTGDSLDEQYFLLDTDLLENAFRPILDEVDHAFVVDRKDPLYEDIAAVARKGGLKLCTVDFSPTFEALVRHFYDRLQSVIEEKGLADQLRIKEMKVLGEQTVEATYCGE

SEQ ID NO: 22906 - protein, 142 aa, Mycobacterium attenuatum
  misc_feature (1)..(142): tr|A0A498QE81|A0A498QE81_9MYCO Uncharacterized protein OS=Mycobacterium attenuatum OX=2341086 GN=LAUMK136_0480 7 PE=4 SV=1
MPTSRGGNEFYTPDLIANKCANLHGHTIFVSVTLVGDTLDEQYFLLDTDLLEQAFRPILDEFDFAFVVDKHDPLYEDIAAVVNKGGLKLCTVDFSPTFEGLVRHFYDRLQAVIAEKGLADQLRIKEMKVLGELTVEATYTGE

SEQ ID NO: 22907 - protein, 177 aa, Mycobacterium basiliense
  misc_feature (1)..(177): tr|A0A3S4BI48|A0A3S4BI48_9MYCO 6-pyruvoyl tetrahydropte rin synthase OS=Mycobacterium basiliense OX=2094119 GN= MB901379_04785 PE=4 SV=1
MNDITISDRVRAVTVHRADAPIGRTARFHLNKRFSDLPCCHRSWSRHDKRVFLHGYELTFEIEFACTETETRTGLVVNNRCLNEVRAALQHQFDHTTLIAADDPQRNLFEQLAGEGVIDLRIMNATSMEGAAAWVFDTVEHIVAPATDGRVWVSRIAARESRNNVVTLTAEPEDRFD

SEQ ID NO: 22908 - protein, 159 aa, Mycobacterium basiliense
  misc_feature (1)..(159): tr|A0A3S4CX24|A0A3S4CX24_9MYCO 6-carboxy-5,6,7,8-tetrah ydropterin synthase OS=Mycobacterium basiliense OX=2094 119 GN=queD PE=4 SV=1
MTETAEIYCEFTFEAAHRLPNVPDGHKCGRLHGHSYRARIYVEGPLDPRAGWIIDFGNIKDACKPVIERLDHYYLNEIAGLENPTSEHLTVWLWRELAGLLPMMSAVSVSETCTSGCMYRGPRVAAHDSDAGCPSVEQRPGITSDQVGIGGLRQPIPSH

SEQ ID NO: 22909 - protein, 127 aa, Mycobacterium bohemicum
  misc_feature (1)..(127): tr|A0A1X1QWM9|A0A1X1QWM9_9MYCO 6-carboxy-5,6,7,8-tetrah ydropterin synthase OS=Mycobacterium bohemicum OX=56425 GN=AWB93_22750 PE=3 SV=1
MNETAEIFWEFTFEAAHRLPNVPRDHKCSRLHGHSYRAQIFVTGPVNPHTGWVIDFGNIKDACKPVIAQLDHYYLNEIPGLENPTSEHLAAWIWRELTASLPMMSAVRVSETCTSGCVYRGQGGGRQ

SEQ ID NO: 22910 - protein, 127 aa, Mycobacterium bohemicum; identical to SEQ ID NO: 22909
  misc_feature (1)..(127): tr|A0A0U0W5N1|A0A0U0W5N1_9MYCO 6-carboxy-5,6,7,8-tetrah ydropterin synthase OS=Mycobacterium bohemicum DSM 4427 7 OX=1236609 GN=BN971_01864 PE=3 SV=1

SEQ ID NO: 22911 - protein, 177 aa, Mycobacterium decipiens
  misc_feature (1)..(177): tr|A0A1X2LSJ4|A0A1X2LSJ4_9MYCO Uncharacterized protein OS=Mycobacterium decipiens OX=1430326 GN=B8W66_15725 PE =4 SV=1
MRMRSDVVAAERDNPNTAAEPSRAVSKGLVPTIRTIEKTFRFDAGHRSLGFDYTKEETIHGHTWELKLIVECRQKLDDMKTIFDTNELNVITRPIIDSLDHSFIIWTEDPIFDAFVKVCELAGVADKVYPVDFNPTIEGMVEHIFNRVDEQLELDGCTLKRAELRCASTLNACYEVG

SEQ ID NO: 22912 - protein, 162 aa, Mycobacterium decipiens
  misc_feature (1)..(162): tr|A0A1X2LSL2|A0A1X2LSL2_9MYCO Uncharacterized protein OS=Mycobacterium decipiens OX=1430326 GN=B8W66_15720 PE =4 SV=1
MSYTIKQTFRIEMGHRTWTQDMRTSRGKEFYDPALVADKCANLHGHTMFVSVTIAGDSLDDQYFLMDTDLLTGAFKPILDEVDHAFVVDKNDPLYGDIAAVTQKGGLKLCTVDFSPTFEAMVRHFHDRLQSALDEKGLGDVLRIKEVKVLGEQSVEATYSNG

SEQ ID NO: 22913 - protein, 146 aa, Mycobacterium gastri
  misc_feature (1)..(146): tr|A0A1X1URD1|A0A1X1URD1_MYCGS Uncharacterized protein OS=Mycobacterium gastri OX=1777 GN=AWC07_19740 PE=4 SV= 1
MGHTIEKTFRFDAGHRSLGFNYKKEETIHGHTWELRLILEYGDQLDDMKTVFDTNELAVIVEPIISDLDHSFIIWDQDPIYDDFLKVCELADVADKVYTVDFNPTIEGLVEHIFERVNSQLRLSGCVLRRVELQCASTLKASYGVN

SEQ ID NO: 22914 - protein, 163 aa, Mycobacterium gastri
  misc_feature (1)..(163): tr|A0A1X1URC6|A0A1X1URC6_MYCGS Uncharacterized protein OS=Mycobacterium gastri OX=1777 GN=AWC07_19735 PE=4 SV= 1
MPYTIKQTIRLEMGHRTWTHDMRTSRGGSELYTPELVANKCANLHGHTIFVSVTLTGDSLDEQYFLLDTDLLENAFRPILDEVDHAFVVDRKDPLYEDIAAVARKGGLKLCTVDFSPTFEALVRHFYDRLQSVIQEKGLADQLRIKEMKVLGEQTVEATYCGE

SEQ ID NO: 22915 - protein, 177 aa, Mycobacterium gordonae
  misc_feature (1)..(177): tr|A0A1A3K647|A0A1A3K647_MYCGO Uncharacterized protein OS=Mycobacterium gordonae OX=1778 GN=A9W97_30195 PE=4 S V=1
MPEIAFAGPAQTATMHRDDAPVGRTARFHLRKRFGGLHCCRRSWSDNGKRLFLHGYALSFEIEFACAETETETGQVLGSDCLDDIRAALAAQFAHTTLIATNDPQRDLFELLAERDLVDMRIVDSTGLEASAAWVFETVETIVAQATGGRVWVSRIDAQESGSRVLTLTALPVKDWV

SEQ ID NO: 22916 - protein, 176 aa, Mycobacterium gordonae
  misc_feature (1)..(176): tr|A0A1A6BHI7|A0A1A6BHI7_MYCGO Uncharacterized protein OS=Mycobacterium gordonae OX=1778 GN=A9W98_18270 PE=4 S V=1
MPEIAFAGTAQTTTMHRDDAPVGRTARFHLRKRFGGLHCCRRSWSDNGKRLFLHGYALSFEIEFACDERQSDDQVLSAECLDDIRAALAAQFGHTTLITSNDPQRDLFELLAERDLVDMRIVESTALEASGAWVFETVERIVAQATGGRAWVSRIDAQESGSRVFTLTALPVKDWV

SEQ ID NO: 22917 - protein, 165 aa, Mycobacterium heckeshornense
  misc_feature (1)..(165): tr|A0A2I3EEQ9|A0A2I3EEQ9_9MYCO Uncharacterized protein OS=Mycobacterium heckeshornense OX=110505 GN=ACT16_2358 0 PE=4 SV=1
MSTTTVRVRHEFSAGHRILGLTGAGEKCRNIHGHNFTCWWMFDQRPGWPLAVEFGSVKAELKEMIDRLLDHAFIVHKDDEFVGYLVTHGLKRYLLSDRPTTEAIAAEIARLTEAQFPALDLLYVQLTEGSNNEAVWMRGGPPAATYPPGSAVLDGDHAKRVRAVI

SEQ ID NO: 22918 - protein, 173 aa, Mycobacterium heckeshornense
  misc_feature (1)..(173): tr|A0A2G8B8B0|A0A2G8B8B0_9MYCO Uncharacterized protein OS=Mycobacterium heckeshornense OX=110505 GN=BMW24_0133 65 PE=4 SV=1
MVSTGRHEMSTTTVRVRHEFSAGHRILGLTGAGEKCRNIHGHNFTCWWMFDQRPGWPLAVEFGSVKAELKEMIDRLLDHAFIVHKDDEFVGYLVTHGLKRYLLSDRPTTEAIAAEIARLTEAQFPALDLLYVQLTEGSNNEAVWMRGGPPAATYPPGSAVLDGDHAKRVRAVI

SEQ ID NO: 22919 - protein, 163 aa, Mycobacterium innocens; identical to SEQ ID NO: 22914
  misc_feature (1)..(163): tr|A0A498QBQ0|A0A498QBQ0_9MYCO Uncharacterized protein OS=Mycobacterium innocens OX=2341083 GN=LAUMK13_04669 P E=4 SV=1

SEQ ID NO: 22920 - protein, 142 aa, Mycobacterium innocens
  misc_feature (1)..(142): tr|A0A498QGK8|A0A498QGK8_9MYCO Uncharacterized protein OS=Mycobacterium innocens OX=2341083 GN=LAUMK13_04673 P E=4 SV=1
MPTSRGGSEFYTPDLIANKCANLHGHTIYVSVTLVGDSLDEQYFLLDTDLLEQAFRPILDEFDFAFVVDRHDPLYEDIAAVVHKGGLKLCTVDFSPTFEGLVRHFYDRLQAVIAEKGLADQLRIKEMKVLGELTVEATYSGE

SEQ ID NO: 22921 - protein, 179 aa, Mycobacterium interjectum
  misc_feature (1)..(179): tr|A0A1X1WJW2|A0A1X1WJW2_9MYCO Uncharacterized protein OS=Mycobacterium interjectum OX=33895 GN=AWC11_16865 PE =4 SV=1
MSHIAFDDDVYVATMHRADAPSGRTARFHMRKLFDELPCCHRSWANPGKRFFLHGCERAFEVEFACAETELGTGLVVDSGAVGEIRSALRYQFDHTTLIAEDDPQRDLFELLAERGVIDLRIMENTGMEGSAAWAFETVERIVALATGGRVWVSRIEARESRNNVVTLTAGPVTAGGWA

SEQ ID NO: 22922 - protein, 171 aa, Mycobacterium intermedium
  misc_feature (1)..(171): tr|A0A1E3SCB2|A0A1E3SCB2_9MYCO Uncharacterized protein OS=Mycobacterium intermedium OX=28445 GN=BHQ20_15790 PE =4 SV=1
MMLSDAAHTATIHRDDAPIGRSARFHLRKRFADLPCCYRSWARQGKHVYLHGYELTFDIEFACAETEPDSDVVLNHGVLKDVCKELRRQFDHTTLIAADDPHLKLFEMLAERGVIDLRIMISTGMQASAAWVFDTVDSIVLQATAGRVWVSRVIARESRNNVITLTAEPPV

SEQ ID NO: 22923 - protein, 99 aa, Mycobacterium kansasii
  misc_feature (1)..(99): tr|X7YTC2|X7YTC2_MYCKA 6-pyruvoyl tetrahydropterin synt hase family protein OS=Mycobacterium kansasii 662 OX=12 99326 GN=I545_5778 PE=4 SV=1
MKTVFDTNELAVIVEPIISDLDHSFIIWDQDPIYDDFLKVCELADVADKVYTVDFNPTIEGLVEHIYERVNSQLRLSGCVLRRVELQCASTLKASYGLN

SEQ ID NO: 22924 - protein, 99 aa, Mycobacterium kansasii; identical to SEQ ID NO: 22923
  misc_feature (1)..(99): tr|A0A1V3X7F1|A0A1V3X7F1_MYCKA 6-pyruvoyl tetrahydropte rin synthase family protein OS=Mycobacterium kansasii O X=1768 GN=BZL29_4579 PE=4 SV=1

SEQ ID NO: 22925 - protein, 171 aa, Mycobacterium lacus
  misc_feature (1)..(171): tr|A0A1X1XXH8|A0A1X1XXH8_9MYCO Uncharacterized protein OS=Mycobacterium lacus OX=169765 GN=AWC15_05240 PE=4 SV =1
MSNTCVRVRHEFSAGHRILGLTGAGEKCRNIHGHNFTCWWMFEQGSGWPPRVEFGAVKAQLRAMVDELFDHAFVVHEDDDFLDYLIRHDLKRYTLRDRPTTEAIAAAIGQLTEERIPDLDLVYVQLTEGSNNEAIYLAHDRGPKFAYPPGDLMVNAPSVQPAGVLAAEVAR

SEQ ID NO: 22926 - protein, 159 aa, Mycobacterium marinum
  misc_feature (1)..(159): tr|A0A2Z5YIE5|A0A2Z5YIE5_MYCMR Uncharacterized protein OS=Mycobacterium marinum OX=1781 GN=MMRN_35470 PE=4 SV= 1
MTDTAEIYCEFTFESAHRLPNVPAGHKCGRLHGHSYRARIYIEGPVDPRAGWIVDFGKIKDACKPVIARLDHYYLNEIDGLENPTSEHLSMWIWRELATLLPMMSAVSVSETCSSGCMYRGPRVSASESDVEYPSMRRRPEAAGEQVGVSGLHQPISSR

SEQ ID NO: 22927 - protein, 159 aa, Mycobacterium marinum
  misc_feature (1)..(159): tr|B2HIP5|B2HIP5_MYCMM 6-pyruvoyl tetrahydrobiopterin s ynthase OS=Mycobacterium marinum (strain ATCC BAA-535 / M) OX=216594 GN=MMAR_3376 PE=4 SV=1
MTDTAEIYCEFTFESAHRLPNVPAGHKCGRLHGHSYRARIYVEGPVDPRAGWIVDFGKIKDACKPVIARLDHYYLNEIDGLENPTSEQLSMWIWRELATLLPMMSAVSVSETCSSGCMYRGPRVSASESDVEYPSTRRRPEAAGEQVGVSGLRQPISSR

SEQ ID NO: 22928 - protein, 160 aa, Mycobacterium montefiorense
  misc_feature (1)..(160): tr|A0A2R5H9R6|A0A2R5H9R6_9MYCO Uncharacterized protein OS=Mycobacterium montefiorense OX=154654 GN=MmonteBS_39 620 PE=4 SV=1
MLQSILEIDPHGGGTTTAVVESEPLIWTHAQESTFAQNAGQRPNSAIEVFKKFTFEAADYLPHVAEGHKGANLHCHTFTLIVGVKGVPDPHSGFVVDFAAIDAAVRPLINQLDRNLMNHLIENPTCENLAAWLWSRLRISGLSSLEIWDRPTSGCKMTAA

SEQ ID NO: 22929 - protein, 173 aa, Mycobacterium nebraskense
  misc_feature (1)..(173): tr|A0A1X1Z1A6|A0A1X1Z1A6_9MYCO Uncharacterized protein OS=Mycobacterium nebraskense OX=244292 GN=AWC17_13535 P E=4 SV=1
MHNTISVDGARVATMHRADAPLGRTARFHLRRLFDNLPCCHRSWANQGKRFFLHGYERAFDIEFACAETEPGTDTVVDEGTLDEVRTTLRDQFDHTTLIAVDDPQRDLFELLADRGVIDLRIMDDTGMAGTAAWTFETVESIVGLATGGRVWVSRIKARESRNNVVTLTAGPV

SEQ ID NO: 22930 - protein, 179 aa, Mycobacterium paraense
  misc_feature (1)..(179): tr|A0A1X2AD40|A0A1X2AD40_9MYCO Uncharacterized protein OS=Mycobacterium paraense OX=767916 GN=AWB90_11440 PE=4 SV=1
MSHIAFEDDVYVATIHRADAPNGRTARYHMRKHFGELPCCHRSWANPGKRFFLHGCERTFEIEFACAQTELGTGLVVDVGAVGEIRSALRYQFDHTTLIAEDDPQRDLFELLAERGVVDLRIMENTGMEGSAAWAFETAERIVALATGGRVWVSRIEARESRNNVVTLIAGPVTAGGWA

SEQ ID NO: 22931 - protein, 173 aa, Mycobacterium paraffinicum
  misc_feature (1)..(173): tr|A0A1Q4HVT0|A0A1Q4HVT0_9MYCO Uncharacterized protein OS=Mycobacterium paraffinicum OX=53378 GN=BRW65_12230 P E=4 SV=1
MRNTAFADGARVATIHRADAPLGRTARFHLRRLFDNLPCCHRSWANHGKRFFLHGYERAFDIEFACAETEADTDAVIDEATLDEVKTALRGQFDHTTLIAVDDPQRDLFELLADRGVIDLRIMDDTGMAGTAAWTFETVEGIVARATGGRVWVSRIKARESRNNVVTLTAGPV

SEQ ID NO: 22932 - protein, 177 aa, Mycobacterium paragordonae
  misc_feature (1)..(177): tr|A0A4R5WLQ9|A0A4R5WLQ9_9MYCO Uncharacterized protein OS=Mycobacterium paragordonae OX=1389713 GN=EUA02_20250 PE=4 SV=1
MPEIAFAGPAQTATMHRDDAPVGRTARFHLRKRFGGLHCCRRSWSDNGKRLFLHGYALSFEIEFACAETETESGQVLGSDCLDDIRAALAAQFAHTTLIATNDPQRDLFELLAERDLVDMRIVDSTGLEASAAWVFETVETIVAQATGGRVWVSRIDAQESGSRVLTLTALPVKDWV

SEQ ID NO: 22933 - protein, 177 aa, Mycobacterium paragordonae
  misc_feature (1)..(177): tr|A0A386UCC5|A0A386UCC5_9MYCO Uncharacterized protein OS=Mycobacterium paragordonae OX=1389713 GN=C0J29_29500 PE=4 SV=1
MPEIAFAGPAQTATMHRDDAPVGRTARFHLRKRFGGLHCCRRSWSDNGKRLFLHGYALSFEIEFACAETETESGQVLGSDCLDDIRAALAAQFAHTTLIATNDPQRDLFELLAERDLVDMRIVDSTGLEASAAWVFETVERIVAQATGGRVWVSRIDAQESGSRVLTLTALPVKDWV

SEQ ID NO: 22934 - protein, 173 aa, Mycobacterium paraseoulense
  misc_feature (1)..(173): tr|A0A1X0IBU4|A0A1X0IBU4_9MYCO Uncharacterized protein OS=Mycobacterium paraseoulense OX=590652 GN=BST39_11355 PE=4 SV=1
MRNTVFADGVRVATMHRADAPLGRTARFHLRRLFDNLPCCHRSWANQGKRFFLHGYERAFDIEFACAETEAGTGAVIDDGTLDEVNTALRDQFDHTTLIAVDDPQRDLFELLADRGVIDLRIMDDTDMAGTAAWTFETVESIVGPATGGRVWVSRIKARESRNNVVTLTAGPV

SEQ ID NO: 22935 - protein, 146 aa, Mycobacterium persicum
  misc_feature (1)..(146): tr|A0A1X0L8A6|A0A1X0L8A6_9MYCO Uncharacterized protein OS=Mycobacterium persicum OX=1487726 GN=LAUMK42_04789 P E=4 SV=1
MSHTIEKTFRFDAGHRSLGFNYKKEETIHGHTWQLRLVLEYGDQLDDMKTVFDTNELAVIVEPIINDLDHSFIIWDQDPIYDDFLKVCELADVADKVYTVDFNPTIEGLVEHIYQRVNSQLRLSGCVLRRVELQCASTLKASYGLN

SEQ ID NO: 22936 - protein, 144 aa, Mycobacterium persicum
  misc_feature (1)..(144): tr|A0A498PLF6|A0A498PLF6_9MYCO Uncharacterized protein OS=Mycobacterium persicum OX=1487726 GN=LAUMK42_04791 P E=4 SV=1
MPTSRGGSEFYTPDLIANKCANIHGHTIFVSVTLVGDSLDEQYFLLDTDLLEQAFRPILDEFDFAFVVDRHDPLYEDIAAVVHKGGLKLCTVDFSPTFEGLVRHFYDRLQAVIAEKGLADQLRIKEMKVLGELTVEATYSGEGE

SEQ ID NO: 22937 - protein, 146 aa, Mycobacterium pseudokansasii
  misc_feature (1)..(146): tr|A0A498R0R7|A0A498R0R7_9MYCO Uncharacterized protein OS=Mycobacterium pseudokansasii OX=2341080 GN=LAUMK142_ 05035 PE=4 SV=1
MGHTIEKTFRFDAGHRSLGFNYKKEETIHGHTWQLRLILEYGDQLDDMKTVFDTNELAVIVEPIISDLDHSFIIWDQDPIYDEFLKVCELADVADKVYTVDFNPTIEGLVEHIYERVNSQLRLSGCVLRRVELQCASTLKASYGLN

SEQ ID NO: 22938 - protein, 163 aa, Mycobacterium pseudokansasii
  misc_feature (1)..(163): tr|A0A498QY61|A0A498QY61_9MYCO 6-carboxy-5,6,7,8-tetrah ydropterin synthase OS=Mycobacterium pseudokansasii OX= 2341080 GN=queD PE=4 SV=1
MPYTIKQTIRLEMGHRTWTHDMRTSRGGSELYTPELVANKCANLHGHTIFVSVTLSGDSLDEQYFLLDTDLLENAFRPILDEVDHAFVVDRKDPLYEDIAAVARKGGLKLCTVDFSPTFEALVRHFYDRLQSVIQEKGLADQLRIKEMKVLGEQTVEATYCGE

SEQ ID NO: 22939 - protein, 163 aa, Mycobacterium riyadhense
  misc_feature (1)..(163): tr|A0A1X2D8P9|A0A1X2D8P9_9MYCO Uncharacterized protein OS=Mycobacterium riyadhense OX=486698 GN=AWC22_14065 PE =4 SV=1
MAYTIKQTIRLEMGHRTWTHDMRTSRGGSELYTPELVANKCANLHGHTIFVSVTLTGDSLDEQYFLLDTDLLENAFRPILDEVDHAFVVDKNDPLYEDIAAITRKGGLKLCTVDFSPTFEALVRHFYDRLQAVIDEKGLADQLRIKEMKVLGEQTVEATYSGS

SEQ ID NO: 22940 - protein, 153 aa, Mycobacterium riyadhense
  misc_feature (1)..(153): tr|A0A1X2BR02|A0A1X2BR02_9MYCO Uncharacterized protein OS=Mycobacterium riyadhense OX=486698 GN=AWC22_02185 PE =4 SV=1
MGRTARFHLRKRFGDLPCCHRSWSRQGKRFFLHGYERTFEVEFACAETAPGTGLVVDTRCLKDLRAALRRQFDHTTLIAADDPQLDLFQMMADQGVIDLRIMDSTGMEACAAWVFDTVERIVGKATEGRVWVSRIEARENRNNVITLTAEPAD

SEQ ID NO: 22941 - protein, 173 aa, Mycobacterium scrofulaceum
  misc_feature (1)..(173): tr|A0A1A2UH75|A0A1A2UH75_MYCSC Uncharacterized protein OS=Mycobacterium scrofulaceum OX=1783 GN=A5679_10250 PE =4 SV=1
MHNTVFADGSRVATIHRADAPLGRTARFHLRRLFDNLPCCHRSWANQGKRFFLHGYERAFDIEFACAETEAGTDAVIDEGTLDEVKAALRGQFDHTTLIAVDDPQRDLFELLAERGVIDLRIMDDTGMAGTAAWTFETVESIVARATGGRVWVSRIKARESRNNVVTLTAGPV

SEQ ID NO: 22942 - protein, 130 aa, Mycobacterium simiae
  misc_feature (1)..(130): tr|A0A5B1BSE4|A0A5B1BSE4_MYCSI 6-carboxytetrahydropteri n synthase OS=Mycobacterium simiae OX=1784 GN=F0Q45_120 90 PE=4 SV=1
MRDVSFSASHRLHSPALTDAENVHIFGKCNNANGHGHNYLLRVALKGELDPVTGMVSNLTKLADLIDRTIKVHFDHTHLNLDTDLFKDRVPTSENIAIVCWELLRSTSIGDMLHYVEVQETSKNRVRFAG

SEQ ID NO: 22943 - protein, 163 aa, Mycobacterium simiae
  misc_feature (1)..(163): tr|A0A5B1BLE4|A0A5B1BLE4_MYCSI Uncharacterized protein OS=Mycobacterium simiae OX=1784 GN=F0Q45_14745 PE=4 SV= 1
MAYTIKQTIRLEMGHRTWTHDMRTSRGGSQLYTPELIANKCANLHGHTIFVSVTLTGDSLDEQYFLLDTDLLENAFRPILDEVDHAFVVDRKDPLYEDIAAVAKKGGLKLCAVDFSPTFEALVRHFYDRLQSVIDEKGLADQLRIKEMKVLGEQTVEATYCGE

SEQ ID NO: 22944 - protein, 173 aa, Mycobacterium sp.
  misc_feature (1)..(173): tr|A0A1A2JL25|A0A1A2JL25_9MYCO Uncharacterized protein OS=Mycobacterium sp. E3339 OX=1834146 GN=A5702_16740 PE =4 SV=1
MGNTIYLDGARVATMHRADAPLGRTARFHLRKLFDNLPCCHRSWANQGKRFFLHGFERAFDIEFACAETEPETEAVIDEGTLDEVKTALRDQFDHTTLIAVDDPQRDLFELLADRGVIDLRIMDDTGMAGTAAWTFETVERIVERATGGRVWVSRIKARESRNNVVTLTAGPV

SEQ ID NO: 22945 - protein, 179 aa, Mycobacterium sp.
  misc_feature (1)..(179): tr|A0A1X2DL65|A0A1X2DL65_9MYCO Uncharacterized protein OS=Mycobacterium sp. IEC1808 OX=1743230 GN=AWB92_22345 PE=4 SV=1
MNHIAFDDDVYVATIHRADTPIGRAARFHMRKLFDEFPCCHRSWANRGKRFFLHGYERAFEIEFACAETERGTGLVVDGRAIAEVRSALRYQFDHTTLIAQDDPQRDLFELLAERGVVDLRIMENTGMEGSAAWVFETAERIVALATGGRVWVSRIQARESRNNVVTLTAGPIRAAGWA

SEQ ID NO: 22946 - protein, 163 aa, Mycobacterium szulgai
  misc_feature (1)..(163): tr|A0A1X2FME8|A0A1X2FME8_MYCSZ Uncharacterized protein OS=Mycobacterium szulgai OX=1787 GN=AWC27_17125 PE=4 SV =1
MAYTIKQTIRLEMGHRTWTHDMRTSRGGSELFTPELVANKCANLHGHTIFVSVTLTGDTLDDQYFLLDTDLLENAFRPILDEVDHAFVVDKNDPLYEDIAAITRKGGLKLCTVDFSPTFEALVRHFYDRLQAVIEEKGLSDQLRIKEMKVLGEQTVEATYSGA

SEQ ID NO: 22947 - protein, 146 aa, Mycobacterium szulgai
  misc_feature (1)..(146): tr|A0A1X2FL20|A0A1X2FL20_MYCSZ Uncharacterized protein OS=Mycobacterium szulgai OX=1787 GN=AWC27_17130 PE=4 SV =1
MTRTIEKTFRFDAGHRSLGFDYKKEETIHGHTWELKLILESELELDGMKTVFDTNELAVVVRPIIDALDHSFIIWTEDPIFDEFVKLCELADVADKVYPVDFNPTIEGLVQHIYEQVSGKLHVDGCVLKRAELRCASTLNASYGIN

SEQ ID NO: 22948 - protein, 160 aa, Mycobacterium ulcerans
  misc_feature (1)..(160): tr|A0PNB2|A0PNB2_MYCUA 6-pyruvoyl tetrahydrobiopterin s ynthase OS=Mycobacterium ulcerans (strain Agy99) OX=362 242 GN=MUL_1264 PE=4 SV=1
MMDTAEIYCEFTFESAHRLPNVPAGHKCGRLHGHSYRARTYVEGPVDPRAGWIVDFGKIKDACKPVIARLDHYYLNEIDGLENPTSEQLSMWIWRELATLLPMMMSAVSVSETCSSGCMYRGPRVSASESDVEYPSMRRRPEAAGEQVGVSGLRQPICSR

SEQ ID NO: 22949 - protein, 163 aa, Mycobacteroides chelonae
  misc_feature (1)..(163): tr|A0A1S1KTJ8|A0A1S1KTJ8_MYCCH 6-pyruvoyl tetrahydrobio pterin synthase OS=Mycobacteroides chelonae OX=1774 GN= BKG75_25595 PE=4 SV=1
MSFQASGRATTRTVTVRHNFETAHRLPILGGKCVNLHGHSWWTEITVAGALNEQGILVDFGILKARLRDWIDANLDHGAMLGHADPLVPALLAQRSKLFRFGLDAPSHGLEWPTVENVSELLARVTAGFIAEAGWSNVTVHRVKVTETHVNAAELTEWPSLNA

SEQ ID NO: 22950 - protein, 345 aa, Mycobacteroides salmoniphilum
  misc_feature (1)..(345): tr|A0A4V3HYZ8|A0A4V3HYZ8_9MYCO Isopentenyl-diphosphate Delta-isomerase OS=Mycobacteroides salmoniphilum OX=404 941 GN=idi PE=3 SV=1
MTDDVVLLDDAGRACGIAPKATVHDDNTPLHLAFSCYLFDPSYRFVLLTQRAWSKRTWPGIWSNSCCGHPPPGVDISEAIIERVHYELGVQMSSPQLALPDFRYRAAMENGVVENEVCPVYVGTIAEVPTPNPDEVAGYRWLPWTQLCDEVLADTRPVSPWCKLQVAKLAQIRNLHSGSRELVPFQASGRATTRTVTVRHNFETAHRLPILGGKCVNLHGHSWWTEITVAGALNEQGILVDFGILKARLRDWIDANLDHGAMLGHADPLVPALLAERSKLFRFGLDAPSHGLEWPTVENVSELLARVTAGFIAEAGWSNVTVHRVKVTETHVNAAELTEWPSLSA

SEQ ID NO: 22951 - protein, 345 aa, Mycobacteroides salmoniphilum
  misc_feature (1)..(345): tr|A0A4R8SQ84|A0A4R8SQ84_9MYCO Isopentenyl-diphosphate Delta-isomerase OS=Mycobacteroides salmoniphilum OX=404 941 GN=idi PE=3 SV=1
MTEDVVLLDDAGRACGIAPKATVHDDNTPLHLAFSCYLFDPSYRFVLLTQRAWSKRTWPGAWSNSCCGHPPPGVDIAEAIIERVHYELGVQMSSPQLALPDFRYRAAMENGVVENEVCPVYVGTIADVPTLNPDEVAGYRWLPWTQLCDEVLTGTRPVSPWCKLQVAKLAQIRNLHSGSSELVPFQASGRATTRTVTVRHNFETAHRLPILGGKCVNLHGHSWWTEITVAGALNEQGILVDFGILKARLRDWIDANLDHGAMLGHADPLVRALRAERSKLFRFGLDAPSHGLEWPTVENVSELLARVTAGFIAEAGWSNVTVHRVKVTETHVNAAELTESPSWNA

SEQ ID NO: 22952 - protein, 150 aa, Mycolicibacillus koreensis
  misc_feature (1)..(150): tr|A0A1E3T955|A0A1E3T955_9MYCO 6-carboxy-5,6,7,8-tetrah ydropterin synthase OS=Mycolicibacillus koreensis OX=10 69220 GN=B8W67_02340 PE=4 SV=1
MSTTDRRTCTRRLHFSAGHRVMGHESKCATAHGHNYLVYVTAEAPHLDSVGRVIDFSVLKSAVGTWIDENWDHTFLVSSDDTDTITALKTMPGAKEPFICPFNPTAEEIASYLLGTVCPSVLDHTDVTITKVEVRETENCFAEAQSNQID

SEQ ID NO: 22953 - protein, 190 aa, Mycolicibacter arupensis
  misc_feature (1)..(190): tr|A0A5B1M4J0|A0A5B1M4J0_9MYCO 6-carboxytetrahydropteri n synthase OS=Mycolicibacter arupensis OX=342002 GN=F04 02_19860 PE=4 SV=1
MGSVGPNSPSVCCRCKTERSLTAEVATQLVIRRSSSSTSSALVEGVDEQAELVIWSSQDPPVSLTVSKQFGFSASHTLSGLPDGHKCSRLHGHSYRVRVDITGERDAVGFVIDYGELDWVRDLIETRLDHRHLNEAVDFNPTAENIAEWLCFRVGEWIDGRPEADRISSIGVAVSETQATWATSTLERRR

SEQ ID NO: 22954 - protein, 91 aa, Mycolicibacterium doricum
  misc_feature (1)..(91): tr|A0A1X1T2S7|A0A1X1T2S7_9MYCO Uncharacterized protein OS=Mycolicibacterium doricum OX=126673 GN=AWC01_14020 P E=4 SV=1
MKSIKALLEMQFDHTVLVAQDDPLREEFERLASLGAANLRVMEDTSLEGSARWIHDAVTPIVEVETSGRVRISRIEVRESAKNTVLLSLGP

SEQ ID NO: 22955 - protein, 129 aa, Mycolicibacterium mucogenicum
  misc_feature (1)..(129): tr|A0A1A0MNB3|A0A1A0MNB3_9MYCO Uncharacterized protein OS=Mycolicibacterium mucogenicum OX=56689 GN=A5642_2244 0 PE=4 SV=1
MSLTVSKQFGFSASHTLSGLPDGHKCSRLHGHSYRVRVDITGERDAVGFVIDYGELDWVRDLIETRLDHRHLNEAVDFNPTAENIAEWLCFRVGEWIDGRPEADRISSIGVAVSETQATWATSTLERRR

SEQ ID NO: 22956 - protein, 129 aa, Mycolicibacterium obuense
  misc_feature (1)..(129): tr|A0A0M2K089|A0A0M2K089_9MYCO Uncharacterized protein OS=Mycolicibacterium obuense OX=1807 GN=WN67_19330 PE=4 SV=1
MSLTVSKQFGFSASHTLSGLPDGHKCSRLHGHSYRVRVDITGERDAVGFVIDYGELDWVRDLIETSLDHRHLNEAVDFNPTAENIAEWLCFRVDEWIDGRPEADRISSIGVAVSETQATWATSTLERRR

SEQ ID NO: 22957 - protein, 137 aa, Myroides guanonis
  misc_feature (1)..(137): tr|A0A1I3NDL7|A0A1I3NDL7_9FLAO 6-carboxy-5,6,7,8-tetrah ydropterin synthase OS=Myroides guanonis OX=1150112 GN= SAMN04487893_10350 PE=3 SV=1
MKVTVSRKAHFNAAHRLYRKDWTDEMNNRVFGKCNNPNFHGHNYELIVHVTGDIDVETGFVMDLKTLSDIIYDEVEVAFDHKNLNLDVAEFRDLNPTAENIAVVIWSKLRKKIDDDKKIKVELYETARNFVSFDGDE

SEQ ID NO: 22958 - protein, 150 aa, Myroides guanonis
  misc_feature (1)..(150): tr|A0A1I3T5C9|A0A1I3T5C9_9FLAO 6-pyruvoyltetrahydropter in/6-carboxytetrahydropterin synthase OS=Myroides guano nis OX=1150112 GN=SAMN04487893_11270 PE=4 SV=1
MSKIRITKQFSFETGHALYGYDGKCRNVHGHSYKLRVTVIGEPIADASNVKFGMVIDFTDLKKIVLEEVVDVFDHATVFNKNTPHIELAKELQDRGHHVILVDYQPTSENMVIDFAEKIKHRLPKGLELYSLRLQETDSSYAEWYQSDNL

SEQ ID NO: 22959 - protein, 136 aa, Myroides indicus
  misc_feature (1)..(136): tr|A0A4R7ELG2|A0A4R7ELG2_9FLAO 6-carboxy-5,6,7,8-tetrah ydropterin synthase OS=Myroides indicus OX=1323422 GN=C 8P70_1573 PE=3 SV=1
MKLTVSRKAHFNAAHRLFRKDWSDEKNQKVFGKCNNPNYHGHNYELIVHVTGEIDEETGFVMDLKELSDLIKNEIEEYLDHKNLNLDVPEFADLNPTAENIAVVIWKKLRSFIETDKTLEIVLYETPRNFVSYRGE

SEQ ID NO: 22960 - protein, 150 aa, Myroides indicus
  misc_feature (1)..(150): tr|A0A4V3E9A9|A0A4V3E9A9_9FLAO 6-pyruvoyltetrahydropter in/6-carboxytetrahydropterin synthase OS=Myroides indic us OX=1323422 GN=C8P70_10242 PE=4 SV=1
MPKIRITKQFNFETGHALYGYDGKCRNVHGHSYKLAVTVIGTPIEDTDNVKYGMVIDFGDLKKIVKEEIVDVFDHATVFNQNTPHVELAKELKERGHHVILVDYQPTSENMVIDFANKIKRRLPHGIDLYALRLQETESSYAEWYQSDNL

SEQ ID NO: 22961 - protein, 137 aa, Myroides marinus
  misc_feature (1)..(137): tr|A0A165RY89|A0A165RY89_9FLAO 6-carboxy-5,6,7,8-tetrah ydropterin synthase OS=Myroides marinus OX=703342 GN=AV 926_11545 PE=3 SV=1
MRLTVSRKAHFNAAHRLHRKEWSDEKNQLIFGKCNNPNFHGHNYELIVQVTGELDQETGFVMDLKELSDLIKSEVEERFDHKNLNLDVPEFFELIPTAENIAVVIWQLLRPFIPSDKELEIILYETARNFVSFKGEN

SEQ ID NO: 22962 - protein, 150 aa, Myroides marinus
  misc_feature (1)..(150): tr|A0A165QKU7|A0A165QKU7_9FLAO 6-pyruvoyl tetrahydropte rin synthase OS=Myroides marinus OX=703342 GN=AV926_014 80 PE=4 SV=1
MPKIRITKQFTFETGHALYGYDGKCRNVHGHSYKLAVTVIGTPIEDTTNVKYGMVIDFGDLKKIVKGDIVDVFDHATVFNKNTPHIELAKELEERGHHVILVDYQPTSENMVIDFAEKIKSKLPEGIELYSLRLQETESSYAEWHQSDNL

SEQ ID NO: 22963 - protein, 150 aa, Myroides odoratimimus
  misc_feature (1)..(150): tr|A0A0E1ZCG3|A0A0E1ZCG3_9FLAO 6-pyruvoyl tetrahydropte rin synthase/QueD family protein OS=Myroides odoratimim us CCUG 10230 OX=883150 GN=HMPREF9712_00924 PE=4 SV=1
MPKIRITKQFTFETGHALYGYDGKCRNVHGHSYKLAVTVIGTPIEDTNNVKYGMVIDFGDLKKIVKGDIVDVFDHATVFNKNTPHIELAKELEERGHHVILVDYQPTSENMVIDFAQKIKSKLPEGIELYSLRLQETESSYAEWHQSDNL

SEQ ID NO: 22964 - protein, 150 aa, Myroides odoratimimus; identical to SEQ ID NO: 22963
  misc_feature (1)..(150): tr|A0A0S7E759|A0A0S7E759_9FLAO 6-pyruvoyl tetrahydropte rin synthase OS=Myroides odoratimimus OX=76832 GN=AS202 _06710 PE=4 SV=1

SEQ ID NO: 22965 - protein, 150 aa, Myroides odoratus
  misc_feature (1)..(150): tr|A0A378U2J4|A0A378U2J4_MYROD 6-pyruvoyl tetrahydropte rin synthase/QueD family protein OS=Myroides odoratus O X=256 GN=NCTC11036_01415 PE=4 SV=1
MSKIRITKQFTFETGHALYGYDGKCRNVHGHSYKLAVTVIGTPITDSSNVKFGMVIDFSDLKKIVKEEIVDIFDHATVFNKNTPHVELAQELKDRGHHVILVDYQPTSENMVIDFANKIKNRLPENLALFSLRLQETDSSYAEWYQSDNL

SEQ ID NO: 22966 - protein, 138 aa, Myroides odoratus
  misc_feature (1)..(138): tr|A0A378RS09|A0A378RS09_MYROD 6-carboxy-5,6,7,8-tetrah ydropterin synthase OS=Myroides odoratus OX=256 GN=queD PE=3 SV=1
MRLTVSRKAHFNAAHRLHRPDWSDEQNQTVFGKCNNPNFHGHNYELIVHVTGEVDPETGFVMDLKILSDLIKSEIEEAFDHKNLNLDVIEFKNLIPTAEYIAVVIWQKLRPFIEKDKDLEVVLYETSRNFVTFKGEGI

SEQ ID NO: 22967 - protein, 137 aa, Myroides phaeus
  misc_feature (1)..(137): tr|A0A1G8H6I6|A0A1G8H6I6_9FLAO 6-pyruvoyltetrahydropter in/6-carboxytetrahydropterin synthase OS=Myroides phaeu s OX=702745 GN=SAMN05421818_1448 PE=4 SV=1
MKLRVSRKAHFNSAHRLFRKEWSDEKNQRIFGKCNNPNYHGHNYELIVHVTGELDLETGFVMDLKELSDLIKREIEETFDHKNLNLDVPEFADLIPSAENIAVVIWQKLRPFIPQDKALEVELYETARNFVSYKGEN

SEQ ID NO: 22968 - protein, 150 aa, Myroides phaeus
  misc_feature (1)..(150): tr|A0A1G8E554|A0A1G8E554_9FLAO 6-pyruvoyltetrahydropter in/6-carboxytetrahydropterin synthase OS=Myroides phaeu s OX=702745 GN=SAMN05421818_10956 PE=4 SV=1
MPKIRITKQFTFETGHALYGYDGKCRNVHGHSYKLGVTVIGTPIDDINNVKYGMVIDFGDLKKIVKEDIVDVFDHATVFNKNTPHVELAKELKDRGHHVILVDYQPTSENMVIDFAAKIKSRLPEGIELYSLRLQETESSYAEWHQSDNL

SEQ ID NO: 22969 - protein, 150 aa, Myroides profundi
  misc_feature (1)..(150): tr|A0A0B5RTU1|A0A0B5RTU1_9FLAO 6-pyruvoyl-tetrahydropte rin synthase OS=Myroides profundi OX=480520 GN=MPR_0251 PE=4 SV=1
MPKIRITKQFTFETGHALYGYDGKCRNVHGHSYKLAVTVIGTPIEDTSNVKYGMVIDFGDLKKIVKGDIVDVFDHATVFNKNTPHIELAKELEERGHHVILVDYQPTSENMVIDFAQKIKSKLPDGIELYSLRLQETESSYAEWHQSDNL

SEQ ID NO: 22970 - protein, 137 aa, Myroides profundi
  misc_feature (1)..(137): tr|A0A0B5S091|A0A0B5S091_9FLAO 6-carboxy-5,6,7,8-tetrah ydropterin synthase OS=Myroides profundi OX=480520 GN=M PR_2924 PE=3 SV=1
MRLTVSRKAHFNAAHRLHRKEWSEEKNQLVFGKCNNPNYHGHNYELIVQVTGELDPETGFVMDLKELSDLIKSEIEENFDHKNLNLDVPEFLELIPTAENIAVVIWQKLRPFINDDKELEVILYETARNFVSFKGDY

SEQ ID NO: 22971 - protein, 139 aa, Myxococcaceae bacterium
  misc_feature (1)..(139): tr|A0A4Q5ZME4|A0A4Q5ZME4_9DELT 6-carboxy-5,6,7,8-tetrah ydropterin synthase OS=Myxococcaceae bacterium OX=24842 52 GN=queD PE=3 SV=1
MTGRRPPSGDCPLKKTPLITEISKEFTFEAAHRLPNVPEGHKCSRVHGHSYRIEITLRGPVHPQFGWIVDFAELNAAWQPLHAQLDHRLLNDVPGLENPTSELLAAWLFERVNVPGTTVARIRVAETCTSSCTVYAAEG

SEQ ID NO: 22972 - protein, 128 aa, Myxococcaceae bacterium
  misc_feature (1)..(128): tr|A0A4V2AUD1|A0A4V2AUD1_9DELT 6-carboxy-5,6,7,8-tetrah ydropterin synthase OS=Myxococcaceae bacterium OX=24842 52 GN=queD PE=3 SV=1
MKKTPLITEISKEYTFEAAHRLPHVPEGHKCSRVHGHSYRIEITLQGPLHPQLGWIVDFAEMNAAWQPLHAQLDHRLLNDVPGLENPTSELLAAWVFEKLQVPAGTRIARVRVAETCTSSCTVFPQED

SEQ ID NO: 22973 - protein, 124 aa, Myxococcales bacterium
  misc_feature (1)..(124): tr|A0A3B8LHK0|A0A3B8LHK0_9DELT Uncharacterized protein OS=Myxococcales bacterium OX=2026763 GN=DCE42_18140 PE= 4 SV=1
MFIVAEERIFPATHRILLPTGEWEPLHEHDWLLKIYIRCKELDDKQLVIDFLDLQRYMDEALAPYIGKDIGEQPPFNEGISPTTEYFAWVLYQSLAPKIDDERIQLYKVELREAPTSWGIYEVA

SEQ ID NO: 22974 - protein, 172 aa, Myxococcales bacterium
  misc_feature (1)..(172): tr|A0A2E6VRN8|A0A2E6VRN8_9DELT Uncharacterized protein OS=Myxococcales bacterium OX=2026763 GN=CMH56_07610 PE= 4 SV=1
MYKILKSIDIDFAHHIRGHQGACINIHGHTWKFEVGVQAKELNEDGFVVDFSKLKKSVLMPCHQLLDHALAIGETSISEIGEFLSPMGEKLVATRADAKPTPDNWEFHGAKGVYPGGMKVAVFPFSPTSEKLARWLYDAASAELADDRVQISFARIYETLHPVQAVAEYWPE

SEQ ID NO: 22975 - protein, 120 aa, Myxococcus fulvus
  misc_feature (1)..(120): tr|F8C6E5|F8C6E5_MYXFH 6-carboxy-5,6,7,8-tetrahydropter in synthase OS=Myxococcus fulvus (strain ATCC BAA-855 / HW-1) OX=483219 GN=LILAB_12130 PE=3 SV=1
MNIFKEFTFEAAHRLPNVPPGHKCSRLHGHSYRVEIHVSGPVGEQSGWVMDFSDLKEAFEPLRLKLDHYYLNEIEGLENPTSENLSRWIWKRLRPGLPLLSRVVVRETCTSGCVYQGEDD

SEQ ID NO: 22976 - protein, 132 aa, Myxococcus fulvus
  misc_feature (1)..(132): tr|A0A511T2G2|A0A511T2G2_MYXFU 6-carboxy-5,6,7,8-tetrah ydropterin synthase OS=Myxococcus fulvus OX=33 GN=MFU01 _33720 PE=3 SV=1
MEPVSKPKVSLVTEISREFTFEAAHFLPNVPPGHKCSRVHGHSYRVEVTVRGPVDPHYGWVVDFATLTEAWQAMHAQLDHRLLNDVPGLENPTSELLAAWVFGKLSFPTAKVVKIRVAETCTSQCVVYPEEG

SEQ ID NO: 22977 - protein, 120 aa, Myxococcus hansupus
  misc_feature (1)..(120): tr|A0A0H4X695|A0A0H4X695_9DELT 6-carboxy-5,6,7,8-tetrah ydropterin synthase OS=Myxococcus hansupus OX=1297742 G N=A176_007686 PE=3 SV=1
MDIFKEFTFEAAHRLPNVPPGHKCSRLHGHSYRVEVHVRGPVGEQSGWVMDFSDIKESFEPVRLKLDHYYLNEIEGLENPTSENLSRWIWKRLRPGLPLLSRVVVRETCTSGCIYQGEDD

SEQ ID NO: 22978 - protein, 120 aa, Myxococcus macrosporus; identical to SEQ ID NO: 22975
  misc_feature (1)..(120): tr|A0A250K6C0|A0A250K6C0_9DELT 6-carboxy-5,6,7,8-tetrah ydropterin synthase OS=Myxococcus macrosporus DSM 14697 OX=1189310 GN=MYMAC_006563 PE=3 SV=1

SEQ ID NO: 22979 - protein, 132 aa, Myxococcus sp.
  misc_feature (1)..(132): tr|A0A540WYM0|A0A540WYM0_9DELT 6-carboxy-5,6,7,8-tetrah ydropterin synthase OS=Myxococcus sp. AM401 OX=2590453 GN=queD PE=3 SV=1
MEPVSTKKASLVTEISKEFTFEAAHRLPNVPPGHKCSRVHGHSYRIEITVRGPVDPHFGWIVDFAELNAAWQPLHALLDHRLLNDVPGLENPTSELLAAWVFERLSFATARVVKLRVSETCTSQCTVYPAEG

SEQ ID NO: 22980 - protein, 164 aa, Myxococcus sp.
  misc_feature (1)..(164): tr|A0A540X040|A0A540X040_9DELT Folate biosynthesis prot ein OS=Myxococcus sp. AM401 OX=2590453 GN=FJV41_20435 P E=4 SV=1
MPRTTTLELYKEEMKFSAGHFTIFSATHRENLHGHNFTVYVALTGEVADNGMLSDYGPLKQTIIARCRTWNETFFLPEHSPHLKLERDAKGNVLARFNGEELRFLARDITVLPVENVTLEELARVFGEELVGDGTALRKDGVTRLVVKCASGPGQSSSWEWVAP

SEQ ID NO: 22981 - protein, 135 aa, Myxococcus stipitatus
  misc_feature (1)..(135): tr|L7UFY3|L7UFY3_MYXSD 6-carboxy-5,6,7,8-tetrahydropter in synthase OS=Myxococcus stipitatus (strain DSM 14675 / JCM 12634 / Mx s8) OX=1278073 GN=MYSTI_05528 PE=3 SV= 1
MEPVSKKKVSLVTEISKEFTFEAAHRLPNVPPGHKCSRVHGHSYRIEITVRGPVDPHFGWIVDFSELNAAWQSLHAQLDHRLLNDVEGLENPTSELLAAWVYERLSFPNFPAARVVKLRVSETCTSQCTVYPAEG

SEQ ID NO: 22982 - protein, 164 aa, Myxococcus stipitatus
  misc_feature (1)..(164): tr|L7UFK0|L7UFK0_MYXSD Folate biosynthesis protein OS=M yxococcus stipitatus (strain DSM 14675 / JCM 12634 / Mx s8) OX=1278073 GN=MYSTI_05526 PE=4 SV=1
MPRTTTLELHKEEMKFSAGHFTIFSATHRENLHGHNFTVFVALTGEVTDNGMLSDYGPLKRTIIERCHSWNETFFLPDRSPHLKLERNAKGDVLAHFNGEELRFLARDVTVLPVANVTLEELARVFGEELVGDGSAMRRDGVLKLVVKCASGPGQWSSWEWEAA

SEQ ID NO: 22983 - protein, 120 aa, Myxococcus virescens
  misc_feature (1)..(120): tr|A0A511HLW1|A0A511HLW1_9DELT 6-carboxy-5,6,7,8-tetrah ydropterin synthase OS=Myxococcus virescens OX=83456 GN =ptps PE=3 SV=1
MDIFKEFTFEAAHRLPNVPPGHKCSRLHGHSYRVEIHVRGPVGSQSGWVMDFSDIKEAFEPLRLKLDHYYLNEVEGLENPTSENLSRWIWKRLRPGLPLLSRVVVRETCTSGCIYQGEDD

SEQ ID NO: 22984 - protein, 126 aa, Myxococcus xanthus
  misc_feature (1)..(126): tr|A0A4Y6AFR5|A0A4Y6AFR5_MYXXA Uncharacterized protein OS=Myxococcus xanthus OX=34 GN=BHS05_13545 PE=4 SV=1
MHYLSLTGEFKASHAVTFPDGQREPLHTHDWWVRVWVKARALNHWDVIIDFKDLQDIIDRVCRELHDTNINEHPYFKTVNCTAERVTEYVFKQVESGLPEGVTLDRVHLRRTGGELPEAEYAHATD

SEQ ID NO: 22985 - protein, 209 aa, Myxococcus xanthus
  misc_feature (1)..(209): tr|Q1D8H8|Q1D8H8_MYXXD Uncharacterized protein OS=Myxoc occus xanthus (strain DK 1622) OX=246197 GN=MXAN_2834 P E=4 SV=1
MHIFVKAGAQRKRTGQARRRRVGTWSPLAGPCSEELRGDSLDSSCLLPYSAGRRSRLRRRYHGVCSLRAAHQDLTTTTSKWTAMHYLSLTAEFKASHAVTFPDGQREPLHTHDWWVRVWVKARALNHWDVIIDFKDLQDIIVRVCRELHDTNINEHPYFKTVNCTAERVTEYVFKQVESGLPEGVTLDRVHLRRTGGELPEAEYAHARD

SEQ ID NO: 22986 - protein, 135 aa, Nakamurella multipartita
  misc_feature (1)..(135): tr|C8XK63|C8XK63_NAKMY Uncharacterized protein OS=Nakam urella multipartita (strain ATCC 700099 / DSM 44233 / C IP 104796 / JCM 9543 / NBRC 105858 / Y-104) OX=479431 G N=Namu_0316 PE=4 SV=1
MFTVTVRDHMMIAHSLRGEVFGPAQRLHGATFVVDAAFAGRALSPDDIVVDIGLAADELRAVVDDFRYRNLDDDEAFAGRNTTTEVLARAIADRLADRVHAEAFGPSGRGLCRLTVTLHESHIAWASYERELWPG

SEQ ID NO: 22987 - protein, 132 aa, Nakamurella panacisegetis
  misc_feature (1)..(132): tr|A0A1H0SVU4|A0A1H0SVU4_9ACTN 6-pyruvoyl-tetrahydropte rin synthase OS=Nakamurella panacisegetis OX=1090615 GN =SAMN04515671_4317 PE=4 SV=1
MFSVTVRDHMMIAHSFRGAVFGPAQRLHGATYVVDATFRSPVLNSDDIVVDIGRAAQELQAVVGELGYRNLDEEPDLAGGNTTTEVLARVIADRLADRVRAGRFGGGTENLDGVTVTLRESHIAWASYERPL

SEQ ID NO: 22988 - protein, 121 aa, Nannocystis exedens
  misc_feature (1)..(121): tr|A0A1I1U6G8|A0A1I1U6G8_9DELT 6-carboxy-5,6,7,8-tetrah ydropterin synthase OS=Nannocystis exedens OX=54 GN=SAM N02745121_01011 PE=3 SV=1
MDIFKQFRFEAAHRLPNVPANHKCARLHGHSFMVEIHVTGPVGETSGWVVDFADIAAAWQPLHALLDHNYLNEVEGLENPTSELLARWIWRRMLPALPGLSQVVIRETCTSGCIYRGEDER

SEQ ID NO: 22989 - protein, 127 aa, Nannocystis exedens
  misc_feature (1)..(127): tr|A0A1I2EPG1|A0A1I2EPG1_9DELT 6-carboxy-5,6,7,8-tetrah ydropterin synthase OS=Nannocystis exedens OX=54 GN=SAM N02745121_06204 PE=3 SV=1
MEIFRVYHFEAAHRLPAVPPGHKCSRLHGHSYAIDVRVRGPVGADTGWIMDLGDLDVAWEPLHRVLDHNYLNEVEGLENPTSELLARWIWRRLKPSLPLLCEVGVRETCTCGCIYRGEDEDERRPAT

SEQ ID NO: 22990 - protein, 130 aa, Natranaerobius trueperi
  misc_feature (1)..(130): tr|A0A226BVE9|A0A226BVE9_9FIRM 6-carboxy-5,6,7,8-tetrah ydropterin synthase OS=Natranaerobius trueperi OX=75941 2 GN=queD PE=3 SV=1
MFTLQSEFSFDAAHNLEGHEGKCKNLHGHRWRVIVQVSEEKLKEEGSERDMVVDFSILKKDLKQLSDMFDHKVIVEGKELKVEEEQITLPFRPTAERLSQFIYKKLQEKEYNVSQVTVYETPNNAVIYSE

SEQ ID NO: 22991 - protein, 139 aa, Natranaerovirga hydrolytica
  misc_feature (1)..(139): tr|A0A4R1ML73|A0A4R1ML73_9FIRM 6-carboxy-5,6,7,8-tetrah ydropterin synthase OS=Natranaerovirga hydrolytica OX=6 80378 GN=EDC19_1975 PE=3 SV=1
MYILRTESSFDSAHFLSNYEGKCKNIHGHRWRVEVEVQSEKLIERGVKKGMVVDFSDFKKDLKQLVDALDHKLIIEKETLKNRTLECLLEEGFEVIQVDFRPTAENFSAYFYNVLEEQGYTVKRATVYETPNNSATYER

SEQ ID NO: 22992 - protein, 139 aa, Natranaerovirga pectinivora
  misc_feature (1)..(139): tr|A0A4R3ML51|A0A4R3ML51_9FIRM 6-carboxy-5,6,7,8-tetrah ydropterin synthase OS=Natranaerovirga pectinivora OX=6 82400 GN=EDC18_103117 PE=3 SV=1
MYLLKTLHSFDSAHFLAGYDGKCKNIHGHRWTVEVEVQSETLIEEGQRKGMVVDFSDLKKDLKVLLDGFDHALIIERGTMRKETLSCLLEDDFYVIEVDFRPTAENFSAYFFKELEKKGYNVRRVVVYETPNNSAIFEK

SEQ ID NO: 22993 - protein, 141 aa, Natribacillus halophilus
  misc_feature (1)..(141): tr|A0A1G8PCY1|A0A1G8PCY1_9BACI 6-carboxy-5,6,7,8-tetrah ydropterin synthase OS=Natribacillus halophilus OX=5490 03 GN=SAMN04488123_10873 PE=3 SV=1
MLQQFYPQVFHDYRYELNKDMQMAAAHFIDHQDAGRCRDTHGHTYFINITIAGDALDDAGFLVDFKTLKDEIHGAYDHTLLNDHPRFAEGLPTTEVVARVFWEQVDERLAARENRPYCLQVLVRETPTSYAIYRPKRGDHR

SEQ ID NO: 22994 - protein, 148 aa, Natronoflexus pectinivorans
  misc_feature (1)..(148): tr|A0A4R2GNS2|A0A4R2GNS2_9BACT 6-carboxy-5,6,7,8-tetrah ydropterin synthase OS=Natronoflexus pectinivorans OX=6 82526 GN=EV194_101616 PE=3 SV=1
MAKIRLTKEFRFEMAHALWNYDGLCRNIHGHSYILQVTVIGEPISDDENPKLGMVMDFGDLKAIVNREIVKDLDHSIVVSNKVSPEIIKQMGQMGERHFMVDYQPTCENMLIDFAQRLKNALPKEVSLFSLKLHETANSFAEWYAEDN

SEQ ID NO: 22995 - protein, 292 aa, Natronospirillum operossus
  misc_feature (1)..(292): tr|A0A4Z0WJU1|A0A4Z0WJU1_9BACT 6-pyruvoyl tetrahydropte rin reductase OS=Natronospirillum operossus OX=2562806 GN=E4656_05295 PE=4 SV=1
MASLFVNNLTVIDFSYLDAERGIVGESWIVDLELGGELNAEGMVFDFGHVKKAIKTALDNGMDHRFVIPLQLDGLEVEQGPEYSRIRRLAADGSLMLDYRAPNQAFYWLQATAVTPQTALRDLQQQVRAVVPANVQQIKLSLRTEDHQDAYYHYSHGLKKHDGDCQRMVHGHRSRLIIEQDGRRQPELEQQFARHWQDIYLITREDIRQEIKVLDTPCYAMSYEAAQGHFELTLPVTRCDVLDTDTTVELIAQHLVHRLSARAPDSHWCVRAFEGVNKGAIAAHPAATAQAL

SEQ ID NO: 22996 - protein, 134 aa, Natronospirillum operossus
  misc_feature (1)..(134): tr|A0A4Z0W475|A0A4Z0W475_9BACT 6-carboxytetrahydropteri n synthase OS=Natronospirillum operossus OX=2562806 GN= E4656_14595 PE=4 SV=1
MYALTVRDHLMIAHSFKGDIFGPAQNLHGATYVVDMTFMRPDLDDDDLIVDIGLASTVLKELLAPLNFQNLDELPEFKGRNTTTEFMARTLFERMREAIAAGRLGPTGKGLSDLRVTLGESHIAWASYEGPLHG

SEQ ID NO: 22997 - protein, 194 aa, Nautilia profundicola
  misc_feature (1)..(194): tr|B9L875|B9L875_NAUPA Putative 6-pyruvoyl tetrahydrobi opterin synthase OS=Nautilia profundicola (strain ATCC BAA-1463 / DSM 18972 / AmH) OX=598659 GN=NAMH_0410 PE=4 SV=1
MIIRKLFKFENAHIVRNCTSRRCSRSIHGHSYKVEVKLSSNYLDNGEMVYDFGLMKVTIKDLIDSFDHAITLWAKDDDEYIEYAKKFSERWIVLPVNPSAEQFSRVFFIMIDRVLNLMEFNNGEKEVKLHSIVVHETDTGYAECFREDAYNFKGMGEIKLEDIVFSDRIKEEWNDSRLWDKLLREEKLTPPKEI

SEQ ID NO: 22998 - protein, 194 aa, Nautilia sp.
  misc_feature (1)..(194): tr|A0A3T0L0I4|A0A3T0L0I4_9PROT 6-carboxytetrahydropteri n synthase QueD OS=Nautilia sp. PV-1 OX=2579250 GN=C3L2 3_02080 PE=4 SV=1
MIIRKLFKFENAHIVRNCTSRRCSRSIHGHSYKVEVKLSSNYLDNGEMVYDFGLMKVTIKDLIDSFDHAITLWAKDDDEYIKYAKKFSERWIVLPVNPSAEQFSRVFFIIIDRVLNLMEFNNGEKEVKLHSITVHETDTGYAECFREDAYNFKGMGEIKFEDIIFSDRIKQEWNDSRLWDKLLKQEKLTPPKEI

SEQ ID NO: 22999 - protein, 142 aa, Neisseria animalis
  misc_feature (1)..(142): tr|A0A3N3EHG1|A0A3N3EHG1_NEIAN 6-carboxy-5,6,7,8-tetrah ydropterin synthase OS=Neisseria animalis OX=492 GN=que D PE=3 SV=1
MKITKIFTFDSSHMLDGHDGKCQNLHGHTYKLEITVSDGLIQGGAKDGMVMDFTDLKAIVKQQIIDPFDHAFIYDGSNERESRIAALLEEWNMKTLRLQRRTTAENMTVEIYGRLQNAGINVCSVKLWETPTSCAEYEGENE

SEQ ID NO: 23000 - protein, 140 aa, Neisseria animaloris
  misc_feature (1)..(140): tr|A0A448UD61|A0A448UD61_9NEIS 6-carboxy-5,6,7,8-tetrah ydropterin synthase OS=Neisseria animaloris OX=326522 G N=NCTC12227_01577 PE=3 SV=1
MKITKIFTFDSSHMLDGHDGKCQNLHGHTYKLEVVVSDGLIQGGAKDGMVMDFSDLKTIVKRTIIEPFDHAFIYNGNNPRESQIAALLESWNMKTLRLGFRTTAENMTVEMFGRLKNAGLPVSLIRLWETPTSCAEYEGE

SEQ ID NO: 23001 - protein, 140 aa, Neisseria arctica
  misc_feature (1)..(140): tr|A0A0J0YS71|A0A0J0YS71_9NEIS 6-carboxy-5,6,7,8-tetrah ydropterin synthase OS=Neisseria arctica OX=1470200 GN= PL75_05420 PE=3 SV=1
MKITKTFSFDMAHMLDNHDGKCKNLHGHTYKLEVEVCGNLIEGGAKDGMVIDFSDLKQSVKALVVEPFDHAFIYHTGSERERQIARMLEGWGLKTLAMDKRTTAENMAQYMFDLLRRKGRLNISTLRLWETPTSYCECSL

SEQ ID NO: 23002 - protein, 53 aa, Neisseria arctica
  misc_feature (1)..(53): tr|A0A0J0YP36|A0A0J0YP36_9NEIS 6-carboxy-5,6,7,8-tetrah ydropterin synthase (Fragment) OS=Neisseria arctica OX= 1470200 GN=PL75_11205 PE=4 SV=1
RHIARMLEVWGLKTLATDKRATAENMAEYMFDLLRRKGRLNITTLRLWETPTS

SEQ ID NO: 23003 - protein, 140 aa, Neisseria bacilliformis
  misc_feature (1)..(140): tr|F2BCW7|F2BCW7_9NEIS 6-carboxy-5,6,7,8-tetrahydropter in synthase OS=Neisseria bacilliformis ATCC BAA-1200 OX =888742 GN=ptpS PE=3 SV=1
MKITKIFTFDSSHLLDGHDGKCKNLHGHTYRLEITVSDDLICGGAKDGMVMDFADLKTIAEREIIAPFDHAFLYHADNARECQIAALLEGWQMKTLRLPCRTTAENMAAEIYGRLKAAGVNVCSVKLWETPTSCAEFEGA

SEQ ID NO: 23004 - protein, 140 aa, Neisseria canis
  misc_feature (1)..(140): tr|A0A448DBB1|A0A448DBB1_9NEIS 6-carboxy-5,6,7,8-tetrah ydropterin synthase OS=Neisseria canis OX=493 GN=NCTC10 296_02342 PE=3 SV=1
MKITKIFTFDSSHMLDGHDGKCQNLHGHTYKLEVVVSDGLIQGGAKDGMVMDFSDLKTIVKRTIIEPFDHAFIYNGNNSRESQIAALLESWNMKTLRLGFRTTAENMTVEMFGRLKNAGLPVSLIRLWETPTSCAEYEGE

SEQ ID NO: 23005 - protein, 144 aa, Neisseria cinerea
  misc_feature (1)..(144): tr|D0W2T8|D0W2T8_NEICI 6-carboxy-5,6,7,8-tetrahydropter in synthase OS=Neisseria cinerea ATCC 14685 OX=546262 G N=queD PE=3 SV=1
MKITKIFTFDSSHMLDGHDGKCQNLHGHTYKLEITVSDGIVRGGPKDGMVMDFTDLKAIVKKYITDPFDHAFIYHGDNGRECQIAALLEGWNMKTLRLPCRTTAENMSIEMYDRLKNAGLNVCSVKLWETPTSCAEYEGRCGAF

SEQ ID NO: 23006 - protein, 144 aa, Neisseria cinerea
  misc_feature (1)..(144): tr|A0A2X3ZLP2|A0A2X3ZLP2_NEICI 6-carboxy-5,6,7,8-tetrah ydropterin synthase OS=Neisseria cinerea OX=483 GN=NCTC 10294_00176 PE=3 SV=1
MKITKIFTFDSSHMLDGHDGKYQNLHGHTYKLEITVSDGIVRGGPKDGMVMDFTDLKAIVKKYITDPFDHAFIYHGDNGRECQIAALLEGWNMKTLRLPCRTTAENMSIEMYDRLKNAGLNVCSVKLWETPTSCAEYEGRCRAF

SEQ ID NO: 23007 - protein, 140 aa, Neisseria dentiae
  misc_feature (1)..(140): tr|A0A1X3DFQ2|A0A1X3DFQ2_9NEIS 6-carboxy-5,6,7,8-tetrah ydropterin synthase OS=Neisseria dentiae OX=194197 GN=B WD09_01935 PE=3 SV=1
MKITKIFTFDSSHMLDGHDGKCQNLHGHTYSLEITVSDGLIEAGAKAGMVMDFADLKTIVKQTVIEPFDHAFIYHGGNARESQIAALLEGWQMKTLRLNRRTTAENLSVEIFGRLKSAGLPVCSVKLWETPTSCAEYEGN

SEQ ID NO: 23008 - protein, 140 aa, Neisseria dumasiana
  misc_feature (1)..(140): tr|A0A1X3DKG2|A0A1X3DKG2_9NEIS 6-carboxy-5,6,7,8-tetrah ydropterin synthase OS=Neisseria dumasiana OX=1931275 G N=BV912_03410 PE=3 SV=1
MKITKIFTFDSSHMLDGHDGKCQNLHGHTYKLEVTVSDGLIQGGAKDGMVMDFSDLKAIVKRTIIEPFDHAFIYNGNNPRESQIAALLESWNMKTLRLGFRTTAENMTVEMFGRLKNAGLPVSLIRLWETPTSCAEYDGE

SEQ ID NO: 23009 - protein, 140 aa, Neisseria elongata
  misc_feature (1)..(140): tr|D4DQ52|D4DQ52_NEIEG 6-carboxy-5,6,7,8-tetrahydropter in synthase OS=Neisseria elongata subsp. glycolytica AT CC 29315 OX=546263 GN=queD PE=3 SV=1
MKITKIFTFDSSHMLDGHDGKCQNLHGHTYKLEITVSGSLIEGGAKDGMVMDFSDLKRTVKQHIIEPFDHAFIYHGGNGRECQIAALLEGWNMKTLRLPFRTTAENMAVEMYGRLKNAGLNVSNVKLWETPTSCAEYEEG

SEQ ID NO: 23010 - protein, 140 aa, Neisseria elongata
  misc_feature (1)..(140): tr|A0A378TXX0|A0A378TXX0_NEIEL 6-carboxy-5,6,7,8-tetrah ydropterin synthase OS=Neisseria elongata OX=495 GN=NCT C10660_00718 PE=3 SV=1
MKITKIFTFDSSHMLDGHDGKCQNLHGHTYKLEITVSGSPIEGGAKDGMVMDFSDLKRTVKQHIIEPFDHSFIYHGGNERESQIAVLLEGWNMKTLRLPFRTTAENMAVEMYGRLKNAGLNVSNVKLWETPTSCAEYEEG

SEQ ID NO: 23011 - protein, 140 aa, Neisseria flavescens
  misc_feature (1)..(140): tr|C0EQQ6|C0EQQ6_NEIFL 6-carboxy-5,6,7,8-tetrahydropter in synthase OS=Neisseria flavescens NRL30031/H210 OX=54 6264 GN=queD PE=3 SV=1
MKITKIFTFDSSHMLDGHDGKCQNLHGHTYKLEITVSAPVIQGGAKDGMVMDFTDLKAIVKQHITDPFDHAFIYHGNNERESQIAALLEGWNMKTLRLPCRTTAENMSVEIYGRLKNAGVKVCSVKLWETPTSCAEYEGE

SEQ ID NO: 23012 - protein, 140 aa, Neisseria flavescens
  misc_feature (1)..(140): tr|C5TL94|C5TL94_NEIFL 6-carboxy-5,6,7,8-tetrahydropter in synthase OS=Neisseria flavescens SK114 OX=596320 GN= queD PE=3 SV=1
MKITKIFTFDSSHMLDGHDGKCQNLHGHTYKLEITVSAPVIQGGAKDGMVMDFTDLKAIVKQHITDPFDHAFIYHGNNERESQIAALLEDWNMKTLRLPCRTTAENMSVEMYGRLKNAGVKVCSVKLWETPTSCAEYEGE

SEQ ID NO: 23013 - protein, 144 aa, Neisseria gonorrhoeae
  misc_feature (1)..(144): tr|B4RQ63|B4RQ63_NEIG2 6-carboxy-5,6,7,8-tetrahydropter in synthase OS=Neisseria gonorrhoeae (strain NCCP11945) OX=521006 GN=NGK_0177 PE=3 SV=1
MKITKIFTFDSSHMLDGHDGKCQNLHGHTYKLEITVSDGTIKGGAKDGMVMDFTDLKAIVKQHITDHFDHAFIYHGGNGRESQIAALLEGWNMKTLRLPCRTTAENMAVEMYCRLKNAGLNVCRVKLWETPTSCAEYEGGEGIF

SEQ ID NO: 23014 - protein, 140 aa, Neisseria gonorrhoeae
  misc_feature (1)..(140): tr|A0A4T9UAB2|A0A4T9UAB2_NEIGO 6-carboxy-5,6,7,8-tetrah ydropterin synthase OS=Neisseria gonorrhoeae OX=485 GN= queD PE=3 SV=1
MKITKIFTFDSSHMLDGHDGKCQNLHGHTYKLEITVSDGTIKGGAKDGMVMDFTDLKAIVKQHITDHFDHAFIYHGGNGRESQIAALLEGWNMKTLRLPCRTTAENMAVEMYCRLKNAGLNVCRVKLWETPTSCAEYEGE

SEQ ID NO: 23015 - protein, 140 aa, Neisseria iguanae
  misc_feature (1)..(140): tr|A0A2P7TYP6|A0A2P7TYP6_9NEIS 6-carboxy-5,6,7,8-tetrah ydropterin synthase OS=Neisseria iguanae OX=90242 GN=qu eD PE=3 SV=1
MKITKIFSFDSSHMLDGHDGKCQNLHGHTYKLEITVSDGLVQSGAKEGMVMDFTDLKAIVKQEITEPFDHAFIYDGRNERESQIAALLEGWNMKTLSLNCRTTAENMSMVMFERLKQAGLKVCSVKLWETPTSCTEYEGV

SEQ ID NO: 23016 - protein, 140 aa, Neisseria lactamica
  misc_feature (1)..(140): tr|E4ZEY2|E4ZEY2_NEIL0 6-carboxy-5,6,7,8-tetrahydropter in synthase OS=Neisseria lactamica (strain 020-06) OX=4 89653 GN=NLA_17130 PE=3 SV=1
MKITKIFTFDSSHMLDGHDGKCQNLHGHTYKLEITVSDGIIKGGAKDGMVMDFTDLKTIVKQHITDPFDHAFIYHGGNGRESQIAALLEGWNMKTLRLPCRTTAENMAVEMYGRLKNAGLNVCGVKLWETPTSCAEYEGG

SEQ ID NO: 23017 - protein, 140 aa, Neisseria lactamica
  misc_feature (1)..(140): tr|D0WB77|D0WB77_NEILA 6-carboxy-5,6,7,8-tetrahydropter in synthase OS=Neisseria lactamica ATCC 23970 OX=546265 GN=queD PE=3 SV=1
MKITKIFTFDSSHMLDGHDGKCQNLHGHTYKLEITVSDGIVSGGPKDGMVMDFTDLKAIVKQHITDPFDHAFIYHGGNGRESQIAALLEGWDMKTLRLPCRTTAENMAVEMYGRLQNAGLNVCGVKLWETPTSCAEYEGG

SEQ ID NO: 23018 - protein, 140 aa, Neisseria macacae
  misc_feature (1)..(140): tr|F9EUV0|F9EUV0_9NEIS 6-carboxy-5,6,7,8-tetrahydropter in synthase OS=Neisseria macacae ATCC 33926 OX=997348 G N=ptpS PE=3 SV=1
MKITKIFTFDSSHMLDGHDGKCQNLHGHTYKLEITVSDDPIRGGAKDGMVMDFTDLKAIVKKHITDPFDHAFIYHGGNGRECQIAALLEGWNMKTLCLPCRTTAENMAVEMYDRLKNAGLKVCSVKLWETPTSCAEYEGE

SEQ ID NO: 23019 - protein, 140 aa, Neisseria meningitidis
  misc_feature (1)..(140): tr|X5F546|X5F546_NEIME 6-carboxy-5,6,7,8-tetrahydropter in synthase OS=Neisseria meningitidis OX=487 GN=queD PE =3 SV=1
MKITKIFTFDSSHMLDGHDGKCQNLHGHTYKLEITVSDGIIKGGAKDGMVMDFTDLKAIVKQHITDPFDHAFIYHGGNSRECQIAALLEGWNMKTLRLPCRTTAENMAVEMYDRLKNAGLNVCRVKLWETPTSCAEYEGE

SEQ ID NO: 23020 - protein, 149 aa, Neisseria meningitidis
  misc_feature (1)..(149): tr|A0A425AK80|A0A425AK80_NEIME 6-carboxy-5,6,7,8-tetrah ydropterin synthase OS=Neisseria meningitidis OX=487 GN =queD PE=3 SV=1
MKITKIFTFDSSHMLDGHDGKCQNLHGHTYKLEITVSDDPVRGGPKDGMVMDFTDLKAIVKQHITDPFDHAFIYHGGNGRESQIAALLEGWNMKTLRLPCRTTAENMAVEMYDRLKNAGLNVCRVKLWETPTSCAEYEGGVGDSLNVSI

SEQ ID NO: 23021 - protein, 140 aa, Neisseria mucosa
  misc_feature (1)..(140): tr|D2ZU75|D2ZU75_NEIMU 6-carboxy-5,6,7,8-tetrahydropter in synthase OS=Neisseria mucosa ATCC 25996 OX=546266 GN =queD PE=3 SV=1
MKITKIFTFDSSHMLDGHDGKCQNLHGHTYKLEITVSDDPVRGGPKDGMVMDFTDLKAIVKQHITDPFDHAFIYNGGNERECQIATLLEGWNMKTLCLPCRTTAENMAVEMYDRLKNAGLKVCSVKLWETPTSCAEYEGE

SEQ ID NO: 23022 - protein, 140 aa, Neisseria mucosa
  misc_feature (1)..(140): tr|A0A2R4AWB2|A0A2R4AWB2_NEIMU 6-carboxy-5,6,7,8-tetrah ydropterin synthase OS=Neisseria mucosa OX=488 GN=queD PE=3 SV=1
MKITKIFTFDSSHMLDGHDGKCQNLHGHTYKLEITVSDDPIRGGPKDGMVMDFTDLKAAVKKHITDPFDHAFIYNGGNERECQISALLEGWNMKTLCLPCRTTAENMAVEMYDRLQNAGLKVCSVKLWETPTSCAEYEGE

SEQ ID NO: 23023 - protein, 140 aa, Neisseria perflava
  misc_feature (1)..(140): tr|A0A2I1QWI4|A0A2I1QWI4_NEIPE 6-carboxy-5,6,7,8-tetrah ydropterin synthase OS=Neisseria perflava OX=33053 GN=q ueD PE=3 SV=1
MKITKIFTFDSSHMLDGHDGKCQNLHGHTYKLEITVSAPVIQGGAKDGMVMDFTDLKAIVKQHITDPFDHAFIYHGDNERESQIAALLEGWNMKTLRLPCRTTAENMSVEMYGRLKNAGVKVCSVKLWETPTSCAEYEGD

SEQ ID NO: 23024 - protein, 140 aa, Neisseria polysaccharea
  misc_feature (1)..(140): tr|E2PI36|E2PI36_NEIPO 6-carboxy-5,6,7,8-tetrahydropter in synthase OS=Neisseria polysaccharea ATCC 43768 OX=54 6267 GN=queD PE=3 SV=1
MKITKIFTFDSSHMLDGHDGKCQNLHGHTYKLEITVSDGIIKGGAKDGMVMDFTDLKTIVKQHITDPFDHAFIYHGGNGRESQIAALLEGWNMKTLLLPCRTTAENMAVEMYGRLKNAGLNVCRVKLWETPTSCAEYEGE

SEQ ID NO: 23025 - protein, 142 aa, Neisseria shayeganii
  misc_feature (1)..(142): tr|G4CF31|G4CF31_9NEIS 6-carboxy-5,6,7,8-tetrahydropter in synthase OS=Neisseria shayeganii 871 OX=1032488 GN=p tpS PE=3 SV=1
MKISKIFEFDAAHMLDTHDGKCRNLHGHTYRLEVTLSGSLLQGGPKDGMVCDFADLKSSVQQWVLSRFDHAFLYDARNPHEAELGRLLEGWGRKTLALPCRTTAENLAVHIFESLCQHKLPVSAVKLWETPSSCVEYTGDSA

SEQ ID NO: 23026 - protein, 140 aa, Neisseria sicca
  misc_feature (1)..(140): tr|C6M3W4|C6M3W4_NEISI 6-carboxy-5,6,7,8-tetrahydropter in synthase OS=Neisseria sicca ATCC 29256 OX=547045 GN= queD PE=3 SV=1
MKITKIFTFDSSHMLDGHDGKCQNLHGHTYKLEITVSDDPVRGGPKDGMVMDFTDLKAIVKKHITDPFDHAFIYHGGNGRECQIAALLEGWNMKTLCLPCRTTAENMAVEMYDRLKNAGLKVCIVKLWETPTSSAEYEGE

SEQ ID NO: 23027 - protein, 140 aa, Neisseria sicca
  misc_feature (1)..(140): tr|A0A2I1XCT2|A0A2I1XCT2_NEISI 6-carboxy-5,6,7,8-tetrah ydropterin synthase OS=Neisseria sicca OX=490 GN=queD P E=3 SV=1
MKITKIFTFDSSHMLDGHDGKCQNLHGHTYKLEITVSDDPIRGGAKDGMVMDFTDLKAAVKKHITDPFDHAFIYHGGNGRECQIAALLEGWNMKTLCLPCRTTAENMAVEMYDRLKNAGLKVCSVKLWETPTSCAEYEGE

SEQ ID NO: 23028 - protein, 140 aa, Neisseria sp.
  misc_feature (1)..(140): tr|D7N3S7|D7N3S7_9NEIS 6-carboxy-5,6,7,8-tetrahydropter in synthase OS=Neisseria sp. oral taxon 014 str. F0314 OX=641149 GN=queD PE=3 SV=1
MKITKIFTFDSSHMLDGHDGKCQNLHGHTYKLEITVSDDPVRGGPKDGMVMDFTDLKAAVKKHITDPFDHAFIYHGGNDRECQIAALLEGWNMKTLCLPCRTTAENMAVEMYDRLKNAGLKVCSVKLWETPTSCAEYEGE

SEQ ID NO: 23029 - protein, 140 aa, Neisseria sp.
  misc_feature (1)..(140): tr|A0A1E8S9F8|A0A1E8S9F8_9NEIS 6-carboxy-5,6,7,8-tetrah ydropterin synthase OS=Neisseria sp. HMSC072F04 OX=1739 348 GN=HMPREF2844_05675 PE=3 SV=1
MKITKIFTFDSSHMLDGHDGKCQNLHGHTYKLEITVSDDPVRGGPKDGMVMDFTDLKAIVKQHITDPFDHAFIYNGGNERECQIATLLEGWNMKTLCLPCRTTAENMAVEMYDRLKNAGLKVCNVKLWETPTSCAEYEGD

SEQ ID NO: 23030 - protein, 140 aa, Neisseria subflava
  misc_feature (1)..(140): tr|D3A6H4|D3A6H4_NEISU 6-carboxy-5,6,7,8-tetrahydropter in synthase OS=Neisseria subflava NJ9703 OX=546268 GN=q ueD PE=3 SV=1
MKITKIFTFDSSHMLDGHDGKCQNLHGHTYKLEITVSAPVIQGGAKDGMVMDFTDLKSIVKQHINDPFDHAFIYHGNNERESQIAALLEGWNMKTLRLPCRTTAENMSVEMYGRLKNAGVKVCSVKLWETPTSYAEYEGE

SEQ ID NO: 23031 - protein, 140 aa, Neisseria subflava
  misc_feature (1)..(140): tr|A0A4D7WE17|A0A4D7WE17_NEISU 6-carboxy-5,6,7,8-tetrah ydropterin synthase OS=Neisseria subflava OX=28449 GN=q ueD PE=3 SV=1
MKITKIFTFDSSHMLDGHDGKCQNLHGHTYKLEITVSAPVIQGGAKDGMVMDFTDLKAIVKQHITDPFDHAFIYHGNNERESQIAALLEGWNMKTLRLPCRTTAENMSVEMYGRLKNAGIKVCSVKLWETPTSCTEYEGE

SEQ ID NO: 23032 - protein, 152 aa, Neisseria wadsworthii
  misc_feature (1)..(152): tr|G4CSP7|G4CSP7_9NEIS 6-pyruvoyltetrahydropterin synth ase OS=Neisseria wadsworthii 9715 OX=1030841 GN=ptpS PE =4 SV=1
MLKLSDRPLQQTMKITKIFTFDSSHMLDGHDGKCQNLHGHTYKLEVVVAGGLIKSGAKDGMVMDFADLKTIVKHTIIEPFDHAFIYNGNNPRESQIAALLEGWNMKTMRLDFRTTAENMAAYMYACLKNAGLHVSLIRLWETPTSCAECDGV

SEQ ID NO: 23033 - protein, 140 aa, Neisseria weaveri
  misc_feature (1)..(140): tr|A0A3S4Z7U6|A0A3S4Z7U6_9NEIS 6-carboxy-5,6,7,8-tetrah ydropterin synthase OS=Neisseria weaveri OX=28091 GN=NC TC12742_00669 PE=3 SV=1
MKITKIFTFDSSHMLDGHDGKCQNLHGHTYKLEVTVSDGLIQGGTKDGMVMDFSDLKTIVKRTIIEPFDHAFIYNGNNPRESQIAALLESWNMKTLRLGFRTTAENMTVEMFGRLKNAGLPVSLIRLWETPTSCAEYEGE

SEQ ID NO: 23034 - protein, 141 aa, Neisseria zalophi
  misc_feature (1)..(141): tr|A0A5J6PTR5|A0A5J6PTR5_9NEIS 6-carboxytetrahydropteri n synthase QueD OS=Neisseria zalophi OX=640030 GN=queD PE=4 SV=1
MKITKIFTFDSSHMLDGHDGKCKNLHGHTYKLEVTVSDGLISGGAKDGMVMDFSDLKTIVKQEIIEPFDHAFIYHGGNERESKIAALLESWQMKTMRLDIRTTAENMVVYMYSRLKAAGLPVSGIKLWETPTSCAEFETSL

SEQ ID NO: 23035 - protein, 140 aa, Neisseria zoodegmatis
  misc_feature (1)..(140): tr|A0A378WT21|A0A378WT21_9NEIS 6-carboxy-5,6,7,8-tetrah ydropterin synthase OS=Neisseria zoodegmatis OX=326523 GN=NCTC12229_01987 PE=3 SV=1
MKITKIFTFDSSHMLDGHDGKCQNLHGHTYKLEVVVSDGLIQGGAKDGMVMDFSDLKTIVKRTIIEPFDHAFIYNGNNPRESQIAALLESWNMKTLRLDFRTTAENMTVEMFGRLKNAGLPVSLIRLWETPTSCAEYDGE

SEQ ID NO: 23036 - protein, 140 aa, Neisseria zoodegmatis
  misc_feature (1)..(140): tr|A0A1X3CPN9|A0A1X3CPN9_9NEIS 6-carboxy-5,6,7,8-tetrah ydropterin synthase OS=Neisseria zoodegmatis OX=326523 GN=BWD10_08785 PE=3 SV=1
MKITKIFTFDSSHMLDGHDGKCQNLHGHTYKLEVVVSDGLIQGGAKDGMVMDFSDLKTIVKHTIIEPFDHAFIYNGNNPRESQIAALLESWNMKTLRLGFRTTAENMTVEMFGRLKNAGLPVSLIRLWETPTSCAEYEGE

SEQ ID NO: 23037 - protein, 142 aa, Neisseriaceae bacterium
  misc_feature (1)..(142): tr|A0A2I7N304|A0A2I7N304_9NEIS 6-pyruvoyl tetrahydrobio pterin synthase OS=Neisseriaceae bacterium DSM 100970 O X=2052837 GN=CUN60_00460 PE=4 SV=1
MGKFQVVRKHEIHCGHRVVQHEGKCKNLHGHSYIFHLKCESTELDNLGRVIDFSVIKDLLCRWLDDNWDHKLILWENDPWLLSLREIDATIVTVPYNPTAENLARYLVEVIGPELFKDLPISLSEVTLEETSKCRASYAISD

SEQ ID NO: 23038 - protein, 142 aa, Neisseriaceae bacterium
  misc_feature (1)..(142): tr|A0A3S0DZD0|A0A3S0DZD0_9NEIS 6-carboxytetrahydropteri n synthase OS=Neisseriaceae bacterium OX=2014784 GN=EKK 54_10290 PE=4 SV=1
MGKYQVVRKHEIHCGHRVYQHESKCRNLHGHSYVFHLKCSSDNLDNLGRVIDFSVIKELLCKWLDDNWDHKMILWDQDPLFTELLKLDSSVVSIPYNPTAENLARYLVETIGPQLFAHLPITLSEVTLEETSKCSASYAISN

SEQ ID NO: 23039 - protein, 142 aa, Neisseriales bacterium
  misc_feature (1)..(142): tr|A0A5C8AZY6|A0A5C8AZY6_9NEIS 6-carboxytetrahydropteri n synthase OS=Neisseriales bacterium OX=2053582 GN=E6Q3 3_09815 PE=4 SV=1
MGKFQVVRKHEIHCGHRVVQHEGKCKNLHGHSYIFHLKCESTELDNLGRVIDFSVIKDLLCCWLDDNWDHRLILWENDPWLMNLREIDSTIVTVPYNPTAENLARYLVEVIGPELFKDLPISLSAVTLEETSKCRASYAISD

SEQ ID NO: 23040 - protein, 180 aa, Neoasaia chiangmaiensis
  misc_feature (1)..(180): tr|A0A1U9KM95|A0A1U9KM95_9PROT 6-pyruvoyl tetrahydropte rin synthase OS=Neoasaia chiangmaiensis OX=320497 GN=A0 U93_01975 PE=4 SV=1
MSSAELVFTRRFSMGHRLIDGASESCALPHGHNEFVTVTLSPTRDRALDGRRNMIVPFRQAKARWHEFVDRSLDHALQLSASDPLLSWFHENEPHRAARIVVTPGDPTTELLAALMMAKLGAILIAEGEHLICTRIELQETPTNTVCLTGDPMDYLPATGRAAQDCWWHRPDLSVSDVAR

SEQ ID NO: 23041 - protein, 121 aa, Neochlamydia sp.
  misc_feature (1)..(121): tr|A0A0C1JNP9|A0A0C1JNP9_9BACT 6-carboxy-5,6,7,8-tetrah ydropterin synthase OS=Neochlamydia sp. EPS4 OX=1478175 GN=queD PE=3 SV=1
MYELEKIFCFEAAHFLNHHDGKCKSMHGHSYSLHVIIRKESLQKEGPKKNMVIDFQDLADLVQPMLKKYLDHQCLNETLQSDSTTVEFVCKWIYDYLKPMLPELHAITLYETASSKATYWI

SEQ ID NO: 23042 - protein, 121 aa, Neochlamydia sp.
  misc_feature (1)..(121): tr|A0A3Q9XVP7|A0A3Q9XVP7_9BACT 6-carboxy-5,6,7,8-tetrah ydropterin synthase OS=Neochlamydia sp. S13 OX=1353976 GN=NCS13_2_0125 PE=3 SV=1
MYELEKIFCFEAAHFLNHHDGKCKSMHGHSYSLHVIIRKESLQKEGPKKNMVIDFQDLADLIQPMLKKYLDHQCLNETLQSDSTTVEFVCKWIYDYLKPMLPELYAITLYETASSKATYWM

SEQ ID NO: 23043 - protein, 169 aa, Neokomagataea sp.
  misc_feature (1)..(169): tr|A0A506UML1|A0A506UML1_9PROT 6-carboxytetrahydropteri n synthase OS=Neokomagataea sp. Jb2 OX=2558904 GN=E3202 _04425 PE=4 SV=1
MGHRLIAGCSDRCAIPHGHNEYISVTLGAGPANPQAARLDGQANMLLPFAEAKGRWHHFIDTRMDHAFQLGEKDPLLQWFAQNEPSRLDRLVVTPGDPTTELLAALLMAKLNAILKAQGDRLTVRALEIRETPTNTVRLVGSDPAPYLPAVTRPPEACWWHRADDSTRD

SEQ ID NO: 23044 - protein, 184 aa, Neokomagataea tanensis
  misc_feature (1)..(184): tr|A0A4Y6V4Q1|A0A4Y6V4Q1_9PROT 6-carboxytetrahydropteri n synthase OS=Neokomagataea tanensis OX=661191 GN=D5366 _07565 PE=4 SV=1
MTSNPNLPETELVFTRRFSMGHRLISGSSERCAMVHGHNEYVTIRLKAMQPARLDGQQNVIVPFAEAKTRWHNFIDNIVDHALQLSEQDPLLNWFQTNEPERAKRIIVTPGDPTTELMAALLLAKLNAFLAADGGKLCALGIELQETPTNTVRLDGSPDAFLPTSGRPAAQCWWHRADLTISDL

SEQ ID NO: 23045 - protein, 132 aa, Neorhizobium galegae
  misc_feature (1)..(132): tr|A0A068SV85|A0A068SV85_RHIGA 6-pyruvoyl tetrahydropte rin synthase OS=Neorhizobium galegae bv. orientalis str . HAMBI 540 OX=1028800 GN=RG540_CH39780 PE=4 SV=1
MFAVEVRDHIMIAHSLPRPVFGPAQGMHGATFMVDAAFFTSDLDENGLAVDIGLATDLLKEVLAPLNYQNLDTLEIFAGKVTTTEFLAKYIFDRIADAIRNGRLGDGGARIRKLRVMLHESHTARGWFEAEL

SEQ ID NO: 23046 - protein, 118 aa, Neorhizobium galegae
  misc_feature (1)..(118): tr|A0A0T7G5A5|A0A0T7G5A5_RHIGA 6-carboxy-5,6,7,8-tetrah ydropterin synthase OS=Neorhizobium galegae bv. officin alis OX=323656 GN=NGAL_HAMBI1146_50630 PE=3 SV=1
MKITQAFTFEAAHRLPNVPATHKCHRMHGHSYRVELQLDGKVNSDTGFVIDFFDLEKAFGPLLEQLDHHTLNEIEGLENPTAENISTWIWTRVRPLLPELSSVKVFETPMCWAEYNGN

SEQ ID NO: 23047 - protein, 118 aa, Neorhizobium sp.
  misc_feature (1)..(118): tr|A0A4R3A8W6|A0A4R3A8W6_9RHIZ 6-carboxy-5,6,7,8-tetrah ydropterin synthase OS=Neorhizobium sp. JUb45 OX=248511 3 GN=EDF70_101383 PE=3 SV=1
MYRITKEFHFSASHQLTHLPADHQCARLHGHNYIVVVELSANELDDDGFVRDYHELKPLKQYIDEKFDHRHLNDVLGHEKVTSEFLAKHFYDWCKERLPETSAVRVSETPKTWAEYRP

SEQ ID NO: 23048 - protein, 132 aa, Neorhizobium sp.
  misc_feature (1)..(132): tr|A0A4R3XJP4|A0A4R3XJP4_9RHIZ 6-pyruvoyl-tetrahydropte rin synthase OS=Neorhizobium sp. S3-V5DH OX=2485166 GN= EDE09_108123 PE=4 SV=1
MFAVEVRDHVMIAHSLPRPVFGPAQGLHGATFVVDAAFFTEDLDENGLAVDIGLAIDVLKEVLAPLNYQNLDTLEIFSGRITTTEFLAKHIFDRIAAAIGKGRLGRDGGRIRKLRVMLHESHMARGWYEAEL

SEQ ID NO: 23049 - protein, 294 aa, Neosynechococcus sphagnicola
  misc_feature (1)..(294): tr|A0A098TMJ7|A0A098TMJ7_9CYAN 6-pyruvoyl tetrahydropte rin synthase OS=Neosynechococcus sphagnicola sy1 OX=149 7020 GN=DO97_18720 PE=4 SV=1
MKCIIHRRAQFSASHRYWLPEWSDAENARQFGACHRAPGHGHNYVLYVALAGDLDEYGMVLNLSDVKRVIKREVTSQLDFSYLNDVWPEFHQTLPTTENLARVIWHRLAPYLPLAQIQLFEHPELWADYQGNGMEAYLSVSTHFSAAHRLARPDLSYEDNCKIYGKCARPNGHGHNYHLEVTVKGEMDPRTGMVVELGALHQVITDQVLEPLDHTFLNLDIPYFAAIVPTAEHIAVYIRDILQQPIQALGAKLHKIKLVESPNNSCEVYCTDAAPESSILQQRDREPMRIGVGV

SEQ ID NO: 23050 - protein, 278 aa, Neptuniibacter caesariensis
  misc_feature (1)..(278): tr|A0A2G6JBK1|A0A2G6JBK1_NEPCE Uncharacterized protein OS=Neptuniibacter caesariensis OX=207954 GN=CSA61_01140 PE=4 SV=1
MKLFVDDLTNVDFSFLHPQRGLLGESWLAQLELAGSLNEQGMICDFGIVKKEVKRWLDQWVDHALVVPTGMPRLSHHTADGYTEVEWLYANGERFYCRSPEQAICLVDMPEINEHTLANWCQKQLLALFPEEVKGLKIGFVPESIDGDFYHYSHGLKKHAGNCQRIAHGHRSKIQIYINDQRERQLEAEWAGRFTDIYIGSESHLVERCLDTHHYAYTAPQGEFAISLPASACYLIDTDSTVELIAAHLATEIKQAYPNDKVRVRAYEGVGKGAIAEM

SEQ ID NO: 23051 - protein, 278 aa, Neptuniibacter sp.
  misc_feature (1)..(278): tr|A0A136H3M2|A0A136H3M2_9GAMM Uncharacterized protein OS=Neptuniibacter sp. Phe_28 OX=1795871 GN=AXW15_05500 PE=4 SV=1
MKLFVDNLTNVDFSYLHPQRGLLGESWLVQLELDGSLNDQGMICDFGIVKKEVKKWFDLWIDHALVVPTGLSELVYNVDAGYTAVEWVYPNGERFSCRSPEAAICLVGMAEINEATLAEWCQGKLLELFPCEVKGLTIRFVPEKIDGAFYHYSHGLQKHDGNCQRIAHGHRSKIELFINGQRDASLEAEWAARFKDIYIGSASHVTSQSDDEHQYAYQAPQGRFEISLPARVCYVIDTDSTVELIASHLAKQIKLSYPNDRVMVKAYEGVGKGAIAEA

SEQ ID NO: 23052 - protein, 278 aa, Neptunomonas antarctica
  misc_feature (1)..(278): tr|A0A1N7PLB9|A0A1N7PLB9_9GAMM 6-pyruvoyl tetrahydropte rin synthase OS=Neptunomonas antarctica OX=619304 GN=SA MN05421760_11625 PE=4 SV=1
MKLFVNNLTNVDFSYLHSSRGLMGESWLLQLELDGALNEQGMVCDFGVVKKLTREWMDSTIDHALLVPTKMNDIKIEHALGQTRVDWLYPNGKSFHCQSPSKAIVAVDVEEITPEAMAEWCRAQLIALFPQEVRGLNLRFVPEVIDGAFYHYSHGLQQHDGNCQRIAHGHRSRIEIFLNNERNHKLEQEWAARWHDIYIGTSAHRKESAEGMNTYEYRAPQGEFSLTLPTEYCSDIDTESTVEQIARHLAARIKQIRPLDDVMVRAYEGVGKGAVSQV

SEQ ID NO: 23053 - protein, 256 aa, Neptunomonas qingdaonensis
  misc_feature (1)..(256): tr|A0A1I2VW19|A0A1I2VW19_9GAMM 6-pyruvoyl tetrahydropte rin synthase OS=Neptunomonas qingdaonensis OX=1045558 G N=SAMN05216175_12025 PE=4 SV=1
MGESWLLQLELDGALNEQGMVCDFGIVKKLTREWMDKTIDHALLVPTRMDNLKVEQAVGQTRVEWVYPDGQAFNCLSPSKAIALIDVEEITPESMAEWCRAQLIELFPQEVKGLNLRFVAEQIDGDFYHYSHGLQQHDGNCQRIAHGHRSRIEIFLNGERDQKLEHEWASRWSDIYIGTSAHRKESAEGMHTYEYRAPQGEFSLTLPAQYCYDIDTESTVEQIARHLAARIKQMKPFDEVLVRAYEGVGKGAVSQV

SEQ ID NO: 23054 - protein, 279 aa, Neptunomonas sp.
  misc_feature (1)..(279): tr|A0A437Q442|A0A437Q442_9GAMM Uncharacterized protein OS=Neptunomonas sp. HPM-16 OX=1815562 GN=EOE65_17210 PE =4 SV=1
MKLFVNNLTNIDFSYLHTERGLMGESWLVQLQLDGALNDQGMICDFGIVKKVVKEWMDTFADHVLLVPVGSDQADLQYHDQQAQLTWHYKEGEALVCQSPAQAIIAVETPEITPQSLAQWCEAKLKALFPGEVKGLKLHFVAEPEQGAFYHYSHGLQQHEGNCQRIAHGHRSQLHIYRNGQRDSLLEREWAERWQDIYLGTTAHRQPDPKPGVYAYCYQAPQGQFELSLPASRCYDLDTETTVELIAEHLAEQVKAVFPDDSIEVHAFEGIGKGAISVR

SEQ ID NO: 23055 - protein, 140 aa, Nesiotobacter exalbescens
  misc_feature (1)..(140): tr|A0A1U7JHU3|A0A1U7JHU3_9RHOB 6-pyruvoyl tetrahydropte rin synthase OS=Nesiotobacter exalbescens OX=197461 GN= A3843_07720 PE=4 SV=1
MYTVEVKNRIMIAHSLPRDVFGPAQQLHGATYCVRVRFFAQNLDKNGLVVDMGKAMSALEEVLEPLNYQNLDELPQFQGVVTTTEYMAGYIFQRICDAVYLHKLGREPSELDRICVTLSESDVANASFEAPLTASEIHHD

SEQ ID NO: 23056 - protein, 128 aa, Nesterenkonia aurantiaca
  misc_feature (1)..(128): tr|A0A4R7FZ68|A0A4R7FZ68_9MICC 6-pyruvoyl-tetrahydropte rin synthase OS=Nesterenkonia aurantiaca OX=1436010 GN= EV640_10851 PE=4 SV=1
MSRFRLTVDDHIMIAHSLQDPFFGPAQNLHGATLSIQASFFRDGLNEYGVVLDIGAATELLAATLEPLRYKNLDELEALAGKFTTTEVIIEHIAETLAAELPADHGLTALEVQAEEHPRARASVWVQL

SEQ ID NO: 23057 - protein, 128 aa, Nesterenkonia jeotgali
  misc_feature (1)..(128): tr|A0A0W8IFQ5|A0A0W8IFQ5_9MICC 6-pyruvoyl tetrahydrobio pterin synthase OS=Nesterenkonia jeotgali OX=317018 GN= AVL63_01920 PE=4 SV=1
MSRFRLTVDDHIMIAHSLQDPFFGPAQNLHGATLSIQASFFRDGLNEYGVVLDIGAASELLAATLEPLRYQNLDEVDALAGKFTTTEVIIEHIAETLAAGLPADHGLTALEVQAEEHPRARASVWVQL

SEQ ID NO: 23058 - protein, 128 aa, Nesterenkonia sandarakina
  misc_feature (1)..(128): tr|A0A2T0YKF3|A0A2T0YKF3_9MICC 6-pyruvoyl-tetrahydropte rin synthase OS=Nesterenkonia sandarakina OX=272918 GN= BCL67_108147 PE=4 SV=1
MSRFRLTVDDHIMIAHSLQDPFFGPAQNLHGATLSIQASFFREGLNEYGVVLDIGAATELLAATLEPLRYKNLDEVPELAGKFTTTEVIIDHIAQKLAAGLPTDHGLTALEVEAEEHPRARASVHVQL

SEQ ID NO: 23059 - protein, 135 aa, Nesterenkonia sp.
  misc_feature (1)..(135): tr|A0A3A4FHU1|A0A3A4FHU1_9MICC 6-carboxytetrahydropteri n synthase OS=Nesterenkonia sp. M8 OX=2174932 GN=D3250_ 07095 PE=4 SV=1
MTSAHTPVFRISVDDHVMIAHSLPGDFFGPAQQLHGATLAISATFEREGLDEHGVVIDIGMATSLLSEVLDDLRYRNLDEHPDFTHKISTTEVVCQHVAMQMAQALPDQHGLRALEIAADEHPRARASVRVELGH

SEQ ID NO: 23060 - protein, 136 aa, Nesterenkonia sp.
  misc_feature (1)..(136): tr|A0A1X3P8H3|A0A1X3P8H3_9MICC 6-pyruvoyl tetrahydrobio pterin synthase OS=Nesterenkonia sp. PF2B19 OX=1881858 GN=BCY76_007950 PE=4 SV=1
MSTTSTPSMTRFRLTVDDHLMIAHSLADPFFGPAQNLHGATLHIRATFERPGLDPHGVVMDIGAAAELLSGVLDPLRHQNLDEHPAFENKLSTTEVIIAYLAQQLAQVLPADHGLTAIEVEAEENPRASASVRIEL

SEQ ID NO: 23061 - protein, 278 aa, Nevskiales bacterium
  misc_feature (1)..(278): tr|A0A2E9ZX93|A0A2E9ZX93_9GAMM 6-pyruvoyl tetrahydropte rin reductase OS=Nevskiales bacterium OX=2026766 GN=CMH 65_08300 PE=4 SV=1
MATLFVEQLANLDFALLDPERGLVGETYLMDLELSGELDAQGMVLDFGRVKREVRAAAEALVDHKLLIPAAHPALDIQPGQVVLGLVGGGEIEVCSPDIAFCRLPAMAVTVETVADAVSAAVRAVVPDNVDAVRVRLQPEAIDGAYYHYCHGLRKHDGDCQRIAHGHRSRLAITRAGERDAALEAQWAERWNNRFLATVDDELPAQRPGHRRFGYDAPQGRFEIELPEARIDVIPGDTTVECLAAYMAKTLAAQHGQAMTVRAYEGLRKGALASAEPA

SEQ ID NO: 23062 - protein, 136 aa, Niabella drilacis
  misc_feature (1)..(136): tr|A0A1G7BMC8|A0A1G7BMC8_9BACT 6-carboxy-5,6,7,8-tetrah ydropterin synthase OS=Niabella drilacis OX=1285928 GN= SAMN04487894_13118 PE=3 SV=1
MRVSVFRREHFNAAHRLFNPAWDDATNEKIFGKCALPHYHGHNYELEIKVTGEVDPQTGFVMDLKKLSELVAKNVIDKFDHRNLNLDTDEFKHTNPTAENIAIVIYDILRPHIGNDHDLKIRLYETPRNFVEYPSS

SEQ ID NO: 23063 - protein, 135 aa, Niabella drilacis
  misc_feature (1)..(135): tr|A0A1G7BNC5|A0A1G7BNC5_9BACT 6-pyruvoyltetrahydropter in/6-carboxytetrahydropterin synthase OS=Niabella drila cis OX=1285928 GN=SAMN04487894_13117 PE=4 SV=1
MVYLTRIEHFNAAHKLFNPAWTEAQNEQVFGKCANKNWHGHNYELYITVKGEPDPDTGFVYDVKKLSEIIKDHIIEKLDHRNLNEDVDFMKGKLCSTENLAIAIWNELGPHLPEGVLLHCIKLYETPRIYVEYFG

SEQ ID NO: 23064 - protein, 135 aa, Niabella ginsenosidivorans
  misc_feature (1)..(135): tr|A0A1A9HWW7|A0A1A9HWW7_9BACT 6-pyruvoyl tetrahydrobio pterin synthase OS=Niabella ginsenosidivorans OX=117658 7 GN=A8C56_01800 PE=4 SV=1
MIYLTRIEHFNAAHKLFNPKWSEEENEQVFGKCANKNWHGHNYELYITVKGLPDPETGFVYDVKKLSGIIRQHIIEKLDHRNLNEDVGFMKDQLCSTENLAIGIWNELTPHLPPNVQLHCIKLYETPRIYVEYFG

SEQ ID NO: 23065 - protein, 135 aa, Niabella ginsenosidivorans
  misc_feature (1)..(135): tr|A0A1A9HWW4|A0A1A9HWW4_9BACT 6-carboxy-5,6,7,8-tetrah ydropterin synthase OS=Niabella ginsenosidivorans OX=11 76587 GN=A8C56_01795 PE=3 SV=1
MKVSVFRREHFNAAHRLFNPEWDAATNEKVFGKCSLPHYHGHNYELEIKVTGNVDPATGFVMDLKVLSELVNRTVLEKFDHRNLNLDTEEFKNLNPTAENIAIVIYNILRPHINKEQELKIRLYETPRNFVEYPA

SEQ ID NO: 23066 - protein, 135 aa, Niabella soli
  misc_feature (1)..(135): tr|W0F117|W0F117_9BACT 6-carboxy-5,6,7,8-tetrahydropter in synthase OS=Niabella soli DSM 19437 OX=929713 GN=NIA SO_19240 PE=3 SV=1
MKVAVFRREHFNAAHRLFNPAWDDATNEKVFGKCSLPHYHGHNYELEIKVTGEVDPVTGFVMDMKQLSALVNKEVLEQFDHRNLNLDTEVFKTMNPTAENIAIVIYTILRPHINPEHDLQIRLYETPRNFVEYPA

SEQ ID NO: 23067 - protein, 135 aa, Niabella soli
  misc_feature (1)..(135): tr|W0F5X6|W0F5X6_9BACT 6-pyruvoyl tetrahydrobiopterin s ynthase OS=Niabella soli DSM 19437 OX=929713 GN=NIASO_1 9245 PE=4 SV=1
MVYLTRIEHFNAAHKLFNPNWSEEQNEQVFGKCANKNWHGHNYELYITIKGDPDPDTGFVYDVKKLSELIKERVIEQLDHRNLNEDVDFMKGKLCSTENLAIGIWKELAPHLPQGVLLHCIKLYETPRIYVEYFG

SEQ ID NO: 23068 - protein, 149 aa, Niabella sp.
  misc_feature (1)..(149): tr|A0A5C7W344|A0A5C7W344_9BACT 6-carboxy-5,6,7,8-tetrah ydropterin synthase OS=Niabella sp. OX=1962976 GN=E6Q58 _04335 PE=3 SV=1
MVYVTRKSHFSASHRLYNPTFSDEKNDAVFYKCNNLHGHGHNYVLEVTVKGLPDPSTGYVIDLKQLRDIIELEIIDKVDHKHLNYDVPFLEGIIPTAENIAVIFWSILEKSIPMGTLHSVKLYESDNNFVEYFGEPVNIPNFKAEEVLS

SEQ ID NO: 23069 - protein, 136 aa, Niastella koreensis
  misc_feature (1)..(136): tr|G8T9X4|G8T9X4_NIAKG Uncharacterized protein OS=Niast ella koreensis (strain DSM 17620 / KACC 11465 / GR20-10 ) OX=700598 GN=Niako_5079 PE=4 SV=1
MVYLTRVEHFNAAHKLYNPNWSKEQNELVFGKCANEHWHGHNYELYVTVKGRPNPDTGFVCDVKALSKIINQYVIEQLDHKNLNMDVPFMKDQLCSTENLAIAIWKQLLPQLPAGVQLHGIKLYETPRIFVEYFGE

SEQ ID NO: 23070 - protein, 137 aa, Niastella koreensis
  misc_feature (1)..(137): tr|G8T9X5|G8T9X5_NIAKG 6-carboxy-5,6,7,8-tetrahydropter in synthase OS=Niastella koreensis (strain DSM 17620 / KACC 11465 / GR20-10) OX=700598 GN=Niako_5080 PE=3 SV=1
MSKKVAVYRKEHFNAAHRLYNPAWDMAKNDAVFGKCNNPNFHGHNYEVVVKVTGVPDPETGYVMDMKILSDLIRDHVLEQFDHKNLNLDTVYFKTLNPTAENICVVIYDLLRAQIAPQFDLQVRLYETERNFVEYPA

SEQ ID NO: 23071 - protein, 138 aa, Niastella populi
  misc_feature (1)..(138): tr|A0A1V9FGN6|A0A1V9FGN6_9BACT 6-carboxy-5,6,7,8-tetrah ydropterin synthase OS=Niastella populi OX=550983 GN=A4 R26_24395 PE=3 SV=1
MSRKVAVYRKEHFNAAHRLYNPAWDMAKNDAVFGKCNNPSFHGHNYEVVVKVTGEPDPETGYVMDMKILSELIRDHVLERFDHKNLNLDTEYFKTLNPTAENICVVIYDLLREQIDAKLDLQVRLYETERNFVEFPAQ

SEQ ID NO: 23072 - protein, 136 aa, Niastella populi
  misc_feature (1)..(136): tr|A0A1V9FGN0|A0A1V9FGN0_9BACT 6-pyruvoyl tetrahydrobio pterin synthase OS=Niastella populi OX=550983 GN=A4R26_ 24400 PE=4 SV=1
MVYLTRVEHFNAAHKLYNPRWSKEQNEQVFGKCANENWHGHNYELYVTVKGRPNPDTGFVCDVKALSRIINQYVTEQLDHKNLNVDVPFMKDQLCSTENLAIAIWKQLEPHIPAGVQLHGIKLYETPRIFVEYFGE

SEQ ID NO: 23073 - protein, 137 aa, Niastella sp.
  misc_feature (1)..(137): tr|A0A4R2VQY4|A0A4R2VQY4_9BACT 6-carboxy-5,6,7,8-tetrah ydropterin synthase OS=Niastella sp. CF465 OX=2135684 G N=C8K05_11359 PE=3 SV=1
MSRKVAVYRKEHFNAAHRLYNPAWDMAKNDAVFGKCNNPSFHGHNYEVIVKVTGEPDPETGYVMDMKILSDLIRDHVLEKFDHKNLNLDTVYFKDLNPTAENICLVIYDLLREQIDTRLDLQVRLYETERNFVEYPA

SEQ ID NO: 23074 - protein, 144 aa, Niastella sp.
  misc_feature (1)..(144): tr|A0A1E4E744|A0A1E4E744_9BACT Uncharacterized protein OS=Niastella sp. SCN 39-18 OX=1660119 GN=ABS68_11005 PE =4 SV=1
MLQVTKIFHFEMAHAIHGYSGACKNIHGHSYELHVTVSANQQGDNYIPGTGFVVDFKELKKCVNESVITLLDHKLVLSKEYIAAHTPVMNLENVIIWEIEPSAENILVFIQKELSQALPANIQLAALKLYETRDSFAKWIARQV

SEQ ID NO: 23075 - protein, 118 aa, Niastella vici
  misc_feature (1)..(118): tr|A0A1V9FT52|A0A1V9FT52_9BACT 6-carboxy-5,6,7,8-tetrah ydropterin synthase OS=Niastella vici OX=1703345 GN=A38 60_31560 PE=3 SV=1
MLLYKEFTFDSAHFLPNVPDGHKCKNIHGHTYRLRVWLKGKPDPQLGWIIDFAELKKIIKPVVTQLDHKLMNDLPGLQNPTCELIAVWIWDQLKPSLPAMHRIELHETPTSGVIYEGE

SEQ ID NO: 23076 - protein, 136 aa, Niastella vici
  misc_feature (1)..(136): tr|A0A1V9FUV1|A0A1V9FUV1_9BACT 6-pyruvoyl tetrahydrobio pterin synthase OS=Niastella vici OX=1703345 GN=A3860_2 9540 PE=4 SV=1
MVYLTRVEHFNAAHKLYNPNWSQEQNEQVFGKCANQNWHGHNYELYVTVKGRPNRDTGFVCDVKELSRIINQYVIEHIDHKNLNVDVPFMKDQLCSTENLAIAIWKQLQPQLPAGVQLHGIKLYETPRIFVEYFGE

SEQ ID NO: 23077 - protein, 118 aa, Niastella yeongjuensis
  misc_feature (1)..(118): tr|A0A1V9F8L2|A0A1V9F8L2_9BACT 6-carboxy-5,6,7,8-tetrah ydropterin synthase OS=Niastella yeongjuensis OX=354355 GN=A4H97_22135 PE=3 SV=1
MLLYKEFTFDSAHFLPNVPEGHKCKNIHGHTYRLRVWLKGKPDPQYGWIIDFAELKTIIKPVVTQLDHKLMNDIPGLENPTCELIAVWIWDNLKPALPAMHRIELHETPTSGVIYEGE

SEQ ID NO: 23078 - protein, 136 aa, Niastella yeongjuensis
  misc_feature (1)..(136): tr|A0A1V9EYV4|A0A1V9EYV4_9BACT 6-pyruvoyl tetrahydrobio pterin synthase OS=Niastella yeongjuensis OX=354355 GN= A4H97_27360 PE=4 SV=1
MVYLTRVEHFNAAHKLYNPNWSKEQNEIVFGKCANEHWHGHNYELYVTVKGRPNPDTGFVCDVKALSKIINQYVIEQLDHKNLNMDVPFMKDQLCSTENLAIAIWKQLQPQLPAGVQLHGIKLYETPRIFVEYFGE

SEQ ID NO: 23079 - protein, 144 aa, Nibricoccus aquaticus
  misc_feature (1)..(144): tr|A0A290QK59|A0A290QK59_9BACT 6-pyruvoyl tetrahydropte rin synthase OS=Nibricoccus aquaticus OX=2576891 GN=CMV 30_18230 PE=4 SV=1
MPYRICKVFSVENGHILSKHPGKCRFPHGHSRRIEVVVEADELDANDMVCDFKQVSALIGGFIETFDHAMCLNTADAHYPLYRAAYERVVAFENQDPTSELMARRVFEKMKAELETSPEAVARRVRVRRIRMHETATSWAEYEG

SEQ ID NO: 23080 - protein, 160 aa, Nibricoccus aquaticus
  misc_feature (1)..(160): tr|A0A290QAY0|A0A290QAY0_9BACT 6-pyruvoyl tetrahydrobio pterin synthase OS=Nibricoccus aquaticus OX=2576891 GN= CMV30_10505 PE=4 SV=1
MPEKTRSRSSKKGAVVRPQKGTVIITRQVHFNSAHRLYNPTKSQAWNLEQFGLCTNPHWHGHNYVLEVSLRGEPDPETGCVMDLGDLKELLNRVIVDKCDHHNLNDEVDFLRGIIPSTENLVIAFWNELAPHITHGRLHSVKLFETPRNFAEYRGPEGIY

SEQ ID NO: 23081 - protein, 140 aa, Nicoletella semolina
  misc_feature (1)..(140): tr|A0A4V2SJU3|A0A4V2SJU3_9PAST 6-carboxy-5,6,7,8-tetrah ydropterin synthase OS=Nicoletella semolina OX=271160 G N=EV693_1088 PE=3 SV=1
MFKIAKEFSFDMAHMLDGHDGKCQNLHGHTYKLQVEISGDLHLAGAKRGMVMDYADLKAIVKTHILDPMDHAYLYDLHSEKECRIAQLLIELNSKVYGIPHRTTAEEMAKYMFNKLEQVGLAVSLIRLWETPTSYCEYSR

SEQ ID NO: 23082 - protein, 120 aa, Nissabacter sp.
  misc_feature (1)..(120): tr|A0A4P8SEW3|A0A4P8SEW3_9GAMM 6-carboxy-5,6,7,8-tetrah ydropterin synthase OS=Nissabacter sp. SGAir0207 OX=212 6321 GN=queD PE=3 SV=1
MVTTLFKDFQFEAAHRLPHVPEGHKCGRLHGHSFMVRLEITGEVDAHTGWVMDFSELKAMFKPTWERLDHHYLNDIPGLENPTSEVLAKWIWDELKPQLPILSAVLVKETCTAGCIYKGE

SEQ ID NO: 23083 - protein, 189 aa, Nitratifractor salsuginis
  misc_feature (1)..(189): tr|E6X1Z0|E6X1Z0_NITSE Uncharacterized protein OS=Nitra tifractor salsuginis (strain DSM 16511 / JCM 12458 / E9 I37-1) OX=749222 GN=Nitsa_0731 PE=4 SV=1
MRWIIDKSFDFCYGHRVWSQNLDKEYSLDECLMCRHLHGHQGKIKIFLSSESLIDGMVTDFKHLNWFKAWLDASLDHRFILDRHDPLFGDLMHHYVDEKGQMDEASFFYHEEGYWTPRLEKLGDAPEALIEKYEGMVVVNFVPTSENLTAWILEIVSERMEKLGIVVEAVEFWETPKSHCRVERSTAGS

SEQ ID NO: 23084 - protein, 118 aa, Nitratireductor aquibiodomus
  misc_feature (1)..(118): tr|I5BY80|I5BY80_9RHIZ 6-carboxy-5,6,7,8-tetrahydropter in synthase OS=Nitratireductor aquibiodomus RA22 OX=118 9611 GN=A33O_11335 PE=3 SV=1
MYRVSKEFHFSASHRLTNLPDDHPCARLHGHNYIVVVELAGERLDNHGFVRDYRELKPLKDHIDDTLDHRHLNEVFGHDGVTAEFLAKALFDWCRTRWSEVSAVRVSETPKTWAEYRP

SEQ ID NO: 23085 - protein, 118 aa, Nitratireductor aquibiodomus
  misc_feature (1)..(118): tr|I5BSG5|I5BSG5_9RHIZ 6-carboxy-5,6,7,8-tetrahydropter in synthase OS=Nitratireductor aquibiodomus RA22 OX=118 9611 GN=A33O_19149 PE=3 SV=1
METYKEFTFEAAHKLEPYSGLHGHSFKVSVHLVGEPDPVFGWAANLYEVEKQIDEIHKILDHTYLNDIEGLSVPSLENLAKWIYDRLAEKSPALQRVELKRGAEGQAEGCVYQPAKAA

SEQ ID NO: 23086 - protein, 118 aa, Nitratireductor indicus
  misc_feature (1)..(118): tr|K2PGY8|K2PGY8_9RHIZ 6-carboxy-5,6,7,8-tetrahydropter in synthase OS=Nitratireductor indicus C115 OX=1231190 GN=NA8A_21027 PE=3 SV=1
METYKEFTFEAAHKLEPYSGLHGHSFKVSVHLVGEPDPVFGWAANLYEVEKQIEGIHKTLDHKYLNEIEGLSVPSLENLAKWIFDKLSEKTDTLDRVEVKRGAEGQAEGCVYRRARAA

SEQ ID NO: 23087 - protein, 118 aa, Nitratireductor indicus
  misc_feature (1)..(118): tr|K2PB43|K2PB43_9RHIZ 6-carboxy-5,6,7,8-tetrahydropter in synthase OS=Nitratireductor indicus C115 OX=1231190 GN=NA8A_01475 PE=3 SV=1
MYRVSKEFHFSASHRLANLPDDHSCARLHGHNYIVVVELAGERLDNHGFVRDYRELDPLKRHIDNTLDHRHLNEVFGHDGVTAEFLAKALYDWCKARWSEVSAVRVSETPKTWAEYRP

SEQ ID NO: 23088 - protein, 118 aa, Nitratireductor pacificus
  misc_feature (1)..(118): tr|K2MCS7|K2MCS7_9RHIZ 6-carboxy-5,6,7,8-tetrahydropter in synthase OS=Nitratireductor pacificus pht-3B OX=3919 37 GN=NA2_04371 PE=3 SV=1
MYRVSKEFHFSASHRLANLPDDHPCARLHGHNYIVVVELAGAQLDNQGFVRDYRELAPLKQHIDTVLDHRHLNEVFGHDGVTAEFLARALYDWCKARWREVSAVRVSETPKTWAEYRP

SEQ ID NO: 23089 - protein, 118 aa, Nitratireductor pacificus
  misc_feature (1)..(118): tr|K2M9U8|K2M9U8_9RHIZ 6-carboxy-5,6,7,8-tetrahydropter in synthase OS=Nitratireductor pacificus pht-3B OX=3919 37 GN=NA2_16108 PE=3 SV=1
METYKEFTFEAAHKLEPYSGLHGHSFKVSVHLVGEPDPVFGWAANLYEVEKQIDAIHGILDHTYLNDIEGLSVPSLENLAKWIFDKLAEKSPALDRVELKRGAEGQAEGCIYRRREAA

SEQ ID NO: 23090 - protein, 118 aa, Nitratireductor sp.; identical to SEQ ID NO: 23084
  misc_feature (1)..(118): tr|A0A1H4LD06|A0A1H4LD06_9RHIZ 6-carboxy-5,6,7,8-tetrah ydropterin synthase OS=Nitratireductor sp. ES.061 OX=18 55335 GN=SAMN05216452_2769 PE=3 SV=1

SEQ ID NO: 23091 - protein, 118 aa, Nitratireductor sp.
  misc_feature (1)..(118): tr|A0A2E0J7E1|A0A2E0J7E1_9RHIZ 6-carboxy-5,6,7,8-tetrah ydropterin synthase OS=Nitratireductor sp. OX=1872084 G N=CMH69_02375 PE=3 SV=1
METYKEFTFEAAHKLEPYSGLHGHSFKVSVHLVGEPDPVYGWAANLYEVEKQIDEIHKILDHTYLNDIEGLSVPSLENLAKWIYDKLAEKSPALHRVELKRGAEGQAEGCIYQPAKAA

SEQ ID NO: 23092 - protein, 193 aa, Nitratiruptor sp.
  misc_feature (1)..(193): tr|A6Q5C8|A6Q5C8_NITSB 6-pyruvoyl-tetrahydropterin synt hase OS=Nitratiruptor sp. (strain SB155-2) OX=387092 GN =NIS_1580 PE=4 SV=1
MIIRKLFKFENAHIVRNCTSRRCSESIHGHSYKVELLFASDTLDRGQMVYDFGLTKLTIKELIDSFDHAITLWSGDDPRYLEDMKRWSRRWVELPVSPSAEQYARVIFLMTDLVLRQTEMVNEEKNVHLESVIVHETDTGYAKCTKEDAYSEKMGSIDLGSIIFSDGVKEEWSDPQIWDKLLRGEKIVNPKKI

SEQ ID NO: 23093 - protein, 193 aa, Nitratiruptor tergarcus
  misc_feature (1)..(193): tr|A0A1W1WQX0|A0A1W1WQX0_9PROT 6-pyruvoyltetrahydropter in/6-carboxytetrahydropterin synthase OS=Nitratiruptor tergarcus DSM 16512 OX=1069081 GN=SAMN05660197_0172 PE= 4 SV=1
MLIRKLYKFENAHIVRNCTTRRCSESIHGHSYKVELIFSSEYLDRGQMVYDFGLTKLTIKELIDSFDHAITLWSEDEPEYLAAMKKWSRRWVELPVSPSAEQYARVILLMVDLVMQNTVTVNEEKDVIIHSVRVHETDTGYAECSREDALSEKLGKIDLYAIKFSQGVKEEWSSPDMWERLLRGEKIVNPKKI

SEQ ID NO: 23094 - protein, 279 aa, Nitrincola lacisaponensis
  misc_feature (1)..(279): tr|A0A063Y0K9|A0A063Y0K9_9GAMM NADPH dependent preQ0 re ductase OS=Nitrincola lacisaponensis OX=267850 GN=ADINL _2810 PE=4 SV=1
MKLFVDNLTHVDFSYLHPQRGLMGESWEVQLVLEGKLDEQGMICDFGVVKKRIKTWLDAHVDHMLVVATGMPGLAVEQFDGQTRVSWPYPDGGTFVCQAPEQAIALIPVDTIQQQAVARWCEDQLLALFPEQVESLALRFVAESIEGAFYHYSHGLQQHKGNCQRIAHGHRSRVQIRVDQKRRQDLELFWAQQFEDIYLGTRAHLQAVEEGQAVFRYQAPQGDFQLTLPVSRCYMMDTETTVEQIAQHLAEKVAEEYPDSVVEVRAYEGVGKGAIVTRP

SEQ ID NO: 23095 - protein, 279 aa, Nitrincola nitratireducens
  misc_feature (1)..(279): tr|W9UX39|W9UX39_9GAMM Queuosine biosynthesis protein Q ueD OS=Nitrincola nitratireducens OX=1229521 GN=D791_03 773 PE=4 SV=1
MKLFVDNLTHVDFSYLHPQRGLVGESWEAQLILKGKLDDQGMICDFGTVKKRIKAWLDSHIDHMLVVARDMASLKVSQDELDTEVEWLYPDGERFFCKAPHQAIALLPVADITQKTVAGWAQEQLLALFPEQVESVEIHFVAEKIEGAFYHYSHGLQQHKGNCQRIAHGHRSRMEVKLDGKRRQDIELYWSQQFADIYIGTLAHRVESIEGVNRYEYVAPQGAFQLELPARYCYDLTTETTVEQIALHLAEQIKDEYSEYEVEVRAFEGVGKGAIVVID

SEQ ID NO: 23096 - protein, 278 aa, Nitrincola sp.
  misc_feature (1)..(278): tr|A0A099PDY3|A0A099PDY3_9GAMM Uncharacterized protein OS=Nitrincola sp. A-D6 OX=1545442 GN=LH51_06925 PE=4 SV =1
MKLFVDNLTHVDFSYLHPQRGLVGESWEVQLVLEGRLDEQGMICDFGVVKKRIKTWLDTHVDHMLVVATGMSGLIWQQSAGVTQVSWSYPAGGRFVCKAPDQAIALVPVAEIQQQAVAKWCETQLLALFPEQVESLELRFVAEPIEGAFYHYSHGLQQHRGNCQRIAHGHRSRMQVRVDQKRRQDLELYWSQQFEDIYIGTQAHLLKNEEGHALFAYEAPQGKFELLLPMRCCYLMETETTVEQIAEHLAQSIKAEYPDSTIEVRAYEGVGKGAIAVK

SEQ ID NO: 23097 - protein, 281 aa, Nitrincola sp.
  misc_feature (1)..(281): tr|A0A5A9VYS1|A0A5A9VYS1_9GAMM Uncharacterized protein OS=Nitrincola sp. MEB193 OX=1708751 GN=E1H14_12275 PE=4 SV=1
MKLFVDNLTHVDFSYLHPERGLVGESWEAQLILQGKLDDQGMICDFGVVKKRIKAWLDSHLDHMLVVPALMDSLELARQDGEIQLQWHYPSGERLFCRAPQQAIAVLPLMEISQKGVAAWCEAQLLALFPEQVESLQLTFVAEEIEGAFYHYSHGLQKHGGNCQRIAHGHRSRVQIRVDGKRRQDLEQYWAQTFADIYIGTRAHLQADSNESWHHYAYTAPQGEFELSLPARYCYVIETESTVEQIAQHLLEQIQLEYPESQVQVRAYEGVGKGAITQTAS

SEQ ID NO: 23098 - protein, 278 aa, Nitrincola tibetensis
  misc_feature (1)..(278): tr|A0A364NHP5|A0A364NHP5_9GAMM Uncharacterized protein OS=Nitrincola tibetensis OX=2219697 GN=DN062_17280 PE=4 SV=1
MKLFVDNLTHVDFSYLHPQRGLVGESWEAQLILQGKLDDQGMICDFGTVKKRIKAWLDSHVDHMLVVARDMESLTVSQDEQDTAVEWFYPGGERFFCKAPHQAIALLPVAEITQKTVAGWAQEQLLALFPEQVESVEIHFVAEKIEGAFYHYSHGLQQHKGNCQRIAHGHRSRMEVKLDNKRRQDVELYWSQQFSDIYIGTLAHRVESIDGVNRYEYLAPQGAFQLELPARYCYDLVTETTVEQIAQHLAEQIKEEYSDYEVEVRAFEGVGKGAIVVI

SEQ ID NO: 23099 - protein, 136 aa, Nitritalea halalkaliphila
  misc_feature (1)..(136): tr|I5BY46|I5BY46_9BACT 6-carboxy-5,6,7,8-tetrahydropter in synthase OS=Nitritalea halalkaliphila LW7 OX=1189621 GN=A3SI_15920 PE=3 SV=1
MRVSVFRKEHFNAAHKLHNPNWSKEKNEATFGKCNNEYYHGHNYDLHVKVTGEIDPETGYVCDMKVLSDLIKEHVIDKFDHKNLNLDTDEFKNLNPTAENMAVVIWNILKEKLDSKYDLMIRLYETERNYVEYDGK

SEQ ID NO: 23100 - protein, 139 aa, Nitritalea halalkaliphila
  misc_feature (1)..(139): tr|I5C1K1|I5C1K1_9BACT Uncharacterized protein OS=Nitri talea halalkaliphila LW7 OX=1189621 GN=A3SI_12689 PE=4 SV=1
MVLVCRKEHFNAAHKLWNPNWSEEKNKEVFGPCANVNWHGHNFELIVTVKGTPDPETGFVVDLKALSDLIRKLIISQVDHKNLNLDVPFMEGKMASCEILVMEFWKILAPAVAEIVPFGGLYKLTLYETPRNFVEYYGE

SEQ ID NO: 23101 - protein, 121 aa, Nitrobacter hamburgensis
  misc_feature (1)..(121): tr|Q1QIG8|Q1QIG8_NITHX 6-carboxy-5,6,7,8-tetrahydropter in synthase OS=Nitrobacter hamburgensis (strain DSM 102 29 / NCIMB 13809 / X14) OX=323097 GN=Nham_3244 PE=3 SV= 1
MWELTKSFRFEAAHSLPGTTFGAASMEIHGHSFRAEVSVRGTPDPATGMVLDLGLLERGMGEVRNKLDHKLLNNVEGLGPPTLENLARFIWDHVQPAGQVTRVSVHRDSCGESCTYFGPRI

SEQ ID NO: 23102 - protein, 121 aa, Nitrobacter sp.
  misc_feature (1)..(121): tr|A0A1Q3K794|A0A1Q3K794_9BRAD 6-carboxy-5,6,7,8-tetrah ydropterin synthase OS=Nitrobacter sp. 62-13 OX=1895797 GN=BGN91_02195 PE=3 SV=1
MWELTKSFRFEAAHALPGTTLGNASMEIHGHSFRAEVSVRGTPDSVTGMVLDLGLLARGMEEVRSKLDHRLLNDVEGLGPPTLENLARFIWDHVQHAGHVTRISVHRDSCGESCTYFGPEN

SEQ ID NO: 23103 - protein, 121 aa, Nitrobacter sp.
  misc_feature (1)..(121): tr|A3WT49|A3WT49_9BRAD 6-carboxy-5,6,7,8-tetrahydropter in synthase OS=Nitrobacter sp. Nb-311A OX=314253 GN=NB3 11A_15027 PE=3 SV=1
MWELTKSFRFEAAHALPGTTLGIASMEIHGHSFRAEVSLRGKPDPASGMVLDLGLLERSMDKVRNKLDHKLLNDIEGLGLPTLENLARFIWDHVQHAGHVTRVSVHRDSCGESCAYFGPEN

SEQ ID NO: 23104 - protein, 121 aa, Nitrobacter vulgaris
  misc_feature (1)..(121): tr|A0A1V4HXD5|A0A1V4HXD5_NITVU 6-carboxy-5,6,7,8-tetrah ydropterin synthase OS=Nitrobacter vulgaris OX=29421 GN =B2M20_14030 PE=3 SV=1
MWELTKSFRFEAAHSLPATTLGTASMEIHGHSFRAEVSVRGKPDPASGMVLDLGLLERGMGEVRSKLDHKLLNNVEGLGPPTLENLARFIWDHVQHAGHVTRVSVHRDSCGESCTYFGPES

SEQ ID NO: 23105 - protein, 123 aa, Nitrobacter winogradskyi
  misc_feature (1)..(123): tr|Q3SPB8|Q3SPB8_NITWN 6-carboxy-5,6,7,8-tetrahydropter in synthase OS=Nitrobacter winogradskyi (strain ATCC 25 391 / DSM 10237 / CIP 104748 / NCIMB 11846 / Nb-255) OX =323098 GN=Nwi_2620 PE=3 SV=1
MWELTKSFRFEAAHALPGTTLGAASMEIHGHSFRAEVSLRGTPDPASGMVLDLGLLERGMGEVRNKLDHKLLNDVEGLGPPTLENLARFIWDHVQHAGAVTRVSVHRDSCGESCAYFGPHVPS

SEQ ID NO: 23106 - protein, 123 aa, Nitrobacter winogradskyi; identical to SEQ ID NO: 23105
  misc_feature (1)..(123): tr|A0A4Y3W655|A0A4Y3W655_NITWI 6-carboxy-5,6,7,8-tetrah ydropterin synthase OS=Nitrobacter winogradskyi OX=913 GN=NWI01_03550 PE=3 SV=1

SEQ ID NO: 23107 - protein, 127 aa, Nitrococcus mobilis
  misc_feature (1)..(127): tr|A4BSY1|A4BSY1_9GAMM 6-carboxy-5,6,7,8-tetrahydropter in synthase OS=Nitrococcus mobilis Nb-231 OX=314278 GN= NB231_00850 PE=3 SV=1
MSGRYILSIVTDFSASHILEGHPGKCSRLHGHNWSVEVEVEARELDRLGMAIDFAELKAATRQIVETMDHRHLNDLPEFAGINPTAEHVAGAIYRALRTWLSGHHARLSAVTVWETAHARVRYTEED

SEQ ID NO: 23108 - protein, 126 aa, Nitrosococcus halophilus
  misc_feature (1)..(126): tr|D5C4H2|D5C4H2_NITHN Uncharacterized protein OS=Nitro sococcus halophilus (strain Nc4) OX=472759 GN=Nhal_2052 PE=4 SV=1
MYTIAVKDHFMIAHSLQGEVFGPAQKLHGATYNVTAEFRTERLSQDGIVIDIGLALNALKAVLALLNYKNLDEEEAFRGVNTTTEYLAHYIHGQLAKRVRASFQGTLKITLEESHVAWGSYEGTVT

SEQ ID NO: 23109 - protein, 129 aa, Nitrosococcus halophilus
  misc_feature (1)..(129): tr|D5BXV2|D5BXV2_NITHN 6-carboxy-5,6,7,8-tetrahydropter in synthase OS=Nitrosococcus halophilus (strain Nc4) OX =472759 GN=Nhal_2797 PE=3 SV=1
MAATYTLKILTDFASAHTLRDYPGECRRMHGHNWKLEVEVTAQALDQQGMAMDFKAIKESARNLCAQLDHRYLNDIPPFDQINPTAENLAAFFYRGLSEKLNNERAQVSAITLWETERACVRYTEDQQQ

SEQ ID NO: 23110 - protein, 127 aa, Nitrosococcus oceani
  misc_feature (1)..(127): tr|A0A0E2ZL92|A0A0E2ZL92_9GAMM 6-carboxy-5,6,7,8-tetrah ydropterin synthase OS=Nitrosococcus oceani C-27 OX=314 279 GN=IB75_10865 PE=3 SV=1
MAITYTLKIITDFSSAHTLRDYPGECRRMHGHNWKLEVEVTAQALDQQGMVMDFKDIKESARELCAQLDHRYLNDISPFDLINPTAENLAAFFYRGLSKQLNNERARVSAITLWETERACVRYTEDQ

SEQ ID NO: 23111 - protein, 126 aa, Nitrosococcus oceani
  misc_feature (1)..(126): tr|Q3JC64|Q3JC64_NITOC 6-pyruvoyl tetrahydropterin synt hase OS=Nitrosococcus oceani (strain ATCC 19707 / BCRC 17464 / NCIMB 11848 / C-107) OX=323261 GN=Noc_1077 PE=4 SV=1
MYTLAVKDHFMIAHSLQGEVFGPAQGLHGATYNVIAEFHTEKLDQDGIVIDIGLALKALQAVLALLNYKNLDEEQSFRGANTTTEYLAHYIHGQLAKRVRATFQGKLKITLEESHVAWGSYEGPVS

SEQ ID NO: 23112 - protein, 129 aa, Nitrosococcus wardiae
  misc_feature (1)..(129): tr|A0A4P7C0U5|A0A4P7C0U5_9GAMM 6-carboxy-5,6,7,8-tetrah ydropterin synthase OS=Nitrosococcus wardiae OX=1814290 GN=queD PE=3 SV=1
MAAIYTLKILTDFASAHTLRDYPGECRRMHGHNWKLEVEVTAHVLDQQGMAMDFKAIKENARNLCAQLDHRYLNDIPPFDQINPTAENLAAFFYRGLSEKLNNERARVSAITLWETERACVRYTEDQQQ

SEQ ID NO: 23113 - protein, 126 aa, Nitrosococcus wardiae
  misc_feature (1)..(126): tr|A0A4P7BZI3|A0A4P7BZI3_9GAMM 6-carboxytetrahydropteri n synthase OS=Nitrosococcus wardiae OX=1814290 GN=E3U44 _14810 PE=4 SV=1
MYAIAVKDHFMIAHSLQGEVFGPAQKLHGATYNVTAEFRTERLSQDGIVIDIGLALNALKAVLALLNYKNLDEEEPFRGVNTTTEYLAHYIHGQLAKRVRDSFQGTLKITLEESHVARGSYEGTVT

SEQ ID NO: 23114 - protein, 126 aa, Nitrosococcus watsoni
  misc_feature (1)..(126): tr|D8K7B4|D8K7B4_NITWC Uncharacterized protein OS=Nitro sococcus watsoni (strain C-113) OX=105559 GN=Nwat_1951 PE=4 SV=1
MYTLAVKDHFMIAHSLQGEIFGPAQGLHGATYNVTAEFHTEQLNQDGIVIDIGLALKALQAVLALLNYKNLDEEESFRGINTTTEYLAHYIHGQLAKRVRATFQGKLKITLEESHVAWGAYEGPVS

SEQ ID NO: 23115 - protein, 129 aa, Nitrosococcus watsoni
  misc_feature (1)..(129): tr|D8K523|D8K523_NITWC 6-carboxy-5,6,7,8-tetrahydropter in synthase OS=Nitrosococcus watsoni (strain C-113) OX= 105559 GN=Nwat_1061 PE=3 SV=1
MAITYTLKILTDFSSAHTLRDYPGECRRMHGHNWKLEVEVTAQALDQQGMVMDFKDIKKSARQLCAQLDHRYLNDISPFDRINPTAENLAAFFYRGLSQQLNNERAWVSAITLWETERACVRYTEDQSP

SEQ ID NO: 23116 - protein, 149 aa, Nitrosomonadaceae bacterium
  misc_feature (1)..(149): tr|A0A2E6UQB3|A0A2E6UQB3_9PROT 6-carboxytetrahydropteri n synthase QueD OS=Nitrosomonadaceae bacterium OX=20267 67 GN=queD PE=4 SV=1
MLISSKLEFDAGHRIPSHNSHCRHLHGHRYAIEITLSGNIITDEGIANQGMIMDYSEVKRIAKDTLINKWDHAFLVYSGDIQVLKFLQSIKDHKTVILDKPPTAENLALIAFDILDHAYIDNYENNLRLEKIRLYETPNCWADAIRKEN

SEQ ID NO: 23117 - protein, 149 aa, Nitrosomonadaceae bacterium
  misc_feature (1)..(149): tr|A0A4P5UIU0|A0A4P5UIU0_9PROT 6-carboxytetrahydropteri n synthase QueD OS=Nitrosomonadaceae bacterium OX=20267 67 GN=LBMAG32_11190 PE=4 SV=1
MLITRKLEFDAGHRIPSHKNQCRHLHGHRYSIEISLSGNVITDEGAAKQGMVMDYSEIKSIAKNSLVDKWDHAFLVYAGDTILLKFLQSLEDHKTVILSVPPTAENLALIAFSILDPAYQDIYGNNLKLERVRLFETPNCWADATREGV

SEQ ID NO: 23118 - protein, 145 aa, Nitrosomonadales bacterium
  misc_feature (1)..(145): tr|A0A2E0I711|A0A2E0I711_9PROT 6-carboxytetrahydropteri n synthase QueD OS=Nitrosomonadales bacterium OX=202676 1 GN=queD PE=4 SV=1
MEITTRLEFDAGHRIPSHKSNCKNLHGHRYCIEVTIKGDINSENTKSNFGMVMDFKDAKDLIKKSIIDEWDHSFIVYKDDIIVLDFLQSLDNHKTVIFPLVPTAENMALIAMDKLKIAFKEEFGDSIKPFKVKLYETPNNWAEAY

SEQ ID NO: 23119 - protein, 149 aa, Nitrosomonadales bacterium
  misc_feature (1)..(149): tr|A0A1E4FSQ3|A0A1E4FSQ3_9PROT 6-carboxytetrahydropteri n synthase QueD OS=Nitrosomonadales bacterium SCN 54-20 OX=1660164 GN=ABS69_12960 PE=4 SV=1
MLITRRLEFDAGHRIPFHKSQCRHLHGHRYAIEITLSGEIITEPGVSEQGMVMDYSEVKRIAKKVLVDKWDHAFLAFAEDHKLLEFLQSLEDHKTVVLDTPPTAENLALTAFRILDEAYQDHYGNHLRLEQVRLFETPNCWADAVRGRL

SEQ ID NO: 23120 - protein, 149 aa, Nitrosomonas aestuarii
  misc_feature (1)..(149): tr|A0A1I4GJJ4|A0A1I4GJJ4_9PROT 6-pyruvoyltetrahydropter in/6-carboxytetrahydropterin synthase OS=Nitrosomonas a estuarii OX=52441 GN=SAMN05216302_10572 PE=4 SV=1
MLITRKLEFDAGHRISTHNSQCRHLHGHRYVIEITLSGNIISEKGVAQQGMVMDFSEVKRIAKSALVDKWDHAFLVYSGDAPVMEFLQSLKDHKTVVLDVQPTAENLAVIAFGILDEAYQDIYGNHLQLEQVRLFETPNCWADAIRGAH

SEQ ID NO: 23121 - protein, 155 aa, Nitrosomonas communis
  misc_feature (1)..(155): tr|A0A1H2SDN4|A0A1H2SDN4_9PROT 6-pyruvoyltetrahydropter in/6-carboxytetrahydropterin synthase OS=Nitrosomonas c ommunis OX=44574 GN=SAMN05421882_10076 PE=4 SV=1
MLITRRLEFDAGHRISTHNSQCRHLHGHRYVIEITLSGNIISDEGVAEQGMVMDFSEIKRIAKEVLVDKWDHAFLVYVGDTLVVEFLQSLKDHKTVIIDTQPTAENLAIKAFHILDLAFQDTYGNRLALEQVRLYETPNCWADARREIINHTNNP

SEQ ID NO: 23122 - protein, 155 aa, Nitrosomonas communis
  misc_feature (1)..(155): tr|A0A1I4R692|A0A1I4R692_9PROT 6-pyruvoyltetrahydropter in/6-carboxytetrahydropterin synthase OS=Nitrosomonas c ommunis OX=44574 GN=SAMN05421863_103043 PE=4 SV=1
MLITRRLEFDAGHRISTHNSQCRHLHGHRYVIEITLSGNIISDEGVAEQGMVMDFSEIKRIAKDVLVDKWDHAFLAYAGDTLVVEFLQSLKDHKTVILDTQPTAENLAIKAFHILDVAFQDTYGNRLALEQVRLYETPNCWADARRETVNNTNNP

SEQ ID NO: 23123 - protein, 149 aa, Nitrosomonas cryotolerans
  misc_feature (1)..(149): tr|A0A1N6JKK6|A0A1N6JKK6_9PROT 6-pyruvoyltetrahydropter in/6-carboxytetrahydropterin synthase OS=Nitrosomonas c ryotolerans ATCC 49181 OX=1131553 GN=SAMN02743940_2675 PE=4 SV=1
MLITRRLEFDAGHRISTHNSQCRHLHGHRYVIEITLSGEVICEEGVAEQGMVMDFSEVKQIAKTALVDKWDHAFLVYSGDIPVVKFLQSLEGHKTVVLDTQPTAENLALAAFRVLDEAYQDNYGNHLRLEQVRLFETPNCWADAIRERG

SEQ ID NO: 23124 - protein, 160 aa, Nitrosomonas europaea
  misc_feature (1)..(160): tr|A0A1H9Z440|A0A1H9Z440_NITER 6-pyruvoyltetrahydropter in/6-carboxytetrahydropterin synthase OS=Nitrosomonas e uropaea OX=915 GN=SAMN05216309_103145 PE=4 SV=1
MLITRKFEFDAGHRISTHLSQCRNLHGHRYVLEVTIAGGIIADAGVPEQGMVMDFSDVKRVIREALVDRWDHAFLVYAGDTRVLEFLQSLENHKTVVLEVQPTAENLALIAFDILRHTFRNRYAGRLELEHVRLFETPNCWADVDKAVFKSATVDRIAES

SEQ ID NO: 23125 - protein, 160 aa, Nitrosomonas europaea; identical to SEQ ID NO: 23124
  misc_feature (1)..(160): tr|Q82UG9|Q82UG9_NITEU 6-pyruvoyl tetrahydropterin synt hase OS=Nitrosomonas europaea (strain ATCC 19718 / CIP 103999 / KCTC 2705 / NBRC 14298) OX=228410 GN=NE1517 PE =4 SV=1

SEQ ID NO: 23126 - protein, 160 aa, Nitrosomonas eutropha
  misc_feature (1)..(160): tr|Q0AGJ5|Q0AGJ5_NITEC Uncharacterized protein OS=Nitro somonas eutropha (strain DSM 101675 / C91) OX=335283 GN =Neut_1286 PE=4 SV=1
MLITRKFEFDAGHRISTHRSQCRNLHGHRYVLEVTILGGIITDAGAPEQGMVMDFSDVKRVIRETLVDQWDHAFLVYAGDTRVLEFLQSIDGHKTVVLEVQPTAENLALIAFDSLHRTLRNKYAGRLELEHIRLFETPNCWADVNKVDFKFDLVGEAPGS

SEQ ID NO: 23127 - protein, 160 aa, Nitrosomonas eutropha; identical to SEQ ID NO: 23126
  misc_feature (1)..(160): tr|A0A2V3Q9Y7|A0A2V3Q9Y7_9PROT 6-pyruvoyltetrahydropter in/6-carboxytetrahydropterin synthase OS=Nitrosomonas e utropha OX=916 GN=C8R14_1348 PE=4 SV=1

SEQ ID NO: 23128 - protein, 155 aa, Nitrosomonas halophila
  misc_feature (1)..(155): tr|A0A1H3DMB4|A0A1H3DMB4_9PROT 6-pyruvoyltetrahydropter in/6-carboxytetrahydropterin synthase OS=Nitrosomonas h alophila OX=44576 GN=SAMN05421881_100576 PE=4 SV=1
MLITRKFEFDAGHRISTHTSKCRNLHGHRYVLEITLSGHIIADAGVPEQGMVMDFSEVKRIAKEALVDQWDHAFLVYAGDALVLSFLQSLPDHKTVVLEVQPTAENLALIAFGVLDRAFCDKYGNQLQLEHVRLFETPNCWADVDRKGGMYDRGA

SEQ ID NO: 23129 - protein, 149 aa, Nitrosomonas marina
  misc_feature (1)..(149): tr|A0A1I0FBS5|A0A1I0FBS5_9PROT 6-carboxy-5,6,7,8-tetrah ydropterin synthase OS=Nitrosomonas marina OX=917 GN=SA MN05216326_1366 PE=3 SV=1
MLITRKLEFDAGHRISTHNSQCRHLHGHRYVIEITLSGSIISEKGNAQQGMVMDFSEVKRIASEVLVDKWDHAFLVYSGDTPVMQFLQSLEDHKTVVLDVQPTAENLAVIAFDILNAAYQDNYGNHLQLEHVRLYETPNCWADASRAVD

SEQ ID NO: 23130 - protein, 214 aa, Nitrosomonas marina
  misc_feature (1)..(214): tr|A0A1H8DBS2|A0A1H8DBS2_9PROT 6-pyruvoyltetrahydropter in/6-carboxytetrahydropterin synthase OS=Nitrosomonas m arina OX=917 GN=SAMN05216325_106146 PE=4 SV=1
MLIRKLFRFENTHRVRGCSTRRCSHSIHGHSYKTELLLEAHALDNGQMVYDFGLLKNNVRDLIDAFDHAVSLWSGDDPDYLATMRKHSERWILLPVSPSAEQLSRILFRLVDTLLRHTAMANGEADVQLHSVIVHETESGYAQCFREDACNPRMGLIELSDIAFSATITRSWQDIELFENLKQYDRIFLRQSRNHDPEKKILMTRNISKTCTES

SEQ ID NO: 23131 - protein, 151 aa, Nitrosomonas mobilis
  misc_feature (1)..(151): tr|A0A1G5SC98|A0A1G5SC98_9PROT 6-pyruvoyl tetrahydropte rin synthase OS=Nitrosomonas mobilis OX=51642 GN=NSMM_2 60068 PE=4 SV=1
MLITRKFEFDAGHRISTHASQCRNLHGHRYVLEVTLSGKIVNDEGVPEQGMVMDFSEVKSIVHTALVDQWDHAFLVYIQDKPVIDFLLSIPDHKTVVLDLQPTAENLALIAFDILDNAFREHYKEQLQLDHVRLFETPNCWADVARTDTGS

SEQ ID NO: 23132 - protein, 155 aa, Nitrosomonas nitrosa
  misc_feature (1)..(155): tr|A0A3D0F959|A0A3D0F959_9PROT 6-carboxytetrahydropteri n synthase QueD OS=Nitrosomonas nitrosa OX=52442 GN=que D PE=4 SV=1
MLITRRLEFDAGHRISTHNSQCRHLHGHRYVIEISLSGNIISDEGVPEQGMVLDFSAIKRIAKEIIVDKWDHAFLVYAGDKPVVDFLQSIEGHKTVIFDSQPTAENLAVKAFQLLDRAFEAAYGNRLRLEQVRLYETPNCWADAKREKIDLTNHS

SEQ ID NO: 23133 - protein, 155 aa, Nitrosomonas nitrosa
  misc_feature (1)..(155): tr|A0A1I4M3J7|A0A1I4M3J7_9PROT 6-pyruvoyltetrahydropter in/6-carboxytetrahydropterin synthase OS=Nitrosomonas n itrosa OX=52442 GN=SAMN05421880_103102 PE=4 SV=1
MLITRRLEFDAGHRISTHNSQCRHLHGHRYVIEISLSGNIISDEGVPEQGMVLDFSAIKRIAKEIIVDKWDHAFLVYAGDKPVVDFLQSIEGHKTVIFDSQPTAENLAVKAFQLLDRAFEAAYGSRLRLEQVRLYETPNCWADAKREKIDLTNNS

SEQ ID NO: 23134 - protein, 149 aa, Nitrosomonas oligotropha
  misc_feature (1)..(149): tr|A0A1H8M9M9|A0A1H8M9M9_9PROT 6-pyruvoyltetrahydropter in/6-carboxytetrahydropterin synthase OS=Nitrosomonas o ligotropha OX=42354 GN=SAMN05216333_10523 PE=4 SV=1
MFITRRLEFDAGHRISTHNSQCRHLHGHRYCIEITLSGNIIADEGVAQQGMVMDYSEVKRIAKSVLVDQWDHAFLVYSGDTKVLQFLQSIEDHKTVVLDVQPTAENLALLAFEILDGAYQDSYGNHLQLEQVRLYETPNCWADALRGSV

SEQ ID NO: 23135 - protein, 149 aa, Nitrosomonas oligotropha
  misc_feature (1)..(149): tr|A0A2T5I356|A0A2T5I356_9PROT 6-carboxytetrahydropteri n synthase QueD OS=Nitrosomonas oligotropha OX=42354 GN =queD PE=4 SV=1
MFITRRLEFDAGHRISTHNSQCRHLHGHRYCIEITLSGNIIADEGVAQQGMVMDYSEVKRIAKSVLVDQWDHAFLVYSGDTKVLQFLQSIEDHKTVVLDVQPTAENLALIAFEILDGAYQDSYGNHLQLEQVRLYETPNCWADAVRGSV

SEQ ID NO: 23136 - protein, 149 aa, Nitrosomonas sp.
  misc_feature (1)..(149): tr|A0A2P7NXJ5|A0A2P7NXJ5_9PROT 6-carboxytetrahydropteri n synthase QueD OS=Nitrosomonas sp. APG5 OX=2116706 GN= queD PE=4 SV=1
MLITRRLEFDSGHRISTHNSQCRHLHGHRYCIEITLSGNIIADEGVAQQGMVMDFSEVKQIAKSALVDHWDHAFLVYSGDQQVLQFLQSIEDHKTVILDVQPTAENLALIAFNILDSAYQDSYGNHLQLEQVRLFETPNCWADAVRGVR

SEQ ID NO: 23137 - protein, 149 aa, Nitrosomonas sp.
  misc_feature (1)..(149): tr|A0A1H9RL66|A0A1H9RL66_9PROT 6-carboxy-5,6,7,8-tetrah ydropterin synthase OS=Nitrosomonas sp. Nm51 OX=133720 GN=SAMN05421690_10613 PE=3 SV=1
MLITRKLEFDAGHRISTHNSQCRHLHGHRYVIEITLSGTIISEKGNAQQGMVMDFSEVKRIAEQALVDKWDHAFLVYTGDVPVMQFLQSLDDHKTVVLDVQPTAENLAVIAFNILSAAYQDSYGNHLQLEHVRLYETPNCWADASRVAD

SEQ ID NO: 23138 - protein, 158 aa, Nitrosomonas stercoris
  misc_feature (1)..(158): tr|A0A4Y1YJE9|A0A4Y1YJE9_9PROT Uncharacterized protein OS=Nitrosomonas stercoris OX=1444684 GN=Nstercoris_0033 3 PE=4 SV=1
MLITRKFEFDAGHRISTHQSQCRNLHGHRYVLEVTISGNIITDDAVPEQGMVMDFSNVKRIIQEALVDQWDHAFLVYAGDTRVLEFLQSMDGHKTVVLEVQPTVENLALIAFDKLQRVFRDRYADRLALEHIRLFETPNCWADINRVDFDQDSDSSNA

SEQ ID NO: 23139 - protein, 149 aa, Nitrosomonas ureae
  misc_feature (1)..(149): tr|A0A285BVG7|A0A285BVG7_9PROT 6-carboxy-5,6,7,8-tetrah ydropterin synthase OS=Nitrosomonas ureae OX=44577 GN=S AMN06296273_0299 PE=3 SV=1
MLITRKLEFDAGHRISTHNSQCRHLHGHRYCIEITLSGNIIADEGVAQQGMVMDFAAVKQIAKSTLVDYWDHAFLVYSGDKKVLQFLQSIEDHKTVVLDVQPTAENLALIAFNILDDAYQDSYGNHLQLEQVRLFETPNCWADAVRGAR

SEQ ID NO: 23140 - protein, 149 aa, Nitrosomonas ureae
  misc_feature (1)..(149): tr|A0A0S3AN99|A0A0S3AN99_9PROT 6-carboxy-5,6,7,8-tetrah ydropterin synthase OS=Nitrosomonas ureae OX=44577 GN=S AMN05216406_11081 PE=3 SV=1
MLITRKLEFDAGHRISTHNSQCRHLHGHRYCIEITLSGNIIADEGVAQQGMVMDFAAVKQIAKSTLVDHWDHAFLVYSGDKKVLQFLQSIEDHKTVVLDVQPTAENLALIAFNILDDAYRDSYGNHLRLEQVRLFETPNCWADAVRGAR

SEQ ID NO: 23141 - protein, 153 aa, Nitrosospira briensis
  misc_feature (1)..(153): tr|A0A1I5DBU3|A0A1I5DBU3_9PROT 6-pyruvoyltetrahydropter in/6-carboxytetrahydropterin synthase OS=Nitrosospira b riensis OX=35799 GN=SAMN05216386_2273 PE=4 SV=1
MLITRRLEFDAGHRIPSHNSQCRHLHGHRYAIEITLSGDIITDAGISEQGMVMDYSEIKRIANTTLVDKWDHAFLVYSEDVRLLEFLQSLEDHKTVVLDTPPTAENLALTAFRVLDAAYQDSYGNHLRLEQVRLFETPNCWADARRGQSGISE

SEQ ID NO: 23142 - protein, 154 aa, Nitrosospira lacus
  misc_feature (1)..(154): tr|A0A1W6SP01|A0A1W6SP01_9PROT 6-carboxytetrahydropteri n synthase QueD OS=Nitrosospira lacus OX=1288494 GN=EBA PG3_007015 PE=4 SV=1
MLITRRLEFDAGHRIPSHNSKCRHLHGHRYAIEITLSGDIITEAGAAEQGMVMDYSEVKRIASAVLVDKWDHAFLAYSDDVPVMEFLQSLDGHKTVVLDVPPTAENLALTAFRILDTAYRDSYGNHLRLEQVRLFETPNCWADATRGQVFGPAG

SEQ ID NO: 23143 - protein, 149 aa, Nitrosospira multiformis
  misc_feature (1)..(149): tr|A0A4V3E5T4|A0A4V3E5T4_9PROT 6-pyruvoyltetrahydropter in/6-carboxytetrahydropterin synthase OS=Nitrosospira m ultiformis OX=1231 GN=C8R18_102124 PE=4 SV=1
MLITRRLEFDAGHRIPSHKSQCRHLHGHRYAIEITLSGEIITEPGVSEQGMVMDYSEVKRIAKKVLVDKWDHAFLAYSEDHKLLEFLQSLEDHKTVVLATPPTAENLALTAFHILDEAYQDRYGNHLRLEQVRLFETPNCWADAVRGQL

SEQ ID NO: 23144 - protein, 149 aa, Nitrosospira multiformis
  misc_feature (1)..(149): tr|Q2Y7N2|Q2Y7N2_NITMU 6-carboxy-5,6,7,8-tetrahydropter in synthase OS=Nitrosospira multiformis (strain ATCC 25 196 / NCIMB 11849 / C 71) OX=323848 GN=Nmul_A1944 PE=3 SV=1
MLITRRLEFDAGHRIPSHKSQCRHLHGHRYAIEITLSGEIITEPGISEQGMVMDYSEVKRIAKEVLVDKWDHAFLAYAEDHKLLEFLQSLEDHKTVVLDTPPTAENLALTAFYILDEAYQDRYGNHLRLEQVRLFETPNCWADAVRGQP

SEQ ID NO: 23145 - protein, 149 aa, Nitrosospira sp.
  misc_feature (1)..(149): tr|A0A2T5K4A3|A0A2T5K4A3_9PROT 6-carboxy-5,6,7,8-tetrah ydropterin synthase OS=Nitrosospira sp. Nsp2 OX=136548 GN=C8R31_101335 PE=3 SV=1
MLITRRLEFDAGHRIPAHQSKCRHLHGHRYAIEVTLSGLIITEAGAAEQGMVMDYSEVKRIANVALVDLWDHAFLVYRQDVEVLQFLQSLDDHKTVVLDSPPTAENLALTAFRILDVAYQDTYGNHLRLEQVRLFETPNCWADAVRGKF

SEQ ID NO: 23146 - protein, 149 aa, Nitrosospira sp.
  misc_feature (1)..(149): tr|A0A495EKT5|A0A495EKT5_9PROT 6-pyruvoyltetrahydropter in/6-carboxytetrahydropterin synthase OS=Nitrosospira s p. Nsp44 OX=1945879 GN=B0H90_1686 PE=4 SV=1
MLITRRLEFDAGHRIPSHHSKCRHLHGHRYAIEVTLSGNIITEAGAAEQGMVMDYSEVKRIANVALVDLWDHAFLVYRQDLDVLHFLQSLDDHKTVVLDTPPTAENLALTAFRILDAAYRDTYGNDLRLEQVRLFETPNCWADAIRDKF

SEQ ID NO: 23147 - protein, 153 aa, Nitrosovibrio sp.
  misc_feature (1)..(153): tr|A0A497XKH7|A0A497XKH7_9PROT 6-pyruvoyltetrahydropter in/6-carboxytetrahydropterin synthase OS=Nitrosovibrio sp. Nv12 OX=2135773 GN=C8R22_0993 PE=4 SV=1
MLITRRLEFDAGHRIPSHNSKCRHLHGHRYAIEITLSGNIINEAGVSEQGMVMDYSEVKRIANTALVDKWDHAFLVYSEDARLLEFLQSLEGHKTVVLDTPPTAENLSLAAFRILDAAYQDTYGNHLRLEQVRLFETPNCWADAVRGQIISSR

SEQ ID NO: 23148 - protein, 154 aa, Nitrosovibrio sp.
  misc_feature (1)..(154): tr|A0A1K1NAA5|A0A1K1NAA5_9PROT 6-pyruvoyltetrahydropter in/6-carboxytetrahydropterin synthase OS=Nitrosovibrio sp. Nv17 OX=1855339 GN=SAMN05216414_11638 PE=4 SV=1
MLITRRLEFDAGHRIPAHASNCRHLHGHRYAIEITLSGDIITEAGTAGQGMVMDYSEVKRIARAALVDKWDHAFLVYAGDVAVMQFLESLEGHRTVVLDAPPTAENLALAAFRILDAAYGDTYGNHLRLERVRLFETPNCWADAVRGQLPQSPA

SEQ ID NO: 23149 - protein, 152 aa, Nitrosovibrio tenuis
  misc_feature (1)..(152): tr|A0A1H7PTD3|A0A1H7PTD3_9PROT 6-pyruvoyltetrahydropter in/6-carboxytetrahydropterin synthase OS=Nitrosovibrio tenuis OX=1233 GN=SAMN05216387_1108 PE=4 SV=1
MLITRRLEFDAGHRIPSHTSKCRHLHGHRYAIEITLSGDIITEAGAPEQGMVMDYSEVKRIASITLVDKWDHAFLVYSQDVSVLQFLQSLQNHKTVVLDMPPTAENLALTAFRILDAAYQDTYGNHLRLERVRLFETPNCWADAVREQIPGI

SEQ ID NO: 23150 - protein, 122 aa, Nitrospina gracilis
  misc_feature (1)..(122): tr|M1Z263|M1Z263_NITG3 6-carboxy-5,6,7,8-tetrahydropter in synthase OS=Nitrospina gracilis (strain 3/211) OX=12 66370 GN=NITGR_950044 PE=3 SV=1
MYEVYVTTRFSAAHQLRGYDGKYENLHGHNWTASVTVEAKELDEIGVGIDFVELKRMVDDFLSKLDYHNINEVPPFDTQNPSAENIARWLFKQLEAAIDKQHARVKRVEVYETPESGAAYFE

SEQ ID NO: 23151 - protein, 141 aa, Nitrospina gracilis
  misc_feature (1)..(141): tr|M1YN83|M1YN83_NITG3 6-pyruvoyl tetrahydrobiopterin s ynthase OS=Nitrospina gracilis (strain 3/211) OX=126637 0 GN=PTS PE=4 SV=1
MIYITRKVEFCASHRLFNPTFSDEKNAQVFGLCNNPNGHGHNYTMEVTVKGDVDPETGMVLDLKFLKKLVTEEIIDKVDHKNLNMDVEFLQGVIPTAENLAIKFWEVLEPKIGGGLLHQIKLYESPRNFVTYRGQVSERVD

SEQ ID NO: 23152 - protein, 122 aa, Nitrospina sp.
  misc_feature (1)..(122): tr|A0A523MX15|A0A523MX15_9BACT 6-carboxy-5,6,7,8-tetrah ydropterin synthase OS=Nitrospina sp. OX=2024844 GN=E2O 41_04450 PE=3 SV=1
MYQVTIKTIFSAAHQLRGYDGQYENLHGHNWTAVVIAESEELDAMGVGIDFVNLKKQTEGVLSALDYHNINEVAPFDQQNPSAENIARWLFEKLSALLNTKSVKIKRVEISETPECGAAYFE

SEQ ID NO: 23153 - protein, 141 aa, Nitrospina sp.
  misc_feature (1)..(141): tr|A0A523NPM3|A0A523NPM3_9BACT 6-carboxytetrahydropteri n synthase OS=Nitrospina sp. OX=2024844 GN=E2O42_05210 PE=4 SV=1
MIYITRKLEFCASHTLFNPEYSDEKNAEVFGLCSNPNGHGHNYVMEVTVRGEVHPETGMVLDLKVLKKLVNEEIILKVDHKNLNVDVPFLKDIIPTAENLAIHFWEVLESKLEGGELHEIKLYESERNFVIYRGNSRERFD

SEQ ID NO: 23154 - protein, 127 aa, Nitrospinae bacterium
  misc_feature (1)..(127): tr|A0A1G1E7B3|A0A1G1E7B3_9BACT 6-carboxy-5,6,7,8-tetrah ydropterin synthase OS=Nitrospinae bacterium RIFCSPLOWO 2_12_FULL_45_22 OX=1801687 GN=A3G93_13360 PE=3 SV=1
MYALTVKSGFAAAHQLRGYQGACENLHGHNWKVEVTIMANKLNELGIVIDFREIKRVLDGVLESLDHKNLSDLEPFKKANPTSENICAWLFQELDKRLSSRDLKVNKVTVRETDNYAASYYRQASEP

SEQ ID NO: 23155 - protein, 141 aa, Nitrospinae bacterium
  misc_feature (1)..(141): tr|A0A2H0CWD4|A0A2H0CWD4_9BACT 6-pyruvoyl tetrahydrobio pterin synthase OS=Nitrospinae bacterium CG22_combo_CG1 0-13_8_21_14_all_47_10 OX=1974050 GN=COW89_01395 PE=4 S V=1
MILITRRLEFCASHRLHNPAFSEEKNAATFGLCNNPNGHGHNYVLEVTVRGEVNPETGMVLDLKALKKLINEEIVDKVDHKNLNVDVDFLKNIIPTAENIAIHFWNIIEPKIENGTLHEIKLFESERNFVIYRGAELERPH

SEQ ID NO: 23156 - protein, 122 aa, Nitrospira bacterium
  misc_feature (1)..(122): tr|A0A0S8AL10|A0A0S8AL10_9BACT 6-carboxy-5,6,7,8-tetrah ydropterin synthase OS=Nitrospira bacterium SG8_35_4 OX =1704025 GN=AMK71_08885 PE=3 SV=1
MFDLMIEAQFSAAHQLRGYKGKCEDLHGHNWRVQVTVSSDKLSDIGMVIDFHELKDISGEVISSLDHTFLNDVFPFTEINPSSENIARWIYESIKKKLNKKDCSMSSVTVWENDTSSATYYE

SEQ ID NO: 23157 - protein, 123 aa, Nitrospira bacterium
  misc_feature (1)..(123): tr|A0A2N1UL06|A0A2N1UL06_9BACT 6-carboxy-5,6,7,8-tetrah ydropterin synthase OS=Nitrospira bacterium HGW-Nitrosp ira-1 OX=2013825 GN=queD PE=3 SV=1
MYDLSIETGFAGAHQLRGYKGKCEKLHGHNWKVQISVTAERLNEIDLAIDFHDLKKIANELISPLDHAFLNDIFPFTEKNPSSENIAKWIYDSLKKKIQDENLRISAVTVWESDTASASYYED

SEQ ID NO: 23158 - protein, 149 aa, Nitrospira defluvii
  misc_feature (1)..(149): tr|D8PJ03|D8PJ03_9BACT 6-pyruvoyl-tetrahydropterin synt hase OS=Nitrospira defluvii OX=330214 GN=pts PE=4 SV=1
MSQATITRRYRFCAAHRLHTDQLSAEENWTTFGKCNNPNGHGHNYVVFVSVRGDIDPVTHQVLDVSRLDAVVERIVVQRFDHQDLNLDPEFATQTTTGENLVLLIWDLLVDQLPAGRLVKVGVIETRDNYFEYSGSVESMRREEGVRHG

SEQ ID NO: 23159 - protein, 250 aa, Nitrospira defluvii
  misc_feature (1)..(250): tr|D8P875|D8P875_9BACT Putative 6-pyruvoyl-tetrahydropt erin synthase (Modular protein) OS=Nitrospira defluvii OX=330214 GN=NIDE4038 PE=4 SV=1
MAAVLLNKRIEFCASHRYHKPEWDAAKNRAMFGACNNDPGHGHNYMLEVTVAGEVDQRTGMVVNLFDLKRVLLQVLEEFDHKHLNLDLPYFERQIPTSENIARVLWDKLQAQPDIGTLKRLSLYEDEDLCADLTAEAGLEVASVTRRYSFTAVHDGHRGHTWDLFVSVHGPIDRGTGMVTDIVALDHLLKERVLVPFEGRDLRMVLATPSVTGEYLAKAVWDRIVSAIPAGTLQLVKLVQTRDLFYEYAG

SEQ ID NO: 23160 - protein, 250 aa, Nitrospira japonica
  misc_feature (1)..(250): tr|A0A1W1I190|A0A1W1I190_9BACT Putative 6-pyruvoyl-tetr ahydropterin synthase (Modular protein) OS=Nitrospira j aponica OX=1325564 GN=NSJP_0585 PE=4 SV=1
MAPVLLTKRIEFAAAHRYFRPEWDEAKNRAVFGRCYNPPAHGHNYMLEVTVSGGVDPQTGMVINLFDLKRVLLGMIEEFDHKNLNLDMSYFTDRIPTSENLARVLWTKLEPQSDIGTLHAIRLYEDEDLFAEITAAGGLDIAGVTRRYSFTAVQEGHQGRQWDCFVTVQGPIDPKTGMVVDIAALNLLVQEHVLAKLDCRDLRDVFGRTSVTGQSLVEFIWTSLVSRIPSGKLAHLQVVHSRDLSFSCSA

SEQ ID NO: 23161 - protein, 136 aa, Nitrospira japonica
  misc_feature (1)..(136): tr|A0A1W1I0P8|A0A1W1I0P8_9BACT 6-carboxy-5,6,7,8-tetrah ydropterin synthase OS=Nitrospira japonica OX=1325564 G N=pts PE=4 SV=1
MQFTMTRRYRFCAAHRLHTDHLTPEENRTAFGKCNNPNGHGHNYVVLVTVRSGANEGAVALERLDRIVEETIVERFDHQDLNQDSEFAALTTTGENLVKLIWNLLAPKLPAGILEKVGVIETRDNYFEYAAPTGPR

SEQ ID NO: 23162 - protein, 143 aa, Nitrospira lenta
  misc_feature (1)..(143): tr|A0A330L7M6|A0A330L7M6_9BACT 6-pyruvoyl tetrahydrobio pterin synthase OS=Nitrospira lenta OX=1436998 GN=PTS P E=4 SV=1
MGQGSITRRYRFCAAHRLHTDYLSIEDNRAVFGKCNNPNGHGHNYVVLVTIGSPGVSQSGRTMDIDALDRIVTERIVTRFDHRDLNQDPEFATRTTTGENLVLLIWDLLVTQVPEGQLKKVAVVETRDNYFEYTGSALVAARS

SEQ ID NO: 23163 - protein, 250 aa, Nitrospira lenta
  misc_feature (1)..(250): tr|A0A330L7H2|A0A330L7H2_9BACT Putative 6-pyruvoyl-tetr ahydropterin synthase (Modular protein) OS=Nitrospira l enta OX=1436998 GN=NITLEN_20575 PE=4 SV=1
MANVQLTKRIEFSSSHRYIKPEWDEAKNRAVFGPCYNAPAHGHNYMLEVTVSGEVDPQTGMVINLFDLKQVLLAVIEEFDHMNFNLDLPYFRDRIPTSENIACVLWTKLVAQSDIGTLDTIRLYEDEDLYAEVTAAGGLDVASVTRRYSFTALLDSRQGHTWDCFVSVHGAIDPITGMVTDIGALDRLVQEQVLRVLDRQDLREVLKAASISGANLAEFIWNALVSRLSSGALKNIRIIQSRDLSFDYNG

SEQ ID NO: 23164 - protein, 136 aa, Nitrospira moscoviensis
  misc_feature (1)..(136): tr|A0A0K2GHM0|A0A0K2GHM0_NITMO 6-pyruvoyl tetrahydrobio pterin synthase OS=Nitrospira moscoviensis OX=42253 GN= PTS PE=4 SV=1
MAHTTITRRYRFCAAHRLHTEHLSAEENWAAFGKCNNPNGHGHNYIVLVTVSTPETEKAVDLARLDRIVGERIVTRFDHHDLNQDPEFADRTTTGENLVLLIWDLLAPHLPEGQLKKVGVIETRDNYFEYAAPSPV

SEQ ID NO: 23165 - protein, 250 aa, Nitrospira moscoviensis
  misc_feature (1)..(250): tr|A0A0K2GIL9|A0A0K2GIL9_NITMO Putative 6-pyruvoyl-tetr ahydropterin synthase (Modular protein) OS=Nitrospira m oscoviensis OX=42253 GN=NITMOv2_4338 PE=4 SV=1
MSVVLLTKRIEFAAAHRYFKPEWDEAKNRAVFGLCYNPPAHGHNYLLEVTVSGEVDPKTGMVINLFDLKRVLLGMIEEFDHKNFNLDMPYFKDRIPTSENIARLLWTKLAPHKDIGMLHTVRLCEDEDLYAEVTAAGGLDVASVTRRYSFNAVQDGKAGRDWDCFVTVHGPIDPVTGMVTDIAALDRLVDERVVTVFDGQDLSHVLRKPGATGDHLAQDIWQRLVSRIAPGRLTNIRLVQSRDVSVDYAG

SEQ ID NO: 23166 - protein, 129 aa, Nitrospira sp.
  misc_feature (1)..(129): tr|A0A1W9GDI3|A0A1W9GDI3_9BACT Uncharacterized protein OS=Nitrospira sp. SG-bin1 OX=1827376 GN=A4E19_04395 PE= 4 SV=1
MTRRYRFCAAHRLHTDQLSPEENWAAFGKCNNPNGHGHNYVVLVTIRNGAIQGMGDVDRLDRIVSENIVERFDHRDLNGDPAFAALTTTGENLVKVIWDILAPFLPADSLQKVGVIETRDNYFEYAGVT

SEQ ID NO: 23167 - protein, 129 aa, Nitrospira sp.
  misc_feature (1)..(129): tr|A0A354BHN6|A0A354BHN6_9BACT 6-pyruvoyl tetrahydrobio pterin synthase OS=Nitrospira sp. OX=70125 GN=DDY39_055 45 PE=4 SV=1
MTRRYRFCAAHRLHTDLLSPEENWAAFGKCNNANGHGHNYVVLVTIRAGTAESLTNLDSLDRLVTDTVIERFDHQDLNSDPAFSALTTTGENLVAVIWDILNPLLPAGRLSKVGVIETRDNYFEYTGAI

SEQ ID NO: 23168 - protein, 267 aa, Nitrospiraceae bacterium
  misc_feature (1)..(267): tr|A0A356R5G2|A0A356R5G2_9BACT 6-pyruvoyl tetrahydropte rin synthase OS=Nitrospiraceae bacterium OX=2026770 GN= DD706_08240 PE=4 SV=1
MANRPKATLTKRLEFCSSHRYHNPQWDDAKNRTVFGPCNNVNTHGHNYLVEVTLRGTIDPVTGMIINLYDLKNILNEVLEQFDHKNLNSDTAYFIDRIPTTENLAVTLWDILEKHPDLPTPETLRLYEDETLYAEVTKSFMEENPQSFTGGSALIARRFGFSAVHQSRTGNTQGHNYDLWVATKGSIPADTGQVMNLQTLDQIVRTEVLTRFDQRNLSQDQAFANFPVTECTIAKVTWDTLNPHFKNPSLYRVSVSQQPGAVTTFSA

SEQ ID NO: 23169 - protein, 122 aa, Nitrospiraceae bacterium
  misc_feature (1)..(122): tr|A0A348VRJ9|A0A348VRJ9_9BACT 6-carboxy-5,6,7,8-tetrah ydropterin synthase OS=Nitrospiraceae bacterium OX=2026 770 GN=queD PE=3 SV=1
MYELMIESRFAAAHQLRGYQGKCEKLHGHNWRVTMAVTAERLNEQGLAIDFTDLNKALREVLDQLEHSFLNDIFPFTEINPSSENLAKWIYDGLAKKLNDDNLEVASVTVWESDTASSSYFE

SEQ ID NO: 23170 - protein, 122 aa, Nitrospirae bacterium
  misc_feature (1)..(122): tr|A0A1G1HST7|A0A1G1HST7_9BACT 6-carboxy-5,6,7,8-tetrah ydropterin synthase OS=Nitrospirae bacterium RIFCSPLOW2 _12_42_9 OX=1801722 GN=A2Y48_09395 PE=3 SV=1
MYEIKVITTISAAHSLRNYPGDCKNIHGHNYKVEVVMQSEGLDNLGMAIDFRMLRQEIERLLQTLDHTYINDKPPFDTINPTAENLSQWIYDTLSKKLNRDIARVCRVNVWENENSSASYFD

SEQ ID NO: 23171 - protein, 256 aa, Nitrospirae bacterium
  misc_feature (1)..(256): tr|A0A1G1K744|A0A1G1K744_9BACT Uncharacterized protein OS=Nitrospirae bacterium RIFCSPLOWO2_12_FULL_63_8 OX=18 01718 GN=A3K11_11610 PE=4 SV=1
MLTKRIEFAAAHRYHNEALDAATNRRVFGACNNAPGHGHNYLLEVTVAGPVDRHTGMVVNLFDLKVVLQEVLEEFDHKHLNLDVPYFTKTVPTTENIATVLWGKLAARSEIGRLERIRLYEEDDLWADVTVKDQAGNRASLTRRYHFPASLPAANAQQGQAGHNYALEVTVEGDIHPETGMVTDIGAVDRMVQELVVSRCTGRNLGQDPAFASRPLTGETLARLIWSSLAKALPSGRLQKVRLVESDDLSYEYAES

SEQ ID NO: 23172 - protein, 123 aa, Nitrospirales bacterium
  misc_feature (1)..(123): tr|A0A4Y7X5V9|A0A4Y7X5V9_9BACT 6-carboxy-5,6,7,8-tetrah ydropterin synthase OS=Nitrospirales bacterium LBB_01 O X=2552947 GN=queD PE=3 SV=1
MFELSVESTFAAAHQLRGYKGKCEALHGHNWRVQVVVQADKLNEIDITIDFHDIKKLTNDVTSQLDHAFLNDIFPFTQINPSSENIAKWVYDTLRKKISTEHVRLLSVTVWESETSAATYYED

SEQ ID NO: 23173 - protein, 123 aa, Nitrospirales bacterium
  misc_feature (1)..(123): tr|A0A524GGZ9|A0A524GGZ9_9BACT 6-carboxy-5,6,7,8-tetrah ydropterin synthase OS=Nitrospirales bacterium OX=23584 60 GN=queD PE=3 SV=1
MFELMIETQFASAHQLRGYKGVCENLHGHNWKVQIFVLAERLNEIDIAIDFHELKKLAEEVIMPLDHGFLNDIFPFTEKNPSSENIAKWIFDSLRKKLDNDDVNLSAVTVWESETASATYFEE

SEQ ID NO: 23174 - protein, 138 aa, Niveispirillum cyanobacteriorum
  misc_feature (1)..(138): tr|A0A2K9NCK5|A0A2K9NCK5_9PROT Uncharacterized protein OS=Niveispirillum cyanobacteriorum OX=1612173 GN=C0V82_ 11660 PE=4 SV=1
MYSVSVRDHIMIAHSFVGAIFGPAQALHGATFVVDAEFRRRQLSPEGLVVDIGAASALLKQVLAPLNYQNLDEMPEYRGRNTTTEYLAGDIHRKIAAGIRAGALGADGPALDGLRVVLSESHTAWGSYEAPLNVEAAR

SEQ ID NO: 23175 - protein, 137 aa, Niveispirillum lacus
  misc_feature (1)..(137): tr|A0A255Z3D3|A0A255Z3D3_9PROT Uncharacterized protein OS=Niveispirillum lacus OX=1981099 GN=CHU95_06760 PE=4 SV=1
MYFLSVREHIMIAHSFVGAIFGPAQALHGATFVVDAEFRRRQLSPEGLVVDIGAASVLLKQVLAPLNYKNLDELPEYRGRNTTTEFLAGDIHRKLAAGIRAGALGADGPALDSLRVTLSESHVAWGAFEAPLTGDGA

SEQ ID NO: 23176 - protein, 117 aa, Nocardia brasiliensis
  misc_feature (1)..(117): tr|K0F544|K0F544_9NOCA 6-carboxy-5,6,7,8-tetrahydropter in synthase OS=Nocardia brasiliensis ATCC 700358 OX=113 3849 GN=O3I_023505 PE=3 SV=1
MDIFREFSFEAAHRLPAVPDGHKCGRLHGHSYRVEVQVTGEVGAETGWVIDFARIKDAFAGVHDQLDHHYLNEVPGLENPTSEVLAQWIWARLYDKIPLSAVTVRETCTSGCVYRGH

SEQ ID NO: 23177 - protein, 136 aa, Nocardia sp.
  misc_feature (1)..(136): tr|A0A0M8WBD9|A0A0M8WBD9_9NOCA 6-pyruvoyl tetrahydropte rin synthase OS=Nocardia sp. NRRL S-836 OX=1519492 GN=A DL03_25115 PE=4 SV=1
MFSITVRDHVMIAHSFRGEVFGPAQRLHGATFLVDATFKRAELDQDNIVVDIGLATQELGKVLAAFNYRNLDEEPQFAGINTSTEWLAKHIADQLADAIAAGSLGEGAHGIDGITVTLHESHVAWASYERALRTAG

SEQ ID NO: 23178 - protein, 117 aa, Nocardia sp.
  misc_feature (1)..(117): tr|A0A3A4K2Z0|A0A3A4K2Z0_9NOCA 6-carboxy-5,6,7,8-tetrah ydropterin synthase OS=Nocardia sp. YIM PH 21724 OX=234 0916 GN=queD PE=3 SV=1
MEIFREFTFEAAHRLPNTPEGHKCARLHGHSFRVEVHVRGEVDERTGWVMDFAEIKSAVAPLYERLDHHYLNEIEGLENPTSENLARWLWERLAGTLPLSAIQVRETCTSGCVYRGE

SEQ ID NO: 23179 - protein, 122 aa, Nocardioidaceae bacterium
  misc_feature (1)..(122): tr|E9US35|E9US35_9ACTN 6-carboxy-5,6,7,8-tetrahydropter in synthase OS=Nocardioidaceae bacterium Broad-1 OX=408 672 GN=NBCG_01553 PE=3 SV=1
MTHTAEIFKEFTFEAAHRLPNVPDGHKCARLHGHSFRVQLHVRGSVGEETGWVQDFGDLKAAFKPLEARLDHYYLNEIEGLDNPTSEVLAKWLWDRLIDALPNLVEVQVRETCTAGCIYRGD

SEQ ID NO: 23180 - protein, 135 aa, Nocardioides albidus
  misc_feature (1)..(135): tr|A0A5C4WCT4|A0A5C4WCT4_9ACTN 6-carboxytetrahydropteri n synthase OS=Nocardioides albidus OX=1517589 GN=FHP29_ 03515 PE=4 SV=1
MFRVTVRDHIMIAHSLQGEVFGPAQRLHGATYVVDATFAGADLDEDGILVDIGRATEVVREVLGRLHYRNLDELDGEEALATQNTSTEVLARWVADRLAERAVGGDLGPGGRTLAAIEVVLHESHVARAGYERTL

SEQ ID NO: 23181 - protein, 132 aa, Nocardioides bacterium
  misc_feature (1)..(132): tr|A0A4S5A628|A0A4S5A628_9ACTN 6-carboxytetrahydropteri n synthase OS=Nocardioides bacterium OX=1565122 GN=E7Z5 4_10950 PE=4 SV=1
MFRVTVRGHIMIAHSLRGAVFGPAQGLHGATYVVDATFAGPELDDDGILVDIGRAGTELHNVLGALNYRNLDEDPLLAGQNTSTEVLARFIADRLAERVQAGGLGPGGSALSGIEVTLRESHIAWASYERSL

SEQ ID NO: 23182 - protein, 154 aa, Nocardioides bacterium
  misc_feature (1)..(154): tr|A0A4S5ASQ9|A0A4S5ASQ9_9ACTN 6-carboxytetrahydropteri n synthase OS=Nocardioides bacterium OX=1565122 GN=E7Z5 4_04480 PE=4 SV=1
MSQTVAVRHTWEAGHRLPHLDGKCQSLHGHSWSVEVTVAGPIAPSTGVLVEFAALKKHLRSWVDTHLDHGLMLGVDDPLLELLAAHGKTYPFGAPTHGAYTAGLLWPTVENVATLLARVMIDHLCSTGEEQRGVRLARVDVQETAVNHATWRGQ

SEQ ID NO: 23183 - protein, 122 aa, Nocardioides caeni
  misc_feature (1)..(122): tr|A0A4S8NLM6|A0A4S8NLM6_9ACTN 6-carboxy-5,6,7,8-tetrah ydropterin synthase OS=Nocardioides caeni OX=574700 GN= queD PE=3 SV=1
MTYSSEIYREFTFEAAHRLPNVPEGHKCARLHGHSYLAAVHVSGPVGEDTGWVQDFGDIKAAFKPLEEQLDHHYLNEVPGLENPTSEVLAKWIWDRLITDLPNLTEVRVRETCTSGCIYRGE

SEQ ID NO: 23184 - protein, 123 aa, Nocardioides immobilis
  misc_feature (1)..(123): tr|A0A417Y8K8|A0A417Y8K8_9ACTN 6-carboxytetrahydropteri n synthase OS=Nocardioides immobilis OX=2049295 GN=D0Z0 8_00655 PE=4 SV=1
MMVAHSLRGEVFGPAQRLHGATFVVDATFVAADLDESGIVVDIGRASEQLKAVLADLTYRNLDDVESLAGVNTSTEVLARLVADRLADAAHQGLLGRPADELSGIEVTLRESHIAWASYQRPL

SEQ ID NO: 23185 - protein, 125 aa, Nocardioides iriomotensis
  misc_feature (1)..(125): tr|A0A4Q5IVR2|A0A4Q5IVR2_9ACTN 6-carboxytetrahydropteri n synthase OS=Nocardioides iriomotensis OX=715784 GN=ET U37_19145 PE=4 SV=1
MFSVTVRDHMLVAHSLRGEVFGPAQRLHGATYVVDVTFRGPELDDDGILVDIGWATETLRDVMGDLGYRNLDDEPDLAGLNTTTEVLARVVADRVVARLTTDAVRTVAVTLHESHVASAGYERSV

SEQ ID NO: 23186 - protein, 131 aa, Nocardioides sp.
  misc_feature (1)..(131): tr|A0A2T8FCI4|A0A2T8FCI4_9ACTN Uncharacterized protein OS=Nocardioides sp. WSJ-1 OX=2138300 GN=DDE18_08990 PE= 4 SV=1
MFSVTVRDHMMVAHSLRGDVFGPAQRLHGATFVVDATFRGETLSEEGILVDIGRATEELRDVLTGLTYRNLDDEPSFGGANTTTEVLARHVADRLAERLNAGALGPAAQVTGLVVTLHESHVAWASYERVP

SEQ ID NO: 23187 - protein, 123 aa, Nocardioides sp.
  misc_feature (1)..(123): tr|A0A5B1LHZ1|A0A5B1LHZ1_9ACTN 6-carboxytetrahydropteri n synthase OS=Nocardioides sp. BN130099 OX=2607660 GN=F 0U44_07615 PE=4 SV=1
MMIAHSLRGEVFGPAQQLHGATYVVDATFRATDVDAAGIVVDIGCAMDQLKAVLADLTYRNLDDHAELTGVITTTEVLAKLVADRLADRAHAGLLGRPAAELDGIEVTLRESHIAWASYERGL

SEQ ID NO: 23188 - protein, 134 aa, Nocardioides terrae
  misc_feature (1)..(134): tr|A0A1I1J7N3|A0A1I1J7N3_9ACTN 6-pyruvoyl-tetrahydropte rin synthase OS=Nocardioides terrae OX=574651 GN=SAMN04 487968_106212 PE=4 SV=1
MFTVTVRDRIMVAHSLAGEEFGPAQRLHGATYVVEAAFRGKSLDPSGVLVDIAKATSELRAVLADLDFQNLDELPAFTGRNRTTEAVAEVIGDELAARVGEGVLGNGVTSVAVTLRESDVAWVTYEAPRVLTEP

SEQ ID NO: 23189 - protein, 132 aa, Nocardiopsis alba
  misc_feature (1)..(132): tr|J7LEE0|J7LEE0_NOCAA Uncharacterized protein OS=Nocar diopsis alba (strain ATCC BAA-2165 / BE74) OX=1205910 G N=B005_4510 PE=4 SV=1
MFGVTVRDHLMVAHSFRGEVFGPAQALHGATFVVDATLRRPDLDPDGIVVDIGAATRVLGEIVGELNYRNLDEVPEFAGVNTSTEFLAKVIADRLAERIHAGGLGQNARGLASLSITLHESHVAWASYEREL

SEQ ID NO: 23190 - protein, 174 aa, Nocardiopsis dassonvillei
  misc_feature (1)..(174): tr|A0A223QDW9|A0A223QDW9_NOCDA 6-carboxytetrahydropteri n synthase OS=Nocardiopsis dassonvillei OX=2014 GN=CGQ3 6_15655 PE=4 SV=1
MTHRIRVRHNFETAHRLPHLSGKCMNLHGHSWWAEVSVSAPALSEDGTVVEFGAFKKALRAFVDTHLDHGAMLGAGDPLAAVLAEHGSKVYRFGAASPGDTERYARDLPYPTVEAVAVMLGRVAQALLDSGERAAGARVTGVEVTETHVNTAAYHPVASSQAGERPFERVLAVD

SEQ ID NO: 23191 - protein, 174 aa, Nocardiopsis dassonvillei
  misc_feature (1)..(174): tr|D7AWP6|D7AWP6_NOCDD Uncharacterized protein OS=Nocar diopsis dassonvillei (strain ATCC 23218 / DSM 43111 / C IP 107115 / JCM 7437 / KCTC 9190 / NBRC 14626 / NCTC 10 488 / NRRL B-5397 / IMRU 509) OX=446468 GN=Ndas_
MTHRIRVRHNFETAHRLPHLSGKCMNLHGHSWWAEVSVSAPALSEDGTVVEFGAFKKALRAFVDTHLDHGAMLGAGDPLAAVLAEHGSKVYRFGAASPGDTERYARDLPYPTVEAVAVMLGRVAQALLDSGERAAGARVTGVEVTETHVNRAAYHPVASPQAGERPFERVLAVD

SEQ ID NO: 23192 - protein, 127 aa, Nocardiopsis flavescens
  misc_feature (1)..(127): tr|A0A1M6BR12|A0A1M6BR12_9ACTN 6-pyruvoyl-tetrahydropte rin synthase OS=Nocardiopsis flavescens OX=758803 GN=SA MN05421803_101444 PE=4 SV=1
MFSVTVRDHMMVAHSFRGEVFGPARALHGATFVVDATVHRRDLDPDGVVVDIGEFSRVLAQIVGELNHRNLDEVPEFAGVNTTTEFLARTVADRLAERLDAAARGLCRIAVTLHESHVARASYEREP

SEQ ID NO: 23193 - protein, 132 aa, Nocardiopsis gilva
  misc_feature (1)..(132): tr|A0A223S1Q7|A0A223S1Q7_9ACTN 6-carboxytetrahydropteri n synthase OS=Nocardiopsis gilva YIM 90087 OX=1235441 G N=CDO52_03875 PE=4 SV=1
MFSVTVRDHLMVAHSFRGEVFGPAQSLHGATFIVDASFRRPELDDDGIVVDIGRATQELNSVLADLNYRNLDEVPEFAGVNTSTEFLAKVIADRIADRVAQGALGEQARGVTELKVTLHESHIAWASYERAL

SEQ ID NO: 23194 - protein, 127 aa, Nocardiopsis sinuspersici
  misc_feature (1)..(127): tr|A0A1V3BYZ1|A0A1V3BYZ1_9ACTN Uncharacterized protein OS=Nocardiopsis sinuspersici OX=501010 GN=NOSIN_07580 P E=4 SV=1
MYSVTVRDHIMVAHSFRGEVFGPAQGLHGATFVVDATFRRRELDEDNIVVDIGLATRELKAVLAGLDYRNLDEDPDFAGVNTSTEFLAGVIADRLVERLDARARGLDGIAVTLHESHVAWAGHERDL

SEQ ID NO: 23195 - protein, 118 aa, Nocardiopsis sinuspersici
  misc_feature (1)..(118): tr|A0A1V3BU81|A0A1V3BU81_9ACTN 6-carboxy-5,6,7,8-tetrah ydropterin synthase OS=Nocardiopsis sinuspersici OX=501 010 GN=NOSIN_26085 PE=3 SV=1
MEIFREFTFEAAHRLPRVPEGHKCARLHGHSYRVVLHIEGPVEPDAGWVMDFGDVKRAFEPLRSRLDHYYLNEVDGLDNPTSENLARWIWERLHPTLHGLTAITVQETCTSGCTYRGE

SEQ ID NO: 23196 - protein, 117 aa, Nocardiopsis sp.
  misc_feature (1)..(117): tr|A0A0M8Y0M4|A0A0M8Y0M4_9ACTN 6-pyruvoyl tetrahydropte rin synthase OS=Nocardiopsis sp. NRRL B-16309 OX=151949 4 GN=ADL05_14620 PE=4 SV=1
MVAHSFRGTVFGPAQRLHGATFVVDATFRRPELDQDNIVIDIGLATRELAAVVAELNYRNLDEEPAFAGVNTSTEYLAQVIGDRLVERVDARARGLSGLTVTLSESHVAWASHDREL

SEQ ID NO: 23197 - protein, 125 aa, Nocardiopsis sp.
  misc_feature (1)..(125): tr|A0A495L1B6|A0A495L1B6_9ACTN 6-carboxy-5,6,7,8-tetrah ydropterin synthase OS=Nocardiopsis sp. Huas11 OX=21839 12 GN=DFP74_2695 PE=3 SV=1
MGYRIGKSFSFDAAHFLGDLPAGHKCSRLHGHTYTVTVELAAQSLVPPGFVTDFGDLALFAAYLDEQLDHRLLNEVLDGEPTSELLARYLGEWFIANVEPGLPANLRAVTVSESPTSWGRWEVER

SEQ ID NO: 23198 - protein, 290 aa, Nodularia sp.
  misc_feature (1)..(290): tr|A0A218Q0S0|A0A218Q0S0_9CYAN 6-pyruvoyl-tetrahydropte rin synthase homolog OS=Nodularia sp. NIES-3585 OX=1973 477 GN=NIES3585_14740 PE=4 SV=1
MQCIVNRRAQFSASHRYFFPELSEAENTEKFGACSRFPGHGHNYVLFISLAGELDKYGMVLNLSDVKHVIKQEVTSQLDFSYLNDVWAEFQETLPTTENIARVIWQRLVPHLPLVRVQLFEHPELWADYIGDGMEAYLSISTHFSAAHRLAHPQLSNEENAEIYGKCARPHGHGHNYHLEVTVKGEIDPRTGMIVDLGALNQAVEDYVLEAFDHTFLNKDIPFFAEVVPTAENIALYISNLLRSPIQELGGTLYKIKLIESPNNSCEIYCTESDTTTVSVAQPEPVLARV

SEQ ID NO: 23199 - protein, 288 aa, Nodularia spumigena
  misc_feature (1)..(288): tr|A0ZKC4|A0ZKC4_NODSP 6-pyruvoyl tetrahydrobiopterin s ynthase OS=Nodularia spumigena CCY9414 OX=313624 GN=NSP _8980 PE=4 SV=1
MQCIVNRRAQFSASHRYFLPELSEAENTEKFGACSRFPGHGHNYVLFISLAGELDKYGMVLNLSDVKHVIKHEVTSQLDYSYLNDVWAEFQETLPTTENIARVIWQRLVPHLPLVRVQLFEHPELWADYIGDDMEAYLSISTHFSAAHRLAHPQLSNEENSQIYGKCARPHGHGHNYHLEVTVKGKIDPRTGMIVDLGALNQAIEDYVLEAFDHTFLNKDIPFFAEVVPTAENIALYISNLLRSPIQELGGTLHKIKLIESPNNSCEIYCTESDANTVSAVKSEPVLV

SEQ ID NO: 23200 - protein, 150 aa, Nodularia spumigena
  misc_feature (1)..(150): tr|A0A166ITM5|A0A166ITM5_NODSP 6-carboxy-5,6,7,8-tetrah ydropterin synthase OS=Nodularia spumigena CENA596 OX=1 819295 GN=A2T98_16010 PE=4 SV=1
MISNKEKDEKPQITRAKSNLETWIIGKEFRFEASHQLPNHDGKCARLHGHSWRCVIYVAGDKLINTGAKQDMIMDYEEIKKYVKPLLDNYLDHYHLNETTGIANPTSEAIAKWIYEQLEDQISGLVAVRIDETCTSQCVYSKKTGNFLLL

SEQ ID NO: 23201 - protein, 149 aa, Nonlabens agnitus
  misc_feature (1)..(149): tr|A0A2S9WVQ5|A0A2S9WVQ5_9FLAO 6-carboxytetrahydropteri n synthase QueD OS=Nonlabens agnitus OX=870484 GN=BST86 _10830 PE=4 SV=1
MGTVRITKEFTFETGHALYGYDGKCRNVHGHSYKLAVTVIGQPIMDADHVKYGMVIDFGDLKKIVKEEIVDPFDHATVFNKNSPHVELAKELENRGHEVILADYQPTSEMMIQDFAKKIAGRLPDNIKLFSLRLRETETSYAEWFASDN

SEQ ID NO: 23202 - protein, 136 aa, Nonlabens agnitus
  misc_feature (1)..(136): tr|A0A2S9WUV5|A0A2S9WUV5_9FLAO 6-carboxy-5,6,7,8-tetrah ydropterin synthase OS=Nonlabens agnitus OX=870484 GN=B ST86_09140 PE=3 SV=1
MRITAYRKAHFNAAHRLYRKDWDDQKNLEVFGKCSNPHYHGHNYDLEVGVSGTVDPETGFLIDLKILKDIIKEHVEDALDHKNLNEQVAEFKNLNPTAENIAYVIYNKIKEQLDPKYDLEVKLYETPRNFVVYRGE

SEQ ID NO: 23203 - protein, 136 aa, Nonlabens arenilitoris
  misc_feature (1)..(136): tr|A0A2S7UAP8|A0A2S7UAP8_9FLAO 6-carboxy-5,6,7,8-tetrah ydropterin synthase OS=Nonlabens arenilitoris OX=121796 9 GN=BST92_08500 PE=3 SV=1
MRITAYRKAHFNAAHRLHRPDWSDQKNAAIFGKCNNPNFHGHNYDLEVGVTGDVDPETGYLIDLKILKDVIKSEVEEAFDHKNLNIEVPDFKTLNPTAENIAYVIYNKIKAKLDSKYDIEIKLYETERNFVVYKGE

SEQ ID NO: 23204 - protein, 136 aa, Nonlabens dokdonensis
  misc_feature (1)..(136): tr|A0A1Z8B9D6|A0A1Z8B9D6_9FLAO 6-carboxy-5,6,7,8-tetrah ydropterin synthase OS=Nonlabens dokdonensis OX=328515 GN=A9Q93_02630 PE=3 SV=1
MRLTAYRKAHFNAAHRLHRKDWSDEKNEKIFGKCNNPHFHGHNYDLEVGVTGEVDPETGYLIDLKILKDIIKDEVEDAFDHKNLNEQVPEFANLNPTAENIAYVIYNKIKAQLDPKYDLEIKLFETERNFVVYRGE

SEQ ID NO: 23205 - protein, 136 aa, Nonlabens dokdonensis
  misc_feature (1)..(136): tr|L7WAR8|L7WAR8_NONDD 6-carboxy-5,6,7,8-tetrahydropter in synthase OS=Nonlabens dokdonensis (strain DSM 17205 / KCTC 12402 / DSW-6) OX=592029 GN=DDD_2087 PE=3 SV=1
MRLTAYRKAHFNAAHRLHREDWSDEKNQQIFGKCNNPHFHGHNYDLEVGVTGEVDPETGYLIDLKILKDIIKEEVEDAFDHKNLNKQVPEFANLNPTAENIAFVIYNKVKAKLDPKYDLEIKLFETERNFVVYRGE

SEQ ID NO: 23206 - protein, 120 aa, Nonlabens marinus
  misc_feature (1)..(120): tr|W8VQ74|W8VQ74_9FLAO 6-pyruvoyl tetrahydrobiopterin s ynthase OS=Nonlabens marinus S1-08 OX=1454201 GN=NMS_14 85 PE=4 SV=1
MYRKDWSDYKNAQIFGKCSNPHYHGHNYELEVGVTGEVDPETGFLIDLKILKDIIKEHVEDVLDHKNLNEEVEEFKDLNPTAEHIAFVIYQKIKKHLDPKYDLEIKLYETPRNFVVYTGS

SEQ ID NO: 23207 - protein, 150 aa, Nonlabens marinus
  misc_feature (1)..(150): tr|W8VWB5|W8VWB5_9FLAO Queuosine biosynthesis QueD, PTP S-I OS=Nonlabens marinus S1-08 OX=1454201 GN=NMS_0608 P E=4 SV=1
MGTVRITKEFTFETGHALHGYDGKCRNVHGHSYKLAVTVIGEPIMDSNHVKFGMVIDFGDLKKIVKEEIVDPFDHATVFNKNSPHVELAKELESRGHEVILADYQPTSEMMIQDFAKKIADRLPNNIKLFSLRLRETETSYAEWFASDNG

SEQ ID NO: 23208 - protein, 136 aa, Nonlabens sediminis
  misc_feature (1)..(136): tr|A0A090PZJ6|A0A090PZJ6_9FLAO 6-carboxy-5,6,7,8-tetrah ydropterin synthase OS=Nonlabens sediminis OX=319236 GN =JCM19294_1708 PE=3 SV=1
MRLTAYRKAHFNAAHRLFRPDWSSEQNESIFGKCSNPHFHGHNYELEVGVTGEVDPETGYLIDLKILKDIIKEQVEDAFDHKNLNEEVPEFKTLIPTAEHIAYVIYQKIKPKLDPKYDLSIKLYETPRNFVVYSGD

SEQ ID NO: 23209 - protein, 149 aa, Nonlabens sediminis
  misc_feature (1)..(149): tr|A0A090Q278|A0A090Q278_9FLAO 6-carboxy-5,6,7,8-tetrah ydropterin synthase OS=Nonlabens sediminis OX=319236 GN =JCM19294_2605 PE=3 SV=1
MKKVRITKEFTFETGHALYGYDGKCRNVHGHSYKLAVTVIGTPKDELGHVKHGMVIDFGDLKKIVKEEIVDPFDHATVFNKNTPHVELAKELSDRGHEVILVDYQPTSEMMILDFADKIKARLPQEIQLHSLRLRETETSYAEWHAADQ

SEQ ID NO: 23210 - protein, 136 aa, Nonlabens sp.
  misc_feature (1)..(136): tr|A0A2K8X5W5|A0A2K8X5W5_9FLAO 6-carboxy-5,6,7,8-tetrah ydropterin synthase OS=Nonlabens sp. MB-3u-79 OX=205813 4 GN=CW736_01685 PE=3 SV=1
MRLTAYRKAHFNAAHRLHRKDWSDEKNAQIFGLCNNPYFHGHNYDLEVGVTGEVDPETGYLIDLKILKDIIKEEVENAFDHKNLNEQVPEFANLNPTAENIAFVIYNKIKAKLDPKYDLEIKLFETERNFVVYRGE

SEQ ID NO: 23211 - protein, 149 aa, Nonlabens sp.
  misc_feature (1)..(149): tr|A0A2K8X758|A0A2K8X758_9FLAO 6-carboxy-5,6,7,8-tetrah ydropterin synthase OS=Nonlabens sp. MB-3u-79 OX=205813 4 GN=CW736_04815 PE=3 SV=1
MRKVRITKEFTFETGHALYGYDGKCRNVHGHSYKLAVTVIGTPIDELGHVKHGMVIDFGDLKKIIKEEIVDPFDHATVFNKNTPHVELAKELSDRGHDVILVDYQPTSEMMIIDFADKIQKRLPATIALHHLRLRETETSYAEWHAGDQ

SEQ ID NO: 23212 - protein, 136 aa, Nonlabens spongiae
  misc_feature (1)..(136): tr|A0A1W6MG79|A0A1W6MG79_9FLAO 6-carboxy-5,6,7,8-tetrah ydropterin synthase OS=Nonlabens spongiae OX=331648 GN= BST97_00505 PE=3 SV=1
MRLTAYRKAHFNAAHRLYRKNWSDEKNEEVFGKCSNPHFHGHNYDLEVGVTGEVDPETGYLIDLKILKDIIRDEVEDYMDHKNLNEEVPEFATMIPTAEHIAYVIYNRIKAKLEDRFELEIKLYETPRNFVVYKGG

SEQ ID NO: 23213 - protein, 150 aa, Nonlabens spongiae
  misc_feature (1)..(150): tr|A0A1W6MME7|A0A1W6MME7_9FLAO 6-carboxytetrahydropteri n synthase QueD OS=Nonlabens spongiae OX=331648 GN=BST9 7_12080 PE=4 SV=1
MKKVRITKEFTFETGHALHGYDGKCRNVHGHSYKLAVTVIGTPISDTNNVKLGMVIDFGDLKKIVKEEIVDPFDHATVFNKNTPHVELAEELRGRGHDVILADYQPTSEMMILDFAEKIKSRLPEHLELFSLRLRETETSYAEWHASDQA

SEQ ID NO: 23214 - protein, 149 aa, Nonlabens tegetincola; identical to SEQ ID NO: 23209
  misc_feature (1)..(149): tr|A0A2S7TFN7|A0A2S7TFN7_9FLAO 6-carboxy-5,6,7,8-tetrah ydropterin synthase OS=Nonlabens tegetincola OX=323273 GN=BST93_01325 PE=3 SV=1

SEQ ID NO: 23215 - protein, 136 aa, Nonlabens tegetincola; identical to SEQ ID NO: 23208
  misc_feature (1)..(136): tr|A0A2S7T349|A0A2S7T349_9FLAO 6-carboxy-5,6,7,8-tetrah ydropterin synthase OS=Nonlabens tegetincola OX=323273 GN=BST93_13785 PE=3 SV=1

SEQ ID NO: 23216 - protein, 150 aa, Nonlabens ulvanivorans
  misc_feature (1)..(150): tr|A0A090X268|A0A090X268_NONUL Queuosine biosynthesis Q ueD OS=Nonlabens ulvanivorans OX=906888 GN=JCM19275_304 4 PE=4 SV=1
MKKVRITKEFTFETGHALYGYDGKCRNVHGHSYKLAVTVIGTPINDANNVKHGMVIDFTDLKKIVKEEIVDPFDHATVFNKNTPHVELAQELRERGHEVILADYQPTSEMMILDFADKIRNRLPENIELFSLRLRETETSYAEWHASDQG

SEQ ID NO: 23217 - protein, 150 aa, Nonlabens ulvanivorans
  misc_feature (1)..(150): tr|A0A081D7X8|A0A081D7X8_NONUL Queuosine biosynthesis Q ueD OS=Nonlabens ulvanivorans OX=906888 GN=JCM19296_602 PE=4 SV=1
MKKVRITKEFTFETGHALYGYDGKCRNVHGHSYKLAVTVIGTPINDANNVKHGMVIDFTDLKKIVKEEIVDPFDHATVFNKNTPHVELAQELRERGHEVILADYQPTSEMMILDFADKIRNRLPENIELFSLRLRETETSYAEWHASDQL

SEQ ID NO: 23218 - protein, 136 aa, Nonlabens xylanidelens
  misc_feature (1)..(136): tr|A0A2S6IH66|A0A2S6IH66_9FLAO 6-carboxy-5,6,7,8-tetrah ydropterin synthase OS=Nonlabens xylanidelens OX=191564 GN=LY01_02331 PE=3 SV=1
MILTAYRKAHFNAAHRLYRKDWSDEKNAQVFGLCSNKHYHGHNYNIEVGVTGEVDPETGYLIDLKVLKDIIKEEVEDALDHKNLNEQVPEFASLNPTAENIAFVVYNKIKAKLDPKFDLEIKLYETERNFVVYKGL

SEQ ID NO: 23219 - protein, 150 aa, Nonlabens xylanidelens
  misc_feature (1)..(150): tr|A0A2S6IQN9|A0A2S6IQN9_9FLAO 6-pyruvoyltetrahydropter in/6-carboxytetrahydropterin synthase OS=Nonlabens xyla nidelens OX=191564 GN=LY01_00387 PE=4 SV=1
MRKVRITKEFTFETGHALYGYDGKCRNVHGHSYKLAVTVIGTPIDELGHVKHGMVIDFGDLKKIIKEEIVDPFDHATVFNKNTPHVELAKELSDRGHDVILVDYQPTSEMMIIDFADKIKRRLPSNIALHTLRLRETETSYAEWHAADQV

SEQ ID NO: 23220 - protein, 149 aa, Nonomuraea fuscirosea
  misc_feature (1)..(149): tr|A0A2T0LXS4|A0A2T0LXS4_9ACTN 6-carboxy-5,6,7,8-tetrah ydropterin synthase OS=Nonomuraea fuscirosea OX=1291556 GN=B0I32_13916 PE=3 SV=1
MTSPRPCPARVGSHPDLRDLRGAALTIGKTFTFEAAHRLNGLPDGHKCGRRHGHSYQVTVELTSTELVGPGFITDFGDLAPFAAYLAEHFDHCDLNEVLTVEPTSELLALHLARWFLDNVQPGIPGRLAAVTVSETSKTWARCTLGNAP

SEQ ID NO: 23221 - protein, 125 aa, Nonomuraea solani
  misc_feature (1)..(125): tr|A0A1H5T0K2|A0A1H5T0K2_9ACTN 6-carboxy-5,6,7,8-tetrah ydropterin synthase OS=Nonomuraea solani OX=1144553 GN= SAMN05444920_10161 PE=3 SV=1
MSFRIGKRFTFEAAHQLSGLPGGHKCGRLHGHSYTVEVVLTATELSESGFVIDFANLDPIKRHLAEHFDHQPLNEAIDIEPTSENLARVLFEWCAKNVPLPATAAIEAVRVSETSATWAEYRPCH

SEQ ID NO: 23222 - protein, 119 aa, Nonomuraea solani
  misc_feature (1)..(119): tr|A0A1H6F129|A0A1H6F129_9ACTN 6-carboxy-5,6,7,8-tetrah ydropterin synthase OS=Nonomuraea solani OX=1144553 GN= SAMN05444920_13280 PE=3 SV=1
MIEIFREFTFEAAHRLPNVPENHKCGRLHGHSYRVEVHVSGEVDPSAGWLIDFGEIKKVVKPLVERLDHYYLNEVEGLENPTSENLAKWIWDRLVGSLPISAIHVRETCTSGCVYRGES

SEQ ID NO: 23223 - protein, 118 aa, Nonomuraea sp.
  misc_feature (1)..(118): tr|A0A5C4UUW2|A0A5C4UUW2_9ACTN 6-carboxy-5,6,7,8-tetrah ydropterin synthase OS=Nonomuraea sp. PA1-10 OX=2219224 GN=queD PE=3 SV=1
MEIFREFTFEAAHRLPNVPENHKCGRLHGHSYRVEVHVSGEVDPSAGWLIDFGEIKKVFNPLEERLDHYYLNEVEGLENPTSENLAKWIWDRLVGSLPISAIHVRETCTSGCVYRGES

SEQ ID NO: 23224 - protein, 164 aa, Nonomuraea sp.; identical to SEQ ID NO: 17026
  misc_feature (1)..(164): tr|A0A1V0A0F6|A0A1V0A0F6_9ACTN 6-pyruvoyl tetrahydrobio pterin synthase OS=Nonomuraea sp. ATCC 55076 OX=1909395 GN=BKM31_21325 PE=4 SV=1

SEQ ID NO: 23225 - protein, 124 aa, Nosocomiicoccus massiliensis
  misc_feature (1)..(124): tr|A0A2J6NIG6|A0A2J6NIG6_9STAP 6-carboxy-5,6,7,8-tetrah ydropterin synthase OS=Nosocomiicoccus massiliensis OX= 1232430 GN=queD PE=3 SV=1
MFYNYEITKEFHFSASHQLDYLPEGHQCKRLHGHNYIVKVTLGSDELNDDGFVTDFGLLKPIKVFIDENLDHRHLNDVFDFKTTSENIAKFFYEKIKNELNMDNVVEVAVSETPKTSARYRELR

SEQ ID NO: 23226 - protein, 129 aa, Nostoc azollae
  misc_feature (1)..(129): tr|D7E5G6|D7E5G6_NOSA0 6-carboxy-5,6,7,8-tetrahydropter in synthase OS=Nostoc azollae (strain 0708) OX=551115 G N=Aazo_4074 PE=3 SV=1
MPQWKLLTEFTFDSAHYIKDYNGPCGRMHGHTYRVKIEAKSSQLNSSEYCPHPVMVADFRSLRWAKKDVTKGGLDHCVLNEVLPPEYETTAEMIAKYIYAETKKRLPQDVKLKVAVSETPNSWAEYEDD

SEQ ID NO: 23227 - protein, 421 aa, Nostoc azollae
  misc_feature (1)..(421): tr|D7E4A6|D7E4A6_NOSA0 Uncharacterized protein OS=Nosto c azollae (strain 0708) OX=551115 GN=Aazo_3791 PE=4 SV= 1
MQCVVNRRAQFLASHHYSLPELGETENLEKFGRSSKFPGQGHNYTLFISIAGELDKYGMVLNLSDVKQVIKREITDQLDFSYLNNVWPEFQQTLSSNENIARVIWQRLAPHLPLIRVQLVEHTGLWADYMGEGMQASLSISTHFSAAHRLASNLSSEKYSKCSRTHGHNYHLEVTVEGEMDSRTGMIIDLDALNRVVENDVVKIFDHFCVNKDIPHFSEIVPTTENLVLYISNLLKSPIQKLGAKLSQVKLFESPQLWVDYQGNGTETFLTVKSEFSSAHRLAHPGLSLEKNTEIYGKCARVNGHGHNYQLEVTVKGEIDSSTGMVVDLGALNQVIANLTEPLDHSFLNRDVPYFGEVVPTAENIALYISNMLRLPIQELGAELYKVKLVESPNNSCEIYPSDIESTSVITVQNQPVLATV

SEQ ID NO: 23228 - protein, 422 aa, Nostoc calcicola
  misc_feature (1)..(422): tr|A0A1U7I3H0|A0A1U7I3H0_9NOSO 6-pyruvoyl tetrahydropte rin synthase OS=Nostoc calcicola FACHB-389 OX=1357508 G N=FACHB389_23370 PE=4 SV=1
MKCIINRRAQFSASHRYWLPELSETENIEKFGARSKFPGQGHNYVLLISLGGEVDEYGMVLNLSDVKHVIKREVTNQLDFSYLNDVWADFQETLPTTENIARIIWQRLAPHLPLVRVQLFEHSQLWADYTGEGMEAYLTISTHFSAAHRLAPNISPEKYGKCTRTHGHNYHLEITVKGKIDPRTGMIVDVDALKRVVEDYAVEPLDHSCLNKDIPYFAEIVPTTENISLYINSLLASPIQKLGVELDKVRLFESHELWADYAKNGTETYFTVSTYFSAAHRLADPNLSQEKNTEIYGKCARPNGHGHNYYLEVTVKGEIDPTTGMIVDLGALNQIVKDYVVERFDHTFINEDVPYFAEVVPTSENIALYISNLLRSPIQELGSELYKVKLFESPNNSCEIYCTESDSNSVSAAVNQQILAGV

SEQ ID NO: 23229 - protein, 128 aa, Nostoc carneum; identical to SEQ ID NO: 17729
  misc_feature (1)..(128): tr|A0A1Z4HF21|A0A1Z4HF21_9NOSO 6-carboxy-5,6,7,8-tetrah ydropterin synthase OS=Nostoc carneum NIES-2107 OX=1973 483 GN=NIES2107_01540 PE=3 SV=1

SEQ ID NO: 23230 - protein, 290 aa, Nostoc carneum
  misc_feature (1)..(290): tr|A0A1Z4HVI3|A0A1Z4HVI3_9NOSO Putative 6-pyruvoyl tetr ahydropterin synthase OS=Nostoc carneum NIES-2107 OX=19 73483 GN=NIES2107_54820 PE=4 SV=1
MQCIVNRRAQFSASHRYWLPELSEAENTQQFGACSRFPGHGHNYVLFISLIGELDEYGMVLNLSDVKQVIKREVTSQLDFSYLNDVWPDFQETLPTTENIARVIWQRLAPHLPLVRVQLFEHPELWADYMGNSMEAYLTISTHFSAAHRLAHPNLSNEENAEIYGKCARTNGHGHNYHLEVTVKGEIDQRTGMIVDLGALNQVIEDYVVEPFDHTFLNKDIPYFAEVVPTAENIALYISNLLRSPVQKLGAKLHKVKLIESPNNSCEIYCTDAESNSVSANANQPMLARV

SEQ ID NO: 23231 - protein, 290 aa, Nostoc commune
  misc_feature (1)..(290): tr|A0A2R5FS23|A0A2R5FS23_NOSCO Putative 6-pyruvoyl tetr ahydropterin synthase OS=Nostoc commune NIES-4072 OX=20 05467 GN=NIES4072_52370 PE=4 SV=1
MQCIVNRRAQFSASHRYWLPELSEAENIEKFGACSRFPGHGHNYVLFISLTGELDEYGMVLNLSDVKHVIKREVTSQLDFSYLNDAWAEFQQTLPTTENIARIIWQRLAPHLPLVRVQLFEHPELWADYMGNAMEAYLTISTHFSAAHRLAHPNLSNEENTEIYGKCARPHGHGHNYHLEVTVKGEIDPRTGMLVDLGALNQVIDDYVVEPFDHTFLNKDIPYFAEVVPTAENIALYISNLLRSPIQELGAKLYKVKLIESPNNSCEIYCTESESNSVSATGNQPVLASV

SEQ ID NO: 23232 - protein, 128 aa, Nostoc cycadae; identical to SEQ ID NO: 17440
  misc_feature (1)..(128): tr|A0A2H6LCQ4|A0A2H6LCQ4_9NOSO 6-carboxy-5,6,7,8-tetrah ydropterin synthase OS=Nostoc cycadae WK-1 OX=1861711 G N=NCWK1_0699 PE=3 SV=1

SEQ ID NO: 23233 - protein, 290 aa, Nostoc cycadae
  misc_feature (1)..(290): tr|A0A2H6LQT1|A0A2H6LQT1_9NOSO 6-pyruvoyl-tetrahydropte rin synthase OS=Nostoc cycadae WK-1 OX=1861711 GN=NCWK1 _5332 PE=4 SV=1
MQCIVNRRAQFSASHRYWLPELSEAENFEKFGAGSKFPGHGHNYVLFISLAGELDKYGMVLNLSDVKQVIKREVTSVLDFSYLNDIWAEFQETLPTTENIARVIWRRLAPHLPVVRVQLFEHPELWADYMGNSMEAYLSISTHFSAAHRLAHPDLSLEDNTEIYGKCARTNGHGHNYHLEVTVKGEIDQRTGMIVDLGALHQAIADYVVEPFDHTFLNKDVPYFAEVVPTAENIALYISNLLRSPIQNLGAQLYKIKLIESPNNSCEIYCTDTDSNSMSAVDSQPVLARL

SEQ ID NO: 23234 - protein, 288 aa, Nostoc flagelliforme
  misc_feature (1)..(288): tr|A0A2K8SYB4|A0A2K8SYB4_9NOSO QueD, 6-pyruvoyltetrahyd ropterin/6-carboxytetrahydropterin synthase OS=Nostoc f lagelliforme CCNUN1 OX=2038116 GN=COO91_06379 PE=4 SV=1
MQCIVNRRAQFSASHRYWLPELSEAENIEKFGACSRFPGHGHNYVLFISLAGELDEYGMVLNLSDVKHVIKREVTSQLDFSYLNDAWAEFQQTLPTTENIARIIWQRLAPHLPLVRVQLFEHPELWADYTGNAMEAYLTISTHFSAAHRLAHPKLSNEENTEIYGKCARPHGHGHNYHLEVTVKGEIDSRTGMIVDLGALNQVIEDYVVEPFDHTFLNKDIPYFVEVVPTAENIALYISNLLRSPIQELGAKLYKVKLIESPNNSCEIYCTESNSVSAAGNQPVLASV

SEQ ID NO: 23235 - protein, 422 aa, Nostoc linckia
  misc_feature (1)..(422): tr|A0A1Z4L975|A0A1Z4L975_NOSLI Uncharacterized protein OS=Nostoc linckia NIES-25 OX=1091006 GN=NIES25_42460 PE =4 SV=1
MKCIINRRAQFSASHRYWLPELSEAENIEKFGVRAKFPGQGHNYVLSISLGGEVDEYGMVLNLSDVKHVIKREVTNQLDFSYLNDVWADFQETLPTTENIARVIWQRLAPHLPVVGVQLLENSQLWADYTGEGMEAYVTISTHFSAAHRLAPNISPEKYGKCTRTHGHNYHLEVTVKGKIDPRTGAIVDVDALKRVVEDYAVEPLDHSCLNKDIPYFAEIVPTTENISLYINHLLSSPIEELGVELHKVRLFESHELWADYAKNGTETNFTVSTYFSAAHRLADPNLSQEKNTEIYGKCARPHGHGHNYYLEITVKGDIDPTTGMIVDLGGLNQIIKNDVIEQFDHTFINEDIPYFAKVVPTSENIALYISNLLRSPIQELGAELYKVKLFESPNNSCEIYCTESDSNSISAAVSQPVLAEV

SEQ ID NO: 23236 - protein, 289 aa, Nostoc linckia
  misc_feature (1)..(289): tr|A0A2C6TZW2|A0A2C6TZW2_NOSLI 6-pyruvoyl tetrahydropte rin synthase OS=Nostoc linckia z16 OX=1628751 GN=VF13_0 6980 PE=4 SV=1
MEAYLTISTHFSAAHRLAPNISPEKYGKCTRTHGHNYHLEITVKGKIDPRTGAIVDVDALKRVVEDYAVEPLDHSCLNKDIPYFAEIVPTTENISLYIHHLLTSPIEKLGVELHKVRLFESHELWADYAKNGTETHFTVSTYFSAAHRLADPNLSQEKNAQIYGKCARPHGHGHNYYLEVTVKGEIDSTTGMIVDLGGLNQIIKNDVVELFDHTFINEDIPYFAEVVPTSENIALYISNILRSPIQELGSELYKVKLFESPNNSCEIYCNESDVNSISATVSELVLAEV

SEQ ID NO: 23237 - protein, 290 aa, Nostoc minutum
  misc_feature (1)..(290): tr|A0A367S3P0|A0A367S3P0_9NOSO 6-pyruvoyl tetrahydropte rin synthase OS=Nostoc minutum NIES-26 OX=1844469 GN=A6 770_07080 PE=4 SV=1
MQCIVNRRAQFSASHRYWLSELSEAENIEKFGACSRFPGHGHNYVLFISIAGELDKYGMVLNLSDVKQVIKREVTSQLDFSYLNDVWAEFQETLPTTENIARVIWQRLAPHLPLVRVQLFEHPELWADYMGNAMEAYLTISTHFSAAHRLAHPDLSNEENTEIYGKCARPHGHGHNYHLEVTVKGEIDPRTGMIVDLGALNQVIEDYVVEPFDHTFLNKDIPHFAKVVPTAENIALYISNLLRSPIQELGAKLYKVKLIESPNNSCEIYCTESESNSVNAAASQPILARV

SEQ ID NO: 23238 - protein, 290 aa, Nostoc piscinale
  misc_feature (1)..(290): tr|A0A0M4T4I8|A0A0M4T4I8_9NOSO 6-pyruvoyl tetrahydropte rin synthase OS=Nostoc piscinale CENA21 OX=224013 GN=AC X27_22190 PE=4 SV=1
MQCIVNRRAQFSASHRYWLPELSEAENFEKFGAGSKFPGHGHNYVLFISLAGELDKYGMVLNLSDVKQVIKREVTSLLDFSYLNDVWAEFQETLPTTENIARVIWRRLAPHLPVVRVQLFEHPELWADYMGNSMEAYLSISTHFSAAHRLAHPDLSLEDNTEIYGKCARTNGHGHNYHLEVTVKGEIDQRTGMIVDLGALQKAIADYVVEPFDHTFLNKDVPYFAEVVPTAENIALYISNLLRSPIQNLGAKLYKVKLIESPNNSCEIYCTDTESDAVGAVDSQPVLVRL

SEQ ID NO: 23239 - protein, 128 aa, Nostoc piscinale
  misc_feature (1)..(128): tr|A0A0M4T7Q4|A0A0M4T7Q4_9NOSO 6-carboxy-5,6,7,8-tetrah ydropterin synthase OS=Nostoc piscinale CENA21 OX=22401 3 GN=ACX27_25855 PE=3 SV=1
MPKWKVVTEFSFNSAHYIKDYDGPCGRMHGHNYQVRIEAISTQLHSSQFCPHPVMVADFRTLRWAKQDVTKGGLDHCILNEVMPPEYETTAEMIAKYIYDETKKRVPPNVQLKVHISETPNSWVEYEE

SEQ ID NO: 23240 - protein, 290 aa, Nostoc punctiforme
  misc_feature (1)..(290): tr|A0A367RRY8|A0A367RRY8_NOSPU 6-pyruvoyl tetrahydropte rin synthase OS=Nostoc punctiforme NIES-2108 OX=1356359 GN=A6769_05865 PE=4 SV=1
MPCIVNRRAQFSASHRYWLPELSEAENIEKFGAGTRFPGHGHNYVLFISLAGELDEYGMVLNLSDVKHVIKREVTSQLDFSYLNDVWAEFQQTLPTTENIARIIWQRLAPHLPLVRVQLFEHPELWADYMGNAMEAYLTISTHFSAAHRLAHPNLSNEENTEIYGKCARPNGHGHNYHLEVTVKGKIDPRTGMIIDLGALNQVVEDYVLEPFDHTFLNKDIPYFAEVVPTAENIALYISNLVRSPIEELGAKLYKVKLIESPNNSCEIYCTESESDSASAAVNQPVFAVI

SEQ ID NO: 23241 - protein, 290 aa, Nostoc punctiforme
  misc_feature (1)..(290): tr|B2IVF9|B2IVF9_NOSP7 Uncharacterized protein OS=Nosto c punctiforme (strain ATCC 29133 / PCC 73102) OX=63737 GN=Npun_F2811 PE=4 SV=1
MQCIVNRRAQFSASHRYWLPELSEAENIEKFGACSKFPGHGHNYVLFISLAGELDKYGMVLNLSDVKHVIKREVTSQLDFSYINDAWTEFQQTLPTTENIARIIWQRLAPHLPLVRVQLFEHPELWADYIGNAMEAYLTISTHFSAAHRLAHPHLSNEENTEIYGKCARPHGHGHNYHLEVTVKGEIDPRTGMIVDLGGLNQVIEDYVVEPFDHTFLNKDIPYFAEIVPTAENIALYISNLLRSPIQELGAKLHKVKLIESPNNSCEIYCTESESDSVSASVNQPVLARV

SEQ ID NO: 23242 - protein, 290 aa, Nostoc sp.
  misc_feature (1)..(290): tr|A0A2D0HGG6|A0A2D0HGG6_9NOSO 6-pyruvoyl tetrahydropte rin synthase OS=Nostoc sp. 'Peltigera malacea cyanobion t' DB3992 OX=1206980 GN=CK516_20010 PE=4 SV=1
MPCIVNRRAQFSASHRYWLPELSEAENIEKFGAGSRFPGHGHNYVLFISLAGELDEYGMVLNLSDVKHVIKREVTSQLDFSYLNDVWAEFQQTLPTTENIARIIWQRLAPHLPLVRVQLFEHPELWADYMGNAMEAYLTISTHFSAAHRLAHPKLSNEENTEIYGKCARPNGHGHNYHLEVTVKGKIDPRTGMIIDLGALNQVVEDYVLEPFDHTFLNKDIPYFAEVVPTAENIALYISNLLRSPIQELGAKLYKVKLIESPNNSCEIYCTESESDSASAAVNQPVLAGV

SEQ ID NO: 23243 - protein, 128 aa, Nostoc sp.
  misc_feature (1)..(128): tr|A0A1C0V4G8|A0A1C0V4G8_9NOSO 6-carboxy-5,6,7,8-tetrah ydropterin synthase OS=Nostoc sp. MBR 210 OX=1881015 GN =BCD64_08040 PE=3 SV=1
MPKWKVVTEFSFNSAHYIKDYDGPCGRMHGHNYQVRIEAISTQLHSSQFCPHPVMVADFRTLRWAKQDVTKGGLDHCILNEVMPAEYETTAEMIAKYIYDETKKRVPPNVQLKVHVSETPNSWVEYEE

SEQ ID NO: 23244 - protein, 290 aa, Nostocales cyanobacterium
  misc_feature (1)..(290): tr|A0A1Y0RF26|A0A1Y0RF26_9CYAN 6-pyruvoyl tetrahydropte rin synthase OS=Nostocales cyanobacterium HT-58-2 OX=19 40762 GN=BZZ01_02515 PE=4 SV=1
MQCIVNRRAQFSASHRYWLPELSEAENIEKFGSCSKFPGHGHNYVLFVSLIGDLDEYGMVLNLSDVKHVIKQEVTSQLDFSYLNDVWVDFQQTLPTTENIARVIWQRLAPHLPLVRIQLFEHPELWADYLGNGMEAYLTLSTHFSAAHRLAHPRLSNEENFKIYGKCARPNGHGHNYHLEVTVKGEIDPRTGMLVDLGALNKVIEDYVVEPFDHTFLNKDIPYFAEVVPTAENIALHISQLLRSPIQQLGAKLYKVKLIESPNNSCEIYCNESESNSVNPAQNEPMLVRV

SEQ ID NO: 23245 - protein, 129 aa, Nostocales cyanobacterium
  misc_feature (1)..(129): tr|A0A1Y0RJH0|A0A1Y0RJH0_9CYAN 6-carboxy-5,6,7,8-tetrah ydropterin synthase OS=Nostocales cyanobacterium HT-58- 2 OX=1940762 GN=BZZ01_17605 PE=3 SV=1
MPKWKLVTEFTFDSAHYIKDYDGPCGRMHGHTYKVRIEAISFKLHSSKYCPHPVMVADFRTLRWAKQDVTKGGLDHSVLNDVLPVEYETTAEMIAKYIYDETKKQLPSDVQLKVAVSETPNSWVEYEDD

SEQ ID NO: 23246 - protein, 177 aa, Notoacmeibacter marinus
  misc_feature (1)..(177): tr|A0A231UXI4|A0A231UXI4_9RHIZ 6-pyruvoyl tetrahydropte rin synthase OS=Notoacmeibacter marinus OX=1876515 GN=B 7H23_11225 PE=4 SV=1
MTNAYRIARRIGIDAGHRIRLHGSKCRNLHGHRYTIEAVCEAEHLAHDGEQAGMVLDFSFLKDEMMGEIDAPCDHGFIAEIADSECLAMFAPGGVSVENFIHALRESVEKDGFAATTKTTLGTKLYVIGAPPTAENLARHWFERLAPRIAERSEGRARLAKVVVWETPNCAAEWPAT

SEQ ID NO: 23247 - protein, 177 aa, Notoacmeibacter sp.
  misc_feature (1)..(177): tr|A0A3L7JDK9|A0A3L7JDK9_9RHIZ 6-carboxytetrahydropteri n synthase OS=Notoacmeibacter sp. M2BS9Y-3-1 OX=2448481 GN=D8780_09455 PE=4 SV=1
MTNAYRITRRIGIDAGHRIRLHGSKCRNLHGHRYTIEAVCEAHELAGSGEQAGMVLDFGFLKDEMMAEIDSPCDHGFIAEAADQDLLTMFAPKSEDAGAFIDTLRQAVEKQGFAQTVETALGTKLYVIGPPPTAENLARHWFERLASRVEKRSEGRARLVKLVVWETPNCSAEWPAN

SEQ ID NO: 23248 - protein, 148 aa, Noviherbaspirillum autotrophicum
  misc_feature (1)..(148): tr|A0A0C2BMS5|A0A0C2BMS5_9BURK 6-carboxy-5,6,7,8-tetrah ydropterin synthase OS=Noviherbaspirillum autotrophicum OX=709839 GN=TSA66_19865 PE=4 SV=1
MLTITRKLEFDAGHRIPDHKSQCRNLHGHRYTLEITLIGAVIREEGSSDNGMIMDFSDVKSLAKQHLVDVWDHAFLVYEKDATLREFLDSLPGHKTVVIDSIPTVENLAQTAFNILRAAYQDHYGTGLRLHKLVLHETPNCWAEITAD

SEQ ID NO: 23249 - protein, 149 aa, Noviherbaspirillum denitrificans
  misc_feature (1)..(149): tr|A0A254TI31|A0A254TI31_9BURK 6-carboxy-5,6,7,8-tetrah ydropterin synthase OS=Noviherbaspirillum denitrificans OX=1968433 GN=AYR66_24385 PE=4 SV=1
MLTITRKLEFDAGHRIPDHKSQCRNLHGHRYTLEITLVGDIIQQEGSSDNGMIMDFSDVKAIAKETLVDVWDHAFLAYAKDTAVREFLESIPGHKTVIIDSIPTVENLARTAFNILHAAYKDRYGTGLHLHKLVLHETPNCWAEITADN

SEQ ID NO: 23250 - protein, 148 aa, Noviherbaspirillum humi
  misc_feature (1)..(148): tr|A0A239H9T8|A0A239H9T8_9BURK 6-carboxy-5,6,7,8-tetrah ydropterin synthase OS=Noviherbaspirillum humi OX=16886 39 GN=SAMN06265795_106138 PE=3 SV=1
MLTITRKLEFDAGHRIPDHKSQCRNLHGHRYVLEITLTGEVVDQDGESDNGMIMDFSDVKTLAKQHLVDVWDHAFLVYEKDAPVREFLASMPDHKTVVVPRVPTVENLAVTAFDILKPAFEQRFGRALRLKRVKLYETPNCWAEATDD

SEQ ID NO: 23251 - protein, 147 aa, Noviherbaspirillum sp.
  misc_feature (1)..(147): tr|A0A3A3GIX9|A0A3A3GIX9_9BURK 6-carboxy-5,6,7,8-tetrah ydropterin synthase OS=Noviherbaspirillum sp. K1S02-23 OX=2320865 GN=queD PE=3 SV=1
MLTITRKLEFDAGHRIPDHKSQCRNLHGHRYTLEITLMGEIIREEGSSDQGMIMDFSDVKALAKQHLVDVWDHAFLVYAKDEKVREFLQSLPGHKTVVIDSIPTVENLAQTAFDILKAAYQDHYGTGLRLHKLVLHETPNCWAEITE

SEQ ID NO: 23252 - protein, 148 aa, Noviherbaspirillum sp.
  misc_feature (1)..(148): tr|A0A5B8N3J5|A0A5B8N3J5_9BURK 6-carboxytetrahydropteri n synthase QueD OS=Noviherbaspirillum sp. UKPF54 OX=260 1898 GN=queD PE=4 SV=1
MLTITRKLEFDAGHRIPDHKSQCRNLHGHRYTLEITLIGAVITEEGSSDNGMIMDFSDVKSLAKQHLVDVWDHAFLVYEKDTALREFLDSLPGHKTVVIGSIPTVENLAQTAFNILKAAYQDRYGTGLRLHKLVLHETPNCWAEITAD

SEQ ID NO: 23253 - protein, 149 aa, Novimethylophilus kurashikiensis
  misc_feature (1)..(149): tr|A0A2R5F7S0|A0A2R5F7S0_9PROT 6-carboxy-5,6,7,8-tetrah ydropterin synthase OS=Novimethylophilus kurashikiensis OX=1825523 GN=queD PE=3 SV=1
MQITTRLEFDAGHRIPSHKSQCRNLHGHRYVIEITLSGDIIQNEGASEQGMVMDFSDVKAIARQQVVDKWDHAFLVYKGDTAVLDFLKTMPDHKTVVMNSVPTAENMAAEAFRILDASYKDTYGNHLRLERVRLFETPNSWADALRNAD

SEQ ID NO: 23254 - protein, 125 aa, Novosphingobium sp.
  misc_feature (1)..(125): tr|A0A0N0JHE3|A0A0N0JHE3_9SPHN 6-carboxy-5,6,7,8-tetrah ydropterin synthase OS=Novosphingobium sp. AAP1 OX=1523 413 GN=IP65_09810 PE=3 SV=1
MFELSKQFRFDAAHTLDRLIGTESSRRIHGHSYRAEVTVRGRPDPVSGMVIDLGFLERTIDDARDALDHRFLDEINDLGAATMENLSRWIWNRLSPAVDNLFRVSVYRDSSGDACFYYGPKEVDA

SEQ ID NO: 23255 - protein, 124 aa, Novosphingobium sp.
  misc_feature (1)..(124): tr|A0A258HZ89|A0A258HZ89_9SPHN 6-carboxy-5,6,7,8-tetrah ydropterin synthase OS=Novosphingobium sp. 32-60-15 OX= 1970410 GN=B7Y89_10070 PE=3 SV=1
MFELSKQFRFDAAHTLDRLIDTESSRRIHGHSYRAEVTVRGRPDPVTGMVVDLGLLERKMADARDALDHRFLDEVNDLGPATMENLSRWIWDRLSPEVGNLFKVSVYRDSSGEACSYWGEEITA

SEQ ID NO: 23256 - protein, 119 aa, Obesumbacterium proteus
  misc_feature (1)..(119): tr|A0A4Q9D5Z7|A0A4Q9D5Z7_9GAMM 6-carboxy-5,6,7,8-tetrah ydropterin synthase OS=Obesumbacterium proteus OX=82983 GN=queD PE=3 SV=1
MTTTLFKDFQFEAAHHLPHVPEGHKCGRLHGHSFLVRIEITGEVDAYTGWVMDFAELKAAFKPILDRLDHYYLNDIPGLENPTSEVLAQWIWQQLKPDLPLLSAVLVKETCTAGCTYRG

SEQ ID NO: 23257 - protein, 119 aa, Obesumbacterium proteus; identical to SEQ ID NO: 20943
  misc_feature (1)..(119): tr|A0A1B7KE07|A0A1B7KE07_9GAMM 6-carboxy-5,6,7,8-tetrah ydropterin synthase OS=Obesumbacterium proteus ATCC 128 41 OX=1354268 GN=M993_02922 PE=3 SV=1

SEQ ID NO: 23258 - protein, 147 aa, Oblitimonas alkaliphila
  misc_feature (1)..(147): tr|A0A0K1XGJ2|A0A0K1XGJ2_9GAMM 6-carboxy-5,6,7,8-tetrah ydropterin synthase OS=Oblitimonas alkaliphila OX=16970 53 GN=AKN88_10795 PE=3 SV=1
MKIVKHFSFDSAHLLDCHDGKCQNLHGHTYQLEVEVQGPLIKSGPKAGMVLDFADLKQAVKQQIVDHLDHAFIYDVHSEKESTIAQLLQSWQMKTFAFKGRTTAEMLSQFIFDQLSTKLPISRIRLYETPSSYAECNSPSSKETSDD

SEQ ID NO: 23259 - protein, 122 aa, Oceanibaculum indicum
  misc_feature (1)..(122): tr|A0A420WID5|A0A420WID5_9PROT 6-carboxy-5,6,7,8-tetrah ydropterin synthase OS=Oceanibaculum indicum OX=526216 GN=BCL74_2625 PE=3 SV=1
MFELSKEFRFDAAHTLNRTIEAESSRRIHGHSYRAQVTVRGTPDPETGMIVDLGMLSRLMEDARQALDHHFLDEVEGLGPATMENLSAWIWRRLDGQVPGLACVTVLRDSSGETCRYFGPAA

SEQ ID NO: 23260 - protein, 134 aa, Oceanibaculum indicum
  misc_feature (1)..(134): tr|K2K0S6|K2K0S6_9PROT Uncharacterized protein OS=Ocean ibaculum indicum P24 OX=1207063 GN=P24_08504 PE=4 SV=1
MFSVTVRDHFMIAHSFVGEVFGPAQALHGATYVVDVEFRRPKLDSDGIVVDIGRATDTLKAVLAEFNFKNLDEEEQFRGQNTTTEFMAKVVFDRMAARIAAGDLGAQAGGLTGMKVALHESHAAWAAYEGSLQA

SEQ ID NO: 23261 - protein, 134 aa, Oceanibaculum pacificum
  misc_feature (1)..(134): tr|A0A154WG67|A0A154WG67_9PROT 6-pyruvoyl tetrahydropte rin synthase OS=Oceanibaculum pacificum OX=580166 GN=AU P43_16145 PE=4 SV=1
MFSVTVRDHFMIAHSFVGAVFGPAQALHGATYVVDLEFRRPQLDSDGIVVDIGRATEALKAVLAEFNFKNLDDEAQFRGQNTTTEFMAKVVFDRVAARIRAGDLGAQAGGLAGLKVTLHESHAAWAAYEGALPA

SEQ ID NO: 23262 - protein, 124 aa, Oceanicaulis sp.
  misc_feature (1)..(124): tr|A0A2T4ZT08|A0A2T4ZT08_9RHOB 6-carboxy-5,6,7,8-tetrah ydropterin synthase OS=Oceanicaulis sp. PT13A OX=213561 6 GN=C7969_2179 PE=3 SV=1
MADLHLEISKDFTFDAAHHFEHKDASHPFSRMHGHSFSGTVTLTGPRAAESGMVRDFWEIDAEINKIRDQLDHRLLNDVEGLEHPSLEAIAFWVFERLEKTLPGLIAVEIRRPSCGEKAVVRRG

SEQ ID NO: 23263 - protein, 124 aa, Oceanicaulis sp.
  misc_feature (1)..(124): tr|A0A2D9MMT8|A0A2D9MMT8_9RHOB 6-carboxy-5,6,7,8-tetrah ydropterin synthase OS=Oceanicaulis sp. OX=1924941 GN=C MH90_03030 PE=3 SV=1
MADLHLEISKDFTFDAAHHFEHKDASHPFSRMHGHSFAGTVTLTGPRAAESGMVRDFWEIDAEINKIRDQLDHRLLNDVEGLEHPSLEAIAFWVFERLEKTLPGLTAVEIRRPSCGEKAVVRRG

SEQ ID NO: 23264 - protein, 137 aa, Oceanicella actignis
  misc_feature (1)..(137): tr|A0A1M7SEG2|A0A1M7SEG2_9RHOB 6-pyruvoyl tetrahydropte rin synthase OS=Oceanicella actignis OX=1189325 GN=SAMN 05216200_102301 PE=4 SV=1
MTGQEASLYAVEVRDHVMIAHSLPDPLFGPAQKLHGATYVVDAAFMRPELTEQGVVVDIGRAREALRAALAPLDYGNLDELLPGRLTTTEYLCRHIYERLRDAARAGALGPGAEGLTRIRVTLSESHLARAWHEGPA

SEQ ID NO: 23265 - protein, 121 aa, Oceanicoccus sagamiensis
  misc_feature (1)..(121): tr|A0A1X9NBR2|A0A1X9NBR2_9GAMM 6-carboxy-5,6,7,8-tetrah ydropterin synthase OS=Oceanicoccus sagamiensis OX=7168 16 GN=BST96_15940 PE=3 SV=1
MVAMEIYKEFTFEAAHRLPNVPEGHKCARLHGHSFYVRIYVDGPVDPDTGWVMDFYELKVAFKPILERLDHYYLNDIPGLENPTSENLSRWIWQALKPDLPLLSKLEVKETCTSGCIYTGP

SEQ ID NO: 23266 - protein, 165 aa, Oceanicoccus sagamiensis
  misc_feature (1)..(165): tr|A0A1X9NIC7|A0A1X9NIC7_9GAMM Uncharacterized protein OS=Oceanicoccus sagamiensis OX=716816 GN=BST96_14735 PE =4 SV=1
MESSNTVQIELDNQSLHFSCAHFTVFSAKSRERLHGHNFTVRARAWSSVGNNGLAFDYNELKTALRTICQRLDEYTLIPLYSPYLDIKEQGEYFSVSHNQQTMLLLQSDTLLLPVSNITLEELNGFIIEQLQSRSLFERLSIERFELSVSSGPGQRVKRELRVQP

SEQ ID NO: 23267 - protein, 149 aa, Oceanihabitans sediminis
  misc_feature (1)..(149): tr|A0A368P695|A0A368P695_9FLAO 6-carboxy-5,6,7,8-tetrah ydropterin synthase OS=Oceanihabitans sediminis OX=1812 012 GN=DU428_03260 PE=3 SV=1
MSKIRITKQFSFETGHALYGYDGKCKNVHGHSYKLSVTVIGTPISDKDNVKYGMVIDFGDLKKIVKNEIVDVFDHATVFNKNTPHIELAKELADRDHSVLLVDYQPTSEMMVIDFAEKIKKQLPSHISLFSLRLQETDSSFAEWFASDN

SEQ ID NO: 23268 - protein, 136 aa, Oceanihabitans sediminis
  misc_feature (1)..(136): tr|A0A368P5W1|A0A368P5W1_9FLAO 6-carboxy-5,6,7,8-tetrah ydropterin synthase OS=Oceanihabitans sediminis OX=1812 012 GN=DU428_09550 PE=3 SV=1
MKVTVSRRAHFNAAHRLYRKDWSDEKNTEVFGKCSNPNFHGHNYELIASVTGEINPETGYVIDIKDLKDIIKTEVEDAFDHKNLNVEVPEFKDLNPTAENIVVVIYNKIKKQLASHLELEVTLYETPRNFVSYSGI

SEQ ID NO: 23269 - protein, 118 aa, Oceanimonas baumannii
  misc_feature (1)..(118): tr|A0A235CL03|A0A235CL03_9GAMM 6-carboxy-5,6,7,8-tetrah ydropterin synthase OS=Oceanimonas baumannii OX=129578 GN=queD PE=3 SV=1
MYTIKKEFHFSASHQLKQMPDWHPCARLHGHNYVVVIELQSEQLDQYGFVRDYLELKAFKEYIDDKLDHRHLNEVLGNECTTAERLARHLYDWASVRWPEVSAVAVSETPKTWAEFRP

SEQ ID NO: 23270 - protein, 118 aa, Oceanimonas doudoroffii
  misc_feature (1)..(118): tr|A0A233RF76|A0A233RF76_9GAMM 6-carboxy-5,6,7,8-tetrah ydropterin synthase OS=Oceanimonas doudoroffii OX=84158 GN=queD PE=3 SV=1
MYTIKKEFHFSASHQLKQMPDWHPCARLHGHNYVVVIELQSERLDQYGFVRDYLELKAFKDYIDDQLDHRHLNEVLGDECTTAERLARHLYEWAREHWPEVSAVAVSETPKTWAEFRP

SEQ ID NO: 23271 - protein, 118 aa, Oceanimonas sp.
  misc_feature (1)..(118): tr|H2FX32|H2FX32_OCESG 6-carboxy-5,6,7,8-tetrahydropter in synthase OS=Oceanimonas sp. (strain GK1) OX=511062 G N=GU3_12045 PE=3 SV=1
MYTIKKEFHFSASHQLKQMPDWHPCARLHGHNYVVVIELQSETLDQYGFVRDYLELKAFKDYIDDRLDHRHLNEVLGDECTTAERLARHLYDWARERWPEVSAVLVSETPKTWAEYRP

SEQ ID NO: 23272 - protein, 118 aa, Oceanisphaera arctica
  misc_feature (1)..(118): tr|A0A2P5TQW6|A0A2P5TQW6_9GAMM 6-carboxy-5,6,7,8-tetrah ydropterin synthase OS=Oceanisphaera arctica OX=641510 GN=UN63_01355 PE=3 SV=1
MYTIKKEFHFSASHQLLQMPDWHPCARLHGHNYVVVIELQSETLDQYGFVRDYLELKAFKDYIDEQLDHRHLNEVLGDACTTAERLARHLFDWACARWPEVSAVSVSETPKTWAEYRP

SEQ ID NO: 23273 - protein, 118 aa, Oceanisphaera profunda
  misc_feature (1)..(118): tr|A0A1Y0D1Q1|A0A1Y0D1Q1_9GAMM 6-carboxy-5,6,7,8-tetrah ydropterin synthase OS=Oceanisphaera profunda OX=141662 7 GN=CBP31_01380 PE=3 SV=1
MYRIKKEFHFSASHQLKQMPDDHPCARLHGHNYIVVIELCSETLDEFGFVRDYHELKAFKNYLDDRFDHRHLNEVLGDECTTAERLARHLFDWARERWCEVSAVLVSETPKTWAEYRP

SEQ ID NO: 23274 - protein, 118 aa, Oceanisphaera psychrotolerans
  misc_feature (1)..(118): tr|A0A1J4QDR4|A0A1J4QDR4_9GAMM 6-carboxy-5,6,7,8-tetrah ydropterin synthase OS=Oceanisphaera psychrotolerans OX =1414654 GN=BFR47_17280 PE=3 SV=1
MYTIKKEFHFSASHQLLQMPDWHPCARLHGHNYVVVIELQSEALDQYGFVRDYLELKPFKDYIDDTLDHRHLNEVLGDECTTAERLARHLFDWARARWPEVSAVLVSETPKTWAEYRP

SEQ ID NO: 23275 - protein, 144 aa, Oceanobacillus caeni; identical to SEQ ID NO: 17788
  misc_feature (1)..(144): tr|A0A0N0M766|A0A0N0M766_9BACI 6-carboxy-5,6,7,8-tetrah ydropterin synthase OS=Oceanobacillus caeni OX=405946 G N=AFL42_11830 PE=3 SV=1

SEQ ID NO: 23276 - protein, 147 aa, Oceanobacillus iheyensis
  misc_feature (1)..(147): tr|Q8EMN8|Q8EMN8_OCEIH 6-carboxy-5,6,7,8-tetrahydropter in synthase OS=Oceanobacillus iheyensis (strain DSM 143 71 / CIP 107618 / JCM 11309 / KCTC 3954 / HTE831) OX=22 1109 GN=OB2804 PE=3 SV=1
MEMMQQIYPVTPHSYAYELNKDFQFSAAHYIPHDQAGKCQQMHGHTYFTNITVVGDELDETGFLVNFKQIKNLIHKRFDHGVINDDAAFSDEQAVDFPTTEVVARKIYEIIQEYLDGLQNKPKCIQVYLRETPTSYCIYRPKGGKSI

SEQ ID NO: 23277 - protein, 155 aa, Oceanobacillus oncorhynchi
  misc_feature (1)..(155): tr|A0A0A1MDZ4|A0A0A1MDZ4_9BACI 6-carboxy-5,6,7,8-tetrah ydropterin synthase OS=Oceanobacillus oncorhynchi OX=54 5501 GN=queD PE=4 SV=1
MFGFRIVEELQKLDKDIHRKELAYHQKRVMVSKEFSFDAAHHLHCYEGKCKNLHGHTYQVVFGISGFVDKVGFVIDFGDIKEIWKNKIETFLDHRYLNETLPKMNTTAENMVVWIFEQMEAAIQELPNQCQVEFVRLFETPTSYAEARREWMNHA

SEQ ID NO: 23278 - protein, 144 aa, Oceanobacillus profundus
  misc_feature (1)..(144): tr|A0A417YLK6|A0A417YLK6_9BACI 6-carboxy-5,6,7,8-tetrah ydropterin synthase OS=Oceanobacillus profundus OX=3724 63 GN=queD PE=3 SV=1
MMQQIYPVTEHPYAYELNKDFQFAAAHYVPHEDAGKCQNMHGHTYFTNVTIAGDELDHTGFLVDFKKIKDLIHKRFDHRMMNEDTKFSDQDAEYFPTTEVVARTIYEIIKEYLNTLSNNPTCVQVYLRETPTSYCIYRPKEKTL

SEQ ID NO: 23279 - protein, 155 aa, Oceanobacillus sojae
  misc_feature (1)..(155): tr|A0A511ZJB3|A0A511ZJB3_9BACI 6-carboxytetrahydropteri n synthase QueD OS=Oceanobacillus sojae OX=582851 GN=OS O01_22700 PE=4 SV=1
MFGFRIVEELQKLDEDIQREHLAYHQKRVMVSKEFTFDAAHHLHCYEGKCKNLHGHTYKVIFGISGFVDENGLVIDFSDIKKIWKDKIEVFLDHRYLNETLPKMNTTAENMVVWIFEQMEEAIRDLPNDCKVELVRLFETPTSYAEARREWIYHA

SEQ ID NO: 23280 - protein, 145 aa, Oceanobacillus sp.
  misc_feature (1)..(145): tr|A0A1E5K2E0|A0A1E5K2E0_9BACI 6-carboxy-5,6,7,8-tetrah ydropterin synthase OS=Oceanobacillus sp. E9 OX=1742575 GN=AQ616_07460 PE=3 SV=1
MMQQIYPVIPHSYAYELNKDFHFSAAHYIPQDQAGKCQQMHGHTYFTNITVVGDELDETGFLVNFKQIKDLIHKRFDHGVINHDSAFSDEQAIDFPTTEVVSRKIYEIIQDYLDGLQNKPKCIQVYLRETPTSYCIYRPRGEKST

SEQ ID NO: 23281 - protein, 144 aa, Oceanobacillus sp.
  misc_feature (1)..(144): tr|A0A498DFU0|A0A498DFU0_9BACI 6-carboxy-5,6,7,8-tetrah ydropterin synthase OS=Oceanobacillus sp. YLB-02 OX=244 8030 GN=queD PE=3 SV=1
MIQQIYPVTEHPYAYELNKDFQFAAAHYIPHGDAGKCQNMHGHTYFTNVTIAGDELNHTGFLVNFKKVKDLIHKRFDHRVMNEDTKFSDLDAEYFPTTEVVARTIYEIIQEYLNTLSNKPTCIQVYLRETPTSYCIYRPKGKTL

SEQ ID NO: 23282 - protein, 277 aa, Oceanobacter sp.
  misc_feature (1)..(277): tr|A0A2G2JG97|A0A2G2JG97_9GAMM Uncharacterized protein OS=Oceanobacter sp. OX=2030817 GN=COA68_12865 PE=4 SV=1
MHLFVEQLTNVDFSYLDLSRGIVGETWWASAILEGELDQQGMVCDFGTVKKVLRNWMDDEIDHRLLVPELAEGLTITQSADRIELRCDTARGPIIMNAPREAVTLIDAKEITIQSVASWCIRQLEPHFPNSIDQLSLDFTPEEINGAMYHYSHGLKKHDGNCQRIAHGHRSRIQIWLDGNRNQDEEAYWADLWKDIYIGSKEDLIDSPEDEYQFEYTAQQGEFYLSLSKQHCYLIDTDTTVELIANHLANKIKARHPNTQVTVRAFEGVNKGAMVTL

SEQ ID NO: 23283 - protein, 140 aa, Oceanococcus atlanticus
  misc_feature (1)..(140): tr|A0A1Y1SH37|A0A1Y1SH37_9GAMM 6-pyruvoyl tetrahydrobio pterin synthase OS=Oceanococcus atlanticus OX=1317117 G N=ATO7_01500 PE=4 SV=1
MTTSKPIVYLTRREHFCAAHRLWSDALSAEENQALYGPCSREYGHGHNYFMDVTLRGPVDPRTGVIVNLTEVRDALKELILEDTDQRHLNHDSPLCAGVNPTAENLAVLFWNVLHARFGALLYEVKVQETDKNWAIYRGE

SEQ ID NO: 23284 - protein, 285 aa, Oceanococcus atlanticus
  misc_feature (1)..(285): tr|A0A1Y1SHC1|A0A1Y1SHC1_9GAMM Uncharacterized protein OS=Oceanococcus atlanticus OX=1317117 GN=ATO7_01900 PE= 4 SV=1
MKLETRLFIADFTHLDCAWFDPLQGLIGESWRVDAELAGELADNGMLCDFGVVKSVLKQALDEQIDHRLLLNAAQAAELHNQSGHSTISLRNAASEEWHYRAPSSSFALLDTPTIDAGHLAATLAAPLRALLPDNITHLNLTLSPAHHQGPYRYCHGLRQHSGNCQRMAHGHRARLDIQVDGERHHQLETDWQQRFDGRYIGSEEHLSISGSRHRYAYQASQGAFELELPQNRSCPIEAEPTVEHITAHMARAIARQLPGRRIECRAFEGIGKGAHSCAELKPRP

SEQ ID NO: 23285 - protein, 288 aa, Oceanococcus sp.
  misc_feature (1)..(288): tr|A0A520SNT6|A0A520SNT6_9GAMM Uncharacterized protein OS=Oceanococcus sp. OX=1958892 GN=EVA65_11075 PE=4 SV=1
MPAMKLETRLFIADFTHLDCAWFDPLQGLIGESWRVDAELAGELADNGMLCDFGVVKSVLKQALDEQIDHRLLLNAAQAAELHNQSGHSTISLRNAASEEWHYRAPSSSFALLDTPTIDAGHLAATLAAPLRALLPDNITDLNLTLSPAHHQGPYRYCHGLRQHSGNCQRMAHGHRARLDIQVDGERHHQLETDWQQRFDGRYIGSEEHLSISGSRHRYAYQASQGAFELELPQNRSCPIEAEPTVEHITAHMARAIARQLPGRRIECRAFEGIGKGAHSCAELKPKP

SEQ ID NO: 23286 - protein, 140 aa, Oceanococcus sp.; identical to SEQ ID NO: 23283
  misc_feature (1)..(140): tr|A0A520SSG9|A0A520SSG9_9GAMM 6-carboxytetrahydropteri n synthase OS=Oceanococcus sp. OX=1958892 GN=EVA65_0604 5 PE=4 SV=1

SEQ ID NO: 23287 - protein, 278 aa, Oceanospirillaceae bacterium
  misc_feature (1)..(278): tr|A0A2E2ICQ1|A0A2E2ICQ1_9GAMM Uncharacterized protein OS=Oceanospirillaceae bacterium OX=1899355 GN=CMI06_057 45 PE=4 SV=1
MQLFVEQLTNVDFSYLDAKRGLVGETWWASAVLDGALDEQGMVCDFGIVKKTLRNWLDDELDHRLLVPVQSPALTLKHSGDIIELSWQYDNGDLLEMRAPRQAVALVDAEQIDANSVAHWCREQLRSHFPVNVEQLTLSFVAEDIDGAFYHYSHGLKKHNGNCQRIAHGHRSRIQIWLDDERSSTLEQQWAERWADIYLGSTEDLISSDNNQLLFRYSAQQGEFELSLPASRNYMMETDTTVEFIARHLADTIKQQHPDSQVRVRAFEGVNKGAIAEA

SEQ ID NO: 23288 - protein, 119 aa, Oceanospirillaceae bacterium
  misc_feature (1)..(119): tr|A0A2D6DJC2|A0A2D6DJC2_9GAMM 6-carboxy-5,6,7,8-tetrah ydropterin synthase OS=Oceanospirillaceae bacterium OX= 1899355 GN=queD PE=3 SV=1
MEIYKDFSFDSAHRLPNVPDGHKCGRLHGHTFQLRIVVSGPVDETTGWIMDFGDIKAAFRPLYERLDHNYLNEIDGLENPTSEVLVKWIWQQLKPVLPQLVRLEIKETCTSGCVYIGDD

SEQ ID NO: 23289 - protein, 278 aa, Oceanospirillales bacterium
  misc_feature (1)..(278): tr|A0A2A4UQN6|A0A2A4UQN6_9GAMM Uncharacterized protein OS=Oceanospirillales bacterium OX=1914300 GN=COB43_0928 0 PE=4 SV=1
MHLFVDQLTNVDFSYLDSHRGLVGETWWASAVLEGALDEQGMVCDFGIVKKTLRNWLDLELDHRLLIPVRSPALQHCLHDDKITLTWHFGHGQHLTMTAPQQAVALVDAEVINDLTVAEWSITQLSSSFPGSIEQLSLTFENENIHGANYHYSHGLKKHDGNCQRIAHGHRSRIEIFIDGERNPSLEQHWANTWEDIYLGTVEDLSNQTEEHLHFHYHAQQGEFTLSLPKDCCYLMDTDTTVELIAAHLAQEIKRDHPSVEVCVRAFEGVNKGAMVAL

SEQ ID NO: 23290 - protein, 279 aa, Oceanospirillales bacterium
  misc_feature (1)..(279): tr|A0A357LYK5|A0A357LYK5_9GAMM Uncharacterized protein OS=Oceanospirillales bacterium OX=1914300 GN=DEA26_0597 0 PE=4 SV=1
MHLFVEKLVNIDFSYLDVTRGLVGETWWASTSLEGALDQQGMVCDFGTVKKVLREWLDREIDHCLLVPAQAAGLKVQENDGITSLSWQTERGLIRMSAPSQAVTLIDAAVITPYTCAKWCMEQLTPLFPDSIDQLSLTFEPEVIDGPSYHYSHGLKKHDGNCQRIAHGHRSRIEIFLDGVRNTDEEAWWAECWKDVYLGSRDDVTEENDQHIDYRYQAAQGDFALTLPRSHCYLMETDTTVELIAAHLTARVAERHPGRTVKVRAFEGVNKGALAFSGQ

SEQ ID NO: 23291 - protein, 279 aa, Oceanospirillum multiglobuliferum
  misc_feature (1)..(279): tr|A0A1T4PFP4|A0A1T4PFP4_9GAMM Uncharacterized protein OS=Oceanospirillum multiglobuliferum OX=64969 GN=BTE48_ 08100 PE=4 SV=1
MTTLFVRQLTVIDCSYLDDQLGLVGESWYVDVELDGELNEQGMLFDFSHVKKTLKKLIDSTVDHALLVPESAPSYQLIQECEDQLSLRFQSQVGTFIHKSPHCAVQRLAVERISAETVAYWLEQSARAVLPPNVQSVRFFLHAEKLPSEQAYYHYSHGLKKHEGNCQRIAHGHRSQIEILTAGQRNTALETQWAKQLKNGYIGTVEDIKAEDDHSLTFAYQANQGHFEITVPKSICTLMPTDTTVELIARFICEQINQPNTRVRAYEGIEKGAIAKSEP

SEQ ID NO: 23292 - protein, 118 aa, Ochrobactrum anthropi
  misc_feature (1)..(118): tr|A0A011UCP9|A0A011UCP9_OCHAN 6-carboxy-5,6,7,8-tetrah ydropterin synthase OS=Ochrobactrum anthropi OX=529 GN= queD PE=3 SV=1
MFRITKEFHFSASHQLTGLPDDHQCARLHGHNYIVEVELSADDLNQHGFVRDYHELAPFKRYIDDCFDHRHLNDVLGHDQSTAETLARHFFEWCYARWPEISAVRVSETPKTWAEYRP

SEQ ID NO: 23293 - protein, 118 aa, Ochrobactrum anthropi
  misc_feature (1)..(118): tr|A0A137XZX2|A0A137XZX2_OCHAN 6-carboxy-5,6,7,8-tetrah ydropterin synthase OS=Ochrobactrum anthropi OX=529 GN= AYJ56_00170 PE=3 SV=1
MFRITKEFHFSASHQLTGLPVGHQCARLHGHNYIVEVELSADDLNQHGFVRDYHELAPFKRYIDDCFDHRHLNDVLGHDQSTAETLARHFFDWCHVRWPEISAVRISETPKTWAEYRP

SEQ ID NO: 23294 - protein, 118 aa, Ochrobactrum cytisi; identical to SEQ ID NO: 23292
  misc_feature (1)..(118): tr|A0A1J6IBW2|A0A1J6IBW2_9RHIZ 6-carboxy-5,6,7,8-tetrah ydropterin synthase OS=Ochrobactrum cytisi OX=407152 GN =BLA27_16520 PE=3 SV=1

SEQ ID NO: 23295 - protein, 122 aa, Ochrobactrum gallinifaecis
  misc_feature (1)..(122): tr|A0A502BM99|A0A502BM99_9RHIZ 6-carboxy-5,6,7,8-tetrah ydropterin synthase OS=Ochrobactrum gallinifaecis OX=21 5590 GN=queD PE=3 SV=1
MFRITKEFHFSASHQLTQLPADHQCARLHGHNYIVEIELSANDLDQHGFVRDYHELAPLKHYIDNELDHRHLNDVLGHDRVTAEFLARHLYDWCKTRWQEVTAVRVSETPKTWAEYRPGNRI

SEQ ID NO: 23296 - protein, 122 aa, Ochrobactrum grignonense
  misc_feature (1)..(122): tr|A0A256FAC5|A0A256FAC5_9RHIZ 6-carboxy-5,6,7,8-tetrah ydropterin synthase OS=Ochrobactrum grignonense OX=9462 7 GN=queD PE=3 SV=1
MYRITKEFHFSASHQLTELPADHQCARLHGHNYIVEVELSAADLNEHGFVRDYHELAPLKRYIDDELDHRHLNDVLGHNRVTAEFLARHLYDWCQTRWQEVTAVRVSETPKTWAEYRPESRS

SEQ ID NO: 23297 - protein, 122 aa, Ochrobactrum haematophilum; identical to SEQ ID NO: 18469
  misc_feature (1)..(122): tr|A0A2P9HQT6|A0A2P9HQT6_9RHIZ 6-carboxy-5,6,7,8-tetrah ydropterin synthase OS=Ochrobactrum haematophilum OX=41 9474 GN=OHAE_2372 PE=3 SV=1

SEQ ID NO: 23298 - protein, 122 aa, Ochrobactrum haematophilum
  misc_feature (1)..(122): tr|A0A397L3W1|A0A397L3W1_9RHIZ 6-carboxy-5,6,7,8-tetrah ydropterin synthase OS=Ochrobactrum haematophilum OX=41 9474 GN=BCF22_3691 PE=3 SV=1
MFRITKEFHFSASHQLTGLPADHQCARLHGHNYIVEVELSAADLDRHGFVRDYHELAPFKRYIDDAFDHRHLNDVLGHGQTTAETLAKHFFDWCRARWPEISAVRVSETPKTWAEYRPGPQP

SEQ ID NO: 23299 - protein, 118 aa, Ochrobactrum intermedium
  misc_feature (1)..(118): tr|U4VAM5|U4VAM5_9RHIZ 6-carboxy-5,6,7,8-tetrahydropter in synthase OS=Ochrobactrum intermedium 229E OX=1337887 GN=Q644_01510 PE=3 SV=1
MFRITKEFHFSASHQLTGLPEDHQCARLHGHNYIVEVELSASDLNEHGFVRDYHELAPFKRYIDDCFDHRHLNDVLGHDQSTAETLARHFFEWCHARWPEISAVRVSETPKTWAEYRP

SEQ ID NO: 23300 - protein, 118 aa, Ochrobactrum intermedium; identical to SEQ ID NO: 23299
  misc_feature (1)..(118): tr|C4WJA2|C4WJA2_9RHIZ 6-carboxy-5,6,7,8-tetrahydropter in synthase OS=Ochrobactrum intermedium LMG 3301 OX=641 118 GN=queD PE=3 SV=1

SEQ ID NO: 23301 - protein, 118 aa, Ochrobactrum lupini
  misc_feature (1)..(118): tr|A0A256GQM1|A0A256GQM1_9RHIZ 6-carboxy-5,6,7,8-tetrah ydropterin synthase OS=Ochrobactrum lupini OX=255457 GN =queD PE=3 SV=1
MFRITKEFHFSASHQLTGLPDDHQCARLHGHNYIVEVELSADDLNQHGFVRDYHELAPFKRHIDDCFDHRHLNDVLGHDQSTAETLARHFFEWCYARWPEISAVRVSETPKTWAEYRP

SEQ ID NO: 23302 - protein, 118 aa, Ochrobactrum oryzae
  misc_feature (1)..(118): tr|A0A2S7J1D7|A0A2S7J1D7_9RHIZ 6-carboxy-5,6,7,8-tetrah ydropterin synthase OS=Ochrobactrum oryzae OX=335286 GN =queD PE=3 SV=1
MFRITKEFHFSASHQLTGLPADHQCARLHGHNYIVEVELSAPELNQHGFVRDYHELAPFKRYIDDCFDHRHLNDVLGHDRSTAETLARHFFEWCHARWPEISAVRVSETPKTWAEYRP

SEQ ID NO: 23303 - protein, 118 aa, Ochrobactrum pecoris
  misc_feature (1)..(118): tr|A0A5C5CPV1|A0A5C5CPV1_9RHIZ 6-carboxy-5,6,7,8-tetrah ydropterin synthase OS=Ochrobactrum pecoris OX=867683 G N=queD PE=3 SV=1
MFRITKEFHFSASHQLTGLPEDHQCARLHGHNYVVEVELSARDLDQHGFVRDYHELAPFKRYIDDCFDHRHLNDVLGHNQSTAETLARHFFEWCQTRWPEISAVRVSETPKTWAEYRP

SEQ ID NO: 23304 - protein, 122 aa, Ochrobactrum pseudogrignonense
  misc_feature (1)..(122): tr|A0A1A9FS24|A0A1A9FS24_9RHIZ 6-carboxy-5,6,7,8-tetrah ydropterin synthase OS=Ochrobactrum pseudogrignonense O X=419475 GN=A8A54_16735 PE=3 SV=1
MFRITKEFHFSASHQLTELPADHQCARLHGHNYIVEVELSSADLNEHGFVRDYHELAPLKRYIDDELDHRHLNDVLGHNCVTAEFLARHLYEWCQTRWQEVTAVRVSETPKTWAEYRPASRS

SEQ ID NO: 23305 - protein, 122 aa, Ochrobactrum pseudogrignonense
  misc_feature (1)..(122): tr|A0A256GM37|A0A256GM37_9RHIZ 6-carboxy-5,6,7,8-tetrah ydropterin synthase OS=Ochrobactrum pseudogrignonense O X=419475 GN=queD PE=3 SV=1
MFRITKEFHFSASHQLTELPADHQCARLHGHNYIVEVELSSADLNEHGFVRDYHELAPLKRYIDDELDHRHLNDVLGHNCVTAEFLARHLYEWCQTRWQEVTAVRVSETPKTWAEYRPESRS

SEQ ID NO: 23306 - protein, 122 aa, Ochrobactrum quorumnocens
  misc_feature (1)..(122): tr|A0A248UFS9|A0A248UFS9_9RHIZ 6-carboxy-5,6,7,8-tetrah ydropterin synthase OS=Ochrobactrum quorumnocens OX=271 865 GN=queD PE=3 SV=1
MFRITKEFHFSASHQLTELPADHQCARLHGHNYIVEVELSAADLNAYGFVRDYHELAPLKRYIDGELDHRHLNDVLGHHRVTAEFLARHLYDWCKVRWQEVTAVRVSETPKTWAEYRPEYRP

SEQ ID NO: 23307 - protein, 122 aa, Ochrobactrum rhizosphaerae
  misc_feature (1)..(122): tr|A0A256F354|A0A256F354_9RHIZ 6-carboxy-5,6,7,8-tetrah ydropterin synthase OS=Ochrobactrum rhizosphaerae OX=57 1254 GN=queD PE=3 SV=1
MFRITKEFHFSASHQLTELPADHQCARLHGHNYIVEVELSASALDEHGFVRDYHELAPLKRYIDDELDHRHLNDVLGHNHVTAECLARHLYDWCQRRWQEVSAVRVSETPKTWAEYRPGNRP

SEQ ID NO: 23308 - protein, 122 aa, Ochrobactrum sp.
  misc_feature (1)..(122): tr|A0A4R7WP20|A0A4R7WP20_9RHIZ 6-carboxy-5,6,7,8-tetrah ydropterin synthase OS=Ochrobactrum sp. LP_5_YM OX=2485 134 GN=EC911_103530 PE=3 SV=1
MFRITKEFHFSASHQLNELPTDHQCARLHGHNYIVEVELSAPDLNEYGFVRDYHELAPLKRYIDDELDHRHLNDVLGHNGVTAEFLARHLYDWCRTRWQEVTAVRVSETPKTWAEYRPGYRA

SEQ ID NO: 23309 - protein, 122 aa, Ochrobactrum sp.
  misc_feature (1)..(122): tr|A0A1V3YTR3|A0A1V3YTR3_9RHIZ 6-carboxy-5,6,7,8-tetrah ydropterin synthase OS=Ochrobactrum sp. P6BS-III OX=192 0636 GN=BRY73_04005 PE=3 SV=1
MFRITKEFHFSASHQLTGLPADHQCARLHGHNYIVEVELSAAGLNGHGFVRDYHELAPFKHYIDDAFDHRHLNDVLGHGHTTAETLAKHFFDWCHSRWPEISAVRVSETPKTWAEYRPSVKQ

SEQ ID NO: 23310 - protein, 126 aa, Ochrobactrum thiophenivorans
  misc_feature (1)..(126): tr|A0A256G1T7|A0A256G1T7_9RHIZ 6-carboxy-5,6,7,8-tetrah ydropterin synthase OS=Ochrobactrum thiophenivorans OX= 571255 GN=queD PE=3 SV=1
MFRITKEFHFSASHQLTDLPADHQCARLHGHNYIVEVELSASDLDENGFVRDYHELTPLKRYIDDELDHRHLNDVLGHNRVTAEFLARHLYDWCKARWQEVSAIRVSETPKTWAEYRPGYQAGYRT

SEQ ID NO: 23311 - protein, 118 aa, Unknown
  misc_feature (1)..(118): tr|A0A2A4Z388|A0A2A4Z388_9PROT 6-carboxy-5,6,7,8-tetrah ydropterin synthase OS=OCS116 cluster bacterium OX=2030 921 GN=queD PE=3 SV=1
MFTISKEFHFSAAHRLLTLAEDHPCYRLHGHNYIVTIELKSEQVSDNGFVVDFRDLTPLKNYIDGTFDHQYLNDVFGDVPTTSELLAKHFYDWSKQKWSEVSAVRVSETAKTWAEYRP

SEQ ID NO: 23312 - protein, 180 aa, Odoribacter laneus
  misc_feature (1)..(180): tr|R5US48|R5US48_9BACT Uncharacterized protein OS=Odori bacter laneus CAG:561 OX=1263089 GN=BN709_00277 PE=4 SV =1
MIIRKLFKFEGAHIVRNCSSQQCRENIHGHSYIVEVFIRSDKLDRGCMVMDFSLLDKVKMFIESFDHTYSLWKGEAEELKHFIYKYNRRVAEFPLSPSAEGFALIFLYVIDLILKNTRFENGEGNIEVSSVRVHETATGYAEAFREDLQEVHFSVRDIHFSPGITEQWKTADWWEKLINA

SEQ ID NO: 23313 - protein, 180 aa, Odoribacter laneus; identical to SEQ ID NO: 23312
  misc_feature (1)..(180): tr|H1DFE2|H1DFE2_9BACT Uncharacterized protein OS=Odori bacter laneus YIT 12061 OX=742817 GN=HMPREF9449_00978 P E=4 SV=1

SEQ ID NO: 23314 - protein, 178 aa, Odoribacter sp.
  misc_feature (1)..(178): tr|A0A373UV63|A0A373UV63_9BACT 6-carboxytetrahydropteri n synthase OS=Odoribacter sp. AF21-41 OX=2293111 GN=DWX 82_02730 PE=4 SV=1
MVIRKLFKFEGAHIVRNCSSHRCRENIHGHSYIVEVFITSDKLDRGYMVMDFVLLDKVKELVDSFDHTYSLWQEESDELKTFVYKYNRRVAEIPVSPSAEGYALLFLYLIDKILQNMEHKNGEGNVQLSSVRVHETATGYAEAFREDLKLVNFNVHDIRFSEAIREEWKNEQWWEGIR

SEQ ID NO: 23315 - protein, 178 aa, Odoribacter sp.
  misc_feature (1)..(178): tr|A0A417WYP5|A0A417WYP5_9BACT 6-carboxytetrahydropteri n synthase OS=Odoribacter sp. OF09-27XD OX=2293112 GN=D XA95_06725 PE=4 SV=1
MIIRKLFKFEGAHIVRNCSSRHCRENMHGHSYIVEVFITSDRLDNGYMVMDFGLLDKVKAFIASFDHTYTLWTQEEPDFKHFVYRYNKRVAEIPVSPSAEGFALLFLYIINRILENTTFRNGEGHVQLSSVRVHETATGYAEAFREDLKLAEFTPADVLFSPAIQEEWKSDEWWKKIR

SEQ ID NO: 23316 - protein, 180 aa, Odoribacter splanchnicus
  misc_feature (1)..(180): tr|F9Z7W9|F9Z7W9_ODOSD 6-pyruvoyl-tetrahydropterin synt hase OS=Odoribacter splanchnicus (strain ATCC 29572 / D SM 20712 / CIP 104287 / JCM 15291 / NCTC 10825 / 1651/6 ) OX=709991 GN=Odosp_0745 PE=4 SV=1
MLIRKQFKFEGAHIVRNCSSQRCRENIHGHSYIVEVFITSDKLDDGYMVMDFCRLDKVKEFIESFDHSYSLWQNESPDLKTFVYRYNRRVAEIPVSPSAEGYALLFTYVIDKILRHTERVNGEGNIQLHAVRVHETATGYAEAFQEDLKLARFQLKDIHFSEGIVAEWKSTDWWDKLLEA

SEQ ID NO: 23317 - protein, 180 aa, Odoribacter splanchnicus
  misc_feature (1)..(180): tr|A0A1Y3YHF4|A0A1Y3YHF4_9BACT 6-carboxytetrahydropteri n synthase QueD OS=Odoribacter splanchnicus OX=28118 GN =DWW57_00535 PE=4 SV=1
MLIRKQFKFEGAHIVRNCSSQRCRENIHGHSYIVEVFITSDKLDDGYMVMDFCRLDKVKEFIESFDHSYSLWQKEPPDFKTFVYRYNRRVAEIPVSPSAEGYALLFTYVIDKILRHTERVNGEGNIQLHAVRVHETATGYAEAFQEDLKLARFRLKDIHFSEGIVAEWKSTDWWDKLLEV

SEQ ID NO: 23318 - protein, 122 aa, Oenococcus oeni
  misc_feature (1)..(122): tr|A0A5E9PA44|A0A5E9PA44_OENOE 6-pyruvoyl tetrahydropte rin synthase OS=Oenococcus oeni OX=1247 GN=E2146_01215 PE=4 SV=1
MTRKKYTYKMRSYINASHAIRWEAGIGSEHPHTWEIICEIVSSNDHMIKFEDIEEVITETISGLSGKFLNTIAPFDKINPTLENLTNYLFDMITDSLKKINCKLIRIEVGESPTRFYCISLD

SEQ ID NO: 23319 - protein, 122 aa, Oenococcus oeni; identical to SEQ ID NO: 23318
  misc_feature (1)..(122): tr|Q04DY8|Q04DY8_OENOB 6-pyruvoyl-tetrahydropterin synt hase OS=Oenococcus oeni (strain ATCC BAA-331 / PSU-1) O X=203123 GN=OEOE_1473 PE=4 SV=1

SEQ ID NO: 23320 - protein, 136 aa, Ohtaekwangia koreensis
  misc_feature (1)..(136): tr|A0A1T5M4Y2|A0A1T5M4Y2_9BACT 6-pyruvoyltetrahydropter in/6-carboxytetrahydropterin synthase OS=Ohtaekwangia k oreensis OX=688867 GN=SAMN05660236_4296 PE=4 SV=1
MKIKVSRKEHFNAAHRLFNPEWSPEKNQQVFGKCSNPNFHGHNYEVIVSVIGDPDPATGYVYDMKILSDEIKEHVLNKFDHRNLNLDLEYFKDLNPTAENIALVIWRILRQRIDSKFELKITLYETERNFVEYPAS

SEQ ID NO: 23321 - protein, 139 aa, Ohtaekwangia koreensis
  misc_feature (1)..(139): tr|A0A1T5LUK8|A0A1T5LUK8_9BACT 6-pyruvoyltetrahydropter in/6-carboxytetrahydropterin synthase OS=Ohtaekwangia k oreensis OX=688867 GN=SAMN05660236_3902 PE=4 SV=1
MLHISRKEHFNAAHKLYNPQWSKEKNAEVFGPCANENWHGHNFDLIVTVKGKPDPETGFVVDLKKLSTLIRQEVIEKLDHKNLNTDVDFMQGKLASCENLIVEIWKILDAKLASITSFGKLHCVRLYETPRNYVEYFGE

SEQ ID NO: 23322 - protein, 148 aa, Okeania hirsuta
  misc_feature (1)..(148): tr|A0A3N6PC87|A0A3N6PC87_9CYAN 6-carboxy-5,6,7,8-tetrah ydropterin synthase OS=Okeania hirsuta OX=1458930 GN=qu eD PE=3 SV=1
MSSNQEEIPEIKKTESNSETWIIGKEFRFEASHQLPNHDGKCARLHGHSWRGVIYVSGNELVNSGGKQGMIMDYGDIKKHLKPLLDDYLDHYHLNETTGLVNPTSEAIAKWIYEQLENKIPGLVAVRIDETCTSQCIYSKGKNNFLIL

SEQ ID NO: 23323 - protein, 166 aa, Okeania hirsuta
  misc_feature (1)..(166): tr|A0A3N6PHY1|A0A3N6PHY1_9CYAN 6-pyruvoyl tetrahydrobio pterin synthase OS=Okeania hirsuta OX=1458930 GN=D5R40_ 04315 PE=4 SV=1
MKKRLTKIELFKQAMNFSAGHFTIFSDSERENLHGHSFSVYVMFEAEVTNNGMTFDYGIYKEIILNICQFLDEVFLLPLKNPYLKIEEFDEYIYALFNGGKEKIPFLKRDVKLLPVRNITVEELSHWFLQQLLVNVQENQEHLIQTIEVKIFSGPGQSGSSFWSKK

SEQ ID NO: 23324 - protein, 119 aa, Oleiagrimonas soli
  misc_feature (1)..(119): tr|A0A099CSS5|A0A099CSS5_9GAMM 6-carboxy-5,6,7,8-tetrah ydropterin synthase OS=Oleiagrimonas soli OX=1543381 GN =LF63_0114460 PE=3 SV=1
MQIFKVFHIEAAHRLPNVPEGHKCARLHGHSFKVEIHVGGTPGAQTGWIMDYADIKAAFAPLYDRLDHHYLNEIEGLENPTSEHIAQWIFARLKVGLPALTRVVVHETCTSGAVCEGLD

SEQ ID NO: 23325 - protein, 119 aa, Oleiagrimonas sp.
  misc_feature (1)..(119): tr|A0A328SYY2|A0A328SYY2_9GAMM 6-carboxy-5,6,7,8-tetrah ydropterin synthase OS=Oleiagrimonas sp. MCCC 1A03011 O X=1926883 GN=BTJ49_12155 PE=3 SV=1
MQIFKIFHIEAAHRLPNVPEGHKCARLHGHSFKVEIHVGGEPGAETGWIMDYAEIKAAFAPLYEQLDHHYLNEIEGLENPTSERIAQWIFTRLKADLPALERVVVHETCTAGAVCTGPV

SEQ ID NO: 23326 - protein, 277 aa, Oleibacter marinus
  misc_feature (1)..(277): tr|A0A1N7Q6P3|A0A1N7Q6P3_9GAMM 6-pyruvoyl tetrahydropte rin synthase OS=Oleibacter marinus OX=484498 GN=SAMN054 21686_11431 PE=4 SV=1
MHLFVEQLTNVDFSYLDANRGIVGETWWASAILEGALDDQGMVCDFGIVKKTLRQWLDTELDHRLLVPAEAPGLEVKKTGERVNISMQTGRGIVEMSAPAQAVTLIDTAEITAASVAAWSIKQLQMYFPDTIDQLTLDFTTETIDGAFYHYSHGLKKHAGNCQRIAHGHRSRIQIWLDGQRDEQEESYWADLWRDIYIGSTEDLASDDNDTLSFAYTAQQGDFSLTLNRAHCYMMSTDSTVELIADHLAKEISKRHPGKDIRVRAFEGVNKGAMVQV

SEQ ID NO: 23327 - protein, 277 aa, Oleibacter sp.
  misc_feature (1)..(277): tr|A0A2D8AEH0|A0A2D8AEH0_9GAMM Uncharacterized protein OS=Oleibacter sp. OX=2024845 GN=CMI13_13900 PE=4 SV=1
MQLFVDQLTNVDFSYLDSRRGLVGETWWASAILDGALDDQGMVCDFGIVKKTLRNWLDDELDHRLLVPVRSPALTLSGDEQRVSLSWRYESGEVLTMEAPREAVALVDADAITTDSVADWCREQLREFFPVNVDQLTLLFAPEDIQGAYYHYSHGLKKHAGNCQRIAHGHRSRIEIWRAGSRDKSLEAEWAEQFADIYLGSEEDISARTDDTIHFAYRSQQGEFSLSLPQRACYLMQTDTTVEFIAAHLASEIRGKYPTEDIEVKAFEGVNKGAIAN

SEQ ID NO: 23328 - protein, 290 aa, Oleiphilus messinensis
  misc_feature (1)..(290): tr|A0A1Y0I7T8|A0A1Y0I7T8_9GAMM Queuosine biosynthesis p rotein QueD OS=Oleiphilus messinensis OX=141451 GN=OLME S_2192 PE=4 SV=1
MNRLFVNNLTVIDFSFLDPIRGIVGESWIVDVELEGELDEQGMVFDFGHVKKQLKNLIDDEVDHKLAIPAQLEGVLIERSENRIDVGYQNSTGEKWLHRSPASAVLLIEEKEITPESVSTFLIDLFDQVLPDNVDGVSITIRPEEINGAYYHYSHGLKKHLGNCQRIAHGHRSRIEIYLNQQRQKVLETEWATKLQDSYVATLEDLSGQNEQTEISLGRQTGQNITFNYVAQQGQFELTLPARQVYIIDTDSTVEWIACHIAENLQETFPNDDIQVRAYEGVGKGSIAER

SEQ ID NO: 23329 - protein, 281 aa, Oleispira antarctica
  misc_feature (1)..(281): tr|R4YRV9|R4YRV9_OLEAN Uncharacterized protein OS=Oleis pira antarctica RB-8 OX=698738 GN=OLEAN_C17820 PE=4 SV= 1
MQLFVDNLTNVDFSYLDDERGLVGETWLASVLLDGGLDQTSMIWDFGVVKKVLRNWLDDELDHRLLVPTKSQRLSYEINQDRITLSWSFGNDNVLTMDAPLEAVALIDAKQINEQTAAKWSIKQLSNHFPDNLEHIQLTFEAEEINAAYYHYSHGLKKHDGNCQRIAHGHRSRIQIWCDGARDRNLENNWAERWSDIYIGSEEDLISISDNEQAQMHFAYDAPQGHFELTLPKKVCYIMPSDTTVECIASHIAQILHDENPDSTITVKAFEGLNKGAIFEV

SEQ ID NO: 23330 - protein, 281 aa, Oleispira antarctica
  misc_feature (1)..(281): tr|A0A1Y5HVL9|A0A1Y5HVL9_OLEAN Uncharacterized protein OS=Oleispira antarctica OX=188908 GN=A9R00_02510 PE=4 S V=1
MQLFVDNLTNVDFSYLDDQRGLVGETWLASALLDGGLNQTSMIWDFGLVKKVLRNWLDDQLDHRLLLPIQSKQLQYEIKQDRIILSWAFANEEVLTMDAPIEAVALIDAEKINEISVAQWSLKQLASEFPENLEHIQLSFEAEEISGAYYHYSHGLKKHDGNCQRIAHGHRSRIQIWQNGTRDNDLESIWAERWADIYIGSEEDLVSISSDAKQQMHFAYDAPQGHFELTLPQRVCYMMNSDTTVECISAHIANVLQSENPTSSITVKAFEGLHKGAISEI

SEQ ID NO: 23331 - protein, 123 aa, Oleomonas sp.
  misc_feature (1)..(123): tr|A0A418WEZ1|A0A418WEZ1_9PROT 6-carboxy-5,6,7,8-tetrah ydropterin synthase OS=Oleomonas sp. K1W22B-8 OX=232085 9 GN=D3874_17615 PE=3 SV=1
MFELSKQFRFEAAHTLHRAVDAEPSRRIHGHSYRAEVILRGPADPVTGMVIDLGLFERSLAMVRDALDHRLLDELPDLGPATMENLSAWIWRRLAADAPQLARVTIYRDSLGDACSYFGPDHG

SEQ ID NO: 23332 - protein, 132 aa, Oleomonas sp.
  misc_feature (1)..(132): tr|A0A418WC96|A0A418WC96_9PROT 6-carboxytetrahydropteri n synthase OS=Oleomonas sp. K1W22B-8 OX=2320859 GN=D387 4_11665 PE=4 SV=1
MFAVEVRDHVMIAHSLPSPVFGPAQGMHGATYVVDAAFFAPALDGDGLVVDIGLATEALGRVLGPLKYQNLDALPAFKGKITTTEFLAKAIADGLIAEIAAGSLGAGGGRLARLRVQLHESHVARAWYETDL

SEQ ID NO: 23333 - protein, 55 aa, Oligella ureolytica
  misc_feature (1)..(55): tr|A0A378XBU5|A0A378XBU5_9BURK 6-pyruvoyl tetrahydropte rin synthase OS=Oligella ureolytica OX=90244 GN=NCTC119 97_00299 PE=4 SV=1
MLQGWDLKTYAFEQRTTAEVISRHIFHTLREQGGLPVNRIRLWETPTSYSEYEGD

SEQ ID NO: 23334 - protein, 141 aa, Oligella ureolytica
  misc_feature (1)..(141): tr|A0A378XAU7|A0A378XAU7_9BURK 6-carboxy-5,6,7,8-tetrah ydropterin synthase OS=Oligella ureolytica OX=90244 GN= queD PE=3 SV=1
MKVVKSFSFDIAHMLDCHDGKCKNLHGHTYRLEVEISGELIQDGPKEGMIMDFSDLKQAVKQWIVDPMDHAFLYNTKSEREVALAEMLEGWDLKTYALDCRTTAEAVSYHIYHVLREQGNLPVTRIRLWETPTSYSEYEGE

SEQ ID NO: 23335 - protein, 121 aa, Oligotropha carboxidovorans
  misc_feature (1)..(121): tr|B6JI63|B6JI63_OLICO 6-carboxy-5,6,7,8-tetrahydropter in synthase OS=Oligotropha carboxidovorans (strain ATCC 49405 / DSM 1227 / KCTC 32145 / OM5) OX=504832 GN=OCA5 _c10910 PE=3 SV=1
MWELTKSFRFEAAHSLKGTTLGESSEEIHGHSFRAEVTVRGTPDPATGMVMDLGLLEQKIAAIRSALDHKFLNKIEALGVPTLENLSRYIWEQVQGAGNVTRVSVHRDSCGESCTYFGPSS

SEQ ID NO: 23336 - protein, 137 aa, Olivibacter sp.
  misc_feature (1)..(137): tr|A0A5C0ZG34|A0A5C0ZG34_9SPHI 6-carboxy-5,6,7,8-tetrah ydropterin synthase OS=Olivibacter sp. LS-1 OX=2592345 GN=FKG96_03545 PE=3 SV=1
MIYITRRERFSAAHKLYRDDWSLEENEATFGKCSNPNWHGHNYELFVTIKGEIDPTTGFVMDLRILKTIILQHVVEKLDHRNVNLDVDFMRGKMASTEVLAVEIFNQLKSPIETAGAQLHSIKLQETENNSVEYFGN

SEQ ID NO: 23337 - protein, 136 aa, Olleya aquimaris
  misc_feature (1)..(136): tr|A0A327RMF2|A0A327RMF2_9FLAO 6-carboxy-5,6,7,8-tetrah ydropterin synthase OS=Olleya aquimaris OX=639310 GN=LY 08_00537 PE=3 SV=1
MKVTVSRKAHFNAAHRLYRKDWSFEKNDEIFGKCNNPNYHGHNYELIASVTGDIDKETGYVIDVKILKDIIKTEVEDAFDHKNLNVEVEEFKNLNPTAENIVVVIYNKIKAKLKPNLDLEVTLYETPRNFVSYSGK

SEQ ID NO: 23338 - protein, 150 aa, Olleya aquimaris
  misc_feature (1)..(150): tr|A0A327RNW3|A0A327RNW3_9FLAO 6-pyruvoyltetrahydropter in/6-carboxytetrahydropterin synthase OS=Olleya aquimar is OX=639310 GN=LY08_00025 PE=4 SV=1
MSNIRITKQFTFETGHALYGYDGKCKNVHGHSYKLDVTVIGKPISDTTNVKFGMVIDFSDLKKIVKEEIVNVFDHATVFNKNTPHVELAKELEERGHNVLLVDYQPTSEMMVIDFAEKIKNRLPNSIKLHSLKLSETATSYAQWYASDNQ

SEQ ID NO: 23339 - protein, 136 aa, Olleya namhaensis
  misc_feature (1)..(136): tr|A0A1I3N3R0|A0A1I3N3R0_9FLAO 6-carboxy-5,6,7,8-tetrah ydropterin synthase OS=Olleya namhaensis OX=1144750 GN= SAMN05443431_1045 PE=3 SV=1
MRVTVSRKAHFNSAHRLYRKDWSFEKNNEIFGKCNNPNYHGHNYELIASVTGAIDQETGFVIDVKILKDIIKAEVEDAFDHKNLNLDVPEFKDLNPTAENIAVVIYNKIKAKLKSNLELEVTLYETPRNFVSYSGK

SEQ ID NO: 23340 - protein, 150 aa, Olleya namhaensis
  misc_feature (1)..(150): tr|A0A1I3JBU7|A0A1I3JBU7_9FLAO 6-pyruvoyltetrahydropter in/6-carboxytetrahydropterin synthase OS=Olleya namhaen sis OX=1144750 GN=SAMN05443431_101341 PE=4 SV=1
MSNIRITKQFTFETGHALYGYDGKCKNVHGHSYKLDVTVIGTPISDSDNAKFGMVIDFTDLKKIVKEEIVDVFDHATVFNKNTPHVELAKELKDRDHNVLLVDYQPTSEMMVIDFAQKIKNRLPNAIKLHSLKLSETATSYAQWYASDNG

SEQ ID NO: 23341 - protein, 136 aa, Olleya sp.
  misc_feature (1)..(136): tr|A0A2K8WY06|A0A2K8WY06_9FLAO 6-pyruvoyl tetrahydrobio pterin synthase OS=Olleya sp. Bg11-27 OX=2058135 GN=CW7 32_07720 PE=4 SV=1
MRVTVSRKAHFNAAHRLYRKDWSFEKNNEIFGKCNNPNYHGHNYELIASVTGDIDQETGFVIDVKILKDIIKVEVEDAFDHKNLNLDVAEFKDVNPTAENIVVVIYNKIKAQLKPSLDLEVTLYETPRNFVSYSGK

SEQ ID NO: 23342 - protein, 150 aa, Olleya sp.
  misc_feature (1)..(150): tr|A0A559RDS2|A0A559RDS2_9FLAO 6-pyruvoyltetrahydropter in/6-carboxytetrahydropterin synthase OS=Olleya sp. Hel _I_94 OX=1250001 GN=JM82_2864 PE=4 SV=1
MSNIRITKQFTFETGHALYGYDGKCKNVHGHSYKLDVTVIGTPISDSNNVKFGMVIDFTDLKKIVKEEIVDVFDHATVFNKNTPHVQLAKELQDRDHNVLLVDYQPTSEMMVIDFAQKIQDRLPNNIKLHSLKLSETATSYAQWYASDNQ

SEQ ID NO: 23343 - protein, 139 aa, Olsenella profusa
  misc_feature (1)..(139): tr|U2VBR2|U2VBR2_9ACTN 6-carboxy-5,6,7,8-tetrahydropter in synthase OS=Olsenella profusa F0195 OX=1125712 GN=HM PREF1316_1429 PE=3 SV=1
MYELSTEYWFDSAHFLTGYHGACENLHGHQWRVTAYVTAESLGEAGTQRGMVVDFGVLKRIVREECDRLDHTFLVEEGSLKPQTIAALEDEGFTLTMLPFRTTAENLARYLAERLRDRGLPISRVDCDETPNNRASYVV

SEQ ID NO: 23344 - protein, 142 aa, Olsenella scatoligenes
  misc_feature (1)..(142): tr|A0A100YW11|A0A100YW11_9ACTN 6-carboxy-5,6,7,8-tetrah ydropterin synthase OS=Olsenella scatoligenes OX=129999 8 GN=AUL39_07050 PE=3 SV=1
MYTLSTEYWFDSAHFLTDYNGKCENLHGHQWRVTAYVRADELGTSGTEKDMVVDFATLKRIVREECDALDHTFLVEEGSLAPSTLEALKSEGFSLTMLPFRTTSENLAHYLFDRLSSRGLPVCRVDCNETPNNRASYEPDVD

SEQ ID NO: 23345 - protein, 140 aa, Olsenella sp.
  misc_feature (1)..(140): tr|A0A1Y4K9K0|A0A1Y4K9K0_9ACTN 6-carboxytetrahydropteri n synthase QueD OS=Olsenella sp. An188 OX=1965579 GN=B5 F23_05165 PE=4 SV=1
MYGLKTEASFDSAHFLADYHGKCENLHGHRWRVVCYLRSGELGGAGTERDMVCDFGAFKREVRSLVAEFDHMFLVEEGTLAPATVAALESEGFTLKVLPFRTTAENLARHFCERLRERGLPCSQVDVYETPLNCATYLWE

SEQ ID NO: 23346 - protein, 142 aa, Olsenella sp.
  misc_feature (1)..(142): tr|A0A1I0CBQ5|A0A1I0CBQ5_9ACTN 6-carboxy-5,6,7,8-tetrah ydropterin synthase OS=Olsenella sp. KH3B4 OX=1855394 G N=SAMN05216348_10868 PE=3 SV=1
MYTLSTEYWFDSAHFLTDYNGKCENLHGHQWRVTAYVRSNELGTSGTEKDMVVDFATLKRIVREECDALDHTFLVEEGSLAPATLEALASEGFSLTILPFRTTSENLARYLFERLSARGLPVCRVDCNETPNNRASYEPDGE

SEQ ID NO: 23347 - protein, 140 aa, Olsenella uli
  misc_feature (1)..(140): tr|X8HS23|X8HS23_9ACTN 6-carboxy-5,6,7,8-tetrahydropter in synthase OS=Olsenella uli MSTE5 OX=1190621 GN=HMPREF 1503_1815 PE=3 SV=1
MYGLKTEASFDGAHFLTDYHGKCENLHGHRWRVVAYVRQEELQAEGTTRGMVVDFGAFKQAVREEVARLDHMFLVEEGSLRRSTIEALQGEGFTLLVLPFRTTAENLARYLYQRISARHLPVSQVDVYETPLNCASYFGE

SEQ ID NO: 23348 - protein, 140 aa, Olsenella umbonata
  misc_feature (1)..(140): tr|A0A1H9MZR3|A0A1H9MZR3_9ACTN PreQ(0) biosynthesis pro tein QueD OS=Olsenella umbonata OX=604330 GN=SAMN052164 46_0066 PE=4 SV=1
MFGLKTEASFDGAHFLADYYGKCENLHGHRWRVVAYARQESLQTEGTMRGMVLDFGVFKKALRSIVGEFDHMFLVEEGTLKQATVDALEGEGFTLKMLPFRTTAENLARYFYGRLEQEGIPVAQVDVYETPLNCASYFGE

SEQ ID NO: 23349 - protein, 141 aa, Olsenella umbonata
  misc_feature (1)..(141): tr|A0A1H1LNV5|A0A1H1LNV5_9ACTN 6-pyruvoyltetrahydropter in/6-carboxytetrahydropterin synthase OS=Olsenella umbo nata OX=604330 GN=SAMN04487824_1089 PE=4 SV=1
MYQLKTEASFDGAHFLTDYNGKCENLHGHRWRVVVYIRQASLGTDGTERDMVLDFGEFKRIVREEVARFDHMFLVEEGSLAPDTVACLEREGFTLRMLPFRTTAENLARNFAEVLLGRGLPVSRVDCYETPLNCATYLVDE

SEQ ID NO: 23350 - protein, 162 aa, Unknown
  misc_feature (1)..(162): tr|A0A520S4G2|A0A520S4G2_9GAMM 6-pyruvoyl tetrahydropte rin synthase OS=OM182 bacterium OX=2510334 GN=EVA68_017 35 PE=4 SV=1
MSRYSRIEIRKQALNFSVAHFTIFSEKERENLHGHNFQVECEITAPVGEDGLVFDYGIIKKLLRQICDELDEHVILPSNSPHLRLEEGEEYTAAIFGNERLLFLPKDLIILPISNTTVEEFSHYILKLLVKHDEFSNKGIIEMTVKVSSSPGQSGCSSWKLT

SEQ ID NO: 23351 - protein, 71 aa, Unknown
  misc_feature (1)..(71): tr|A0A520RVS9|A0A520RVS9_9GAMM 6-carboxytetrahydropteri n synthase (Fragment) OS=OM182 bacterium OX=2510334 GN= EVA69_06090 PE=4 SV=1
IEEELQKIVDYFGDKMLNDLPEFAGLNPSIEHFSRIVCEKMLAGVAPPGSGRFTIRIWENETCWAAYYMDY

SEQ ID NO: 23352 - protein, 126 aa, Omnitrophica bacterium
  misc_feature (1)..(126): tr|A0A1G1J9J0|A0A1G1J9J0_9BACT 6-carboxy-5,6,7,8-tetrah ydropterin synthase OS=Omnitrophica bacterium RIFCSPHIG HO2_02_FULL_49_9 OX=1801822 GN=A3J52_00125 PE=3 SV=1
MGEQFTVRVETRFEAAHNLRQYKGAEEPLHGHSWRVEAKFSTAKLDHEDIAIDYVSLKDAIRKLGERLDHRYINEIPPFDKINPTSENIARWFFDELNRENIRQNTQLSEVVVWEGPDAFVSYRQD

SEQ ID NO: 23353 - protein, 134 aa, Omnitrophica bacterium
  misc_feature (1)..(134): tr|A0A1G1KQX6|A0A1G1KQX6_9BACT Uncharacterized protein OS=Omnitrophica bacterium RIFCSPLOWO2_12_FULL_44_17 OX= 1801832 GN=A3G33_03060 PE=4 SV=1
MSYSVTKTIHFSYGHRLSDYEGECRNFHGHNGKAEIELSSDSLNQFGMVRDFREVNQVMKAWIDQTLDHKLILWKNDPLAALLKQQKEPFYEMETRPTAEAIAKLIYDVAISKGFPATRVTLWETETSSATYHG

SEQ ID NO: 23354 - protein, 122 aa, Unknown
  misc_feature (1)..(122): tr|A0A1G1M2C2|A0A1G1M2C2_9BACT 6-carboxy-5,6,7,8-tetrah ydropterin synthase OS=Omnitrophica WOR_2 bacterium GWB 2_45_9 OX=1801843 GN=A2Y42_03425 PE=3 SV=1
MYKLSVKTEFSAAHNLRHYKGKCEALHGHNWKVEAVISAKKTDTNGLAMDFHEIKDILKETLEELDHKHLNQIAYFKKNNPTSENIACYLFGRLDGQLKKGLVYLSEVTVWESDNCSATYCK

SEQ ID NO: 23355 - protein, 121 aa, Unknown
  misc_feature (1)..(121): tr|A0A1G1NU19|A0A1G1NU19_9BACT 6-carboxy-5,6,7,8-tetrah ydropterin synthase OS=Omnitrophica WOR_2 bacterium RIF CSPHIGHO2_01_FULL_48_9 OX=1801851 GN=A2787_04410 PE=3 S V=1
MYELTIKSDFASAHFVRGYQGNCKDLHGHTWKVEVTVENDKLDAIGMVVDFKIIKQQLKDFLKNIDHVCLNDLPHFKVVNPTTENLAKYIFDEFAKVCHPLRIKKVCVWESETSDVTYYKI

SEQ ID NO: 23356 - protein, 151 aa, Opitutaceae bacterium
  misc_feature (1)..(151): tr|A0A178IK57|A0A178IK57_9BACT 6-pyruvoyl tetrahydropte rin synthase OS=Opitutaceae bacterium TSB47 OX=1184151 GN=AW736_12660 PE=4 SV=1
MPYRISKIFEIENGHILSKHPDNCRFPHGHSRMVEIVLAADSLDSNDMVCDFKAIKESLGAFLESWDHALCLNTADPNFGFYQKTYGSRIIPFEKTDPTSERMAKAIFDEVRARLAEASAAKGARYPVASGVRVERVRVTETSSTWAEYSE

SEQ ID NO: 23357 - protein, 151 aa, Opitutaceae bacterium
  misc_feature (1)..(151): tr|A0A2T6DV20|A0A2T6DV20_9BACT 6-pyruvoyl tetrahydropte rin synthase OS=Opitutaceae bacterium EW11 OX=2161865 G N=DB347_12610 PE=4 SV=1
MPYRISKSFEIESGHILSKHPDKCRFPHGHSRRVEIVLAADSLDANDMVCDFKALKERIGAYIDSWDHALCLNSADANRDFYQQAYGDRVVIFTSTDPTSEVMAKAIFDELTRRLAEGQKQTNSAYRIPVGVRVERVRVTETSSSWAEYSA

SEQ ID NO: 23358 - protein, 117 aa, Opitutae bacterium
  misc_feature (1)..(117): tr|A0A1Z8WM38|A0A1Z8WM38_9BACT 6-carboxy-5,6,7,8-tetrah ydropterin synthase OS=Opitutae bacterium TMED67 OX=198 6877 GN=CBC27_05715 PE=3 SV=1
MELRKTFQFEAAHYLPNLPKEHKCNRLHGHSFKVEIVVEGECDPKLGWVIDYSDITKAFKPLWEQLDHHYLNEIEGLENPTSENLALWIWKHLKPNLSILTAVEVAETCTARCVYRG

SEQ ID NO: 23359 - protein, 162 aa, Opitutae bacterium
  misc_feature (1)..(162): tr|A0A2A2QC72|A0A2A2QC72_9BACT 6-pyruvoyl tetrahydrobio pterin synthase OS=Opitutae bacterium Tous-C1TDCM OX=19 82319 GN=B9S34_02530 PE=4 SV=1
MPKLAARKKPAPPRVLPGIVYITRQVHFNSAHRLYNPTKSQAWNVEQYGLCTNPHWHGHNYVLEVTVRGQPHPDTGYVMELGDLKDLLNEAVVDKCDHRNLNTDVDFLRNVIPSTENLVIAFWHELAPRLPKAAELYRIRLFETPRNYAEFFGPGATEASAR

SEQ ID NO: 23360 - protein, 146 aa, Opitutales bacterium
  misc_feature (1)..(146): tr|A0A3S5J5Y9|A0A3S5J5Y9_9BACT 6-carboxytetrahydropteri n synthase OS=Opitutales bacterium TMED207 OX=1986795 G N=CBD67_002060 PE=4 SV=1
  misc_feature (88)..(88): Xaa can be any naturally occurring amino acid
MLTCSKTYKDIPFAHRQPLHKGHCSKIHGHNWTIVIEFEATELDANGFVVDFGNLKYLKAFIDEHLDHACLFSKKDSQVQSLSQSEFXDLFKILWVDNASCEGIALFLYETFSQLIEAHEKGRVSIRSLKLYEDEKNFVSYIPKNK

SEQ ID NO: 23361 - protein, 143 aa, Opitutales bacterium
  misc_feature (1)..(143): tr|A0A2E7VHY9|A0A2E7VHY9_9BACT 6-pyruvoyl tetrahydropte rin synthase OS=Opitutales bacterium OX=2026772 GN=CMI3 2_08605 PE=4 SV=1
MLTCSKTYSDVPLGHRQPHHHGHCACIHGHNWEIKVTFQAADLDENGFVVDFGELHYLKDWIDEHLDHACAFSSTDPQRQKIEELVGLGLIKPLWIENVSCEGFAKYLFETFDPMVRENTGGRVQVVSIELFEDSRNSVLYHP

SEQ ID NO: 23362 - protein, 149 aa, Opitutus sp.
  misc_feature (1)..(149): tr|A0A2T6CZW0|A0A2T6CZW0_9BACT 6-pyruvoyl tetrahydropte rin synthase OS=Opitutus sp. ER46 OX=2161864 GN=DB354_0 9975 PE=4 SV=1
MPFRIAKTFTIESGHLLSKHPGACRFPHGHSRTVEVIVTADTLDAQDMVCDFKALKTAVGDIITRYDHAFALNTADPHFRELRTAYGERVLAFTNTDPTTEVLAREIFLEINAQMKAAANDAEFPIPACVRLERVRVTETESSWAEYWE

SEQ ID NO: 23363 - protein, 168 aa, Opitutus sp.
  misc_feature (1)..(168): tr|A0A2T6CQA8|A0A2T6CQA8_9BACT 6-pyruvoyl tetrahydrobio pterin synthase OS=Opitutus sp. ER46 OX=2161864 GN=DB35 4_13590 PE=4 SV=1
MPAISPRGKKPDASPRRGGRSAPVRALGGTVYVTRQVHFNSAHRLENPTKSLRWNQAQYGACTRPHWHGHNYVLEVTVAGTPDPETGYVLDLGMLKEILNRAIVEPCDHRNLNTDVPFLRGVIPTTENLVIAFWQRIEPLLPCGRLHRVRLYETPRNFAEYNGPDAPL

SEQ ID NO: 23364 - protein, 161 aa, Opitutus terrae
  misc_feature (1)..(161): tr|B1ZTR4|B1ZTR4_OPITP Uncharacterized protein OS=Opitu tus terrae (strain DSM 11246 / JCM 15787 / PB90-1) OX=4 52637 GN=Oter_1566 PE=4 SV=1
MPAKSRRRRSAARSPRVLRGTVFITRQVHFNAAHRLYNPTKSQAWNTNQYGLCTSPNWHGHNYVLEVTVRGEPDPETGYIVDLSELKRVLHETVVDRCDHRNLNDDVDFLRNVIPTTENLVIAFWDQIEPALPAGKLHCVRLYETPRNFAEYFGPDAPARA

SEQ ID NO: 23365 - protein, 139 aa, Opitutus terrae
  misc_feature (1)..(139): tr|B1ZSN3|B1ZSN3_OPITP Uncharacterized protein OS=Opitu tus terrae (strain DSM 11246 / JCM 15787 / PB90-1) OX=4 52637 GN=Oter_0602 PE=4 SV=1
MPFRIAKSFTVESGHLLTKHPGSCRFPHGHSRTIEIIVTSDQLDAADMVCDFKALKAAATDAVHRFDHTFALNTADPRFAELRAAYGDHVVAFPDTDPTTEVLAREIFQQVRAKLQVPGVRLERVRVTETATSWAEYWE

SEQ ID NO: 23366 - protein, 153 aa, Orenia marismortui
  misc_feature (1)..(153): tr|A0A4R8H0M2|A0A4R8H0M2_9FIRM PreQ(0) biosynthesis pro tein QueD OS=Orenia marismortui OX=46469 GN=C7959_10484 PE=4 SV=1
MSKVTVSKEFSWDMAHILAEHEGLCKNLHGHTYKMRVTVAEKRGSLEDDGAAAGMVIDFKDLKQVVNQEIVEPLDHAFIYWGNSPDEVEHQIARLLSNAERKVFEVEFRPTAEMMASYFLSLLEDSFDNLDIEVVSVKLWETPTSYAEARGEN

SEQ ID NO: 23367 - protein, 151 aa, Orenia metallireducens
  misc_feature (1)..(151): tr|A0A1C0ACH9|A0A1C0ACH9_9FIRM 6-carboxytetrahydropteri n synthase QueD OS=Orenia metallireducens OX=1413210 GN =U472_02530 PE=4 SV=1
MITVTKEFSWDMSHMLAEHEGLCKNLHGHTYRMEVTVAKKEGSLEDEGSKAGMVIDFKDLKEIVKEEIISPLDHSFMYWTHSSDEIEHQLAQILQQADRKVFAVDFRPTAEMMAIYFFQSLEDKFNEIDIDLVSIKVWETPTSYAEFRGER

SEQ ID NO: 23368 - protein, 151 aa, Orenia metallireducens
  misc_feature (1)..(151): tr|A0A285GW55|A0A285GW55_9FIRM PreQ(0) biosynthesis pro tein QueD OS=Orenia metallireducens OX=1413210 GN=SAMN0 6265827_11176 PE=4 SV=1
MITITKEFSWDMSHMLAEHEGLCKNLHGHTYRMEVTVAKKEGALEDEGSKAGMVIDFKDLKKIVKEEIVEPLDHSFMYWTHSPDEIEHQIARILQQDERKVFAVDFRPTAEMMSIYFFQSLEDRFNGIDINLVSIKVWETPTSYAEFRGER

SEQ ID NO: 23369 - protein, 139 aa, Oribacterium sp.
  misc_feature (1)..(139): tr|A0A1I2PWE7|A0A1I2PWE7_9FIRM 6-carboxy-5,6,7,8-tetrah ydropterin synthase OS=Oribacterium sp. WCC10 OX=185534 3 GN=SAMN05216356_103123 PE=3 SV=1
MFYLKSEASFDAAHFLKDYEGKCRNIHGHRWRVVVEIKGDKLSEDTQTRGMLIDFSDLKKAVKDMCDFFDHSLIYEKDSLKEATIAALTDEHFRLNEVPFRPTAECFSKYFYETLSDKGFTVHRVEVYETPTNCACYEG

SEQ ID NO: 23370 - protein, 140 aa, Oribacterium sp.
  misc_feature (1)..(140): tr|A0A1S9BSW3|A0A1S9BSW3_9FIRM 6-carboxy-5,6,7,8-tetrah ydropterin synthase OS=Oribacterium sp. C9 OX=1943579 G N=BXO88_12615 PE=3 SV=1
MYFLKSESSFDAAHFLKDYEGKCRNIHGHRWRVVVEIKGESLSEETQTRGMLIDFSDLKRAVKDACDFFDHSLIYESGSLKETTIKALEEENFRLNEVPFRPTAENFSRFFFTSLRDKGFNVHRVDVYETPNNCASFEME

SEQ ID NO: 23371 - protein, 118 aa, Oricola cellulosilytica
  misc_feature (1)..(118): tr|A0A4R0PDB4|A0A4R0PDB4_9RHIZ 6-carboxy-5,6,7,8-tetrah ydropterin synthase OS=Oricola cellulosilytica OX=14290 82 GN=E0D97_08975 PE=3 SV=1
MYRITKEFHFSASHQLCKLPDDHPCARLHGHNYIVVVELASQDVDGNGFVRDYRELAPLKNYIDDTFDHRHLNEVLGHDSVTAECLAHHLFGWCRERWPETTAVRVSETPKTWAEYRP

SEQ ID NO: 23372 - protein, 126 aa, Ornithinimicrobium humiphilum
  misc_feature (1)..(126): tr|A0A543KJQ5|A0A543KJQ5_9MICO 6-pyruvoyl-tetrahydropte rin synthase OS=Ornithinimicrobium humiphilum OX=125288 GN=FB476_0149 PE=4 SV=1
MFTLTVRDHVMVAHSLPDPFFGPAQGLHGATYVVEAGFERADLDEHGVVLDIGAASEALSAVLGRIAYRNLDEVEELAGVVTTTEWLARWVAEQLAASLDTAGLSAVTVVLREHPDAWASYRLALT

SEQ ID NO: 23373 - protein, 127 aa, Ornithinimicrobium pekingense
  misc_feature (1)..(127): tr|A0A285VRU2|A0A285VRU2_9MICO 6-pyruvoyltetrahydropter in/6-carboxytetrahydropterin synthase OS=Ornithinimicro bium pekingense OX=384677 GN=SAMN05421879_1099 PE=4 SV= 1
MFTLTVRDHMMVAHSLPDPFFGPARALHGATYVVEAGFERAELDEHGVVLDIGAAGTALAEVLGQLTYRNLDEVEALDGRLTTTEFLARWVAERLAERFEREDLAAITVVLREHPDAWASYRLRLRW

SEQ ID NO: 23374 - protein, 128 aa, Ornithinimicrobium sp.
  misc_feature (1)..(128): tr|A0A345NSV2|A0A345NSV2_9MICO 6-carboxytetrahydropteri n synthase OS=Ornithinimicrobium sp. AMA3305 OX=2283195 GN=DV701_13010 PE=4 SV=1
MHTLTVRDHVMVAHSLPDEFFGPAQALHGATYVVEATWERDGLDAHGVVLDIGAATEALAGVLGRLAYRNLDEVPELAGHVTTTEFLSRWVAERLVEQVDPAPFRSVSVTLREHPDAWASYRLDLDRA

SEQ ID NO: 23375 - protein, 116 aa, Ornithinimicrobium sp.
  misc_feature (1)..(116): tr|A0A345NQE5|A0A345NQE5_9MICO 6-carboxytetrahydropteri n synthase QueD OS=Ornithinimicrobium sp. AMA3305 OX=22 83195 GN=DV701_15040 PE=4 SV=1
MVSRTVHVVRELSFAAARSLPHVWGGRTSPHPYRVALTVAGELDTHGMVVDWGVLDRLAAPALEQLDGGDLVALLGTPSAEIIALWLLDQLEPAVPGLVSVQVWETERASALVHVR

SEQ ID NO: 23376 - protein, 151 aa, Ornithobacterium rhinotracheale
  misc_feature (1)..(151): tr|I3ZZS2|I3ZZS2_ORNRL 6-pyruvoyl-tetrahydropterin synt hase OS=Ornithobacterium rhinotracheale (strain ATCC 51 463 / DSM 15997 / CCUG 23171 / CIP 104009 / LMG 9086) O X=867902 GN=Ornrh_1014 PE=4 SV=1
MNPQKIRITKIFSFETAHALFGYDGKCKNVHGHSYKLYVTLRGTPIEDTSNEKLGMVIDFGDVKKIVKSEIVDKLDHAVLLNENSGHKSLGEMLEKQGHKVVFTPYQPTCENMLIDFAERIKKQLPPQVELVYLKLYETENSYGEWLAEEN

SEQ ID NO: 23377 - protein, 151 aa, Ornithobacterium rhinotracheale
  misc_feature (1)..(151): tr|A0A3R5UVT1|A0A3R5UVT1_9FLAO 6-carboxytetrahydropteri n synthase OS=Ornithobacterium rhinotracheale OX=28251 GN=EQP59_10395 PE=4 SV=1
MNPQKIRITKIFSFETAHALFGYDGKCKNVHGHSYKLYVTLRGTPIEDTSNEKLGMVIDFGDVKKIVKSEIVDKLDHAVLLNENSGHKSLGEMLEKQGHKVVFTPYQPTCENMLIDFAERIKKQLPPQVELVYLKLYETENSYGEWLVEEN

SEQ ID NO: 23378 - protein, 156 aa, Orrella dioscoreae
  misc_feature (1)..(156): tr|A0A1C3JWW0|A0A1C3JWW0_9BURK 6-carboxytetrahydropteri n synthase @ Queuosine biosynthesis QueD, PTPS-I OS=Orr ella dioscoreae OX=1851544 GN=ODI_03728 PE=4 SV=1
MNTSADGRAAISVTRRLEFDAGHRIPDHRSQCRNLHGHRYVLEITLSGEVLDAPGESDNGMVMDFSEIKSIAKAHIVDVWDHAFLVFQGDTAVRGFLETLPDHKTVVLDCIPTAENLARIVFRTLAPHYQGHYGQALRLTRVRLFETPNCWADCHG

SEQ ID NO: 23379 - protein, 148 aa, Oryzomicrobium terrae
  misc_feature (1)..(148): tr|A0A5C1EA52|A0A5C1EA52_9RHOO 6-carboxy-5,6,7,8-tetrah ydropterin synthase OS=Oryzomicrobium terrae OX=1735038 GN=ptpS PE=3 SV=1
MQITRRLEFDAGHRIPDHKSQCRHLHGHRYALEITLSGEVIQLDGDAANGMVMDFAEVKALAKEHIVDRWDHAFLVFERDEPLVSFLRSMPDHKTVLMPCVPTAENLAQRAFQLLDEVYRDTYGNHLRLQRVRLYETPNCWADAVRPE

SEQ ID NO: 23380 - protein, 129 aa, Oscillatoria acuminata
  misc_feature (1)..(129): tr|K9TN53|K9TN53_9CYAN 6-carboxy-5,6,7,8-tetrahydropter in synthase OS=Oscillatoria acuminata PCC 6304 OX=56110 GN=Oscil6304_4467 PE=3 SV=1
MPKWKVTTEFTFDSAHFIKDYDGPCGRMHGHTYRVRIEATTQKLHSSEYCPHEVMVADFKTLRWAKRDVSKGGLDHCVLNDVMPPEYETTAEMIAKYIYDETKRRLPEGVSLKVAVSETPNSWAEYEDD

SEQ ID NO: 23381 - protein, 137 aa, Oscillatoria acuminata
  misc_feature (1)..(137): tr|K9TRG2|K9TRG2_9CYAN 6-pyruvoyl-tetrahydropterin synt hase OS=Oscillatoria acuminata PCC 6304 OX=56110 GN=Osc il6304_5960 PE=4 SV=1
MSMIYITRRVTFCASHRLHSDALSDEENRRIFGKCNNPNGHGHNYALKVTVRGEVNPETGIVLNFFDLQDAIDAAIIDEVDHKHINLDVPAFKGINPTAENMVVVFWNMLEPKLPPGMLYEMQLYETDNDHVTYRGT

SEQ ID NO: 23382 - protein, 290 aa, Oscillatoria nigroviridis
  misc_feature (1)..(290): tr|K9VJL9|K9VJL9_9CYAN Uncharacterized protein OS=Oscil latoria nigro-viridis PCC 7112 OX=179408 GN=Osc7112_304 0 PE=4 SV=1
MQCIINRRAQFSASHRYWLPELSEAENFERFGPTARAPGHGHNYVLYVSMIGELDEYGMVLNLSDVKHVIKREVIKDLDFSYLNEAWPEFEQTLPTTENIARQIWLRLAPHLPVSKIQLFEHPELWAEYLGNGMEAYLTLSTHFSAAHRLARPDLSFEENSEIYGKCARPNGHGHNYHLEVTVKGEIDARTGMIADLGALQKAVDDYVVEPFDHTFLNKDIAYFEKVVPTAENIAVRIGQLLRSPVRELGAELHKIKLIESPNNSCEIYGADLEEVVAQSQQPEAVLAAV

SEQ ID NO: 23383 - protein, 294 aa, [Oscillatoria] sp.
  misc_feature (1)..(294): tr|D8G1S7|D8G1S7_9CYAN Uncharacterized protein OS=[Osci llatoria] sp. PCC 6506 OX=272129 GN=OSCI_3060047 PE=4 S V=1
MQCVINRRAQFSASHRYWLPELSAAENSDRFGPTARAPGHGHNYVLYVSMIGELDSYGMVLNLSNVKHVIKREVTNHLDFSYLNQAWPEFEQTLPTTENIARVIWQRLAPHLPLTRIQLFEHPELWADYLGNGMEAYLTISTHFSAAHRLAHPKLSYEENCEIYGKCARPNGHGHNYHLEVTVKGEMDERTGMIVDLGALQKAIDEYVLDPLDHTFLNKDIAYFAEVVPTAENIAIYIRELLRSPIRELGAQLYKIKLIESPNNSCEVYCTESESESEAATIQEREPVLAPLYK

SEQ ID NO: 23384 - protein, 291 aa, Oscillatoriales cyanobacterium
  misc_feature (1)..(291): tr|A0A1C0VWE2|A0A1C0VWE2_9CYAN 6-pyruvoyl tetrahydropte rin synthase OS=Oscillatoriales cyanobacterium USR001 O X=1880991 GN=BCD67_22795 PE=4 SV=1
MQCVINRRAEFSASHRYWLPELSEGENRDRFGPTARAPGHGHNYVLYVSMVGEVDRYGMVLNLSNVKHVIKREVTNDLDFSFLNDVWPEFKQTLPTTENMARVIWQRLAPHLPLIRIQVFENPELWADYLGNEMEAYLTISTHFSAAHRLAHPQLSYEENCEIYGKCARPNGHGHNYHLEVTVRGEMDERTGMIADLGALQKAIDDYVVEPLDHTFLNKDIAYFENVVPTAENIAMYIRELLRAPVADLGAQLHKIKLIESPNNSCEVYCDNLKNRAGLIQEFEPVLAGVS

SEQ ID NO: 23385 - protein, 290 aa, Oscillatoriales cyanobacterium
  misc_feature (1)..(290): tr|K8GH31|K8GH31_9CYAN 6-pyruvoyl-tetrahydropterin synt hase OS=Oscillatoriales cyanobacterium JSC-12 OX=864702 GN=OsccyDRAFT_2803 PE=4 SV=1
MRCIINRRAQFSASHRYWLPELTEAENIARFGACTRAPGHGHNYVLYVSMLGDLDEYGMVLNLSDVKRVIKQEVTSQLDFSYLNDVWEEFQHTLPTTEAIARAIWNRLAPHLPLTRIQLFEHPELWADYYGNNMEAYLTISTHFSAAHRLARPDLSYEENCEIYGKCARPNGHGHNYHLEVTIKGEIDSRTGMVADLVAFQRIVDDLVVEPFDHTFLNKDIAYFVDVVPTAENIAIHIRDLLQAPIQQIGAQLYKVKLIESPNNSCEVYCETPQEAIALSTQRELALAEA

SEQ ID NO: 23386 - protein, 278 aa, Osedax symbiont
  misc_feature (1)..(278): tr|A0A1Y5GUT5|A0A1Y5GUT5_9BACT Uncharacterized protein OS='Osedax' symbiont bacterium Rs2_46_30_T18 OX=1856298 GN=A9R01_13695 PE=4 SV=1
MKLFVKNLTNVDFSYLDADRGMMGESWLAQLELDGSLNSQGMICDFGLVKSRVRDWLDTYVDHRLVIPVQSAQAELVVEQQNIILHWTYADGEALSCNAPRQAFALVERQKITLESLASWCEGQLLALFGDEVQGLTLSFVPEKIEGAFYHYSHGLQQHDGNCQRIAHGHRSQLEIFLDGERDQQLEQQWALKWKDIYLGTKNHLVKQQDGYNSYQYSAPQGQFSLRLPSSRCDDLATETTVEQIAQHIASELKKTYADRQVTVRAYEGIGKGAIAQA

SEQ ID NO: 23387 - protein, 278 aa, Osedax symbiont
  misc_feature (1)..(278): tr|S6HP53|S6HP53_9GAMM Uncharacterized protein OS=Oseda x symbiont Rs2 OX=1330035 GN=OFPI_12170 PE=4 SV=1
MKLFVKNLTNVDFSFLDAQRGMMGESWLAQLELDGSLNSQGMICDFSLVKSRVRDWLDTYVDHRLVIPVHSAQAEITQQQQNIQLQWTYAEGEKLSCNAPEQAFALVDCQKIDLDTLACWCEGQLLALFGDEVQGLSLSFVPEKMQGAFYHYSHGLQQHDGNCQRIAHGHRSQLEIYLDGERDQQLELQWAQKWQDIYLGTLAHLVKQQGGYNSYQYSAPQGEFSLRLPSSRCDDLTTETTVEQIAQHIANELKKSHANRQVTVRAYEGIGKGAIAQA

SEQ ID NO: 23388 - protein, 140 aa, Otariodibacter oris
  misc_feature (1)..(140): tr|A0A420XGK3|A0A420XGK3_9PAST 6-carboxy-5,6,7,8-tetrah ydropterin synthase OS=Otariodibacter oris OX=1032623 G N=DES31_0822 PE=3 SV=1
MFKIAKEFSFDMAHMLDGHDGKCKNLHGHTYKLQVEISGELYVEGPKAGMVMDYADLKASVNEHILDHMDHAFIYDSTNERESQVATLLNDLNSKTFAIPYRTTAENMAKYMFDKLKTAGLPVSLIRLWETPTSYCEYSN

SEQ ID NO: 23389 - protein, 117 aa, Ottowia sp.
  misc_feature (1)..(117): tr|A0A5C7VJC6|A0A5C7VJC6_9BURK 6-carboxy-5,6,7,8-tetrah ydropterin synthase OS=Ottowia sp. OX=1898956 GN=queD P E=3 SV=1
MDIFKVFTLEAAHRLPHVPAGHKCARLHGHSFRVEIHVSGPVDPHSGWVMDFADIKAAFQPLYDQLDHHYLNEVDGLDNPTSERLAAWIWERLKPALPLLSEVVVHETCTSGCRHRG

SEQ ID NO: 23390 - protein, 164 aa, Ottowia sp.
  misc_feature (1)..(164): tr|A0A5C7VZ72|A0A5C7VZ72_9BURK 6-pyruvoyl tetrahydropte rin synthase OS=Ottowia sp. OX=1898956 GN=E6Q64_03960 P E=4 SV=1
MNDTVTIRLAKQAMKFSAAHFTIFSASERERLHGHNFKVEVDIEAQMLGNGMCFDYGIYKDSVIALCRELNEWTILPMHSPHLRIEEADGQVIALFNGQRIPFLRADVLLLPIENATLEEFAAYFLTRLTADREALHVHRIRAIEVRVFSGPGQSAGRRLRMAP

SEQ ID NO: 23391 - protein, 150 aa, Owenweeksia hongkongensis
  misc_feature (1)..(150): tr|G8R5S9|G8R5S9_OWEHD 6-pyruvoyl-tetrahydropterin synt hase OS=Owenweeksia hongkongensis (strain DSM 17368 / C IP 108786 / JCM 12287 / NRRL B-23963 / UST20020801) OX= 926562 GN=Oweho_3446 PE=4 SV=1
MEHFALSNYLTVTKIFRFEMAHVLTSHDGLCKNIHGHSYKLYVTLTGETKNSPGASDDGMLMDFSELKKLVNEQIMNTFDHALVINQNAPYAQVLNDLPFERIKLVPFQPTCENLILHFAKLLVPKLPADIRLNRLRLFETETSYAEWYA

SEQ ID NO: 23392 - protein, 137 aa, Owenweeksia hongkongensis
  misc_feature (1)..(137): tr|G8R785|G8R785_OWEHD 6-carboxy-5,6,7,8-tetrahydropter in synthase OS=Owenweeksia hongkongensis (strain DSM 17 368 / CIP 108786 / JCM 12287 / NRRL B-23963 / UST200208 01) OX=926562 GN=Oweho_3544 PE=3 SV=1
MRVTVNRKAHFNAAHRLHRADWDDQKNQQVFGRCNNPFYHGHNYELIVSVTGKVDDETGFVVDMKWLADLITEKVEDYLDHKNLNEQIDEFKSLNPTAENIAVVIWKRLRSSIDSQHDLKVTLYETPRNFVEYSGEE

SEQ ID NO: 23393 - protein, 137 aa, Owenweeksia sp.
  misc_feature (1)..(137): tr|A0A1Z8LE83|A0A1Z8LE83_9FLAO 6-pyruvoyl tetrahydrobio pterin synthase OS=Owenweeksia sp. TMED14 OX=1986609 GN =CBB74_01620 PE=4 SV=1
MVYIQRRETFSASHRLYNPSWTEERNFEIFGKCSNKRGHGHNFQLIVVVKGEVNPETGFVMNLSDLKNLIRSNIIESVDHTSLNEDIDFLDGIIPSTENLVIAFWKILSPIIVDHGAELHCVRIIETENNSVEYFGK

SEQ ID NO: 23394 - protein, 136 aa, Owenweeksia sp.
  misc_feature (1)..(136): tr|A0A1Z8L9T0|A0A1Z8L9T0_9FLAO 6-pyruvoyl tetrahydrobio pterin synthase OS=Owenweeksia sp. TMED14 OX=1986609 GN =CBB74_04475 PE=4 SV=1
MKATVSRHAHFNAAHRLHIRDWSDKKNQEFFGLCNNNNFHGHNYELIVSIKGEIDPITGYVYDMKELSNIIKTKVEKRLDHKNLNLDVPAFKNLNPSAENIAMVIYNWLKPHFSSGIDLKIRLYETPRNYVDFGDD

SEQ ID NO: 23395 - protein, 152 aa, Oxalobacter formigenes
  misc_feature (1)..(152): tr|C3X241|C3X241_OXAFO Queuosine biosynthesis protein Q ueD OS=Oxalobacter formigenes HOxBLS OX=556268 GN=OFAG_ 00430 PE=4 SV=1
MLTITRKLEFDAGHRIPDHHSQCRNLHGHRYVLHITLEGDPLMKEGDSGNGMILDFSEVKKLAETHLVSHWDHAFLVYEKDRPVREFLDSLPNHKTVVLDRVPTVENMAQVAFDTLKNVYEGFYGKALVLKSVRIYETPNCWAEVTADSVHD

SEQ ID NO: 23396 - protein, 153 aa, Oxalobacter formigenes
  misc_feature (1)..(153): tr|C3XA63|C3XA63_OXAFO Queuosine biosynthesis protein Q ueD OS=Oxalobacter formigenes OXCC13 OX=556269 GN=queD PE=4 SV=1
MLTITRKLEFDAGHRIPDHHSQCRNLHGHRYVLHITLEGDPHKKDGDSSNGMILDFSEVKRLAETHLVSHWDHAFLVYENDMPVRQFLDSLPNHKTVVLDRVPTAENLAQIAFDTLKDVYEGFYGNKLVLKSIRIYETPNCWAEVTADSVDVR

SEQ ID NO: 23397 - protein, 149 aa, Oxalobacter sp.
  misc_feature (1)..(149): tr|A0A3A6P316|A0A3A6P316_9BURK 6-carboxy-5,6,7,8-tetrah ydropterin synthase OS=Oxalobacter sp. OX=2093374 GN=qu eD PE=3 SV=1
MLTITRKLEFDAGHRIPDHNSQCRNLHGHRYALHLTLTGEIVTQDGRSDKGMIMDFSDIKALANKYLVDEWDHAFLVYENDLAVRQFLESLPNHKTVVLNKIPTVENLAQIAFDRLKDVFQKEVGLRLVKVTLYETPNCWAEVSEGASA

SEQ ID NO: 23398 - protein, 67 aa, Oxalobacteraceae bacterium
  misc_feature (1)..(67): tr|A0A4Q3IJW5|A0A4Q3IJW5_9BURK 6-pyruvoyl tetrahydropte rin synthase family protein (Fragment) OS=Oxalobacterac eae bacterium OX=1871070 GN=EOO80_17855 PE=4 SV=1
MDIFKVFTLEAAHRLPNVPPGHKCARLHGHSFRVELHVSGDPGAETGWIMDFGDIKAAFQPIYEQLD

SEQ ID NO: 23399 - protein, 149 aa, Oxalobacteraceae bacterium
  misc_feature (1)..(149): tr|A0A3D3PRD7|A0A3D3PRD7_9BURK 6-carboxytetrahydropteri n synthase QueD OS=Oxalobacteraceae bacterium OX=187107 0 GN=queD PE=4 SV=1
MLTITRKLEFDAGHRIPDHKSQCRNLHGHRYTLEITLVGAVIDVEGSSDNGMIMDFSDIKALAKEHLVDVWDHAFLVYEKDAVVREFLESIPGHKTVIIDRIPTVENLAQTAFNILKAAYRDRYGTGLHLHKLVLHETPNCWAEVTDPA

SEQ ID NO: 23400 - protein, 117 aa, Pacificibacter maritimus
  misc_feature (1)..(117): tr|A0A3N4VC83|A0A3N4VC83_9RHOB 6-carboxy-5,6,7,8-tetrah ydropterin synthase OS=Pacificibacter maritimus OX=7622 13 GN=EDD53_0559 PE=3 SV=1
MFRITKEFHFSASHQLTHLPHDHQCARLHGHNYIVVIELASKTLNKDGFVRDYGELKALKTYIDDTFDHHHLNDVMDCPSTSENLAQHFYDWCLARWPETSAVKVSETPKTWAEYRP

SEQ ID NO: 23401 - protein, 132 aa, Paenarthrobacter aurescens; identical to SEQ ID NO: 17686
  misc_feature (1)..(132): tr|A1R2X7|A1R2X7_PAEAT Putative 6-pyruvoyl tetrahydropt erin synthase OS=Paenarthrobacter aurescens (strain TC1 ) OX=290340 GN=AAur_0790 PE=4 SV=1

SEQ ID NO: 23402 - protein, 132 aa, Paenarthrobacter aurescens
  misc_feature (1)..(132): tr|A0A4Y3NNQ3|A0A4Y3NNQ3_PAEAU Uncharacterized protein OS=Paenarthrobacter aurescens OX=43663 GN=ptpS PE=4 SV= 1
MFSLTVRRHFMIAHSLPREAFGPAQGLHGATFVAEVTFRRPNVNDDAIVLDIGAAGGILEEVLADLNYKNLDEHPAFKGKLSTTEALAKHIADAMAAQIQDTADGPALTGIDVVLRENPDAWAGYSLELPVK

SEQ ID NO: 23403 - protein, 132 aa, Paenarthrobacter nicotinovorans
  misc_feature (1)..(132): tr|A0A175J6X6|A0A175J6X6_PAENI 6-pyruvoyl tetrahydrobio pterin synthase OS=Paenarthrobacter nicotinovorans OX=2 9320 GN=CVCC1112_2347 PE=4 SV=1
MFSLTVRRHFMIAHSLPREAFGPAQGLHGATFVAEVSFRRQNLNDDAIVLDIGAAGGILEEILEDLNYKNLDEHPAFKGKLSTTEALAKHIADAMATRIQDTEDGPALAGIDVVLRENPDAWAGYSLELPAK

SEQ ID NO: 23404 - protein, 132 aa, Paenarthrobacter nitroguajacolicus
  misc_feature (1)..(132): tr|A0A558GWE6|A0A558GWE6_PAENT 6-carboxytetrahydropteri n synthase OS=Paenarthrobacter nitroguajacolicus OX=211 146 GN=FQP90_14385 PE=4 SV=1
MFSLTVRRHFMIAHSLPREAFGPAQGLHGATFVAEVSFRRPDLNDDAIVLDIGAAGGILEEILEDLNYKNLDEHPAFKGKLSTTEALAKHIADAMATRIQDTEDGPALAGIDVVLRENPDAWAGYSLELPAK

SEQ ID NO: 23405 - protein, 132 aa, Paenarthrobacter ureafaciens
  misc_feature (1)..(132): tr|A0A444GX43|A0A444GX43_9MICC 6-carboxytetrahydropteri n synthase OS=Paenarthrobacter ureafaciens OX=37931 GN= AUR_14015 PE=4 SV=1
MFSLTVRRHFMVAHSLPREAFGPAQGLHGATFVAEVTFRRRELNDDAIVLDIGAAGGILEEILADLNYKNLDEHPAFKGKLSTTEALAKHIADVMAARIKSTDDGPALSGIDVVLRENPDAWAGYSLELPGN

SEQ ID NO: 23406 - protein, 140 aa, Paenibacillaceae bacterium
  misc_feature (1)..(140): tr|A0A2A6DYD5|A0A2A6DYD5_9BACL 6-carboxy-5,6,7,8-tetrah ydropterin synthase OS=Paenibacillaceae bacterium JTher m OX=1906605 GN=BLM47_11040 PE=3 SV=1
MLFPYYPAAPHPYRFELHKEMHFSAAHFIPHPDAGDCRRVHGHTYVVDLTVAGDELDDSGFLVNFQDLKRLVHDRFDHRLLNDCPELAGRMPTTETLAETVCRIVQEYLDGRPNRPRVVQVIVRETPTSYVVYRPLQKNG

SEQ ID NO: 23407 - protein, 134 aa, Paenibacillaceae bacterium
  misc_feature (1)..(134): tr|A0A354DFI1|A0A354DFI1_9BACL 6-carboxytetrahydropteri n synthase QueD (Fragment) OS=Paenibacillaceae bacteriu m OX=2003592 GN=queD PE=4 SV=1
MAEYMIPKKIQCLHDDIHPQHLSYHKRRVAVTKEFTFDAAHHLHLYEGKCKSLHGHTYKLVIMVSGFVNEIGICIDFTDIKKMYEEVIKNRLDHRYLNEVLPLMNTTAENMIVWIWEELDQFLVSSGEKQRGTR

SEQ ID NO: 23408 - protein, 148 aa, Paenibacillus agaridevorans
  misc_feature (1)..(148): tr|A0A2R5F6Q6|A0A2R5F6Q6_9BACL 6-carboxy-5,6,7,8-tetrah ydropterin synthase OS=Paenibacillus agaridevorans OX=1 71404 GN=PAT3040_07174 PE=3 SV=1
MLQQIYPSVQHDYCYELNKDFHFAAAHYIPSDDAGKCRLTHGHTYFANVTVAGGELDDSGFLVNFAIIKQLIHNRFDHTLLNEDTDSFDNGISHRFPTTEVVARVIHDLVQTHLDSLPNRPQCLQVFLRETPTSYCIYRPKRKGKGND

SEQ ID NO: 23409 - protein, 161 aa, Paenibacillus algorifonticola
  misc_feature (1)..(161): tr|A0A1I2IJW6|A0A1I2IJW6_9BACL 6-pyruvoyltetrahydropter in/6-carboxytetrahydropterin synthase OS=Paenibacillus algorifonticola OX=684063 GN=SAMN04487969_13745 PE=4 SV =1
MIQQIYPSVSHPYSYELNKDMHFAAAHSIPSADAGKCAQVHGHTYFANVTIAGDELDASGFLVNFALIKRLIHDRFDHTYLNDDNEHFHAQSADYFPTTEVVARTIYEITQNYLDQLANKPRCVQVYLRETPTSYVIYRPKKTDQQLAANEAQNKAAAPDA

SEQ ID NO: 23410 - protein, 162 aa, Paenibacillus alvei
  misc_feature (1)..(162): tr|S9U6D4|S9U6D4_PAEAL 6-pyruvoyl tetrahydrobiopterin s ynthase OS=Paenibacillus alvei TS-15 OX=1117108 GN=PAAL TS15_16961 PE=4 SV=1
MSTPGPFRIVDKLQVLGADISQESLRYHRHRVLVSKEFTFDAAHHLHAYEGKCKNLHGHTYKVVFGLSGFVNEIGLTLDFGDIKEIWKDRIEPYLDHRYLNETLPPMNTTAENMVVWLYEQMQGALQTEPYAERCEGGRVEFVRLYETPTSYAEARREWMEQ

SEQ ID NO: 23411 - protein, 162 aa, Paenibacillus alvei
  misc_feature (1)..(162): tr|K4ZPN2|K4ZPN2_PAEA2 Queuosine biosynthesis protein Q ueD OS=Paenibacillus alvei (strain ATCC 6344 / DSM 29 / NBRC 3343 / NCIMB 9371 / NCTC 6352) OX=1206781 GN=queD PE=4 SV=1
MSTPGPFHIVDRLQVLGADISQESLRYHRHRVLVSKEFTFDAAHHLHAYEGKCKNLHGHTYKVVFGVSGFVNEIGLALDFGDIKEIWKDRIEPFLDHRYLNETLPTMNTTAENMVVWLYEQMKAALQAEPYAECCEGGRVEFVRLYETPTSYAEARREWIEQ

SEQ ID NO: 23412 - protein, 163 aa, Paenibacillus amylolyticus
  misc_feature (1)..(163): tr|A0A100VI08|A0A100VI08_PAEAM 6-pyruvoyl tetrahydrobio pterin synthase OS=Paenibacillus amylolyticus OX=1451 G N=PAHA3_0098 PE=4 SV=1
MREPGTFRIVEHLQRIGEDILPTQLRYHRKRVLVSKEFTFDAAHHLHCYEGKCKNLHGHTYKVIFGISGYPGETGLTVDFGHIKDIWKTQIEGYLDHQYLNETLPLMNTTAENMVVWLFEQMEHALQTEPYAGLTEGGRTEFVRLFETPTSYAEARREWMIDE

SEQ ID NO: 23413 - protein, 163 aa, Paenibacillus amylolyticus
  misc_feature (1)..(163): tr|A0A1R1BWW8|A0A1R1BWW8_PAEAM 6-carboxytetrahydropteri n synthase QueD OS=Paenibacillus amylolyticus OX=1451 G N=queD PE=4 SV=1
MREPGTFRIVEHLQRIGEDILPTQLRYHRKRVLVSKEFTFDAAHHLHCYEGKCKNLHGHTYKVIFGISGYPGETGLTVDFGHIKDIWKTQIEGYLDHQYLNETLPLMNTTAENMVVWLFEQMEHALQTEPYAGLTDGGRTEFVRLFETPTSYAEARREWMIDE

SEQ ID NO: 23414 - protein, 169 aa, Paenibacillus antarcticus
  misc_feature (1)..(169): tr|A0A168QTM1|A0A168QTM1_9BACL 6-pyruvoyl tetrahydrobio pterin synthase OS=Paenibacillus antarcticus OX=253703 GN=PBAT_00685 PE=4 SV=1
MNPTPGEFRIIDNLQRLGEGIQRDELKYHTKRVLVCKEFTFDAAHHLHAYEGKCKNLHGHTYKAVFGISGVPNDIGITVDFSEIKSIWKERIEPYLDHRYLNETLPKMNTTAENMVVWLFEEMEQALQDSIHLDHEDIPHASVMRTEFVRLYETPTSYAESRREWMLSE

SEQ ID NO: 23415 - protein, 161 aa, Paenibacillus aquistagni
  misc_feature (1)..(161): tr|A0A1X7LZ63|A0A1X7LZ63_9BACL 6-pyruvoyltetrahydropter in/6-carboxytetrahydropterin synthase OS=Paenibacillus aquistagni OX=1852522 GN=SAMN06295960_4830 PE=4 SV=1
MRQPGPFQIVEKLQRYGTDIEANELRYHRKRVMVSKAFTFDAAHHLHAYEGKCKNLHGHTYKVVFGISGYVDEIGLTLDFGEIKTLWKDRMEPYLDHRYLNDTLPPMNTTAENMVVWIYEQMESALKDSESSKALGCRVEFVRLYETPTGYAEARREWMME

SEQ ID NO: 23416 - protein, 149 aa, Paenibacillus baekrokdamisoli
  misc_feature (1)..(149): tr|A0A3G9JES8|A0A3G9JES8_9BACL 6-carboxy-5,6,7,8-tetrah ydropterin synthase OS=Paenibacillus baekrokdamisoli OX =1712516 GN=queD PE=4 SV=1
MIQQIYPSAAHPFRYELNKDMQFAAAHYVPSESAGACSRVHGHTYFVNVTVAGDELDESGFLVNFSQIKKLIHNRFDHSLLNDHSALFSDEDPNRYPTTENVARIIAELVSDFLAQTVNKPQCVQIFLRETPTSYVIYRPYAAGGNRHE

SEQ ID NO: 23417 - protein, 163 aa, Paenibacillus barcinonensis
  misc_feature (1)..(163): tr|A0A2V4VPY3|A0A2V4VPY3_PAEBA 6-pyruvoyltetrahydropter in/6-carboxytetrahydropterin synthase OS=Paenibacillus barcinonensis OX=198119 GN=DFQ00_108117 PE=4 SV=1
MREPGTFRIVERLQRIDQDILPSQLRYHRRRVLVSKEFTFDAAHHLHCYEGKCKNLHGHTYKVVFGISGYPGDTGLTVDFGHIKDIWKSRIEGYLDHQYLNETLPLMNTTAENMVVWLFEQMEQALQTEPYAGLTEGARTEFVRLFETPTSYAEARREWMIHE

SEQ ID NO: 23418 - protein, 271 aa, Paenibacillus barcinonensis
  misc_feature (1)..(271): tr|A0A2V4VR22|A0A2V4VR22_PAEBA 6-pyruvoyltetrahydropter in/6-carboxytetrahydropterin synthase OS=Paenibacillus barcinonensis OX=198119 GN=DFQ00_107126 PE=4 SV=1
MFHLSRRVEFSAAHVYHVPSWSEQQNKEVFGKCSNLHGHGHDYKLDVVVRGKLNPQSGIVVNTTDIKNTVNAMIEEELDGKFLNREHDHFQHHMPTTENMALYIWDRLNEQFDDCELQQIKLYENTELSAEKERHALPRLTRKYHFCASHRLHSPLLSDEENRQLFGKCNNPHGHGHNYVLDVTVQGTPDADTGMIIHLSELDSIVEREVLDRYDHHHLNLDVEDYKDLNPTSEVVAMVIYNLLKPHLPQLYRIGLWETDKNYFEYYGSGA

SEQ ID NO: 23419 - protein, 164 aa, Paenibacillus barengoltzii
  misc_feature (1)..(164): tr|R9L9R8|R9L9R8_9BACL Queuosine biosynthesis protein Q ueD OS=Paenibacillus barengoltzii G22 OX=1235795 GN=C81 2_02587 PE=4 SV=1
MKRTPGEFRIVEALQKLDQDIRRDQLRYHRRRVLVSKEFTFDAAHHLHAYDGKCKNLHGHTYKVVFGISGRPDEIGMTIDFGTIKEIWKNEIETYLDHRYINETLPPMNTTAENMVVWLFEKMEEALQSEAYRNPVLEARTEFVRLYETPTSYAEARREWMRDE

SEQ ID NO: 23420 - protein, 148 aa, Paenibacillus beijingensis
  misc_feature (1)..(148): tr|A0A0D5NIM4|A0A0D5NIM4_9BACL 6-carboxy-5,6,7,8-tetrah ydropterin synthase OS=Paenibacillus beijingensis OX=11 26833 GN=VN24_12320 PE=3 SV=1
MIQQIYPAPSHSYRYELNKDMQFAAAHYIPAEEAGKCSRVHGHTYFANLTIAGDELDECGFLIDFAVLKRLVHDRFDHRLLNDDTELFDSKDGSRFPTTEAVARIVCELVQQHLDTRPNRPRCIQVFLRETPTSYVIYRPHPEVRHER

SEQ ID NO: 23421 - protein, 160 aa, Paenibacillus borealis
  misc_feature (1)..(160): tr|A0A1R0YFY5|A0A1R0YFY5_9BACL 6-pyruvoyl tetrahydrobio pterin synthase OS=Paenibacillus borealis OX=160799 GN= BSK56_14215 PE=4 SV=1
MLGEVSVCKIFTFDAAHQLIGHKGKCSNLHGHTYKLEVVLKGKPSVEAGHSDEGFVIDFSDIKSTVQQSLVDRLDHAFLAMGNEPVLDTLTNTGSKVALLSFRTTVENMACYIAYKLKQAALPLYSVKLWETPTSWAEVLAEDIPEDGPSYRMHGGCDCE

SEQ ID NO: 23422 - protein, 160 aa, Paenibacillus borealis
  misc_feature (1)..(160): tr|A0A089MR29|A0A089MR29_9BACL 6-pyruvoyl tetrahydrobio pterin synthase OS=Paenibacillus borealis OX=160799 GN= PBOR_19765 PE=4 SV=1
MQGEVSVCKIFTFDAAHQLIGHKGKCSNLHGHTYKLEVVLKGVPSLEHGQSDEGFVIDFSDIKATVKQLVVDRLDHAFLAMGNEPVLETLTATGSKVALLSFRTTAENMSAYIAYELKRASLPVYSVKLWETPTSWAEVLAADIPEEGPSYRLYGGCDHE

SEQ ID NO: 23423 - protein, 162 aa, Paenibacillus bovis
  misc_feature (1)..(162): tr|A0A172ZN12|A0A172ZN12_9BACL 6-carboxytetrahydropteri n synthase QueD OS=Paenibacillus bovis OX=1616788 GN=AR 543_08000 PE=4 SV=1
MNQPGPFRIVEKLQQYGTDIQHEQLRYHRKRVLVNKEFTFDAAHHLHAYEGKCMNLHGHTYRVIFGISGIPSMNGIVVDFGDIKNIWKERIEPYLDHRYLNETLPPMNTTAENMVVWLYEQMEQALQSEPYCDQVQGGRTEFVQLYETPTSYAEARREWMES

SEQ ID NO: 23424 - protein, 147 aa, Paenibacillus catalpae
  misc_feature (1)..(147): tr|A0A1I1Z6R4|A0A1I1Z6R4_9BACL 6-carboxy-5,6,7,8-tetrah ydropterin synthase OS=Paenibacillus catalpae OX=104577 5 GN=SAMN05216378_2961 PE=3 SV=1
MIQQIYPSVQHPFQYELNKDMQFAAAHSIPSEEAGHCARVHGHTYFANVTIAGDELDSSGFLVNFAAIKKLIHNRFDHTYLNDHQDVFDNNDPNRFPTTEVVARTIYEIVQAYLDETSNKATCVQVFLRETPTSYCIYRPKKVVTHD

SEQ ID NO: 23425 - protein, 159 aa, Paenibacillus cellulosilyticus
  misc_feature (1)..(159): tr|A0A2V2YFD2|A0A2V2YFD2_9BACL 6-pyruvoyltetrahydropter in/6-carboxytetrahydropterin synthase OS=Paenibacillus cellulosilyticus OX=375489 GN=DFQ01_13919 PE=4 SV=1
MNYEIPRKVQVLGEDIQSHQLRYHKRRVLLSKEFTFDSAHHLHNYEGKCMNLHGHTYKVQLMMSGVPDERGISIDFSDMKRIAQARIIEPLDHRYLNEVLPPMNTTAENMVVWMYEQVHEALVEEGLYPNVRVEEVRLWETPTSFAAITREWMEAADNE

SEQ ID NO: 23426 - protein, 162 aa, Paenibacillus chitinolyticus
  misc_feature (1)..(162): tr|A0A410WS35|A0A410WS35_9BACL 6-carboxytetrahydropteri n synthase QueD OS=Paenibacillus chitinolyticus OX=7926 3 GN=queD PE=4 SV=1
MKAPGEFRIVENLQQYGQDIRHEQLRYHTKRVLVSKEFTFDAAHHLHAYEGKCKNLHGHTYKAVYGISGYVNEIGLTLDFGEIKDIWKARIEPYLDHRYLNETLPPMNTTAENMVVWLYEQMETALQSDEMQAKARGGRVEFVRLYETPTSYAEARREWMSE

SEQ ID NO: 23427 - protein, 147 aa, Paenibacillus contaminans
  misc_feature (1)..(147): tr|A0A329MT55|A0A329MT55_9BACL 6-carboxy-5,6,7,8-tetrah ydropterin synthase OS=Paenibacillus contaminans OX=450 362 GN=DQG23_02955 PE=3 SV=1
MLHQLYPSVPHHYSYELNKDMQFAAAHYVPAEEAGKCRNMHGHTYFANITIAGDTLDSAGFLVNFSILKRLIHDRFDHSVLNSDTVSFSDKRPDRFPTTEVVARTICEIVQDYLDRTENRPRCLQVYLRETPTSYCLYRPKAVISND

SEQ ID NO: 23428 - protein, 164 aa, Paenibacillus crassostreae
  misc_feature (1)..(164): tr|A0A167GUJ0|A0A167GUJ0_9BACL 6-pyruvoyl tetrahydrobio pterin synthase OS=Paenibacillus crassostreae OX=176353 8 GN=PNBC_00235 PE=4 SV=1
MQSPGEFRIIDRLQRFGEDLNHSDLRYHNKRVLVSKEFTFDASHHLHAYEGKCKNLHGHTYKVVFGISGVPNDIGITVDFGEIKDIWKKYIEPYLDHRYLNETLPKMNTTAENMVVWLFEQMEAALQSLQLSEENLILETRTEFVRLFETPTSYAEARREWILG

SEQ ID NO: 23429 - protein, 122 aa, Paenibacillus curdlanolyticus
  misc_feature (1)..(122): tr|E0I7G5|E0I7G5_9BACL 6-carboxy-5,6,7,8-tetrahydropter in synthase OS=Paenibacillus curdlanolyticus YK9 OX=717 606 GN=PaecuDRAFT_1589 PE=3 SV=1
MIMVLGRHFEFEAAHFLPDVGTFGRCSRMHGHRYELTVEIEGPVNSDGWICDFKELKGVVQEQVLDRYDHSNLNDHFEVSTVENIASQIFSALTHALDGKPYWLKKIKLYETRNCYAEITAN

SEQ ID NO: 23430 - protein, 159 aa, Paenibacillus curdlanolyticus
  misc_feature (1)..(159): tr|E0IGB8|E0IGB8_9BACL Uncharacterized protein OS=Paeni bacillus curdlanolyticus YK9 OX=717606 GN=PaecuDRAFT_47 11 PE=4 SV=1
MTYEIPRNVQIFGEHIQLHELRYHNRRVLLSKEFTFDSAHHLHHYEGKCQSMHGHTYKVQLMMSGKPDERGISIDFADMKRIAQARIIEPLDHKYLNEALPPMNTTAENMVVWMYEQVHEALVEEGLYPNVRVEEIRLWETPTSFAAVTRQWMEASDDE

SEQ ID NO: 23431 - protein, 143 aa, Paenibacillus darwinianus
  misc_feature (1)..(143): tr|A0A015L087|A0A015L087_9BACL 6-carboxy-5,6,7,8-tetrah ydropterin synthase OS=Paenibacillus darwinianus OX=138 0763 GN=BG52_07390 PE=3 SV=1
MLQQIYPPVAHDYAYELNKDMHFAAAHYIPHDDAGKCRRVHGHTYFANVTIAGDELDGSGFLVNFSTVKKLIHERFDHHTVNEDELFDDADPGRYPTTEIMARTIWEIVQEHLDVQPNKPRCLQVFLRETPSSYVVYRPKAVR

SEQ ID NO: 23432 - protein, 273 aa, Paenibacillus darwinianus
  misc_feature (1)..(273): tr|A0A015L4A0|A0A015L4A0_9BACL 6-pyruvoyl tetrahydropte rin synthase OS=Paenibacillus darwinianus OX=1380763 GN =BG52_10785 PE=4 SV=1
MLFISRRIDFSATHVYRVSSWSEAENKRVFGLCSNPNGHGHDYRLEVVVKGALNEKSGIVVNTTDIKHIVGSFVEDELDGKFLDRQHPYFVTHMPTTENLAGYIWQSLENRFENCELHRIRLYENHYLSAEKEKAALTRLTRKYHFCAAHRLHSDQLSAEENLELFGKCNNPHGHGHNYYLDVTVHGEPDPVTGMIVNLAELDEIVQKQVLDKVDHKHLNLDTAEFKDLNPTSEAVAMVIYNMLHPHLPELHKIGLWETEKNYFEYRGAGELS

SEQ ID NO: 23433 - protein, 162 aa, Paenibacillus dendritiformis
  misc_feature (1)..(162): tr|A0A4R5YRI3|A0A4R5YRI3_9BACL 6-carboxytetrahydropteri n synthase QueD OS=Paenibacillus dendritiformis OX=1300 49 GN=queD PE=4 SV=1
MSRPGPFRIVEKLQQYGTDISRESLRYHKRRVLVSKEFTFDAAHHLHAYEGKCKNLHGHTYKAVFGLSGYTNDIGIALDFGDIKEIWKERIEPYLDHRYLNETLPPMNTTAENMVVWLYEQMSAALAEEPYRTRCEGGRVEFVRLYETPTSYAEARREWMER

SEQ ID NO: 23434 - protein, 162 aa, Paenibacillus dendritiformis
  misc_feature (1)..(162): tr|H3SNA3|H3SNA3_9BACL 6-pyruvoyl tetrahydrobiopterin s ynthase OS=Paenibacillus dendritiformis C454 OX=1131935 GN=PDENDC454_25264 PE=4 SV=1
MSRPGPFRIVEKLQQYGTDISRESLRYHKRRVLVSKEFTFDAAHHLHAYEGKCKNLHGHTYKAVFGLSGYTNDIGIALDFGDIKEIWKERIEPYLDHRYLNETLPPMNTTAENMVVWLYEQMSAALAEEPYRTRCEGGRVEFIRLYETPTSYAEARREWMER

SEQ ID NO: 23435 - protein, 160 aa, Paenibacillus donghaensis
  misc_feature (1)..(160): tr|A0A2Z2KL33|A0A2Z2KL33_9BACL 6-pyruvoyl tetrahydrobio pterin synthase OS=Paenibacillus donghaensis OX=414771 GN=B9T62_13770 PE=4 SV=1
MHNEVTVCKIFTFDSAHQLIGHQGKCSNLHGHTYKLEVVLKGIPSSEEGTSGEGFVIDFSEIKSKVKAIVIDRLDHAFLAMGNEPVLETLTLTGSKVAQLSFRTTAENMSCYIAHTLKQAGLPLYSVKLWETPTSWAEVLAADIPLEGPSYRMFGGCDCE

SEQ ID NO: 23436 - protein, 159 aa, Paenibacillus durus
  misc_feature (1)..(159): tr|A0A089HQT7|A0A089HQT7_PAEDU 6-pyruvoyl tetrahydrobio pterin synthase OS=Paenibacillus durus OX=44251 GN=PDUR _15155 PE=4 SV=1
MLHEVSVCKIFSFDAAHQLVGHKGKCANVHGHTYKLEVVLKGKPVAEEGRSDEGFVVDFGDIKELVKERVVDRLDHAFLAKGDEPVLEALKTSGSKTAVLSFRTTAENLASYIAYTLKTSGLPVYSVKLWETPSAWAEVLAADIPEEGPSYRLYGGCDL

SEQ ID NO: 23437 - protein, 159 aa, Paenibacillus durus
  misc_feature (1)..(159): tr|A0A0F7FAD0|A0A0F7FAD0_PAEDU 6-pyruvoyl tetrahydrobio pterin synthase OS=Paenibacillus durus ATCC 35681 OX=13 33534 GN=VK70_10630 PE=4 SV=1
MLGEVTVCKIFSFDAAHQLVGHKGKCANVHGHTYKLEVVLKGKPVAEEGRSDEGFVTDFGDIKALVKEHVVDKLDHAFLAKGDEPVLESLKVSGSKTAELSFRTTAENLASYIAYTLKMSGLPVHSIKLWETPTAWAEVLAADIPEEGPSYRLYGGCDL

SEQ ID NO: 23438 - protein, 158 aa, Paenibacillus elgii
  misc_feature (1)..(158): tr|A0A2T6G507|A0A2T6G507_9BACL 6-carboxytetrahydropteri n synthase QueD OS=Paenibacillus elgii OX=189691 GN=que D PE=4 SV=1
MTYEIPKKVQTLGEDIQRSELKYHDREVLVSKEFTFDSAHHLHCYEGKCKSLHGHTYKLQVVMRGKVDDRGITIDFADIKRIAKERIIDRLDHRYLNEVLPPMNTTAENMVVWMYEQLRDALRSEGLFPAVRLEEVRLWETPTSYAAVTARLMGDDPA

SEQ ID NO: 23439 - protein, 158 aa, Paenibacillus elgii
  misc_feature (1)..(158): tr|A0A165RBZ3|A0A165RBZ3_9BACL 6-pyruvoyl tetrahydrobio pterin synthase OS=Paenibacillus elgii OX=189691 GN=AV6 54_11290 PE=4 SV=1
MTYEIPKKVQTLGEDIQRSELKYHDREVLVSKEFTFDSAHHLHCYEGKCKSLHGHTYKLQVVMRGKVDDRGITIDFADIKRIAKERIIDRLDHRYLNEVLPPMNTTAENMVVWMYEQLRDALRSEGLFPAVRLEEVRLWETPTSYASVTARLMGDDPA

SEQ ID NO: 23440 - protein, 160 aa, Paenibacillus etheri
  misc_feature (1)..(160): tr|A0A0W1AYZ2|A0A0W1AYZ2_9BACL 6-pyruvoyl tetrahydrobio pterin synthase OS=Paenibacillus etheri OX=1306852 GN=U Q64_13855 PE=4 SV=1
MLNEVSVCKIFTFDSAHQLVGHKGKCSNLHGHTYKLEVVLKGKPMAAEGHSDEGFVIDFSDIKTTVQQTLVDRLDHAFLAMGNEPVFETLTNTGSKVALLSFRTTVENMSSYIAYKLKQAGLPLYAVKLWETPTSWAEVLAEDVPDEGPSYRLYGGCDCE

SEQ ID NO: 23441 - protein, 164 aa, Paenibacillus faecis
  misc_feature (1)..(164): tr|A0A5D0CZJ1|A0A5D0CZJ1_9BACL 6-carboxytetrahydropteri n synthase QueD OS=Paenibacillus faecis OX=862114 GN=qu eD PE=4 SV=1
MSRMPGEFRIVDNLQALGRDIDEAQLQYHRRRVLVSKEFTFDAAHHLHAYEGKCKNLHGHTYKVVFGISAIPDKRGISLDFGTIKQIWKDEIEGFLDHRYLNETLPPMNTTAENMVVWLYEKMEAALSSERYRDASAEARTEFVRLYETPNSYAEARREWMGDE

SEQ ID NO: 23442 - protein, 157 aa, Paenibacillus ferrarius
  misc_feature (1)..(157): tr|A0A1V4HKH9|A0A1V4HKH9_9BACL 6-carboxytetrahydropteri n synthase QueD OS=Paenibacillus ferrarius OX=1469647 G N=BC351_25385 PE=4 SV=1
MSYDIPRDVQMLGRDIQENQLKYHNKFVLISKEFTFDSAHHLHCYEGKCKNLHGHTYKLQVIMRGQVDSRGIAIDFGDIKRIAKERVIDRLDHKYLNDVLPAMNTTAENMIVWMYEEIHQALVNEQLFPAIKLEEIRLWETPTSYAAITRAMMEEDL

SEQ ID NO: 23443 - protein, 146 aa, Paenibacillus ginsengarvi
  misc_feature (1)..(146): tr|A0A3B0BIN1|A0A3B0BIN1_9BACL 6-carboxy-5,6,7,8-tetrah ydropterin synthase OS=Paenibacillus ginsengarvi OX=400 777 GN=D7M11_27945 PE=3 SV=1
MMQQIYPTIPHPYAYELNKDLQFAAAHYVPAEEAGNCRKLHGHTYFANITVAGDTLDSAGFLVNFSILKRLIHERFDHTVLNDDRESFDDQHPDRFPTTEVVARTICDIVQRYLDGTENKPRCLQVYLRETPTSYCLYRPKAGDGR

SEQ ID NO: 23444 - protein, 169 aa, Paenibacillus glacialis
  misc_feature (1)..(169): tr|A0A168NN11|A0A168NN11_9BACL 6-pyruvoyl tetrahydrobio pterin synthase OS=Paenibacillus glacialis OX=494026 GN =PGLA_00730 PE=4 SV=1
MNYTPGVFRIIDNLQRFGEDIQHDELKYHTKRVLVCKEFTFDAAHHLHAYEGKCKNLHGHTYKAVFGISGVPNDIGITVDFGEIKDIWKDRIEPYLDHRYLNETLPKMNTTAENMVVWLFEQMEQALQGSIHLNHEDIPHSNVIRTEFVRLYETPTSYAESRREWMLSE

SEQ ID NO: 23445 - protein, 163 aa, Paenibacillus glucanolyticus
  misc_feature (1)..(163): tr|A0A163KNE1|A0A163KNE1_9BACL 6-pyruvoyl tetrahydrobio pterin synthase OS=Paenibacillus glucanolyticus OX=5984 3 GN=AWU65_16300 PE=4 SV=1
MSREPGTFRIVEHLQKLGEDIDAGSLRYHRKRVLVSKEFTFDAAHHLHCYEGKCKNLHGHTYKVVFGISGIPNEVGITVDFGDIKDCWKTDIEPYLDHRYLNETLPPMNTTAENMVVWLFEKMEDALRSKESHEQQGTRTEFVRLFETPTSYAEVRREWMIHE

SEQ ID NO: 23446 - protein, 160 aa, Paenibacillus graminis
  misc_feature (1)..(160): tr|A0A089MC81|A0A089MC81_9BACL 6-pyruvoyl tetrahydrobio pterin synthase OS=Paenibacillus graminis OX=189425 GN= PGRAT_16835 PE=4 SV=1
MLGEVSVCKIFTFDSAHQLVGHKGKCSNLHGHTYKLEVVLKGKPLVEEGHSDEGFVVDFSDIKAAVQESLVDHLDHAFLAMGNEPVLETLMNTGSKVALLSFRTTVENMSAYIAYKLKQASLPLYSVKLWETPTSWAEVLAADIPAEGPSYRLFGGCDCE

SEQ ID NO: 23447 - protein, 147 aa, Paenibacillus hemerocallicola
  misc_feature (1)..(147): tr|A0A5C4T8P7|A0A5C4T8P7_9BACL 6-carboxy-5,6,7,8-tetrah ydropterin synthase OS=Paenibacillus hemerocallicola OX =1172614 GN=FE784_14675 PE=3 SV=1
MMQQIYPVASHSYAYELNKDMQFAAAHYVPAEEAGKCRKLHGHTYFANITVAGDTLDSAGFLVNFAILKQLIHERFDHSVLNDDTESFSADEPDRFPTTEAVARTICEIVQRHLDGTENRARCLQVYLRETPTSYCIYRPKAGIAHA

SEQ ID NO: 23448 - protein, 148 aa, Paenibacillus herberti
  misc_feature (1)..(148): tr|A0A229NYF7|A0A229NYF7_9BACL 6-carboxy-5,6,7,8-tetrah ydropterin synthase OS=Paenibacillus herberti OX=161930 9 GN=queD PE=3 SV=1
MQQIYPAPPPHVYRYELNKEFHFAAAHYIPAEAAGSCSRVHGHTYYCNVTVGGDKLDDCGFLVNFSEVKKLVRDRFDHRLLNDDERFGGGASELDPQHFPTTEVVARTVWELVQEELDRRDNGARCLQVFLRETPSSYVIYRPEAQHG

SEQ ID NO: 23449 - protein, 163 aa, Paenibacillus ihbetae
  misc_feature (1)..(163): tr|A0A1B2DXL7|A0A1B2DXL7_9BACL 6-carboxytetrahydropteri n synthase QueD OS=Paenibacillus ihbetae OX=1870820 GN= BBD41_07730 PE=4 SV=1
MSREPGAFRIVERLQKLGEDIDAGSLRYHRKRVLVSKEFTFDAAHHLHAYEGKCKNLHGHTYKVVFGISGIPDEVGITVDFGDIKEIWKSEIEPYLDHRYLNETLPPMNTTAENMVVWLFEKMEAALSAKPSHEQQGTRTEFVRLFETPTSYAEVRREWMLGE

SEQ ID NO: 23450 - protein, 163 aa, Paenibacillus illinoisensis
  misc_feature (1)..(163): tr|A0A2W0CCD1|A0A2W0CCD1_9BACL 6-pyruvoyl tetrahydrobio pterin synthase OS=Paenibacillus illinoisensis OX=59845 GN=PIL02S_04475 PE=4 SV=1
MREPGTFRIVEHLQRIGEDILPSQLRYHRKRVLVSKEFTFDAAHHLHCYEGKCKNLHGHTYRVVFGISGYPGETGLTVDFGHIKDIWKTKIEGYLDHQYLNETLPLMNTTAENMVVWLFEQMEHALQTEPYAGLTEGGRTEFVRLYETPTSYAEARREWMIDE

SEQ ID NO: 23451 - protein, 160 aa, Paenibacillus jilunlii
  misc_feature (1)..(160): tr|A0A1G9KCC1|A0A1G9KCC1_9BACL PreQ(0) biosynthesis pro tein QueD OS=Paenibacillus jilunlii OX=682956 GN=SAMN05 216191_103202 PE=4 SV=1
MLGEVSVCKIFTFDSAHQLIGHKGKCSNLHGHTYKLEVVLKGKPLAVEGHSDEGFVADFSDIKATVQERLVDHLDHAFLAMGNEPVLETLKNTGSKVALLSFRTTVENMSAYIAYTLKQASLPLYSVKLWETPTSWAEVLAADIPAEGPSYRLNGGCDCE

SEQ ID NO: 23452 - protein, 163 aa, Paenibacillus kribbensis
  misc_feature (1)..(163): tr|A0A222WQC1|A0A222WQC1_9BACL 6-carboxytetrahydropteri n synthase QueD OS=Paenibacillus kribbensis OX=172713 G N=B4V02_19545 PE=4 SV=1
MREPGTFHIVNKLQQFGTDIQHAQLRYHRKRVLVSKQFTFDAAHHLHCYEGKCKNLHGHTYIVVFGISGIPDETGLTMDFGDIKTIWKERIEPYLDHRYLNETLPPMNTTAENMVVWIFEQMESALSSDAYRSRVEGGRTEFVRLFETPTSYAEFRREWMLDE

SEQ ID NO: 23453 - protein, 163 aa, Paenibacillus lactis
  misc_feature (1)..(163): tr|G4HI40|G4HI40_9BACL Uncharacterized protein OS=Paeni bacillus lactis 154 OX=743719 GN=PaelaDRAFT_3651 PE=4 S V=1
MSREPGAFRIVERLQKLGEDIDAGSLRYHRKRVLVSKEFTFDAAHHLHAYEGKCKNLHGHTYKVVFGISGIPDEVGITVDFGEIKDIWKSEIEPYLDHRYLNETLPPMNTTAENMVVWLFEKMEAALSAKPSHEQQGTRTEFVRLFETPTSYAEVRREWMLGE

SEQ ID NO: 23454 - protein, 161 aa, Paenibacillus larvae
  misc_feature (1)..(161): tr|V9W372|V9W372_9BACL Queuosine biosynthesis protein Q ueD OS=Paenibacillus larvae subsp. larvae DSM 25430 OX= 697284 GN=queD PE=4 SV=1
MTRPGDFRIVDKLQRAGQDIACSQLRYHHKRVLVSKEFTFDASHHLHAYEGKCKNLHGHTYKAVFGISGRVNDIGLMVDFADIKEIWKQDIEPYLDHRYLNETLPAMNTTAENMVVWLFEKMEESLPDRIMEEQGARVEFVRLYETPTSFAEARREWITGD

SEQ ID NO: 23455 - protein, 161 aa, Paenibacillus larvae
  misc_feature (1)..(161): tr|A0A1U9YMG9|A0A1U9YMG9_9BACL 6-carboxytetrahydropteri n synthase QueD OS=Paenibacillus larvae subsp. pulvifac iens OX=1477 GN=B5S25_08465 PE=4 SV=1
MTRPGDFRIVDKLQRAGQDITCSQLRYHHKRVLVSKEFTFDASHHLHAYEGKCKNLHGHTYKAVFGISGRVNDIGLMVDFADIKEIWKQDIEPYLDHRYLNETLPAMNTTAENMVVWLFEKMEESLPDRIMEEQGARVEFVRLYETPTSFAEARREWITGD

SEQ ID NO: 23456 - protein, 163 aa, Paenibacillus lautus
  misc_feature (1)..(163): tr|A0A1R1B2J9|A0A1R1B2J9_PAELA 6-carboxytetrahydropteri n synthase QueD OS=Paenibacillus lautus OX=1401 GN=BK12 3_14170 PE=4 SV=1
MSREPGAFRIVEQLQKLGEDIDAGSLRYHRKRVLVSKEFTFDAAHHLHCYEGKCKNLHGHTYKVVFGISGIPNEVGITVDFGDIKDCWKTDIEPYLDHRYLNETLPPMNTTAENMVVWLFEKMEEALRSKESHERQGTRTEFVRLFETPTSYAEVRREWMIDE

SEQ ID NO: 23457 - protein, 163 aa, Paenibacillus lautus
  misc_feature (1)..(163): tr|A0A385TU78|A0A385TU78_PAELA 6-carboxytetrahydropteri n synthase QueD OS=Paenibacillus lautus OX=1401 GN=queD PE=4 SV=1
MSREPGAFRIVEHLQKLGEDIDAGSLRYHRKRVLVSKEFTFDAAHHLHCYEGKCKNLHGHTYKVVFGISGTPNEVGITVDFGDIKDCWKTSIEPYLDHRYLNETLPPMNTTAENMVVWLFEKMEEALRSRESYEQQGMRTEFVRLFETPTSYAEVRREWMIHE

SEQ ID NO: 23458 - protein, 164 aa, Paenibacillus lentus
  misc_feature (1)..(164): tr|A0A3Q8S6D5|A0A3Q8S6D5_9BACL 6-carboxytetrahydropteri n synthase QueD OS=Paenibacillus lentus OX=1338368 GN=q ueD PE=4 SV=1
MSFVPGEFRIVDKLQKLGEDIPHSELRYHKRRVLVSKEFTFDAAHHLHAYEGKCKNLHGHTYRVIFGISGIPDELGLTIDFGTIKTIWKQEIEGYLDHQYLNESLPLMNTTAENMVVWLYEQMEQALQSDAYRSSSLQARTEFVRLYETPTSYAEARREWMSGE

SEQ ID NO: 23459 - protein, 164 aa, Paenibacillus macerans
  misc_feature (1)..(164): tr|A0A090ZBQ9|A0A090ZBQ9_PAEMA Queuosine biosynthesis p rotein QueD OS=Paenibacillus macerans OX=44252 GN=queD PE=4 SV=1
MSRTPGEFRIVESLQKLGRDIGKEQLRYHRRRVLVSKEFTFDAAHHLHAYEGKCKNLHGHTYKAVFGISALPNEIGITVDFGTIKEIWKNEIEVYLDHRYLNETLPPMNTTAENTVVWLFEKMEAALGSETYRNVVLEGRTEFVRLYETPTSYAEVRREWMLDE

SEQ ID NO: 23460 - protein, 169 aa, Paenibacillus macquariensis
  misc_feature (1)..(169): tr|A0A1N6UXM6|A0A1N6UXM6_9BACL 6-pyruvoyltetrahydropter in/6-carboxytetrahydropterin synthase OS=Paenibacillus macquariensis OX=948756 GN=SAMN05421578_103453 PE=4 SV= 1
MNHTPGEFRIIDNLQRFGEDIQRDELKYHNKRVLVCKEFTFDAAHHLHAYEGKCKNLHGHTYKAVFGISGVPNDIGITVDFGEIKDIWKDLIEPYLDHRYLNETLPKMNTTAENMVAWLFEQMEQALQGSIHLKHEDIPCSNDIRTEFVRLYETPTSYAEARREWMLSE

SEQ ID NO: 23461 - protein, 169 aa, Paenibacillus macquariensis; identical to SEQ ID NO: 23460
  misc_feature (1)..(169): tr|A0A162LYZ7|A0A162LYZ7_PAEMC 6-pyruvoyl tetrahydrobio pterin synthase OS=Paenibacillus macquariensis OX=1468 GN=PMSM_07880 PE=4 SV=1

SEQ ID NO: 23462 - protein, 160 aa, Paenibacillus montanisoli
  misc_feature (1)..(160): tr|A0A328U852|A0A328U852_9BACL 6-carboxytetrahydropteri n synthase QueD OS=Paenibacillus montanisoli OX=2081970 GN=queD PE=4 SV=1
MTYEIPKQIERLGEEIQEHQLRYHNRRVIVSKEFTFDSAHHLHLYEGKCKSLHGHTYKLQTILSGKTDHRGLTIDFADMKRIAKERVIDKLDHRYLNEVLPPMNTTAENMVVWIYEQIHHALIEEGHYPNIRIEEIRLWETPTSFAAVTREMMEADENDG

SEQ ID NO: 23463 - protein, 156 aa, Paenibacillus mucilaginosus
  misc_feature (1)..(156): tr|F8FPI7|F8FPI7_PAEMK Queuosine biosynthesis protein Q ueD OS=Paenibacillus mucilaginosus (strain KNP414) OX=1 036673 GN=KNP414_01648 PE=4 SV=1
MEYEIPKKVQILGEDIQQSQLKYHDREVLVSKEFTFDSAHHLHCYEGKCQSLHGHTYKLQVIMRGKVDHRGITIDFGDIKRIAKERVIDRLDHRYLNDVLPPMNTTAENMVVWMYEQLAAALREENLYPAVRLEEVRLWETPTSFAAVTARLMGEE

SEQ ID NO: 23464 - protein, 156 aa, Paenibacillus mucilaginosus; identical to SEQ ID NO: 23463
  misc_feature (1)..(156): tr|H6NA12|H6NA12_9BACL Queuosine biosynthesis protein Q ueD OS=Paenibacillus mucilaginosus 3016 OX=1116391 GN=P M3016_1952 PE=4 SV=1

SEQ ID NO: 23465 - protein, 149 aa, Paenibacillus nanensis
  misc_feature (1)..(149): tr|A0A3A1V3R8|A0A3A1V3R8_9BACL 6-carboxy-5,6,7,8-tetrah ydropterin synthase OS=Paenibacillus nanensis OX=393251 GN=queD PE=3 SV=1
MLQQVYPSPQHDYVYELNKDFHFAAAHYVPSEEAGKCQRVHGHTYYANVTVAGDELDAAGFLVNFAIIKKLIHERFDHTLLNDDTDSFDEADPNRFPTTEVVARTVCELVQQYLDGTANKPVCVQVFLRETPTSYCVYRPKRKGGKSHE

SEQ ID NO: 23466 - protein, 158 aa, Paenibacillus naphthalenovorans
  misc_feature (1)..(158): tr|A0A0U2VXL1|A0A0U2VXL1_9BACL 6-carboxytetrahydropteri n synthase QueD OS=Paenibacillus naphthalenovorans OX=1 62209 GN=IJ22_06590 PE=4 SV=1
MEYEIPKKVQTLGEDIQKSQLKYHDREVLVSKEFTFDSAHHLHCYEGKCKSLHGHTYKLQVIMRGKVDERGITIDFADIKRIAKARILDRLDHRYLNEVLPPMNTTAENMVVWMYEQLRDALASEGLYPAVRVEEVRLWETPTSYASVTARLMGDELS

SEQ ID NO: 23467 - protein, 162 aa, Paenibacillus nuruki
  misc_feature (1)..(162): tr|A0A1E3KZ79|A0A1E3KZ79_9BACL 6-pyruvoyltetrahydropter in synthase OS=Paenibacillus nuruki OX=1886670 GN=queD PE=4 SV=1
MNQPGPFRIVEKLQQYGTDIQHEQLRYHRRRVLVNKEFTFDAAHHLHAYDGKCMNLHGHTYRVIFGISGIPSDNGIVVDFGDIKNIWKAHIEPFLDHRYLNETLPPMNTTAENMVVWLYEQMELALQSEPYAGQVEGGRVEFVQLYETPTSYAEARREWMQA

SEQ ID NO: 23468 - protein, 160 aa, Paenibacillus odorifer
  misc_feature (1)..(160): tr|A0A1R0XY09|A0A1R0XY09_9BACL 6-pyruvoyl tetrahydrobio pterin synthase OS=Paenibacillus odorifer OX=189426 GN= BSO21_01955 PE=4 SV=1
MLNEVSVCKIFTFDAAHQLVGHKGKCSNLHGHTYKLEVVLKGKPMAAEGHSDEGFVIDFSDIKMTVQQSLVDRLDHAFLAMGNEAVLETLTNTGSKVALLSFRTTVENMSSYIAYKLKQAGLPLYSVKLWETPTSWAEVLGEDVPDEGPSYRLYGGCDCE

SEQ ID NO: 23469 - protein, 160 aa, Paenibacillus odorifer
  misc_feature (1)..(160): tr|A0A1R0Z6P7|A0A1R0Z6P7_9BACL 6-pyruvoyl tetrahydrobio pterin synthase OS=Paenibacillus odorifer OX=189426 GN= BJP51_10340 PE=4 SV=1
MLNEVSVCKIFTFDAAHQLVGHKGKCSNLHGHTYKLEVVLKGKPMAAEGHSDEGFVIDFSDIKMTVQQSLVDRLDHAFLAMGNEPVLETLTNTGSKVALLSFRTTVENMSSYIAYKLKQAGLPLYSVKLWETPTSWAEVLAEDVPDEGPSYRLYGGCDCE

SEQ ID NO: 23470 - protein, 159 aa, Paenibacillus oryzae
  misc_feature (1)..(159): tr|A0A1A5YJW6|A0A1A5YJW6_9BACL 6-pyruvoyl tetrahydrobio pterin synthase OS=Paenibacillus oryzae OX=1844972 GN=A 7K91_18245 PE=4 SV=1
MMNEVSVCKIFTFDSAHQLIGHSGKCANVHGHTYKLEVVLKAPVIAEEGVSDEGFVMDFSHLKSIVKEHILSHLDHAFLAAGNEPVLESLQNTGSKIAKLGFRTTAENLASYICWRLLSHGLPVFSVKLWETGSAWAEVEAADIPAEGPLYRKFGDCDF

SEQ ID NO: 23471 - protein, 157 aa, Paenibacillus oryzisoli
  misc_feature (1)..(157): tr|A0A198AN50|A0A198AN50_9BACL 6-carboxytetrahydropteri n synthase QueD OS=Paenibacillus oryzisoli OX=1850517 G N=A8708_12180 PE=4 SV=1
MSYEIPRSVQELGRDIQENQLKYHHKSVLISKEFTFDSAHHLHCYEGKCKSLHGHTYKLQVIMRGKVDSRGIAIDFGDIKRITKERVIDRLDHRYLNDVLPPMNTTAENMVVWIYEEIHQALLDEKLYPAISLDEIRLWETPTSYAAITRSMMEEDL

SEQ ID NO: 23472 - protein, 163 aa, Paenibacillus pabuli
  misc_feature (1)..(163): tr|A0A327PLH9|A0A327PLH9_9BACL 6-pyruvoyltetrahydropter in/6-carboxytetrahydropterin synthase OS=Paenibacillus pabuli OX=1472 GN=DET54_110135 PE=4 SV=1
MREPGTFRIVERLQRIGEDILPAQLRYHRKRVLVSKEFTFDAAHHLHCYEGKCKNLHGHTYKVVFGISGYPGETGLTVDFGHIKEIWQTQIEGYLDHQYLNETLPLMNTTAENMVVWLFEQMEHALQTEPYAALTEGGRTEFVRLYETPTSYAEARREWMIDE

SEQ ID NO: 23473 - protein, 148 aa, Paenibacillus paeoniae
  misc_feature (1)..(148): tr|A0A371PP14|A0A371PP14_9BACL 6-carboxy-5,6,7,8-tetrah ydropterin synthase OS=Paenibacillus paeoniae OX=229270 5 GN=DX130_11200 PE=3 SV=1
MLQQIYPSVPHFYLYELNKDFQFDAAHFVPAEAAGKCQRIHGHTYYANVTVVGDALDESGFLVNFAAIKGLIHGRFDHTLLNDDGESFDAANPDRFPTTEVVARTIWELVQRYLDGMPNKPVCLQVYLRETPTSYCIYRPKRKAASHE

SEQ ID NO: 23474 - protein, 219 aa, Paenibacillus pasadenensis
  misc_feature (1)..(219): tr|A0A2N5N116|A0A2N5N116_9BACL 6-carboxytetrahydropteri n synthase, Queuosine biosynthesis QueD, PTPS-I OS=Paen ibacillus pasadenensis OX=217090 GN=B8V81_2462 PE=4 SV= 1
MMHAIYPAPAHPFRYELNKEFHFAAAHYIPAEAAGRCSRVHGHTYYCNVTVGGDRLDECGFLVNFSEIKKLVQDRFDHRLLNEDELFGGPARLPNGGEAAEAVVQGSKAAEAMRHGKADAARGAWAERAAAVEAAGEQGAASGAVRHGKADAAWQGSAAIADSALDPERFPTTEVVARTVWQLVQEELDRRGNGARCLQVFLRETPSSYVIYRPEAAHG

SEQ ID NO: 23475 - protein, 157 aa, Paenibacillus pectinilyticus
  misc_feature (1)..(157): tr|A0A1C0ZV65|A0A1C0ZV65_9BACL 6-carboxytetrahydropteri n synthase QueD OS=Paenibacillus pectinilyticus OX=5123 99 GN=A8709_29535 PE=4 SV=1
MSYEIPRDVQELGRDIQENQLKYHHKSVLVSKEFTFDSAHHLHCYEGKCKSLHGHTYKLQVIMRGKVDSRGISIDFGDIKRITKERVIDRLDHKYLNDVLPPMNTTAENMVVWIYEEIHQALLEEKLYPAIALEEIRLWETPTSYAAITRSMMEEDV

SEQ ID NO: 23476 - protein, 163 aa, Paenibacillus peoriae
  misc_feature (1)..(163): tr|A0A0K2F5G3|A0A0K2F5G3_9BACL 6-pyruvoyl tetrahydrobio pterin synthase OS=Paenibacillus peoriae OX=59893 GN=AB E82_05615 PE=4 SV=1
MREPGTFRIVDKLQQFGTDIEHSQLRYHRKRVLVSKQFTFDAAHHLHCYEGKCKNLHGHTYIVVFGISGIPGETGLTLDFGDIKTIWKERLEPFLDHRYLNETLPPMNTTAENMVVWIFEQMESALTSDAYCNRVEGGRTEFVRLFETPTSYAEFRREWMLDE

SEQ ID NO: 23477 - protein, 163 aa, Paenibacillus peoriae
  misc_feature (1)..(163): tr|A0A2S6NWF0|A0A2S6NWF0_9BACL 6-carboxytetrahydropteri n synthase QueD OS=Paenibacillus peoriae OX=59893 GN=qu eD PE=4 SV=1
MREPGTFRIVDKLQQFGTDIEHSQLRYHRKRVLVSKQFTFDAAHHLHCYEGKCKNLHGHTYIVVFGISGIPGETGLTLDFGDIKTIWKERIEPFLDHRYLNETLPPMNTTAENMVVWIFEQMESALTSDAYCNRVEGGRTEFVRLFETPTSYAEFRREWMLDE

SEQ ID NO: 23478 - protein, 164 aa, Paenibacillus pini
  misc_feature (1)..(164): tr|W7YZ64|W7YZ64_9BACL Queuosine biosynthesis QueD OS=P aenibacillus pini JCM 16418 OX=1236976 GN=JCM16418_1687 PE=4 SV=1
MSRTPGEYRIVEHLQVLGEEIQISDLRYHNRRALVSKEFTFDAAHHLHAYEGKCKNLHGHTYKVVFGISALPNDIGITADFGLIKQIWKNHIETFLDHRYLNETLPLMNTTAENMVVWLYERMEEALNSTEYRPIIHEGRTEFVRLYETPTSYAEIRREWMHGE

SEQ ID NO: 23479 - protein, 148 aa, Paenibacillus pinisoli
  misc_feature (1)..(148): tr|A0A3A6PPP6|A0A3A6PPP6_9BACL 6-carboxy-5,6,7,8-tetrah ydropterin synthase OS=Paenibacillus pinisoli OX=127611 0 GN=queD PE=3 SV=1
MLQQIYPSAPHDYSYELNKDFQFDAAHFVPSEAAGKCQRIHGHTYYANVTVAGDELDESGFLVNFALIKELIHGRFDHTLLNDDSASFDGENPDRFPTTEVVARTVWELVQAYLDGMPNKPVCLQVYLRETPTSYCIYRPKRKAASHE

SEQ ID NO: 23480 - protein, 163 aa, Paenibacillus polymyxa
  misc_feature (1)..(163): tr|A0A1D7MLE9|A0A1D7MLE9_PAEPO 6-carboxytetrahydropteri n synthase QueD OS=Paenibacillus polymyxa OX=1406 GN=AO U00_18405 PE=4 SV=1
MREPGTFRIVDKLQQFGTDISHSQLRYHRKRVLVSKQFTFDAAHHLHCYEGKCKNLHGHTYIVVFGISGIPGETGLTLDFGDIKTIWKERIEPFLDHRYLNETLPPMNTTAENMVVWIFEQMESALTSDAYCNRVEGGRTEFVRLFETPTSYAEFRREWMLDE

SEQ ID NO: 23481 - protein, 163 aa, Paenibacillus polymyxa
  misc_feature (1)..(163): tr|E0RL57|E0RL57_PAEP6 6-pyruvoyl tetrahydrobiopterin s ynthase OS=Paenibacillus polymyxa (strain E681) OX=3495 20 GN=PPE_01079 PE=4 SV=1
MREPGTFRIVDKLQQLGTDIEHSQLRYHRKRVLVSKQFTFDAAHHLHCYEGKCKNLHGHTYVVVFGISGIPGETGLTLDFGDIKTIWKERIEPFLDHRYLNETLPPMNTTAENMVVWIFEQMESALTSDAYCNRVEGGRTEFVRLFETPTSYAEFRREWMLDE

SEQ ID NO: 23482 - protein, 163 aa, Paenibacillus polysaccharolyticus
  misc_feature (1)..(163): tr|A0A1G5GHK0|A0A1G5GHK0_9BACL 6-pyruvoyltetrahydropter in/6-carboxytetrahydropterin synthase OS=Paenibacillus polysaccharolyticus OX=582692 GN=SAMN05720606_105269 PE =4 SV=1
MREPGTFRIVERLQRIDQDILPTQLRYHRKRVLVSKEFTFDAAHHLHCYEGKCKNLHGHTYKVVFGISGYPGETGLTVDFGHIKDIWKSRIEGYLDHQYLNETLPLMNTTAENMVVWLFEQMEHALQTEPYAGLTDGARTEFVRLFETPTSYAEARREWMIDE

SEQ ID NO: 23483 - protein, 162 aa, Paenibacillus popilliae
  misc_feature (1)..(162): tr|M9LPH9|M9LPH9_PAEPP 6-pyruvoyl-tetrahydropterin synt hase OS=Paenibacillus popilliae ATCC 14706 OX=1212764 G N=PPOP_1818 PE=4 SV=1
MNRPGPFRIVEKLQQYGTDISRESLRYHKRRVLVSKEFTFDAAHHLHAYEGKCKNLHGHTYKAVFGLSGYTNDIGIALDFGDIKEIWKDRIETYLDHRYLNETLPPMNTTAENMVVWLYEQMSAALAEEPYRARCEGGRVEFVRLYETPTSYAEARREWMEQ

SEQ ID NO: 23484 - protein, 271 aa, Paenibacillus prosopidis
  misc_feature (1)..(271): tr|A0A368W084|A0A368W084_9BACL 6-pyruvoyltetrahydropter in/6-carboxytetrahydropterin synthase OS=Paenibacillus prosopidis OX=630520 GN=DFP97_10769 PE=4 SV=1
MIYLSRKLYFSASNRYRVEDWSDEENRQVFGLRSNPNGYGQDYTLEVMVKGPLDERSGIVVNITDIDKVVKHLIQEEFDGKFLNYEHPYFAERIPTTENIAEYLWNALENQIEGCELHKIRLHENHYLLSEKGSDKMVQLSRKYHFCAAHRLHSDLLTDEENKQIFGKCNNPHGHGHNYYLDVTVSGRPDSVTGMVINLAELDEKVNRIVIDKFDHKNLNLDTEEFRNINPTSDIMVKVIWEMLETSLPGLYKIGLWETEKNYFEYLGPGR

SEQ ID NO: 23485 - protein, 150 aa, Paenibacillus prosopidis
  misc_feature (1)..(150): tr|A0A368VW54|A0A368VW54_9BACL PreQ(0) biosynthesis pro tein QueD OS=Paenibacillus prosopidis OX=630520 GN=DFP9 7_110149 PE=4 SV=1
MMLQQIYPAANHPYQYELNKDLHFAAAHFVPAEEAGKCRLLHGHTYYANVTVAGDELDAAGFLVNFAVIKQLIHTRFDHSVLNDDTESFDDVNPDRFPTTEVVARTICEIVQKHLDGTANRPQCVQVYLRETPTSYCIYRPKRKAGSHVG

SEQ ID NO: 23486 - protein, 161 aa, Paenibacillus rhizosphaerae
  misc_feature (1)..(161): tr|A0A1R1F226|A0A1R1F226_9BACL 6-carboxytetrahydropteri n synthase QueD OS=Paenibacillus rhizosphaerae OX=29731 8 GN=BK138_05965 PE=4 SV=1
MTKTPGEFRIVDRLQKLGEDIQPSDLRYHHKRVLVSKEFTFDAAHHLHAYEGKCKNLHGHTYKAVFGISAFLDEVGITADFGLIKQIWKERIEPSLDHRYLNETLPPMNTTAENIVVWLFERMEEALNCGDYRIEGGRTEFVRLYETPTSYAEARREWMYE

SEQ ID NO: 23487 - protein, 158 aa, Paenibacillus rigui
  misc_feature (1)..(158): tr|A0A229UL18|A0A229UL18_9BACL 6-carboxytetrahydropteri n synthase QueD OS=Paenibacillus rigui OX=554312 GN=que D PE=4 SV=1
MEYEIPVKVQRLGVEIQEEQLKYHDKEVLVSKEFTFDSAHHLHCYDGKCKSLHGHTYKLQVFMRGKVDHRGITIDFADIKRIAKERILDRLDHRYLNDALPLMNTTAENMVVWMYEQLSSALKEEGLTPRVRLEEVRLWETPTSFAAVTASMMGDDSN

SEQ ID NO: 23488 - protein, 160 aa, Paenibacillus riograndensis
  misc_feature (1)..(160): tr|A0A132U9W1|A0A132U9W1_9BACL 6-pyruvoyl tetrahydrobio pterin synthase OS=Paenibacillus riograndensis OX=48393 7 GN=AMQ84_04845 PE=4 SV=1
MLGEVSVCKIFTFDSAHQLVGHKGKCSNLHGHTYKLEVVLKGKPLAEEGHSDEGFVADFSDIKATVQEGLLDHLDHAFLAMGNEPVLETLKNTGSKVALLSFRTTVENMSAYIAYKLIQASLPLYSVKLWETPTSWAEVLAADIPAEGPAYRLYGGCDCE

SEQ ID NO: 23489 - protein, 160 aa, Paenibacillus riograndensis
  misc_feature (1)..(160): tr|A0A0E4CX89|A0A0E4CX89_9BACL 6-pyruvoyl tetrahydrobio pterin synthase OS=Paenibacillus riograndensis SBR5 OX= 1073571 GN=PRIO_3711 PE=4 SV=1
MLGEVSVCKIFTFDSAHQLVGHKGKCSNLHGHTYKLEVVLKGKPLAEEGHSDEGFVADFSDIKATVQESLLDHLDHAFLAMGNEPVLETLKNTGSKIALLSFRTTVENMSAYIAYKLIQASLPLYSVKLWETPTSWAEVLAADIPAEGPAYRLYGGCDCE

SEQ ID NO: 23490 - protein, 159 aa, Paenibacillus sabinae
  misc_feature (1)..(159): tr|X4ZDF6|X4ZDF6_9BACL 6-pyruvoyl tetrahydrobiopterin s ynthase OS=Paenibacillus sabinae T27 OX=1268072 GN=PSAB _13390 PE=4 SV=1
MLGEVTVCKIFSFDAAHQLVGHKGKCANVHGHTYRLEVVLKGKPVAEEGRSDEGFVVDFGDIKALVKEQVVDLLDHAFLAKGDEPVLESLKESGSKTAVLSFRTTAENLASYITYTLKASGLPVYSVKLWETPTAWAEVLAADIPEEGPSYRLYGGCDL

SEQ ID NO: 23491 - protein, 164 aa, Paenibacillus selenitireducens
  misc_feature (1)..(164): tr|A0A1T2X349|A0A1T2X349_9BACL 6-carboxytetrahydropteri n synthase QueD OS=Paenibacillus selenitireducens OX=13 24314 GN=BVG16_24460 PE=4 SV=1
MNRTPGPFRIVEHLQKFGDDITKEQLRYHNRRVLVSKEFTFDAAHHLHAYEGKCKNLHGHTYKVVFGISGLPDQIGITVDFGTIKEIWKHEIEIFLDHRYLNETLPPMNTTAENMVVWLFEKMELALQSAPYQSTLIEARTEFVRLYETGTSYAEVRREWMYDA

SEQ ID NO: 23492 - protein, 163 aa, Paenibacillus silvae
  misc_feature (1)..(163): tr|A0A2W6NXD8|A0A2W6NXD8_9BACL 6-carboxytetrahydropteri n synthase QueD OS=Paenibacillus silvae OX=1325358 GN=q ueD PE=4 SV=1
MREPGTFRIVERLQRIDQDILPSQLRYHRKRVLVSKEFTFDAAHHLHCYEGKCKNLHGHTYKVIFGISGYPGDTGLTVDFGHIKDIWKSRIEGYLDHQYLNETLPLMNTTAENMVVWLFEQMEQALQSEPYAGLTDGARTEFVRLFETPTSYAEARREWMIDE

SEQ ID NO: 23493 - protein, 163 aa, Paenibacillus solani
  misc_feature (1)..(163): tr|A0A0M1P211|A0A0M1P211_9BACL 6-pyruvoyl tetrahydrobio pterin synthase OS=Paenibacillus solani OX=1705565 GN=A M231_02425 PE=4 SV=1
MSREPGAFRIVEHLQKLGEDIDASSLRYHRKRVLVSKEFTFDAAHHLHCYEGKCKNLHGHTYKVVFGISGIPNEVGITIDFGDIKDCWKTEIEPYLDHRYLNETLPPMNTTAENMVVWLFEKMEEALSSRECHEQQGARTEFVRLFETPTSYAEVRREWMIHE

SEQ ID NO: 23494 - protein, 159 aa, Paenibacillus sophorae
  misc_feature (1)..(159): tr|A0A1H8FNB0|A0A1H8FNB0_9BACL 6-pyruvoyltetrahydropter in/6-carboxytetrahydropterin synthase OS=Paenibacillus sophorae OX=1333845 GN=SAMN04487895_101182 PE=4 SV=1
MLHEVSVCKIFSFDAAHQLVGHKGKCANVHGHTYKLEVVLKGKPIAEEGRSDEGFVVDFGDIKELVKERVVDRLDHAFLAKGDEPVLEALKSSGSKTAVLSFRTTAENLASYIAYTLKTSGLPVYSVKLWETPTAWAEVLAGDIPEEGPSYRLYGGCDL

SEQ ID NO: 23495 - protein, 160 aa, Paenibacillus sp.
  misc_feature (1)..(160): tr|A0A1Q5XLA6|A0A1Q5XLA6_9BACL 6-pyruvoyl tetrahydrobio pterin synthase OS=Paenibacillus sp. P46E OX=1349436 GN =A3849_27630 PE=4 SV=1
MMGEVSVCKIFTFDSAHQLVGHKGKCSNLHGHTYKLEVVLKGKPLVEEGHSDEGFVIDFSDIKATVQESLVDHLDHAFLAMGNEPVLETLVNTGSKVALLSFRTTVENMSAYIAYRLMQASLPLYSVKLWETPTSWAEVLAADIPDEGPSYRLYGGCDCE

SEQ ID NO: 23496 - protein, 158 aa, Paenibacillus sp.
  misc_feature (1)..(158): tr|A0A0P9FF72|A0A0P9FF72_9BACL 6-pyruvoyl tetrahydrobio pterin synthase OS=Paenibacillus sp. A3 OX=1337054 GN=Q J48_32580 PE=4 SV=1
MTYEIPKKVQTLGEDIQRSELKYHDREVLVSKEFTFDSAHHLHCYEGKCKSLHGHTYKLQVVMRGKVDDRGITIDFADIKRIAKERIIDRLDHRYLNEVLPPMNTTAENMVVWMYEQLRDALRSEGLFPAVRLEEVRLWETPTSYAAVTARLMGDGPA

SEQ ID NO: 23497 - protein, 159 aa, Paenibacillus stellifer
  misc_feature (1)..(159): tr|A0A089LTF5|A0A089LTF5_9BACL 6-pyruvoyl tetrahydrobio pterin synthase OS=Paenibacillus stellifer OX=169760 GN =PSTEL_15070 PE=4 SV=1
MLHEVSVCKIFSFDAAHQLIGHKGKCANVHGHTYRLEVVLKGRPVTEEGRSDEGFVADFGDIKALVKARIVDKLDHAFMAKGDEPVLETLEASGSKVAVLSFRTTAENLAGYIAYTLKTSGLPVYSVKLWETPTAWAEVLAADIPEHGPAYCLNGGCDL

SEQ ID NO: 23498 - protein, 142 aa, Paenibacillus swuensis
  misc_feature (1)..(142): tr|A0A172TML4|A0A172TML4_9BACL 6-carboxy-5,6,7,8-tetrah ydropterin synthase OS=Paenibacillus swuensis OX=117851 5 GN=SY83_19700 PE=3 SV=1
MLFQYYPAPAHNYKYELHKDMNFSAAHFIPAASAGQCARMHGHTYVADITVAGNELNEAGFLVNFSDLKKLIHGRYDHTLLNDHEEFTGESSSEPERYPTTEVLARQVWETVEAYLQQFPNKATCLQVLVRETPTSYVIYRP

SEQ ID NO: 23499 - protein, 163 aa, Paenibacillus taichungensis
  misc_feature (1)..(163): tr|A0A329R4Q8|A0A329R4Q8_9BACL 6-carboxytetrahydropteri n synthase QueD OS=Paenibacillus taichungensis OX=48418 4 GN=queD PE=4 SV=1
MREPGTFRIVERLQRIGEDILPAQLRYHRKRVLVSKEFTFDAAHHLHCYEGKCKNLHGHTYKVVFGISGYPGETGLTVDFGHIKEIWKTQIEGYLDHQYLNETLPLMNTTAENMVVWLFEQMEHALQTEPYATLTEGGRTEFVRLYETPTSYAEARREWMIDE

SEQ ID NO: 23500 - protein, 163 aa, Paenibacillus taichungensis; identical to SEQ ID NO: 23472
  misc_feature (1)..(163): tr|A0A2V3S8V3|A0A2V3S8V3_9BACL 6-pyruvoyltetrahydropter in/6-carboxytetrahydropterin synthase OS=Paenibacillus taichungensis OX=484184 GN=DEU73_101352 PE=4 SV=1

SEQ ID NO: 23501 - protein, 160 aa, Paenibacillus taihuensis
  misc_feature (1)..(160): tr|A0A3D9RWR0|A0A3D9RWR0_9BACL 6-pyruvoyltetrahydropter in/6-carboxytetrahydropterin synthase OS=Paenibacillus taihuensis OX=1156355 GN=A8990_11587 PE=4 SV=1
MTYEIPKHIQQFGTDIEEQQLRYHNRRVLVSKEFTFDSAHHLHLYEGKCKSLHGHTYKLQTIMSGKTDKRGLTIDFADMKRIAKERVIDKLDHRYLNEVLPPMNTTAENMVVWIYEQIHEALVEEGHYPDIRIEEIRLWETPTSYAAVTRELMEADEHAG

SEQ ID NO: 23502 - protein, 163 aa, Paenibacillus terrae
  misc_feature (1)..(163): tr|G7VYT4|G7VYT4_PAETH 6-pyruvoyl tetrahydrobiopterin s ynthase OS=Paenibacillus terrae (strain HPL-003) OX=985 665 GN=HPL003_13615 PE=4 SV=1
MREPGPFRIVDKLQQFGTDIERSQLRYHRKRVLVSKQFTFDAAHHLHCYEGKCKNLHGHTYIVVFGISGIPGETGLTLDFGDIKTIWKERIEPYLDHRYLNETLPPMNTTAENMVVWIFEQMESALTSDAYRSRVEGGRTEFVRLFETPTSYAEFRREWMLDE

SEQ ID NO: 23503 - protein, 163 aa, Paenibacillus terrae
  misc_feature (1)..(163): tr|A0A4U2PWR4|A0A4U2PWR4_9BACL 6-carboxytetrahydropteri n synthase QueD OS=Paenibacillus terrae OX=159743 GN=qu eD PE=4 SV=1
MREPGPFRIVDKLQQFGTDIERSQLRYHRKRVLVSKQFTFDAAHHLHCYEGKCKNLHGHTYIVVFGISGIPGETGLTLDFGDIKTIWKERIEPYLDHRYLNETLPPMNTTAENMVVWIFEQMESALTSEAFRHRVECGRTEFVRLFETPTSYAEFRREWMLDE

SEQ ID NO: 23504 - protein, 164 aa, Paenibacillus thermophilus
  misc_feature (1)..(164): tr|A0A388MM03|A0A388MM03_9BACL 6-carboxytetrahydropteri n synthase OS=Paenibacillus thermophilus OX=1181891 GN= PbJCM17693_07470 PE=4 SV=1
MSRMPGEFRIVESLQKLGRDIGKEQLRYHRHRVLVSKEFTFDAAHHLHAYEGKCKNLHGHTYKAVFGISALPNEIGITVDFGTIKEIWKNEIEVYLDHRYLNETLPPMNTTAENMVVWLFEKMEAALGSETYRNVVLEGRTEFVRLYETPTSYAEVRREWMLDE

SEQ ID NO: 23505 - protein, 162 aa, Paenibacillus thiaminolyticus
  misc_feature (1)..(162): tr|A0A515LV77|A0A515LV77_PANTH 6-carboxytetrahydropteri n synthase QueD OS=Paenibacillus thiaminolyticus OX=492 83 GN=queD PE=4 SV=1
MNRPGPFRIVEKLQQYGTDISREALRYHMRRVLVSKEFTFDAAHHLHAYEGKCKNLHGHTYKVVFGLSSYTNDIGIALDFGDIKEIWKEQIEPYLDHRYLNETLPPMNTTAENMVVWLYEQMSAALAEEPYRTRCEGGRVEFVRLYETPTSYAEARREWMEL

SEQ ID NO: 23506 - protein, 162 aa, Paenibacillus thiaminolyticus
  misc_feature (1)..(162): tr|A0A3A3GBM1|A0A3A3GBM1_PANTH 6-carboxytetrahydropteri n synthase QueD OS=Paenibacillus thiaminolyticus OX=492 83 GN=queD PE=4 SV=1
MNRPGSFRIVEKLQQYGTDISRESLRYHKRRVLVSKEFTFDAAHHLHAYEGKCKNLHGHTYQAVFGLSGYTNDIGIALDFGDIKEIWKERIEPYLDHRYLNETLPLMNTTAENMVVWLYEQMSAALAEEPYRTRCEGGRVEFVRLYETPTSYAEARWEWMEP

SEQ ID NO: 23507 - protein, 158 aa, Paenibacillus tianmuensis; identical to SEQ ID NO: 23438
  misc_feature (1)..(158): tr|A0A1G4RPU2|A0A1G4RPU2_9BACL 6-pyruvoyltetrahydropter in/6-carboxytetrahydropterin synthase OS=Paenibacillus tianmuensis OX=624147 GN=SAMN04487970_10186 PE=4 SV=1

SEQ ID NO: 23508 - protein, 160 aa, Paenibacillus typhae
  misc_feature (1)..(160): tr|A0A1G8GVR1|A0A1G8GVR1_9BACL PreQ(0) biosynthesis pro tein QueD OS=Paenibacillus typhae OX=1174501 GN=SAMN052 16192_102214 PE=4 SV=1
MLGEVTVCKIFTFDSAHQLVGHKGKCSNLHGHTYKLEVMLKGKPLTEPGHSDEGFVIDFSDIKATVQQQLVDRLDHAFLAMGNEPVLETLNQTGSKVALLGFRTTVENMSAYIAHRLKLADLPLYSVKLWETPTSWAEVLASDIPEDGPAYRIHGGCDCE

SEQ ID NO: 23509 - protein, 158 aa, Paenibacillus tyrfis
  misc_feature (1)..(158): tr|A0A081P6F9|A0A081P6F9_9BACL 6-pyruvoyl tetrahydrobio pterin synthase OS=Paenibacillus tyrfis OX=1501230 GN=E T33_35045 PE=4 SV=1
MTYEIPKKVQTLGEDIQRSELKYHDREVLVSKEFTFDSAHHLHCYEGKCKSLHGHTYKLQVVMRGKVDDRGISIDFVDIKQIAKERIIDRLDHRYLNEVLPPMNTTAENMVVWMYEQLREALRSEGLFPAVRLEEVRLWETPTSYAAVTARLMGDDPA

SEQ ID NO: 23510 - protein, 145 aa, Paenibacillus tyrfis
  misc_feature (1)..(145): tr|A0A081NU68|A0A081NU68_9BACL 6-carboxy-5,6,7,8-tetrah ydropterin synthase OS=Paenibacillus tyrfis OX=1501230 GN=ET33_28395 PE=3 SV=1
MLQQIYPSVNHSFVYELNKDLQFAAAHYIPSDLAGKCSRIHGHTYFMNVCIVGDVLDDTGFLVNFSDLKALIHDRFDHKLINEDPLFNEEQGNIFPSTEVVARTAWTIIQDYLDSLPNQPKCLQIFLRETPTSYVIYRPRIGDRS

SEQ ID NO: 23511 - protein, 163 aa, Paenibacillus uliginis
  misc_feature (1)..(163): tr|A0A1X7HMY5|A0A1X7HMY5_9BACL 6-pyruvoyltetrahydropter in/6-carboxytetrahydropterin synthase OS=Paenibacillus uliginis N3/975 OX=1313296 GN=SAMN05661091_4685 PE=4 SV =1
MTRQPGAFRIVEQLQKLGEDIDTGSLRYHRKRVLVSKEFTFDAAHHLHAYEGKCKNLHGHTYKVVFGISGKPDEVGITVDFGQIKEIWKSAIEPFLDHRYLNETLPPMNTTAENMVVWLYEQMELALTQQETFTQQETRTEFVRLYETPTSYAEVRREWMEHE

SEQ ID NO: 23512 - protein, 163 aa, Paenibacillus vortex
  misc_feature (1)..(163): tr|A0A2R9SZ10|A0A2R9SZ10_9BACL 6-pyruvoyl tetrahydrobio pterin synthase OS=Paenibacillus vortex V453 OX=715225 GN=PVOR_07295 PE=4 SV=1
MNKVPGQFVIVDALQKFGMDITENQLKYHQRRVLVSKEFTFDAAHHLHAYEGKCKNLHGHTYKVVFGISGYTNEIGLTIDFSMLKTIWREQIEPFLDHRYLNETLPLMNTTAENIVVWLYEQMEAALSTEKYSSKEVDARTEFVRLFETPTSYAEARREWMAD

SEQ ID NO: 23513 - protein, 206 aa, Paenibacillus vortex
  misc_feature (1)..(206): tr|A0A2R9SYG4|A0A2R9SYG4_9BACL 6-pyruvoyl tetrahydrobio pterin synthase OS=Paenibacillus vortex V453 OX=715225 GN=PVOR_09220 PE=4 SV=1
MSREPGTFRIVEHLQKLGEDIDAGSLRYHRKRVLVSKEFTFDAAHHLHCYEGKCKNLHGHTYKVVFGISGIPNEVGITVDFGDIKDCWKTDIEPYLDHRYLNETLPPMNTTAENMVVWLFEKMEDALRSKESHEQQGHTNRIRSPVRDADQLRRGQTGVDDPVNDQHVTTANDTGPTASSAAANGGPGRFPSWKSSVPPFKVKAWS

SEQ ID NO: 23514 - protein, 157 aa, Paenibacillus whitsoniae
  misc_feature (1)..(157): tr|A0A430J710|A0A430J710_9BACL 6-carboxytetrahydropteri n synthase QueD OS=Paenibacillus whitsoniae OX=2496558 GN=queD PE=4 SV=1
MSYDIPSDIQRLGRDIQENQLKYHHKSVLVSKEFTFDSAHHLHCYEGKCKSLHGHTYKLQVIMRGKVDHRGIAIDFGDIKRIAKERVIDRLDHRYLNEVLPPMNTTAENMVVWMYEEIHRGLLDEGLHPGIQLEEIRLWETPTSYAAITRAMMEEDV

SEQ ID NO: 23515 - protein, 136 aa, Paenibacillus whitsoniae
  misc_feature (1)..(136): tr|A0A430JIZ9|A0A430JIZ9_9BACL 6-carboxy-5,6,7,8-tetrah ydropterin synthase OS=Paenibacillus whitsoniae OX=2496 558 GN=queD PE=3 SV=1
MNTYFPFTPHAFRYELHKEMHLSAAHFIPAESAGKCQRIHGHTYQIDLMIVGDELDANGFLIDFKLLKSIVHDRYDHTLLNEHPEFRVLHPTTEVMAKTIYTFIQEYLDGTSNKPSCLQVIVRETPTSYVVYRPKK

SEQ ID NO: 23516 - protein, 160 aa, Paenibacillus wynnii
  misc_feature (1)..(160): tr|A0A098M578|A0A098M578_9BACL 6-pyruvoyl tetrahydrobio pterin synthase OS=Paenibacillus wynnii OX=268407 GN=PW YN_21430 PE=4 SV=1
MLNEVSVCKIFTFDSAHQLVGHKGKCSNLHGHTYKLEVVLKGRPLTTEGHSDEGFVIDFSDMKTLVKEAVVDRLDHSFLAMGNEPVLETLVSTGSKVSHLSFRTTVENMSCYIAYQLKLAGLPLYSVKLWETPTAWAEVLAEDIPDEGPAYRLYGGCDCE

SEQ ID NO: 23517 - protein, 160 aa, Paenibacillus xerothermodurans
  misc_feature (1)..(160): tr|A0A2W1NB90|A0A2W1NB90_9BACL 6-carboxytetrahydropteri n synthase QueD OS=Paenibacillus xerothermodurans OX=19 77292 GN=queD PE=4 SV=1
MEYHIPMKVQQLGVDIDKSQLKYHDKEVLVSKEFTFDSAHHLHCYEGKCKSLHGHTYKLQVIMRGKVDERGITIDFADIKRIAKERVIDPLDHRYLNEVLPLMNTTAENMVVWMYEQLNTAVREEGLYPQVRVEEVRLWETPTSYAAVTAAMMGDAAGER

SEQ ID NO: 23518 - protein, 163 aa, Paenibacillus xylanexedens
  misc_feature (1)..(163): tr|A0A3N6BZ03|A0A3N6BZ03_9BACL 6-carboxytetrahydropteri n synthase OS=Paenibacillus xylanexedens OX=528191 GN=E DO6_05155 PE=4 SV=1
MREPGTFRIVEHLQRIGEDILPTQLRYHRKRVLVSKEFTFDAAHHLHCYEGKCKNLHGHTYKVIFGISGYPGETGLTVDFGHIKDIWKTQIEGYLDHQYLNETLPLMNTTAENMVVWLFEQMEHALQTEPYAGLTDGGRTEFVRLFETPTSYAEARREWMIHE

SEQ ID NO: 23519 - protein, 163 aa, Paenibacillus xylanexedens; identical to SEQ ID NO: 23413
  misc_feature (1)..(163): tr|A0A1L5LLL3|A0A1L5LLL3_9BACL 6-carboxytetrahydropteri n synthase QueD OS=Paenibacillus xylanexedens OX=528191 GN=BS614_09935 PE=4 SV=1

SEQ ID NO: 23520 - protein, 169 aa, Paenibacillus yonginensis
  misc_feature (1)..(169): tr|A0A1B1MWP1|A0A1B1MWP1_9BACL 6-pyruvoyl tetrahydrobio pterin synthase OS=Paenibacillus yonginensis OX=1462996 GN=AWM70_02435 PE=4 SV=1
MSQVNQSRRTAGEFRIVESLQQFGRDITKDQLRYHNRRVLVSKEFTFDAAHHLHAYEGKCKNLHGHTYIVVFGISGLPDETGITVDFGVIKEIWKNEIEGYLDHRYLNETLPPMNTTAENMVVWLYEQMEQALEQANAEGRMIEARTEFVRLFETPTSFAEIRREWMQA

SEQ ID NO: 23521 - protein, 126 aa, Paeniglutamicibacter gangotriensis
  misc_feature (1)..(126): tr|M7MYL8|M7MYL8_9MICC 6-pyruvoyl tetrahydropterin synt hase OS=Paeniglutamicibacter gangotriensis Lz1y OX=1276 920 GN=ADIAG_00139 PE=4 SV=1
MYSLTVRDHVMIAHSLPDPFFGPAQSLHGATLVVEATWRRAELGPQSVVMDIGAATSMLSEVLETLRYSNLDEHPAFAGRLSTTEAIAGYISTELCVRFDTTQYAGLEVLLREHPDAWASHDIAFD

SEQ ID NO: 23522 - protein, 117 aa, Paenimaribius caenipelagi
  misc_feature (1)..(117): tr|A0A547PUK6|A0A547PUK6_9RHOB 6-carboxy-5,6,7,8-tetrah ydropterin synthase OS=Paenimaribius caenipelagi OX=248 9174 GN=queD PE=3 SV=1
MYRIRKEFHFSASHQLTHLPDDHQCARLHGHNYIVVVELASETLNADGFVRDYHDLKPLKVYIDDTFDHRHLNDVMDVPSTAENMAKHFYDWCKSRWPETSAVQVSETPKTWAEYRP

SEQ ID NO: 23523 - protein, 79 aa, Paenisporosarcina antarctica
  misc_feature (1)..(79): tr|A0A4P7A148|A0A4P7A148_9BACL Uncharacterized protein OS=Paenisporosarcina antarctica OX=417367 GN=E2636_1630 5 PE=4 SV=1
MFGFKIVDGLQKYGGDLTYWNELLPPVNTTAENMVYWIYKKMEEGIDSKPKIVEGIAVEFARLYETPTSYAEFRMEWDK

SEQ ID NO: 23524 - protein, 141 aa, Paenisporosarcina antarctica
  misc_feature (1)..(141): tr|A0A4P6ZV73|A0A4P6ZV73_9BACL 6-carboxy-5,6,7,8-tetrah ydropterin synthase OS=Paenisporosarcina antarctica OX= 417367 GN=queD PE=3 SV=1
MIQQFYPQTPHTYRFELNKDMHLSAAHFIPHDDAGNCQYLHGHTYFINITIAGDQLDEMGFLIDFKIIKNLVHKRYDHTVLNNHEEFEDKFPTTEQVAEEIWKTIQNNLKTLVHEPKCIQVLVRETPTSYVVYRPRAEDLL

SEQ ID NO: 23525 - protein, 141 aa, Paenisporosarcina sp.
  misc_feature (1)..(141): tr|A0A2T6KGI9|A0A2T6KGI9_9BACL 6-carboxy-5,6,7,8-tetrah ydropterin synthase OS=Paenisporosarcina sp. OV554 OX=2 135694 GN=C8K15_10558 PE=3 SV=1
MIQQFYPQTPHSYRFELNKDMHLSAAHFIPHDDAGNCQYMHGHTYFINITIAGDQLDEMGFLIDFKVIKNLVHKRYDHTVLNDHPEFKQKFPTTEQVAHEIWMTIHNKLKTLPHQPRCLQVVVRETPTSYVVYRPKAEELL

SEQ ID NO: 23526 - protein, 141 aa, Paenisporosarcina sp.
  misc_feature (1)..(141): tr|S2XXE3|S2XXE3_9BACL 6-carboxy-5,6,7,8-tetrahydropter in synthase OS=Paenisporosarcina sp. HGH0030 OX=1078085 GN=HMPREF1210_03259 PE=3 SV=1
MIQQFYPQTPHTYRFELNKDMHLSAAHFIPHADAGNCQYMHGHTYFINITIAGDELDEMGFLIDFKVIKHLIHKKYDHTVLNDHPEFKQNNPTTEQVAQVIWTTIQQKLMTLSNQPKCIQVVVRETPTSYVVYRPKAEDLL

SEQ ID NO: 23527 - protein, 120 aa, Pajaroellobacter abortibovis
  misc_feature (1)..(120): tr|A0A1L6MV22|A0A1L6MV22_9DELT 6-carboxy-5,6,7,8-tetrah ydropterin synthase OS=Pajaroellobacter abortibovis OX= 1882918 GN=BCY86_00420 PE=3 SV=1
MQLVHEFRFEAAHRLPCVPAGHKCARLHGHSFRIEVAVQGPVDENTGWLIDFEQIHQAWEPLQEMLDHHYLNEIDGLQNPTSEMLARWIWDRLYPTLPILTQITVFETCNARCEYRRENY

SEQ ID NO: 23528 - protein, 116 aa, Paludibacter propionicigenes
  misc_feature (1)..(116): tr|E4T1V7|E4T1V7_PALPW 6-carboxy-5,6,7,8-tetrahydropter in synthase OS=Paludibacter propionicigenes (strain DSM 17365 / JCM 13257 / WB4) OX=694427 GN=Palpr_0542 PE=3 SV=1
MYTISKEFHFSASHQLHGLKNDHPCGRIHGHNYTLKIFLRGEPNKDGFVQDYNDLKPISDWVNNTLDHRHLNDVFDFQTSVENMSKYIFDLFKPEFPLLVAVEMSETPKTNCRYEE

SEQ ID NO: 23529 - protein, 340 aa, Paludibacterium purpuratum
  misc_feature (1)..(340): tr|A0A4R7B026|A0A4R7B026_9NEIS 6-pyruvoyltetrahydropter in/6-carboxytetrahydropterin synthase OS=Paludibacteriu m purpuratum OX=1144873 GN=DFP86_11396 PE=4 SV=1
MHTTFLLAATGFEAARRIPGATDERLINTHGHSFRALARADATHTDQATLEAALATAAAPLHYAQINDTLADPDDLGIARYLADSISSPVTLALQSSMRRGALVDNNLALVSLTVSFEAAHQLPQVPAGHKCGRLHGHRFGVRLFADAARCDHMRLEAAWQPLFERLNHRYLNDIDGLDNPTSEVLAKWLFERLRDTLPGLAWVEVRETHSAGSQYDGQHFNIWKEQRFESAVPFAQDGAYTGHSYLIRLMLTGDLDRTMGWVLDFGDVKDRFKPVYRQLDHNPLDRLSGIRNGKSTSVAEWVHVHLAPLVPELSRIDLYDTAERGVSLTFDHDMRWPLL

SEQ ID NO: 23530 - protein, 158 aa, Paludifilum halophilum
  misc_feature (1)..(158): tr|A0A235B779|A0A235B779_9BACL 6-carboxytetrahydropteri n synthase QueD OS=Paludifilum halophilum OX=1642702 GN =queD PE=4 SV=1
MEFKIPDQVEKLGVDIRRDELKYHHKRVAVTKAFTFDAAHHLHCYEGKCKNLHGHTYKLVITFSGYVNEIGIVVDFSDVKRMFKEEIESRLDHRYLNEVLPKMNTSAENMIVWIWERLRDRIRGEDWAGRGIRLEELTLYETPTSFATLKREWMEADA

SEQ ID NO: 23531 - protein, 137 aa, Paludisphaera borealis
  misc_feature (1)..(137): tr|A0A1U7CKR9|A0A1U7CKR9_9BACT Uncharacterized protein OS=Paludisphaera borealis OX=1387353 GN=BSF38_00958 PE= 4 SV=1
MYRVTREIEFCYGHRLLNYDGKCRHLHGHNGRAVVTLEGSRLDSRGMLVDFGEIKQTIQRWIDEQLDHNMLLCREDPLLPLLRERGERVFVMDANPTAENIARLIYDHGRGAGLPISEVVLWETPNCFAAYSGEDDR

SEQ ID NO: 23532 - protein, 163 aa, Paludisphaera borealis
  misc_feature (1)..(163): tr|A0A1U7CIM7|A0A1U7CIM7_9BACT Uncharacterized protein OS=Paludisphaera borealis OX=1387353 GN=BSF38_00160 PE= 4 SV=1
MSSSRYKVRVTKDFLVFSSGHFITFEGNQCERVHGHNYRTAVEVDGDLDGNHYVVDFIALRDMTRTICDELDHRMLLPAGSPYIRLEDDGPNIVARYRDRYWSFPRDECVVLPIANTTAELLAKYIADRLLVAMRARGWADPRAVRVEVEECFGQSAEVELTL

SEQ ID NO: 23533 - protein, 281 aa, Panacagrimonas perspica
  misc_feature (1)..(281): tr|A0A4R7NXE0|A0A4R7NXE0_9GAMM 6-pyruvoyl tetrahydropte rin synthase-like protein OS=Panacagrimonas perspica OX =381431 GN=B1810_12360 PE=4 SV=1
MSTLFVEHLTVIDCAYLDAARGLVGQSWIVDVELEGDLDQQSMVLDFGEVKRRLKRAIDSGLDHTLIVPTQAPELSLAHTGDISELQFRSALGAYEHRSPALAITPVDAAAIDEAAVTAHLRTSLAPILPANVARLDLRLRTEVIDGASYQYVHGLKKHAGQCQRIAHGHRSRIEMRVDGTRDAALEQDIALAWADIYLGTREDLITRANGELRFAYSAPEGRFELALPEAHAELLDADTTVERIAEHLAWVGAARLPGKTVEARAYEGVMKGAVGRVRGS

SEQ ID NO: 23534 - protein, 137 aa, Panacibacter ginsenosidivorans
  misc_feature (1)..(137): tr|A0A5B8VG28|A0A5B8VG28_9BACT 6-carboxy-5,6,7,8-tetrah ydropterin synthase OS=Panacibacter ginsenosidivorans O X=1813871 GN=FRZ67_22785 PE=3 SV=1
MSKKVAVYRKEHFNAAHRLHNPDWTDEMNDKVFGKCNNPNYHGHNYELEVKLVGEPDERTGYVMDMKELSNIINATVLERFDHKNLNLDTEEFKYLNPTAENIVVVIYELLRAKIDSRFDLQVRLYETPRNFVEYPV

SEQ ID NO: 23535 - protein, 136 aa, Panacibacter ginsenosidivorans
  misc_feature (1)..(136): tr|A0A5B8VHC2|A0A5B8VHC2_9BACT 6-carboxytetrahydropteri n synthase OS=Panacibacter ginsenosidivorans OX=1813871 GN=FRZ67_22790 PE=4 SV=1
MVYLTRLEHFNAAHKLYNPDWSKEKNEEMFGACANENWHGHNFDLYVTIKGDPNQETGFLMDVKKLKLIIKEHVIVKVDHKNLNLDVEFLKGKMCSTENLAIGIWNQLTPNLPQNVQLHCVKLYETPRIYVEYFGD

SEQ ID NO: 23536 - protein, 136 aa, Panacibacter sp.
  misc_feature (1)..(136): tr|A0A4U3LCC2|A0A4U3LCC2_9BACT 6-carboxy-5,6,7,8-tetrah ydropterin synthase OS=Panacibacter sp. 17mud1-8 OX=257 5867 GN=FC093_00330 PE=3 SV=1
MVYLTRIEHFNAAHKLYNPRWSKEKNEELFGVCANENWHGHNFDLHVTIKGTPDPDTGFLMDAKKLSKLINEKILEQLDHKNLNLDVPFLKDMMCTTENLATAIWQQLTPHLPSEVQLHAIKLYETPRIYVEYFGE

SEQ ID NO: 23537 - protein, 137 aa, Panacibacter sp.
  misc_feature (1)..(137): tr|A0A4U3KVX1|A0A4U3KVX1_9BACT 6-carboxytetrahydropteri n synthase OS=Panacibacter sp. 17mud1-8 OX=2575867 GN=F C093_16510 PE=4 SV=1
MSKVAVCRVEHFNAAHRLHVPEWSDAVNTTVFGKCNNPNYHGHNYQLIVRVTGEPNATTGYVMDMKVLSDIIKAEVLQRFDHKNLNLDTQEFKNLNPTAENIAITIYNLLRARIEPALELKITLYETERNFVEYPAS

SEQ ID NO: 23538 - protein, 147 aa, Pandoraea apista
  misc_feature (1)..(147): tr|A0A0B5FF22|A0A0B5FF22_9BURK 6-carboxytetrahydropteri n synthase QueD OS=Pandoraea apista OX=93218 GN=queD PE =4 SV=1
MITITRKLEFDAGHRIPDHRSQCRNLHGHRYVLEITLAGEVSRESGASDNGMVMDFADVKALANEHLVSVWDHAFLVYEGDTAVRNFLETMPDHKTVIFDRVPTVENLAAAAFDKLSSVFDSHYGHDLRLVRLRLYETPNCWSEVTA

SEQ ID NO: 23539 - protein, 161 aa, Pandoraea apista
  misc_feature (1)..(161): tr|A0A0G4JFL5|A0A0G4JFL5_9BURK 6-carboxy-5,6,7,8-tetrah ydropterin synthase OS=Pandoraea apista OX=93218 GN=que D PE=4 SV=1
MSREGADSPHGVRARALKRTAPRSTRNLAVVASRAQFTLSRSFVFEAAHTLSRRDIDPPSIDASRRIHGHSYRATVEVTGNPQGESGMVLDLACLDAELTRVRERLDHRLLDDVAGLGPATLENLCAFIWRALAPTLEGLSRVTVSRDARGDACSLTLRER

SEQ ID NO: 23540 - protein, 147 aa, Pandoraea faecigallinarum
  misc_feature (1)..(147): tr|A0A0H3WSV5|A0A0H3WSV5_9BURK 6-carboxy-5,6,7,8-tetrah ydropterin synthase OS=Pandoraea faecigallinarum OX=656 179 GN=AB870_12190 PE=3 SV=1
MITITRKLEFDAGHRIPDHRSQCRNLHGHRYVLEITLAGEVSRESGASDNGMVMDFADVKALANEHLVSVWDHAFLVYEGDTAVRNFLETMPGHKTVVFDRVPTVENLAAAAFDKLSHVFDAHYGRDLRLVRLRLYETPNCWSEVTA

SEQ ID NO: 23541 - protein, 161 aa, Pandoraea fibrosis
  misc_feature (1)..(161): tr|A0A5E4U5X7|A0A5E4U5X7_9BURK 6-carboxytetrahydropteri n synthase OS=Pandoraea fibrosis OX=1891094 GN=PFI31113 _01813 PE=4 SV=1
MSRGGSGESPDGRERALKRTTQRKTRSLAVVESRAQFTLSRSFVFEAAHTLIRRDIDPPSIDASRRIHGHSYRATVEVTGDPQGESGMVLDLGRLDAELTRVRERLDHRLLDDVAGLGPATLENLCAFLWRALAPTLDGLSRVTVSRDARGDACSLTLRER

SEQ ID NO: 23542 - protein, 147 aa, Pandoraea fibrosis
  misc_feature (1)..(147): tr|A0A0B3TSF0|A0A0B3TSF0_9BURK 6-carboxy-5,6,7,8-tetrah ydropterin synthase OS=Pandoraea fibrosis OX=1891094 GN =PJ20_08130 PE=3 SV=1
MITITRKLEFDAGHRIPDHRSQCRNLHGHRYVLEITLAGEVSRESGASDNGMVMDFADVKALANEHLVSVWDHAFLVYEGDTAVRNFLETMPDHKTVVFDRVPTVENLAAAAFDKLSSVFDTHYGHDLRLVRLRLYETPNCWSEVTA

SEQ ID NO: 23543 - protein, 147 aa, Pandoraea norimbergensis
  misc_feature (1)..(147): tr|A0A0U2MCU0|A0A0U2MCU0_9BURK 6-carboxy-5,6,7,8-tetrah ydropterin synthase OS=Pandoraea norimbergensis OX=9321 9 GN=AT302_08955 PE=3 SV=1
MITITRKLEFDAGHRIPDHRSQCRNLHGHRYVLEITLAGEVSRESGASDNGMVMDFADVKALANEHLVSVWDHAFLVYEGDTAVRDFLATMPDHKTVVFDRVPTVENLAAAAFDKLSGVFDAHYGRDLRLVRLRLYETPNCWSEVTA

SEQ ID NO: 23544 - protein, 134 aa, Pandoraea norimbergensis
  misc_feature (1)..(134): tr|A0A0U2Y7P8|A0A0U2Y7P8_9BURK 6-carboxy-5,6,7,8-tetrah ydropterin synthase OS=Pandoraea norimbergensis OX=9321 9 GN=AT302_10030 PE=3 SV=1
MNGSADRAQFTLSRSFVFEAAHTLARRDIDPPSIDASRRIHGHSYRATVEVTGKPQGETGMVLDLAVFDAALAQVCERLDHRLLDDVAGLGPATLENLCSFIWRSLAPRLVGLSRVTVSRDARGDACSLVIGPA

SEQ ID NO: 23545 - protein, 123 aa, Pandoraea oxalativorans
  misc_feature (1)..(123): tr|A0A0E3U9H1|A0A0E3U9H1_9BURK 6-carboxy-5,6,7,8-tetrah ydropterin synthase OS=Pandoraea oxalativorans OX=57373 7 GN=MB84_06405 PE=3 SV=1
MSRSFVFEAAHTLNRRDIDPPSMDASRRIHGHSYRATVEVTGAPMGESGMVLDLAQLDAALTRVSERLDHRLLDDVAGLGPATLENLCAFIWRALAPHLVGLSRVTVSRDARGDACSLSMREA

SEQ ID NO: 23546 - protein, 147 aa, Pandoraea oxalativorans
  misc_feature (1)..(147): tr|A0A0E3U5Y2|A0A0E3U5Y2_9BURK 6-carboxy-5,6,7,8-tetrah ydropterin synthase OS=Pandoraea oxalativorans OX=57373 7 GN=MB84_05280 PE=3 SV=1
MITITRKLEFDAGHRIPDHRSQCRNLHGHRYVLEITLAGEVSRESGASDNGMVMDFADVKALANEHLVSVWDHAFLVYEGDTAVRTFLETMPDHKTVVFDRVPTVENLAAAAFDKLSHVFDAHYGRDLRLVRLRLYETPNCWSEVTA

SEQ ID NO: 23547 - protein, 147 aa, Pandoraea pnomenusa
  misc_feature (1)..(147): tr|A0A518QXB3|A0A518QXB3_9BURK 6-carboxy-5,6,7,8-tetrah ydropterin synthase OS=Pandoraea pnomenusa OX=93220 GN= queD PE=3 SV=1
MITITRKLEFDAGHRIPDHRSQCRNLHGHRYVLEITLAGEVSRESGASDNGMVMDFADVKALANQHLVSVWDHAFLVYEGDTAVRAFLETMPDHKTVVFDRVPTVENLAAAAFETLSGVFDAHYGRDLRLVRLRLYETPNCWSEVTA

SEQ ID NO: 23548 - protein, 147 aa, Pandoraea pnomenusa
  misc_feature (1)..(147): tr|A0A378YR13|A0A378YR13_9BURK 6-carboxy-5,6,7,8-tetrah ydropterin synthase OS=Pandoraea pnomenusa OX=93220 GN= NCTC13160_02978 PE=3 SV=1
MITITRKLEFDAGHRIPDHRSQCRNLHGHRYVLEITLAGEVSRESGASDNGMVMDFADVKALANEHLVSVWDHAFLVYEGDTAVRAFLETMPDHKTVVFDRVPTVENLAAAAFETLSGVFDAHYGRDLRLVRLRLYETPNCWSEVTA

SEQ ID NO: 23549 - protein, 147 aa, Pandoraea pulmonicola
  misc_feature (1)..(147): tr|A0A378Z6V3|A0A378Z6V3_9BURK 6-carboxy-5,6,7,8-tetrah ydropterin synthase OS=Pandoraea pulmonicola OX=93221 G N=NCTC13159_02402 PE=3 SV=1
MITITRKLEFDAGHRIPDHRSQCRNLHGHRYVLEITLAGEVSRESGASDNGMVMDFADVKALANEHLVSVWDHAFLVYEGDTAVRTFLETMPDHKTVVFDRVPTVENLAAAAFDKLSGVFDAHYGRDLRLVRLRLYETPNCWSEVTA

SEQ ID NO: 23550 - protein, 157 aa, Pandoraea pulmonicola
  misc_feature (1)..(157): tr|A0A378Z4A0|A0A378Z4A0_9BURK 6-carboxy-5,6,7,8-tetrah ydropterin synthase OS=Pandoraea pulmonicola OX=93221 G N=queD PE=4 SV=1
MSRGRTGVASGTRTKAVERMDATGPAPQRRAQFTLSRSFVFEAAHTLARRGIDPPSIDASRRIHGHSYRATIEVTGSPQGATGMVLDLARLDAELAHVSERLDHRLLDDVAGLGPATLENLCAFIWRSLAPRLSGLTRVTVSRDARGDACSLTMQAT

SEQ ID NO: 23551 - protein, 161 aa, Pandoraea sp.
  misc_feature (1)..(161): tr|R7WV72|R7WV72_9BURK Uncharacterized protein OS=Pando raea sp. SD6-2 OX=1286093 GN=C266_23136 PE=4 SV=1
MSREGSPKSRGERERPLKRTVERGPRSLAVTQKRAQFTLSRSFVFEAAHTLIRHDIDSPSIDASRRIHGHSYRATVEVTGSPQGESGMVLDLACLDAQLRRVSERLDHRLLDDVAGLGPATLENLCAFIWRALAPHLAGLSRVTVSRDARGDACSLTMRDA

SEQ ID NO: 23552 - protein, 147 aa, Pandoraea sp.
  misc_feature (1)..(147): tr|A0A522ES19|A0A522ES19_9BURK 6-carboxytetrahydropteri n synthase QueD OS=Pandoraea sp. OX=1883445 GN=queD PE= 4 SV=1
MITITRKLEFDAGHRIPDHRSQCRNLHGHRYVLEITLCGEIMQHEGASDNGMVMDFADVKTLAREHLIDVWDHAFLVYENDAAVRGFLDSLPDHKTVVLDRVPTVENLAAVAFDVLAAVFDAHYGVNLRLTRVRLYETPNCWAEVCR

SEQ ID NO: 23553 - protein, 164 aa, Pandoraea sputorum
  misc_feature (1)..(164): tr|A0A239S727|A0A239S727_9BURK 6-carboxy-5,6,7,8-tetrah ydropterin synthase OS=Pandoraea sputorum OX=93222 GN=q ueD PE=4 SV=1
MSRTHAQKPVAARQRALKRTPEPSDRHARAHASTETRAQFTLSRSFVFEAAHTLNRRDIDPPSMDASRRIHGHSYRATVEVTGAPMGESGMVLDLAQLDAALTRVSERLDHRLLDDVAGLGPATLENLCAFIWRALAPHLVGLSRVSVSRDARGDACSLSMREA

SEQ ID NO: 23554 - protein, 164 aa, Pandoraea sputorum
  misc_feature (1)..(164): tr|A0A5E5B6R9|A0A5E5B6R9_9BURK 6-carboxytetrahydropteri n synthase OS=Pandoraea sputorum OX=93222 GN=PSP31120_0 2946 PE=4 SV=1
MSRTHAQKPVAARQRALKRTPEPSDRSARAHASTETRAQFTLSRSFVFEAAHTLNRRDIDPPSMDASRRIHGHSYRATVEVTGAPMGESGMVLDLAQLDAALTRVSERLDHRLLDDVAGLGPATLENLCAFIWRALAPHLVGLSRVSVSRDARGDACSLSMREA

SEQ ID NO: 23555 - protein, 147 aa, Pandoraea terrae
  misc_feature (1)..(147): tr|A0A5E4TA10|A0A5E4TA10_9BURK 6-carboxy-5,6,7,8-tetrah ydropterin synthase OS=Pandoraea terrae OX=1537710 GN=P TE30175_01251 PE=3 SV=1
MITITRKLEFDAGHRIPDHRSQCRNLHGHRYVLEITLTGEVSRQAGASDNGMVMDFADVKALANEHLVSVWDHAFIVYEGDAAVRDFLASLPDHKTVVLDRVPTVENLAAVAFDKLAAVFDAHYGRDLRLMRLRLYETPNCWAEVTA

SEQ ID NO: 23556 - protein, 121 aa, Pandoraea thiooxydans
  misc_feature (1)..(121): tr|A0A0G3EX98|A0A0G3EX98_9BURK 6-carboxy-5,6,7,8-tetrah ydropterin synthase OS=Pandoraea thiooxydans OX=445709 GN=ABW99_16830 PE=3 SV=1
MNYELSQKFYFEAAHTLHREIDAEGSRRVHGHTYHAQIFVRGRPDPSTRMVADLGQLRREIEHVRDQLDHRFLDEVPGLGAPTLEGLCAFIYRSLSRALPNISKVRVERPASGDCCDLDPA

SEQ ID NO: 23557 - protein, 147 aa, Pandoraea thiooxydans
  misc_feature (1)..(147): tr|A0A0G3EU58|A0A0G3EU58_9BURK 6-carboxy-5,6,7,8-tetrah ydropterin synthase OS=Pandoraea thiooxydans OX=445709 GN=ABW99_16355 PE=4 SV=1
MITITRKLEFDAGHRIPDHRSQCRNLHGHRYVLEITLCGEIMQHEGASDNGMVMDFADVKTLAREHLIDVWDHAFLVYENDAAVRGFLDTLPDHKTVVLDRVPTVENLAAVAFDILAAVFDAHYGVNLRLARVRLYETPNCWAEVCR

SEQ ID NO: 23558 - protein, 147 aa, Pandoraea vervacti
  misc_feature (1)..(147): tr|A0A0C5JVJ3|A0A0C5JVJ3_9BURK 6-carboxy-5,6,7,8-tetrah ydropterin synthase OS=Pandoraea vervacti OX=656178 GN= UC34_00915 PE=3 SV=1
MITITRKLEFDAGHRIPDHRSQCRNLHGHRYVLEITLAGEVSRESGASDNGMVMDFADVKALANEHLVSVWDHAFLVYEGDTAVRNFLETMPDHKTVVFDRVPTVENLAAAAFDKLSHVFDAHYGRDLRLVRLRLYETPNCWSEVTA

SEQ ID NO: 23559 - protein, 132 aa, Pandoraea vervacti
  misc_feature (1)..(132): tr|A0A0C5K5N4|A0A0C5K5N4_9BURK 6-carboxy-5,6,7,8-tetrah ydropterin synthase OS=Pandoraea vervacti OX=656178 GN= UC34_01965 PE=3 SV=1
MGETRAQFTLSRSFVFEAAHTLVRRDIDPPSMDASRRIHGHSYRATVEITGVPTGESGMVIDLARLDGVLSQVSNRLDHRLLDDVAGLGPATLENLCVFIWRALAPQLVGLSRVTVGRDARGDACSLSMRDA

SEQ ID NO: 23560 - protein, 133 aa, Pannonibacter indicus
  misc_feature (1)..(133): tr|A0A0K6HP46|A0A0K6HP46_9RHOB 6-pyruvoyl-tetrahydropte rin synthase OS=Pannonibacter indicus OX=466044 GN=Ga00 61067_10243 PE=4 SV=1
MFAVEVRDHVMIAHSFKGELFGPAQALHGATFVVDAAFLADRLDINGVVIDIGRAHEVLKEVLSPLNYRNLDEVPEFAGINTTTEFLTRHVHDHLAQAARDNRLGRPGSEIRAIRVTISESHVARAWYEAPVA

SEQ ID NO: 23561 - protein, 126 aa, Pannonibacter indicus
  misc_feature (1)..(126): tr|A0A0K6HSG5|A0A0K6HSG5_9RHOB 6-carboxy-5,6,7,8-tetrah ydropterin synthase OS=Pannonibacter indicus OX=466044 GN=Ga0061067_102541 PE=3 SV=1
MFRIAKEFHFSASHQLFGLPDDHPCARLHGHNYVVEVELMSETLDSVGFVRDYRELGPFKTWLDDTLDHRHLNDVLGNGNVTAERMARLFYDWCKARWPEVSAVRVRETPKTMAEYRPKGSCGCSA

SEQ ID NO: 23562 - protein, 133 aa, Pannonibacter phragmitetus
  misc_feature (1)..(133): tr|A0A378ZQW2|A0A378ZQW2_9RHOB Queuosine biosynthesis p rotein QueD OS=Pannonibacter phragmitetus OX=121719 GN= NCTC13350_00357 PE=4 SV=1
MFAVEVRDHVMIAHSFKGELFGPAQALHGATFVVDAAFLADRLDVNGVVIDIGRAHEALKEVLSPLNYRNLDEVPEFAGINTTTEFLTKHVHDHLAQAARDNRLGRPGSEIRAIRVTISESHVARAWYEAPVA

SEQ ID NO: 23563 - protein, 128 aa, Pannonibacter phragmitetus
  misc_feature (1)..(128): tr|A0A0U3P1W0|A0A0U3P1W0_9RHOB 6-carboxy-5,6,7,8-tetrah ydropterin synthase OS=Pannonibacter phragmitetus OX=12 1719 GN=APZ00_06940 PE=3 SV=1
MFRIAKEFHFSASHQIFGLPDDHPCARLHGHNYVVEVELMSETLDSVGFVRDYRELGPFKTWLDDTLDHRHLNDVLGNDNVTAERMARLFYDWCKARWPEVSAVRVRETPKTMAEYRPKGSCGCGYGA

SEQ ID NO: 23564 - protein, 120 aa, Pantoea alhagi
  misc_feature (1)..(120): tr|A0A1W6B683|A0A1W6B683_9GAMM 6-carboxy-5,6,7,8-tetrah ydropterin synthase OS=Pantoea alhagi OX=1891675 GN=B1H 58_11525 PE=3 SV=1
MATTLFKDFQFEAAHRLPHVPEGHKCGRLHGHSFLVRLEITGDVDPYTGWIMDFAELKAAFKPVYDRLDHYYLNDIAGLENPTSEVLAQWIWQQMKPVVPLLSAVMIKETCTAGCVYRGE

SEQ ID NO: 23565 - protein, 119 aa, Pantoea allii
  misc_feature (1)..(119): tr|A0A2V2BKM6|A0A2V2BKM6_9GAMM 6-carboxy-5,6,7,8-tetrah ydropterin synthase OS=Pantoea allii OX=574096 GN=C7431 _103512 PE=3 SV=1
MSTTLFKEFQFEAAHHLPNVPAGHKCGRLHGHSFLVRLEITGEVDAHTGWVMDFAELKAAFKPLYDRLDHYYLNEIPGLENPTSEVLAKWIWDHMKPRLPLLSAVMIKETCTAGCTYRG

SEQ ID NO: 23566 - protein, 119 aa, Pantoea allii
  misc_feature (1)..(119): tr|A0A4S3BIB8|A0A4S3BIB8_9GAMM 6-carboxy-5,6,7,8-tetrah ydropterin synthase OS=Pantoea allii OX=574096 GN=queD PE=3 SV=1
MSTTLFKEFQFEAAHHLPNVPAGHKCGRLHGHSFLVRLEITGEVDAHTGWVMDFAELKAAFKPLYNRLDHYYLNDIPGLENPTSEVLAKWIWEQMKPQLPLLSAVMIKETCTAGCVYRG

SEQ ID NO: 23567 - protein, 119 aa, Pantoea ananas
  misc_feature (1)..(119): tr|A0A2V1ZXR1|A0A2V1ZXR1_PANAN 6-carboxy-5,6,7,8-tetrah ydropterin synthase OS=Pantoea ananas OX=553 GN=C7427_1 0839 PE=3 SV=1
MSTTLFKEFQFEAAHYLPNVPAGHKCGRLHGHSFLVRLEITGEVDAHTGWVMDFAELKAAFKPLYDRLDHYYLNEIPGLENPTSEVLAKWIWDHMKPRLPLLSAVMIKETCTAGCTYRG

SEQ ID NO: 23568 - protein, 119 aa, Pantoea ananas
  misc_feature (1)..(119): tr|A0A2S7ZVH1|A0A2S7ZVH1_PANAN 6-carboxy-5,6,7,8-tetrah ydropterin synthase OS=Pantoea ananas OX=553 GN=queD PE =3 SV=1
MSTTLFKEFQFEAAHHLPNVPAGHKCGRLHGHSFLVRLEITGEVDAHTGWVMDFAELKAAFKPLYNRLDHYYLNDIPGLENPTSEVLAKWIWDQMKPELPLLSAVMIKETCTAGCVYRG

SEQ ID NO: 23569 - protein, 119 aa, Pantoea ananatis; identical to SEQ ID NO: 23567
  misc_feature (1)..(119): tr|A0A0H3KZF9|A0A0H3KZF9_PANAA 6-carboxy-5,6,7,8-tetrah ydropterin synthase OS=Pantoea ananatis (strain AJ13355 ) OX=932677 GN=ygcM PE=3 SV=1

SEQ ID NO: 23570 - protein, 119 aa, Pantoea ananatis; identical to SEQ ID NO: 23567
  misc_feature (1)..(119): tr|D4GLI2|D4GLI2_PANAM 6-carboxy-5,6,7,8-tetrahydropter in synthase OS=Pantoea ananatis (strain LMG 20103) OX=7 06191 GN=ygcM PE=3 SV=1

SEQ ID NO: 23571 - protein, 119 aa, Pantoea anthophila
  misc_feature (1)..(119): tr|A0A506NQW3|A0A506NQW3_9GAMM 6-carboxy-5,6,7,8-tetrah ydropterin synthase OS=Pantoea anthophila OX=470931 GN= queD PE=3 SV=1
MSTTLFKEFQFEAAHHLPNVPAGHKCGRLHGHSFLVRLEITGEVDAHTGWVMDFAELKAAFKPVYDRLDHYYLNDIPGLENPTSEVLAKWIWDQMKPQLPLLSAVMIKETCTAGCVYRG

SEQ ID NO: 23572 - protein, 119 aa, Pantoea coffeiphila
  misc_feature (1)..(119): tr|A0A2S9I914|A0A2S9I914_9GAMM 6-carboxy-5,6,7,8-tetrah ydropterin synthase OS=Pantoea coffeiphila OX=1465635 G N=queD PE=3 SV=1
MATTLFKDFQFEAAHHLPNVPAGHKCGRLHGHSFMVRLEITGEVDAHTGWVIDFSEIKAAFKPVYDRLDHYYLNDIPGLENPTSEVLAAWIWQQMKPVLPLLSAVMVKETCTAGCVYRG

SEQ ID NO: 23573 - protein, 119 aa, Pantoea cypripedii
  misc_feature (1)..(119): tr|A0A1X1EX88|A0A1X1EX88_PANCY 6-carboxy-5,6,7,8-tetrah ydropterin synthase OS=Pantoea cypripedii OX=55209 GN=H A50_15365 PE=3 SV=1
MSTTLFKEFQFEAAHRLPHVPEGHKCGRLHGHSFLVRLEITGEVDAYTGWVMDFAELKAAFAPIYDRLDHHYLNDIPGLSNPTSEVLAKWIWDEMKPILPELSAVMIKETCTAGCVYRG

SEQ ID NO: 23574 - protein, 119 aa, Pantoea deleyi
  misc_feature (1)..(119): tr|A0A506PXP3|A0A506PXP3_9GAMM 6-carboxy-5,6,7,8-tetrah ydropterin synthase OS=Pantoea deleyi OX=470932 GN=queD PE=3 SV=1
MSTTLFKEFQFEAAHHLPNVPAGHKCGRLHGHSFLVRLEITGEVDAHTGWVMDFAELKAAFKPVYDRLDHYYLNEIPGLENPTSEVLARWIWDQMKPQLPLLTAVMIKETCTAGCVYRG

SEQ ID NO: 23575 - protein, 289 aa, Pantoea dispersa
  misc_feature (1)..(289): tr|A0A518XJL5|A0A518XJL5_9GAMM Isocitrate dehydrogenase OS=Pantoea dispersa OX=59814 GN=D8B20_20825 PE=4 SV=1
MVLFVCNLTTIDFSWLDPLRGLVGESLIVDVSLTGELDEQSMVMDFSLVKKEIKKYLDASVDHALVLPLRNPRVTCTCCAERVDVMLFSDAGKVDCFVSGPAASFLPIDAASIETTELEKWLNKKIKEILPANIDDAAITLRHEEHAGYYYHYAHGLKKHAGNCQRIAHGHRSTIQIFINDKRDAYWEKYWAERWKNSYLMSENDVVAASQLSAKAQAVYHDKLLASAYTSSQGYFEILLSHEQVEILPDDTTVERIGCFIKQEIGRLNPQLGHVTVHAFEGVGKGARI

SEQ ID NO: 23576 - protein, 119 aa, Pantoea dispersa
  misc_feature (1)..(119): tr|A0A437T5Z8|A0A437T5Z8_9GAMM 6-carboxy-5,6,7,8-tetrah ydropterin synthase OS=Pantoea dispersa OX=59814 GN=que D PE=3 SV=1
MSTTLFKEFQFEAAHRLPHVPEGHKCGRLHGHSFLVRLEITGEVDAHTGWVMDFAELKAAFRPIYDRLDHHYLNDIPGLENPTSEVLAKWIWDEMKPILPELSAVMIKETCTAGCVYRG

SEQ ID NO: 23577 - protein, 119 aa, Pantoea eucalypti; identical to SEQ ID NO: 23568
  misc_feature (1)..(119): tr|A0A506P6X6|A0A506P6X6_9GAMM 6-carboxy-5,6,7,8-tetrah ydropterin synthase OS=Pantoea eucalypti OX=470933 GN=q ueD PE=3 SV=1

SEQ ID NO: 23578 - protein, 119 aa, Pantoea latae
  misc_feature (1)..(119): tr|A0A1V9DCN6|A0A1V9DCN6_9GAMM 6-carboxy-5,6,7,8-tetrah ydropterin synthase OS=Pantoea latae OX=1964541 GN=B2J6 9_17670 PE=3 SV=1
MSTTLFKEFQFEAAHHLPNVPAGHKCGRLHGHSFLVRLEITGEVDAHTGWVMDFAELKAAFSPLYDRLDHHYLNEIPGLENPTSEVLAKWIWDEMKPLLPELSAVMIKETCTAGCVYKG

SEQ ID NO: 23579 - protein, 119 aa, Pantoea rodasii
  misc_feature (1)..(119): tr|A0A0B1RAJ0|A0A0B1RAJ0_9GAMM 6-carboxy-5,6,7,8-tetrah ydropterin synthase OS=Pantoea rodasii OX=1076549 GN=QU 24_10495 PE=3 SV=1
MSTTLFKEFQFESAHRLPHVPEGHKCGRLHGHSFLVRLEITGEVDAHTGWVMDFAELKAAFKPIYDRLDHHYLNDIPGLENPTSEVLAKWIWDQMKPILPELSAVMIKETCTAGCVYRG

SEQ ID NO: 23580 - protein, 119 aa, Pantoea rodasii
  misc_feature (1)..(119): tr|A0A2M9W8H6|A0A2M9W8H6_9GAMM 6-carboxy-5,6,7,8-tetrah ydropterin synthase OS=Pantoea rodasii OX=1076549 GN=qu eD PE=3 SV=1
MSTTLFKEFQFESAHRLPHVPEGHKCGRLHGHSFLVRLEITGEVDAHTGWVMDFAELKAAFMPIYDRLDHHYLNDIPGLENPTSEVLAKWIWDQMKPILPELSAVMIKETCTAGCTYKG

SEQ ID NO: 23581 - protein, 119 aa, Pantoea rwandensis
  misc_feature (1)..(119): tr|A0A1X1CS59|A0A1X1CS59_9GAMM 6-carboxy-5,6,7,8-tetrah ydropterin synthase OS=Pantoea rwandensis OX=1076550 GN =HA51_20115 PE=3 SV=1
MSTTLFKEFQFESAHHLPHVPEGHKCGRLHGHSFLVRLEITGEVDAHTGWVMDFAELKAAFMPIYDRLDHHYLNDIPGLENPTSEVLAKWIWDQMKPILPELSAVMIKETCTAGCVYRG

SEQ ID NO: 23582 - protein, 120 aa, Pantoea sesami; identical to SEQ ID NO: 20131
  misc_feature (1)..(120): tr|A0A1M5UHR4|A0A1M5UHR4_9GAMM 6-carboxy-5,6,7,8-tetrah ydropterin synthase OS=Pantoea sesami OX=1881110 GN=SAM N05428958_106241 PE=3 SV=1

SEQ ID NO: 23583 - protein, 119 aa, Pantoea sp.; identical to SEQ ID NO: 23568
  misc_feature (1)..(119): tr|E0M4N4|E0M4N4_9GAMM 6-carboxy-5,6,7,8-tetrahydropter in synthase OS=Pantoea sp. aB OX=517433 GN=PanABDRAFT_4 353 PE=3 SV=1

SEQ ID NO: 23584 - protein, 119 aa, Pantoea sp.
  misc_feature (1)..(119): tr|A0A2P5ISZ2|A0A2P5ISZ2_9GAMM 6-carboxy-5,6,7,8-tetrah ydropterin synthase OS=Pantoea sp. PSNIH6 OX=2080494 GN =queD PE=3 SV=1
MSTTLFKEFQFEAAHHLPNVPEGHKCGRLHGHSFLVRLEITGEVDAHTGWVMDFAELKAAFKPLYDRLDHNYLNDIPGLENPTSEVLAKWIWDEMKPLLPELSAVMIKETCTAGCVYKG

SEQ ID NO: 23585 - protein, 119 aa, Pantoea stewartii
  misc_feature (1)..(119): tr|H3RGV8|H3RGV8_PANSE 6-carboxy-5,6,7,8-tetrahydropter in synthase OS=Pantoea stewartii subsp. stewartii DC283 OX=660596 GN=CKS_1306 PE=3 SV=1
MSTTLFKEFQFEAAHHLPNVPAGHKCGRLHGHSFLVRLEITGEVDAHTGWVMDFAELKAAFKPLYDRLDHYYLNDIPGLENPTSEVLAKWIWDHMKPRLPLLSAVMIKETCTAGCTYRG

SEQ ID NO: 23586 - protein, 119 aa, Pantoea vagans
  misc_feature (1)..(119): tr|E1SC30|E1SC30_PANVC 6-carboxy-5,6,7,8-tetrahydropter in synthase OS=Pantoea vagans (strain C9-1) OX=712898 G N=ygcM PE=3 SV=1
MSTTLFKEFQFEAAHHLPNVPAGHKCGRLHGHSFLVRLEITGEVDAHTGWVMDFAELKAAFKPLYNRLDHYYLNDIPGLENPTSEVLAKWIWDQMKPQLPLLSAVMIKETCTAGCVYRG

SEQ ID NO: 23587 - protein, 119 aa, Pantoea vagans; identical to SEQ ID NO: 23579
  misc_feature (1)..(119): tr|A0A0U3TFQ7|A0A0U3TFQ7_9GAMM 6-carboxy-5,6,7,8-tetrah ydropterin synthase OS=Pantoea vagans OX=470934 GN=LK04 _03435 PE=3 SV=1

SEQ ID NO: 23588 - protein, 119 aa, Pantoea wallisii
  misc_feature (1)..(119): tr|A0A1X1D9S3|A0A1X1D9S3_9GAMM 6-carboxy-5,6,7,8-tetrah ydropterin synthase OS=Pantoea wallisii OX=1076551 GN=H A48_09485 PE=3 SV=1
MSTTLFKEFQFEAAHRLPHVPEGHKCGRLHGHSFLVRLEITGEVDAHTGWVMDFAELKAAFMPIYDRLDHHYLNDIPGLDNPTSEVLAKWIWDQMKPLLPELSAVMIKETCTAGCVYKG

SEQ ID NO: 23589 - protein, 110 aa, Parabacteroides acidifaciens
  misc_feature (1)..(110): tr|A0A3D8HF65|A0A3D8HF65_9BACT 6-carboxy-5,6,7,8-tetrah ydropterin synthase OS=Parabacteroides acidifaciens OX= 2290935 GN=queD PE=3 SV=1
MYTVIKRMEISAAHSLSLSYPSKCENLHGHNWIITVYCRSEELNPDGMVVDFSHIKRIVKDQLDHRNLNEVLPFNPTAENIARWICDQLPTCYKVEVQESEGNTAIYEKD

SEQ ID NO: 23590 - protein, 110 aa, Parabacteroides chinchillae
  misc_feature (1)..(110): tr|A0A1H5Y9H8|A0A1H5Y9H8_9BACT 6-carboxy-5,6,7,8-tetrah ydropterin synthase OS=Parabacteroides chinchillae OX=8 71327 GN=SAMN05444001_12014 PE=3 SV=1
MYTVIKRMEISASHSLRLSYPSKCENLHGHNWIITVYCRSKELNADGMVIDFSHIKKIVKSTLDHQNLNEILPFNPTAENIARWICDQLHSCFKVEIQESEGNTAIYEKD

SEQ ID NO: 23591 - protein, 111 aa, Parabacteroides distasonis
  misc_feature (1)..(111): tr|A0A174VTR5|A0A174VTR5_9BACT 6-carboxy-5,6,7,8-tetrah ydropterin synthase OS=Parabacteroides distasonis OX=82 3 GN=queD_2 PE=3 SV=1
MYTVRKRLEISASHRLSLSYASKCENLHGHNWIVIVWCRSKQLNPDGMVVDFAHVKRMIQEKLDHKNLNEVLSFNPTAENIAKWICDQIPQCFKVMVQESENNIAWYEEDK

SEQ ID NO: 23592 - protein, 110 aa, Parabacteroides distasonis
  misc_feature (1)..(110): tr|A0A3L7ZUA7|A0A3L7ZUA7_9BACT 6-carboxy-5,6,7,8-tetrah ydropterin synthase OS=Parabacteroides distasonis OX=82 3 GN=D7V78_02090 PE=3 SV=1
MYTVIKRMEISASHSLRLSYPSKCENLHGHNWMITVYCRSKELNADGMVVDFSHIKRAVKSLLDHQNLNDILPFNPTAENIAFWVYEQIPSCFKVEVKESEGNTAIYEED

SEQ ID NO: 23593 - protein, 110 aa, Parabacteroides goldsteinii
  misc_feature (1)..(110): tr|S0GTC5|S0GTC5_9BACT 6-carboxy-5,6,7,8-tetrahydropter in synthase OS=Parabacteroides goldsteinii dnLKV18 OX=1 235789 GN=C803_01334 PE=3 SV=1
MYTVIKRMEISAAHSLRLSYSSKCENLHGHNWIITVYCRSKELNADGMVIDFSHIKESIKNKLDHQNLNEVLPFNPTAENMARWICDQLPNCYKVEVKESESNTAIYEKD

SEQ ID NO: 23594 - protein, 110 aa, Parabacteroides goldsteinii; identical to SEQ ID NO: 23593
  misc_feature (1)..(110): tr|A0A0J6CFR1|A0A0J6CFR1_9BACT 6-carboxy-5,6,7,8-tetrah ydropterin synthase OS=Parabacteroides goldsteinii OX=3 28812 GN=ACM15_19585 PE=3 SV=1

SEQ ID NO: 23595 - protein, 110 aa, Parabacteroides gordonii
  misc_feature (1)..(110): tr|A0A0F5J8K3|A0A0F5J8K3_9BACT 6-carboxy-5,6,7,8-tetrah ydropterin synthase OS=Parabacteroides gordonii MS-1 = DSM 23371 OX=1203610 GN=HMPREF1536_03690 PE=3 SV=1
MYTVVKRMEVSAAHSLKLSYPSKCENLHGHNWIITVYCRSKELNADGMVIDFSHIKNLIKSKLDHQNLNEVLPFNPTAENMARWICDQIPTCYKVEVNESESNTAIYEKD

SEQ ID NO: 23596 - protein, 110 aa, Parabacteroides johnsonii
  misc_feature (1)..(110): tr|K5ZR11|K5ZR11_9BACT 6-carboxy-5,6,7,8-tetrahydropter in synthase OS=Parabacteroides johnsonii CL02T12C29 OX= 999419 GN=HMPREF1077_03538 PE=3 SV=1
MYTVIKRMEISAAHSLSLSYPSKCEYLHGHNWIITVHCRSKELNTDGMVIDFTHIKQVVKDQLDHRNLNEVLPFNPTAENIARWICDQLPTCYKVEVQESEGNTAIYEKD

SEQ ID NO: 23597 - protein, 110 aa, Parabacteroides johnsonii; identical to SEQ ID NO: 23596
  misc_feature (1)..(110): tr|R5DJN0|R5DJN0_9BACT 6-carboxy-5,6,7,8-tetrahydropter in synthase OS=Parabacteroides johnsonii CAG:246 OX=126 3091 GN=BN560_00549 PE=3 SV=1

SEQ ID NO: 23598 - protein, 110 aa, Parabacteroides merdae; identical to SEQ ID NO: 23596
  misc_feature (1)..(110): tr|A7AAG5|A7AAG5_9BACT 6-carboxy-5,6,7,8-tetrahydropter in synthase OS=Parabacteroides merdae ATCC 43184 OX=411 477 GN=PARMER_00366 PE=3 SV=1

SEQ ID NO: 23599 - protein, 110 aa, Parabacteroides merdae
  misc_feature (1)..(110): tr|A0A3R5WYV9|A0A3R5WYV9_9BACT 6-carboxy-5,6,7,8-tetrah ydropterin synthase OS=Parabacteroides merdae OX=46503 GN=queD PE=3 SV=1
MYTVIKRMEISAAHSLLLSYPSKCEYLHGHNWIITVHCRSKELNADGMVIDFSHIKRVVKDQLDHRNLNKVLPFNPTAENIARWICNQLPTCYKVEVQESEGNTAIYEKD

SEQ ID NO: 23600 - protein, 110 aa, Parabacteroides sp.
  misc_feature (1)..(110): tr|E1YVT5|E1YVT5_9BACT 6-carboxy-5,6,7,8-tetrahydropter in synthase OS=Parabacteroides sp. 20_3 OX=469591 GN=DX C95_15330 PE=3 SV=1
MYTVIKRMEISASHSLRLSYPSKCENLHGHNWMITVYCRSKELNADGMVVDFSHIKRSVKSLLDHQNLNDILPFNPTAENIAFWVYEQIPSCFKVEVKESEGNTAIYEED

SEQ ID NO: 23601 - protein, 110 aa, Parabacteroides sp.; identical to SEQ ID NO: 23600
  misc_feature (1)..(110): tr|C7XB67|C7XB67_9BACT 6-carboxy-5,6,7,8-tetrahydropter in synthase OS=Parabacteroides sp. D13 OX=563193 GN=HMP REF0619_02709 PE=3 SV=1

SEQ ID NO: 23602 - protein, 147 aa, Paraburkholderia aromaticivorans
  misc_feature (1)..(147): tr|A0A248VMR9|A0A248VMR9_9BURK 6-carboxy-5,6,7,8-tetrah ydropterin synthase OS=Paraburkholderia aromaticivorans OX=2026199 GN=queD PE=3 SV=1
MTITRKLEFDAGHRIPDHRSQCRNLHGHRYVLEITLQGDLVDTEGAPDRGMVMDFADVKSLAVEHLVDKWDHAFLVYEGDTQVRGFLETMADHKTVVLDRIPTVENLAAVAFDVLANVYDAHYGVNLRLHKLRLYETPNCWADVVRD

SEQ ID NO: 23603 - protein, 148 aa, Paraburkholderia aspalathi
  misc_feature (1)..(148): tr|A0A1I7CGE4|A0A1I7CGE4_9BURK 6-carboxy-5,6,7,8-tetrah ydropterin synthase OS=Paraburkholderia aspalathi OX=13 24617 GN=SAMN05192563_1006224 PE=3 SV=1
MLTITRKLEFDAGHRIPDHRSQCRNLHGHRYVLEITLQGDLVDTEGAPDRGMVMDFADVKSLAVEHLVDKWDHAFLVYEGDTQVRGFLETMAGHKTVVLDRIPTVENLAAVAFDILANVYDAHYGVNLRLHKVRLFETPNCWADVVRD

SEQ ID NO: 23604 - protein, 190 aa, Paraburkholderia aspalathi
  misc_feature (1)..(190): tr|A0A1I7B750|A0A1I7B750_9BURK 6-pyruvoyltetrahydropter in/6-carboxytetrahydropterin synthase OS=Paraburkholder ia aspalathi OX=1324617 GN=SAMN05192563_1004239 PE=4 SV =1
MLIRKLFSFEGAHVVRHASSHRCAWSIHGHSYRVEIILEADALDHGQMVYDFGLLKGEVREIVDAFDHTLVFWNCDDPAYMEMCRSHSQRWIALPVSPSAEQLSRVFFVLVDVVMRAMPMRNGEADVRVQSVIVHETATGYAQCFRRDAYNPRMGLVSPALIGFSDAVRREATTGILDELTSAVACAPAC

SEQ ID NO: 23605 - protein, 147 aa, Paraburkholderia azotifigens
  misc_feature (1)..(147): tr|A0A5C6VW23|A0A5C6VW23_9BURK 6-carboxy-5,6,7,8-tetrah ydropterin synthase OS=Paraburkholderia azotifigens OX= 2057004 GN=queD PE=3 SV=1
MTITRKLEFDAGHRIPDHRSQCRNLHGHRYVLEITLQGDLVETEGAPDRGMVMDFADVKALANEHLVDKWDHAFLVYEGDTQVRGFLETMAGHKTVVLDRIPTVENLAAVAFDILANVYDAHYGVNLRLHKVRLYETPNCWADVVRD

SEQ ID NO: 23606 - protein, 148 aa, Paraburkholderia bryophila
  misc_feature (1)..(148): tr|A0A329C0A8|A0A329C0A8_9BURK 6-carboxy-5,6,7,8-tetrah ydropterin synthase OS=Paraburkholderia bryophila OX=42 0952 GN=BX591_11258 PE=3 SV=1
MLTITRKLEFDAGHRIPDHRSQCRNLHGHRYVLEITLQGDLVDTEGAPDRGMVMDFADVKSLANEHLVDKWDHAFLVFEGDTQVRGFLETMAGHKTVVLDRIPTVENLAAVAFDILANVYDAHYGVNLRLHKLRLYETPNCWADVVRD

SEQ ID NO: 23607 - protein, 190 aa, Paraburkholderia caballeronis
  misc_feature (1)..(190): tr|A0A1H7F3P0|A0A1H7F3P0_9BURK 6-pyruvoyltetrahydropter in/6-carboxytetrahydropterin synthase OS=Paraburkholder ia caballeronis OX=416943 GN=SAMN05192542_101150 PE=4 S V=1
MLIRKLFSFEGAHVVRHASSHRCAWSIHGHSYRVEIILEADALDHGQMVYDFGLLKAEVREIVDAFDHTLVFWKCDDPAYIAMCRSHSQRWIALPVSPSAEQLSRVFFVLIDAVMRAMPMRNGEADVSVQSVIVHETATGYAQCFRRDAYNPRMGRVAPALIGFSDAVRREAATGILDELASTAACAPAC

SEQ ID NO: 23608 - protein, 148 aa, Paraburkholderia caballeronis
  misc_feature (1)..(148): tr|A0A1H7HCY1|A0A1H7HCY1_9BURK 6-carboxy-5,6,7,8-tetrah ydropterin synthase OS=Paraburkholderia caballeronis OX =416943 GN=SAMN05192542_102220 PE=3 SV=1
MLTITRKLEFDAGHRIPDHRSQCRNLHGHRYVLEITLQGDLVDTEGAPDRGMVMDFADVKALANQHLIDRWDHAFLVYEGDTQVRGFLETLPGHKTVVLDRIPTVENLAAVAFDILASVYDAHYGVNLRLHRVRLYETPNCWADVIRD

SEQ ID NO: 23609 - protein, 147 aa, Paraburkholderia caledonica
  misc_feature (1)..(147): tr|A0A2Z5MFM4|A0A2Z5MFM4_9BURK 6-carboxy-5,6,7,8-tetrah ydropterin synthase OS=Paraburkholderia caledonica OX=1 34536 GN=queD PE=3 SV=1
MTITRKLEFDAGHRIPDHRSQCRNLHGHRYVIEITLQGDLVDTEGAPDRGMVMDFADVKSLAVEHLVDKWDHAFLVYEGDTQVRGFLETMAGHKTVVLDRIPTVENLAAVAFDILANVYDAHYGVNLRLHKLRLYETPNCWADVVRD

SEQ ID NO: 23610 - protein, 148 aa, Paraburkholderia caribensis
  misc_feature (1)..(148): tr|A0A0P0R587|A0A0P0R587_9BURK 6-carboxy-5,6,7,8-tetrah ydropterin synthase OS=Paraburkholderia caribensis MBA4 OX=1323664 GN=K788_0003500 PE=3 SV=1
MLTITRKLEFDAGHRIPDHRSQCRNLHGHRYVLEITLQGDLVETEGAPDRGMVMDFADVKALANEHLVDKWDHAFLVYEGDTQVRGFLESMAGHKTIVLDRIPTVENLAAVAFDILANVYDAHYGVNLRLHKVRLYETPNCWADVVRD

SEQ ID NO: 23611 - protein, 147 aa, Paraburkholderia caribensis
  misc_feature (1)..(147): tr|A0A2T3YLS6|A0A2T3YLS6_9BURK 6-carboxy-5,6,7,8-tetrah ydropterin synthase OS=Paraburkholderia caribensis OX=7 5105 GN=queD PE=3 SV=1
MTITRKLEFDAGHRIPDHRSQCRNLHGHRYVLEITLQGDLVETEGAPDRGMVMDFADVKALANEHLVDKWDHAFLVYEGDTQVRGFLESMAGHKTIVLDRIPTVENLAAVAFDILANVYDAHYGVNLRLHKVRLYETPNCWADVVRD

SEQ ID NO: 23612 - protein, 148 aa, Paraburkholderia diazotrophica
  misc_feature (1)..(148): tr|A0A1H6RDS3|A0A1H6RDS3_9BURK 6-carboxy-5,6,7,8-tetrah ydropterin synthase OS=Paraburkholderia diazotrophica O X=667676 GN=SAMN05192539_100248 PE=3 SV=1
MLTITRKLEFDAGHRIPDHRSQCRNLHGHRYVLEITLQGDLVETEGAPDRGMVMDFADVKALANEHLVDKWDHAFLVYEGDTQVRGFLDSMAGHKTVVLDRIPTVENLAAVAFEILANVYDAHYGVNLRLHKVRLYETPNCWADVVRD

SEQ ID NO: 23613 - protein, 147 aa, Paraburkholderia dipogonis
  misc_feature (1)..(147): tr|A0A4Y8NBS1|A0A4Y8NBS1_9BURK 6-carboxy-5,6,7,8-tetrah ydropterin synthase OS=Paraburkholderia dipogonis OX=12 11383 GN=queD PE=3 SV=1
MTITRKLEFDAGHRIPDHRSQCRNLHGHRYVLEITLQGDLVDTEGAPDRGMVMDFADVKSLAVEHLVDKWDHAFLVYEGDTQVRGFLETMAGHKTVVLDRIPTVENLAAVAFDILANVYDAHYGVNLRLHKLRLYETPNCWADVVRD

SEQ ID NO: 23614 - protein, 172 aa, Paraburkholderia eburnea
  misc_feature (1)..(172): tr|A0A2S4MNY7|A0A2S4MNY7_9BURK 6-pyruvoyltetrahydropter in/6-carboxytetrahydropterin synthase OS=Paraburkholder ia eburnea OX=1189126 GN=B0G62_101859 PE=4 SV=1
MAPVDADAQIPEHSLILPFSVEAAVLTITRKLEFDAGHRIPDHRSQCRNLHGHRYVLEITLQGDTVETEGAPDRGMVMDFADVKALANQHLVDLWDHAFLVFEGDTQVRGFLETLPGHKTVVIDRIPTVENLAAIAFEILANVYDAHYGVNLQLYKVRLYETPNCWAEVIRD

SEQ ID NO: 23615 - protein, 148 aa, Paraburkholderia endofungorum
  misc_feature (1)..(148): tr|A0A2P5KD95|A0A2P5KD95_9BURK 6-carboxy-5,6,7,8-tetrah ydropterin synthase OS=Paraburkholderia endofungorum OX =417203 GN=B0O95_10277 PE=3 SV=1
MLTITRKLAFDAGHRIPDHRSQCRNLHGHRYVLEITLQGELVDTEGAPDRGMVMDFADVKRLAMEHLVNVWDHAFIVYEQDVMVRSFLDTLPEHKTVVLDRIPTVENLAAKAFEILAHVYDAHYGINLRLAKIRLYETPNCWADIIRD

SEQ ID NO: 23616 - protein, 148 aa, Paraburkholderia fungorum; identical to SEQ ID NO: 23603
  misc_feature (1)..(148): tr|A0A3R7I928|A0A3R7I928_9BURK 6-carboxy-5,6,7,8-tetrah ydropterin synthase OS=Paraburkholderia fungorum OX=134 537 GN=BCY88_28925 PE=3 SV=1

SEQ ID NO: 23617 - protein, 148 aa, Paraburkholderia fungorum
  misc_feature (1)..(148): tr|A0A1H0YZK4|A0A1H0YZK4_9BURK 6-carboxy-5,6,7,8-tetrah ydropterin synthase OS=Paraburkholderia fungorum OX=134 537 GN=SAMN05443245_0364 PE=3 SV=1
MLTITRKLEFDAGHRIPDHRSQCRNLHGHRYVLEITLQGDLVDTEGAPDRGMVMDFADVKSLANEHLVDKWDHAFLVYEGDAQVRGFLETMAGHKTVVLDRIPTVENLAAVAFDLLASVYDAHYGVNMRLQKLRLYETPNCWADVVRD

SEQ ID NO: 23618 - protein, 148 aa, Paraburkholderia ginsengiterrae
  misc_feature (1)..(148): tr|A0A1A9NCC1|A0A1A9NCC1_9BURK 6-carboxy-5,6,7,8-tetrah ydropterin synthase OS=Paraburkholderia ginsengiterrae OX=1462993 GN=A6V37_00675 PE=3 SV=1
MLTITRKLEFDAGHRIPDHRSQCRNLHGHRYVLEITLQGDLVDTEGAPDRGMVMDFADVKSLAVEHLIDKWDHAFLVYEGDTQVRGFLETMAGHKTVVLDRIPTVENLAAVAFDILANVYDAHYGVNLRLHKVRLYETPNCWADVVRD

SEQ ID NO: 23619 - protein, 148 aa, Paraburkholderia graminis
  misc_feature (1)..(148): tr|B1G3M6|B1G3M6_PARG4 6-carboxy-5,6,7,8-tetrahydropter in synthase OS=Paraburkholderia graminis (strain ATCC 7 00544 / DSM 17151 / LMG 18924 / NCIMB 13744 / C4D1M) OX =396598 GN=BgramDRAFT_3971 PE=3 SV=1
MLTITRKLEFDAGHRIPDHRSQCRNLHGHRYVLEITLQGDLVDTEGAPDRGMVMDFADVKSLAVEHLVDKWDHAFLVYECDSQVRGFLETMAGHKTVVLDRIPTVENLAAVAFDVLANVYDAHYGVNLRLHKVRLYETPNCWADVVRD

SEQ ID NO: 23620 - protein, 148 aa, Paraburkholderia hospita; identical to SEQ ID NO: 23610
  misc_feature (1)..(148): tr|A0A244DGA9|A0A244DGA9_9BURK 6-carboxy-5,6,7,8-tetrah ydropterin synthase OS=Paraburkholderia hospita OX=1694 30 GN=CA603_39320 PE=3 SV=1

SEQ ID NO: 23621 - protein, 148 aa, Paraburkholderia insulsa
  misc_feature (1)..(148): tr|A0A2T1B4F1|A0A2T1B4F1_9BURK 6-carboxy-5,6,7,8-tetrah ydropterin synthase OS=Paraburkholderia insulsa OX=1441 714 GN=BX589_103291 PE=3 SV=1
MLTITRKLEFDAGHRIPDHRSQCRNLHGHRYVLEITLQGDLVDTEGAPDRGMVMDFADVKSLAVEHLVDKWDHAFLVYEGDTQVRGFLETMAGHKTVVLDRIPTVENLAAAAFDILANVYDAHYGVNLRLHKVRLFETPNCWADVVRD

SEQ ID NO: 23622 - protein, 148 aa, Paraburkholderia megapolitana
  misc_feature (1)..(148): tr|A0A1I3UTL7|A0A1I3UTL7_9BURK 6-carboxy-5,6,7,8-tetrah ydropterin synthase OS=Paraburkholderia megapolitana OX =420953 GN=SAMN05192543_112106 PE=3 SV=1
MLTITRKLEFDAGHRIPDHRSQCRNLHGHRYVLEITLQGDLVETEGAPDRGMVMDFADVKSLAIEHLVDKWDHAFLVFEGDTRVRGFLESMPDHKTVVLDRIPTVENLAAVAFDILANVYDAHYGVNLRLHHVRLYETPNCWADVVRD

SEQ ID NO: 23623 - protein, 148 aa, Paraburkholderia monticola
  misc_feature (1)..(148): tr|A0A149PXS5|A0A149PXS5_9BURK 6-carboxy-5,6,7,8-tetrah ydropterin synthase OS=Paraburkholderia monticola OX=13 99968 GN=CI15_06650 PE=3 SV=1
MLTITRKLEFDAGHRIPDHRSQCRNLHGHRYVLEITLQGDLVDTEGAPDRGMVMDFADVKSLANEHLVDRWDHAFLVFEGDTQVRGFLDSMAGHKTVVIDRIPTVENLAAIAFDILANVYDAHYGVNLRLHKVRLYETPNCWADVVRD

SEQ ID NO: 23624 - protein, 148 aa, Paraburkholderia phenazinium
  misc_feature (1)..(148): tr|A0A1N6ELD8|A0A1N6ELD8_9BURK 6-carboxy-5,6,7,8-tetrah ydropterin synthase OS=Paraburkholderia phenazinium OX= 60549 GN=SAMN05444168_0764 PE=3 SV=1
MLTITRKLEFDAGHRIPDHRSQCRNLHGHRYVLEITLQGDLVETEGAPDRGMVMDFADVKSLAVEHLVDKWDHAFLVYEGDTQVRGFLDSMQGHKTVVLDRIPTVENLAAIAFELLANVYDAHYGVNLRLHKVRLYETPNCWADVVRD

SEQ ID NO: 23625 - protein, 148 aa, Paraburkholderia phenazinium
  misc_feature (1)..(148): tr|A0A1N6L6L6|A0A1N6L6L6_9BURK 6-carboxy-5,6,7,8-tetrah ydropterin synthase OS=Paraburkholderia phenazinium OX= 60549 GN=SAMN05444165_6240 PE=3 SV=1
MLTITRKLEFDAGHRIPDHRSQCRNLHGHRYVLEITLQGDLVDTEGAPDRGMVMDFADVKSLAVEHLVDKWDHAFLVYEGDTHVRGFLDSMPGHKTVVLDRIPTVENLAAVAFDLLANVYDAHYGVNLRLHKVRLYETPNCWADVVRD

SEQ ID NO: 23626 - protein, 148 aa, Paraburkholderia phenoliruptrix
  misc_feature (1)..(148): tr|K0DE79|K0DE79_9BURK 6-carboxy-5,6,7,8-tetrahydropter in synthase OS=Paraburkholderia phenoliruptrix BR3459a OX=1229205 GN=BUPH_03966 PE=3 SV=1
MLTITRKLEFDAGHRIPDHRSQCRNLHGHRYVLEITLQGDLVDTEGAPDRGMVMDFADVKSLAVEHLVDKWDHAFLVYEGDSQVRGFLDTMAGHKTVVLDRIPTVENLAAVAFEVLANVYDAHYGVNLRLHKVRLYETPNCWADVVRD

SEQ ID NO: 23627 - protein, 148 aa, Paraburkholderia phymatum
  misc_feature (1)..(148): tr|B2JJV3|B2JJV3_PARP8 6-carboxy-5,6,7,8-tetrahydropter in synthase OS=Paraburkholderia phymatum (strain DSM 17 167 / CIP 108236 / LMG 21445 / STM815) OX=391038 GN=Bph y_0045 PE=3 SV=1
MLTITRKLEFDAGHRIPDHRSQCRNLHGHRYVLEITLQGDLVETEGAPDRGMVMDFADVKALANEHLVDKWDHAFLVYEGDTQVRGFLETMAGHKTVVLDRIPTVENLAAVAFDILANVYDAHYGVNLRLHKLRLYETPNCWADVVRD

SEQ ID NO: 23628 - protein, 148 aa, Paraburkholderia phytofirmans
  misc_feature (1)..(148): tr|B2T1L5|B2T1L5_PARPJ 6-carboxy-5,6,7,8-tetrahydropter in synthase OS=Paraburkholderia phytofirmans (strain DS M 17436 / LMG 22146 / PsJN) OX=398527 GN=Bphyt_0319 PE= 3 SV=1
MLTITRKLEFDAGHRIPDHRSQCRNLHGHRYVLEITLQGDLVDTEGAPDRGMVMDFADVKSLAVEHLVDKWDHAFLVYEGDTQVRGFLETMVGHKTVVLDRIPTVENLAAVAFDILANVYDAHYGVNLRLHKLRLYETPNCWADVVRD

SEQ ID NO: 23629 - protein, 148 aa, Paraburkholderia piptadeniae
  misc_feature (1)..(148): tr|A0A1N7RJ92|A0A1N7RJ92_9BURK 6-carboxy-5,6,7,8-tetrah ydropterin synthase OS=Paraburkholderia piptadeniae OX= 1701573 GN=BN2476_20068 PE=3 SV=1
MLTITRKLEFDAGHRIPDHRSQCRNLHGHRYVLEITLQGDLVETEGAPDRGMVMDFADVKALANEHLVDKWDHAFLVYEGDTQVRGFLDSMAGHKTVVLDRIPTVENLAAAAFEILANVYDAHYGVNLRLHKVRLYETPNCWADVVRD

SEQ ID NO: 23630 - protein, 148 aa, Paraburkholderia rhizosphaerae
  misc_feature (1)..(148): tr|A0A4V3HEP7|A0A4V3HEP7_9BURK 6-carboxy-5,6,7,8-tetrah ydropterin synthase OS=Paraburkholderia rhizosphaerae O X=480658 GN=BX592_11074 PE=3 SV=1
MLTITRKLEFDAGHRIPDHRSQCRNLHGHRYVLEITLQGDLVETEGAPDRGMVMDFADVKSLAMEHLVNQWDHAFIVYEGDTQLCRFLESMPGHKTVVLDRIPTVENLAAVAFGILANVYDAHYGVNLRLQRVRLYETPNCWADFVRE

SEQ ID NO: 23631 - protein, 148 aa, Paraburkholderia rhizoxinica
  misc_feature (1)..(148): tr|E5ANB2|E5ANB2_PARRH 6-carboxy-5,6,7,8-tetrahydropter in synthase OS=Paraburkholderia rhizoxinica (strain DSM 19002 / CIP 109453 / HKI 454) OX=882378 GN=RBRH_02246 PE=3 SV=1
MLTITRKLEFDAGHRIPDHRSQCRNLHGHRYVLEITLQGELVDTEGASDRGMVMDFADVKRLAMEHLVNVWDHAFIVYEQDVTVRSFLDTLPGHKTVVLDRIPTVENLAAKAFEILAHVYDAHYGINLRLAKVRLYETPNCWADITRD

SEQ ID NO: 23632 - protein, 147 aa, Paraburkholderia rhynchosiae
  misc_feature (1)..(147): tr|A0A2N7WQD2|A0A2N7WQD2_9BURK 6-carboxy-5,6,7,8-tetrah ydropterin synthase OS=Paraburkholderia rhynchosiae OX= 487049 GN=queD PE=3 SV=1
MTITRKLEFDAGHRIPDHRSQCRNLHGHRYVLEITLQGDLVDTEGAPDRGMVMDFADVKSLAVEHLVDKWDHAFLVYEGDTQVRGFLETMEGHKTVVLDRIPTVENLAAVAFDILANVYDAHYGVNLRLYKVRLYETPNCWADVVRD

SEQ ID NO: 23633 - protein, 190 aa, Paraburkholderia rhynchosiae
  misc_feature (1)..(190): tr|A0A2N7WWN2|A0A2N7WWN2_9BURK 6-carboxytetrahydropteri n synthase QueD OS=Paraburkholderia rhynchosiae OX=4870 49 GN=C0Z16_03495 PE=4 SV=1
MLIRKLFSFEGAHVVRHASSHRCAWSIHGHSYRVEIILEADALDHGQMVYDFGLLKGEVREIVDAFDHTLVFWNCDDPGYMEMCRSHSQRWIALPVSPSAEQLSRVFFVLVDVVMRAMPMRNGEADVRVQSVIVHETATGYAQCFRRDAYNPRMGLISPALIGFSDAVRREATTGILDELTSAVACAPAC

SEQ ID NO: 23634 - protein, 148 aa, Paraburkholderia ribeironis
  misc_feature (1)..(148): tr|A0A1N7RJT5|A0A1N7RJT5_9BURK 6-carboxy-5,6,7,8-tetrah ydropterin synthase OS=Paraburkholderia ribeironis OX=1 247936 GN=BN2475_40142 PE=3 SV=1
MLTITRKLEFDAGHRIPDHRSQCRNLHGHRYVLEITLQGDLVDSEGAPDRGMVMDFADVKSLAVEHLVGQWDHAFLVYEGDTPVRGFLETMPGHKTVVLDRIPTVENLAAIAFDILASVYDAHYGVNLRLHKVRLYETPNCWADVVRD

SEQ ID NO: 23635 - protein, 138 aa, Paraburkholderia ribeironis
  misc_feature (1)..(138): tr|A0A1N7SJC9|A0A1N7SJC9_9BURK Uncharacterized protein OS=Paraburkholderia ribeironis OX=1247936 GN=BN2475_750 024 PE=4 SV=1
MLQAERHHDISCGRRVYGHEGKCQYPHGHNCRIHFVCEAASPEGLGRVIDFRRDQALLYNWVEDHWDHRMLLWADAPFYAHVRDMDASVVRVPFNPTAENMAQWLVTVLGPEVLEGAGVRLVEVRIEETRKCSATYRL

SEQ ID NO: 23636 - protein, 148 aa, Paraburkholderia sacchari
  misc_feature (1)..(148): tr|A0A0A6T335|A0A0A6T335_9BURK 6-carboxy-5,6,7,8-tetrah ydropterin synthase OS=Paraburkholderia sacchari OX=159 450 GN=NH14_05350 PE=3 SV=1
MLTITRKLEFDAGHRIPDHRSQCRNLHGHRYVLEVTLQGDTVETEGAPDRGMVMDFADVKALANQHLVDLWDHAFIVFEGDAQVRGFLDTLPGHKTVVIDRIPTVENLAAIAFEILANVYDAHYGVNLQLQKLRLYETPNCWAEVTRD

SEQ ID NO: 23637 - protein, 148 aa, Paraburkholderia sartisoli
  misc_feature (1)..(148): tr|A0A1H4FSL1|A0A1H4FSL1_9BURK 6-carboxy-5,6,7,8-tetrah ydropterin synthase OS=Paraburkholderia sartisoli OX=83 784 GN=SAMN05192564_10553 PE=3 SV=1
MLTITRKLEFDAGHRIPDHRSQCRNLHGHRYVLEITLQGDLVETEGAPDRGMVMDFADVKSLANEHLVDLWDHAFLVYEGDAQVRGFLETMPGHKTVVLDRIPTVENLAAVAFDILANVYDAHYGVNLRLHKVRLYETPNCWADIVRD

SEQ ID NO: 23638 - protein, 148 aa, Paraburkholderia sediminicola; identical to SEQ ID NO: 23603
  misc_feature (1)..(148): tr|A0A419U791|A0A419U791_9BURK 6-carboxy-5,6,7,8-tetrah ydropterin synthase OS=Paraburkholderia sediminicola OX =458836 GN=DFH24_05355 PE=3 SV=1

SEQ ID NO: 23639 - protein, 148 aa, Paraburkholderia silvatlantica
  misc_feature (1)..(148): tr|A0A2V4UE30|A0A2V4UE30_9BURK 6-carboxy-5,6,7,8-tetrah ydropterin synthase OS=Paraburkholderia silvatlantica O X=321895 GN=C7410_103247 PE=3 SV=1
MLTITRKLEFDAGHRIPDHRSQCRNLHGHRYVLEITLEGDLVETEGAPDRGMVMDFADVKSLANQHLVDLWDHAFLVFSGDTQVRGFLETLPGHKTVVIDRIPTVENLAAIAFDILANVYDAHYGVNLRLHKLRLYETPNCWAEVTRD

SEQ ID NO: 23640 - protein, 122 aa, Paraburkholderia sp.
  misc_feature (1)..(122): tr|A0A3D9MDQ4|A0A3D9MDQ4_9BURK 6-carboxy-5,6,7,8-tetrah ydropterin synthase OS=Paraburkholderia sp. BL27I4N3 OX =1938805 GN=B0G71_0085 PE=3 SV=1
MIFELSQRFFFDAAHTLHREIDQEGSRRIHGHTYHAHVFVRGNPNPETGMIVDLGLLNQAIERVRNQLDHRFLDDIPELGPATLESLCAFILRKIRDSFPEVTRVRVERTAGGDACDLYVQG

SEQ ID NO: 23641 - protein, 147 aa, Paraburkholderia sp.
  misc_feature (1)..(147): tr|A0A372K5J1|A0A372K5J1_9BURK 6-carboxy-5,6,7,8-tetrah ydropterin synthase OS=Paraburkholderia sp. DHOC27 OX=2 303330 GN=queD PE=3 SV=1
MTITRKLEFDAGHRIPDHRSQCRNLHGHRYVLEVTLQGDLVETEGAPDRGMVMDFADVKSLAVEHLVDVWDHAFIVYEGDTQVRGFLDAMPGHKTVVLDRIPTVENLAAVAFNILANVYDAHYGVNLRLHKVRLYETPNCWADVVRD

SEQ ID NO: 23642 - protein, 148 aa, Paraburkholderia sprentiae
  misc_feature (1)..(148): tr|A0A1I9YIG8|A0A1I9YIG8_9BURK 6-carboxy-5,6,7,8-tetrah ydropterin synthase OS=Paraburkholderia sprentiae WSM50 05 OX=754502 GN=BJG93_12355 PE=3 SV=1
MLTITRKLEFDAGHRIPDHRSQCRNLHGHRYVLEITLQGDLVDTEGAPDRGMVMDFADVKSLAVEHLVDKWDHAFLVYEGDTQVRGFLDSMVGHKTVVIDRIPTVENLAAIAFDMLANVYDAHYGVNLRLHKVRLYETPNCWADVVRD

SEQ ID NO: 23643 - protein, 148 aa, Paraburkholderia susongensis
  misc_feature (1)..(148): tr|A0A1X7K5R5|A0A1X7K5R5_9BURK 6-carboxy-5,6,7,8-tetrah ydropterin synthase OS=Paraburkholderia susongensis OX= 1515439 GN=SAMN06265784_103385 PE=3 SV=1
MLTITRKLEFDAGHRIPDHRSQCRNLHGHRYVLEITLQGDLVDTEGAPDRGMVMDFADVKSLAVEHLVDKWDHAFLVYEGDTQVRSFLESMAGHKTVVLDRIPTVENLAAIAFEMLANVYDAHYGVNLRLHKVRLYETPNCWADVVRD

SEQ ID NO: 23644 - protein, 147 aa, Paraburkholderia terrae; identical to SEQ ID NO: 23611
  misc_feature (1)..(147): tr|A0A2I8EN18|A0A2I8EN18_9BURK 6-carboxy-5,6,7,8-tetrah ydropterin synthase OS=Paraburkholderia terrae OX=31123 0 GN=queD PE=3 SV=1

SEQ ID NO: 23645 - protein, 148 aa, Paraburkholderia terrae; identical to SEQ ID NO: 23610
  misc_feature (1)..(148): tr|I5CWM9|I5CWM9_9BURK 6-carboxy-5,6,7,8-tetrahydropter in synthase OS=Paraburkholderia terrae BS001 OX=1171375 GN=WQE_14746 PE=3 SV=1

SEQ ID NO: 23646 - protein, 148 aa, Paraburkholderia terricola
  misc_feature (1)..(148): tr|A0A1M6SF36|A0A1M6SF36_9BURK 6-carboxy-5,6,7,8-tetrah ydropterin synthase OS=Paraburkholderia terricola OX=16 9427 GN=SAMN05192548_102243 PE=3 SV=1
MLTITRKLEFDAGHRIPDHRSQCRNLHGHRYVLEITLQGDLVDTEGAPDRGMVMDFADVKSLAVEHLVDKWDHAFLVYEGDTQVRGFLETMAGHKTVVLDRIPTVENLAAVAFDILANVYDAHYGVNLRLHKLRLYETPNCWADVVRD

SEQ ID NO: 23647 - protein, 148 aa, Paraburkholderia tropica
  misc_feature (1)..(148): tr|A0A1A5X834|A0A1A5X834_9BURK 6-carboxy-5,6,7,8-tetrah ydropterin synthase OS=Paraburkholderia tropica OX=9264 7 GN=A6456_00680 PE=3 SV=1
MLTITRKLEFDAGHRIPDHRSQCRNLHGHRYVLEITLQGDTVETEGAPDRGMVMDFADVKSLANQHLVDLWDHAFLVFEGDTQVRGFLETLPGHKTVVIDRIPTVENLAAIAFEILANVYDAHYGVNLQLHKVRLYETPNCWAEVVRD

SEQ ID NO: 23648 - protein, 190 aa, Paraburkholderia tuberum
  misc_feature (1)..(190): tr|A0A1H1GQQ0|A0A1H1GQQ0_9BURK 6-pyruvoyltetrahydropter in/6-carboxytetrahydropterin synthase OS=Paraburkholder ia tuberum OX=157910 GN=SAMN05445850_3027 PE=4 SV=1
MLIRKLFSFEGAHVVRHASSHRCAWSIHGHSYRVEIILEADALDHGQMVYDFGLLKGEVREIVDAFDHTLVFWNCDDPAYMEMCRSHSQRWIALPVSPSAEQLSRVFFVLVDVVMRAMPMRNGEADVTVQSVIVHETATGYAQCFRRDAYNPRMGLVSPALIGFSDAVRREATTGILDELTSAVACAPAC

SEQ ID NO: 23649 - protein, 152 aa, Paraburkholderia tuberum
  misc_feature (1)..(152): tr|A0A1H1CWQ9|A0A1H1CWQ9_9BURK 6-pyruvoyltetrahydropter in/6-carboxytetrahydropterin synthase OS=Paraburkholder ia tuberum OX=157910 GN=SAMN05445850_1404 PE=4 SV=1
MLTITRKLEFDAGHRIPDHRSQCRNLHGHRYVLEITLLGDLVDTEGAPDRGMVMDFADVKSLANEHLVDKWDHAFLVYEGDTQVRGFLDSMADHKTVVIDRIPTVENLAAVAFDILANVYDAHYGVNLRLHKVRLYETPNCWAEVVRDSLPT

SEQ ID NO: 23650 - protein, 148 aa, Paraburkholderia unamae
  misc_feature (1)..(148): tr|A0A328Y648|A0A328Y648_9BURK 6-carboxy-5,6,7,8-tetrah ydropterin synthase OS=Paraburkholderia unamae OX=21964 9 GN=C7401_102336 PE=3 SV=1
MLTITRKLEFDAGHRIPDHRSQCRNLHGHRYVLEITLQGDLVETEGAPDRGMVMDFADVKSLANQHLVDLWDHAFLVFEGDTQVRGFLETLPGHKTVVIDRIPTVENLAAIAFDILANVYDAHYGVNLRLHKLRLYETPNCWAEVTRD

SEQ ID NO: 23651 - protein, 148 aa, Paraburkholderia xenovorans
  misc_feature (1)..(148): tr|Q146Z4|Q146Z4_PARXL 6-carboxy-5,6,7,8-tetrahydropter in synthase OS=Paraburkholderia xenovorans (strain LB40 0) OX=266265 GN=Bxe_A4405 PE=3 SV=1
MLTITRKLEFDAGHRIPDHRSQCRNLHGHRYVLEITLQGDLVDTEGAPDRGMVMDFADVKSLAVEHLVDKWDHAFLVYEGDTQVRGFLETMAGHKTVVLDRIPTVENLAAVAFGILANVYDAHYGVNLRLHKLRLYETPNCWADVIRD

SEQ ID NO: 23652 - protein, 151 aa, Parachlamydia acanthamoebae
  misc_feature (1)..(151): tr|A0A0C1CD36|A0A0C1CD36_9BACT 6-carboxy-5,6,7,8-tetrah ydropterin synthase OS=Parachlamydia acanthamoebae OX=8 3552 GN=queD PE=4 SV=1
MLYNKEFKMNTVKCTRKIHFCAGHRVMNHENKCATAHGHNYYVHLTAEAPQLDSLGRVIDFSVLKEKVGGWIDEHWDHTFLVCEHDKELIQALRSLPRKKEPFICPFNPTAEEIAIYLLREVSPKVLAGSNVMITKVVVHETDNCYAEVSL

SEQ ID NO: 23653 - protein, 143 aa, Parachlamydia acanthamoebae
  misc_feature (1)..(143): tr|F8KX34|F8KX34_PARAV 6-carboxy-5,6,7,8-tetrahydropter in synthase OS=Parachlamydia acanthamoebae (strain UV7) OX=765952 GN=queD-B PE=4 SV=1
MNTVKCTRKIHFCAGHRVMNHENKCATAHGHNYYVHLTAEAPQLDSLGRVIDFSVLKEKVGGWIDEHWDHTFLVCEHDKELIQALRSLPRKKEPFICPFNPTAEEIAIYLLREVSPKVLAGSNVMITKVVVHETDNCYAEVSL

SEQ ID NO: 23654 - protein, 122 aa, Parachlamydia sp.
  misc_feature (1)..(122): tr|A0A2H9SWW8|A0A2H9SWW8_9BACT 6-carboxy-5,6,7,8-tetrah ydropterin synthase OS=Parachlamydia sp. OX=2052048 GN= queD PE=3 SV=1
MYELEKTFHFEAGHVLEYHDGKCRGPHGHSYTLTVKIRSNTLIASGPKMNMVQDFSDISAIVKPMIEKHLDHKWLNDSLNTKTPTTEVIVKWIYDYLEPRLPLLYSICISETASSKVTYTRS

SEQ ID NO: 23655 - protein, 131 aa, Paracoccus aestuarii
  misc_feature (1)..(131): tr|A0A419A203|A0A419A203_9RHOB 6-carboxytetrahydropteri n synthase OS=Paracoccus aestuarii OX=453842 GN=D3P06_0 2035 PE=4 SV=1
MFAVEVRDHIMIAHSFPSPTFGPAQGVHGATFTVDCAFFAREMDDESLVVDIGLATEALADTLAPLRYKNLDDIEEFKGRMTTTEFLCKHIFDRMAAKVRAGDLKDGGRVCKLRVLLHESHMARAWFEGDI

SEQ ID NO: 23656 - protein, 117 aa, Paracoccus aestuarii
  misc_feature (1)..(117): tr|A0A418ZS74|A0A418ZS74_9RHOB 6-carboxy-5,6,7,8-tetrah ydropterin synthase OS=Paracoccus aestuarii OX=453842 G N=D3P06_13970 PE=3 SV=1
MFRITKEFHFSASHVLDHLPADHQCARLHGHNYVVVVELAAPALNGDGFVRDFHELAALKAYLDEHFDHRHLNDVIEGPTTAEALARHLHDWCRARWPETAAVRVSETPKTWAEYRP

SEQ ID NO: 23657 - protein, 117 aa, Paracoccus alcaliphilus
  misc_feature (1)..(117): tr|A0A1H8LWT4|A0A1H8LWT4_9RHOB 6-carboxy-5,6,7,8-tetrah ydropterin synthase OS=Paracoccus alcaliphilus OX=34002 GN=SAMN04489859_103429 PE=3 SV=1
MYRIAKEFHFSASHQLSHLPPDHQCARLHGHNYVVVVELAAPALNADGFVRDYHELAALKRYIDDRFDHRHLNDVLDGPSTAEALARHFFDWSRARWPEVAAVRVSETPKTWAEYRP

SEQ ID NO: 23658 - protein, 117 aa, Paracoccus bengalensis
  misc_feature (1)..(117): tr|A0A3D9XR80|A0A3D9XR80_9RHOB 6-carboxy-5,6,7,8-tetrah ydropterin synthase OS=Paracoccus bengalensis OX=302403 GN=BDD41_0668 PE=3 SV=1
MFRIAKEFHFSASHQLAHLPPDHQCARLHGHNYVVVVELAAAELNADGFVRDYHELVPLKHYIDTHFDHRHLNEVLDGPSTAENMARHFHDWCKARWPETVAVRVSETPKTWAEYRP

SEQ ID NO: 23659 - protein, 117 aa, Paracoccus denitrificans
  misc_feature (1)..(117): tr|A1B9Q4|A1B9Q4_PARDP 6-carboxy-5,6,7,8-tetrahydropter in synthase OS=Paracoccus denitrificans (strain Pd 1222 ) OX=318586 GN=Pden_4184 PE=3 SV=1
MFRISKEFHFSASHQLAHLPPDHQCARLHGHNYIVVVELAAEELNADGFVRDYHELAPLKHYIDTHFDHRHLNDVLDGPSTAENMARHFHDWCKARWPETVAVRVSETPKTWAEYRP

SEQ ID NO: 23660 - protein, 131 aa, Paracoccus gahaiensis
  misc_feature (1)..(131): tr|A0A4U0RED0|A0A4U0RED0_9RHOB 6-carboxytetrahydropteri n synthase OS=Paracoccus gahaiensis OX=1706839 GN=FA743 _05480 PE=4 SV=1
MFAVEVRDHIMIAHSFPSPTFGPAQGMHGATFTVDAAFFAEEMDHESLVVDIGLATEALAATLAPLRYKNLDEIPEFAGKMTTTEFLCKHIFDQMAGKVRAGDLKDGGRVKKLRILLHESHMARAWFEGDL

SEQ ID NO: 23661 - protein, 117 aa, Paracoccus gahaiensis
  misc_feature (1)..(117): tr|A0A4U0REK9|A0A4U0REK9_9RHOB 6-carboxy-5,6,7,8-tetrah ydropterin synthase OS=Paracoccus gahaiensis OX=1706839 GN=queD PE=3 SV=1
MFRISKEFHFSASHRLDHLAADHQCARLHGHNYIVVVELSAPDLNADGFVRDYHELAPLKAYLDGQFDHRHLNDVLDMPSTAENLARHLFDWCRARWPETSAVKVSETPKTWAEYRP

SEQ ID NO: 23662 - protein, 131 aa, Paracoccus haeundaensis
  misc_feature (1)..(131): tr|A0A5C4R734|A0A5C4R734_9RHOB 6-carboxytetrahydropteri n synthase OS=Paracoccus haeundaensis OX=225362 GN=FHD6 7_07465 PE=4 SV=1
MFAVEVRDHIMIAHSFPSPTFGPAQGVHGATFTVDCAFFAAEMDDESLVVDIGLATEALAETLAPLRYKNLDDIPEFKGKMTTTEFLCKHIFDQMAGTVRAGGLKDGGRVKKLRVLLHESHMARAWYEGDI

SEQ ID NO: 23663 - protein, 117 aa, Paracoccus haeundaensis
  misc_feature (1)..(117): tr|A0A5C4R789|A0A5C4R789_9RHOB 6-carboxy-5,6,7,8-tetrah ydropterin synthase OS=Paracoccus haeundaensis OX=22536 2 GN=queD PE=3 SV=1
MFRISKEFHFSASHRLDHLAPDHQCARLHGHNYIVVVELAAPDLNADGFVRDYHELAALKAYVDGTFDHRHLNDVLDVPSTAENLARHFFDWCRARWPETSAVKVSETPKTWAEYRP

SEQ ID NO: 23664 - protein, 117 aa, Paracoccus hibiscisoli
  misc_feature (1)..(117): tr|A0A4U0QU39|A0A4U0QU39_9RHOB 6-carboxy-5,6,7,8-tetrah ydropterin synthase OS=Paracoccus hibiscisoli OX=202326 1 GN=queD PE=3 SV=1
MFRISKEFHFSASHRLDHLAPDHQCARLHGHNYIVVVELAAADLNRDGFVRDYHELAPLKAYLDESFDHRHLNDVLDVPSTAENLARHLFDWCRARWPETSAVKVSETPKTWAEYRP

SEQ ID NO: 23665 - protein, 131 aa, Paracoccus hibiscisoli
  misc_feature (1)..(131): tr|A0A4U0R2X2|A0A4U0R2X2_9RHOB 6-carboxytetrahydropteri n synthase OS=Paracoccus hibiscisoli OX=2023261 GN=FA74 0_14525 PE=4 SV=1
MFAVEVRDHIMIAHSFPSPTFGPAQGMHGATFTVDTAFFAEEMDHESLVVDIGLATEALAETLSPLRYKNLDEIPEFAGKMTTTEFLCKHIFDQMAAKVRAGDLKDGGRVKKLRVLLHESHMARAWFEGDI

SEQ ID NO: 23666 - protein, 117 aa, Paracoccus homiensis
  misc_feature (1)..(117): tr|A0A1I0ENL3|A0A1I0ENL3_9RHOB 6-carboxy-5,6,7,8-tetrah ydropterin synthase OS=Paracoccus homiensis OX=364199 G N=SAMN04489858_105234 PE=3 SV=1
MFRIRKEFHFSASHQLTHLPADHQCARLHGHNYIVVVELAAQALNADGFVRDYHDLGALKSYIDDGFDHRHLNDVLDGPSTAENMALHFFDWCKDRWPETSAVMVSETPKTWAEYRP

SEQ ID NO: 23667 - protein, 117 aa, Paracoccus laeviglucosivorans
  misc_feature (1)..(117): tr|A0A521B4N6|A0A521B4N6_9RHOB 6-carboxy-5,6,7,8-tetrah ydropterin synthase OS=Paracoccus laeviglucosivorans OX =1197861 GN=SAMN06265221_102111 PE=3 SV=1
MYRISKEFHFSASHQLGHLPADHQCARLHGHNYIVSVELASTTLNADGFVRDYHELSALKHYIDSELDHRHLNDVLDLPSTAENMARHFYDWSKARWPETVAVRVSETPKTWAEYRP

SEQ ID NO: 23668 - protein, 117 aa, Paracoccus pantotrophus
  misc_feature (1)..(117): tr|A0A495P1P1|A0A495P1P1_PARPN 6-carboxy-5,6,7,8-tetrah ydropterin synthase OS=Paracoccus pantotrophus OX=82367 GN=BDE18_3441 PE=3 SV=1
MFRIAKEFHFSASHQLAHLPPDHQCARLHGHNYVVVVELAAAELNADGFVRDYHELAALKHYIDTHFDHRHLNDVLDGPSTAENMARHFHDWCKARWPETVAVRVSETPKTWAEYRP

SEQ ID NO: 23669 - protein, 117 aa, Paracoccus pantotrophus
  misc_feature (1)..(117): tr|A0A1K2F1Z8|A0A1K2F1Z8_PARPN 6-carboxy-5,6,7,8-tetrah ydropterin synthase OS=Paracoccus pantotrophus OX=82367 GN=SAMN04244548_04290 PE=3 SV=1
MFRIAKEFHFSASHQLAHLPPDHQCARLHGHNYVVVVELAAAELNADGFVRDYHELAPLKHYIDTHFDHRHLNEVLDGPSTAENMARHFHDWCKARWPETVAVRVSETPKTWAEYRP

SEQ ID NO: 23670 - protein, 117 aa, Paracoccus saliphilus
  misc_feature (1)..(117): tr|A0A1N7PHK2|A0A1N7PHK2_9RHOB 6-carboxy-5,6,7,8-tetrah ydropterin synthase OS=Paracoccus saliphilus OX=405559 GN=SAMN05421772_11820 PE=3 SV=1
MYRIAKEFHFSASHQLSHLPPDHQCARLHGHNYVVVVELAAQELNAAGFVRDYHELGPLKAYIDDNFDHRHLNDIIDGPSTAEILARHFYDWCKARWPETAAVRVSETPKTWAEYRP

SEQ ID NO: 23671 - protein, 117 aa, Paracoccus seriniphilus
  misc_feature (1)..(117): tr|A0A239PWC2|A0A239PWC2_9RHOB 6-carboxy-5,6,7,8-tetrah ydropterin synthase OS=Paracoccus seriniphilus OX=18474 8 GN=SAMN05444959_106178 PE=3 SV=1
MFRIRKEFHFSASHRLSHLPDDHQCARLHGHNYIVVVELAAKALNPDGFVRDYHDLKPLKTHIDDHFDHRHLNDVLEGPSTAENLARHFFDWCAARWPETSAVLVSETPKTWAEYRP

SEQ ID NO: 23672 - protein, 120 aa, Paracoccus siganidrum
  misc_feature (1)..(120): tr|A0A419A6C1|A0A419A6C1_9RHOB 6-carboxy-5,6,7,8-tetrah ydropterin synthase OS=Paracoccus siganidrum OX=1276757 GN=queD PE=3 SV=1
MYRISKEFHFSASHQLAHLPADHQCARLHGHNYVVVVELAAADLNADGFVRDYHELKALKSYIDTHFDHRHLDDVLEVPSTAENLARHFFDWCRARWPETAAVRVSETPKTWAEYRPGPA

SEQ ID NO: 23673 - protein, 131 aa, Paracoccus sp.
  misc_feature (1)..(131): tr|A0A3A3DI62|A0A3A3DI62_9RHOB 6-carboxytetrahydropteri n synthase OS=Paracoccus sp. JM45 OX=2283626 GN=DWB67_0 2025 PE=4 SV=1
MFAVEVRDHIMIAHSFPSPTFGPAQGVHGATFTVDAAFFTDSIDDEGLVIDMGLATDALGAALAPLRYQNLDDVPAFKGKFTTTEFLCKEIFDSLAQTARDGGLGDASRLKKLRITLHESHVARAWYEANL

SEQ ID NO: 23674 - protein, 117 aa, Paracoccus sp.
  misc_feature (1)..(117): tr|A0A4P7HPE0|A0A4P7HPE0_9RHOB 6-carboxy-5,6,7,8-tetrah ydropterin synthase OS=Paracoccus sp. 2251 OX=2560053 G N=queD PE=3 SV=1
MFRISKEFHFSASHRLDHLAADHQCARLHGHNYIVVVELAAPDLNADGFVRDYHELAPLKAYLDGQFDHRHLNEVLDMPSTAENLARHLFDWCRARWPETSAVRVSETPKTWAEYRP

SEQ ID NO: 23675 - protein, 117 aa, Paracoccus versutus
  misc_feature (1)..(117): tr|A0A3E0BPM3|A0A3E0BPM3_PARVE 6-carboxy-5,6,7,8-tetrah ydropterin synthase OS=Paracoccus versutus OX=34007 GN= ATH84_103341 PE=3 SV=1
MFRIAKEFHFSASHQLAHLPPDHQCARLHGHNYVVVVELAAAELNADGFVRDYHELALLKHYIDTHFDHRHLNDVLDGPSTAENMARHFHDWCKVRWPETVAVRVSETPKTWAEYRP

SEQ ID NO: 23676 - protein, 117 aa, Paracoccus versutus; identical to SEQ ID NO: 23669
  misc_feature (1)..(117): tr|A0A369U2B6|A0A369U2B6_PARVE 6-carboxy-5,6,7,8-tetrah ydropterin synthase OS=Paracoccus versutus OX=34007 GN= DVR11_09510 PE=3 SV=1

SEQ ID NO: 23677 - protein, 133 aa, Paracraurococcus sp.
  misc_feature (1)..(133): tr|A0A4R4DSD6|A0A4R4DSD6_9PROT 6-carboxytetrahydropteri n synthase OS=Paracraurococcus sp. NE82 OX=2527868 GN=E XY23_04890 PE=4 SV=1
MFSLTVCDHIMVAHSFRGAEFGPAQRLHGATFAVEAEFRAPVLDHLHLLVDIGLAKQELRRALDSLDYRNLDAEPQFAGLNTTTEYLCLHIHRLLCAALKEGRLGPQGGNVSSLKVLLRESPNAWAAYEGDAA

SEQ ID NO: 23678 - protein, 175 aa, Paracraurococcus sp.
  misc_feature (1)..(175): tr|A0A4R4DPA7|A0A4R4DPA7_9PROT 6-carboxytetrahydropteri n synthase OS=Paracraurococcus sp. NE82 OX=2527868 GN=E XY23_08990 PE=4 SV=1
MFELVFSRRFSMAHRLIAGAAEPCAIPHGHNEVVTVRLRAAVPMPLDGHANMVEPFERAKSRWHGWIDGCVDHALQLSAADPLLGWFRAQEPHRLSRILVTPGDPTTEMLAALFMAKLNAFLAADGGRLACVHLAIEETPTNTVTFAGDPLGVLPVRDGWWRRPDSSINDLGGAA

SEQ ID NO: 23679 - protein, 140 aa, Paraeggerthella hongkongensis
  misc_feature (1)..(140): tr|A0A369LHG1|A0A369LHG1_9ACTN 6-carboxy-5,6,7,8-tetrah ydropterin synthase OS=Paraeggerthella hongkongensis OX =230658 GN=C1879_05940 PE=3 SV=1
MYGLKTEASFDSAHFLTDYYGKCENLHGHRWRTVVYLETGELQTEGTMRDMVLDFGVFKRAVRDLAEELDHTFLVEEGSLGEATLAALAAEGFSLTVLPFRTTAENLARYVCERLTEQGLPVSQVDMYETPNNCAVYRAR

SEQ ID NO: 23680 - protein, 140 aa, Paraeggerthella hongkongensis
  misc_feature (1)..(140): tr|A0A3N0BG55|A0A3N0BG55_9ACTN 6-carboxy-5,6,7,8-tetrah ydropterin synthase OS=Paraeggerthella hongkongensis OX =230658 GN=DMP08_03995 PE=3 SV=1
MYGLKTEASFDSAHFLTDYYGKCENLHGHRWRTVVYLETDELQTEGTMRDMVLDFGVFKRAVRDLAEELDHTFLVEEGSLGEATMAALAAEGFSLTVLPFRTTAENLARYVCERLTEQGLPVSQVDMYETPNNCAVYRAR

SEQ ID NO: 23681 - protein, 165 aa, Parafilimonas terrae
  misc_feature (1)..(165): tr|A0A1I5SAZ0|A0A1I5SAZ0_9BACT 6-pyruvoyltetrahydropter in/6-carboxytetrahydropterin synthase OS=Parafilimonas terrae OX=1465490 GN=SAMN05444277_101676 PE=4 SV=1
MYSLLKARSLQLAPKACVCRNFAQIFKAAMVYLTRLEHFNAAHKLYNPAWSKERNEAVFGACANENWHGHNFELFVTVKGVPDIDTGFIMDAKQLSRIIKEHVIEKLDHKNLNLDVEFLEGKMCSTENLIVEIWKQLQPHIPANVTLHSLKLYETPRIYVEYFGE

SEQ ID NO: 23682 - protein, 137 aa, Parafilimonas terrae
  misc_feature (1)..(137): tr|A0A1I5SB37|A0A1I5SB37_9BACT 6-pyruvoyltetrahydropter in/6-carboxytetrahydropterin synthase OS=Parafilimonas terrae OX=1465490 GN=SAMN05444277_101677 PE=4 SV=1
MNEKVAVYRKEHFNAAHRLHNDAFDEATNQKVFGKCNNPNYHGHNYELIVKVTGVPDAQTGFVIDLKELSDIIRENVLARFDHKNLNLDVEEFKSLNPTAENIAIIIYKILRPLINSEFDLRVRLYETERNFVEYPA

SEQ ID NO: 23683 - protein, 145 aa, Parageobacillus caldoxylosilyticus; identical to SEQ ID NO: 20745
  misc_feature (1)..(145): tr|A0A023DCW1|A0A023DCW1_9BACI 6-carboxy-5,6,7,8-tetrah ydropterin synthase OS=Parageobacillus caldoxylosilytic us NBRC 107762 OX=1220594 GN=queD PE=3 SV=1

SEQ ID NO: 23684 - protein, 145 aa, Parageobacillus caldoxylosilyticus; identical to SEQ ID NO: 20745
  misc_feature (1)..(145): tr|A0A150L4Z9|A0A150L4Z9_9BACI 6-carboxy-5,6,7,8-tetrah ydropterin synthase OS=Parageobacillus caldoxylosilytic us OX=81408 GN=B4119_1299 PE=3 SV=1

SEQ ID NO: 23685 - protein, 145 aa, Parageobacillus genomosp.
  misc_feature (1)..(145): tr|A0A023CTM1|A0A023CTM1_9BACI 6-carboxy-5,6,7,8-tetrah ydropterin synthase OS=Parageobacillus genomosp. 1 OX=1 295642 GN=H839_03681 PE=3 SV=1
MIYQLYPQVFHDYRYELNKDMHIAAAHFIPHKQAGKCANIHGHTYVINITVAGDELDETGFLVNFQKLKELIHGKLDHTLLNEHHDWFDTKNSNDFPTTEVVARKIYETVQAYLDTLPHKPKCLQVFVRETPTSYVVYRPKAGDR

SEQ ID NO: 23686 - protein, 144 aa, Parageobacillus thermantarcticus
  misc_feature (1)..(144): tr|A0A1I0T9C0|A0A1I0T9C0_9BACI 6-carboxy-5,6,7,8-tetrah ydropterin synthase OS=Parageobacillus thermantarcticus OX=186116 GN=SAMN05192569_101718 PE=3 SV=1
MIHQLYPQVFHNYQYELNKDMHIAAAHFIPHEKAGKCANMHGHIYTVNITVAGDELDDAGFLVNFQELKELIHGKLDHTLMNEHRDWFNDQNSNDFPTSEVIARKIYETVQAHLDTLPNKPKCLQVFVRETPTSYVVYRPKAGK

SEQ ID NO: 23687 - protein, 144 aa, Parageobacillus thermoglucosidasius
  misc_feature (1)..(144): tr|A0A178TWH5|A0A178TWH5_PARTM 6-carboxy-5,6,7,8-tetrah ydropterin synthase OS=Parageobacillus thermoglucosidas ius OX=1426 GN=BAA00_13470 PE=3 SV=1
MIHQLYPQVFHNYQYELNKDMHIAAAHFIPHEKAGKCANMHGHIYTVNITVAGDELDDAGFLVNFQELKKLIHGKLDHTLMNEHQDWFNEQNSNDFPTSEVIARKIYETVQAHLDTLPNKPKCLQVFVRETPTSYVVYRPKAGK

SEQ ID NO: 23688 - protein, 144 aa, Parageobacillus thermoglucosidasius
  misc_feature (1)..(144): tr|A0A401XWI4|A0A401XWI4_PARTM 6-carboxy-5,6,7,8-tetrah ydropterin synthase OS=Parageobacillus thermoglucosidas ius OX=1426 GN=queD PE=3 SV=1
MIHQLYPQVFHNYQYELNKDMHIAAAHFIPHEKAGKCANMHGHIYTVNITVAGDELDDAGFLVNFQELKKLIHDKLDHTLMNEHQDWFNEQNSNDFPTSEVIARKIYETVQAHLDTLPNKPKCLQVFVRETPTSYVVYRPKAGK

SEQ ID NO: 23689 - protein, 143 aa, Parageobacillus toebii
  misc_feature (1)..(143): tr|A0A150N691|A0A150N691_9BACI 6-carboxy-5,6,7,8-tetrah ydropterin synthase OS=Parageobacillus toebii OX=153151 GN=B4110_1040 PE=3 SV=1
MHQLYPQVFHDYRYELNKDMHIAAAHFIPHKQAGKCANIHGHTYIVNITVAGDVLDDSGFLVNFQKLKELIHGKLDHSLMNEHQDWFNDQNSNDFPTSEVIARKIYETVQAYLDTMPNKPKCLQVFVRETPTSYVVYRPKAGK

SEQ ID NO: 23690 - protein, 144 aa, Parageobacillus toebii; identical to SEQ ID NO: 20738
  misc_feature (1)..(144): tr|A0A3M0EYG9|A0A3M0EYG9_9BACI 6-carboxy-5,6,7,8-tetrah ydropterin synthase OS=Parageobacillus toebii NBRC 1078 07 OX=1223503 GN=DER53_1851 PE=3 SV=1

SEQ ID NO: 23691 - protein, 291 aa, Paraglaciecola agarilytica
  misc_feature (1)..(291): tr|K6XC52|K6XC52_9ALTE Uncharacterized protein OS=Parag laciecola agarilytica NO2 OX=1125747 GN=GAGA_0799 PE=4 SV=1
MQLFVNDLTVMDFSYLCPKRGMVGESWIVDVVLDGDLNEESMVLDFSKVKKQLKHLIDEYVDHKLLIPVEHEYSHILRDEKNDRVSVDFMRPDGRSIHLNCPSEAYAFVYSKHVTMSSVSQYLKQVIATHLPDNVAGLELALRAEVITTPYYHYTHGLKKHDGNCQRIAHGHRSKITIVENQHESQEWQQYWAERWCDIYVGSNEDLVSADKVNFVKSDTDFSEHFLFGYESSQGWFELAIPKAETEMVDTDTTVECLAQYIADEQKRLVPDSEFKVFAFEGVGKGAIAYA

SEQ ID NO: 23692 - protein, 291 aa, Paraglaciecola arctica
  misc_feature (1)..(291): tr|K6YVE9|K6YVE9_9ALTE Uncharacterized protein OS=Parag laciecola arctica BSs20135 OX=493475 GN=GARC_5217 PE=4 SV=1
MQLFVNDLTVMDFSYLCPERGMVGESWIVDVILSGDLNEESMVLDFGKVKKQLKQLIDEYIDHKLLVPVEHQYSRVKHDEKSDRVKVDFIRPDGKSIHLNCPAEAYAFVYSPNVTMPSVSDYLKDVIATHLPENVAGLELNLRAEVINTPYYHYTHGLKKHDGNCQRIAHGHRSKVVVFENQQESTKWQQYWADRWCDIYIGSTEDIVDIGETVFSLPDDDATQHYVFAYESSQGRFELAIPKAESEMLDTDTTVECLAQYMADEHKRLQSNSDFKVLAYEGVGKGAIAFA

SEQ ID NO: 23693 - protein, 199 aa, Paraglaciecola hydrolytica
  misc_feature (1)..(199): tr|A0A136A1Z7|A0A136A1Z7_9ALTE QueD like protein OS=Par aglaciecola hydrolytica OX=1799789 GN=AX660_14010 PE=4 SV=1
MELAILLMVLVIIVAVCVMKLNEPQLAFPFKKKTNLFTQVERNFLALIEDAVGKDYRILCRVKLVDILAVRQSTDKKTSKNAVSKANSRYLDFVLCSKTDMTPVLAIDLVHNNGKDGYKTQRDWFVNGSLDAASIPHVRIKVRSGYKTQDIKDCIEAKLPSKIPKQLKAPIMQGTLNLPEELKQKAKPTRPVGRSVIAA

SEQ ID NO: 23694 - protein, 291 aa, Paraglaciecola hydrolytica
  misc_feature (1)..(291): tr|A0A148KMF2|A0A148KMF2_9ALTE 6-pyruvoyl tetrahydropte rin synthase OS=Paraglaciecola hydrolytica OX=1799789 G N=AX660_22520 PE=4 SV=1
MQLFVNDLTVMDFSYLCPQRGMVGESWIVDVILNGDLNEESMVLDFSKVKKQLKYLIDLHIDHKLLVPVEHSYSQVERDNKTDYVKVDFMRPQGRSIHLNCPAEAYAFVYADQVTMPTVSDYLKDVIATHLPDNVEGIELMLRAEVIHTPYYHYTHGLKKHDGNCQRIAHGHRSKVLVYQDQQDSLELQTYWAQRWADIYIGSTEDVVTTADVCFKLDTGDFNAHWLFAYESSQGRFELAIPKAESELIDTDTTVECLAQFMANEHKRLDLSHSYKVLAFEGVGKGAIAYA

SEQ ID NO: 23695 - protein, 291 aa, Paraglaciecola mesophila
  misc_feature (1)..(291): tr|K6ZSL3|K6ZSL3_9ALTE Uncharacterized protein OS=Parag laciecola mesophila KMM 241 OX=1128912 GN=GMES_4012 PE= 4 SV=1
MQLFVNDLTVMDFSYLCPKRGMVGESWIVDVVLDGDLNEESMVLDFSKVKKQLKHLIDEYVDHKLLIPVEHEYSHIWRDEKNDRVSVDFMRPEGRSIHLNCPSEAYAFVYSKHVTMSSVSQYLKQVIATHLPDNVAGLELNLRAEVINTPYYHYTHGLKKHDGNCQRIAHGHRSKITIVENQHESLEWQQYWAERWCDIYVGSNEDLVSADKVNFVKNQTDFTGHYLFGYESSQGWFELAIPKAETEMVDTDTTVECLAQYIADEQKRLVPESEFKIFAFEGVGKGAIAYA

SEQ ID NO: 23696 - protein, 291 aa, Paraglaciecola polaris
  misc_feature (1)..(291): tr|K6YP40|K6YP40_9ALTE Uncharacterized protein OS=Parag laciecola polaris LMG 21857 OX=1129793 GN=GPLA_3596 PE= 4 SV=1
MQLFVNDLTVMDFSYLCPKRGMVGESWIVDVILDGDLNEESMVLDFSKVKKQLKHLIDEYVDHKLLIPVEHEYSHILRDEKNDRVSVDFMRPEGRSLHLNCPSEAYAFVYSKHVTMSSVSQYLKQVIATHLPENVAGIELTLRAEVINTPYYHYTHGLKKHDGNCQRIAHGHRSKITIVENQHESQEWQQYWAERWCDIYVGSNEDLVSLDKVNFVKSDTDLTQHYLFGYESSQGWFELAIPKAETEMVDTDTTVECLAQYIADEQKRLEPESDFKVYAFEGVGKGAIAYA

SEQ ID NO: 23697 - protein, 291 aa, Paraglaciecola psychrophila
  misc_feature (1)..(291): tr|K7ATN9|K7ATN9_9ALTE Uncharacterized protein OS=Parag laciecola psychrophila 170 OX=1129794 GN=C427_4577 PE=4 SV=1
MQLFVNDLTVMDFSYLCPERGMVGESWIVDVILSGDLNEESMVLDFGKVKKQLKQLIDEYIDHKLLVPVEHEYSRIEHDEKSDRVKVDFIRPDNQSIHLNCPAEAYAFVYSPNVTMPSVSDYLKDVIATHLPENVAGIELNLRAEVINTPFYHYTHGLKKHDGNCQRIAHGHRSKVVVFENQQESIKWQEYWSERWCDIYIGSTEDIVDVSETVFSLPNGDLEQHNVFAYESSQGRFELAIPKAESEMLDTDTTVECLAQFMADEHKRLNNNSDFKVLAYEGVGKGAIAFA

SEQ ID NO: 23698 - protein, 291 aa, Paraglaciecola sp.
  misc_feature (1)..(291): tr|A0A2N1DFC0|A0A2N1DFC0_9ALTE Uncharacterized protein OS=Paraglaciecola sp. MB-3u-78 OX=2058332 GN=CXF95_0663 0 PE=4 SV=1
MQLFVNDLTVMDFSYLCPERGMVGESWIVDVILSGDLNEESMVLDFGKVKKQLKQLIDEYIDHKLLVPVEHEYSHVEHDEKSDRVKVDFIRPDNKSIHLNCPAEAYAFVYSQHVTMPSVSNYLKDVIATHLPENVAGLELNLRAEVINTPFYHYTHGLKKHDGNCQRIAHGHRSKVVVFENQQESIKWQEYWAKRWCDIYIGSTEDIVEASETVFCLPNANSEKHNVFAYESSQGRFELAIPKAESEMIDTDTTVECLAQFMADEHKRLNSNSDFRVLAYEGVGKGAIAFA

SEQ ID NO: 23699 - protein, 162 aa, Parahaliea aestuarii
  misc_feature (1)..(162): tr|A0A5C8ZUG3|A0A5C8ZUG3_9GAMM 6-pyruvoyl tetrahydropte rin synthase OS=Parahaliea aestuarii OX=1852021 GN=FV13 9_15680 PE=4 SV=1
MERLTTLHIDKESHKFSAAHYTIFSASERERLHGHNYSVSARIVAPMGDNGFSADYNVYKRRIKQLCDELDEYMLLAGDSPHQQIGEEGDYYRVRFAGEQMLFLRSDTLVLPIRNATVEEFSHYLLGRLVERSRGEDLREIELGVASGPGQRGSARWQCAPD

SEQ ID NO: 23700 - protein, 120 aa, Parahaliea aestuarii
  misc_feature (1)..(120): tr|A0A5C8ZZ20|A0A5C8ZZ20_9GAMM 6-carboxy-5,6,7,8-tetrah ydropterin synthase OS=Parahaliea aestuarii OX=1852021 GN=queD PE=3 SV=1
MPMEIYKEFHFEAAHRLPNVPEGHKCARLHGHSFHVRISVTGDAPEPSGWVMDFGDLKAAFKPVLEQLDHYYLNDITGLENPTSENLARWIWQRLQPDLPLLSAVEIRETCTSGCIYRGD

SEQ ID NO: 23701 - protein, 149 aa, Paralcaligenes ureilyticus
  misc_feature (1)..(149): tr|A0A4R3MFD0|A0A4R3MFD0_9BURK 6-carboxy-5,6,7,8-tetrah ydropterin synthase OS=Paralcaligenes ureilyticus OX=62 7131 GN=EDC26_101169 PE=3 SV=1
MLTITKRLEFDAGHRIPDHKSKCRNLHGHRYALEITLQGEPIDSPGASDNGMLMDFSDVKQIAMEHLVDIWDHAFLVYEGDSLMQLLLSGLPDHKTVVVPQIPTVENLAIIAYQILAPRYRQRFGAKLQLAKIRLYETPTSWADYTASN

SEQ ID NO: 23702 - protein, 131 aa, Paramaledivibacter caminithermalis
  misc_feature (1)..(131): tr|A0A1M6QZ91|A0A1M6QZ91_9CLOT 6-carboxy-5,6,7,8-tetrah ydropterin synthase OS=Paramaledivibacter caminithermal is DSM 15212 OX=1121301 GN=SAMN02745912_02786 PE=3 SV=1
MKLKKVVYKEFLFDAAHKLLNYEGDCKFLHGHTYKLIVGIKGKLNEIGMIIDYKEIKEIWDKKIKNSLDHTNLNDSIDVPNTTAEYIASWIFKKWDAEIRLISTNKNELELESITLYETPTSFVVVEKEKV

SEQ ID NO: 23703 - protein, 118 aa, Paramesorhizobium deserti
  misc_feature (1)..(118): tr|A0A135HZG3|A0A135HZG3_9RHIZ 6-carboxy-5,6,7,8-tetrah ydropterin synthase OS=Paramesorhizobium deserti OX=149 4590 GN=ATN84_01810 PE=3 SV=1
MYRITKEFHFSASHRLTGLPEEHPCARLHGHNYMVVVELSAAELDAHGFVRDYRELAPLKRYIDEALDHRHLNDVFGHERVTAEFLARELYGWCKARWPEVTAVRVSETPKTWAEYRP

SEQ ID NO: 23704 - protein, 117 aa, Paramuribaculum intestinale
  misc_feature (1)..(117): tr|A0A2V1IQD9|A0A2V1IQD9_9BACT 6-carboxy-5,6,7,8-tetrah ydropterin synthase OS=Paramuribaculum intestinale OX=2 094151 GN=C5O25_12370 PE=3 SV=1
MYYISKKIEVSGSHRLELSYESKCGNVHGHNWIVTVFCRAETLNADGMVCDFTRIKEDIMGRLDHRHLNDVLPFNPTAENIARWITEQIPECYKTIVQESEGNVAAYVRDDCGDCVL

SEQ ID NO: 23705 - protein, 137 aa, Parapedobacter composti
  misc_feature (1)..(137): tr|A0A1I1IXL5|A0A1I1IXL5_9SPHI 6-carboxy-5,6,7,8-tetrah ydropterin synthase OS=Parapedobacter composti OX=62328 1 GN=SAMN05421747_11097 PE=3 SV=1
MIYLTRRERFNAAHKLYREGWTLEQNEEVFGKCSNPNWHGHNYELFVTVKGKINPETGFVIDLKELKKIIKAQVVNKLDHRNINLDVDFMQGKMASTEVLAVEIFNQLKPHVEAHGVFLHSIKLVETENNAVEYFGG

SEQ ID NO: 23706 - protein, 137 aa, Parapedobacter indicus
  misc_feature (1)..(137): tr|A0A1I3TAI4|A0A1I3TAI4_9SPHI 6-carboxy-5,6,7,8-tetrah ydropterin synthase OS=Parapedobacter indicus OX=147743 7 GN=SAMN05444682_112102 PE=3 SV=1
MIYLTRRERFNAAHKLYREGWTLEQNEAVFGKCSNPNWHGHNYELFVTVKGEVNPETGFVIDLKELKKIITTYVIDKLDHRNVNLDVDFMQGKMASTEVLAIEIFHQLKPHVEAHQAFLHSVRLVETENNSVEYFGD

SEQ ID NO: 23707 - protein, 138 aa, Parapedobacter koreensis
  misc_feature (1)..(138): tr|A0A1H7IET4|A0A1H7IET4_9SPHI 6-carboxy-5,6,7,8-tetrah ydropterin synthase OS=Parapedobacter koreensis OX=3329 77 GN=SAMN05421740_102196 PE=3 SV=1
MIYVTRRERFSAAHFMYNKALSREENMRLYGKCAGIHGHNYELFVTVSGEINPETGYLIDLGILGHIIREHVVDLLDHRNLNENVAFLEGLPTSTEVLAGEIFHQLEALVAAAGISLHKVKLVETKNNYTEYGGDTWQ

SEQ ID NO: 23708 - protein, 137 aa, Parapedobacter koreensis
  misc_feature (1)..(137): tr|A0A1H7T9S4|A0A1H7T9S4_9SPHI 6-carboxy-5,6,7,8-tetrah ydropterin synthase OS=Parapedobacter koreensis OX=3329 77 GN=SAMN05421740_110147 PE=3 SV=1
MIYLTRRERFNAAHKLYRDEWTLEQNEAVFGKCSNPNWHGHNYELFVTVKGEVNPKTGFVIDLKELKNIIMAYVIDKVDHRNINLDVDFMRGKMASTEVLAIEIFNQLRPHIEAHDVILHSVRLVETENNSVEYFGS

SEQ ID NO: 23709 - protein, 137 aa, Parapedobacter luteus
  misc_feature (1)..(137): tr|A0A1T5F908|A0A1T5F908_9SPHI 6-carboxy-5,6,7,8-tetrah ydropterin synthase OS=Parapedobacter luteus OX=623280 GN=SAMN05660226_03834 PE=3 SV=1
MIYLTRRERFNAAHKLYRDEWTLEQNEAVFGKCSNPNWHGHNYELFVTVKGEVNPETGFVIDLKELKNIIMFYVIDKLDHRNINMDVDFMQGKMASTEVLAIEIFNQLKPHVEAHDVILHSVRLVETENNSVEYFGE

SEQ ID NO: 23710 - protein, 137 aa, Parapedobacter sp.
  misc_feature (1)..(137): tr|A0A3N7H751|A0A3N7H751_9SPHI 6-carboxytetrahydropteri n synthase OS=Parapedobacter sp. OX=1958893 GN=EAS52_08 835 PE=4 SV=1
MIYLTRRERFNAAHKLYREGWTLEQNEAVFGKCSNPNWHGHNYELFVTVKGEVNPETGFVIDLKELKSIITTYVIDKLDHRNVNLDVDFMQGKMASTEVLAIEIFHQLKAHIEAHGAILHSVRLVETENNSVEYFGD

SEQ ID NO: 23711 - protein, 200 aa, Paraperlucidibaca baekdonensis
  misc_feature (1)..(200): tr|A0A3E0H327|A0A3E0H327_9GAMM 6-pyruvoyltetrahydropter in/6-carboxytetrahydropterin synthase OS=Paraperlucidib aca baekdonensis OX=748120 GN=DFR26_2069 PE=4 SV=1
MLIRKLFRFENAHIVRNCSSDRCKRSIHGHSYQVEVLLEAHALDNGQMVYDFGLMKDDIRNLIDAFDHAVAFWDEDDADYIAACKQFSARWIALPVSPSAEQFSRMFFTLIDRALSLTDMANGEQDVALHSVIVHETATGYAQCFRADIDNPRIGPVDMQRVVFSEQVISEWSDTTLWQRLLRGKRKHNPRVEQQVISNR

SEQ ID NO: 23712 - protein, 120 aa, Paraphotobacterium marinum
  misc_feature (1)..(120): tr|A0A220VET0|A0A220VET0_9GAMM 6-carboxy-5,6,7,8-tetrah ydropterin synthase OS=Paraphotobacterium marinum OX=17 55811 GN=queD PE=3 SV=1
MTTEIFKEFTFEAAHKLPNVPEGHKCGRLHGHSFVVRLYITGNVDPHTGWILDFSEVSKVFKPIYNQLDHYYLNDIPGLENPTSEVLAKWIYKKVKPNLPLLSKVMIMETCTAGCFYTED

SEQ ID NO: 23713 - protein, 188 aa, Paraprevotella clara
  misc_feature (1)..(188): tr|A0A412UDW9|A0A412UDW9_9BACT Rubredoxin OS=Paraprevot ella clara OX=454154 GN=DWW55_04510 PE=4 SV=1
MRSITTFDLQYAHRFYGFQGEAQYLHGHTGVLTIEVEDTVNEGVNMVYPCNEIQKVAWDVLKNFDHALVLREDDPLLPAILDVYEKQGIKNGHPQNKMKGEAFKTPLATAYPDCRLVVTKETMTVEGMIKIVYDLLKEKLNIAKITFTSGVNAGSAEFETKNNIERCPLCGITLNKEGVCPKCGYKKK

SEQ ID NO: 23714 - protein, 188 aa, Paraprevotella clara; identical to SEQ ID NO: 23713
  misc_feature (1)..(188): tr|R5NZA3|R5NZA3_9BACT Uncharacterized protein OS=Parap revotella clara CAG:116 OX=1263095 GN=BN471_00857 PE=4 SV=1

SEQ ID NO: 23715 - protein, 284 aa, Pararheinheimera mesophila
  misc_feature (1)..(284): tr|A0A3P3QQ87|A0A3P3QQ87_9GAMM Uncharacterized protein OS=Pararheinheimera mesophila OX=1547515 GN=EIK76_00915 PE=4 SV=1
MILFVRDLTVIDFSYLCQQRGLLGESYIVDVELHGSLDQTSMVFDFGLVKKVIKKAIDQLVDHKLVIPALSPATELRSGEVEQVLFRSDKGLLQVASPAEAFAIIQTDKIDMTSVGDFLTAQIKPLLPDNVAKLLLQLRTEHVSGFSYHYTHGLKKHDGNCQRIAHGHRSTIQIFDNGMLSPKLGKYWCERWEDIYLATAEDQVDASVLRYLQAEAGALNFAYSSAQGYFEISLPAATCEVVPCDTTVECLADYIAASVKASHQLSAVKVIAYEGVGKGAIAFA

SEQ ID NO: 23716 - protein, 284 aa, Pararheinheimera tangshanensis
  misc_feature (1)..(284): tr|A0A5C8LZ95|A0A5C8LZ95_9GAMM Uncharacterized protein OS=Pararheinheimera tangshanensis OX=400153 GN=FU839_09 710 PE=4 SV=1
MILFVRDLTVIDFSYLCQQRGLLGESYIVDVELHGDLDQTSMVFDFGLVKKVIKKAIDQLVDHKLAIPALSSATQLLSGEVEQVLFSCAKGLLQIASPAEAFAVIQAEKIDMTSVTEFLTEQIKPLLPDNVAKLVLQLRTEQVSGFSYHYTHGLKKHDGNCQRIAHGHRSTIQIFDNGMLSPRLGKYWCERWEDIYLATAEDQIEASALRYLKAEAGALNFAYSSDQGYFEISLPASTCEVVPCDTTVECLADYIAASIKESHQLRAVKVVAFEGVGKGAIAFA

SEQ ID NO: 23717 - protein, 118 aa, Pararhizobium polonicum
  misc_feature (1)..(118): tr|A0A1C7P0H1|A0A1C7P0H1_9RHIZ 6-carboxy-5,6,7,8-tetrah ydropterin synthase OS=Pararhizobium polonicum OX=16126 24 GN=ADU59_16010 PE=3 SV=1
MFRITKEFHFSASHQLTHLPAEHQCARLHGHNYIVVVELSAAALNGDGFVRDYHELAPLKRYIDDSFDHRHLNEVLGHDRVTSECLAKHFYDWCKDRLPETSAVRVSETPKTWAEYRP

SEQ ID NO: 23718 - protein, 184 aa, Parasaccharibacter apium
  misc_feature (1)..(184): tr|A0A2S4PDG9|A0A2S4PDG9_9PROT 6-pyruvoyl tetrahydropte rin synthase OS=Parasaccharibacter apium OX=1510841 GN= ASQ42_08320 PE=4 SV=1
MSDITRTELVFTRRFCMGHRLISGSSERCAIPHGHNEYVTVTLVPGPNAPQDRRLDGHGNMLLPFAEAKGRWHRFIDERMDHSFQLSESDPLLGWFAEHEPQRLDRLVVTPGDPTTELLAALLMSKLQAFLTAQGGLLSPASLEIKETPTNTVRLHGDPSLYLPLVDRPADRCWWHRADDTTRD

SEQ ID NO: 23719 - protein, 184 aa, Parasaccharibacter apium
  misc_feature (1)..(184): tr|A0A2C6IW54|A0A2C6IW54_9PROT 6-pyruvoyl tetrahydropte rin synthase OS=Parasaccharibacter apium OX=1510841 GN= BG621_02940 PE=4 SV=1
MSDITRTELVFTRRFCMGHRLISGCSERCAIPHGHNEYVTVTLIPGPNAPQGQRLDGHHNMMLPFAEAKGRWHRFIDERMDHSFQLSASDPLLQWFTTHEPQRLERIVVTPGDPTTELLAALLMSKLQAFLTAQGGLLAPASLEIKETPTNTVRLHGEPTLYLPLMDRPAEQCWWHRADDSTRD

SEQ ID NO: 23720 - protein, 289 aa, Parashewanella curva
  misc_feature (1)..(289): tr|A0A3L8PZQ8|A0A3L8PZQ8_9GAMM Uncharacterized protein OS=Parashewanella curva OX=2338552 GN=D5018_05940 PE=4 SV=1
MLLFVNDLTVIDFSYLCAERGMVGESWIVDVVLEGGLDDQNMVLDFAKVKKTIKRTIDDVLDHRLAVPSLSHATSYQVQDDDTVRVDFNSQKGSIHLRCPEQAFTSIDTNVIDLAATIQFLNNELKKVLPDNVLNIELTLRAEELNRPYYHYSHGLKKHDGNCQRIAHGHRSPISVFIDGEESQQWNEYWAKRWQDIYLGSEEDLVQLADLDVNSKGISDESHFAFKYQAPQGEFQLAISKEVCDIIPHDTTVELLADFVANHVANEIQDSKVLVKAYEGVGKGAIAKV

SEQ ID NO: 23721 - protein, 167 aa, Parashewanella curva
  misc_feature (1)..(167): tr|A0A3L8PWI9|A0A3L8PWI9_9GAMM 6-pyruvoyl tetrahydropte rin synthase OS=Parashewanella curva OX=2338552 GN=D501 8_10665 PE=4 SV=1
MTQTNRRLTHLVLAKEYMKFSAAHFTIFSVTERERLHGHNFQVSLELTLPVGNDGLSHSYRLFKDQARALCETLDEYCLLPNHSPYLDIHQNNNEYHVKFHNETLRFPVSDTLLLPIKNTSVEELSFYLLEQIIRALPPVKYGIEHVTVSVSSGAGQSGSSSWKKEE

SEQ ID NO: 23722 - protein, 292 aa, Parashewanella spongiae
  misc_feature (1)..(292): tr|A0A3A6UMQ6|A0A3A6UMQ6_9GAMM Uncharacterized protein OS=Parashewanella spongiae OX=342950 GN=D5R81_02670 PE= 4 SV=1
MLLFVKDLTVIDFSYLCEKRGMIGESWIVDVVLEGGLDEQNMVLDFAKVKRAIKNTIDDVADHRLLVPVHSDATQFEQTIDKTFVDFESEVGALHLACPDEAFAFINSDSITYESVVDFLRIELGKVLPDNVEGIELTLRTEALDKPFYHYSHGLKKHDGNCQRIAHGHRSPISVYENGVESMKWNEYWAERWQDIYLGSKEDIYDVMALTLSENAKVSSDEHYGFSYVAPQGLFQLAIPKSCCEIIPHDTTVELLAEFVANDLSAQRPDSDFKVVAFEGVGKGAIASKAKQ

SEQ ID NO: 23723 - protein, 164 aa, Parashewanella spongiae
  misc_feature (1)..(164): tr|A0A3A6TVG1|A0A3A6TVG1_9GAMM QueD-like protein OS=Par ashewanella spongiae OX=342950 GN=D5R81_06050 PE=4 SV=1
MQLERALINELDTGLSLNLATVSNRRSDFSLLLALMSQDIRDMAQFELEHSQADAEKLKLRKKFKLPAEETLIADLSTQTLPVDHSATFQAQGVIEFRLQQNLKPEAIVSRGKYPADFTEAINNCDIHVSRKINGIDGDKKLKSVPFITQLEQQRTMSKLIAQA

SEQ ID NO: 23724 - protein, 208 aa, Parasutterella excrementihominis
  misc_feature (1)..(208): tr|F3QH32|F3QH32_9BURK Uncharacterized protein OS=Paras utterella excrementihominis YIT 11859 OX=762966 GN=HMPR EF9439_00223 PE=4 SV=1
MRQEKTLNRIEIDTVLTKEKSMRSITSFDLQYAHRFLNFQGEAQYLHGHTGVLTIEVEDTIEPGVNMVFPCNEIRKTAWEVLKNFDHALILREDDPLLPAILAVYDAQGIRNGAPSNRMKGAPVKTDLITCYPDCRLVVTKETLTTEGMIKIAYDLLKDKLNIAKITFTSGVNAASQEYKPQGTVDRCPLCGIALDENGVCPKCGYRK

SEQ ID NO: 23725 - protein, 148 aa, Parcubacteria group
  misc_feature (1)..(148): tr|A0A2D6FNK2|A0A2D6FNK2_9BACT 6-pyruvoyl tetrahydrobio pterin synthase OS=Parcubacteria group bacterium OX=202 6774 GN=CMI54_08935 PE=4 SV=1
MKIITATRRIQFCCGHRVMLHESKCAHLHGHNYVAFFTASAELDAVGRVMDFSAIKTLIGGWIDKYWDHGFILNKADELGIKVVSIFEPREGIVQKLYLMPTNPTAENMAEYLVNTVCPSLMKGTGVEITKVRIWETENCYADAEEDR

SEQ ID NO: 23726 - protein, 168 aa, Parcubacteria group
  misc_feature (1)..(168): tr|A0A1V5WFV3|A0A1V5WFV3_9BACT 6-pyruvoyl tetrahydropte rin synthase OS=Parcubacteria group bacterium ADurb.Bin 216 OX=1852939 GN=BWY21_02252 PE=4 SV=1
MKTYISKIINIGVCYRLLNLPKSHPYCKLFKQNLTLTLNFCGPQKEDKEWIIDYAKLDEMEEVILEDFNHRCLNMNELMYEKSDIEVNATLENMAQYFYHYITKKFPGYAELLDSVELDNNEGLVATVIRDEEKRLEEEIPTIKTTDYYPYITYPPFFYRPWYWNEKL

SEQ ID NO: 23727 - protein, 284 aa, Parendozoicomonas haliclonae
  misc_feature (1)..(284): tr|A0A1X7AF87|A0A1X7AF87_9GAMM 6-pyruvoyl tetrahydropte rin synthase OS=Parendozoicomonas haliclonae OX=1960125 GN=EHSB41UT_00473 PE=4 SV=1
MSSLFVNQLTTIDFSYLCPERGLVGETWLVDVILSGELNEEGMVFDFGHVKKEIKAMIDSSADHALLVPALHPAIQVEELADKQRSVRLNINSGNEIICQAPEQAIMSLPVSEITPENVRPLLEEHVLKQLPDNVTGIEFSLYPDTIQGAYFHYSHGLKKHSGDCQRIAHGHRSPLKVFICGEEREELAQEQAKSWRDIYLATTEDLQSRYQHNGQQHLTFAYTANQGDFLLSIPESHCYLLETDTTIELLADHLAQCMLDKTGSENIKVIANEGFCKGAIGIR

SEQ ID NO: 23728 - protein, 161 aa, Parolsenella catena
  misc_feature (1)..(161): tr|A0A3G9KAD3|A0A3G9KAD3_9ACTN 6-carboxytetrahydropteri n synthase QueD OS=Parolsenella catena OX=2003188 GN=Pc atena_13570 PE=4 SV=1
MYGLQAEAHFDGAHFLTDYYGKCENLHGHRWRVVATIEVERLQGAHDGAGELRDDGTSTAAGTMRDMVVDFGVFKRTVAEVADELDHTFLVEEGSLAPATVAALEGEGFSLTMLPFRTTAENLARWFFDRLAERGLPVSQVEVDETPNNRAFYARDGHVGR

SEQ ID NO: 23729 - protein, 142 aa, Parvibacter caecicola
  misc_feature (1)..(142): tr|A0A3N0ABK6|A0A3N0ABK6_9ACTN 6-carboxy-5,6,7,8-tetrah ydropterin synthase OS=Parvibacter caecicola OX=747645 GN=queD PE=3 SV=1
MYGLKTESSFDAAHFLTDYHGKCENLHGHRWRVVAILATDELQEAGTCKDMVMDFGEFKRILRALTEELDHSFIVEEGSLKPQTMKCLEEEGFTLSVMPFRTTAENLARYFWQRLDEAGVPVMVVEVYETPNNCAIYERGRN

SEQ ID NO: 23730 - protein, 142 aa, Parvibacter caecicola
  misc_feature (1)..(142): tr|A0A4T9TB92|A0A4T9TB92_9ACTN 6-carboxy-5,6,7,8-tetrah ydropterin synthase OS=Parvibacter caecicola OX=747645 GN=E5982_05815 PE=3 SV=1
MYGLKTESSFDAAHFLTDYHGKCENLHGHRWRVVAILATDELQEAGTCKDMVMDFGEFKRILRALTEELDHSFIVEEGSLKPQTMKCLEEEGFTLSVMPFRTTVENLARYFWQRLDEAGVPVMVVEVYETPNNCAIYERGRN

SEQ ID NO: 23731 - protein, 122 aa, Parvibaculum lavamentivorans
  misc_feature (1)..(122): tr|A7HXX3|A7HXX3_PARL1 6-carboxy-5,6,7,8-tetrahydropter in synthase OS=Parvibaculum lavamentivorans (strain DS- 1 / DSM 13023 / NCIMB 13966) OX=402881 GN=Plav_3150 PE= 3 SV=1
MKIYKEFLFDAAHFLPYAEEGHPNRRMHGHSFRVVVWLKGKPAAETGIVRHFEDVEREIMAVREKLDHHLLNEIEGLEFPTLERIAAWIWDALATPLPEIARVEVHRASCREGCIYDGPEAE

SEQ ID NO: 23732 - protein, 125 aa, Parvibaculum sp.
  misc_feature (1)..(125): tr|A0A2D8XBR5|A0A2D8XBR5_9RHIZ 6-carboxy-5,6,7,8-tetrah ydropterin synthase OS=Parvibaculum sp. OX=2024848 GN=C MI60_02950 PE=3 SV=1
MRIYKEFGFEAAHFLPSAPEGHPNSRLHGHSFRAVVWMEGEPDPETGLIREFGSLLDVLNEVKADLDHRCLNEIEGLSVPTLENICVWLWDRLSPNLRRLSRVEVHRDSCREGCVYDGPGDTSKG

SEQ ID NO: 23733 - protein, 122 aa, Parvibaculum sp.
  misc_feature (1)..(122): tr|A0A2D8RU17|A0A2D8RU17_9RHIZ 6-carboxy-5,6,7,8-tetrah ydropterin synthase OS=Parvibaculum sp. OX=2024848 GN=C MI61_02225 PE=3 SV=1
MRIYKEFFFDAAHFLPYAEEGHPNRRMHGHSFRVVVWLSGKPDASTGLVRHFEDLEREVMAVREKLDHHLLNEIEGLELPTLEHIAVWIWHELAAPLPEIARVEIHRASCREGCVYDGPEAE

SEQ ID NO: 23734 - protein, 125 aa, Parvibium lacunae
  misc_feature (1)..(125): tr|A0A368L6F5|A0A368L6F5_9BURK 6-carboxy-5,6,7,8-tetrah ydropterin synthase OS=Parvibium lacunae OX=1888893 GN= DU000_00125 PE=3 SV=1
MHELTQSFIFEAAHTLNRAYLADPAAVLGSKRIHGHSYRALVTVRGIADPTTGMLLDLHTFRQQLHTVQSQLDHHLLDEVADLGPATLENLTQYIWRQLQPTLASLYRVTVERVLTGDSCSYYGT

SEQ ID NO: 23735 - protein, 136 aa, Parvularcula bermudensis
  misc_feature (1)..(136): tr|E0TEJ4|E0TEJ4_PARBH 6-carboxy-5,6,7,8-tetrahydropter in synthase OS=Parvularcula bermudensis (strain ATCC BA A-594 / HTCC2503 / KCTC 12087) OX=314260 GN=PB2503_1211 9 PE=3 SV=1
MTFLRDASPFPDFGMYYQSYSFFFEAAHELGEMKPEDSAHLYAEIHGHSFEVTVTLAAATIEPEGWIMDFAELKAACETVRGLLDHRLLNRIEGLSRPTLERLADFIIERLSPDLPALSEVEIARPSLNERLRRVR

SEQ ID NO: 23736 - protein, 118 aa, Parvularcula sp.
  misc_feature (1)..(118): tr|A0A2E1XB41|A0A2E1XB41_9PROT 6-carboxy-5,6,7,8-tetrah ydropterin synthase OS=Parvularcula sp. OX=1979207 GN=q ueD PE=3 SV=1
MRIVKSMSFDAAHYLDHDPDARPYARLHGHSFTLEVVIEGEPQEETGWVVDFGDVAEALQGLHEALDHRLLNEVEGLERPTLENICRWAAEKLKPQFPGLAEVRVSRPSIGESCVHLL

SEQ ID NO: 23737 - protein, 125 aa, Parvularcula sp.
  misc_feature (1)..(125): tr|A0A355BX75|A0A355BX75_9PROT 6-carboxy-5,6,7,8-tetrah ydropterin synthase OS=Parvularcula sp. OX=1979207 GN=D DZ68_01585 PE=3 SV=1
MVYEQSLQFSFEAAHELGAAVRGEGDHPYARIHGHSFVVTVTLRAGALTSAGWIMDFAELRRISERVRDLLDHRLLNLIAGLERPTLENLAAWIFKAFAAEVEGLWRVEVARPTLNERVACYATG

SEQ ID NO: 23738 - protein, 152 aa, Parvularculaceae bacterium
  misc_feature (1)..(152): tr|A0A520RBJ7|A0A520RBJ7_9PROT 6-carboxytetrahydropteri n synthase OS=Parvularculaceae bacterium OX=2510335 GN= EVA70_03900 PE=4 SV=1
MRALGRLYAAAAPQMVGGTRSMYEQTYSFTFEAAHALATSPPAQQKADTATGPHPYARLHGHSFVATIMLQSEELGGDHWVADFADVRAACDKVKNALDHQLLNEIDGLETPTLEVLSRWIYDRLASDFPAIAKVSVARPTLSESASFAAKR

SEQ ID NO: 23739 - protein, 139 aa, Pasteurella aerogenes
  misc_feature (1)..(139): tr|A0A448K5L5|A0A448K5L5_PASAE 6-carboxy-5,6,7,8-tetrah ydropterin synthase OS=Pasteurella aerogenes OX=749 GN= queD PE=3 SV=1
MFKVSKEFSFDMAHILDGHDGKCQNLHGHTYKLQVEVSGDLVLEGAKKGMVVDFTDVKRVVKEAILDPMDHAFIYDTTSERECKIAALLNELNSKTFGIPMRTTAEEMARFMFNCLKDKLPISAIRLWETPTSFCEYRE

SEQ ID NO: 23740 - protein, 141 aa, Pasteurella bettyae
  misc_feature (1)..(141): tr|I3D6J7|I3D6J7_9PAST 6-carboxy-5,6,7,8-tetrahydropter in synthase OS=Pasteurella bettyae CCUG 2042 OX=1095749 GN=queD PE=3 SV=1
MFKVSKEFSFDMAHILDGHDGKCQNLHGHTYKLQVEVSGNLHAEGAKKGMVIDFSDVKEIVKAFILDPMDHAFIYDINSERETKIANLLVELKSKTFGIPVRTTAEEMSRFIFNRLKHEVGLPVSAIRLWETPTSFCEYRE

SEQ ID NO: 23741 - protein, 141 aa, Pasteurella caecimuris
  misc_feature (1)..(141): tr|A0A4S2E538|A0A4S2E538_9PAST 6-carboxy-5,6,7,8-tetrah ydropterin synthase OS=Pasteurella caecimuris OX=179664 4 GN=queD PE=3 SV=1
MFKISKEFSFDMAHLLDNHDGKCQNLHGHTYKLQVEITGDLHENGAKKSMVMDFSDLKNTVKKAILDPMDHAFIYDQTSERESKIAALLQELNSKTFAVPFRTTAEEMARFIFNRLKYDEKLAVSAIRLWETPTSFCEYSE

SEQ ID NO: 23742 - protein, 130 aa, Pasteurella canis
  misc_feature (1)..(130): tr|A0A379EUV2|A0A379EUV2_9PAST 6-carboxy-5,6,7,8-tetrah ydropterin synthase OS=Pasteurella canis OX=753 GN=queD PE=3 SV=1
MAHMLDGHDGKCKNLHGHTYKLQVELCGDLHQSGPKRGMVIDFSDLKSIVKQHILDPMDHAFIYDSHSEKETKVAALLQSLDSKTFALTTRTTAEEMARFIFNCLKYEAHLPISAIRLWETPTSFCEYEE

SEQ ID NO: 23743 - protein, 141 aa, Pasteurella dagmatis
  misc_feature (1)..(141): tr|C9PRY5|C9PRY5_9PAST 6-carboxy-5,6,7,8-tetrahydropter in synthase OS=Pasteurella dagmatis ATCC 43325 OX=66712 8 GN=queD PE=3 SV=1
MFKIVKEFSFDMAHMLDGHDGKCKNLHGHTYKLQVEICGELHQSGPKKGMVIDFSDLKAIVKKRILEPMDHAFIYDCTSERESKVANLLQSLDSKTFSLPTRTTAEEMARFIFNCLKYEEHLPVSAIRLWETPSSFCEYEE

SEQ ID NO: 23744 - protein, 139 aa, Pasteurella langaaensis
  misc_feature (1)..(139): tr|A0A2U0SKH0|A0A2U0SKH0_9PAST 6-carboxy-5,6,7,8-tetrah ydropterin synthase OS=Pasteurella langaaensis DSM 2299 9 OX=1122935 GN=C8D76_1197 PE=3 SV=1
MFKVSKEFSFDMAHILDGHDGKCRNLHGHTYKLQVEVSGELIANGAKKGMVVDFTDVKAIVKSVILDQMDHAFIYDSTSERECKIASLLNELNSKTFGIPVRTTAEEMARFIFNQLKDKLPLSAIRLWETPTSFCEYRE

SEQ ID NO: 23745 - protein, 139 aa, [Pasteurella] mairii
  misc_feature (1)..(139): tr|A0A379B6T8|A0A379B6T8_9PAST 6-carboxy-5,6,7,8-tetrah ydropterin synthase OS=[Pasteurella] mairii OX=757 GN=q ueD PE=3 SV=1
MFKVSKEFSFDMAHILDGHDGKCQNLHGHTYKLQVEVSGDLVPEGAKKSMVVDFTDVKTAVKEAILDPMDHAFIYDTTSERECKIAALLNELNSKTFGIPVRTTAEEMARFMFNRLKDKLPISAIRLWETPTSFCEYRE

SEQ ID NO: 23746 - protein, 141 aa, Pasteurella multocida
  misc_feature (1)..(141): tr|A0A1D7R2P4|A0A1D7R2P4_PASMD 6-carboxy-5,6,7,8-tetrah ydropterin synthase OS=Pasteurella multocida OX=747 GN= queD PE=3 SV=1
MFKIAKEFSFDMAHMLDGHDGKCKNLHGHTYKLQVELCGELHQTGPKKGMVIDFSDLKDIVKQHILDPMDHAFIYDCSSEKESKVAHLLQSLDSKTFALPTRTTAEEMARFMFNCLKYEAHLPVSAIRLWETPTSFCEYKE

SEQ ID NO: 23747 - protein, 141 aa, Pasteurella multocida; identical to SEQ ID NO: 23746
  misc_feature (1)..(141): tr|V4NFF1|V4NFF1_PASMD 6-carboxy-5,6,7,8-tetrahydropter in synthase OS=Pasteurella multocida subsp. multocida P 1062 OX=1331042 GN=P1062_0206855 PE=3 SV=1

SEQ ID NO: 23748 - protein, 141 aa, Pasteurella sp.
  misc_feature (1)..(141): tr|A0A4Y9GWQ2|A0A4Y9GWQ2_9PAST 6-carboxy-5,6,7,8-tetrah ydropterin synthase OS=Pasteurella sp. WM03 OX=2558280 GN=queD PE=3 SV=1
MFKISKEFSFDMAHLLDNHDGKCQNLHGHTYKLQVEITGDLHENGAKKAMVMDFSDLKNTVKKAILDPMDHAFIYDQTSERESKIAALLQELNSKTFAVPFRTTAEEMARFIFNRLKYDEKLAVSAIRLWETPTSFCEYSE

SEQ ID NO: 23749 - protein, 142 aa, Pasteurella testudinis
  misc_feature (1)..(142): tr|A0A1W1UL70|A0A1W1UL70_9PAST 6-carboxy-5,6,7,8-tetrah ydropterin synthase OS=Pasteurella testudinis DSM 23072 OX=1122938 GN=SAMN05660772_01962 PE=3 SV=1
MFKISKEFSFDMAHMLDGHDGKCKNLHGHTYKLQVELCAPLLTDAAKCGMVMDYSDLKSVVDDLILKPMDHAFIYDQHSEKERKVAELLQELDSKVFALPYRTTAEQMSQFIFQRLQHAGLPISAVRLWETPTSFCEYTDSE

SEQ ID NO: 23750 - protein, 142 aa, Pasteurellaceae bacterium
  misc_feature (1)..(142): tr|A0A5C4QN31|A0A5C4QN31_9PAST 6-carboxy-5,6,7,8-tetrah ydropterin synthase OS=Pasteurellaceae bacterium BK431 OX=2585026 GN=queD PE=3 SV=1
MFKISKEFSFDMAHMLDGHDGKCKNLHGHTYKLQIELCAPLLTDPAKCGMVMDYSDLKNTVNELIIKPMDHAFIFDENSEKESKVARLLQELDSKVFALPYRTTAELMSQFIFQRLQQAGLPISAVRLWETPTSFCEYSCNQ

SEQ ID NO: 23751 - protein, 141 aa, Pasteurellaceae bacterium; identical to SEQ ID NO: 23741
  misc_feature (1)..(141): tr|A0A1B3JDU2|A0A1B3JDU2_9PAST 6-carboxy-5,6,7,8-tetrah ydropterin synthase OS=Pasteurellaceae bacterium NI1060 OX=1679001 GN=AC062_0147 PE=3 SV=1

SEQ ID NO: 23752 - protein, 23 aa, Patescibacteria group
  misc_feature (1)..(23): tr|A0A351TBC2|A0A351TBC2_9BACT Uncharacterized protein OS=Patescibacteria group bacterium OX=2052139 GN=DCZ31_ 03400 PE=4 SV=1
MPNHTSQCKNIHGHRYKIEITLE

SEQ ID NO: 23753 - protein, 368 aa, Paucibacter aquatile
  misc_feature (1)..(368): tr|A0A2N8KZJ6|A0A2N8KZJ6_9BURK 6-pyruvoyl tetrahydropte rin synthase OS=Paucibacter aquatile OX=2070761 GN=C1O6 6_15895 PE=4 SV=1
MNTDTLYSASSGFESACQIPALPSGHRSRGLHGHSYFATIRAQLPAGWAPFPGAEVEELRRRLEACVAPLDHALLNQTIEQPTDENIARWIRLRLEHEFGVPGIQQVGIQSTQHSGVDLDVKGMAHVWRRYRFQAAHKLPNVPMGHKCGRMHGHGFEVIVHANQDLGERDISIDYDHLDEVWAPFHAELNYHCLNEIEGLSNPTSEVISAWLWARMKPLLPELSWLTVYETGSCGANFDGQNYRIWKELTLDSAIQLKAAPADSPLRAIHGHTYTLRLHLSAELDAVMGWTVDFGDVKTLFDPIFKAIDHRPLYEIADLPDGDTASLAAWVLGKARVDLPQLDRVDMYETRGCGSIVSVATAVDLIPV

SEQ ID NO: 23754 - protein, 368 aa, Paucibacter sp.
  misc_feature (1)..(368): tr|A0A3N7C483|A0A3N7C483_9BURK 6-pyruvoyl tetrahydropte rin synthase OS=Paucibacter sp. KBW04 OX=2153361 GN=DBR 47_10075 PE=4 SV=1
MNTLTLFSASCGFESACQITALPMGHRSRGLHGHSYFATIRAELPEGWAPFPGAEVEELRRRLEACVAPLDHALLNRCIEEPTDENIARWIRQRLETEFEVPGIQQVGIQSTPHSGVDLDAQGMAHVWRRYRFQAAHQLPNVPMGHKCGRMHGHGFEVIIHANQDLGERAISIDYDHLDEVWAPFHMLLNYHCLNEIEGLHNPTSEVISAWLWARMKSELPELSWITVYETGSCGANFDGQHYRIWKELTLDSAIQLKRAPTDSPLRGIHGHTYTLRLHLHAELDQLMGWTVDFGDVKTLFDPIFKAIDHRPLYEIADLPDGDTASLAAWVLAKGRAALPQLDRIDMYETRGCGSIVSASSDGPVIPV

SEQ ID NO: 23755 - protein, 368 aa, Paucibacter sp.
  misc_feature (1)..(368): tr|A0A0U3EJZ1|A0A0U3EJZ1_9BURK 6-pyruvoyl tetrahydropte rin synthase OS=Paucibacter sp. KCTC 42545 OX=1768242 G N=AT984_18460 PE=4 SV=1
MKTLTIFSASCGFESACQITALPVGHRSHGLHGHSYFATVRAELPADWAPFPGGEVEELRKRLEACVEPLDHALLNRCVEEPTDENIARWIRQRLETEFGVPGIQQIGIQSTQHSGVDLDANGSAHVWRRYRFQAAHQLPNVPMGHKCGRMHGHGFEVIIHANQDLGERALSIDYDHLDEVWAPWHMLLNYQCLNSIEGLHNPTSEVISAWLWAGLKPVLPELSWITVYETGSCGANFDGTNYRIWKELTLDSAIQLKRAPTDSPLRGIHGHTYTLRLHLSAELDKVQGWTVDFGDVKTLFDPIFKAIDHRPLYEIADLPDGDTASLAAWVLAKGAAVLPQIDRVDMYETRGCGSIVSSSGDEALIPV

SEQ ID NO: 23756 - protein, 365 aa, Paucibacter toxinivorans
  misc_feature (1)..(365): tr|A0A4R6QKI8|A0A4R6QKI8_9BURK 6-pyruvoyltetrahydropter in/6-carboxytetrahydropterin synthase OS=Paucibacter to xinivorans OX=270368 GN=DES47_104109 PE=4 SV=1
MTTPHTLFSAASGFESAAQVTLLPVGHRSRGLHGHSYLATVRADLSAGWAPFPGGEVEALRARLEECLAPLDYQLLNNTIAQPTDENIARWIRERLDVPGIAQIGIQSTAHSGVDLDAAGMAHVWRRYRFQAAHRLPQVPLGHKCGRMHGHGFEVIVHANQDLGTRDLSIDYDHLDEVWAPLHHQLNYQCLNDIAGLDNPTSEVISSWLWQRLKPQLPELSWVTVYETGSCGANFDGESYRIWKELTLDSAIQLKRAPDGSALRSIHGHTYTLRLHLSAPLDTVMGWTVDFGDVKTLFDPIFKAIDHRPLYEIADMADGDTASIAAWILEKARAQLPQLDRVDLYETRGCGAIVSAASEGPALPV

SEQ ID NO: 23757 - protein, 118 aa, Paucimonas lemoignei
  misc_feature (1)..(118): tr|A0A2X4AWL1|A0A2X4AWL1_PAULE 6-carboxy-5,6,7,8-tetrah ydropterin synthase OS=Paucimonas lemoignei OX=29443 GN =queD PE=3 SV=1
MEIFKEFTFESAHLLPHVPAGHKCGRLHGHSFRIAIHLEGEVDPHIGWIRDFSEIKAIFKPLYERLDHNYLNDIPGLENPTSENLAKWIFAELKPLLPELSAIRIHETCTSGCIYRGD

SEQ ID NO: 23758 - protein, 147 aa, Paucimonas lemoignei
  misc_feature (1)..(147): tr|A0A4R3I1N8|A0A4R3I1N8_PAULE 6-pyruvoyltetrahydropter in/6-carboxytetrahydropterin synthase OS=Paucimonas lem oignei OX=29443 GN=EDC30_101464 PE=4 SV=1
MLTITRKLEFDAGHRIPDHKSQCRNLHGHRYTLEITLVGEVIKEEGSSDQGMIMDFSDVKALAKQHLVDVWDHAFLVYAKDEKVRDFLEALEGHKTVIIDSIPTVENLAQTAFNILKPAYQDRYGTGLRLHKLVLHETPNCWAEITE

SEQ ID NO: 23759 - protein, 125 aa, Pectinatus cerevisiiphilus
  misc_feature (1)..(125): tr|A0A4R3KCP4|A0A4R3KCP4_9FIRM 6-carboxy-5,6,7,8-tetrah ydropterin synthase OS=Pectinatus cerevisiiphilus OX=86 956 GN=EDC37_10413 PE=3 SV=1
MFELSVRDDFGAAHRIIGYPGKCNNLHGHNWVVEAVVCGSKLNELGMLIDFKKLKGALKEIIGELDHHYLNELEPFSTANPSAENIAAYLYHKLSQHENIKGKCHVKFVKVWETEKSAVSYCEEA

SEQ ID NO: 23760 - protein, 120 aa, Pectobacterium actinidiae
  misc_feature (1)..(120): tr|A0A1V2R3W7|A0A1V2R3W7_9GAMM 6-carboxy-5,6,7,8-tetrah ydropterin synthase OS=Pectobacterium actinidiae OX=150 7808 GN=BSK71_09255 PE=3 SV=1
MVTTLFKDFQFEAAHHLPHVPDGHKCGRLHGHSFMVRLEITGEVDPHTGWVMDFSELKAAFKPTWERLDHHYLNEIPGLENPTSEVLAHWIWHQLKPILPLLSAVMVKETCTAGCVYKGE

SEQ ID NO: 23761 - protein, 120 aa, Pectobacterium aquaticum
  misc_feature (1)..(120): tr|A0A3R8PLZ9|A0A3R8PLZ9_9GAMM 6-carboxy-5,6,7,8-tetrah ydropterin synthase OS=Pectobacterium aquaticum OX=2204 145 GN=queD PE=3 SV=1
MVTTLFKDFQFEAAHHLPHVPDGHKCGRLHGHSFMVRLEITGEVDPHTGWVMDFSELKAAFKPTWERLDHHYLNEIPGLENPTSEVLAHWIWHQLKPTLPLLSAVMVKETCTAGCVYKGE

SEQ ID NO: 23762 - protein, 138 aa, Pectobacterium atrosepticum
  misc_feature (1)..(138): tr|Q6D195|Q6D195_PECAS 6-carboxy-5,6,7,8-tetrahydropter in synthase OS=Pectobacterium atrosepticum (strain SCRI 1043 / ATCC BAA-672) OX=218491 GN=ECA3553 PE=3 SV=1
MHTMFWKPLFQNETGNIAMVTTLFKDFQFEAAHHLPHVPEGHKCGRLHGHSFMVRLEITGEVDPYTGWVMDFSELKAAFKPTWERLDHHYLNEIPGLENPTSEVLAHWIWQQLKPTLPLLSAVMVKETCTAGCVYKGE

SEQ ID NO: 23763 - protein, 120 aa, Pectobacterium betavasculorum
  misc_feature (1)..(120): tr|A0A093T1T5|A0A093T1T5_9GAMM 6-carboxy-5,6,7,8-tetrah ydropterin synthase OS=Pectobacterium betavasculorum OX =55207 GN=KP22_12190 PE=3 SV=1
MVTTLFKDFQFEAAHHLPHVPEGHKCGRLHGHSFMVRLEITGEVDPYTGWVMDFSELKAAFKPTWERLDHHYLNEIPGLENPTSEVLAHWIWQQLKPTLPLLSAVMVKETCTAGCVYKGE

SEQ ID NO: 23764 - protein, 120 aa, Pectobacterium brasiliense
  misc_feature (1)..(120): tr|A0A086F2D2|A0A086F2D2_9GAMM 6-carboxy-5,6,7,8-tetrah ydropterin synthase OS=Pectobacterium brasiliense OX=18 0957 GN=IW01_00205 PE=3 SV=1
MVTTLFKDFQFEAAHHLPHVPDGHKCGRLHGHSFMVRLEITGEVDPYTGWVMDFSELKAAFKPTWERLDHHYLNEIPGLENPTSEVLAHWIWHQLKPELPLLSAVMVKETCTAGCVYKGE

SEQ ID NO: 23765 - protein, 120 aa, Pectobacterium brasiliense
  misc_feature (1)..(120): tr|A0A086EFK1|A0A086EFK1_9GAMM 6-carboxy-5,6,7,8-tetrah ydropterin synthase OS=Pectobacterium brasiliense OX=18 0957 GN=F126LOC_04169 PE=3 SV=1
MVTTLFKDFQFEAAHHLPHVPDGHKCGRLHGHSFMVRLEITGEVDPYTGWVMDFSELKAAFKPTWERLDHHYLNEIPGLENPTSEVLAHWIWHQLKPTLPLLSAVMVKETCTAGCVYKGE

SEQ ID NO: 23766 - protein, 120 aa, Pectobacterium carotovorum
  misc_feature (1)..(120): tr|C6DDI1|C6DDI1_PECCP 6-carboxy-5,6,7,8-tetrahydropter in synthase OS=Pectobacterium carotovorum subsp. caroto vorum (strain PC1) OX=561230 GN=PC1_3372 PE=3 SV=1
MVTTLFKDFQFEAAHHLPHVPEGHKCGRLHGHSFMVRLEITGEVDPHTGWVMDFSELKAAFKPTWERLDHHYLNEIPGLENPTSEVLAHWIWHQLKPTLPLLSAVMVKETCTAGCVYKGE

SEQ ID NO: 23767 - protein, 120 aa, Pectobacterium carotovorum; identical to SEQ ID NO: 23765
  misc_feature (1)..(120): tr|A0A255BQI9|A0A255BQI9_PECCA 6-carboxy-5,6,7,8-tetrah ydropterin synthase OS=Pectobacterium carotovorum OX=55 4 GN=queD PE=3 SV=1

SEQ ID NO: 23768 - protein, 120 aa, Pectobacterium odoriferum
  misc_feature (1)..(120): tr|A0A094SYD5|A0A094SYD5_9GAMM 6-carboxy-5,6,7,8-tetrah ydropterin synthase OS=Pectobacterium odoriferum OX=783 98 GN=KU75_00970 PE=3 SV=1
MVTTLFKDFQFEAAHHLPHVPDGHKCGRLHGHSFMVRLEITGEVDPHTGWVMDFSELKAAFKPTWERLDHHYLNEIPGLENPTSEVLAHWIWQQLKPTLPLLSAVMVKETCTAGCVYKGE

SEQ ID NO: 23769 - protein, 120 aa, Pectobacterium parmentieri
  misc_feature (1)..(120): tr|A0A0H3ICI3|A0A0H3ICI3_PECPM 6-carboxy-5,6,7,8-tetrah ydropterin synthase OS=Pectobacterium parmentieri OX=19 05730 GN=queD PE=3 SV=1
MVTTLFKDFQFEAAHHLPHVPEGHKCGRLHGHSFMVRLEITGEVDPYTGWVMDFSELKAAFKSTWERLDHHYLNEIPGLENPTSEVLAHWIWHQLKPALPLLSAVMVKETCTAGCVYKGE

SEQ ID NO: 23770 - protein, 120 aa, Pectobacterium peruviense
  misc_feature (1)..(120): tr|A0A0J5XE74|A0A0J5XE74_9GAMM 6-carboxy-5,6,7,8-tetrah ydropterin synthase OS=Pectobacterium peruviense OX=206 6479 GN=G033_16605 PE=3 SV=1
MVTTLFKDFQFEAAHHLPHVPEGHKCGRLHGHSFMVRLEITGEVDPYTGWVMDFSELKAAFKATWERLDHHYLNEIPGLENPTSEVLAHWIWQQLKPTLPLLSAVMVKETCTAGCVYKGE

SEQ ID NO: 23771 - protein, 120 aa, Pectobacterium polaris; identical to SEQ ID NO: 23765
  misc_feature (1)..(120): tr|A0A093SDY6|A0A093SDY6_9GAMM 6-carboxy-5,6,7,8-tetrah ydropterin synthase OS=Pectobacterium polaris OX=204205 7 GN=queD PE=3 SV=1

SEQ ID NO: 23772 - protein, 120 aa, Pectobacterium polonicum; identical to SEQ ID NO: 23763
  misc_feature (1)..(120): tr|A0A4U7KFJ1|A0A4U7KFJ1_9GAMM 6-carboxy-5,6,7,8-tetrah ydropterin synthase OS=Pectobacterium polonicum OX=2485 124 GN=queD PE=3 SV=1

SEQ ID NO: 23773 - protein, 120 aa, Pectobacterium punjabense; identical to SEQ ID NO: 23763
  misc_feature (1)..(120): tr|A0A2T3VXW0|A0A2T3VXW0_9GAMM 6-carboxy-5,6,7,8-tetrah ydropterin synthase OS=Pectobacterium punjabense OX=210 8399 GN=queD PE=3 SV=1

SEQ ID NO: 23774 - protein, 120 aa, Pectobacterium wasabiae
  misc_feature (1)..(120): tr|A0A1D7YXE6|A0A1D7YXE6_9GAMM 6-carboxy-5,6,7,8-tetrah ydropterin synthase OS=Pectobacterium wasabiae CFBP 330 4 OX=1175631 GN=A7983_02770 PE=3 SV=1
MVTTLFKDFQFEAAHHLPHVPEGHKCGRLHGHSFMVRLEITGEVDPYTGWVMDFSELKAAFKPTWEQLDHHYLNEIPGLENPTSEVLAHWIWHQLKPVLPLLSAVMVKETCTAGCVYKGE

SEQ ID NO: 23775 - protein, 123 aa, Pediococcus acidilactici
  misc_feature (1)..(123): tr|A0A410LDQ1|A0A410LDQ1_PEDAC 6-pyruvoyl tetrahydropte rin synthase OS=Pediococcus acidilactici OX=1254 GN=EQJ 92_08390 PE=4 SV=1
MPLVHTYKIKSYVNASHAMRWKDGEGKQHNHTWEVVCEIKSKDDHMIVFRDIEKKIQDVLGSFSGQFLNELPYFKEINPTVENVTIWLFDLLSSILEELSAKLVRIEVGESPTRSYVISDIDD

SEQ ID NO: 23776 - protein, 123 aa, Pediococcus acidilactici; identical to SEQ ID NO: 23775
  misc_feature (1)..(123): tr|D2EHH0|D2EHH0_PEDAC 6-pyruvoyl tetrahydropterin synt hase-related domain protein OS=Pediococcus acidilactici 7_4 OX=563194 GN=HMPREF9024_00232 PE=4 SV=1

SEQ ID NO: 23777 - protein, 104 aa, Pediococcus cellicola
  misc_feature (1)..(104): tr|A0A0R2IPC7|A0A0R2IPC7_9LACO Uncharacterized protein OS=Pediococcus cellicola OX=319652 GN=IV80_GL000968 PE= 4 SV=1
MRWKGGEGKQHNHTWEIVCEIHTKGDHMIIFNDLEKAVTEILSQINGKFLNDLDYFKKINSSVENVTEYLFDQIGPELKKLEASLIRIEVGESPTRFYCITVDD

SEQ ID NO: 23778 - protein, 137 aa, Pedobacter africanus
  misc_feature (1)..(137): tr|A0A1W2B626|A0A1W2B626_9SPHI 6-carboxy-5,6,7,8-tetrah ydropterin synthase OS=Pedobacter africanus OX=151894 G N=SAMN04488524_1961 PE=3 SV=1
MIYITRKASFNAAHKLSRPDWTEAQNTEVYGKCANPNWHGHNYQLYVTVKGEINPETGFLVDLKWLKDITNTYVVDKIDHKNLNLDVDFMKGKLASTENLAVAIWDELVNLIAESGAQLHSIKIYETENNFVEYFGH

SEQ ID NO: 23779 - protein, 136 aa, Pedobacter alluvionis
  misc_feature (1)..(136): tr|A0A497XWS9|A0A497XWS9_9SPHI 6-carboxytetrahydropteri n synthase OS=Pedobacter alluvionis OX=475253 GN=BCL90_ 3569 PE=4 SV=1
MIYITRKASFNAAHKLARTDWDDDKNNEVYGKCANPNWHGHNYWLYVTVKGEVNPETGFLVDLKWLKDVMNDYVVDKVDHKNLNLDVDFMKGKLASTENLAIEIWKQLWAPIAESGAVLHCVKIYETENNFVEYFG

SEQ ID NO: 23780 - protein, 106 aa, Pedobacter antarcticus
  misc_feature (1)..(106): tr|A0A081PLM3|A0A081PLM3_9SPHI Uncharacterized protein OS=Pedobacter antarcticus 4BY OX=1358423 GN=N180_18595 PE=4 SV=1
MIIYKLFRFDSAHYLPNVPAGHPCGGMHGQTGTHTGWVIDYTAIKELVGPWVKKLDHQVINQLDGLENPTAENICLWFWRNLQPELPGLFRLELNETPDSGVIYEG

SEQ ID NO: 23781 - protein, 106 aa, Pedobacter antarcticus; identical to SEQ ID NO: 23780
  misc_feature (1)..(106): tr|A0A1I2IX69|A0A1I2IX69_9SPHI 6-pyruvoyltetrahydropter in/6-carboxytetrahydropterin synthase OS=Pedobacter ant arcticus OX=34086 GN=SAMN03003324_04023 PE=4 SV=1

SEQ ID NO: 23782 - protein, 137 aa, Pedobacter bauzanensis
  misc_feature (1)..(137): tr|A0A4V2PXQ5|A0A4V2PXQ5_9SPHI 6-carboxy-5,6,7,8-tetrah ydropterin synthase OS=Pedobacter bauzanensis OX=653929 GN=C8N28_1588 PE=3 SV=1
MIYITRRERFSAAHKLARNDWNEDQNLKVFGKCSNANWHGHNYELFVTVKGEVNSETGFLIDLRVLKEIIQEEAIDKLDHKNINLDVDFMQGKMASTEMIAIEIFKRLAPRIENEGAQLHCIKLCETENNFVEYFGN

SEQ ID NO: 23783 - protein, 136 aa, Pedobacter borealis
  misc_feature (1)..(136): tr|A0A4R8P7S1|A0A4R8P7S1_9SPHI 6-pyruvoyltetrahydropter in/6-carboxytetrahydropterin synthase OS=Pedobacter bor ealis OX=475254 GN=C8F03_3464 PE=4 SV=1
MIYITRKASFNAAHKLARTDWDDDRNNEVFGKCANPNWHGHNYWLYVTVKGEVNPETGFLVDLKWLKDVMNDYVVDKVDHKNLNLDVDFMKGKLASTENLAIEIWKQLWGPIEASGAILHCVKIYETENNFVEYFG

SEQ ID NO: 23784 - protein, 117 aa, Pedobacter caeni
  misc_feature (1)..(117): tr|A0A1M5MUH2|A0A1M5MUH2_9SPHI 6-carboxy-5,6,7,8-tetrah ydropterin synthase OS=Pedobacter caeni OX=288992 GN=SA MN04488522_107328 PE=3 SV=1
MIIYKTFSFDSAHYLPLVPIGHKCGGMHGHTYTLKVFISGDPEPHSGWVIDYTDLKNGIRPLIEMLDHKVLNDIPGLENPTSEQLSIWLWNRVKPIFPGLIRIELNETQSSGVIYEG

SEQ ID NO: 23785 - protein, 136 aa, Pedobacter caeni
  misc_feature (1)..(136): tr|A0A1M5P542|A0A1M5P542_9SPHI 6-carboxy-5,6,7,8-tetrah ydropterin synthase OS=Pedobacter caeni OX=288992 GN=SA MN04488522_10913 PE=3 SV=1
MIYITRKASFNAAHKLSRPDWSEDKNTEVYGKCANPNWHGHNYQLYVTVKGEINPETGFLVDLKWLKDITNTYVVDKIDHRNLNLDVDFMKGKLASTENLAIAIWDELLPFIEESGAKLHCIKIYETENNFVEYFG

SEQ ID NO: 23786 - protein, 156 aa, Pedobacter chitinilyticus
  misc_feature (1)..(156): tr|A0A3S3SRE6|A0A3S3SRE6_9SPHI 6-carboxytetrahydropteri n synthase OS=Pedobacter chitinilyticus OX=2233776 GN=D PV69_10645 PE=4 SV=1
MQNQMIRVTKEFTFDMAHALFNYDGPCKNIHGHTYRLQVTVSGYANQDPQNVKCGMLIDFGQLKKVVAEHVIDKYDHALVLNEAVPASLRASCYAISEKVHFVSFQPTCENMLLSIKFTLLPILESDGFTLQAVRLYETPTSWAEWRREDQPKSFQ

SEQ ID NO: 23787 - protein, 136 aa, Pedobacter chitinilyticus
  misc_feature (1)..(136): tr|A0A3S3STL3|A0A3S3STL3_9SPHI 6-carboxytetrahydropteri n synthase OS=Pedobacter chitinilyticus OX=2233776 GN=D PV69_13565 PE=4 SV=1
MIYITRRESFNAAHKLARPDWSEDENTAVFGKCANPNWHGHNYQLFVTVKGEVNPETGFLVDLKWLKQVINKHVIDKVDHKNLNLDVDFMKGKLASTENLAIAIWDILAPHVGESGAQLHCIKIYETDNNYVEYFG

SEQ ID NO: 23788 - protein, 136 aa, Pedobacter cryoconitis
  misc_feature (1)..(136): tr|A0A127VIU1|A0A127VIU1_9SPHI 6-pyruvoyl tetrahydrobio pterin synthase OS=Pedobacter cryoconitis OX=188932 GN= AY601_4380 PE=4 SV=1
MIYITRKESFNAAHKLARPDWSDDHNLEVFGKCANPNWHGHNYQLFVTVKGEINPETGFLVDLKWMKEIINEHIIDKLDHRNLNLDVDFMKDKLASTENLVIAVWDQLLPHIQQGGAILHCVKIYETENNFVEYFG

SEQ ID NO: 23789 - protein, 136 aa, Pedobacter cryoconitis
  misc_feature (1)..(136): tr|A0A327RZY0|A0A327RZY0_9SPHI 6-pyruvoyltetrahydropter in/6-carboxytetrahydropterin synthase OS=Pedobacter cry oconitis OX=188932 GN=LY11_04810 PE=4 SV=1
MIYITRKESFNAAHKLARPDWSDDHNLEVFGKCANPNWHGHNYQLFVTVKGEINPETGFLVDLKWMKEIINEHVIDKLDHRNLNLDVDFMKDKLASTENLVIAVWDQLLPHIQQGGAILHCVKIYETENNFVEYFG

SEQ ID NO: 23790 - protein, 136 aa, Pedobacter duraquae
  misc_feature (1)..(136): tr|A0A4R6IDL6|A0A4R6IDL6_9SPHI 6-carboxy-5,6,7,8-tetrah ydropterin synthase OS=Pedobacter duraquae OX=425511 GN =CLV32_3792 PE=3 SV=1
MIYITRKESFNAAHKLSRPDWSQDKNNEVYGKCANPNWHGHNYQLYVTVKGEVNPETGFLIDLKWLKEIINVNVVDKIDHRNLNLDVDFMEGILASTENLAIAIWNILFPLIEQEGAILHAIKIFETENNSVEYFG

SEQ ID NO: 23791 - protein, 136 aa, Pedobacter ginsengisoli
  misc_feature (1)..(136): tr|A0A2D1U969|A0A2D1U969_9SPHI 6-carboxy-5,6,7,8-tetrah ydropterin synthase OS=Pedobacter ginsengisoli OX=36385 2 GN=CPT03_17645 PE=3 SV=1
MIYITRKASFNAAHKLSRPDWTEDKNTEVYGKCANPNWHGHNYQLYVTVKGEINPETGFLVDLKWLKDITNTYVVDKIDHKNLNLDVDFMKGKLASTENLAIAIWDQLYALIAESGAHLHSIKIYETENNFVEYFG

SEQ ID NO: 23792 - protein, 136 aa, Pedobacter ginsenosidimutans; identical to SEQ ID NO: 23779
  misc_feature (1)..(136): tr|A0A0T5VN55|A0A0T5VN55_9SPHI 6-pyruvoyl tetrahydrobio pterin synthase OS=Pedobacter ginsenosidimutans OX=6878 42 GN=ASU31_15700 PE=4 SV=1

SEQ ID NO: 23793 - protein, 137 aa, Pedobacter glucosidilyticus
  misc_feature (1)..(137): tr|A0A0B8YGD3|A0A0B8YGD3_9SPHI 6-pyruvoyl tetrahydropte rin synthase/QueD family protein OS=Pedobacter glucosid ilyticus OX=1122941 GN=PBAC_15820 PE=4 SV=1
MKQKIAVYRKEHFNAAHRLHNPLWSDEENKKVFGKCNNPSFHGHNYELIVKVIGYTDEQTGYLVDMKILSDIIQEHVVEKFDHKNLNLDVAEFKDLNPTAENIAMVIWNILRAHIDNALDLYVTLFETERNYVEYPA

SEQ ID NO: 23794 - protein, 137 aa, Pedobacter glucosidilyticus
  misc_feature (1)..(137): tr|A0A0B8YBW2|A0A0B8YBW2_9SPHI 6-carboxy-5,6,7,8-tetrah ydropterin synthase OS=Pedobacter glucosidilyticus OX=1 122941 GN=queD PE=3 SV=1
MIYITRKEHFNAAHKLYREDWSKEKNEELFGRCANANWHGHNYDLYVTIKGNINPDTGFVIDLKELKDIILVNVIDKLDHRNLNLDVDFMKGKMASTEVLAIEIWKQLAPHITARGAQLHSIKLYETANNYVEYFGD

SEQ ID NO: 23795 - protein, 136 aa, Pedobacter hartonius
  misc_feature (1)..(136): tr|A0A1H4HHX7|A0A1H4HHX7_9SPHI 6-pyruvoyltetrahydropter in/6-carboxytetrahydropterin synthase OS=Pedobacter har tonius OX=425514 GN=SAMN05443550_11912 PE=4 SV=1
MIYITRKESFNAAHKLARPDWSDDHNLEVYGKCANPNWHGHNYQLFVTVKGEINPETGFLVDLKWLKNMINEHIIDKVDHKNLNLDVDFMKDKLASTENLAIAIWEQLLPHINAGGAQLHSIKIYETENNIIEYLG

SEQ ID NO: 23796 - protein, 91 aa, Pedobacter hartonius
  misc_feature (1)..(91): tr|A0A1H4EYT5|A0A1H4EYT5_9SPHI PreQ(0) biosynthesis pro tein QueD OS=Pedobacter hartonius OX=425514 GN=SAMN0544 3550_106215 PE=4 SV=1
MHGHTYTLKIFISGKPSIYTGWIMDFSDLKDIVKPWIALLDHQVLNNVEGLENPTSENLCLWLWKKIKAEIPNLCRIELNETPDSGVIYEG

SEQ ID NO: 23797 - protein, 137 aa, Pedobacter heparinus
  misc_feature (1)..(137): tr|C6XWQ2|C6XWQ2_PEDHD 6-carboxy-5,6,7,8-tetrahydropter in synthase OS=Pedobacter heparinus (strain ATCC 13125 / DSM 2366 / CIP 104194 / JCM 7457 / NBRC 12017 / NCIMB 9290 / NRRL B-14731 / HIM 762-3) OX=485917 GN=P
MIYITRKASFNAAHKLSRPDWTEAQNTEVYGKCANPNWHGHNYQLYVTVKGEINPETGFLVDLKWLKDITNTYVVDKIDHKNLNLDVNFMKGKLASTENLAIAIWEELVNLIAESGAQLHSIKIYETENNFVEYFGQ

SEQ ID NO: 23798 - protein, 136 aa, Pedobacter insulae
  misc_feature (1)..(136): tr|A0A1I2SXM0|A0A1I2SXM0_9SPHI 6-pyruvoyltetrahydropter in/6-carboxytetrahydropterin synthase OS=Pedobacter ins ulae OX=414048 GN=SAMN04489864_101107 PE=4 SV=1
MIYITRRESFNAAHKLSRSDWSQDKNTEVYGKCANPNWHGHNYQLYVTVKGEVNPETGFLVDLKWLKHLINVHVIDQVDHRNLNLDVDFMKGILASTENLAIAIWNILSPYINESGAQLHCIKIYETENNFVEYFG

SEQ ID NO: 23799 - protein, 136 aa, Pedobacter jejuensis
  misc_feature (1)..(136): tr|A0A3N0BPE9|A0A3N0BPE9_9SPHI 6-carboxytetrahydropteri n synthase OS=Pedobacter jejuensis OX=1268550 GN=D7004_ 17735 PE=4 SV=1
MIYITRKASFNAAHKLARPDWDDEKNNAFYGKCANPNWHGHNYWLYVTVKGEVDPETGFLVDLKWLKDVMNTYVVDKVDHKNLNLDVDFMKGILASTENLAIAVWEQLYAPIAESGAILHSVKIYETENNFVEYLG

SEQ ID NO: 23800 - protein, 136 aa, Pedobacter kyonggii; identical to SEQ ID NO: 23779
  misc_feature (1)..(136): tr|A0A4Q9HC69|A0A4Q9HC69_9SPHI 6-carboxytetrahydropteri n synthase OS=Pedobacter kyonggii OX=1926871 GN=EYS08_1 3965 PE=4 SV=1

SEQ ID NO: 23801 - protein, 136 aa, Pedobacter kyungheensis
  misc_feature (1)..(136): tr|A0A0C1FIK4|A0A0C1FIK4_9SPHI 6-pyruvoyl tetrahydrobio pterin synthase OS=Pedobacter kyungheensis OX=1069985 G N=OC25_15455 PE=4 SV=1
MIYITRKASFNAAHKLARTDWDDDKNSEVYGKCANPNWHGHNYWLYVTVKGEVNPETGFLVDLKWLKDVMNNYVVDKVDHKNLNLDVDFMKGKLASTENLAIEIWKQLWAPIAESGAILHCVKIYETENNYVEYFG

SEQ ID NO: 23802 - protein, 136 aa, Pedobacter lusitanus
  misc_feature (1)..(136): tr|A0A0D0GP23|A0A0D0GP23_9SPHI Contig68, whole genome s hotgun sequence OS=Pedobacter lusitanus OX=1503925 GN=T H53_16190 PE=4 SV=1
MIYITRKESFNAAHKLARPDWSDDHNLEVFGKCANPNWHGHNYQLFVTVKGEVNPETGFLVDLKWMKEIINEHIIDKLDHRNLNLDVDFMKDKLASTENLVIAVWDQLLPHIKAGGAELHCVKIYETENNFVEYFG

SEQ ID NO: 23803 - protein, 137 aa, Pedobacter luteus
  misc_feature (1)..(137): tr|A0A1T5DVY3|A0A1T5DVY3_9SPHI 6-carboxy-5,6,7,8-tetrah ydropterin synthase OS=Pedobacter luteus OX=572036 GN=S AMN05661099_2647 PE=3 SV=1
MIYITRRERFNAAHKLFREEWSDEKNLETFGKCSNPNWHGHNYELFVTVKGEINPETGFVVDLKELKAIITSYVTSELDHKNINLDVDFMKGKLASTEILAVTIFERLKPYIEEQGAQLHSVKLFETENNSVEYFGS

SEQ ID NO: 23804 - protein, 136 aa, Pedobacter metabolipauper
  misc_feature (1)..(136): tr|A0A4R6SYH5|A0A4R6SYH5_9SPHI 6-carboxy-5,6,7,8-tetrah ydropterin synthase OS=Pedobacter metabolipauper OX=425 513 GN=ATK78_1892 PE=3 SV=1
MIFITRKASFNAAHKLSRPDWTEDENTAVYGKCANPNWHGHNYQLYVTVKGEVNPETGFLVDLKWLKDITNTYVVDKIDHRNLNLDVDFMQGKLASTENLAIAIWDELHNLIAESGAALHCIKIYETENNFVEYFG

SEQ ID NO: 23805 - protein, 117 aa, Pedobacter metabolipauper
  misc_feature (1)..(117): tr|A0A4R6T4B4|A0A4R6T4B4_9SPHI 6-carboxy-5,6,7,8-tetrah ydropterin synthase OS=Pedobacter metabolipauper OX=425 513 GN=ATK78_0019 PE=3 SV=1
MIIYKTFQFDSAHYLPHVPKGHKCGKMHGHTYMLKIFISGTPELNAGWVLDYKDLKEGINPIINLLDHNTLNEIPGLENPTSENLCIWLWNIIKPIFPGLIKIELNETPTSGVIYEG

SEQ ID NO: 23806 - protein, 136 aa, Pedobacter nutrimenti
  misc_feature (1)..(136): tr|A0A318UKC4|A0A318UKC4_9SPHI 6-carboxy-5,6,7,8-tetrah ydropterin synthase OS=Pedobacter nutrimenti OX=1241337 GN=B0O44_102170 PE=3 SV=1
MIYITRKASFNAAHKLSRPDWSEDKNTEVYGKCANPNWHGHNYQLYVTVKGEVNPETGFLVDLKWLKEVVNEYVVEKIDHRNLNLDVDFMKGKLASTENLVIAVWEELLPHIEKEGVQLHSIKIYETENNFVEYFG

SEQ ID NO: 23807 - protein, 117 aa, Pedobacter nutrimenti
  misc_feature (1)..(117): tr|A0A318U9B3|A0A318U9B3_9SPHI 6-carboxy-5,6,7,8-tetrah ydropterin synthase OS=Pedobacter nutrimenti OX=1241337 GN=B0O44_107131 PE=3 SV=1
MIIYKCFSFDAAHFLPNVPAGHKCGRMHGHTYHLKVFVSGEIDPESCWFMDFSDLKAIVNPLIKRLDHHTLNEIDGLENPTSESLMVWIWEKLKPLLPALVKLELQETPGSGVIYEG

SEQ ID NO: 23808 - protein, 71 aa, Pedobacter nyackensis
  misc_feature (1)..(71): tr|A0A1W2FBK9|A0A1W2FBK9_9SPHI 6-pyruvoyl tetrahydropte rin synthase OS=Pedobacter nyackensis OX=475255 GN=SAMN 04488101_1331 PE=4 SV=1
MDYTELKNSIKPFLDILDHKLLNEIPGLENPTSENLSIWLWKIIKPIFPDLVRIELKETPTSGVIYEGQRA

SEQ ID NO: 23809 - protein, 137 aa, Pedobacter nyackensis
  misc_feature (1)..(137): tr|A0A1W2E4K9|A0A1W2E4K9_9SPHI 6-carboxy-5,6,7,8-tetrah ydropterin synthase OS=Pedobacter nyackensis OX=475255 GN=SAMN04488101_11014 PE=3 SV=1
MIYITRKASFNAAHKLSRPDWTEDKNTEVYGKCANPNWHGHNYQLYVTVKGEINPETGFLVDLKWLKDITNTHVVEKIDHKNLNLDVDFMKDKLASTENLAIAIWDQLVDLIAESGAQLHSIKIYETENNFVEYFGH

SEQ ID NO: 23810 - protein, 139 aa, Pedobacter psychrophilus
  misc_feature (1)..(139): tr|A0A179DLK0|A0A179DLK0_9SPHI 6-pyruvoyl tetrahydrobio pterin synthase OS=Pedobacter psychrophilus OX=1826909 GN=A5893_00745 PE=4 SV=1
MNQKQKVAVYRKEHFNAAHRLNNPNWSDERNQSVYGKCNNPNYHGHNYDLIVKVSGFVDEEVGYLMDLKILSDLIKEKILDRFDHMNLNLDVEEFKKLNPTAENIAMVIYDQLRSEINTDLDLKITLFETERNYVEYPA

SEQ ID NO: 23811 - protein, 137 aa, Pedobacter psychrophilus
  misc_feature (1)..(137): tr|A0A179DDY4|A0A179DDY4_9SPHI 6-pyruvoyl tetrahydrobio pterin synthase OS=Pedobacter psychrophilus OX=1826909 GN=A5893_11280 PE=4 SV=1
MIYVTRKEHFNAAHKLYREEWSQEKNDEVFGRCANANWHGHNYDLFVTVKGEINHETGFVIDLKDLKSLIIKYITDKLDHKNLNLDVDFMKGKMASTEILAIEIWKQLAPHIEEKGAKLHCIKLYETASNFVEYFGD

SEQ ID NO: 23812 - protein, 136 aa, Pedobacter psychrotolerans
  misc_feature (1)..(136): tr|A0A4R2HFJ1|A0A4R2HFJ1_9SPHI 6-pyruvoyltetrahydropter in/6-carboxytetrahydropterin synthase OS=Pedobacter psy chrotolerans OX=1843235 GN=EV200_103187 PE=4 SV=1
MIYITRKASFNAAHKLARTDWDDDKNNEVYGKCANPNWHGHNYWLYVTVKGEVNPETGFLVDLKWLKDVMNVYVVDKVDHKNLNLDVDFMKGKLASTENLAIEIWNQLLTPITEAGALLHSVKIYETENNYVEYFG

SEQ ID NO: 23813 - protein, 136 aa, Pedobacter rhizosphaerae
  misc_feature (1)..(136): tr|A0A1H9J7Z3|A0A1H9J7Z3_9SPHI 6-carboxy-5,6,7,8-tetrah ydropterin synthase OS=Pedobacter rhizosphaerae OX=3902 41 GN=SAMN04488023_101251 PE=3 SV=1
MIYITRKASFNAAHKLSRTDWDQDQNDAVYGKCANPNWHGHNYWLYVTVKGEVNPETGFLVDLKWLKDVMNTYVVDKVDHKNLNLDVDFMKGKLASTENLAIEIWNQLIAPIAESGAILHSVKIYETENNYVEYFG

SEQ ID NO: 23814 - protein, 118 aa, Pedobacter ruber
  misc_feature (1)..(118): tr|A0A1G9THK9|A0A1G9THK9_9SPHI 6-carboxy-5,6,7,8-tetrah ydropterin synthase OS=Pedobacter ruber OX=990371 GN=SA MN05421813_11325 PE=3 SV=1
MIIYKQFSFDSAHFLPAVPLGHKCGNMHGHTYMLIVFIEGQPDEKSGWIIDYGDLKKKIQPVIELLDHHLLNDIPGLENPTSENLSIWLWNKIKPLVMGLKKIELKETPSSGVIYEGF

SEQ ID NO: 23815 - protein, 136 aa, Pedobacter ruber
  misc_feature (1)..(136): tr|A0A1G9PZB3|A0A1G9PZB3_9SPHI 6-pyruvoyltetrahydropter in/6-carboxytetrahydropterin synthase OS=Pedobacter rub er OX=990371 GN=SAMN05421813_10551 PE=4 SV=1
MIYITRRERFNAAHKLYREEWSDEQNLEIFGKCSNPNWHGHNYELFITVKGEINPETGFVIDLKDLKRIITVYVTDVLDHKNINLDVNFMKGKMASTEVLAVTIFDVLKPHIDGQGAILHSVKLFETENNFVEYFG

SEQ ID NO: 23816 - protein, 136 aa, Pedobacter soli; identical to SEQ ID NO: 23801
  misc_feature (1)..(136): tr|A0A1G6QWN4|A0A1G6QWN4_9SPHI 6-pyruvoyltetrahydropter in/6-carboxytetrahydropterin synthase OS=Pedobacter sol i OX=390242 GN=SAMN04488024_103479 PE=4 SV=1

SEQ ID NO: 23817 - protein, 136 aa, Pedobacter sp.
  misc_feature (1)..(136): tr|A0A0Q5UCX2|A0A0Q5UCX2_9SPHI 6-pyruvoyl tetrahydrobio pterin synthase OS=Pedobacter sp. Leaf194 OX=1736297 GN =ASG14_01520 PE=4 SV=1
MIYITRKASFNAAHKLARTDWDDEKNAEVYGKCANPNWHGHNYWLYVTVKGEVNPETGFLVDLKWLKDVMNTCVVDKVDHKNLNLDVDFMKGKLASTENLAIAVWDQLVNPIAEAGAILHAVKIYETENNYVEYFG

SEQ ID NO: 23818 - protein, 117 aa, Pedobacter sp.
  misc_feature (1)..(117): tr|A6EFM8|A6EFM8_9SPHI 6-carboxy-5,6,7,8-tetrahydropter in synthase OS=Pedobacter sp. BAL39 OX=391596 GN=PBAL39 _03559 PE=3 SV=1
MIIYKKFSFDSAHYLPLVPASHKCGRMHGHTYQLTVYLSGTPDPHSGWVADFGDLKRGIQPFVDLLDHRLLNDIPGLENPTSENLSVWLWQKIKPVFPALAKIELSETPGTGVIYEG

SEQ ID NO: 23819 - protein, 117 aa, Pedobacter steynii
  misc_feature (1)..(117): tr|A0A1H0MLE1|A0A1H0MLE1_9SPHI 6-carboxy-5,6,7,8-tetrah ydropterin synthase OS=Pedobacter steynii OX=430522 GN= SAMN05421820_1276 PE=3 SV=1
MIIYKTFSFDSAHYLPRVPAGHKCGGMHGHTYTLKVFISGVPEPHSGWILDYTDLKKGISPLIDMLDHKTLNDIPGLENPTSEQVSIWLWDKIKPVFPGLIRIELNETPSSGVIYEG

SEQ ID NO: 23820 - protein, 117 aa, Pedobacter steynii
  misc_feature (1)..(117): tr|A0A1D7QD10|A0A1D7QD10_9SPHI 6-carboxy-5,6,7,8-tetrah ydropterin synthase OS=Pedobacter steynii OX=430522 GN= BFS30_04485 PE=3 SV=1
MIIYKTFSFDAAHYLPHVPAGHKCGRMHGHTYSLKVFITGDPEPHSGWVMDYTDLKNGISPLIEILDHKVLNDIPGLENPTSEQLSIWLWNKIKPVFPGLSRIELNETPSSGVIYEG

SEQ ID NO: 23821 - protein, 136 aa, Pedobacter suwonensis; identical to SEQ ID NO: 23783
  misc_feature (1)..(136): tr|A0A1I0TCU1|A0A1I0TCU1_9SPHI 6-pyruvoyltetrahydropter in/6-carboxytetrahydropterin synthase OS=Pedobacter suw onensis OX=332999 GN=SAMN04488511_108125 PE=4 SV=1

SEQ ID NO: 23822 - protein, 136 aa, Pedobacter terrae
  misc_feature (1)..(136): tr|A0A1G7XY52|A0A1G7XY52_9SPHI 6-pyruvoyltetrahydropter in/6-carboxytetrahydropterin synthase OS=Pedobacter ter rae OX=405671 GN=SAMN05421827_112130 PE=4 SV=1
MIYITRKASFNAAHKLARTDWDDDKNNEVYGKCANPNWHGHNYWLYVTVKGEVNPETGFLVDLKWLKDVMNDYVVDKVDHKNLNLDVDFMKGKLASTENLAIEIWKQLWAPIAESGAILHCVKIYETENNFVEYFG

SEQ ID NO: 23823 - protein, 136 aa, Pedobacter terrae
  misc_feature (1)..(136): tr|A0A561GJ16|A0A561GJ16_9SPHI 6-pyruvoyltetrahydropter in/6-carboxytetrahydropterin synthase OS=Pedobacter ter rae OX=405671 GN=FHW25_103239 PE=4 SV=1
MIYITRKASFNAAHKLARTDWNDDKNNEVYGKCANPNWHGHNYWLYVTVKGEVNPETGFLVDLKWLKDVMNDYVVDKVDHKNLNLDVDFMKGKLASTENLAIEIWKQLWTPIAESGAVLHCVKIYETENNFVEYFG

SEQ ID NO: 23824 - protein, 118 aa, Pedobacter tournemirensis
  misc_feature (1)..(118): tr|A0A4Q0MD15|A0A4Q0MD15_9SPHI 6-carboxy-5,6,7,8-tetrah ydropterin synthase OS=Pedobacter tournemirensis OX=699 437 GN=queD PE=3 SV=1
MIIYKQFFFDSAHFLPKVPKGHKCGDLHGHTYKLTVFFEGDLDPEQGWLIDFNEIKKIVDPVVSSIDHKLLNDIPGLENPTSELLSVWLWNKIKPELPLLIRIELNETPTSGVVYEGA

SEQ ID NO: 23825 - protein, 141 aa, Pedobacter tournemirensis
  misc_feature (1)..(141): tr|A0A4Q0MED9|A0A4Q0MED9_9SPHI 6-carboxytetrahydropteri n synthase OS=Pedobacter tournemirensis OX=699437 GN=BD E36_0456 PE=4 SV=1
MIYITRREQFNAAHKLYREEWSDEKNLEVFGKCSNPNWHGHNYELYVTVKGEINPETGYLIDLKTLKDLIRTCITDKLDHKNVNLDVDFMRGKMASTEVMTVEIFNQLKGPLEQRSVTLYKVKLVETENNFVEYYGEEPAL

SEQ ID NO: 23826 - protein, 136 aa, Pedobacter westerhofensis
  misc_feature (1)..(136): tr|A0A521CFG9|A0A521CFG9_9SPHI 6-carboxy-5,6,7,8-tetrah ydropterin synthase OS=Pedobacter westerhofensis OX=425 512 GN=SAMN06265348_103499 PE=3 SV=1
MIYITRKESFNAAHKLARPDWSEDHNLEVYGKCANPNWHGHNYQLFVTVKGEINPETGFLVDLKWLKMIINEHIIDKLDHRNLNLDVDFMKDKLASTENLAIAIWEQLLPHITAGGAQLHSIKIYETENNFVEYFG

SEQ ID NO: 23827 - protein, 178 aa, Pedobacter xixiisoli
  misc_feature (1)..(178): tr|A0A286AEG2|A0A286AEG2_9SPHI 6-pyruvoyltetrahydropter in/6-carboxytetrahydropterin synthase OS=Pedobacter xix iisoli OX=1476464 GN=SAMN06297358_3981 PE=4 SV=1
METDNCFSKKNSILNFFVSVYLRLSNLCLSTLYCIFAFYFEKMIYITRRESFNAAHKLARPDWTEDENTAVFGKCANPNWHGHNYQLYVTVKGEVNPETGFLVDLKWLKQVINTHVIDKVDHRNLNLDVDFMKGKLASTENLAIAVWDILKPHVNESGAELHCIKIYETDNNYVEYFG

SEQ ID NO: 23828 - protein, 156 aa, Pedobacter xixiisoli
  misc_feature (1)..(156): tr|A0A286AD19|A0A286AD19_9SPHI 6-pyruvoyltetrahydropter in/6-carboxytetrahydropterin synthase OS=Pedobacter xix iisoli OX=1476464 GN=SAMN06297358_3452 PE=4 SV=1
MQNQMIRVTKEFTFDMAHALFNYDGPCKNIHGHTYRLQVTVSGYANQDPQNVKCGMLIDFGQLKKIVTEKIIDKYDHALVLNEAVPASLRASCYAISEKVHFVAFQPTCENLLLDMKFKLQTAFEHDGFILQAIRLYETPTSWAEWCKEDQPKAFQ

SEQ ID NO: 23829 - protein, 136 aa, Pedobacter yonginense
  misc_feature (1)..(136): tr|A0A317EPK6|A0A317EPK6_9SPHI 6-pyruvoyl tetrahydrobio pterin synthase OS=Pedobacter yonginense OX=651869 GN=D HW03_09455 PE=4 SV=1
MIYITRKASFNAAHKLARTDWDDEKNAEVYGKCANPNWHGHNYWLYVTVKGEINPETGFLVDLKWLKDVMNNYVVDLVDHKNLNLDVDFMKGQLASTENLAIAIWNQLLAPIAESGTILHSVKLYETENNYVEYFG

SEQ ID NO: 23830 - protein, 136 aa, Pedobacter yulinensis
  misc_feature (1)..(136): tr|A0A2T3HNG6|A0A2T3HNG6_9SPHI 6-pyruvoyl tetrahydrobio pterin synthase OS=Pedobacter yulinensis OX=2126353 GN= C7T94_04430 PE=4 SV=1
MIYITRKASFNAAHKLARPDWDDETNESVYGKCANKNWHGHNYELFVTVKGELNPETGFLIDLKLLKDIMNVYVVDKIDHKNLNMDVDFMQGKLTSTENLAMAVWNELLAPIAAQGATLHCVKIYETDNNFVEYFG

SEQ ID NO: 23831 - protein, 120 aa, Pedosphaera parvula
  misc_feature (1)..(120): tr|B9XN00|B9XN00_PEDPL 6-carboxy-5,6,7,8-tetrahydropter in synthase OS=Pedosphaera parvula (strain Ellin514) OX =320771 GN=Cflav_PD1969 PE=3 SV=1
MKMELRKTFQFEAAHLLPGLPKTHKCRRLHGHSFKAEIVVSGEVDPKLGWVMDYAEISAAFKPIWEKLDHHYLNEIPGLENPTSEILAIWIWKKLKPKLPQLSEVVVAETCTARCVYRGE

SEQ ID NO: 23832 - protein, 118 aa, Pedosphaera sp.
  misc_feature (1)..(118): tr|A0A2A2QYC6|A0A2A2QYC6_9BACT 6-carboxy-5,6,7,8-tetrah ydropterin synthase OS=Pedosphaera sp. Tous-C6FEB OX=19 82324 GN=queD PE=3 SV=1
MELRKSFQFEAAHLLPLLPEAHKCRRLHGHSFKVELVIAGECDPKLGWLMDYADIKAAFKPLWEQLDHRYLNEVPGLENPTSENVAVWIWERLKPTLPLLTEVVVAETCTAQAVYRGS

SEQ ID NO: 23833 - protein, 118 aa, Pedosphaera sp.
  misc_feature (1)..(118): tr|A0A2D7BAI6|A0A2D7BAI6_9BACT 6-carboxy-5,6,7,8-tetrah ydropterin synthase OS=Pedosphaera sp. OX=2024890 GN=qu eD PE=3 SV=1
MELRKTFQFEAAHLLPHLPKDHKCRRLHGHSFSAEIVVEGPCDPALGWVMDYADISKAFRPLWEQLDHYYLNEVEGLANPTSENIAIWIWKRLSPQLPMLTEVVVAETCTARCVYRGE

SEQ ID NO: 23834 - protein, 117 aa, Pelagibaca sp.
  misc_feature (1)..(117): tr|A0A2D6BA92|A0A2D6BA92_9RHOB 6-carboxy-5,6,7,8-tetrah ydropterin synthase OS=Pelagibaca sp. OX=1979400 GN=que D PE=3 SV=1
MFRIRKEFHFSASHQLAHLPADHQCARLHGHNYIVVVELAAETLNEDGFVRDYHDLKPLKSYIDDTFDHRHLNDVLDMPSTAENMAKHFHDWCKARWPETSAVLVSETPKTWAEYRP

SEQ ID NO: 23835 - protein, 120 aa, Pelagibacteraceae bacterium
  misc_feature (1)..(120): tr|A0A1Z9SQS9|A0A1Z9SQS9_9PROT 6-carboxy-5,6,7,8-tetrah ydropterin synthase OS=Pelagibacteraceae bacterium TMED 258 OX=1986820 GN=CBE18_01735 PE=3 SV=1
  misc_feature (66)..(66): Xaa can be any naturally occurring amino acid
MFELTRKYEFHAARKLTLVDIDHPCYQLHGHTFSVVVELSGDIDPSKGWVVDFYDIDRIYKDEIHXLLDHKYLNDIKELSNPTTEHIAKWIWNKIQPKLSGLTGVTVSEGPSYSCTYRGA

SEQ ID NO: 23836 - protein, 123 aa, Pelagibacteraceae bacterium
  misc_feature (1)..(123): tr|A0A2E5LFP1|A0A2E5LFP1_9PROT 6-carboxy-5,6,7,8-tetrah ydropterin synthase OS=Pelagibacteraceae bacterium OX=2 026775 GN=CMI97_01740 PE=3 SV=1
MTDIFEITKQFTFEAAHFFPNMPKGHIYRKIHGHSFVVEVTFYGKKNKNNQWVTDFDKVSESLKEIKKKLDHKCINDIKEIGLPTLENISSWIGKQLKKKYSNVYSIKLSRPSCGEFCLYKIK

SEQ ID NO: 23837 - protein, 123 aa, Pelagibacterales bacterium
  misc_feature (1)..(123): tr|A0A2E1BX09|A0A2E1BX09_9PROT 6-carboxy-5,6,7,8-tetrah ydropterin synthase OS=Pelagibacterales bacterium OX=20 26776 GN=CMJ07_09880 PE=3 SV=1
  misc_feature (19)..(19): Xaa can be any naturally occurring amino acid
  misc_feature (44)..(44): Xaa can be any naturally occurring amino acid
  misc_feature (46)..(46): Xaa can be any naturally occurring amino acid
  misc_feature (50)..(50): Xaa can be any naturally occurring amino acid
  misc_feature (54)..(54): Xaa can be any naturally occurring amino acid
MIIYRDFTFDAAHVLEGYXETHPYGRVHGHSFRARVWVKGEPEXEXSMIXDLGXIAKECELVKNLLDHNTLNNVDGLYNPTLEGLCVFIWNKLIIKISNLNKIEVHRDQSGEGCIYYGPENNE

SEQ ID NO: 23838 - protein, 121 aa, Pelagibacterales bacterium
  misc_feature (1)..(121): tr|A0A2D7ALH7|A0A2D7ALH7_9PROT 6-carboxy-5,6,7,8-tetrah ydropterin synthase OS=Pelagibacterales bacterium OX=20 26776 GN=CMJ06_00525 PE=3 SV=1
MKKIISKNFYFEAAHKLESSVNEKNNNVHGHSYFVEIAILDLNSNIEKTGYILDFNLFNLEIKNIKNCLDHSYLNDITGLENPTLENIGVYIYKKLKERKLNVCRIVVKRKSCGESFYLEI

SEQ ID NO: 23839 - protein, 119 aa, Pelagibacterium luteolum
  misc_feature (1)..(119): tr|A0A1G7W264|A0A1G7W264_9RHIZ 6-carboxy-5,6,7,8-tetrah ydropterin synthase OS=Pelagibacterium luteolum OX=4401 68 GN=SAMN04487974_105167 PE=3 SV=1
MTYRITKEFHFSASHQLVSLPSDHQCARLHGHNYIVEVELKADELNEHGFVRDYQDLSVLKHYIDTAFDHRHLNDVLGHGRVTAECLAKHFFDWCKTRLPEVSAVRVSETAKTWAEYRP

SEQ ID NO: 23840 - protein, 126 aa, Pelagibacterium sp.
  misc_feature (1)..(126): tr|A0A2E7FVT7|A0A2E7FVT7_9RHIZ 6-carboxy-5,6,7,8-tetrah ydropterin synthase OS=Pelagibacterium sp. OX=1967288 G N=queD PE=3 SV=1
MSATYTLKILADFASAHTLRDYPGDCRRMHGHNWKLEVEVTANALNQHGMGMDFKTIKTATRELAKTLDHRYLNDIPPFDEINPTAENIAQFFYQRLSDTLNTDTARVSGVTVWETDRACVKYSED

SEQ ID NO: 23841 - protein, 117 aa, Pelagibaculum spongiae
  misc_feature (1)..(117): tr|A0A2V1GV22|A0A2V1GV22_9GAMM 6-carboxy-5,6,7,8-tetrah ydropterin synthase OS=Pelagibaculum spongiae OX=208065 8 GN=queD PE=3 SV=1
MEIYKDFTFEAAHKLPHVPDGHQCGRLHGHSFQVRIVVEGEPDPKTGWIIDFAEIKATFKPIWSQLDHYYLNDIPGLENPTSEVLCKWIWQQLKPQMPLLSRIEIKETCTSGCIYRG

SEQ ID NO: 23842 - protein, 118 aa, Pelagicola litorisediminis
  misc_feature (1)..(118): tr|A0A1Y5RDR2|A0A1Y5RDR2_9RHOB 6-carboxy-5,6,7,8-tetrah ydropterin synthase OS=Pelagicola litorisediminis OX=13 12363 GN=queD PE=3 SV=1
MYRISKEFHFSASHQLKGLPEDHQCARLHGHNYVVVIELQSEALNANGFVRDYLDLAALKRYIDETLDHRHLNDVLGDDRVTAEHLARHFYDWCKARWSEVSAAKVSETPKTWAEYRP

SEQ ID NO: 23843 - protein, 118 aa, Pelagicola sp.
  misc_feature (1)..(118): tr|A0A2U2CUN8|A0A2U2CUN8_9RHOB 6-carboxy-5,6,7,8-tetrah ydropterin synthase OS=Pelagicola sp. LXJ1103 OX=217524 7 GN=queD PE=3 SV=1
MYRITKEFHFSASHQLFGLPEEHQCARLHGHNYIVVIELASPELNDHGFIRDYLDLAPLKRYIDDTFDHRHLNDVLGDDGVTAERMAKHFYDWCAAQWPETAAVKISETPKTWAEYRP

SEQ ID NO: 23844 - protein, 118 aa, Pelagivirga sediminicola
  misc_feature (1)..(118): tr|A0A2T7G7Q3|A0A2T7G7Q3_9RHOB 6-carboxy-5,6,7,8-tetrah ydropterin synthase OS=Pelagivirga sediminicola OX=2170 575 GN=queD PE=3 SV=1
MYRITKEFHFSASHQLFGLPEDHQCARLHGHNYVVVVELASEALNAHGFVRDYLELAPLKQYIDDELDHRHLNDVLGDDCVTAERMAKHLYDWCAARWAETAAVKISETPKTWAEYRP

SEQ ID NO: 23845 - protein, 142 aa, Pelistega indica
  misc_feature (1)..(142): tr|V8FWS3|V8FWS3_9BURK 6-carboxy-5,6,7,8-tetrahydropter in synthase OS=Pelistega indica OX=1414851 GN=V757_1026 5 PE=3 SV=1
MKVVKIFTFDSSHLLDGHDGKCKNLHGHTYKLEVEVSGELIESGPKEGMVLDFGDLKKIVQREIIDKMDHAFLYNRLNERERSIAQMLEGWSMKTYPLEQRTTAEVMSKHIFHVLKAHQLPVTRVRLWETPTSYSEYEPNVG

SEQ ID NO: 23846 - protein, 122 aa, Pelobacter acetylenicus
  misc_feature (1)..(122): tr|A0A1L3GIW7|A0A1L3GIW7_PELAE 6-carboxy-5,6,7,8-tetrah ydropterin synthase OS=Pelobacter acetylenicus OX=29542 GN=A7E75_13030 PE=3 SV=1
MYRLMISTYFAAAHNLMHYQGDCENLHGHNWKVEVTVATRQLDKSGLGIDFKVLKKETKRILGLLDHKYLNELPFFKDISPSSENIARFVFEELQQVFNEAVVIESVCIWESENACASYALQ

SEQ ID NO: 23847 - protein, 122 aa, Pelobacter carbinolicus
  misc_feature (1)..(122): tr|Q3A420|Q3A420_PELCD 6-carboxy-5,6,7,8-tetrahydropter in synthase OS=Pelobacter carbinolicus (strain DSM 2380 / NBRC 103641 / GraBd1) OX=338963 GN=queD PE=3 SV=1
MYRLMICTHFAAAHNLMNYQGDCENLHGHNWKVEVTVATRELDKAGLGVDFKILKKETNRILDLLDHKYLNDLPFFKGISPSSENIARFVFEELSKVFQESVVVENVRIWESDNACASYSLD

SEQ ID NO: 23848 - protein, 122 aa, Pelobacter propionicus
  misc_feature (1)..(122): tr|A1APX8|A1APX8_PELPD 6-carboxy-5,6,7,8-tetrahydropter in synthase OS=Pelobacter propionicus (strain DSM 2379 / NBRC 103807 / OttBd1) OX=338966 GN=Ppro_1786 PE=3 SV= 1
MYKLTIRTSFAAAHNLVNYQGDCENLHGHNWKVDVAVIARQLDKAGLGIDFKVLKREAGVVINELDHKYLNDNPAFAGISPSSEHISRFLFERLSEHLNSDVIKVESVTVWESDNASACYYE

SEQ ID NO: 23849 - protein, 164 aa, Pelobacter sp.
  misc_feature (1)..(164): tr|A0A1L3GPI6|A0A1L3GPI6_9DELT Uncharacterized protein OS=Pelobacter sp. SFB93 OX=1842532 GN=A7E78_06910 PE=4 SV=1
MSDDKYTSIVNLDFQYAHRFMNWPREAKHLHGHSGLLTIELEDTVDPVTGFAHACKDGFKKAWEICDHFHHATLFQEGDPLLDAVLAVYKKEGINNDPENCVPLKKIDHALAWSYPEYRIVVTKKVSTCENLCELFYELLKNKMPIKKITFRSSSMNAASKEFK

SEQ ID NO: 23850 - protein, 123 aa, Pelobacter sp.
  misc_feature (1)..(123): tr|A0A1L3GLE5|A0A1L3GLE5_9DELT 6-carboxy-5,6,7,8-tetrah ydropterin synthase OS=Pelobacter sp. SFB93 OX=1842532 GN=A7E78_02175 PE=3 SV=1
MYYLTIHTQFAAAHNLIHYQGDCENLHGHNWKVEVTVTAKELDKAGLGIDFKVLKRETNKQLDLLDHKYLNDLPAFRESSPSSENIARFLYEQLQGVLNDGNVAVDKVTVWESDYACASYVAD

SEQ ID NO: 23851 - protein, 137 aa, Pelobium manganitolerans
  misc_feature (1)..(137): tr|A0A419SA36|A0A419SA36_9SPHI 6-carboxy-5,6,7,8-tetrah ydropterin synthase OS=Pelobium manganitolerans OX=1842 495 GN=BCY91_14440 PE=3 SV=1
MIYITRKEHFNAAHKLYREDWTFEKNEEVFGRCANTNWHGHNYDLFVTVKGQINEDTGFVIDLKDLKKLIVEHVVDKLDHKNLNIDVDFMRGKMASTEVLAVEIWKQLASKIKEKGAALHCVKLYETANNYVEYFGE

SEQ ID NO: 23852 - protein, 137 aa, Pelobium manganitolerans
  misc_feature (1)..(137): tr|A0A419S8V0|A0A419S8V0_9SPHI 6-pyruvoyl tetrahydrobio pterin synthase OS=Pelobium manganitolerans OX=1842495 GN=BCY91_15625 PE=4 SV=1
MKQKVAVFRKEHFNAAHRLHQPNWSDEKNQAFFGQCNNPNYHGHNYDLIVKLTGYVDEESGYLYDMKLLSALLHKKVIDKFDHRNLNLDTQEFKSLNPTAENIAMVIYDLLRPEIPQDLDLKITLYETERNFVEYPA

SEQ ID NO: 23853 - protein, 162 aa, Pelodictyon luteolum
  misc_feature (1)..(162): tr|Q3B4V1|Q3B4V1_PELLD 6-pyruvoyltetrahydropterin synth ase OS=Pelodictyon luteolum (strain DSM 273 / 2530) OX= 319225 GN=Plut_0755 PE=4 SV=1
MKQKKTPLSSPPAAPPPAGQPRKVYVTRTIEFNAAHRLFNPKFSEEMNTRVYGKCANKYGHGHNYQLEITLGGTVDPETGYLFDLKELKKILEEEVTARFDHRHLNHDVPELEGLVPTTETLAVLIWDILEERIAAIDNREISLQAVKLHETGKNSVSYLGE

SEQ ID NO: 23854 - protein, 141 aa, Pelodictyon luteolum
  misc_feature (1)..(141): tr|A0A165LFE4|A0A165LFE4_PELLU 6-pyruvoyl tetrahydropte rin synthase OS=Pelodictyon luteolum OX=1100 GN=A3K90_0 6980 PE=4 SV=1
MQISRKIEIDYGHTLPNHFSFCNQLHGHRGVVVATVEGPVVVRSGDSEEGMVMDFRFLKEIMVEHIHNRLDHGFAVWREDHEDLEFILKRNTRVLVTDDPPTAEYLAKWAFNEIRTHLPEGISLHNVRWYETPNNWADYDG

SEQ ID NO: 23855 - protein, 143 aa, Pelodictyon phaeoclathratiforme
  misc_feature (1)..(143): tr|B4SF76|B4SF76_PELPB Uncharacterized protein OS=Pelod ictyon phaeoclathratiforme (strain DSM 5477 / BU-1) OX= 324925 GN=Ppha_0936 PE=4 SV=1
MMRISRKIEIDYGHTLPNSFSFCNQLHGHRGVVVATVEGNLIERKGDGEEGMVMDFKFLKDILIEHIHDKLDHGFAVWKEDHEDLDFIVKRNSRVLITDEPPTAECLAKWAFNQIQPHLPDGVTLKQLRWYETPNNWADFDGR

SEQ ID NO: 23856 - protein, 149 aa, Pelodictyon phaeoclathratiforme
  misc_feature (1)..(149): tr|B4SBX7|B4SBX7_PELPB 6-carboxy-5,6,7,8-tetrahydropter in synthase OS=Pelodictyon phaeoclathratiforme (strain DSM 5477 / BU-1) OX=324925 GN=Ppha_1857 PE=3 SV=1
MNDLLRKPRKVYVSRKIEFNAAHRLFNPLFTEQENLELYGKCSNTFGHGHNYLLDVTISGIANQETGFLFDLKELKIILEEEIIARFDHKHLNHDVPELQECVPTTEVLAVLIWDILEKRLHNINNRELSLHEVTIYETGKNAVRYLGE

SEQ ID NO: 23857 - protein, 364 aa, Pelomonas puraquae
  misc_feature (1)..(364): tr|A0A254MXL2|A0A254MXL2_9BURK 6-pyruvoyl tetrahydropte rin synthase OS=Pelomonas puraquae OX=431059 GN=CDO81_2 6870 PE=4 SV=1
MSNAAYTVASCRLESARRVSVLPRDHKCRHVHGHSFLISVFAEVPVGWAPFPGGEVSELQRRLEGCVAPLNYQLLNEFLEQPTDENIARWVRQRLDVPGIDRVAVQSTANQGVDLDAQGHAHVWRRYRFQAAHQLPNVPLGHKCGRLHGHGFEVIVHADQDVGERDLSIDYDHLDAIWAPFHYELNYQYLNEIEGLHNPTSEVISAWLWRRLKLALPELSWVTVFETGSCGANFDGTQYRIWKEFTLDSAVQYRRAPADVPQARIHGHTYTLRLHLSAPLDAMMGWTVDFGDVKAIFDPIFKSLDHHPLHQLTGILDCDTASLAAWIQNQASKELPQLVRVDLYETEGSGSIATVDQAGPALPV

SEQ ID NO: 23858 - protein, 370 aa, Pelomonas puraquae
  misc_feature (1)..(370): tr|A0A254NCV6|A0A254NCV6_9BURK 6-pyruvoyl tetrahydropte rin synthase OS=Pelomonas puraquae OX=431059 GN=CDO81_1 7010 PE=4 SV=1
MSLSILHCASAGFESACRIPALPAHHRSHGLHGHSYFATVRSALPSGWAASVGSFAGGEVAALRERMGRTVAPLDHALLNDHLSEPTDENLARWVRRHLAADVPGIVQVGVQSTTHSGVDLDGAGQAHVWRRYRFQAAHQLPNVPAGHQCGRMHGHGFEVILHANADLGERDLAIDYDHLDEVWAPLHFELNYRCLNDIPGLANPTSENISAWLWQRLKPVLPELSWVTVYETGSSGANFNGQSYRIWKEMTLDSAVRMQQAPAGHALAGIHGHTFTLRLHLAAPLDQVMGWTVDFGDVKQLFNPIFKRLDHHPLYEIADLPDGDAASVAAWVLREGGAVLPQIDRVDLYETRGCGAIVSRADSEELIPV

SEQ ID NO: 23859 - protein, 364 aa, Pelomonas saccharophila
  misc_feature (1)..(364): tr|A0A4R3VDR9|A0A4R3VDR9_PELSC 6-pyruvoyltetrahydropter in/6-carboxytetrahydropterin synthase OS=Pelomonas sacc harophila OX=304 GN=EV671_10074 PE=4 SV=1
MSLSVLHCASAGFESACRIPALPASHRSHGLHGHSYFATVRSALPAGWAAFPGGEVEALRARMADTVAPLDHALLNDHLAEPTDENLARWVRSRLAVPGIAQVGVQSTPHSGVDLDGAGHAHVWRRYRFQAAHQLPHVPAGHQCGRMHGHGFEVILHANADLGERDLSIDYDHLDEVWAPLHFELNYRCLNDIPGLQNPTSENISAWLWQRLKPELPELSWVTVYETGSSGANFNGQSYRIWKEMTLDSAVRMRHAPAGHPLAGIHGHTFTLRLHLAAPLDQVMGWTVDFGDVKRLFNPIFKRLDHHPLFEIANLPDGDAASLAAWVLREGGGVLPQIDRVDLYETRGSGAIVSRADSEELIPV

SEQ ID NO: 23860 - protein, 364 aa, Pelomonas sp.
  misc_feature (1)..(364): tr|A0A397RXB9|A0A397RXB9_9BURK 6-pyruvoyltetrahydropter in/6-carboxytetrahydropterin synthase OS=Pelomonas sp. BT06 OX=2135721 GN=C8K28_0794 PE=4 SV=1
MSLSVLHCASAGFESACRIPALPASHRSHGLHGHSYFATVRTALPAGWAAFPGGEVEALRARMADTVAPLDHALLNDHLTEPTDENLARWVRSRLEVPGIVQVGVQSTTHSGVDLDNAGHAHVWRRYRFQAAHQLPNVPAGHQCGRMHGHGFEVILHANADLGERDLSIDYDHLDEVWAPLHFELNYRCLNDIAGLQNPTSENISAWLWQRLKPELPELSWVTVYETGSSGANFNGQNYRIWKEMTLDSAVRMQQAPAGHPLAGIHGHTFTLRLHLAAPLDQVMGWTVDFGDVKTLFNPIFKRLDHHPLFEIANLPDGDAASIAAWVLREGGGVLPQIDRVDLYETRGSGAIVSRADSEELIPV

SEQ ID NO: 23861 - protein, 115 aa, Pelomonas sp.
  misc_feature (1)..(115): tr|A0A2R7SBY3|A0A2R7SBY3_9BURK 6-pyruvoyl tetrahydropte rin synthase (Fragment) OS=Pelomonas sp. HMWF004 OX=205 6841 GN=DBR42_19180 PE=4 SV=1
AVRLQHAPAGHALAGIHGHTFTLRLHLAAPLDEVMGWTVDFGDVKALFNPIFKALDHHPLYEIAGLPDGDAASIAAWVLREGSGVLPSLDRVDLYETRGSGAIVSRADSEELIPV

SEQ ID NO: 23862 - protein, 125 aa, Pelosinus fermentans
  misc_feature (1)..(125): tr|I8RJC1|I8RJC1_9FIRM 6-carboxy-5,6,7,8-tetrahydropter in synthase OS=Pelosinus fermentans B4 OX=1149862 GN=FB 4_3434 PE=3 SV=1
MFELTIAVNFEAAHCIRNYPGKCNRLHGHNWKVEVNIYGSQLNELGMLVDFVDLKAAINGIMVNLDHYYLNEIEPFCRINPTAENLAKYIYEELAKTPIFNENVKLRSIRIWESSNSAAAYSQEA

SEQ ID NO: 23863 - protein, 125 aa, Pelosinus fermentans
  misc_feature (1)..(125): tr|I8TVS2|I8TVS2_9FIRM 6-carboxy-5,6,7,8-tetrahydropter in synthase OS=Pelosinus fermentans JBW45 OX=1192197 GN =JBW_02259 PE=3 SV=1
MFELTIAVNFEAAHCIRNYPGKCNRLHGHNWKVEVNIYGSQLNDLGMLVDFVDLKAAINGIMVNLDHYYLNEIEPFCRINPTAENLAKYIYEELAKTPIFNENVKLRSIRIWESSNSAAAYSQEA

SEQ ID NO: 23864 - protein, 125 aa, Pelosinus propionicus
  misc_feature (1)..(125): tr|A0A1I4HC77|A0A1I4HC77_9FIRM 6-carboxy-5,6,7,8-tetrah ydropterin synthase OS=Pelosinus propionicus DSM 13327 OX=1123291 GN=SAMN04490355_1003138 PE=3 SV=1
MFELTIAVNFEAAHCIRNYPGKCNRLHGHNWKVEVNIYGCQLNELGMLVDFVDLKAAINGIMVNLDHYYLNEIEPFCRINPTAENLAKYIYDELIKTPIFDENVKLRSIKLWESPNSAAAYSQEA

SEQ ID NO: 23865 - protein, 125 aa, Pelosinus sp.
  misc_feature (1)..(125): tr|A0A075KCK5|A0A075KCK5_9FIRM 6-carboxy-5,6,7,8-tetrah ydropterin synthase OS=Pelosinus sp. UFO1 OX=484770 GN= UFO1_2359 PE=3 SV=1
MFELTIAVNFEAAHCIRNYPGKCSRIHGHNWKVEVNIYGSKLDELGMLIDFGDLKAAVNDIMLNLDHYYLNEIEPFCKINPTAENLAQYIYEKLAETAVFNPDVKLRSVRVWESPNSAAAYTQEA

SEQ ID NO: 23866 - protein, 128 aa, Pelotomaculum propionicicum
  misc_feature (1)..(128): tr|A0A4Y7RM87|A0A4Y7RM87_9FIRM 6-carboxy-5,6,7,8-tetrah ydropterin synthase OS=Pelotomaculum propionicicum OX=2 58475 GN=queD PE=3 SV=1
MFEIAVKTRFAAAHFLSGYKGPCASLHGHTWQVEVTFKGQNLDHSGMLLDFKEVKEKVRNIVDELDHVNLNDLTPFQKGGEDNPTAENLARYIYRRLKLEFSAHEPFVKITAVRVWESPDASASYLEE

SEQ ID NO: 23867 - protein, 132 aa, Pelotomaculum schinkii
  misc_feature (1)..(132): tr|A0A4Y7RD34|A0A4Y7RD34_9FIRM 6-carboxy-5,6,7,8-tetrah ydropterin synthase OS=Pelotomaculum schinkii OX=78350 GN=queD PE=3 SV=1
MYELSIRTRFAAAHCIEDYKGPCSRVHGHTWQIEATVLGPQLNRLGMLIDFQDLKRILKNIVHKLDHQNLNELEPFKGGGEKSPTAENLARYIFEQLKPEITAMQGDLRVGLVRVWESPDASAVYKEVQPLS

SEQ ID NO: 23868 - protein, 83 aa, Pelotomaculum sp.
  misc_feature (1)..(83): tr|A0A1V4W729|A0A1V4W729_9FIRM 6-carboxy-5,6,7,8-tetrah ydropterin synthase OS=Pelotomaculum sp. PtaB.Bin104 OX =1811693 GN=queD_1 PE=4 SV=1
MLVDFKELKSGVKEVIEELDHQNLNMLEPFKQNSENNPTAENLARYIFSRLKTKFTNSLKGAKIAVVRVGESPEASAAYREEV

SEQ ID NO: 23869 - protein, 129 aa, Pelotomaculum sp.
  misc_feature (1)..(129): tr|A0A1V5BQQ4|A0A1V5BQQ4_9FIRM 6-carboxy-5,6,7,8-tetrah ydropterin synthase OS=Pelotomaculum sp. PtaU1.Bin065 O X=1811696 GN=queD PE=3 SV=1
MYELTVRTRFAAAHSLMNYDGPCARLHGHTWQVEVVFQGHQLDQRGMLVDFKELKSSVKDVIDELDHQNLNMLEPFKQNSENNPTAENLARYIFNSLKTKFTNSLMEAKIAVVRVGESPEASAAYREED

SEQ ID NO: 23870 - protein, 129 aa, Pelotomaculum thermopropionicum
  misc_feature (1)..(129): tr|A5D2E2|A5D2E2_PELTS 6-carboxy-5,6,7,8-tetrahydropter in synthase OS=Pelotomaculum thermopropionicum (strain DSM 13744 / JCM 10971 / SI) OX=370438 GN=PTH_1403 PE=3 SV=1
MYEIVVRTSFAAAHSIKGYDGPCSRMHGHTWLVEAVLRGGQLDQKGMLVDFKEVKNILRSAVGELDHQNLNEIKPFAGGSGDSPTAENIARYLFCRIKPEIVKLERNIHLAMVRVWESDTAAASYLEVD

SEQ ID NO: 23871 - protein, 126 aa, Pelotomaculum thermopropionicum
  misc_feature (1)..(126): tr|A0A101HVP7|A0A101HVP7_9FIRM 6-carboxy-5,6,7,8-tetrah ydropterin synthase OS=Pelotomaculum thermopropionicum OX=110500 GN=XD97_0066 PE=3 SV=1
MYELTVKNSFSSAHSIPDYDGKCARLHGHTWQVEVAVRGKHLDRKGMLVDFRKIKSGLDKIVTDLDHQYLNDLKIFKEEGINPTAENLAKYIYISLKEMINNYDVKLTMVRVWESPSASASYWEVD

SEQ ID NO: 23872 - protein, 156 aa, Peptoclostridium acidaminophilum
  misc_feature (1)..(156): tr|W8T538|W8T538_PEPAC Queuosine biosynthesis protein Q ueD OS=Peptoclostridium acidaminophilum DSM 3953 OX=128 6171 GN=queD PE=4 SV=1
MLPGWRQKKYWKGTWNNMYIIKTQQSFDSAHFLSGYEGKCANIHGHRWNVHAEISSQELLQGGQNDGMVVDFSDIKTVLKGLVDSLDHALLIQKGSMRSKTLECLVGDGFRVIELDFRPTAENFARYFFDKIKETGFTVKRVTVYETPKNCATYED

SEQ ID NO: 23873 - protein, 143 aa, Peptoclostridium litorale
  misc_feature (1)..(143): tr|A0A069RAQ0|A0A069RAQ0_PEPLI 6-carboxy-5,6,7,8-tetrah ydropterin synthase OS=Peptoclostridium litorale DSM 53 88 OX=1121324 GN=queD PE=3 SV=1
MYILKAEHSFDSAHFLAEYEGKCANIHGHRWKVEIEVCSDSLTAGGQLDGMVVDFSDLKKDVKEMADSCDHALLVQRGTMRENTLQCLKEDGFNIIELDFRPTAENFSAFFFYEMKSRGYNVKRATVYETPSNCATYEETEAV

SEQ ID NO: 23874 - protein, 130 aa, Peptococcaceae bacterium
  misc_feature (1)..(130): tr|A0A0F2N257|A0A0F2N257_9FIRM 6-carboxy-5,6,7,8-tetrah ydropterin synthase OS=Peptococcaceae bacterium BRH_c4a OX=1629716 GN=VR68_15915 PE=3 SV=1
MFEISVKRRFAAAHRLEGYQGQCSALHGHTWIVEVAVAGSGLDSCGMLADFRIIKETVDGIVTDLDHSYLNDIVFFSGGDPKNNPTAENIAFYIYGKVKEQIIKISPGLMVRGVRVWESPDASALYREDL

SEQ ID NO: 23875 - protein, 129 aa, Peptococcaceae bacterium
  misc_feature (1)..(129): tr|A0A0J1F7K1|A0A0J1F7K1_9FIRM 6-carboxy-5,6,7,8-tetrah ydropterin synthase OS=Peptococcaceae bacterium CEB3 OX =999898 GN=queD PE=3 SV=1
MALATIVKEFTFDAAHRLDGHHGHCGNIHGHTYKLQVGVCGAVRERPGASDDGMVMDFEELKEVVKTEIINRVDHQFLNEVLPFRTTAENISLWAVQVLRKAGLPVKFIRLYETPTSYVEVEERDVPVD

SEQ ID NO: 23876 - protein, 110 aa, Peptoniphilus asaccharolyticus
  misc_feature (1)..(110): tr|A0A1W1UK48|A0A1W1UK48_PEPAS 6-carboxy-5,6,7,8-tetrah ydropterin synthase OS=Peptoniphilus asaccharolyticus D SM 20463 OX=573058 GN=SAMN00017477_0361 PE=3 SV=1
MFKIKKTLEISAAHKLNLNYESKCQNLHGHNWIITIYCKSEELDENGMVYDFTHIKNKIHKRLDHTYINDIIPYNPTAENIAKWIAEEIGEKCYMVEVQESEGNVAIYEV

SEQ ID NO: 23877 - protein, 131 aa, Peptoniphilus indolicus
  misc_feature (1)..(131): tr|A0A379D8X4|A0A379D8X4_9FIRM 6-carboxy-5,6,7,8-tetrah ydropterin synthase OS=Peptoniphilus indolicus OX=33030 GN=queD PE=3 SV=1
MEFEIVWVLLNQLFINFEVKVMFKIKKTLEISAAHKLSLNYESKCQNLHGHNWIVNIYCKSKNLDENGMVYDFTHIKNKIHKRLDHTYLNDVIPYNPTAENIAKWIADEIGEKCYMVEVQESEGNVAIYEV

SEQ ID NO: 23878 - protein, 131 aa, Peptoniphilus indolicus; identical to SEQ ID NO: 23877
  misc_feature (1)..(131): tr|G4D5E1|G4D5E1_9FIRM 6-carboxy-5,6,7,8-tetrahydropter in synthase OS=Peptoniphilus indolicus ATCC 29427 OX=99 7350 GN=HMPREF9129_1621 PE=3 SV=1

SEQ ID NO: 23879 - protein, 118 aa, Peptostreptococcaceae bacterium
  misc_feature (1)..(118): tr|U2JBH1|U2JBH1_9FIRM 6-carboxy-5,6,7,8-tetrahydropter in synthase OS=Peptostreptococcaceae bacterium oral tax on 113 str. W5053 OX=1321784 GN=HMPREF1987_00832 PE=3 S V=1
MILIKEFEFDAAHHLTKYHGKCEHLHGHTYKLVVMLEGQPNFEDMVFDFVELKHMVQDKILSRLDHAYLNDLLPNPTAENIAVFVWKELFPLVKRENSSLHEIQVWETKTSGIIYRGE

SEQ ID NO: 23880 - protein, 181 aa, Peredibacter sp.
  misc_feature (1)..(181): tr|A0A2E5CDC3|A0A2E5CDC3_9PROT Uncharacterized protein OS=Peredibacter sp. OX=2024850 GN=CMJ16_07260 PE=4 SV=1
MSECSYKLSDLKVRLFLDFNYSIKVYKQYFNFAASHFLIFEDGTREPLHGHNYRVMVKGEAPKLEGDMVFDFLDIKPIVREVCDSLDHRLLLPKDNQHLKIHDKGKSFKLTTPDESEFLIPKQDALVLPISNTSAERLAIYICEEITKITFERFQFRFSALEVEVEETPGQSAVYAHKETL

SEQ ID NO: 23881 - protein, 197 aa, Perlucidibaca sp.
  misc_feature (1)..(197): tr|A0A2P6AQZ8|A0A2P6AQZ8_9GAMM 6-carboxytetrahydropteri n synthase QueD OS=Perlucidibaca sp. HR-E OX=2094561 GN =C5O18_08430 PE=4 SV=1
MLIRKLFRFENAHIVRNCSSDRCRRSIHGHSYQVEVLLEAHALDHGQMVYDFGLMKGDIRSLIDSFDHAVAFWDRDDPEYLDACRKFSARWIALPVSPSAEQFSRVFFALVDRVLALTDMANGEQDVRLHSVIVHETATGYAQCFREDIENPRMGELPLERIVFSDQVRAEWPDPDLWQRLLDGRRSRNPEVELQVR

SEQ ID NO: 23882 - protein, 285 aa, Permianibacter aggregans
  misc_feature (1)..(285): tr|A0A4R6UGV0|A0A4R6UGV0_9GAMM 6-pyruvoyl tetrahydropte rin synthase-like protein OS=Permianibacter aggregans O X=1510150 GN=EV696_11920 PE=4 SV=1
MASLFVDHLTVIDCSALSAERGLIGASYIVDIELQGPLDRQGMVLDFSKVKKQIKRLIDDSVDHRLLVPTKYTGLQIAYQGEQVALQFRDQRDFLWQHSSPAVALAQIPLTDISAELLSPWLQQHIQEQLPRGMQLTLRLREEQIDGASYCYSHGLQKHDGACQRIAHGHRSRIEIFIDGERSTAWEQTWAKRFDDIYIVTRSHIHGEATDGETPMLLLRYRAQEGDYFLNLPKARCHTIDSESTVEHIAAHIAEVTQRETGADNVRVRAFEGVLKGAIAEKCAG

SEQ ID NO: 23883 - protein, 161 aa, Persephonella hydrogeniphila
  misc_feature (1)..(161): tr|A0A285NHK1|A0A285NHK1_9AQUI 6-pyruvoyltetrahydropter in/6-carboxytetrahydropterin synthase OS=Persephonella hydrogeniphila OX=198703 GN=SAMN06265182_1298 PE=4 SV=1
MRYEITKRFKFEAGHRVWKQNLISGKGAKLMGKEVPPNPCLNIHGHSYKVEVTVGSDKLNEQEMVIDFYHIKAALKDLIDNQIDHSFIIDRNDPLYPTFKEHFGFLKLFVVDFCPTAEALAKFIYDFLKGKLEEAELLDDIKVVSVTVWETETGKAVYKEE

SEQ ID NO: 23884 - protein, 115 aa, Persephonella hydrogeniphila
  misc_feature (1)..(115): tr|A0A285NNJ1|A0A285NNJ1_9AQUI 6-carboxy-5,6,7,8-tetrah ydropterin synthase OS=Persephonella hydrogeniphila OX= 198703 GN=SAMN06265182_1873 PE=3 SV=1
MPYIIRVRREFNAAHYLTDYYGKPEPLHGHTWEVELFIRADSLDKGGMGFDFIEIQNFLSEILPDYKCMNDIYDFSPSAENVARYIYNKVKEKYPSLQKVVVWETKYGGAEYFEE

SEQ ID NO: 23885 - protein, 114 aa, Persephonella marina
  misc_feature (1)..(114): tr|C0QTV8|C0QTV8_PERMH 6-carboxy-5,6,7,8-tetrahydropter in synthase OS=Persephonella marina (strain DSM 14350 / EX-H1) OX=123214 GN=PERMA_0330 PE=3 SV=1
MPFIIRVKREFQAAHFLTDYHGKPEPLHGHTWLVEIFIRADKLDKGGMGYDFIEIQRFLDQIIPDYKCLNDIFDFSPSAENLAKWLYEKIKERYPTLQKVVVWETKEGGAEYFE

SEQ ID NO: 23886 - protein, 161 aa, Persephonella marina
  misc_feature (1)..(161): tr|C0QR57|C0QR57_PERMH Putative 6-pyruvoyl tetrahydrobi opterin synthase (Ptps)(Ptp synthase) OS=Persephonella marina (strain DSM 14350 / EX-H1) OX=123214 GN=PERMA_13 85 PE=4 SV=1
MRYEITKRFKFEAGHRVWKQNLSSGKGAKLMADEIPPNPCINIHGHSYKVEVTVGSDKLNEQEMVIDFYHIKSALKDLIDNQLDHSFIIDKNDPLFPKFKENFGFLKLTVVDFCPTAEALAKYIYDFLEDKLREAGLLDEIKVVSVTIWETETGKAVYKGK

SEQ ID NO: 23887 - protein, 161 aa, Persephonella sp.
  misc_feature (1)..(161): tr|A0A432S6S0|A0A432S6S0_9AQUI 6-carboxy-5,6,7,8-tetrah ydropterin synthase OS=Persephonella sp. OX=2060922 GN= DSY53_00765 PE=4 SV=1
MKYKITKRFKFEAGHRVWKQNLLSGKGSKLLGKEIPPNPCLNIHGHSYKVEVVVGSDKLNEQEMVIDFYHIKSALKDLIDNQMDHSFIIDKNDPLYPKFKENFGFLKLFEVDFCPTAEALAKFIYEFLENKLKEADLLNDIKVVKVVVWETETGKAEYGIE

SEQ ID NO: 23888 - protein, 114 aa, Persephonella sp.
  misc_feature (1)..(114): tr|A0A432S569|A0A432S569_9AQUI 6-carboxy-5,6,7,8-tetrah ydropterin synthase OS=Persephonella sp. OX=2060922 GN= DSY53_04335 PE=3 SV=1
MPYIVRVRKEFQSAHFLTDYHGKPEPLHGHTWMIEVFIKADKLDKGGMGYDFVEIDKFLDEILPNYKCMNDIYDFSPSAENLAKYFYYKIKEKYPSLQKVVVWETKYGGAEYYE

SEQ ID NO: 23889 - protein, 121 aa, Petrimonas mucosa
  misc_feature (1)..(121): tr|A0A1G4G3F9|A0A1G4G3F9_9PORP 6-carboxy-5,6,7,8-tetrah ydropterin synthase OS=Petrimonas mucosa OX=1642646 GN= queD PE=3 SV=1
MYKISKQFAFSAAHSLSGLPEDHPCTRLHGHNYVVTVHLRANELNSTGFVKDYNELRVVKQYIDEHLDHRNLNDIMHPLNSSAENLARLLYDIFKPILPELYAVEVSETPKTSAIYEPDGQ

SEQ ID NO: 23890 - protein, 120 aa, Petrimonas sp.
  misc_feature (1)..(120): tr|A0A3G9DN62|A0A3G9DN62_9PORP 6-carboxy-5,6,7,8-tetrah ydropterin synthase OS=Petrimonas sp. IBARAKI OX=197833 7 GN=PEIBARAKI_4086 PE=3 SV=1
MYKISKQFAFSAAHSLDGLPGDHPCTRLHGHNYVVTVHLRSKELNDTGFVKDYNELKVVKQYIDEHIDHRNLNDIMYPLNSSAENLARMFFDIFKPMLPELYAVEVSETPKTSAIYELDN

SEQ ID NO: 23891 - protein, 117 aa, Phaeobacter gallaeciensis
  misc_feature (1)..(117): tr|V9WNH7|V9WNH7_9RHOB 6-carboxy-5,6,7,8-tetrahydropter in synthase OS=Phaeobacter gallaeciensis DSM 26640 OX=1 423144 GN=Gal_02945 PE=3 SV=1
MFRITKEFHFSASHQLSHLPDDHQCARLHGHNYIVVIELAGAELNSDGFVRDYHELAPLKNYIDGSFDHRHLNDVMEGPSTAENMARHFYDWCAARWPETAAVRVSETPKTWAEYRP

SEQ ID NO: 23892 - protein, 117 aa, Phaeobacter gallaeciensis
  misc_feature (1)..(117): tr|A0A1B0ZN60|A0A1B0ZN60_9RHOB 6-carboxy-5,6,7,8-tetrah ydropterin synthase OS=Phaeobacter gallaeciensis OX=608 90 GN=JL2886_00624 PE=3 SV=1
MFRIRKEFHFSASHQLSHLPDDHQCARLHGHNYIVVVELAAEALNDDGFVRDYHDLKPLKTYIDETFDHRHLNEVLDVASTAENMARHFHDWCAARWPETSAVLVSETPKTWAEYRP

SEQ ID NO: 23893 - protein, 117 aa, Phaeobacter inhibens
  misc_feature (1)..(117): tr|I7DMH5|I7DMH5_PHAIB 6-carboxy-5,6,7,8-tetrahydropter in synthase OS=Phaeobacter inhibens (strain ATCC 700781 / DSM 17395 / CIP 105210 / JCM 21319 / NBRC 16654 / NC IMB 13546 / BS107) OX=391619 GN=queD PE=3 SV=1
MFRITKEFHFSASHQLSHLPADHQCARLHGHNYIVVVELAGAELNSDGFVRDYHELAPLKNYIDGSFDHRHLNDVMDGPSTAENMARHFYEWCVARWPETSAVRVSETPKTWAEYRP

SEQ ID NO: 23894 - protein, 117 aa, Phaeobacter inhibens
  misc_feature (1)..(117): tr|A0A2I7K652|A0A2I7K652_9RHOB 6-carboxy-5,6,7,8-tetrah ydropterin synthase OS=Phaeobacter inhibens OX=221822 G N=queD PE=3 SV=1
MFRITKEFHFSASHQLSHLPADHQCARLHGHNYIVVVELAGAKLNSDGFVRDYHELAPLKNYIDGSFDHRHLNDVMEGPSTAENMARHFYEWCVARWPETAAVRVSETPKTWAEYRP

SEQ ID NO: 23895 - protein, 117 aa, Phaeobacter italicus
  misc_feature (1)..(117): tr|A0A0H5D044|A0A0H5D044_9RHOB 6-carboxy-5,6,7,8-tetrah ydropterin synthase OS=Phaeobacter italicus OX=481446 G N=queD PE=3 SV=1
MFRITKEFHFSASHQLTHLPADHQCARLHGHNYIVVVELAGAELNSDGFVRDYHELAPLKNYIDGSFDHRHLNDVMEGPSTAENMARHFYDWCVSRWPETAAVRVSETPKTWAEYRP

SEQ ID NO: 23896 - protein, 117 aa, Phaeobacter piscinae
  misc_feature (1)..(117): tr|A0A291FWS0|A0A291FWS0_9RHOB 6-carboxy-5,6,7,8-tetrah ydropterin synthase OS=Phaeobacter piscinae OX=1580596 GN=queD PE=3 SV=1
MFRITKEFHFSASHQLTHLPADHQCARLHGHNYIVVVELAGAELNSDGFVRDYHELAPLKNYIDGSFDHRHLNDVMEGPSTAENMARHFYDWCAARWPETAAVRVSETPKTWAEYRP

SEQ ID NO: 23897 - protein, 117 aa, Phaeobacter piscinae
  misc_feature (1)..(117): tr|A0A291FKL8|A0A291FKL8_9RHOB 6-carboxy-5,6,7,8-tetrah ydropterin synthase OS=Phaeobacter piscinae OX=1580596 GN=queD PE=3 SV=1
MFRITKEFHFSASHQLTHLPDDHQCARLHGHNYIVVIELAGAELNSDGFVRDYHELAPLKSYIDGSFDHRHLNDVMEGPSTAENMARHFYDWCAARWPETAAVRVSETPKTWAEYRP

SEQ ID NO: 23898 - protein, 117 aa, Phaeobacter porticola
  misc_feature (1)..(117): tr|A0A1L3I7Y6|A0A1L3I7Y6_9RHOB 6-carboxy-5,6,7,8-tetrah ydropterin synthase OS=Phaeobacter porticola OX=1844006 GN=queD PE=3 SV=1
MYRITKEFHFSASHQLTHLPDDHQCARLHGHNYIVIVELAGAKLNSDGFVRDYHELAPLKNYIDGTFDHRHLNDVMDGPSTAENMARHFYDWCAARWPETTAVRISETPKTWAEYRP

SEQ ID NO: 23899 - protein, 117 aa, Phaeobacter sp.
  misc_feature (1)..(117): tr|A0A384GRJ7|A0A384GRJ7_9RHOB 6-carboxy-5,6,7,8-tetrah ydropterin synthase OS=Phaeobacter sp. S60 OX=1569353 G N=OO25_12065 PE=3 SV=1
MFRITKEFHFSASHQLTHLPADHQCARLHGHNYIVVIELAGSELNSDGFVRDYHELAPLKNYIDGSFDHRHLNDVMEGPSTAENMARHFYDWCAARWPETAAVRVSETPKTWAEYRP

SEQ ID NO: 23900 - protein, 117 aa, Phaeobacter sp.
  misc_feature (1)..(117): tr|A0A0P6R690|A0A0P6R690_9RHOB 6-carboxy-5,6,7,8-tetrah ydropterin synthase OS=Phaeobacter sp. 11ANDIMAR09 OX=1 225647 GN=AN476_20085 PE=3 SV=1
MFRIRKEFHFSASHQLSHLPDDHQCARLHGHNYIVVVELAAERLNADGFVRDYHDLKSLKSYIDDHFDHRHLNDVMQGPSTAENMARHFYDWCVARWPETAAVLVSETPKTWAEYRP

SEQ ID NO: 23901 - protein, 135 aa, Phaeodactylibacter luteus
  misc_feature (1)..(135): tr|A0A5C6RHA2|A0A5C6RHA2_9BACT 6-carboxy-5,6,7,8-tetrah ydropterin synthase OS=Phaeodactylibacter luteus OX=156 4516 GN=FRY97_17560 PE=3 SV=1
MRIAVFRRAHFNAAHRLYNPAWSDEKNQEVFGLCNNPNYHGHNYELEVKVAGEVDPVTGYLIDLKDLKDLIKKEVELRFDHKNLNLDTEEFRNLNPTAENICFVIWNILRSHLDERYDLSVRLYETPRNYVEYPA

SEQ ID NO: 23902 - protein, 136 aa, Phaeodactylibacter luteus
  misc_feature (1)..(136): tr|A0A5C6RJI1|A0A5C6RJI1_9BACT 6-carboxytetrahydropteri n synthase OS=Phaeodactylibacter luteus OX=1564516 GN=F RY97_13335 PE=4 SV=1
MVYLTRRERFNAAHKLWVDAWSDDRNREMFGKCSNKNWHGHNYDLFVTVKGKPDPVTGFIVDVKQLSKLIKSSIVDKVDHCNLNLDVDFIPKGMQPTTENLVILFWQQLEPLLEGCQLHCIKLYETENIFAEYYGE

SEQ ID NO: 23903 - protein, 136 aa, Phaeodactylibacter xiamenensis
  misc_feature (1)..(136): tr|A0A098S471|A0A098S471_9BACT 6-pyruvoyl tetrahydrobio pterin synthase OS=Phaeodactylibacter xiamenensis OX=15 24460 GN=IX84_16035 PE=4 SV=1
MVYLTRRERFNAAHKLWVDSWSEEKNQTMFGKCSNKNWHGHNYDLFVTVKGKPDPVTGFIVDVKQLSKLIKSSIVDKVDHSNLNLDVDFIPEGMQPTTENLVILFWQQLEPLLEGCQLHCIKLYETENIFAEYYGE

SEQ ID NO: 23904 - protein, 123 aa, Phaeodactylibacter xiamenensis
  misc_feature (1)..(123): tr|A0A098S9P7|A0A098S9P7_9BACT 6-pyruvoyl tetrahydropte rin synthase OS=Phaeodactylibacter xiamenensis OX=15244 60 GN=IX84_06790 PE=4 SV=1
MFSVTIRQHIMIAHSLPHPDFGPAQRLHGATYVTDVTFYSQQLTEMGIVIDIALAHDALKKALAPLDYQNLDELPQFKGKLTTTEFLALYIHGQVKAAVADQFDGRIKVVLGESHEAWAAYEA

SEQ ID NO: 23905 - protein, 175 aa, Phaeospirillum fulvum
  misc_feature (1)..(175): tr|A0A1H6JBX5|A0A1H6JBX5_PHAFV 6-pyruvoyltetrahydropter in/6-carboxytetrahydropterin synthase OS=Phaeospirillum fulvum OX=1082 GN=SAMN04244559_03012 PE=4 SV=1
MSVFHIRRRIEIDAGHRIATHGSKCRNLHGHRYGIEAECAADALHAGGEQTDMAIDFAFLKEEMMARIDATCDHGLIVALSDVALLDLFAPDGRDPAEWRADLAERVARDGAALTSETKLGSKMYVVPFHPTAEALARHWYAVLAAPVAERSGGAARLVALRVWETPNCMAEYAP

SEQ ID NO: 23906 - protein, 175 aa, Phaeospirillum fulvum
  misc_feature (1)..(175): tr|S9S9T0|S9S9T0_PHAFV 6-pyruvoyl-tetrahydropterin synt hase OS=Phaeospirillum fulvum MGU-K5 OX=1316936 GN=K678 _14167 PE=4 SV=1
MSVFHIRRRIEIDAGHRIATHGSKCRNLHGHRYGIEAECAADALHDGGEQTDMAIDFAFLKEEMMARIDATCDHGLIVALSDVALLDLFAPDGRDPAEWRAGLAESVARDGAALTTETKLGSKIYVVPFHPTAEALARHWFAVLEAPVVTRSGGAARLIALRVWETPNCMAEYAP

SEQ ID NO: 23907 - protein, 175 aa, Phaeospirillum molischianum
  misc_feature (1)..(175): tr|H8FNB2|H8FNB2_PHAMO 6-pyruvoyl-tetrahydropterin synt hase OS=Phaeospirillum molischianum DSM 120 OX=1150626 GN=PHAMO_10275 PE=4 SV=1
MSVFHIRRRIEIDAGHRIATHGSKCRNLHGHRYGIEAECAADALHDGGEQTDMALDFAFLKDEMMSRIDAFCDHGLIVALSDAALLDLFAPNGADPVVWRARLAQTVARDGAALTSDTRLGSKIYVVPFHPTAEALARHWFEVLAAPVVERSGGAARLVALRVWETPNCMAEYAP

SEQ ID NO: 23908 - protein, 119 aa, Phascolarctobacterium faecium
  misc_feature (1)..(119): tr|A0A3G9GRQ4|A0A3G9GRQ4_9FIRM 6-carboxy-5,6,7,8-tetrah ydropterin synthase OS=Phascolarctobacterium faecium OX =33025 GN=queD PE=3 SV=1
MFVLKEFEFDAAHYLPEYNGKCERLHGHTYKLVVKVEGTPDKEGMVIDFIRLKNIVKEEVLSKLDHACLNDILKQPSAENISVWVWQRLQKMLQGPNYKLYEVEVWETKTSGCIYRGDL

SEQ ID NO: 23909 - protein, 187 aa, Phascolarctobacterium faecium
  misc_feature (1)..(187): tr|A0A3G9H427|A0A3G9H427_9FIRM 6-pyruvoyl tetrahydropte rin synthase OS=Phascolarctobacterium faecium OX=33025 GN=PFJ30894_00101 PE=4 SV=1
MRSITTLDLQYAHRFYGFKGEAQYLHGHSGILTIEVEDSVEPGVNMVFPCNEIQKTAWDVLKNFDHALILREDDPLLPAVLDVYEKQGIRNGAPQNQMKGAAFKTELATAYPDCRLVVTKETMTVEGMIKIVYDLLKDKLNIAKITFVSGVNTASAEFTTKNQIDRCPLCGIALNENGVCPKCGYKK

SEQ ID NO: 23910 - protein, 119 aa, Phascolarctobacterium sp.; identical to SEQ ID NO: 23908
  misc_feature (1)..(119): tr|R6I8H8|R6I8H8_9FIRM 6-carboxy-5,6,7,8-tetrahydropter in synthase OS=Phascolarctobacterium sp. CAG:207 OX=126 2914 GN=BN533_00736 PE=3 SV=1

SEQ ID NO: 23911 - protein, 119 aa, Phascolarctobacterium sp.
  misc_feature (1)..(119): tr|A0A316S1X8|A0A316S1X8_9FIRM 6-carboxy-5,6,7,8-tetrah ydropterin synthase OS=Phascolarctobacterium sp. OX=204 9039 GN=queD PE=3 SV=1
MIVLKEFEFDAAHYLPEYNGKCERLHGHTYKLVVKVQGTPDHEGMVIDFIRLKNIVKENVLVHLDHACINDILPQPSAENISVWVWNKLKDLLHADNYDLYEVEVWETKTSGCIYRGDL

SEQ ID NO: 23912 - protein, 118 aa, Phascolarctobacterium succinatutens
  misc_feature (1)..(118): tr|E8LD21|E8LD21_9FIRM 6-carboxy-5,6,7,8-tetrahydropter in synthase OS=Phascolarctobacterium succinatutens YIT 12067 OX=626939 GN=queD PE=3 SV=1
MIIIKEFDFDAAHYLPAYNGKCEHLHGHTYKLVVKVEGTPDHEGMVIDFIKLKNLVKEEVLAHLDHACLNDILPVPSAENISVWVWNKLVELLKSDHYHLYEVEVWETRTSGCVYRGE

SEQ ID NO: 23913 - protein, 118 aa, Phascolarctobacterium succinatutens
  misc_feature (1)..(118): tr|A0A3C1IK43|A0A3C1IK43_9FIRM 6-carboxy-5,6,7,8-tetrah ydropterin synthase OS=Phascolarctobacterium succinatut ens OX=626940 GN=queD PE=3 SV=1
MIIIKEFDFDAAHYLPAYNGKCEHLHGHTYKLVVKVEGTPDHEGMVIDFIKLKNLVKEEVLAHLDHACLNDILPVPSAENISVWVWNKLVELLKSDHYHLFEVEVWETRTSGCVYRGE

SEQ ID NO: 23914 - protein, 125 aa, Phenylobacterium deserti
  misc_feature (1)..(125): tr|A0A328AS68|A0A328AS68_9CAUL 6-carboxy-5,6,7,8-tetrah ydropterin synthase OS=Phenylobacterium deserti OX=1914 756 GN=DJ018_08340 PE=3 SV=1
MNNSVFEITKAAGFDAAHHLPDGGPEGSPYTRLHGHSFRVEATVRGQMVPPVGWVADFAQLDAALKAIANDLDHGYLNDKPGLESPTLERICLYFAERLKPQFPGLCRVVLSRPTIGESCALIVE

SEQ ID NO: 23915 - protein, 125 aa, Phenylobacterium hankyongense
  misc_feature (1)..(125): tr|A0A328AYZ0|A0A328AYZ0_9CAUL 6-carboxy-5,6,7,8-tetrah ydropterin synthase OS=Phenylobacterium hankyongense OX =1813876 GN=DJ021_02870 PE=3 SV=1
MSPNIFEITKAAGFDAAHHLPAGGAEGSPYTRLHGHSFRVEATVRGEAVQPVGWVADLAELDRALRAIAGELDHGLLNEKPGLESPTLERLCVYFAERLKPEFPGLSRIVVSRPTIGESCALLVG

SEQ ID NO: 23916 - protein, 123 aa, Phenylobacterium kunshanense
  misc_feature (1)..(123): tr|A0A328BAQ4|A0A328BAQ4_9CAUL 6-carboxy-5,6,7,8-tetrah ydropterin synthase OS=Phenylobacterium kunshanense OX= 1445034 GN=DJ019_13825 PE=3 SV=1
MTQPYFEITKAATFDAAHYLAEGPAHRPYTNLHGHSFKVEATVRGPAVEPVGWVADLADLESALKGVASELDHGLLNEKPGLERPTLEHICLYFAERLKPAFPGLSRIVVSRPTIGESCAFSL

SEQ ID NO: 23917 - protein, 123 aa, Phenylobacterium sp.
  misc_feature (1)..(123): tr|A0A2D7ZGD1|A0A2D7ZGD1_9CAUL 6-carboxy-5,6,7,8-tetrah ydropterin synthase OS=Phenylobacterium sp. OX=1871053 GN=CMJ17_02400 PE=3 SV=1
MTSHSFEITKVATFDAAHYLPDGPAESPYTRLHGHSFQVEATVAGAPQPPVGWVADLAELDGALRAVALELDHGLLNEKPGLESPTLENLCLYFAERLKRQFPGLSRIKVSRPTIGESCALTI

SEQ ID NO: 23918 - protein, 123 aa, Phenylobacterium sp.
  misc_feature (1)..(123): tr|A0A521PEV0|A0A521PEV0_9CAUL 6-carboxy-5,6,7,8-tetrah ydropterin synthase OS=Phenylobacterium sp. OX=1871053 GN=EPO51_24305 PE=3 SV=1
MSQPTFEITKAATFDAAHHFPQGPEHRPYSNLHGHSFKVEATVRGPAQEPVGWVADLADLDAALKAVAAQLDHGLLNEKPGLERPTLEHICLYFAERLTPTFPGLSRIVVSRPTIGESCALSL

SEQ ID NO: 23919 - protein, 125 aa, Phenylobacterium zucineum
  misc_feature (1)..(125): tr|B4RHW0|B4RHW0_PHEZH 6-carboxy-5,6,7,8-tetrahydropter in synthase OS=Phenylobacterium zucineum (strain HLK1) OX=450851 GN=PHZ_c2742 PE=3 SV=1
MSQPVFEITKAATFDAAHYLAEGPAHRPYTNLHGHSFKVEATVRGQPQEPVGWVADLADLDEALKAVAGELDHGLLNEKPGLERPTLEHLCLYFAERLRPRFPGLSRVVVSRPTIGESCAMQVSA

SEQ ID NO: 23920 - protein, 170 aa, Phenylobacterium zucineum
  misc_feature (1)..(170): tr|B4RFN3|B4RFN3_PHEZH 6-pyruvoyl tetrahydrobiopterin s ynthase OS=Phenylobacterium zucineum (strain HLK1) OX=4 50851 GN=PHZ_c0700 PE=4 SV=1
MSWISTKTYGAERGLTCALRQWAADSHCALLHGYSLGFRFTFAAEQLDRRGWVVDFGSGGFGKIREWLHGTFDHALLVAEDDPGRPELARLADLGLARVQVVPGTSCEALARFVFEAAQPMVAAATQGRCWIAEVECFEHGANSAIYRNPEGVLREVSAEALTALAAAVA

SEQ ID NO: 23921 - protein, 216 aa, Phorcysia thermohydrogeniphila
  misc_feature (1)..(216): tr|A0A4R1GH55|A0A4R1GH55_9BACT 6-pyruvoyltetrahydropter in/6-carboxytetrahydropterin synthase OS=Phorcysia ther mohydrogeniphila OX=936138 GN=CLV27_0101 PE=4 SV=1
MFEISKTFEFSAAHSVFSQRLSKRWAKNAYPKCRRLPGHGHNYRLVVYLQSEKLDSSQMVTDFGHLRWLKDFIGECFDHKLILSFEDPAFYVLLEKLGLLKNETFSLPVEGAQVEAVAVKEDYRLEKFNFKEMELSKFSSYTFVSFRYLGETSTPEGDFYSRLIDGIAFFRGSPTSENLARFFYYFVNENIKPLGVKCSKVSIFETPSSCATFGEV

SEQ ID NO: 23922 - protein, 296 aa, Phormidesmis priestleyi
  misc_feature (1)..(296): tr|A0A0P7ZTR1|A0A0P7ZTR1_9CYAN 6-pyruvoyltetrahydropter in/6-carboxytetrahydropterin synthase OS=Phormidesmis p riestleyi Ana OX=1666911 GN=queD-2 PE=4 SV=1
MKCTINRRSQFCASHRYWLPELSESENLRLFGKCTRAPGHGHNYVLHAAITSELDAHGMVLNLTEAKAIIQREIIEPLDFSYLNDAWDEFAQTLPTTENIARVIWHRLVPHLPAPLRLTNIELYETPNLWASYPENRQGNGMNAYLTVAAHFSAAHRLALPELSYEQNCEIYGKCARPNGHGHNYRVEVTVKGDVHPRTGMLVDLVALQNVIDHHVIEPFDHTFLNKDVPYFVETVPTAENIVIRICQLLYQPIEDIGATLHKVKLIESPNNSAEVLAEELMDLKISQSRSLAAVI

SEQ ID NO: 23923 - protein, 129 aa, Phormidesmis priestleyi
  misc_feature (1)..(129): tr|A0A2W4X218|A0A2W4X218_9CYAN 6-carboxy-5,6,7,8-tetrah ydropterin synthase OS=Phormidesmis priestleyi OX=26814 1 GN=DCF15_15435 PE=3 SV=1
MPQWKLSTEFTFDAAHFIRDYDGPCGRMHGHTYRVRIEASARQLQASQYCPHPAMVADFRTLRWAKKDMLKGGLDHCVLNEVMPANYETTAEMIAQFIHEKTSKMLNPNIHLKVCVSETPDSWVEYESD

SEQ ID NO: 23924 - protein, 129 aa, Phormidium ambiguum
  misc_feature (1)..(129): tr|A0A1U7ISW2|A0A1U7ISW2_9CYAN 6-carboxy-5,6,7,8-tetrah ydropterin synthase OS=Phormidium ambiguum IAM M-71 OX= 454136 GN=NIES2119_02975 PE=3 SV=1
MPKWKLITEFTFDSAHYIKDYNGPCGRMHGHTYKVRVEATSSTLHSSEFCPHPVMVADFRTLRWAKQDITKGGLDHGILNEVMPEEYETTAEMIAKFIYDQTKEKLPEDVQLKVAVSETLNSWVEYEDD

SEQ ID NO: 23925 - protein, 290 aa, Phormidium ambiguum
  misc_feature (1)..(290): tr|A0A1U7IPZ6|A0A1U7IPZ6_9CYAN 6-pyruvoyl tetrahydropte rin synthase OS=Phormidium ambiguum IAM M-71 OX=454136 GN=NIES2119_07080 PE=4 SV=1
MKCIINRRAKFSASHLYWLPELSEAENIQRFGACSRAPGHGHNYLFHVYMAGELDEYGMVLNLSDVKHTIKQEVTSQLDFSFLNDVWSEFQETLPTTENIARVIWQRLAPHLPIVRIQLFEHPELWADYLGNEMEAYLSIATHFSAAHRLARPDLSYEKNCEIYGKCARPHGHGHNYHLEVTVKGEIDPRTGMTVDLGELQKVVDDYVVEPFDHTFLNKDIPYFAEVVPTAENIAIHIRDLLQEPIRKLGAELFKVKLVESPNNSCEVYGTQLEKSLGNGKLNEQLLVRL

SEQ ID NO: 23926 - protein, 157 aa, Phormidium sp.
  misc_feature (1)..(157): tr|A0A522XDL4|A0A522XDL4_9CYAN 6-carboxytetrahydropteri n synthase OS=Phormidium sp. SL48-SHIP OX=2518363 GN=EY R95_13090 PE=4 SV=1
MQARLTVNTYFSAAHRLARPDLDYTTNCGVYGKCARPHGHGHNYHLDVTVCGEVHPRTGMVVELGALRHLIQEVVIEPLDHRFLNKDIPHFETVVPTAENIAIYIRNLLLEPLRELGLSLEKLRLYESPNNSCELYGTMGGDRQGTPTQEKTKLLLV

SEQ ID NO: 23927 - protein, 287 aa, Phormidium sp.
  misc_feature (1)..(287): tr|A0A522XCN2|A0A522XCN2_9CYAN 6-carboxytetrahydropteri n synthase OS=Phormidium sp. SL48-SHIP OX=2518363 GN=EY R95_14560 PE=4 SV=1
MDCIINRRAQFSAGHRYWLPELSEAENRRQFGACANVHGHGHNYVLYVSMAGELDEYGMVLNLSNIKHDIKREVTSQLDFSFLNEVWPEFKETLPTTENVARVIWQRLAPHLPLVKIQLSEHPDLWADYFGNGWEAHLTTCTHFSAAHRLAIPDASDDENDAIYGKCAYPHGHGHNYNLEVTVKGDIDQRTGMLVDLGALNQLIEDLVAEPFDHTFLNYDIPHFEKLVPTTENFVLHIRDILTQPIRDLGASLYKVKLIESPGNSCEVLGEADAETPPSEAELVGAV

SEQ ID NO: 23928 - protein, 288 aa, Phormidium tenue
  misc_feature (1)..(288): tr|A0A1U7J8C7|A0A1U7J8C7_9CYAN 6-pyruvoyl tetrahydropte rin synthase OS=Phormidium tenue NIES-30 OX=549789 GN=N IES30_06585 PE=4 SV=1
MKCIINRRAQFSASHRYWLSELSDAENIQRFGPCINFPGHGHNYVLYVAMEGDLDEYGMVLNLSDVKHMIKQEVTAQLDFAYLNEVWPEFQHTLPTTEYVAKVIWDRLAPHLPIVNIQLFEHPELWSDYSGNAMEAFLTVSTHFSAAHRLASPRLSYEENCEIYGKCARPHGHGHNYHLEVTVKGEIDPRTGMLVDLAALQAVIDEYVVEPFDHTFLNKDIPYFAEVVPTAENIAVHIRDLLQGPIADLGASLHKVKLIESPNNSAEVYASVPTDDAVAAAAPEFATV

SEQ ID NO: 23929 - protein, 129 aa, Phormidium tenue
  misc_feature (1)..(129): tr|A0A1U7IZ26|A0A1U7IZ26_9CYAN 6-carboxy-5,6,7,8-tetrah ydropterin synthase OS=Phormidium tenue NIES-30 OX=5497 89 GN=NIES30_23545 PE=3 SV=1
MPKWSVKTEFSFDAAHYIKDYDGPCGRMHGHTYRVRVEATTSQLRASEFCPHPVMVADFRTLRWAKKDMLKGGLDHCVLNDVLPEDYETTAEMIAQYIYEKTKRSLPEGIQLKVAVSETPNSWVEYEDD

SEQ ID NO: 23930 - protein, 287 aa, Phormidium willei
  misc_feature (1)..(287): tr|A0A168TJ20|A0A168TJ20_9CYAN 6-pyruvoyl tetrahydropte rin synthase OS=Phormidium willei BDU 130791 OX=399101 GN=AY600_05585 PE=4 SV=1
MDCIINRRAQFSAGHRYWLPELSEAENRRQFGACANVHGHGHNYVLYVSMAGELDEYGMVLNLSNIKHDIKREVTSQLDFSFLNEVWPEFKETLPTTENVARVIWQRLAPHLPLVKIQLSEHPDLWADYFGNDWEAHLTTCTHFSAAHRLAIPDASDDENDAIYGKCAYPHGHGHNYNLEVTVKGDIDQRTGMLVDLGALNQLIEDLVAEPFDHTFLNYDIPHFEKIVPTTENFVLHIRDILTQPIRDLGASLYKVKLIESPGNSCEVLGEADAETPPSEAELVGAV

SEQ ID NO: 23931 - protein, 157 aa, Phormidium willei
  misc_feature (1)..(157): tr|A0A168VTB1|A0A168VTB1_9CYAN Uncharacterized protein OS=Phormidium willei BDU 130791 OX=399101 GN=AY600_0462 0 PE=4 SV=1
MQARLTVNTYFSAAHRLARPDLDYTTNCGVYGKCARPHGHGHNYHLDVTVCGEVHPRTGMVVELGALRHLIQEVVIEPLDHRFLNKDIPHFETVVPTAENIAIYIRNLLLEPLQELGLSLEKLRLYESPNNSCELYGTMGGHRQGTPTQEKTKLLLV

SEQ ID NO: 23932 - protein, 292 aa, Photobacterium angustum
  misc_feature (1)..(292): tr|Q1ZU22|Q1ZU22_PHOAS Uncharacterized protein OS=Photo bacterium angustum (strain S14 / CCUG 15956) OX=314292 GN=VAS14_14764 PE=4 SV=1
MKLFVRDLTVIDASYLCTDRGMVGESWILDVVMSGELNEMSMVLDFSRVKKQIKQLVDQYVDHRLIVPAKSPAIHIAATKTGYATVDLLREDKNIHLHCPEQAFCFVDAETVTIKSVTEHVYYVLKDNLPENVQGLEVALRHEAIQGAFYHYSHGLKKHDGNCQRIAHGHRSPIELIVNGERNAELEKQWAKRWQDIYLGSEEDVCSVSELNLSECAKSVSDETHYGFRYTAPQGEFELAIARSETEMLATDTTVELLACYIAEKVKPSLSADDCLDVVAYEGVGKGAMATL

SEQ ID NO: 23933 - protein, 292 aa, Photobacterium angustum
  misc_feature (1)..(292): tr|A0A2T3M3D0|A0A2T3M3D0_PHOAN Uncharacterized protein OS=Photobacterium angustum OX=661 GN=CTM95_00695 PE=4 S V=1
MKLFVRDLTVIDASYLCTDRGMVGESWILDVVMSGELNEMSMVLDFSRVKKQIKQLVDQYVDHRLIVPAKSPAIHTAATKTGYATVDLLREDKNIHLHCPDQAFCFIDAETVTIESVTAHVYHVLKDNLPENVQGLEVTLRHEAIQGAFYHYSHGLKKHDGNCQRIAHGHRSPIELIVNGERNAELEKQWAKRWQDIYLGSEEDVCSVSELNLSECAKSVSDETHYGFSYTAPQGEFELAIARSETEMLVTDTTVELLASYIAEKVKPSLSAADCLDVVAYEGVGKGAMATL

SEQ ID NO: 23934 - protein, 189 aa, Photobacterium aphoticum
  misc_feature (1)..(189): tr|A0A090QJ88|A0A090QJ88_9GAMM NADPH dependent preQ0 re ductase OS=Photobacterium aphoticum OX=754436 GN=JCM192 37_6098 PE=4 SV=1
MVGESWILDVVMSGELNEMSMVLDFSRVKKQIKQIVDEYVDHRLIVPSRSEAIRIAPTQPGYSTVDLLRGENSIHLHCPEQAFCLIDAESVSIESVTEHLYQVLAGKLPENVQGLALTLRHERIDGAFYHYSHGLKKHDGNCQRIAHGHRSPVELFIDGQRDAELEQQWASQWQDIYLAAAKTNVQSRH

SEQ ID NO: 23935 - protein, 168 aa, Photobacterium aphoticum
  misc_feature (1)..(168): tr|A0A090QU50|A0A090QU50_9GAMM Potential QueD like 2 OS =Photobacterium aphoticum OX=754436 GN=ABT58_14045 PE=4 SV=1
MQIHTLDKAQLIHEVQLGSHLSHAVEGGRRADFALMLAMLSPDLLETTPLDAPPAEGKTESELRAYFELPPATPLSSTEHCYEHSARQAQAFHDSGLADVRLLSGLQPTALTYPPQGTKGMPEELYHNLSGHERRLLPPTETTRVPASPQDLYLSLLQAKRFAEMRLA

SEQ ID NO: 23936 - protein, 296 aa, Photobacterium aquae
  misc_feature (1)..(296): tr|A0A0J1JS72|A0A0J1JS72_9GAMM 6-pyruvoyl tetrahydropte rin synthase OS=Photobacterium aquae OX=1195763 GN=ABT5 6_13050 PE=4 SV=1
MKLFVRDLTVVDASYLCPTRGMVGESWILDVVMSGELNEMSMVLDFSRVKKQIKHIVDEFVDHRLIIPAKNAAISIGQSTSGYQTVDLDRGDKSIYLHCPEQAYCIIDSDEVTIDSVTQHICKVLQGQLPENVQGLEITLRHEKIDGAFYHYSHGLKKHDGNCQRIAHGHRSPVELFVDGQRDAELEAKWAERWQDIYLGSEEDRCPVSELTLSDAAKGVVTDEAYFGFRYTAPQGEFELAIAQSETEILPTDTTVELLASYIAEQASCWVDAGKSIDVVAYEGVGKGAMASVVAR

SEQ ID NO: 23937 - protein, 175 aa, Photobacterium aquae
  misc_feature (1)..(175): tr|A0A0J1HBS9|A0A0J1HBS9_9GAMM Queuosine biosynthesis p rotein QueD OS=Photobacterium aquae OX=1195763 GN=ABT56 _02710 PE=4 SV=1
MQIHTIDKAQLIHEGQLGNQLNHAVEHGRRADFALMLAMLSPDRLETTPIDIHQDPVHTDETMRAYFELQPPKPLTTSENCYNHSARQAKAFHESGLADVRLLDGLKPIALTFPPQGTKGMPEELYHNLSGHERRLLPPTETTPLKVSPQSLYRSLIEAKRFDEMYGSQRLSVAA

SEQ ID NO: 23938 - protein, 293 aa, Photobacterium aquimaris
  misc_feature (1)..(293): tr|A0A2T3I391|A0A2T3I391_9GAMM Uncharacterized protein OS=Photobacterium aquimaris OX=512643 GN=C0W81_00445 PE =4 SV=1
MKLFVRDLTVIDASYLCPQRGMVGESWILDVVMSGELNEMSMVLDFSRVKKQIKQLVDQYVDHRLLIPTASTAIQTATTKADYMTVDLVSEQHAIYLHSPEQAFCFVDAEAITIETVTEHVQQVLLGNLPSNVQGLEITLRHENIDGAFYHYSHGLKKHDGNCQRIAHGHRSPVELVVNGQRNAELEQQWAQRWQDIYLGSQEDVISVSELNLSAAAANINDETHYGFRYTAPQGEFELAIAKSVTEILATDTTVELLACYIAEQLKPQLVAIDRLDVFAYEGVGKGAMASIG

SEQ ID NO: 23939 - protein, 293 aa, Photobacterium aquimaris
  misc_feature (1)..(293): tr|A0A2T3IIG4|A0A2T3IIG4_9GAMM Uncharacterized protein OS=Photobacterium aquimaris OX=512643 GN=CTM88_13270 PE =4 SV=1
MKLFVRDLTVIDASYLCPQRGMVGESWILDVVMSGELNEMSMVLDFSRVKKQIKQLVDQYVDHRLLIPTASTAIQTAATKADYMTVDLVSEQHAIHLHSPEQAFCFVDAEAITIETVTEHVQQVLLGNLPSNVQGLEITLRHENIDGAFYHYSHGLKKHDGNCQRIAHGHRSPVELVVNGQRNADLEQQWAQRWQDIYLGSQEDVISVSELNLSAAAANINDETHYGFRYTAPQGEFELAITKSVTEILATDTTVELLACYIAEQLKPQLVATDRLDVFAYEGVGKGAMASIG

SEQ ID NO: 23940 - protein, 293 aa, Photobacterium carnosum
  misc_feature (1)..(293): tr|A0A2N4USE0|A0A2N4USE0_9GAMM Uncharacterized protein OS=Photobacterium carnosum OX=2023717 GN=CIK00_10765 PE =4 SV=1
MKLFVRDLTVIDASYLCPQRGMVGESWILDVVMSGELNEMSMVLDFSRVKKQIKQLVDQYVDHRLLIPATSTAIHTTITKTDYMTVDLISNEHAIHLHSPEQAFCFIDTDAITVESVTQYVQQLLLGHLPSNVQGLEITLRHEKIDGAFYHYSHGLKKHDGNCQRIAHGHRSPVELVVNGQRNADLEQQWAQRWHDIYLGSQEDVISVSELNLSSAAANINDETHYGFRYTAPQGEFELAIAKSATEILATDTTVELLASYIAEQIKPQLAATERLDVFAYEGVGKGAMVTLD

SEQ ID NO: 23941 - protein, 292 aa, Photobacterium damsela
  misc_feature (1)..(292): tr|A0A1Q9GWS1|A0A1Q9GWS1_PHODP 6-pyruvoyl tetrahydropte rin synthase OS=Photobacterium damsela subsp. piscicida OX=38294 GN=BEI67_16225 PE=4 SV=1
MKLFVRDLTVIDASYLSVERGMVGESWILDVVMSGELNEMSMVLDFSRVKKQIKQLVDQFVDHRLIVPTQNSAIKAQQVEDGYFTVDLLRGDNSIYLKSPEQAFCFIEAQEVTIETVTKHLHNVLSGHMPANVEGLELTLRHEKIDGAFYHYSHGLKKHDGNCQRIAHGHRSPIELLVNGKRHSVLEQEWAERWQDIYLAAEEDVVELSLLDLSENAQNLSSEQYVGFSYQAPQGKFDLAIAKNKTEILPTDTTIELLAYYIAQQVKPKLETNDSLDVFAYEGVGKGAMASL

SEQ ID NO: 23942 - protein, 292 aa, Photobacterium damselae
  misc_feature (1)..(292): tr|A0A2T3ICF4|A0A2T3ICF4_9GAMM Uncharacterized protein OS=Photobacterium damselae OX=38293 GN=CTM90_00740 PE=4 SV=1
MKLFVRDLTVIDASYLSVERGMVGESWILDVVMSGELNEMSMVLDFSRVKKQIKQLVDQFVDHRLIVPTQNSAIKAQQVEDGYFTVDLLRGDNSIYLKSPEQAFCFIEAQEVTIETVTKHLHNVLSGHMPANVEGLELTLRHEKIDGAFYHYSHGLKKHDGNCQRIAHGHRSPIELLVNGKRHSVLEQEWAERWQDIYLAAEEDVVELSLLDLSENAQNLSSEQYVGFSYQAPQGKFDLAIAKNKTEILPTDTTVELLAYYIAQQVKPKLETNDSLDVFAYEGVGKGAMASL

SEQ ID NO: 23943 - protein, 292 aa, Photobacterium damselae
  misc_feature (1)..(292): tr|A0A2S2CI65|A0A2S2CI65_9GAMM Uncharacterized protein OS=Photobacterium damselae OX=38293 GN=BST98_19335 PE=4 SV=1
MKLFVRDLTVIDASYLSVERGMVGESWILDVVMSGELNEMSMVLDFSRVKKQIKQLVDQFVDHRLIVPTQNSAIKAQQVEDDYFTVDLLRGDNSIYLKSPEQAFCFIDAQEVTVETVTKHLHNVLSGHMPANVEGLELTLRHEKIDGAFYHYSHGLKKHDGNCQRIAHGHRSPIELLVNGQRHSVLEQEWAERWQDIYLAAEEDVVELSLLDLSENAQNLSSEQYVGFSYQAPQGKFDLAIAKNKTEILPTDTTVELLAYYIAQQVKPKLETNDSLDVFAYEGVGKGAMASL

SEQ ID NO: 23944 - protein, 291 aa, Photobacterium frigidiphilum
  misc_feature (1)..(291): tr|A0A2T3JNM6|A0A2T3JNM6_9GAMM Uncharacterized protein OS=Photobacterium frigidiphilum OX=264736 GN=C9J12_0453 0 PE=4 SV=1
MKLFVRDLTVIDASYLCDERGMVGESWILDVVMSGELNEMSMLLDFSRVKKQIKFLVDEHVDHRLIVPSNNTAIRTATTKSGYATVDLLRGDKSIHLHSPEEAYCFIDAEKVTIESVTAYLHNILKGNLPDNVEGLELTLRHEKIDGPFYHYSHGLKKHDGNCQRIAHGHRSPIELFVDGARHTELEQQWANRWEDIYLGTKEDMISVAELNLSEHATSITDDGYFGFRYTAPQGEFELAIAKSETEIIDTDTTVELLASYIANEVKQSLSDESLEVVAYEGVGKGAMASA

SEQ ID NO: 23945 - protein, 168 aa, Photobacterium gaetbulicola
  misc_feature (1)..(168): tr|A0A0B9GJ30|A0A0B9GJ30_9GAMM Queuosine biosynthesis p rotein QueD OS=Photobacterium gaetbulicola OX=1295392 G N=RJ45_04755 PE=4 SV=1
MQIHSLDKAQLINEVQLGSQLSHAVEGGRRADFALMLALLSPEQLETTPVDTLPATGKTESDLRAYFELPEPQPLSTTESSYQNAAQQAKAFHQSGLADARLLDGLNPTPLSYPPQGTKGMPEEVYHNLSGHERRLLPPTEDATIKASPQDLYLSLVQAKRFAEMYGV

SEQ ID NO: 23946 - protein, 298 aa, Photobacterium gaetbulicola
  misc_feature (1)..(298): tr|A0A0C5WIX5|A0A0C5WIX5_9GAMM Uncharacterized protein OS=Photobacterium gaetbulicola Gung47 OX=658445 GN=H744 _1c1102 PE=4 SV=1
MKLFVRDLTVIDASYLCQQRGMVGESWILDVVMSGELNEMSMVLDFSRVKKQIKQIVDEYVDHRLIVPSQSAAIRTAATQPGYATVDLLRGDKSLHLHCPEQAYCFIDDSEVTIESVTRHIYKVLEGKLPDNVQGLELTLRHEQIEGPYYHYSHGLKKHDGNCQRIAHGHRSPVELLINGQRNLSLEQEWAERWQDIYLGSTEDECTLAELNLSPFAAKVNEQSHHAFRYTAPQGEFELAIAKNDVEMIGTDTTVELLAQYIAEQVSLSVEAGSAIDVIAYEGVGKGAMATAIGKLDA

SEQ ID NO: 23947 - protein, 169 aa, Photobacterium galatheae
  misc_feature (1)..(169): tr|A0A066RTV5|A0A066RTV5_9GAMM Uncharacterized protein OS=Photobacterium galatheae OX=1654360 GN=EA58_15595 PE =4 SV=1
MSSSVSQTGGSSEAMRFTVTKMFDDLPCSHRAWAQQGKCSFLHGYERVFTIEFGCNELEKDTGFVIDFGAMKTIRALLQDQFDHTTVIAENDPELELFQALSEKQIIDLRVMHHPGMEGAAEWVFHNVDALVKRQTNHRVHVLKVEARESRKNAVTFTPQRAQASEASL

SEQ ID NO: 23948 - protein, 292 aa, Photobacterium galatheae
  misc_feature (1)..(292): tr|A0A066RKY6|A0A066RKY6_9GAMM 6-pyruvoyl tetrahydropte rin synthase OS=Photobacterium galatheae OX=1654360 GN= EA58_20075 PE=4 SV=1
MKLFVRDLTVIDASYLCPERGMVGDSWILDVVMSGELNEMSMVLDFGRVKKQIKKLVDEYVDHRLLVPVNHPSVQIAETTPGYATVDLLRGDQSIHLHCPEEAYCLVEAEAITIDTVTEHLYQVLAGELPENVQGLELVLRHEKIDGAFYHYSHGLKKHDGNCQRIAHGHRSPIELYVDGQRDSQLEADWAKRWTDIYLGTVEDQVSVTALNLSEHAKDVTDETHYGFRYTAPQGLFELAITKRETEMIHTDTTIELLAHFIAAEVKPMVGDNQHLEVVAYEGVGKGAMASL

SEQ ID NO: 23949 - protein, 173 aa, Photobacterium ganghwense
  misc_feature (1)..(173): tr|A0A0J1HI70|A0A0J1HI70_9GAMM Queuosine biosynthesis p rotein QueD OS=Photobacterium ganghwense OX=320778 GN=A BT57_00675 PE=4 SV=1
MQIHTLDKAQLINEVQLGSQLNQAVETGRRADFALMLAMLSPDRLETVPVDTLPATEQTEGDLRAYFELQPPRPLSASESCYENSARQAQAFHDGGMADVRLLSGLSPTALTYPPTGTKGMPEELYHNLSGHERRMLPPKEDVALKASPQDLYLSLVQAKRFAEMSHHFTVSA

SEQ ID NO: 23950 - protein, 298 aa, Photobacterium ganghwense
  misc_feature (1)..(298): tr|A0A0J1HFF8|A0A0J1HFF8_9GAMM 6-pyruvoyl tetrahydropte rin synthase OS=Photobacterium ganghwense OX=320778 GN= ABT57_07305 PE=4 SV=1
MKLFVRDLTVIDASYLCEQRGMVGESWILDVVMSGELNEMSMVLDFSRVKKRIKQLVDEFVDHRLIVPRQSAAIRIAESQLGYSTVDLLRGEKSIYLNCPDEAYCFIDANEVTIESVTQHIYDVLKGQLPENVQGLELTLRHEAIPGAFYHYSHGLKKHDGNCQRIAHGHRSPIELLVDGERDASLEQQWAERWHDIYLGTQEDYCSLNELDLSPEAKAAKEESHFAFRYTAPQGEFQLAIARCETEMIPTDTTVELLAQYIAEQVSLQVNESSVLDVVAYEGVGKGAMASMPGRKSA

SEQ ID NO: 23951 - protein, 173 aa, Photobacterium halotolerans
  misc_feature (1)..(173): tr|A0A0F5V8U2|A0A0F5V8U2_9GAMM Queuosine biosynthesis p rotein QueD OS=Photobacterium halotolerans OX=265726 GN =KY46_19790 PE=4 SV=1
MQIHTIDKAQLINEVQLGNQLNRAVEQGRRSDFALMLAMLSPDYLETTPTEKPLPPATTEEQLRAYFELQEPAPLSTSEFCYPRGAEQSNAFHYGGLSATRLLSSLQPIAMTFPPQDTKGLPEELYHNLSGHERRRLPPTQPEPIKGSPQDLYLNLIRAKRSAEMYGAVAKVC

SEQ ID NO: 23952 - protein, 292 aa, Photobacterium halotolerans
  misc_feature (1)..(292): tr|A0A0F5VF96|A0A0F5VF96_9GAMM 6-pyruvoyl tetrahydropte rin synthase OS=Photobacterium halotolerans OX=265726 G N=KY46_07565 PE=4 SV=1
MKLFVRDLTVIDASYLCPVRGMVGESWILDVVMSGELNEMSMVLDFSRVKKQIKQLVDQYVDHRLLVPAAHASIKMAATQPGYATVDLLRGDQSIHLHCPDEAYCLVDADAITIETVTQHLHQVLSGKLPDNVQGLELVLRHEKIDGAFYHYSHGLKKHDGNCQRIAHGHRSPIGLYVDGQRDSKLEADWAKRWTDIYLGTAEDQVRVSELNLSEHAASVSDDTHYGFRYTAPQGLFELAIAKSETEMIGTDTTIELLAHYIAAAVKPAIGEHQTLDVVAYEGVGKGAMASL

SEQ ID NO: 23953 - protein, 293 aa, Photobacterium iliopiscarium
  misc_feature (1)..(293): tr|A0A2T3MKY3|A0A2T3MKY3_9GAMM Uncharacterized protein OS=Photobacterium iliopiscarium OX=56192 GN=C9I88_10530 PE=4 SV=1
MKLFVRDLTVIDASYLCPQRGMVGESWILDVVMSGELNEMSMVLDFSRVKKQIKQLVDQYVDHRLLIPATSTAIHTAITKTDYMTVDLISNEHAIHLHSPEQAFCFIDTDAITIESVTQYLHKLLLGHLPSNVQGLEITLRHEKIDGAFYHYSHGLKKHDGNCQRIAHGHRSPVELVVNGQRNADLEQQWAQRWHDIYLGSQEDVISVSELNLSLAAANINDETHYGFRYTAPQGEFELAIAKSATEILATDTTVELLASYIAEQVKPQLIATDRLDVFAYEGVGKGAMVTLD

SEQ ID NO: 23954 - protein, 291 aa, Photobacterium indicum
  misc_feature (1)..(291): tr|A0A2T3LDR8|A0A2T3LDR8_9GAMM Uncharacterized protein OS=Photobacterium indicum OX=81447 GN=C9J47_02805 PE=4 SV=1
MKLFVRDLTVIDASYLCDERGMVGESWILDVVMSGELNEMSMLLDFSRVKKQIKFLVDEHVDHRLIVPSNNTAIRTSTTKSGYATVDLLRGDKCIHLHSPEEAYCFIDAEKVTIESVTAYLHNVLKGNLPDNVEGLELTLRHEKIDGPFYHYSHGLKKHDGNCQRIAHGHRSPVELFVDGARRTELEQQWANRWEDIYLGTKEDMISVAELNLSEHATSITDDGYFGFRYTAPQGEFELAIAKSETEIIDTDTTVELLASYIANEVKQSLSDESLEVVAYEGVGKGAMASA

SEQ ID NO: 23955 - protein, 292 aa, Photobacterium jeanii
  misc_feature (1)..(292): tr|A0A178K122|A0A178K122_9GAMM 6-pyruvoyl tetrahydropte rin synthase OS=Photobacterium jeanii OX=858640 GN=A3K8 6_18490 PE=4 SV=1
MKLFVRDLTVIDASYLCATRGMVGESWILDVVMSGELNEMSMVLDFGRVKKQIKHLVDEYVDHRLLVPMRDPAMKLAATKEGYSTLDLLRGEKGIHLHCPDEAFCLVDADEITIETVTEHVYQVLKGELPENVEGLEITLRHENIDGAFYHYSHGLKKHDGNCQRIAHGHRSPIELLVNGQRDSEREQAWAQRWQDIYLGSQEDQVTIDELALSAHAQAISDESHYGFRYTAPQGEFELAIARSETEILPTDTTVELLAGYIADEVKATLSADDALDVVAYEGVGKGAMASL

SEQ ID NO: 23956 - protein, 169 aa, Photobacterium jeanii
  misc_feature (1)..(169): tr|A0A178KM81|A0A178KM81_9GAMM Queuosine biosynthesis p rotein QueD OS=Photobacterium jeanii OX=858640 GN=A3K86 _06045 PE=4 SV=1
MQIHTLDKAQLINEVQLGSQLNHAVETGRRSDFSLMLAMLSPDYLENTPTEIPPAQGKTEEELREYFELARPQPLTSTEECYQRAAAQADAFHKGGIRSSQFLHELQPAALTFPPQGTKGMPEELYHNLSGHERRLLPPKDEAKLNVSPQDLYLSLIQAKRFAEMQYTA

SEQ ID NO: 23957 - protein, 293 aa, Photobacterium kishitanii
  misc_feature (1)..(293): tr|A0A2T3KDD5|A0A2T3KDD5_9GAMM Uncharacterized protein OS=Photobacterium kishitanii OX=318456 GN=C9J27_19875 P E=4 SV=1
MKLFVRDLTVIDASYLCPQRGMVGESWILDVVMSGELNEMSMVLDFSRVKKQIKQLVDQYVDHRLLIPAASAAIQTATTKAEYMTVDLVSDQHTIHLHSPEQAFCFIDAEAITIESVTKHVQQVLLGNLPANVQGLEIILRHEKIDGAFYHYSHGLKKHDGNCQRIAHGHRSPVELVVNGQRNADLEQQWAQRWQDIYLGSQEDVISVRELNLSAAAVNVNDETHYGFRYTAPQGEFELAIAKSVTEILATDTTVELLACYIAEQIKPQLVATDRLDVFAYEGVGKGAMVTIG

SEQ ID NO: 23958 - protein, 293 aa, Photobacterium kishitanii
  misc_feature (1)..(293): tr|A0A2T3QX28|A0A2T3QX28_9GAMM Uncharacterized protein OS=Photobacterium kishitanii OX=318456 GN=C0W70_11640 P E=4 SV=1
MKLFVRDLTVIDASYLCPQRGMVGESWILDVVMSGELNEMSMVLDFSRVKKQIKQLVDQYVDHRLLIPAASAAIQTATTKAEYMTVDLVSDQHTIHLHSPEQAFCFIDAEAITIESVTKHVQQVLLGNLPANVQGLEIILRHEKIDGAFYHYSHGLKKHDGNCQRIAHGHRSPVELVVNGQRNADLEQQWAQRWQDIYLGSQEDVIGVRELNLSAAAANINDETHYGFRYTAPQGEFELAIAKSVTEILATDTTVELLACYIAEQIKPQLVATDRLDVFAYEGVGKGAMVTIG

SEQ ID NO: 23959 - protein, 292 aa, Photobacterium leiognathi
  misc_feature (1)..(292): tr|V5H5Z0|V5H5Z0_PHOLE Uncharacterized protein OS=Photo bacterium leiognathi lrivu.4.1 OX=1248232 GN=PLEI_4114 PE=4 SV=1
MKLFVRDLTVIDASYLCTERGMVGESWILDVVMSGELNEMSMVLDFSRVKKQIKQLVDQYVDHRLIVPAKSPAINTAATTTGYATVDLLRENKSIHLHCPEQAFCFIDAEAVTIESVTEHVYQVLKGNLPENVQGLEITLRHEMINGAFYHYSHGLKKHDGNCQRIAHGHRSPIELIVNGERNAELEKQWAKRWQDIYLGSQEDVLSVTELNLSECAKQVTNETHYGFRYTAPQGEFELAIARSETEMLDTDTTVELLAGYIAEKVKPSLSDSDTLEVVAYEGVGKGAMATL

SEQ ID NO: 23960 - protein, 292 aa, Photobacterium leiognathi
  misc_feature (1)..(292): tr|A0A2G4WQA1|A0A2G4WQA1_PHOLE Uncharacterized protein OS=Photobacterium leiognathi OX=553611 GN=CRG86_001125 PE=4 SV=1
MKLFVRDLTVIDASYLCTERGMVGESWILDVVMSGELNEMSMVLDFSRVKKQIKQLVDQYVDHRLIVPAKSPAINTAATTTGYATVDLMREDKSIHLHCPEQAFCFIDAETVTIESVTEHVYQVLKGNLPENVQGLEITLRHETINGAFYHYSHGLKKHDGNCQRIAHGHRSPIELFVNGERNAELEKQWAKRWQDIYLGSQEDVLSVSELNLSECAKQVTDETHYGFRYTAPQGEFELAIARSETEMLSTDTTVELLAGYIAEKVKPSLSDSDVLEVVAYEGVGKGAMATL

SEQ ID NO: 23961 - protein, 291 aa, Photobacterium lipolyticum
  misc_feature (1)..(291): tr|A0A2T3MWI0|A0A2T3MWI0_9GAMM Uncharacterized protein OS=Photobacterium lipolyticum OX=266810 GN=C9I89_13390 PE=4 SV=1
MKLFVRDLTVIDASYLCEERGMVGESWILDVVMSGELNEMSMVLDFSRVKKQIKQLVDQYVDHRLIVPTKNVNVKMSQSKNGYATVDLLRGDKSIHLHCPEQAYCLIDDEKVTIESVTRHLHQVLIGKLPANVQGLELTLRQEKINGAFYHYTHGLKKHDGNCQRIAHGHRSPVELFVNGVRSDTLEQQWAQRWQDIYLGTAEDQVTVSELNLSDYAAGLSDDKHFGFRYTTEQGEFELAIAKSETEVIDTDTTVELLAHYIAKEVNKSLHGESLEVVAYEGVGKGAMASA

SEQ ID NO: 23962 - protein, 298 aa, Photobacterium lutimaris
  misc_feature (1)..(298): tr|A0A2T3J3I4|A0A2T3J3I4_9GAMM Uncharacterized protein OS=Photobacterium lutimaris OX=388278 GN=C9I99_02270 PE =4 SV=1
MKLFVRDLTVIDASYLCQHRGMVGESWILDVVMSGELNEMSMVLDFSRVKKQIKQIVDEYVDHRLIVPSQSNAIRTATTKLGYATVDLLREDKSLHLHCPEQAYCLIEDSEVTIESVTRHIYKVLEGKLPENVQGLEITLRHEQISGPFYHYSHGLKKHDGNCQRIAHGHRSPVELLINGLRDQQLEQQWADRWEDIYLGSTEDECTLAELNLSPFAAEASEQSHYAFRYTAPQGEFELAIARSDVEMLDTDTTVELLAQYIAAQVSESVEVGSTVDVIAYEGVGKGAIASAKGRLNA

SEQ ID NO: 23963 - protein, 291 aa, Photobacterium marinum
  misc_feature (1)..(291): tr|L8JGX5|L8JGX5_9GAMM NADPH dependent preQ0 reductase OS=Photobacterium marinum OX=1056511 GN=C942_04375 PE=4 SV=1
MKLFVRDLTVIDASYLCEKRGMVGESWILDVVMSGELNEMSMVLDFGRVKKQIKKLVDEYVDHRLIVPMKNSRIHVAASKPGYAMVDLLREGKSIHLNCPEQAYCYIDDDVVTIESVTHHLYKVLEGKLPDNVQGLELTLRHEKIDGAFYHYSHGLKKHDGNCQRIAHGHRSPVELIVDGQRDAELEQKWAERWQDIYLGSSEDLISVSELTLSEKAAVATDTSHYGFRYTAPQGEFELAIARFESEVLDTDTTVELLADYIAEQVSEMVPGKALDVVAYEGVGKGAMASK

SEQ ID NO: 23964 - protein, 169 aa, Photobacterium marinum
  misc_feature (1)..(169): tr|L8JGM1|L8JGM1_9GAMM Putative queD protein OS=Photoba cterium marinum OX=1056511 GN=C942_01321 PE=4 SV=1
MQIHTLDKAQLINEVQLGGQLNHAVEGGRRADFALMLAMLSPDHLETVPIDAPPPKGKTEAELRAYFELRDPQPLTTSEHCYENAAAQAKAFHESGLNGVRLLQELQPTALTFPPQDTKGLPEEVYHNLSGHERRMLPPKEEAKIKASPQDLYLSLIQAKRFAEMYQTA

SEQ ID NO: 23965 - protein, 293 aa, Photobacterium phosphoreum; identical to SEQ ID NO: 23957
  misc_feature (1)..(293): tr|A0A0B7JEU8|A0A0B7JEU8_PHOPO Uncharacterized protein OS=Photobacterium phosphoreum ANT-2200 OX=1454202 GN=PP BDW_II1061 PE=4 SV=1

SEQ ID NO: 23966 - protein, 293 aa, Photobacterium phosphoreum
  misc_feature (1)..(293): tr|A0A2T3Q031|A0A2T3Q031_PHOPO Uncharacterized protein OS=Photobacterium phosphoreum OX=659 GN=CTM87_02700 PE= 4 SV=1
MKLFVRDLTVIDASYLCPQRGMVGESWILDVVMSGELNEMSMVLDFSRVKKQIKQLVDQYVDHRLLIPTASTAIQTATTKAEYMTVDLVSDQHAIHLHSPEQAFCFIDAEAITVESVTKHVEQVLLGNLPANVQGLEITLRHENIDGAFYHYSHGLKKHDGNCQRIAHGHRSPIELVVNGQRNAELEQQWAHRWEDIYLGSQEDVISVGELNLSAAAANINDETHYGFRYTAPQGEFELAITKSVTEILATDTTVELLASYIADQIKPQLAATDSLDVFAYEGVGKGAMVTLG

SEQ ID NO: 23967 - protein, 292 aa, Photobacterium piscicola
  misc_feature (1)..(292): tr|A0A1T5HXU4|A0A1T5HXU4_9GAMM 6-pyruvoyl tetrahydropte rin synthase OS=Photobacterium piscicola OX=1378299 GN= CZ809_01097 PE=4 SV=1
MKLFVRDLTVIDASYLCPQRGMVGESWILDVVMSGELNEMSMVLDFSRVKKQIKQLVDQYVDHRLLIPSASAAIQAAATKADYMTVDLVSDQHAIHLHSPEQAFCFIDTDAITIESVTEYVQQLLLGHLPSNVQGLEITLRHEKIDGAFYHYSHGLKKHDGNCQRIAHGHRSPVELVVNGQRNAELEQQWAQRWHDIYLGSQEDVISVSELTLSSAVNINDDTHYGFRYTAPQGEFELAIAKSVTEILATDTTVELLASYIAEQIKPQLTATDRLDVFAYEGVGKGAMASIG

SEQ ID NO: 23968 - protein, 270 aa, Photobacterium profundum
  misc_feature (1)..(270): tr|Q1Z648|Q1Z648_9GAMM Uncharacterized protein OS=Photo bacterium profundum 3TCK OX=314280 GN=P3TCK_12446 PE=4 SV=1
MVGESWILDVVMSGELNEMSMLLDFSRVKKQIKFLVDEHVDHRLIVPSNNTAIRTATTKSGYATVDLLRDDKSIHLHSPEEAYCFIEAEKVTIESVTAYLHNVLKGNLPDNVEGLELTLRHEKIDGPFYHYSHGLKKHDGNCQRIAHGHRSPVELFVDGARHTELEQQWASRWEDIYLGTKEDMISVTELNLSEHATTITDDGYFGFRYIAPQGEFELAIAKSETEIIDTDTTVELLASYIANEVKLSLSDESLEVVAYEGVGKGAMASA

SEQ ID NO: 23969 - protein, 291 aa, Photobacterium profundum
  misc_feature (1)..(291): tr|Q6LKJ1|Q6LKJ1_PHOPR Uncharacterized protein OS=Photo bacterium profundum (strain SS9) OX=298386 GN=SO2179 PE =4 SV=1
MKLFVRDLTVIDASYLCDERGMVGESWILDVVMSGELNEMSMLLDFSRVKKQIKFLVDEHVDHRLIVPSNNTAIRTATTKSGYATVDLLRGDKSIHLHSPEEAYCFIDAEKVTIESVTAYLHNVLKGNLPDNVEGLELTLRHEKIDGPFYHYSHGLKKHDGNCQRIAHGHRSPVELFVDGARHTELEQQWANRWEDIYLGTKEDMISVAELNLSEHATFISDDGYFGFRYTAPQGEFELAIAKSETEIIDTDTTVELLASYIANEVKQSLSDESLEVVAYEGVGKGAMASA

SEQ ID NO: 23970 - protein, 291 aa, Photobacterium proteolyticum
  misc_feature (1)..(291): tr|A0A1Q9GVA1|A0A1Q9GVA1_9GAMM Uncharacterized protein OS=Photobacterium proteolyticum OX=1903952 GN=BIT28_147 15 PE=4 SV=1
MKLFVRDLTVIDASYLCEQRGMVGESWILDVVMSGELNEMSMVLDFSRVKKQIKQLVDEFVDHRLIVPTRNSRIHVAESQPGYATVDLLRDETSIHLNCPDQAYCFIDDDAVTIESVTRHLYQVLDGKLPDNVQGLELTLRHEKIQGAFYHYSHGLKKHDGNCQRIAHGHRSPVELFVDGQRDAELEQQWAQRWQDIYLGSREDEVALSELNLSKHAAGISELTHYGFRYQAPQGEFELAIARSETEMLDTDTTVELLAHYIAEQVSPMVAGKSLDVVAYEGVGKGAMASV

SEQ ID NO: 23971 - protein, 298 aa, Photobacterium rosenbergii
  misc_feature (1)..(298): tr|A0A2T3NJH8|A0A2T3NJH8_9GAMM Uncharacterized protein OS=Photobacterium rosenbergii OX=294936 GN=C9J01_01020 PE=4 SV=1
MKLFVRDLTVIDASYLCQQRGMVGESWILDVVMSGELNEMSMVLDFSRVKKQIKQIVDEYVDHRLIVPSQSDAIRTAATKPGYATVDLLRGDKSLHLHCPEQAYCFIDDSEVTIESVTRHIHKVLEGKLPENVQGLELTLRPEHIPGPFYHYSHGLKKHDGNCQRIAHGHRSPVELVINGQRDTALEQQWAERWQDIYLGSTEDECVLSELNLSSLAANVTEQTHHAFRYTAPQGEFELAIARSDVEMISTDTTVELLAQYIAEQVSTSVASGSTIEVIAYEGVGKGAMAATVGQLKA

SEQ ID NO: 23972 - protein, 297 aa, Photobacterium sanctipauli
  misc_feature (1)..(297): tr|A0A2T3NUF3|A0A2T3NUF3_9GAMM Uncharacterized protein OS=Photobacterium sanctipauli OX=1342794 GN=C9I98_10495 PE=4 SV=1
MKLFVRDLTVIDASYLCETRGMVGESWILDVVMSGELNEMSMVLDFSRVKKQIKHIVDEFVDHRLIVPSQSKAVRIAACKPGYSTVDLLRADKGIHLNCPDEAYCFVDAEAVTIESVTQHVYKVLEGKLPENVQGLEITLRYENIDGALYHYSHGLKKHDGNCQRIAHGHRSPVELLVDGKRDSELEAKWAERWSDIYLGSDEDVCPLSALSLSAEAKNLSDELHYGFKYTAPQGEFELAIARSDVEMLNTDTTVELLAHYIAEQVSPLVDAGKTLDVLAYEGVGKGAMATVAGSKQ

SEQ ID NO: 23973 - protein, 292 aa, Photobacterium sanguinicancri
  misc_feature (1)..(292): tr|A0A264TAW9|A0A264TAW9_9GAMM Uncharacterized protein OS=Photobacterium sanguinicancri OX=875932 GN=ASV53_106 15 PE=4 SV=1
MKLFVKDLTVIDASYLCATRGMVGESWILDVVMSGELNEMSMVLDFSRVKKQIKHLVDEYVDHRLLVPMRDPAVHLATTKDGYSTLDILRGEKGIHLHCPDEAYCLVDTDAITVQTVTEHVYHVLKDQLPTNVQGLEITLRHENIDGAFYHYTHGLKKHDGNCQRIAHGHRSPIELLVNGKRDAEREQQWAQRWQDIYLGSAEDQANVNDLTLSQHAQSVSDETHYGFRYTAPQGEFELAIARTETEILDTDTTVELLAGYIAQQVKPTLKGDDILDVVAYEGVGKGAMASL

SEQ ID NO: 23974 - protein, 169 aa, Photobacterium sanguinicancri
  misc_feature (1)..(169): tr|A0A135ZNL4|A0A135ZNL4_9GAMM Queuosine biosynthesis p rotein QueD OS=Photobacterium sanguinicancri OX=875932 GN=AS132_09960 PE=4 SV=1
MQIHTLDKAQLINEVQLGSQLNHAVETGRRSDFALMLAMLSPDYLEKTPTEIPPAEGKTEEELREYFELARPQPLTSTEHCYERAASQADAFHRGGLRSSQFLHELQPAALTFPPQGTKGMPEELYHNLSGHERRRLPPAEEAKLKVSPQDLYLSLIHAKRFAEMHHAA

SEQ ID NO: 23975 - protein, 292 aa, Photobacterium sp.
  misc_feature (1)..(292): tr|Q2C8V3|Q2C8V3_9GAMM Uncharacterized protein OS=Photo bacterium sp. SKA34 OX=121723 GN=SKA34_09098 PE=4 SV=1
MKLFVRDLTVIDASYLCTDRGMVGESWILDVVMSGELNEMSMVLDFSRVKKQIKQLVDQYVDHRLIVPAKSPAIHTAATKTGYATVDLLREDKNIHLHCPEEAFCFIDAETVTIESVTEHVYHVLKDNLPENVQGLEVVLRHEVIQGAFYHYSHGLKKHDGNCQRIAHGHRSPIELIVNGERNAELEKQWAKRWQDIYLGSEEDVCSVTKLNLSECAKSVSDETHYGFRYTAPQGEFELAIARSETEMLATDTTVELLASYIAEKVKPSLSADDCLDVVAYEGVGKGAMATL

SEQ ID NO: 23976 - protein, 290 aa, Photobacterium sp.
  misc_feature (1)..(290): tr|A0A444JTG1|A0A444JTG1_9GAMM Uncharacterized protein OS=Photobacterium sp. BEI 247 OX=2485123 GN=EDI28_08700 PE=4 SV=1
MKLFVRDLTVIDASYLCAQRGMVGESWILDVVMSGELNEMSMVLDFSRVKKQIKQLVDEYVDHRLIVPAQNARIHVAESQPGYTTVDLLRDEKSIHLNCPDQAYCFIDDDAVTIESVTQHLYQVLEGKLPANVQGLELTLRHENIDGSFYHYSHGLKKHDGNCQRIAHGHRSPIELYVNGQRDAELEQLWAQRWQDIYLGSSEDEVALSVLNLSKHAATVTESTHYGFRYHAPQGKFELAIARSETEVLSTDTTVELLAQYIAEQVSPMVAAKPLEVVAYEGVGKGAMAS

SEQ ID NO: 23977 - protein, 292 aa, Photobacterium swingsii
  misc_feature (1)..(292): tr|A0A0J8Y323|A0A0J8Y323_9GAMM Uncharacterized protein OS=Photobacterium swingsii OX=680026 GN=C9I94_06335 PE= 4 SV=1
MKLFVKDLTVIDASYLCATRGMVGESWILDVVMSGELNEMSMVLDFSRVKKQIKQLVDEYVDHRLLVPMRDPSVHLATTKEGYSTLDMLRGEKGIHLHCPDEAYCLVDTETITVETVTEHVYQVLKDELPANVQGLEITLRHENIDGAFYHYTHGLKKHDGNCQRIAHGHRSPVELLVNGKRDAERELQWAQRWQDIYLGSIEDQISVDALALSQHAQTVTDDTHFGFRYTAPQGEFELAIARSETEILDTDTTVELLAGYIAQHVKATLNEDDTLDVVAYEGVGKGAMASL

SEQ ID NO: 23978 - protein, 293 aa, Photobacterium toruni
  misc_feature (1)..(293): tr|A0A1T4SUT1|A0A1T4SUT1_9GAMM 6-pyruvoyl tetrahydropte rin synthase OS=Photobacterium toruni OX=1935446 GN=CZ8 14_01760 PE=4 SV=1
MKLFVRDLTVIDASYLCPQRGMVGESWILDVVMSGELNEMSMVLDFSRVKKQIKQLVDQYVDHRLLIPSASVAIQTAVTKENYMTVDLVSEQHAIHLHSPEQAFCFIDTDAITIESVTEYVQQLLLGHLPSNVQGLEITLRHEKIDGAFYHYSHGLKKHDGNCQRIAHGHRSPVELVVNGQRNADLEQQWAQRWHDIYLGSQEDVISVSELNLSTVAANINDETHYGFRYTAPQGEFELAIAKSVTEILATDTTVELLASYIAEQIKPQLAATDQLDVFAYEGVGKGAMVTLG

SEQ ID NO: 23979 - protein, 120 aa, Photorhabdus asymbiotica
  misc_feature (1)..(120): tr|C7BLC2|C7BLC2_PHOAA 6-carboxy-5,6,7,8-tetrahydropter in synthase OS=Photorhabdus asymbiotica subsp. asymbiot ica (strain ATCC 43949 / 3105-77) OX=553480 GN=ygcM PE= 3 SV=1
MSTTIFKDFQFEAAHRLPHVPEGHKCGRLHGHSFMVRLEITGEVDPHSGWIIDFADLKAIFKPVWEQLDHQYLNDIPGLENPTSEVLSAWIWAKVKPKVPQLSAVMVKETCNAGCIFRGK

SEQ ID NO: 23980 - protein, 120 aa, Photorhabdus australis
  misc_feature (1)..(120): tr|A0A1C0U9N5|A0A1C0U9N5_9GAMM 6-carboxy-5,6,7,8-tetrah ydropterin synthase OS=Photorhabdus australis OX=286156 GN=queD PE=3 SV=1
MSTTIFKDFQFEAAHRLPHVPEGHKCGRLHGHSFMVRLEITGEVDPHSGWIMDFADLKAIFKPVWEQLDHQYLNDIPGLENPTSEVLAAWIWDKVKPKVPQLSAVMVKETCNAGCIFRRK

SEQ ID NO: 23981 - protein, 105 aa, Photorhabdus bodei
  misc_feature (1)..(105): tr|A0A329XEK3|A0A329XEK3_9GAMM Uncharacterized protein OS=Photorhabdus bodei OX=2029681 GN=CKY02_05595 PE=4 SV =1
MLIVVSTKFHIQREYDSWQEALMNIDSIGIMMQRDDIGFSASHFTIFSEFERETLHGHNFNVGVEVYSEYEENGMIFDYCIIKKNSMSFVVISMTNYYFLVNHHF

SEQ ID NO: 23982 - protein, 120 aa, Photorhabdus bodei
  misc_feature (1)..(120): tr|A0A329X2G3|A0A329X2G3_9GAMM 6-carboxy-5,6,7,8-tetrah ydropterin synthase OS=Photorhabdus bodei OX=2029681 GN =queD PE=3 SV=1
MSTTIFKDFQFEAAHRLPHVPEGHKCGRLHGHSFMVRLEITGEVDPHSGWIMDFADLKALFKPVWEQLDHHYLNDIPGLENPTSEVLATWIWHKVKPIVPQLSAVMVKETCNAGCIFRGK

SEQ ID NO: 23983 - protein, 120 aa, Photorhabdus heterorhabditis
  misc_feature (1)..(120): tr|A0A0N0CLY4|A0A0N0CLY4_9GAMM 6-carboxy-5,6,7,8-tetrah ydropterin synthase OS=Photorhabdus heterorhabditis OX= 880156 GN=AM629_14715 PE=3 SV=1
MSTTIFKDFQFEAAHRLPHVPEGHKCGRLHGHSFIVRLEITGEVDPHSGWIMDFADLKTIFKPVWEQLDHHYLNDIPGLENPTSEVLAAWIWAKVKPKVPQLSAVMVKETCNAGCIFRGK

SEQ ID NO: 23984 - protein, 120 aa, Photorhabdus khanii
  misc_feature (1)..(120): tr|W3V152|W3V152_9GAMM 6-carboxy-5,6,7,8-tetrahydropter in synthase OS=Photorhabdus khanii NC19 OX=1004151 GN=P TE_03946 PE=3 SV=1
MRTTIFKDFQFEAAHHLPHVPEGHKCGRLHGHSFMVRLEITGEVDPHSGWIMDFADLKTVFKPIWEQLDHHYLNDIPGLENPTSEVLAAWIWAKVKPSIPQLSAVMVKETCNAGCIFRGK

SEQ ID NO: 23985 - protein, 120 aa, Photorhabdus laumondii
  misc_feature (1)..(120): tr|A0A329VDX0|A0A329VDX0_9GAMM 6-carboxy-5,6,7,8-tetrah ydropterin synthase OS=Photorhabdus laumondii subsp. cl arkei OX=2029685 GN=queD PE=3 SV=1
MSTTIFKDFQFEAAHRLPHVPEGHKCGRLHGHSFIVRLEITGEVNPHSGWIMDFADLKALFKPVWEQLDHHYLNDIPGLENPTSEVLATWIWHKVKPIVPQLSAVMVKETCTAGCIFRGK

SEQ ID NO: 23986 - protein, 194 aa, Photorhabdus laumondii
  misc_feature (1)..(194): tr|Q7N3C3|Q7N3C3_PHOLL Uncharacterized protein OS=Photo rhabdus laumondii subsp. laumondii (strain DSM 15139 / CIP 105565 / TT01) OX=243265 GN=plu2794 PE=4 SV=1
MTIQYITRKGSFDSAHRVMNERVKCFNIHGHTYLYELTFSFEQMQPIGYAIDFKEIKRIGAAWIDEFLDHASILNPKDADFISAVHATRSKFRLMSLNRHGEYCNPTVENIAKEIFLTMEVLFNEWDNLKIHHIRLYETPNCFTDCNAESIHEEERSAFLSQRFEELKAYSQAMGRFEYDSRNVVTSDSTHERL

SEQ ID NO: 23987 - protein, 120 aa, Photorhabdus luminescens
  misc_feature (1)..(120): tr|A0A5C4REM7|A0A5C4REM7_PHOLU 6-carboxy-5,6,7,8-tetrah ydropterin synthase OS=Photorhabdus luminescens subsp. sonorensis OX=1173677 GN=queD PE=3 SV=1
MSTTIFKDFQFEAAHRLPHVPEGHKCGRLHGHSFMVRLEITGEVDPHSGWIMDFADLKALFKPVWEQLDHHYLNDIPGLENPTSEVLATWIWDKVKPIIPQLSAVMVKETCNAGAIFRGK

SEQ ID NO: 23988 - protein, 120 aa, Photorhabdus luminescens; identical to SEQ ID NO: 23987
  misc_feature (1)..(120): tr|A0A1G5RIX8|A0A1G5RIX8_PHOLU 6-carboxy-5,6,7,8-tetrah ydropterin synthase OS=Photorhabdus luminescens OX=2948 8 GN=SAMN02982990_04518 PE=3 SV=1

SEQ ID NO: 23989 - protein, 120 aa, Photorhabdus namnaonensis
  misc_feature (1)..(120): tr|A0A1B8YIJ5|A0A1B8YIJ5_9GAMM 6-carboxy-5,6,7,8-tetrah ydropterin synthase OS=Photorhabdus namnaonensis OX=185 1568 GN=queD PE=3 SV=1
MSTTIFKDFQFEAAHRLPHVPEGHKCGRLHGHSFMVRLEITGEVDPHSGWIMDFADLKALFKPIWEQLDHHYLNDIPGLENPTSEVLAAWIWDKVKPTIPQLSAVMVKETCNAGAIFRGK

SEQ ID NO: 23990 - protein, 194 aa, Photorhabdus namnaonensis
  misc_feature (1)..(194): tr|A0A1B8YDU7|A0A1B8YDU7_9GAMM 6-pyruvoyl tetrahydropte rin synthase OS=Photorhabdus namnaonensis OX=1851568 GN =Phpb_03385 PE=4 SV=1
MTIQYITRKGSFDSAHRVMNERVKCFNIHGHTYLYELTFSFEQMQSIGYAIDFKEIKRIGAAWIDEFLDHASILNPKDADFISAVHATRSKFRLMSLNPSGEYCNPTVENIAKEIFLTMEVLFSEWDSLKIHHVRLYETPNCFTDCNADSIHEEERNAFLSQRFEELKAYSQAMGRFEYDSRNIVTPDSTSENL

SEQ ID NO: 23991 - protein, 193 aa, Photorhabdus sp.
  misc_feature (1)..(193): tr|A0A4R4JS22|A0A4R4JS22_9GAMM 6-carboxytetrahydropteri n synthase OS=Photorhabdus sp. MEX47-22 OX=2100167 GN=C 5468_00715 PE=4 SV=1
MTIQYITRKGSFDSAHRVMNERVKCFNIHGHTYLYELTFSFEQMQPIGYAIDFKEIKRIGAAWIDEHLDHASILNPKDADFISAVHATRSKFRLMSLNPSGEYCNPTVENIAKEIFLTMEVLFSEWNSLKIHHVRLYETPNCFTDCNADSIHEEERSAFLSQRFEELKAYSQAMGQFEYDSRNVVTSDSTSEH

SEQ ID NO: 23992 - protein, 120 aa, Photorhabdus sp.
  misc_feature (1)..(120): tr|A0A4R4J2H7|A0A4R4J2H7_9GAMM 6-carboxy-5,6,7,8-tetrah ydropterin synthase OS=Photorhabdus sp. MEX20-17 OX=210 0166 GN=queD PE=3 SV=1
MSTTIFKDFQFEAAHHLPHVPEGHKCGRLHGHSFMVRLEITGEVDPHSGWIMDFADLKTVFKPIWEQLDHHYLNDIPGLENPTSEVLAAWIWAKVKPSIPQLSAVMVKETCNAGCIFRGK

SEQ ID NO: 23993 - protein, 120 aa, Photorhabdus temperata
  misc_feature (1)..(120): tr|A0A4R7Q2M6|A0A4R7Q2M6_PHOTE 6-carboxy-5,6,7,8-tetrah ydropterin synthase OS=Photorhabdus temperata OX=574560 GN=EDD23_1175 PE=3 SV=1
MSTTIFKDFQFEAAHHLPHVPDGHKCGRLHGHSFMVRLEITGEVDPHSGWIMDFADLKAVFKPIWEQLDHHYLNDIPGLENPTSEVLAAWIWAKVKPSVPQLSAVMVKETCNAGCIFRGK

SEQ ID NO: 23994 - protein, 120 aa, Photorhabdus temperata
  misc_feature (1)..(120): tr|T0PFP7|T0PFP7_PHOTE 6-carboxy-5,6,7,8-tetrahydropter in synthase OS=Photorhabdus temperata subsp. temperata M1021 OX=1221520 GN=B738_02865 PE=3 SV=1
MSTTIFKDFQFEAAHHLPHVPEGHKCGRLHGHSFMVRLEITGEVDPHSGWIMDFADLKTVFKPVWEQLDHHYLNDIPGLENPTSEVLAAWIWAKVKPSIPQLSAVMVKETCNAGCIFRGK

SEQ ID NO: 23995 - protein, 120 aa, Photorhabdus thracensis
  misc_feature (1)..(120): tr|A0A0F7LHR8|A0A0F7LHR8_9GAMM 6-carboxy-5,6,7,8-tetrah ydropterin synthase OS=Photorhabdus thracensis OX=23008 9 GN=VY86_04190 PE=3 SV=1
MNTTIFKDFQFEAAHHLPHVPEGHKCGRLHGHSFMVRLEITGEVDPHSGWIMDFADLKTVFKPVWEQLDHHYLNDIPGLENPTSEVLAAWIWAKVEPSIPQLSAVMVKETCNAGCIFRGK

SEQ ID NO: 23996 - protein, 136 aa, Phreatobacter cathodiphilus
  misc_feature (1)..(136): tr|A0A2S0NDD7|A0A2S0NDD7_9PROT Uncharacterized protein OS=Phreatobacter cathodiphilus OX=1868589 GN=C6569_1380 5 PE=4 SV=1
MYSVEVRDRIMIAHSLPDPFFGPAQGKHGASFVVDVAFFRETLTAQNVVVDIGAALDVLGKTLKRLAYQDLDTLPEFAGQLTTTEFLCKYVFDRMAEAAASGALGADAAGLAKIRVTLHEHDLARATFEAPLARRA

SEQ ID NO: 23997 - protein, 136 aa, Phreatobacter oligotrophus
  misc_feature (1)..(136): tr|A0A2T4Z348|A0A2T4Z348_9PROT 6-pyruvoyl-tetrahydropte rin synthase OS=Phreatobacter oligotrophus OX=1122261 G N=C8P69_105355 PE=4 SV=1
MYSVEVRDRIMIAHSLPDPFFGPAQGKHGASFVIDVAFFRETLTAQNVVVDIGAALDVLGKTLKRLAYQDLDTLPEFAGKLTTTEFLCKYVFDRMAEAARSGALGADAGGLAKIRVTLHEHDLARATFEAPLPQAA

SEQ ID NO: 23998 - protein, 133 aa, Phreatobacter sp.
  misc_feature (1)..(133): tr|A0A4D7QK34|A0A4D7QK34_9PROT 6-carboxytetrahydropteri n synthase OS=Phreatobacter sp. NMCR1094 OX=2570229 GN= E8L99_02225 PE=4 SV=1
MFSVEVRDRIMIAHSLPDPFFGPAQGKHGASFVVDVAFYRETLTPQNVVVDIGAALDVLSKTLKPLAYQDLDTLPQFKGQLTTTEFLCKYVFDAVAAAAKSGALGVDGQGLAKIRVTLHEHDLARATYEGSVA

SEQ ID NO: 23999 - protein, 171 aa, Phreatobacter stygius
  misc_feature (1)..(171): tr|A0A4D7BGL6|A0A4D7BGL6_9PROT 6-pyruvoyl tetrahydrobio pterin synthase OS=Phreatobacter stygius OX=1940610 GN= E8M01_23800 PE=4 SV=1
MADSAVSIIPDVQRLKPSQRETYRSTKSYDHNEGLSCCFRQWRASHSHCRFVHGYALAFKFVFATHELDERNWCYDFGGMKPVKAWLHEMFDHTMVVAEDDPELATFRKMAADGLVDLRILPAVGCEATAKFVFDHVAPSIKAETHGRVWLESVEVREHAGNSAVYERLGG

SEQ ID NO: 24000 - protein, 133 aa, Phreatobacter stygius
  misc_feature (1)..(133): tr|A0A4D7ATM8|A0A4D7ATM8_9PROT 6-carboxytetrahydropteri n synthase OS=Phreatobacter stygius OX=1940610 GN=E8M01 _08450 PE=4 SV=1
MYSVEVRDRMMIAHSLPDPFFGPAQGKHGASFVIDVAFFRETLNRQNVVVDIGAALDVLGKTLKELAYQDLDGLPQFKGQLTTTEFLCRYVYDACVAAAKSGGLGTDGATLAKIRVTLHEHDLARASFEGPVA

SEQ ID NO: 24001 - protein, 132 aa, Phycicoccus bigeumensis
  misc_feature (1)..(132): tr|A0A502D0P5|A0A502D0P5_9MICO 6-carboxytetrahydropteri n synthase OS=Phycicoccus bigeumensis OX=433644 GN=EAH8 6_02405 PE=4 SV=1
MFRVTVRDHMMIAHSFSGAVFGPAQSLHGATYVVDATFHREDLDDDGIVVDIGRAGEQLHAALADLNYRNLDDDPSLAGTNTTTEVLARVVADRLADRIHAGELGDGARGVAAITVTLGESPVAWASYERTL

SEQ ID NO: 24002 - protein, 132 aa, Phycicoccus cremeus
  misc_feature (1)..(132): tr|A0A1H9TEJ7|A0A1H9TEJ7_9MICO 6-pyruvoyl-tetrahydropte rin synthase OS=Phycicoccus cremeus OX=587636 GN=SAMN05 216199_1559 PE=4 SV=1
MFSVTVRDHMMVAHSLRGEVFGPAQRLHGATFIVDATFRSASLDADGVVVDIGRATEQLRAVIGELTYRNLDDDPVFAGVNTTTEALAKVVADALATRASEGELGPAAEHLAGIAVTLRESHVAWASYERDL

SEQ ID NO: 24003 - protein, 131 aa, Phycicoccus sp.
  misc_feature (1)..(131): tr|A0A542IKA9|A0A542IKA9_9MICC 6-pyruvoyltetrahydropter in/6-carboxytetrahydropterin synthase OS=Phycicoccus sp . SLBN-51 OX=1456756 GN=FBY27_2618 PE=4 SV=1
MFSLTVRRHFMIAHSLPREAFGPAQGLHGATFVAEVAFRRRALNEDAIVLDIGAAGTIIEDVLGGLNYRNLDEHPDFDGKLTTTEALAEYIAQKVAARIKDTADGPELAGLDVTLRENPDAWATYSLDLTT

SEQ ID NO: 24004 - protein, 132 aa, Phycicoccus sp.
  misc_feature (1)..(132): tr|A0A0Q9SKA0|A0A0Q9SKA0_9MICO 6-pyruvoyl tetrahydropte rin synthase OS=Phycicoccus sp. Soil802 OX=1736414 GN=A SG91_16700 PE=4 SV=1
MFRVTVRDHIMIAHSFRGEVFGPAQSLHGATYVVDATFHRPDLDDDGIVVDIGRAGEQLRAVLADLNYRNLDDDPTLTGGNTTTEALAKLVADRLVDRIHAGDLGATAAGITAVTVTLAESPVASASYEREL

SEQ ID NO: 24005 - protein, 150 aa, Phycisphaera mikurensis
  misc_feature (1)..(150): tr|I0IEL7|I0IEL7_PHYMF 6-pyruvoyl tetrahydropterin synt hase family protein OS=Phycisphaera mikurensis (strain NBRC 102666 / KCTC 22515 / FYK2301M01) OX=1142394 GN=PS MK_15460 PE=4 SV=1
MHEITVTTAFSAAHALRLPDGSLEPVHGHDWKLTLRVASEGLDAMGAVMDFHELQRLVDAAVARWRNADLNTLPPFAAGVAAGDDGCGIGSLDPPPGRAWNPTAERVAQEVAVRVAPGLPAGVRMRSVSVTEAVGCTARFTPAYASDAAP

SEQ ID NO: 24006 - protein, 255 aa, Phycisphaera mikurensis
  misc_feature (1)..(255): tr|I0IIJ5|I0IIJ5_PHYMF Putative 6-pyruvoyl tetrahydrobi opterin synthase OS=Phycisphaera mikurensis (strain NBR C 102666 / KCTC 22515 / FYK2301M01) OX=1142394 GN=PSMK_ 29240 PE=4 SV=1
MFELTRTLRFCPSGDPGAPRDNAHAAWPPPRGLAGVLSLDLTIAGRPDPGTGVLLNVKDLDAAFAAAALPRFRAAAGAEPAGLLRGVAQALAPTLPFPLLRLRLSASASASTELRPADMSRVILRQRFSFSAAHRLQADALSEEENRTLFGKCNRPSFHGHNYELEVAAAAAIAPDGRSLEPAALDAAVRTRVIDTLDHRNLNTDVAAFATRNPTVEHIAQTCWDLLAGGLPEGAELQEVVVWETDRTSCAYRGG

SEQ ID NO: 24007 - protein, 288 aa, Phycisphaera sp.
  misc_feature (1)..(288): tr|A0A424JV08|A0A424JV08_9BACT 6-carboxytetrahydropteri n synthase OS=Phycisphaera sp. TMED24 OX=1986832 GN=CBB 84_005170 PE=4 SV=1
MGSARRAGDWQPIRKRKETLRNMRDFTAKRPYRISVVELTRIVRFHLDGSPSPLGSNGYAGRPALSQIASMVEVHITLRGEPDPTTHYVLDIKRFDRWANKHIFPAVSMLPQSSSLDKILRNAFQNTHDLPHELISLKLQLSPYATLNLEQPMPHEPPTLTFSQTYDFAAAHYLWAHNADDAQNRDLYGKCSGIHGHNYQVEVVVEPQSNDPIPADKLDLLVAEHLLEAWDHRVLNDLDDFQDVPPSVERIAEKAAGRLVAPLAASNLRLREVSVSETDRTRARVRLG

SEQ ID NO: 24008 - protein, 120 aa, Phycisphaera sp.
  misc_feature (1)..(120): tr|A0A424KQC2|A0A424KQC2_9BACT 6-carboxy-5,6,7,8-tetrah ydropterin synthase OS=Phycisphaera sp. TMED9 OX=198661 1 GN=queD PE=3 SV=1
MRVSLSKSFGFEAAHWLPTFPEDHKCRRLHGHSFHVDIVVEGDVPEESGYLMDFGTIKAAIKPVEEALDHRCLNEIEGLENPTSEMLARWIWQRIAPELPLLSEVRIRETCSSSCVYRGD

SEQ ID NO: 24009 - protein, 133 aa, Phycisphaeraceae bacterium
  misc_feature (1)..(133): tr|A0A1Z9QAA6|A0A1Z9QAA6_9BACT Uncharacterized protein OS=Phycisphaeraceae bacterium TMED231 OX=1986831 GN=CBD 91_04895 PE=4 SV=1
MDDPLSYTRNMFELEVSHRFSAAHAVTVGGVREELHGHDWRVTVTVRGPRLDEEDLLVDFHVVETSLKDVVAPFSGRTINGVPPFDRLHPTAERIAEHVATRLAPSIPEGCAIASVAVEEAPGCIARWLPASK

SEQ ID NO: 24010 - protein, 124 aa, Phycisphaeraceae bacterium
  misc_feature (1)..(124): tr|A0A520QD73|A0A520QD73_9BACT 6-carboxytetrahydropteri n synthase OS=Phycisphaeraceae bacterium OX=2026777 GN= EVA77_04025 PE=4 SV=1
MPFELRIERTFSAAHAIVIQGEREPLHGHDWRVLVAVRGPQLDQEELLCDFHAIEQQVDGVIAPFHNANLNETAPFNQRNPTAEAIADYVYQTLVDRMPQGASLHRVEIGEAPGCTAVYGVRLD

SEQ ID NO: 24011 - protein, 120 aa, Phycisphaerae bacterium
  misc_feature (1)..(120): tr|A0A5C5W789|A0A5C5W789_9BACT 6-carboxy-5,6,7,8-tetrah ydropterin synthase OS=Phycisphaerae bacterium RAS1 OX= 2528034 GN=queD_1 PE=3 SV=1
MTVRLSKSFTFEAAHSLPGFPDGHKCRRLHGHSFRVDVHVEGPLDPKRGYLIDYGEIKAAFEPLRARLDHYHLNEIEGLENPTSEMIARWIWERLRPALPLLAEVVVHETCDSRCEFRGG

SEQ ID NO: 24012 - protein, 269 aa, Phycisphaerae bacterium
  misc_feature (1)..(269): tr|A0A1Q2MDW6|A0A1Q2MDW6_9BACT 6-pyruvoyl tetrahydropte rin synthase/QueD family protein OS=Phycisphaerae bacte rium SM-Chi-D1 OX=1851148 GN=SMSP2_01247 PE=4 SV=1
MPSLSREIRFTVNPFSSNRLKGANSYCSSPSGEGLGLFFGLWVEVGGDVDADTGFVVNLVDIDRLVRLNVVPVFVEKICEKYRNGREVSFCDIVELLKYSAQILKDKFSPQKLLSLKLFLNPYRTLRYLTESEKVIYYSEKFEFAAMHRLWNSSFSDEKNFRIFGKCANPNGHGHNYIAEVTAAVECGTEFEFGSFQKVVDENFISILDHKNLNADVEYFRTANPTLENITRFGWKVLKDRIVPARLHRIKVWENNRAFCSYEGEAESQ

SEQ ID NO: 24013 - protein, 127 aa, Phycisphaerales bacterium
  misc_feature (1)..(127): tr|A0A3C0EHH4|A0A3C0EHH4_9BACT 6-carboxytetrahydropteri n synthase QueD OS=Phycisphaerales bacterium OX=2052180 GN=DCM28_01750 PE=4 SV=1
MYQIQIKKTFSASHAIYLPDGSLEPLHGHNWPVVVTVESKELDAIETVMDFHVLEGWINDLLATVHNRHLNEVAPFAGEDGKLAVNPTAERVAWWIGTQIASRLPDHVQLVRVSVGEADGCTAIYLP

SEQ ID NO: 24014 - protein, 268 aa, Phycisphaerales bacterium
  misc_feature (1)..(268): tr|A0A3C0ETQ2|A0A3C0ETQ2_9BACT Uncharacterized protein OS=Phycisphaerales bacterium OX=2052180 GN=DCM28_21920 PE=4 SV=1
MVELTRCVRFCLNRIPAPQAGKFNTFSAWPAMTGLGRYYELLVTCKGEPDAQTGYFLNIKTIDTAVREHVLPYMQTLVAPGQDPSQVGMGQLMQQIIALLQPQLKGSVIRVRLALTPFYQLQIRSTGMQHVILRQQYEFAAAHRLHVPTLSDEENRQIFGKCNNPSGHGHNYQVEVAVKCPIDGDGHIATVNMIDALVDREIMERLDHKHLNEDVDAFADLNPSVENIAKVIYDWLVVAMRNENLELEVISVWETGKTRCTYPAGVLS

SEQ ID NO: 24015 - protein, 128 aa, Phyllobacterium bourgognense
  misc_feature (1)..(128): tr|A0A368YVU3|A0A368YVU3_9RHIZ 6-carboxy-5,6,7,8-tetrah ydropterin synthase OS=Phyllobacterium bourgognense OX= 314236 GN=C7476_10482 PE=3 SV=1
MRIFNEFTFEAAHHLPHIFPDGHINTRLHGHSFRVRVTLEGKPDTRTGLISDLGAVKSAFDSAHGKLDHRYLNEIEGLETPTLENIAMWLWRHFALSLPGLAEVGVYRDTCGEGCEYQGEFEMERKAA

SEQ ID NO: 24016 - protein, 161 aa, Phyllobacterium brassicacearum
  misc_feature (1)..(161): tr|A0A2P7BV91|A0A2P7BV91_9RHIZ Uncharacterized protein OS=Phyllobacterium brassicacearum OX=314235 GN=CU102_04 780 PE=4 SV=1
MPSPKSDQTISRPIFKSVKKYDHSEGLSCCFRQWRADHSHCQFLHGYALAVKFVFATHDLDDTNWCFDFGGLKDVRAWLHSYFDHTTIVAEDDPHMATFEGLAANRLIDLRVLPAVGCEAVAQFIHKHVSAVVKEKTNNRVWLESVEISEHSGNSACYQLT

SEQ ID NO: 24017 - protein, 128 aa, Phyllobacterium brassicacearum
  misc_feature (1)..(128): tr|A0A2P7BJF9|A0A2P7BJF9_9RHIZ 6-carboxy-5,6,7,8-tetrah ydropterin synthase OS=Phyllobacterium brassicacearum O X=314235 GN=CU102_19015 PE=3 SV=1
MRIFNEFTFEAAHHLPHIFPDGHVNTRLHGHSFRVRVTLEGKPDARTGLISDLGVVKDAFDSALELLDHRYLNEIRGLETPTLENIAIWLWRHFAAVLPGLAQVGVYRDTCGEGCEYQGEYEKREVTA

SEQ ID NO: 24018 - protein, 128 aa, Phyllobacterium endophyticum
  misc_feature (1)..(128): tr|A0A2P7B2C0|A0A2P7B2C0_9RHIZ 6-carboxy-5,6,7,8-tetrah ydropterin synthase OS=Phyllobacterium endophyticum OX= 1149773 GN=CU100_01175 PE=3 SV=1
MRIFNEFTFEAAHHLPHIFPDGHINTRLHGHSFRVRVTLEGKPDGKTGLISDLGTVKAAFDSAHEKLDHRYLNEVDGLETPTLENISMWLWRHFARSLSGLAQVGVYRDTCGEGCEYAGEYEIERKAA

SEQ ID NO: 24019 - protein, 118 aa, Phyllobacterium endophyticum
  misc_feature (1)..(118): tr|A0A2P7ASF7|A0A2P7ASF7_9RHIZ 6-carboxy-5,6,7,8-tetrah ydropterin synthase OS=Phyllobacterium endophyticum OX= 1149773 GN=queD PE=3 SV=1
MKITQAFTFEAAHRLPNVPTTHKCHRMHGHSYRVELQLKGVVGPRTGFVIDFFDVEKVFGPVLEGLDHHTLNDIDGLENPTAENIAVWIWQKVKPLLDELNSVKVFETPSCWAEFEGN

SEQ ID NO: 24020 - protein, 123 aa, Phyllobacterium leguminum
  misc_feature (1)..(123): tr|A0A318T642|A0A318T642_9RHIZ 6-carboxy-5,6,7,8-tetrah ydropterin synthase OS=Phyllobacterium leguminum OX=314 237 GN=C7477_10664 PE=3 SV=1
MYRITKEFHFSASHQLSHLPPEHQCARLHGHNYIVVVELAAETLGEDGFVRDYHDLSALKRYIDETLDHRHLNEVFGHEKVTSEFLAKHFFDWCKARLPETSAVRISETPKTWAEYRPTASQP

SEQ ID NO: 24021 - protein, 128 aa, Phyllobacterium myrsinacearum
  misc_feature (1)..(128): tr|A0A2S9JJG0|A0A2S9JJG0_9RHIZ 6-carboxy-5,6,7,8-tetrah ydropterin synthase OS=Phyllobacterium myrsinacearum OX =28101 GN=C5750_12535 PE=3 SV=1
MRIFIDFNFEAAHHLPHSFPDGHVNQRLHGHSFRVRVSLQGRPDPKTGLIADLGAVKTTVDSAKDALDHRYLNEIAGLELPTLETIAIWLWRRIAPDLPALAEIGIYRDSCGEGCEYQGEFETLEEAA

SEQ ID NO: 24022 - protein, 118 aa, Phyllobacterium salinisoli
  misc_feature (1)..(118): tr|A0A368K043|A0A368K043_9RHIZ 6-carboxy-5,6,7,8-tetrah ydropterin synthase OS=Phyllobacterium salinisoli OX=18 99321 GN=queD PE=3 SV=1
MFRITKEFHFSASHQLAHLPAEHQCARLHGHNYVVEVELSAATLNSDGFVRDYHELAPLKHYIDEAFDHRHLNDVLGHDGVTAEYLAKHFYDWCKERLPETSAVRVSETPKTWAEYRP

SEQ ID NO: 24023 - protein, 128 aa, Phyllobacterium sophorae
  misc_feature (1)..(128): tr|A0A2P7BKS8|A0A2P7BKS8_9RHIZ 6-carboxy-5,6,7,8-tetrah ydropterin synthase OS=Phyllobacterium sophorae OX=1520 277 GN=CU103_01295 PE=3 SV=1
MRIFNEFTFEAAHHLPHIFPDGHVNTRLHGHSFRVRVTLEGKPDGRTGLISDLGVVKSAFDSAVDLLDHRYLNEIQGLETPTLENIAMWLWRHFAPALPGLAEVGVYRDTCGEGCEYRGEFEIERTAA

SEQ ID NO: 24024 - protein, 128 aa, Phyllobacterium sp.
  misc_feature (1)..(128): tr|A0A1H0LBR8|A0A1H0LBR8_9RHIZ 6-carboxy-5,6,7,8-tetrah ydropterin synthase OS=Phyllobacterium sp. OV277 OX=188 2772 GN=SAMN05443582_102721 PE=3 SV=1
MRIFTDFTFEAAHHLPHSFPDGHVNQRLHGHSFRVRVTLQGRPDPKTGLIADLGTVKTAIKSARHALDHRYLNEIDGLELPTLESIAIWLWRRIASDIPALAEIGIYRDSCGEGCEYQGEFETLEEAA

SEQ ID NO: 24025 - protein, 132 aa, Phyllobacterium sp.
  misc_feature (1)..(132): tr|J2V8P8|J2V8P8_9RHIZ 6-pyruvoyl-tetrahydropterin synt hase OS=Phyllobacterium sp. YR531 OX=1144343 GN=PMI41_0 2983 PE=4 SV=1
MFAIEVRDHVMIAHSLQRPVFGPAQAMHGATFVVDAAFFTKELDEDGLAVDIGLATTVLSKVLQPLNYQNLDVMKEFAGKITTTEVLAKYIFDQLAAAVLSGDFGKGSQRICKIRVLLNESHIARGWYEADL

SEQ ID NO: 24026 - protein, 128 aa, Phyllobacterium zundukense
  misc_feature (1)..(128): tr|A0A2N9VWS0|A0A2N9VWS0_9RHIZ 6-carboxy-5,6,7,8-tetrah ydropterin synthase OS=Phyllobacterium zundukense OX=18 67719 GN=B5P45_15285 PE=3 SV=1
MRIFNEFTFEAAHHLPHIFPDGHINTRLHGHSFRVRVTLEGKPDSRTGLISDLGAVKSAFDSAVEQLDHRYLNEIKGLETPTLENIAMWLWRHFAPALPGLAQVGVYRDTCGEGCEYQGEFEMERTAA

SEQ ID NO: 24027 - protein, 120 aa, Phytobacter diazotrophicus; identical to SEQ ID NO: 20906
  misc_feature (1)..(120): tr|A0A4R4BBJ3|A0A4R4BBJ3_9GAMM 6-carboxy-5,6,7,8-tetrah ydropterin synthase OS=Phytobacter diazotrophicus OX=39 5631 GN=EDC53_101435 PE=3 SV=1

SEQ ID NO: 24028 - protein, 120 aa, Phytobacter ursingii
  misc_feature (1)..(120): tr|A0A0G3Q7F7|A0A0G3Q7F7_9GAMM 6-carboxy-5,6,7,8-tetrah ydropterin synthase OS=Phytobacter ursingii OX=1972431 GN=AB182_04540 PE=3 SV=1
MSTTLFKDFMFEAAHRLPHVPAGHKCGRLHGHSFMVRLEITGEVDPHTGWIMDFAELKAAFKPTYDRLDHYYLNDIPGLENPTSEVLAKWIWDQIKPIVPLLSAVMIKETCTAGCIYRGE

SEQ ID NO: 24029 - protein, 120 aa, Phytobacter ursingii; identical to SEQ ID NO: 21458
  misc_feature (1)..(120): tr|A0A508UM07|A0A508UM07_9GAMM 6-carboxy-5,6,7,8-tetrah ydropterin synthase OS=Phytobacter ursingii OX=1972431 GN=queD PE=3 SV=1

SEQ ID NO: 24030 - protein, 124 aa, Pigmentiphaga aceris
  misc_feature (1)..(124): tr|A0A5C0B3Q6|A0A5C0B3Q6_9BURK 6-carboxy-5,6,7,8-tetrah ydropterin synthase OS=Pigmentiphaga aceris OX=1940612 GN=FXN63_24030 PE=3 SV=1
MMYEVSQRFYFDAAHTLNREIETAGSRRIHGHTYWAEVAVRGIPEPVTGMVVDSGLLKARLHEVRDRLDHHLLDEVPDLGPATLENLCAFIARGLDGFHPGLATVKVWREANGDSCTLHLLPKL

SEQ ID NO: 24031 - protein, 170 aa, Pirellula sp.
  misc_feature (1)..(170): tr|A0A142XW92|A0A142XW92_9PLAN 6-pyruvoyl tetrahydropte rin synthase OS=Pirellula sp. SH-Sr6A OX=1632865 GN=VN1 2_03850 PE=4 SV=1
MSSGHSGTFRVLLQKEQLVFSSAHFITFAGDICECLHGHNYGLRGEVQGKLDENRYVIDFIAFRDTLAKIVKRLDHHMLLPTRHSMISVQEDGDEVVVRFRAKRWVFPAEDCILLPIVNTTAEEIAEWIGRELLSELYSKIGDRLDWLEIGVDENNGQWGYCRLPWSRVS

SEQ ID NO: 24032 - protein, 159 aa, Pirellula sp.
  misc_feature (1)..(159): tr|A0A142Y744|A0A142Y744_9PLAN 6-carboxy-5,6,7,8-tetrah ydropterin synthase OS=Pirellula sp. SH-Sr6A OX=1632865 GN=queD PE=4 SV=1
MSLTIMRRIKFCAGHRLFKHGGKCEHFHGHNYVADFFVTGESQDSVGRVMDFSHLKSKCKGWLDEHWDHSFLVYEKDQNAIEALQMVKPSRLFLMPYNPTAENMARYLLEEVCPQLLADVGAIATRVRIWETDESFAEAAIDTRGDLVISSFDADSTDR

SEQ ID NO: 24033 - protein, 182 aa, Pirellula staleyi
  misc_feature (1)..(182): tr|D2R465|D2R465_PIRSD 6-pyruvoyl tetrahydrobiopterin s ynthase K01737 6-pyruvoyl tetrahydrobiopterin synthase OS=Pirellula staleyi (strain ATCC 27377 / DSM 6068 / IC PB 4128) OX=530564 GN=Psta_4266 PE=4 SV=1
MTEPIKIEPAANLTERYRIRLEKEAHVFAAAHFITFAGNICEPLHGHNYGVAVEIEAPLDENQYVIDFIAVRDELTAITQTLDHRMLLPTSHPLIQVTADEREVTARFGDKRWVFPRTDCVLLPLTNTTSELLARYIGLALRERLAARLPAQVVGSITRFSVEVDENHGQRGIWSLAADAVH

SEQ ID NO: 24034 - protein, 169 aa, Pirellula staleyi
  misc_feature (1)..(169): tr|D2R401|D2R401_PIRSD Uncharacterized protein OS=Pirel lula staleyi (strain ATCC 27377 / DSM 6068 / ICPB 4128) OX=530564 GN=Psta_4202 PE=4 SV=1
MIKEQPPRPATLSPAETAVEVQSSSTSVFRVSREIDFCYGHRLLNYDGKCRHLHGHNGRAVITIESSSLDNRGMVMDFSDIKRVVSSWIDENLDHRMLLCKRDPYVQILKDLGEPLFLLDENPTAENICKLIHEFTASRGFPIVETQLWETPHCFATYRAARYVPGEAN

SEQ ID NO: 24035 - protein, 161 aa, Piscirickettsia salmonis
  misc_feature (1)..(161): tr|A0A0B8UMU5|A0A0B8UMU5_PISSA 6-pyruvoyl tetrahydropte rin synthase family protein OS=Piscirickettsia salmonis OX=1238 GN=KW89_268 PE=4 SV=1
MYTLKIFKERFHFCSAHFCIFSNRDKENLHGHNYYIDVEFSGEKIENGFLYPVADLKEIIQSTCDNLDEKILIQGSSPYLTNEQNSEYITIYFNNKMLYKFPRDEVIILPIKNTTMECLAEYLLTNIKNNISRTINTNFSKISLGIAETQGQKLIIEQQFS

SEQ ID NO: 24036 - protein, 161 aa, Piscirickettsia salmonis
  misc_feature (1)..(161): tr|A0A0B8V7D9|A0A0B8V7D9_PISSA 6-pyruvoyl tetrahydropte rin synthase QueD OS=Piscirickettsia salmonis OX=1238 G N=queD PE=4 SV=1
MYTLKIFKERFHFCSAHFCILSNRNKENLHGHNYYIDVEFSGKKIENGFLYPVADLKEIIQSTCDNLDEKILIQGNSPYLTNQQDNEYITIYFNGKMLYKFPRDEVIILPIKNTTMECLAEYLLTNIKSNISRTINTNFSKISLGIAETQGQKLIIEHQLS

SEQ ID NO: 24037 - protein, 125 aa, Piscirickettsiaceae bacterium
  misc_feature (1)..(125): tr|A0A2M7M711|A0A2M7M711_9GAMM 6-carboxy-5,6,7,8-tetrah ydropterin synthase OS=Piscirickettsiaceae bacterium CG _4_10_14_3_um_filter_44_349 OX=1974075 GN=queD PE=3 SV= 1
MAQQFVLKTLLDFASAHSLRGYPGDCAKLHGHNWKIEVEVIGETLNEIGMLIDFKDIKRHAKAVIEELDHSFLNDHPYFSDRNPTAENIAQYIFRALQSRITSDNLKMHRLTVWENDRNCVIYSE

SEQ ID NO: 24038 - protein, 134 aa, Piscirickettsiaceae bacterium
  misc_feature (1)..(134): tr|A0A2A4PIC4|A0A2A4PIC4_9GAMM 6-carboxy-5,6,7,8-tetrah ydropterin synthase OS=Piscirickettsiaceae bacterium OX =2030828 GN=queD PE=3 SV=1
MYRITKKFTFCYGHRLMNHPGKCKHLHGHSAQVAITLESEQLNEQGMVCDFSDIKHFAEKWLDDTFDHNMLLHKDDPVLPLLQQAGERVMVVDEHPTAEFLAKMIFDYVATGGFPVTNVSVWETDSANASYAIR

SEQ ID NO: 24039 - protein, 137 aa, Pistricoccus aurantiacus
  misc_feature (1)..(137): tr|A0A5B8SWR7|A0A5B8SWR7_9GAMM 6-carboxytetrahydropteri n synthase OS=Pistricoccus aurantiacus OX=1883414 GN=FG L86_09920 PE=4 SV=1
MFRLTVRDHMMIAHSFHSEVFGPAQRLHGATYVVDVTFVRPELDENDLVVDIGLAGDTLKRILSEFNLSNLDDIEAFRGRNTTTEFMAKVVFDRLAKAIEDGQLGEGARALSALTVTLHESHLAWASYEGTLGEDVA

SEQ ID NO: 24040 - protein, 516 aa, Planctomicrobium piriforme
  misc_feature (1)..(516): tr|A0A1I3FHC1|A0A1I3FHC1_9PLAN 6-pyruvoyl tetrahydropte rin synthase/QueD family protein OS=Planctomicrobium pi riforme OX=1576369 GN=SAMN05421753_105249 PE=4 SV=1
MPCDTISLATDTLADQVRTACILECAARKPGNVHPQAAFHDVTFHDFVRSAEVIAPVIAQASTIGVGRSILLAVQATRQAVGTNTNLGMILLLAPLAAVPVGVKCESGIQDVLRSLNERDATDVYAAIRETQPGGLGEVNEHDVSQAPQLSLIEAMTLAAERDLVARQYANGFQDVLTWGRQTFLQWIERLSSDSPLPCTQGRGARGEGPNCHSTSQRLSQPGESQFALKSVSKRMQDWETAVIGTQLDIMAREPDSLIARKCGQDDAKQSQQLAKEVLNAGWPSQPGQELIVRFDNWLRANGHRRNPGTTADLIAAILFAVIRDHLWTPPKIVPDAPSVRDNESHSTLDSPMNRTFSVDVTKDHLVFSAGHFITIGNFCERLHGHNFRLAAQVEGTLDANGYVFDFIALRDELQRVCDQLDHRMLLPLQHPEIIVDMQEREIEVRYTDRRWVFPREECILLPIKQTTVELIAEWIGTEALKRFDTSNLTSLTIKVEENFGQWANCRFEISQNEGL

SEQ ID NO: 24041 - protein, 143 aa, Planctomicrobium piriforme
  misc_feature (1)..(143): tr|A0A1I3DM63|A0A1I3DM63_9PLAN 6-pyruvoyltetrahydropter in/6-carboxytetrahydropterin synthase OS=Planctomicrobi um piriforme OX=1576369 GN=SAMN05421753_103310 PE=4 SV= 1
MYRVTQEIDFCYGHRLLNYAGKCKHLHGHNGRAVIVLEGEQLDDRGMLIDFGDIKREIRRWIDDTLDHRMILCQGDPALTALRELGEPLFVIDCNPTAENIARLIFEHAREKRLPVIEVSLWETPRAFATYSQNDCPPGTARG

SEQ ID NO: 24042 - protein, 157 aa, Planctomyces bekefii
  misc_feature (1)..(157): tr|A0A5C6MAE1|A0A5C6MAE1_9PLAN 6-carboxytetrahydropteri n synthase QueD OS=Planctomyces bekefii OX=1653850 GN=E 3A20_04110 PE=4 SV=1
MIIQKEYKFYAAHRNETLKDKCSNLHGHRYGVRCFFEVERDGEISTLFGEFDSRMEPWIKEYYDHGMLINVNDPLYESLQEHCRRTGEQLKMKLFNGPTSVENLAWMLFTEVTDMGFRLAQLEIRETDTSVISYTREDWIRDNRLFASLRSPGAATP

SEQ ID NO: 24043 - protein, 163 aa, Planctomyces sp.
  misc_feature (1)..(163): tr|A0A142YDD5|A0A142YDD5_9PLAN 6-pyruvoyl tetrahydropte rin synthase OS=Planctomyces sp. SH-PL62 OX=1636152 GN= VT85_05480 PE=4 SV=1
MPVSRFKVRVTKDYLVFSSGHFITFDGDHCERIHGHNYRAAVEVDGDLDANAYVVDFIALRDMTRVITDELDHRMLLPAKSPLIALEVVGPNTVARYRDRYWSFPSDECVVLPIANTTAELIAEYIAGRLLEAMKARGWPSPRTLRVEVEECFGQSAEIELTP

SEQ ID NO: 24044 - protein, 139 aa, Planctomyces sp.
  misc_feature (1)..(139): tr|A0A2E8F068|A0A2E8F068_9PLAN 6-pyruvoyl tetrahydrobio pterin synthase OS=Planctomyces sp. OX=37635 GN=CMJ45_0 7185 PE=4 SV=1
MYLVRIETTFDSGHRLLDYDGKCAFPHGHTYRAEVFLESDTLDSQGLVFDFTELKRRVKSWIDDNWDHSFLLNSRDTELINGLAPASKGRIYRFDEENPSCEVLSRVLYTKIVELCGVSPVKVRLWESLDQYAEYSGGQ

SEQ ID NO: 24045 - protein, 306 aa, Planctomycetaceae bacterium
  misc_feature (1)..(306): tr|A0A424JS20|A0A424JS20_9PLAN 6-carboxytetrahydropteri n synthase OS=Planctomycetaceae bacterium TMED241 OX=19 86836 GN=CBE01_006565 PE=4 SV=1
MTETKSPARHGQGRGCVITRRACFSASHRYWLPELSADDNAARFGPCAIPPGHGHNYELIVSMAGGLDADGMVLNLSEVKHAIRSVVTGQLDFRFLNEAWPEFDLSTPAGCLPTTEALVRGIWQRLSSHLPITALRLYEQPGLWADYLGHPMDAFLTIRTHFAAAHRLARPELSQEENERIYGKCARPHGHGHNYLVDVTVRGAIDPRTGMVCDLSALQRLVDDLVVEPFDHTFLNKDVPFFADCVPTAENIALHIADRLSTPVKAIGAHLHKIRLQESPNNAAEVYAESPQLEMTPATLESVATV

SEQ ID NO: 24046 - protein, 133 aa, Planctomycetaceae bacterium
  misc_feature (1)..(133): tr|A0A177Q002|A0A177Q002_9PLAN 6-pyruvoyl tetrahydrobio pterin synthase OS=Planctomycetaceae bacterium SCGC AG- 212-D15 OX=1799653 GN=AYO40_04240 PE=4 SV=1
MFRVTREIRFCYGHRLLNYRGKCRHLHGHNGRAVIALEAPELDRLGMVVDFTQIKEAVSTWIDETLDHRMLLHRDDPVLAYLREQGEPVYVMDVNPTAENIARLIFDYTASRGFPVVEVQLWETDHCFATYKK

SEQ ID NO: 24047 - protein, 121 aa, Planctomycetales bacterium
  misc_feature (1)..(121): tr|A0A1W9T336|A0A1W9T336_9BACT Uncharacterized protein OS=Planctomycetales bacterium 4572_13 OX=1971638 GN=B6I 25_08015 PE=4 SV=1
MYTLFVETNFKAQHQLSFEDATQEPLHEHDWKVCVAVSSEQLDKDEWVMDFEELKCITESMLQDFQGQKLELLPIFENRNVSAEIVAHTLYDQLAPELPHPVRLDFVEITEAPGCRARYAP

SEQ ID NO: 24048 - protein, 137 aa, Planctomycetales bacterium
  misc_feature (1)..(137): tr|A0A354GY97|A0A354GY97_9BACT 6-pyruvoyl tetrahydrobio pterin synthase OS=Planctomycetales bacterium OX=205359 1 GN=DDY78_24480 PE=4 SV=1
MFSVTREIHFCYGHRLLNYDGKCRHLHGHNGRAVITLAGAALDDLGMVMDFSRLKRVVGGWIDETLDHKMILHKDDPVLPSLRRLGEPVHVINVNPTAENIARIIFDYTAAQGFPVTEVKLWETESCFAAYTGERPA

SEQ ID NO: 24049 - protein, 132 aa, Planctomycetes bacterium
  misc_feature (1)..(132): tr|A0A1G2YGT4|A0A1G2YGT4_9BACT Uncharacterized protein OS=Planctomycetes bacterium GWF2_42_9 OX=1801958 GN=A2Y 12_14665 PE=4 SV=1
MLYFSEKFEFAASHTLWNTKFTDEENFKVFGKCANKCGHGHNYIIEVAIQKSTTDKQLFAADYEKIVDKNFISVVDHKNLNADVDYFKKANPTVENIAEFAFQSLDGKFESAKLDCVTVWENDRTFCSFRRD

SEQ ID NO: 24050 - protein, 135 aa, Planctomycetes bacterium
  misc_feature (1)..(135): tr|A0A1G3AC63|A0A1G3AC63_9BACT 6-pyruvoyl tetrahydrobio pterin synthase OS=Planctomycetes bacterium RBG_16_64_1 0 OX=1801970 GN=A2W31_17265 PE=4 SV=1
MFRVTREIDFCYGHRLLNYEGKCKHLHGHNGRAVITIETPALDQRAMVLDFVKIKRAIQHWIDENLDHRMILHRDDPAVGVLRELGEPLYLVETNPTAENIAKLIFDVCVQHGLPVVETRLWETPHCCASYQRGQ

SEQ ID NO: 24051 - protein, 133 aa, Planctomycetia bacterium
  misc_feature (1)..(133): tr|A0A4P5XQG5|A0A4P5XQG5_9BACT 6-pyruvoyl tetrahydrobio pterin synthase OS=Planctomycetia bacterium OX=2052181 GN=LBMAG52_06570 PE=4 SV=1
MFQVSQHIDFCYGHRLLNYAGKCRNLHGHNGRAVIVLASEHLDSRGMLMDFSDIKKVVRTWIDEQLDHRMILHENDPALPSLQQLGEPLFILPVNPTAENIAKTIFEFTHSQGFPVIEVSLWETPNAFATYRG

SEQ ID NO: 24052 - protein, 121 aa, Planctomycetia bacterium
  misc_feature (1)..(121): tr|A0A3D3KQF7|A0A3D3KQF7_9BACT 6-carboxy-5,6,7,8-tetrah ydropterin synthase OS=Planctomycetia bacterium OX=2052 181 GN=queD PE=3 SV=1
MYELVVETDFAAAHSLRGYHGKCENLHGHNWKIQVVLSAGRLDSLGMVLDFKDVKSIADEILEDFDHKNLNDLEYFKKDNPTTENVSRALYAEFSKKLPKGVSVRKVTVWESDRCGASYFE

SEQ ID NO: 24053 - protein, 136 aa, Planctopirus ephydatiae
  misc_feature (1)..(136): tr|A0A518GJM9|A0A518GJM9_9PLAN 6-carboxy-5,6,7,8-tetrah ydropterin synthase OS=Planctopirus ephydatiae OX=25280 19 GN=queD_1 PE=3 SV=1
MFEVSSEIQFCYGHRLLNYSGKCRHLHGHNGKAIITLAGESLDERGMLVDFGDLKRTVSQWIDDHLDHRMVLCERDPMVKILRDAGEPLYLIPENPTAENIAKLIYEKTVEVGLPVIQVGLWETAKNYAVYRERKV

SEQ ID NO: 24054 - protein, 161 aa, Planctopirus ephydatiae
  misc_feature (1)..(161): tr|A0A518GRM8|A0A518GRM8_9PLAN 6-carboxy-5,6,7,8-tetrah ydropterin synthase OS=Planctopirus ephydatiae OX=25280 19 GN=queD_2 PE=4 SV=1
MPEFRVRVTKDHLVFSAAHFITFNGNICERLHGHNWRVAVELTGPLDENSYVFDFIALRDATQKLVHELDHKVLLPLQHPTIKVEVGTKEVEAKFEDRRWVFPLEDCALLPIANTTAELLADWFAKHLCEVVRAWPGQQVKFVQAEVEENFGQWGICKVEV

SEQ ID NO: 24055 - protein, 161 aa, Planctopirus hydrillae
  misc_feature (1)..(161): tr|A0A1C3ESZ9|A0A1C3ESZ9_9PLAN 6-pyruvoyl tetrahydrobio pterin synthase OS=Planctopirus hydrillae OX=1841610 GN =A6X21_16420 PE=4 SV=1
MPEFRVRVTKDHLVFSAAHFITFNGNICERLHGHNWRVAVELTGPLDENSYVFDFIALRDATQKLVHELDHKVLLPLQHPTIKVEVGPKEVEAKFEDRRWVFPLEDCALLPIANTTAELLADWFAKHLCEVVRAWPGQQVKYVQAEVEENFGQWGICKLEV

SEQ ID NO: 24056 - protein, 136 aa, Planctopirus hydrillae
  misc_feature (1)..(136): tr|A0A1C3ERX8|A0A1C3ERX8_9PLAN 6-carboxy-5,6,7,8-tetrah ydropterin synthase OS=Planctopirus hydrillae OX=184161 0 GN=A6X21_02360 PE=3 SV=1
MFEVSSEIQFCYGHRLLNYSGKCRHLHGHNGKAIITLAGESLDERGMLVDFGDLKRTVSQWIDDHLDHRMVLCERDPMVKILRDAGEPLYLISENPTAENIAKLIYEKTVEVGLPVIQVGLWETAKNYAVYRERKV

SEQ ID NO: 24057 - protein, 136 aa, Planctopirus limnophila; identical to SEQ ID NO: 24053
  misc_feature (1)..(136): tr|D5SZ35|D5SZ35_PLAL2 6-carboxy-5,6,7,8-tetrahydropter in synthase OS=Planctopirus limnophila (strain ATCC 432 96 / DSM 3776 / IFAM 1008 / 290) OX=521674 GN=Plim_4125 PE=3 SV=1

SEQ ID NO: 24058 - protein, 161 aa, Planctopirus limnophila
  misc_feature (1)..(161): tr|D5SP90|D5SP90_PLAL2 Uncharacterized protein OS=Planc topirus limnophila (strain ATCC 43296 / DSM 3776 / IFAM 1008 / 290) OX=521674 GN=Plim_2408 PE=4 SV=1
MPEFRVRVTKDHLVFSAAHFITFNGNICERLHGHNWRVAVELTGPLDENSYVFDFIALRDATQKLVHELDHKVLLPLQHPTIKVEVGPKEVEAKFEDRRWVFPLEDCALLPIANTTAELLADWFAKHLCEVVRAWPGQQVKYVQAEVEENFGQWGICKVEV

SEQ ID NO: 24059 - protein, 174 aa, Planifilum fimeticola
  misc_feature (1)..(174): tr|A0A2T0LII3|A0A2T0LII3_9BACL PreQ(0) biosynthesis pro tein QueD OS=Planifilum fimeticola OX=201975 GN=CLV97_1 0251 PE=4 SV=1
MNPKEWNQAGPSRKEEGAFPFPPKLQVFGRDIQKEQLKYHQRRVAVEKTFTFDSSHHLHLYEGKCKALHGHTYRLTVQVSGFVNDIGLVVDFKDLKAMVKEKILVPLDHQYLNGVLPPMNTSVENMIVWIWERLEEGLKELGSPEQALRLESLRLEETPTSAATLRREWMGEDR

SEQ ID NO: 24060 - protein, 174 aa, Planifilum fulgidum
  misc_feature (1)..(174): tr|A0A1I2MBA5|A0A1I2MBA5_9BACL 6-pyruvoyltetrahydropter in/6-carboxytetrahydropterin synthase OS=Planifilum ful gidum OX=201973 GN=SAMN04488025_10725 PE=4 SV=1
MNAKEWNQAGPSRKEEGTFPFPPKLQIFGRDIQREQLRYHQRRVAVEKTFTFDSSHHLHLYEGKCKALHGHTYRLTVQVSGFVNEIGLVVDFKDLKAMVKEKILLPLDHQYLNGVLPPMNTSVENMIVWIWEKLEEGLKELGSPEQALRLEALRLEETPTSAAILRREWMEDRR

SEQ ID NO: 24061 - protein, 129 aa, Planktothricoides sp.
  misc_feature (1)..(129): tr|A0A0M1JW40|A0A0M1JW40_9CYAN 6-carboxy-5,6,7,8-tetrah ydropterin synthase OS=Planktothricoides sp. SR001 OX=1 705388 GN=AM228_07415 PE=3 SV=1
MPKWKLVTEYTFDSAHFIRDYDGPCGRMHGHTYKVRIEASSQKLHSSEYCPHEVMVADFKTLRWAKKDVTKGGLDHCFLNDVMPPDYDTTAEMIAKYIYEETKRRVPPGVDLKVAVSETPNSWVEYEDD

SEQ ID NO: 24062 - protein, 290 aa, Planktothrix agardhii
  misc_feature (1)..(290): tr|A0A2Z6CHL9|A0A2Z6CHL9_PLAAG Putative 6-pyruvoyl tetr ahydropterin synthase OS=Planktothrix agardhii NIES-204 OX=282423 GN=NIES204_31420 PE=4 SV=1
MECVITRRAQFSASHRYWLPELSATENLKRFGPTSRAPGHGHNYVLYVSMVGELNEYGMVLNLSDVKHTLKREVTDHLDFSYLNDVWPEFQQTLPTTEALAQAIWHRLAPHLPLTKIQLFEHPELWAEYQGNSMEAYLTISTHFSAAHRLAHPDLSFEDNFEIYGKCARPNGHGHNYHLEVTVKGEVDPQTGMIVDLEGLQRVINNYVVEPFDHTFLNKDIPYFSKVVPTAENIAVHIQNLLQKPIHNLGAQLHKIKLIESPNNSCEVYCTNTKSESTVSQIQHPVLAQV

SEQ ID NO: 24063 - protein, 290 aa, Planktothrix agardhii
  misc_feature (1)..(290): tr|A0A073CWH1|A0A073CWH1_PLAAG 6-pyruvoyl tetrahydropte rin synthase OS=Planktothrix agardhii NIVA-CYA 126/8 OX =388467 GN=A19Y_3550 PE=4 SV=1
MECVITRRAQFSASHRYWLPELSATENLKRFGPTSRAPGHGHNYVLYVSMVGELNEYGMVLNLSDVKHTLKREVTDHLDFSYLNDVWPEFQQTLPTTEALAQAIWHRLAPHLPLTKIQLFEHPELWAEYQGNSMEAYLTISTHFSAAHRLAHPDLSFEDNFEIYGKCARPNGHGHNYHLEVTVKGEVDPQTGMIVDLEGLQRVINDYVVEPFDHTFLNKDIPYFSKVVPTAENIAVHIQNLLQKPIHNLGAQLHKIKLIESPNNSCEVYCTNTKSESTVSQIQHPVLAQV

SEQ ID NO: 24064 - protein, 290 aa, Planktothrix rubescens
  misc_feature (1)..(290): tr|A0A1J1L2B2|A0A1J1L2B2_PLARU Uncharacterized protein OS=Planktothrix rubescens OX=59512 GN=PLAN40427 PE=4 SV =1
MECVITRRAQFSASHRYWLPELSATENLKRFGPTSRAPGHGHNYVLYVSMVGELDEYGMVLNLSDVKHTLKREVTDHLDFSYLNDVWPEFQQTLPTTEALAQAIWHRLAPHLPLTKIQLFEHPELWAEYQGNSMEAYLTISTHFSAAHRLAHPDLSFEDNCEIYGKCARPNGHGHNYHLEVTVKGEVDPQTGMIVDLEGLQRVINDYVVEPFDHTFLNKDIPYFSKVVPTAENIAVHIQNLLQKPIHNLGAQLHKIKLIESPNNSCEVYCTNTKSESTVSQIQHPVLAQV

SEQ ID NO: 24065 - protein, 290 aa, Planktothrix sp.
  misc_feature (1)..(290): tr|A0A3C1PCD3|A0A3C1PCD3_9CYAN 6-pyruvoyl tetrahydropte rin synthase OS=Planktothrix sp. UBA8402 OX=2055759 GN= DCQ63_12045 PE=4 SV=1
MECVITRRAQFSASHRYWLAELSAAENLERFGPTSRAPGHGHNYVLYVSMVGELDEYGMVLNLSDVKHTLKREVTDHLDFSYLNDVWPEFQQTLPTTEALAQAIWHRLAPHLPLTNIQLFEHPELWADYQGNDMEAYLTISTHFSAAHRLAHPDLSFEDNCEIYGKCARPNGHGHNYHLEVTVKGKVDSRTGMIVDLEGLQKAIDDHVVEPFDHTFLNKDIPYFSKVVPTAENIAVHIRDLLQKPIQDLGAQLHKVKLIESPNNSCEVYCTNTESESTISQIKQPVLARV

SEQ ID NO: 24066 - protein, 290 aa, Planktothrix sp.
  misc_feature (1)..(290): tr|A0A1T4ZMA2|A0A1T4ZMA2_9CYAN Uncharacterized protein OS=Planktothrix sp. PCC 11201 OX=1729650 GN=PL11201_700 142 PE=4 SV=1
MECVITRRAQFSASHRYWLPELSATENLKRFGPTSRAPGHGHNYILYVSMVGELDEYGMVLNLSDVKHTLKREVTNHLDFSYLNDVWPEFQQTLPTTEALAQAIWHRLAPHLPLTNIQLFEHPELWADYQGNDMEAYLTISTHFSAAHRLAHPDLSFEDNCEIYGKCARPNGHGHNYHLEVTVKGEVDPRTGMIVDLEGLQRVIDDYVVEPFDHTFLNKDIPYFSKVVPTAENIAVHIRDLLQKPIQDLGAQLHKIKLIESPNNSCEVYCTNTESESSLAQIQQPVLAQV

SEQ ID NO: 24067 - protein, 290 aa, Planktothrix tepida
  misc_feature (1)..(290): tr|A0A1J1LTR4|A0A1J1LTR4_9CYAN Uncharacterized protein OS=Planktothrix tepida PCC 9214 OX=671072 GN=PL92146506 67 PE=4 SV=1
MECVITRRAQFSASHRYWLPELSAAENIERFGLTSRAPGHGHNYVLYVSMVGELDEYGMVLNLSDVKHTLKQEVTDHLDFAHLNDVWPEFQQTLPTTEALARAIWHRLAPHLPLTNIQLFEHPELWADYQGNGMEAYLTLSTHFSAAHRLAHPDLSFEDNCEIYGKCARPNGHGHNYHLEVTVKGEIDPRTGMIVKLESLQKVIDDYVVEPFDHTFLNKDIPHFAKVVPTAENIAVHIRDLLQNPIQELRAKLHKVKLIESPNNSCEVYCTNTESEPKTLQVKQPVLAKV

SEQ ID NO: 24068 - protein, 179 aa, Planktothrix tepida
  misc_feature (1)..(179): tr|A0A1J1LKA3|A0A1J1LKA3_9CYAN 6-carboxy-5,6,7,8-tetrah ydropterin synthase (Modular protein) OS=Planktothrix t epida PCC 9214 OX=671072 GN=PL9214490153 PE=4 SV=1
MLSIRTQLGIVKSELICLIYVSKFLNGWKVHGGVKIRSDVELKPVPMPKWKLTTEFTFDSAHYIKDYDGPCGRMHGHSYRVQVEATSNQLHSSEYCPHPVMVADFRSLRWAKKDVTKGGLDHGVLNEILPPEYETTAEMIAKYIYDVTKKRVPEGVRLKVRVSETSNSWVEYEDDESES

SEQ ID NO: 24069 - protein, 141 aa, Planococcus antarcticus
  misc_feature (1)..(141): tr|A0A1C7DJ12|A0A1C7DJ12_9BACL 6-carboxy-5,6,7,8-tetrah ydropterin synthase OS=Planococcus antarcticus DSM 1450 5 OX=1185653 GN=BBH88_14435 PE=3 SV=1
MMQQFYPTAAHDFQFELNKDLHFSAAHFIPSEDAGKCQVMHGHTYHLNITIGGNELDATGFLIDFKLLKELIHKKYDHSVLNDHPEFKNKFPTTELLAQQVWQSIQQVLEMRSNRPHCLQVIVRETPTSYVVFRPRKGELS

SEQ ID NO: 24070 - protein, 139 aa, Planococcus citreus
  misc_feature (1)..(139): tr|A0A497YMG3|A0A497YMG3_9BACL 6-carboxy-5,6,7,8-tetrah ydropterin synthase OS=Planococcus citreus OX=1373 GN=D FR62_3104 PE=3 SV=1
MQQFYPSVQHPYSFELNKDMHFSAAHYIPADDAGKCAKMHGHTYHLNITIAGDHLNSTGFLIDFKQLKDLIHKRYDHSVLNDHPEFTETFPTTEQLAQQIHKLTQDTLDRSDNQPKCIQVIVRETPTSYVIYRPKEVSS

SEQ ID NO: 24071 - protein, 141 aa, Planococcus donghaensis
  misc_feature (1)..(141): tr|A0A1C7EK22|A0A1C7EK22_9BACL 6-carboxy-5,6,7,8-tetrah ydropterin synthase OS=Planococcus donghaensis OX=41477 8 GN=BCM40_10005 PE=3 SV=1
MMQQFYPTVSHNYQFELNKDMHFSAAHFIPSEEAGKCKVMHGHTYHLNITIGGNELDSIGFLIDFKLLKELIHKKYDHSVLNDHPEFTNKFPTTELLAQQVWQSIQTMLQATINRPNCLQVIVRETPTSYVVYRPRQEDLS

SEQ ID NO: 24072 - protein, 141 aa, Planococcus donghaensis
  misc_feature (1)..(141): tr|E7RE92|E7RE92_9BACL 6-carboxy-5,6,7,8-tetrahydropter in synthase OS=Planococcus donghaensis MPA1U2 OX=933115 GN=GPDM_03880 PE=3 SV=1
MMQQFYPPVSHNYQFELNKDMHFSAAHFIPSEDAGKCKVMHGHTYHLNITIGGNELDSIGFLIDFKLLKELIHKKYDHSVLNDHPEFTNKFPTTELLAQQVWQSIQTMLQATTNRPNCLQVIVRETPTSYVVYRPRQEDLS

SEQ ID NO: 24073 - protein, 141 aa, Planococcus halocryophilus
  misc_feature (1)..(141): tr|A0A1C7DML8|A0A1C7DML8_9BACL 6-carboxy-5,6,7,8-tetrah ydropterin synthase OS=Planococcus halocryophilus OX=12 15089 GN=BBI08_02185 PE=3 SV=1
MMQQFYPTVSHNYQFELNKDMHFSAAHFIPSEDAGKCKVMHGHTYHLNITIGGNQLDSIGFLIDFKLLKELIHKKYDHSVLNDHPEFANKFPTTELLAQQVWQSIQTMLQATINRPNCLQVIVRETPTSYVVYRPRQEDLL

SEQ ID NO: 24074 - protein, 141 aa, Planococcus halotolerans
  misc_feature (1)..(141): tr|A0A365L6S4|A0A365L6S4_9BACL 6-carboxy-5,6,7,8-tetrah ydropterin synthase OS=Planococcus halotolerans OX=2233 542 GN=queD PE=3 SV=1
MMQQFYPSVPHAYRFELNKDMNFSAAHFIPHAEAGKCQTVHGHTYFVNVTVAGNELDASDFLIDFKLLKDAIHKKYDHSVLNDHPEFNGKFPTTERLAEQIWQSIEAILKTRDNKPSCLQVIVRETPTSYVVYRPEQGWLR

SEQ ID NO: 24075 - protein, 140 aa, Planococcus maitriensis
  misc_feature (1)..(140): tr|A0A365K0Z9|A0A365K0Z9_9BACL 6-carboxy-5,6,7,8-tetrah ydropterin synthase OS=Planococcus maitriensis OX=22179 9 GN=queD PE=3 SV=1
MMQQFYPSVPHSYSFELNKDMHFSAAHYIPADEAGKCAEMHGHTYHLNITIAGDQLNGIGFLIDFKQLKDLIHKRYDHSVLNDHPEFTETFPTTEQLAQQVHKLIQDALDRSENQPKCIQVIVRETPTSYVIYRPKGVSS

SEQ ID NO: 24076 - protein, 140 aa, Planococcus maritimus
  misc_feature (1)..(140): tr|A0A150W5H5|A0A150W5H5_PLAMR 6-carboxy-5,6,7,8-tetrah ydropterin synthase OS=Planococcus maritimus OX=192421 GN=AY633_11250 PE=3 SV=1
MMQQFYPTVSHSYCFELNKDMHFSAAHYIPADEAGKCAKMHGHTYHLNLTIAGDQLNDTGFLIDFKHLKDLVHKRYDHSVLNDHPEFSDTFPTTELLARQIHTLIQEMLDQTDNQPECLQVIVRETPTSYVIYRPKKVSS

SEQ ID NO: 24077 - protein, 140 aa, Planococcus maritimus
  misc_feature (1)..(140): tr|A0A1C7DZU7|A0A1C7DZU7_PLAMR 6-carboxy-5,6,7,8-tetrah ydropterin synthase OS=Planococcus maritimus OX=192421 GN=BBI11_07345 PE=3 SV=1
MMQQFYPTVSHPYCFELNKDMHFSAAHYIPADEAGKCAKMHGHTYHLNLTIAGDQLNDTGFLIDFKHLKDLVHKRYDHSVLNDHPEFSHTFPTTELLAKQIHTLIQEKLNQTDNQPECLQVIVRETPTSYVIYRPKKVSS

SEQ ID NO: 24078 - protein, 140 aa, Planococcus plakortidis
  misc_feature (1)..(140): tr|A0A1C7E5Y1|A0A1C7E5Y1_9BACL 6-carboxy-5,6,7,8-tetrah ydropterin synthase OS=Planococcus plakortidis OX=10388 56 GN=BBI15_02195 PE=3 SV=1
MMQQFYPSVPHPYSFELNKDMHFSAAHYIPADEAGKCAKMHGHTYHLNITIAGDRLNGTGFLIDFKQLKDLIHKRYDHSVLNDHPEFGDTFPTTEQLAQQIHELVQETLDRSDNRPRCIQVIVRETPTSYVIYRPKEVSS

SEQ ID NO: 24079 - protein, 140 aa, Planococcus rifietoensis
  misc_feature (1)..(140): tr|A0A0U2XPA7|A0A0U2XPA7_9BACL 6-carboxy-5,6,7,8-tetrah ydropterin synthase OS=Planococcus rifietoensis OX=2009 91 GN=AUC31_03555 PE=3 SV=1
MMQQFYPSVSHPYSFELNKDMHFSAAHYIPADEAGKCAKMHGHTYHLNITIAGDQLNGTGFLIDFKQLKDLIHKRYDHSVLNDHPEFTETFPTTEQLAQQIHKLTQDTLDRSDNQPKCIQVIVRETPTSYVIYRPKEVSS

SEQ ID NO: 24080 - protein, 141 aa, Planococcus salinus
  misc_feature (1)..(141): tr|A0A3M8PAV0|A0A3M8PAV0_9BACL 6-carboxy-5,6,7,8-tetrah ydropterin synthase OS=Planococcus salinus OX=1848460 G N=queD PE=3 SV=1
MMQQFYPQVPHTFRFELNKDMHFSAAHFIPSKDAGKCQQMHGHTYFVNVTIAGNGLDPTGFLIDFKEIKNLVHKKYDHTVLNDHPEFKDMFPTTELLAQQIWQSVQELLNNRTNHPSCLQIIVRETPTSYVVFRPTEEDFR

SEQ ID NO: 24081 - protein, 141 aa, Planococcus sp.
  misc_feature (1)..(141): tr|A0A5C5T3E7|A0A5C5T3E7_9BACL 6-carboxy-5,6,7,8-tetrah ydropterin synthase OS=Planococcus sp. CPCC 101016 OX=2 599617 GN=queD PE=3 SV=1
MMQQFYPTVAHDFQFELNKDLHFSAAHFIPSEDAGKCQVMHGHTYHLNITIGGNELDATGFLIDFKLLKDLIHKKYDHSVLNDHPEFADKFPTTELLAQQVWLSIQNVLSTRSNRPHCLQVIVRETPTSYVVYRPRKEDVL

SEQ ID NO: 24082 - protein, 141 aa, Planococcus sp.
  misc_feature (1)..(141): tr|A0A5B0CUI7|A0A5B0CUI7_9BACL 6-carboxy-5,6,7,8-tetrah ydropterin synthase OS=Planococcus sp. ANT_H30 OX=25973 47 GN=queD PE=3 SV=1
MMQQFYPTIPHDFQFELNKDFHFSAAHFIPSEEAGKCQVMHGHTYHLNITIAGNELDAIGFLIDFKLLKELIHKKYDHSVLNDHPEFATKFPTTELLAKQVWQSIQTMLQATSNRPNCLQVIVRETPTSYVVFRPKQEDLL

SEQ ID NO: 24083 - protein, 362 aa, Planomicrobium glaciei
  misc_feature (1)..(362): tr|A0A518XPQ4|A0A518XPQ4_9BACL 7-cyano-7-deazaguanine s ynthase OS=Planomicrobium glaciei OX=459472 GN=queC PE= 3 SV=1
MKNEKAVVVFSGGQDSTTCLFWALKNFKEVATVTFDYGQRHSAEIECARKIAEELGVSFKVLDMTLINQLSANALTRDDIEVTATEGELPSTFVPGRNHLFLSFAAVYADAIGARHLITGVSETDFSGYPDCRDTFIKSLNVTLNLAMDKQFVIHTPLMWLNKSEVWELSDQLDALDFVQEKTLTCYNGIPSSGCGECPSCILRNEGLSAYKAKKSCRCSFMMQQFYPSVPHAFRFELNKDMHFSAAHFIPSEDAGKCQEMHGHTYFINLTICGNELDTTGFLIDFKLLKNLIHKKYDHSVLNHHPEFESKFPTTELLAQQIWQMVENLLQTSANQPHCLQVIVRETPTSYVVYRPSKEDFQ

SEQ ID NO: 24084 - protein, 141 aa, Planomicrobium glaciei
  misc_feature (1)..(141): tr|A0A1G8GVW5|A0A1G8GVW5_9BACL 6-carboxy-5,6,7,8-tetrah ydropterin synthase OS=Planomicrobium glaciei OX=459472 GN=SAMN04487975_110137 PE=3 SV=1
MMQQFYPSVPHAFRFELNKDMHFSAAHFIPSEDAGKCQEMHGHTYFINLTICGNELDATGFLIDFKLLKNLIHKKYDHSVLNHHPEFESKFPTTELLAQQIWQMVENLLQSTANQPHCLQVIVRETPTSYVVYRPSKEDFQ

SEQ ID NO: 24085 - protein, 141 aa, Planomicrobium soli
  misc_feature (1)..(141): tr|A0A2P8GAQ8|A0A2P8GAQ8_9BACL 6-carboxy-5,6,7,8-tetrah ydropterin synthase OS=Planomicrobium soli OX=1176648 G N=B0H99_1127 PE=3 SV=1
MMQQFYPSPLHSYRFELNKDMNFSAAHFIPSEEAGKCQAVHGHTYFVNVTIGGNELDSIGFLIDFKIIKDVVHKKYDHSVLNDHPEFKDKFPTTELLAEQIWNSIQEVLDTRSNRPQCLQVIVRETPTSYVVYRPRQEELA

SEQ ID NO: 24086 - protein, 141 aa, Planomicrobium sp.
  misc_feature (1)..(141): tr|A0A3L7JHL8|A0A3L7JHL8_9BACL 6-carboxy-5,6,7,8-tetrah ydropterin synthase OS=Planomicrobium sp. Y74 OX=247897 7 GN=queD PE=3 SV=1
MMQQFYPSVPHAYRFELNKDMNFSAAHFIPHAEAGKCQTVHGHTYFVNVTVAGNELDASNFLIDFKLLKDAVHKKYDHSVLNDHPEFNGKFPTTERLAEQIWQSIDAILQTRDNKPSCLQVIVRETPTSYVIYRPEREGLR

SEQ ID NO: 24087 - protein, 141 aa, Planomicrobium sp.
  misc_feature (1)..(141): tr|A0A5C5T709|A0A5C5T709_9BACL 6-carboxy-5,6,7,8-tetrah ydropterin synthase OS=Planomicrobium sp. CPCC 101079 O X=2599618 GN=queD PE=3 SV=1
MMQQFYPSIPHPYRFELNKDMNFSAAHFIPSEEAGKCQAVHGHTYHVNVTIGGNELDPIGFLIDFKLLKDIVHKKYDHSVLNDHPEFKDKFPTTELLAEQIWISIQDVLNTRGNKPKCLQVIVRETPTSYVVYRPRQEDLA

SEQ ID NO: 24088 - protein, 158 aa, Planomonospora sphaerica
  misc_feature (1)..(158): tr|A0A171DJ21|A0A171DJ21_9ACTN Queuosine biosynthesis Q ueD OS=Planomonospora sphaerica OX=161355 GN=PS9374_045 23 PE=4 SV=1
MLDTSTDQPTGPRSSGPQPLLGPERPDQATSGFQLEISKWFGFEAGHRLNGLPDGHKCGRAHGHSYQVEVRLTAQALTGPGFVTDFGELEPFATYIADHLDHRDLNAVLAVEPTSELLAVHLARWFLEHVEPAVPGRLVAVTVKETTKTSATCTVIRP

SEQ ID NO: 24089 - protein, 118 aa, Planomonospora sphaerica
  misc_feature (1)..(118): tr|A0A171DIQ0|A0A171DIQ0_9ACTN 6-carboxy-5,6,7,8-tetrah ydropterin synthase OS=Planomonospora sphaerica OX=1613 55 GN=PS9374_04432 PE=3 SV=1
MELIKEYRFEAAHRLPHVPPGHQCGRPHGHSYRVGIHVEGEVNEAAGWVIDYAEINAVVKPIIDELDHRTLEEIPGLENPTSENLARWLWQHIAPRILLLSAVTVHETATSSCVYRGA

SEQ ID NO: 24090 - protein, 132 aa, Plantactinospora sp.
  misc_feature (1)..(132): tr|A0A2R4FTQ3|A0A2R4FTQ3_9ACTN Uncharacterized protein OS=Plantactinospora sp. BB1 OX=2071627 GN=C6W10_35715 P E=4 SV=1
MFSITVRDHIMIAHSFRGEVFGPAQKLHGATFVVDATFRRPELDADNIVVDIGLASGALAEVLGELNYRNLDDEPSLAGINTSTEALAQIIADRLAERVQAGQLGAGARGLTGITVTLHESHIAWASYERTL

SEQ ID NO: 24091 - protein, 132 aa, Plantactinospora sp.
  misc_feature (1)..(132): tr|A0A4Q7W9K6|A0A4Q7W9K6_9ACTN 6-pyruvoyl-tetrahydropte rin synthase OS=Plantactinospora sp. CNZ321 OX=2512141 GN=EV371_2802 PE=4 SV=1
MFSITVRDHIMIAHSFRGEVFGPAQKLHGATYVVDATFRRPELDADNLVVDIGLASGQLAEVLGELNYRNLDDEPSLAGINTSTEALARIIADRLAERVHAGSLGAGARGLTGLTVTLHESHIAWASYERTL

SEQ ID NO: 24092 - protein, 124 aa, Plantibacter flavus
  misc_feature (1)..(124): tr|A0A4U3FQA6|A0A4U3FQA6_9MICO 6-carboxy-5,6,7,8-tetrah ydropterin synthase OS=Plantibacter flavus OX=150123 GN =queD PE=3 SV=1
MSNLDGLRVSVSQEFEFHAAHFLSWHPGKCANLHGHSYRVQVNVEGPLDHNGIVIDFDQLAEIVWKRVIEPLDHSLLNDHIENPTAERLAVHIMQKLEDVAIRLSEVRVWETAQSCATVRRSPE

SEQ ID NO: 24093 - protein, 365 aa, Plasticicumulans acidivorans
  misc_feature (1)..(365): tr|A0A317MYN5|A0A317MYN5_9GAMM 6-pyruvoyltetrahydropter in/6-carboxytetrahydropterin synthase OS=Plasticicumula ns acidivorans OX=886464 GN=C7443_102452 PE=4 SV=1
MSERVYTVARAPFEAACRIPTLPATHPASRLHGHSYAARVRARLPEDWAGFAGAGVENLAAHLAAAVAPLDYAYLNELIAVPTDENLARWIGGRLLDVPGIESLGLRSTPDAGVDLDADGSAHVWRRFRFEAAHFLPNVPAGHQCGRMHGHGFEVVLHANQDLGGADMGVDQDRLAEVWAPLAAELDHACLNELPGLACPTSEVLARWIWRRLRDELPELSWVTVFETASAGCQYDGEYFRIWKEQRFEAALRLPAAPEDDPRGRLHGHSYGIRLHVAAPLDEVMGWTVDFGDVKRLFTPVYARLDHHRLDGLDGLPSADAANLARWIRAQCAESLPMLDRIDLFETPGNGVALCWGRLAPALPG

SEQ ID NO: 24094 - protein, 361 aa, Plasticicumulans lactativorans
  misc_feature (1)..(361): tr|A0A4R2L7K8|A0A4R2L7K8_9GAMM 6-pyruvoyltetrahydropter in/6-carboxytetrahydropterin synthase OS=Plasticicumula ns lactativorans OX=1133106 GN=EV699_10418 PE=4 SV=1
MSATLYRLASAPFEAACHVGALPEGHRARRLHGHSYLARVRVRHAAADGPCDCAGLAGRLAATVAPLDYAYLNDIVAEPTDENLARWIGARLDLPGVAALGIQSTPLAGVDLDAGGGAHVWRRFRFEAAHRLPHVPPGHPCGRMHGHGFEVILHAQTALGTRDLALDHDHLAALWAPLHAELHHACLNDLPGLANPTSELLAAWIWARLKGVLPELSWVTVYETVSAGCHYDGHHYRIWKEQRFEAALQLTRAAAGDPRRGLHGHSYVVRLHLAAPLDTVMGWTVDYGEVKALFAPLYQQIDHHRLDALPGLDQADPASLAQWLRERLHAALPALDRIDLFETPACGVALCWGGLGPALPG

SEQ ID NO: 24095 - protein, 119 aa, Plautia stali
  misc_feature (1)..(119): tr|U3U371|U3U371_9ENTR 6-carboxy-5,6,7,8-tetrahydropter in synthase OS=Plautia stali symbiont OX=891974 GN=E05_ 44980 PE=3 SV=1
MSTTLFKEFQFEAAHRLPHVPEGHKCGRLHGHSFLVRLEITGEVDAHTGWVMDFAELKAAFRPIYDRLDHHYLNDIPGLESPTSEVLAKWIWDEMKPILPELSAVMIKETCTTGCVYRG

SEQ ID NO: 24096 - protein, 283 aa, Pleionea mediterranea
  misc_feature (1)..(283): tr|A0A316FX23|A0A316FX23_9GAMM 6-pyruvoyl tetrahydropte rin synthase-like protein OS=Pleionea mediterranea OX=5 23701 GN=C8D97_10374 PE=4 SV=1
MTTLFVEQLTVIDFSYFDPDRGIVGESWILDVELDGSLDDNGMVFDFTHVKKQIKQYVDQLIDHKFVVANHYKNLKTQLESDQLTLELHTNNKDYYCHKSPVQAVTFVPAETISIETVLPFLQDSIKSILPANVHDLRIRLKEESIEGAFYHYSHGLKKHFGDCQRIAHGHRSKIIVHRNNKRDESLEQKIAEEWRDIYLITEGDITSRQNLNEKPYVTLGYLANQGSFELTLPEDVCDTLETDSTVELIAEHLAQKLKQENPTDTFSVRAFEGVKKGAIAKA

SEQ ID NO: 24097 - protein, 166 aa, Plesiocystis pacifica
  misc_feature (1)..(166): tr|A6GII1|A6GII1_9DELT Uncharacterized protein OS=Plesi ocystis pacifica SIR-1 OX=391625 GN=PPSIR1_11973 PE=4 S V=1
MDGRLTTIELFKEDMKFSAGHFTIFSATERENLHGHNFTVSAALTGRVGREGLMADYGAFKRELKAMCDAWNETFMLPNCSPHLQVERTDSEVLAHYDGTTLRFLPRDVTVVECANVTIEELARLFGERLTAEPERLRERGVVGVTIKCASGPGQWASWVWTEKQA

SEQ ID NO: 24098 - protein, 129 aa, Plesiocystis pacifica
  misc_feature (1)..(129): tr|A6GHT7|A6GHT7_9DELT 6-carboxy-5,6,7,8-tetrahydropter in synthase OS=Plesiocystis pacifica SIR-1 OX=391625 GN =PPSIR1_28706 PE=3 SV=1
MARQYRLKTNVHFAAAHVLRGYGGDCEQLHGHNYKVEIEVACEQLDELGMGVDFRAVRAAAREVVGVIDHRFLNEIPPFTEVNPTAEHIAAYIYEGLARRLAELAGERVQLAAITVWETERDSVTYTEG

SEQ ID NO: 24099 - protein, 120 aa, Plesiomonas shigelloides
  misc_feature (1)..(120): tr|A0A1A9AXA7|A0A1A9AXA7_PLESH 6-carboxy-5,6,7,8-tetrah ydropterin synthase OS=Plesiomonas shigelloides OX=703 GN=queD PE=3 SV=1
MTTTLFKDFMFEAAHRLPHVPEGHKCGRLHGHSFTVRIEISGEVDPHTGWIMDFGDIKQVFKPIYDQLDHYYLNDIEGLENPTSEVLSRWIWDKLKPQLPLLSAVMIKETCTSGCTYRGE

SEQ ID NO: 24100 - protein, 120 aa, Plesiomonas shigelloides; identical to SEQ ID NO: 24099
  misc_feature (1)..(120): tr|R8AUN6|R8AUN6_PLESH 6-carboxy-5,6,7,8-tetrahydropter in synthase OS=Plesiomonas shigelloides 302-73 OX=13159 76 GN=PLESHI_00842 PE=3 SV=1

SEQ ID NO: 24101 - protein, 289 aa, Pleurocapsa sp.
  misc_feature (1)..(289): tr|A0A2T1CE28|A0A2T1CE28_9CYAN 6-pyruvoyl tetrahydropte rin synthase OS=Pleurocapsa sp. CCALA 161 OX=2107688 GN =C7B62_22650 PE=4 SV=1
MKCTINRRAQFSASHRYWLPELDEAENKRLFGACSRFPGHGHNYVLYASLEGDLDEYGMVENLSVVKQVIKREVTSQLNYSYLNDTWPEFQTTLPTTENISRIIWQRLAPHLPLVNVRLFEHPELWTDYQGNNMEATLTVKTHFSAAHRLAIPSLSFEENQEIYGKCARPNGHGHNYHLEVTVAGEIDARTGMLVDLAALQNVIDEYVVEPFDHTFLNKDIAYFAEVVPTAENIAVRIADLLRSPIKEIGAELDKIKLIESPNNSCEINCRNTQATIETAANQAAVMAS

SEQ ID NO: 24102 - protein, 290 aa, Pleurocapsa sp.
  misc_feature (1)..(290): tr|K9T5T3|K9T5T3_9CYAN 6-pyruvoyl-tetrahydropterin synt hase OS=Pleurocapsa sp. PCC 7327 OX=118163 GN=Ple7327_2 183 PE=4 SV=1
MQCVIHRRAQFSASHRYWLPELDEAENWERFGAGSRFPGHGHNYVLYVSLAGEIDEYGMVQNLSKVKRLIKQEVTSQLDYAYLNDVWSEFQQTLPTTENIARVIWQRLAPHLPLVNIQLFEHPDLWADYKGNGMEATLTVKTHFSAAHQLALPELSQEENNEIYGKCARPNGHGHNYHLEVSVVGEIDPRTGMIVDLGALQKAIDDYVVEPFDHTFLNKDIPHFAKVVPTAENIALYIAQLLQQPIRELGAELEKVKLIESPNNSCEIYCRQLAGETTNLQMKEPALAAG

SEQ ID NO: 24103 - protein, 120 aa, Pluralibacter gergoviae
  misc_feature (1)..(120): tr|A0A089PMM0|A0A089PMM0_PLUGE 6-carboxy-5,6,7,8-tetrah ydropterin synthase OS=Pluralibacter gergoviae OX=61647 GN=queD PE=3 SV=1
MSTTLFKDFTFEAAHRLPHVPEGHKCGRLHGHSFMVRLEITGEVDPHTGWIMDFAELKAAFKPTYDRLDHYYLNDIPGLENPTSEVLAKWIWDQMKPRVPLLSAVMIKETCTAGCVYRGE

SEQ ID NO: 24104 - protein, 120 aa, Pluralibacter gergoviae
  misc_feature (1)..(120): tr|A0A1S2BL43|A0A1S2BL43_PLUGE 6-carboxy-5,6,7,8-tetrah ydropterin synthase OS=Pluralibacter gergoviae OX=61647 GN=B5M10_25335 PE=3 SV=1
MSTTLFKDFTFEAAHRLPHVPEGHKCGRLHGHSFMVRLEITGEVDPHTGWIMDFAELKAAFKPTYDRLDHYYLNDIPGLENPTSEVLAKWIWDQMKPQVPLLSAVMIKETCTAGCVYRGE

SEQ ID NO: 24105 - protein, 283 aa, Pokkaliibacter plantistimulans
  misc_feature (1)..(283): tr|A0A318C1U4|A0A318C1U4_9GAMM Uncharacterized protein OS=Pokkaliibacter plantistimulans OX=1635171 GN=WH50_20 500 PE=4 SV=1
MALTLFVENLTVLDCSLLSADQGIQGESWRVDIELDGELDQQSMLLDFGEVKKQIKRHIDETLDHTLLLPGRLPGLLIEKEAEQTRVVFDHCRFGFESSGPAQAYSLLDCEAITAESVALHLQQLIQPLLPDNLQQVRFTLVNEQVDGVMYQYSHGLKKHGGNCQRIVHGHRSTIRIFRNGERDRQAESAWATRWQNIYLGTAEDVTGHTEHQIDFAYSSNQGHFTLRMPAARCEILDRDTTVEELARYITEQLHDQHPDAEWRVQAFEGIGKGAIYRIPPRR

SEQ ID NO: 24106 - protein, 137 aa, Polaribacter atrinae
  misc_feature (1)..(137): tr|A0A176TB03|A0A176TB03_9FLAO 6-pyruvoyl tetrahydrobio pterin synthase OS=Polaribacter atrinae OX=1333662 GN=L PB303_10275 PE=4 SV=1
MPKVKVYRRAHFNAAHRLFNSDWSDEKNAAVFGKCSNPNYHGHNYEMIVALFGEVDPVTGFVYDLGLLRELIKEEIEDPFDHKNLNIEVAEFKNLNPTAENISIIIYNKLRPHIPAHLEIEVTLYETRRNFVRYSGE

SEQ ID NO: 24107 - protein, 149 aa, Polaribacter atrinae
  misc_feature (1)..(149): tr|A0A176TDF6|A0A176TDF6_9FLAO 6-carboxy-5,6,7,8-tetrah ydropterin synthase OS=Polaribacter atrinae OX=1333662 GN=LPB303_06750 PE=3 SV=1
MSTIRITKQFSFETGHALYGYDGKCKNVHGHSYKLSVTVSGTPIKDSTNVKFGMVIDFGDLKKIVNEEIVDIFDHATVFNKNTPHVDLAKELIDRGHHVLLVDYQPTSEMMVIDFAKKIKNRLPENIKLHAIKLQETDSSFAEWYASEN

SEQ ID NO: 24108 - protein, 150 aa, Polaribacter butkevichii
  misc_feature (1)..(150): tr|A0A2P6C6T5|A0A2P6C6T5_9FLAO 6-carboxytetrahydropteri n synthase QueD OS=Polaribacter butkevichii OX=218490 G N=BTO14_11310 PE=4 SV=1
MSTIRITKQFNFETGHALYGYDGKCKNVHGHSYKLSVTVSGKPIKDNTNVKFGMVIDFGDLKKIVNEEIVDIFDHATVFNKNTPHVELAKELQARDHHVILVDYQPTSEMMVIDFAEKIKNRLPENIKLYSIKLQETDSSFAEWFASENK

SEQ ID NO: 24109 - protein, 137 aa, Polaribacter butkevichii
  misc_feature (1)..(137): tr|A0A2P6CF01|A0A2P6CF01_9FLAO 6-pyruvoyl tetrahydrobio pterin synthase OS=Polaribacter butkevichii OX=218490 G N=BTO14_09515 PE=4 SV=1
MPKVKVYRRAHFNAAHRLFNAAWSDAKNAEVFGKCSNPNYHGHNYEMIVALFGEIDPVTGFVYDLGLLRELIKKEVEDPFDHKNLNIEVAEFKNLNPTAENISIVIYNKLRPHIPAHLEIEVTLYETRRNFVRYAGE

SEQ ID NO: 24110 - protein, 149 aa, Polaribacter dokdonensis
  misc_feature (1)..(149): tr|A0A0M9CFP2|A0A0M9CFP2_9FLAO 6-carboxy-5,6,7,8-tetrah ydropterin synthase OS=Polaribacter dokdonensis DSW-5 O X=1300348 GN=I602_1093 PE=3 SV=1
MSTIRITKQFKFETGHALYGYDGKCKNVHGHSYKLSVTVSGKPITDNTHVKFGMVIDFGDLKKIVNEEIVDIFDHATVFNKNTPHVELAKELMDRDHHVILVDYQPTSEMMVIDFAEKIKKRLPENIKLHSIKLQETASSFAEWFASEN

SEQ ID NO: 24111 - protein, 137 aa, Polaribacter dokdonensis
  misc_feature (1)..(137): tr|A0A0M9CI17|A0A0M9CI17_9FLAO 6-carboxy-5,6,7,8-tetrah ydropterin synthase OS=Polaribacter dokdonensis DSW-5 O X=1300348 GN=I602_2512 PE=4 SV=1
MPKVTVHRKAHFNAAHRLYRKDWSDDKNFEVFNKCSNPNFHGHNYELIVSLTGEIDKDTGYVYDLGILKNLIKSEIEECFDHKNLNVEVAEFQELNPTAENICVVTYDKLRKHLPNHLDLKITLYETPRNFVSYSGD

SEQ ID NO: 24112 - protein, 136 aa, Polaribacter filamentus
  misc_feature (1)..(136): tr|A0A2S7KXI9|A0A2S7KXI9_9FLAO 6-pyruvoyl tetrahydrobio pterin synthase OS=Polaribacter filamentus OX=53483 GN= BST83_08715 PE=4 SV=1
MPKVTVHRKAHFNSAHRLYRKDWSDEKNFEVFNKCSNPNFHGHNYELIVSLTGDIDKETGYVYDLGVLSNLIKLQIENSFDHKNLNIEVEEFKNLNPTAENISVVIYNKLIEHLPDHLELEITLYETPRNFVTYSG

SEQ ID NO: 24113 - protein, 149 aa, Polaribacter filamentus
  misc_feature (1)..(149): tr|A0A2S7L0L7|A0A2S7L0L7_9FLAO 6-carboxy-5,6,7,8-tetrah ydropterin synthase OS=Polaribacter filamentus OX=53483 GN=BST83_16015 PE=3 SV=1
MSTIRITKQFKFETGHALYGYDGKCKNVHGHSYKLSVTVSGKPITDSNNVKFGMVIDFGDLKKIVKEEIVDLFDHATVFNQNTPHIELAKELKDRDHHVILVDYQPTSEMMVIDFAQKIKSRLPSNIKLHSIKLSETDTSFAEWFASEN

SEQ ID NO: 24114 - protein, 136 aa, Polaribacter gangjinensis
  misc_feature (1)..(136): tr|A0A2S7WBN1|A0A2S7WBN1_9FLAO 6-pyruvoyl tetrahydrobio pterin synthase OS=Polaribacter gangjinensis OX=574710 GN=BTO13_05050 PE=4 SV=1
MPKVTVHRKAHFNAAHRLYRKDWSDEKNFEIFSKCSNPNFHGHNYELIVSLTGEINPETGYVYDLGILKNLIKTEIEDCFDHKNLNIEVPEFKELNPTAENICVVTYDKLRKHLPKTLDLKITLYETPRNFVSYSG

SEQ ID NO: 24115 - protein, 149 aa, Polaribacter gangjinensis
  misc_feature (1)..(149): tr|A0A2S7WCP8|A0A2S7WCP8_9FLAO 6-carboxy-5,6,7,8-tetrah ydropterin synthase OS=Polaribacter gangjinensis OX=574 710 GN=BTO13_09175 PE=3 SV=1
MSTIRITKQFSFETGHALYGYDGKCKNVHGHSYKLSVTVSGKPISDNTNVKFGMVIDFGDLKKIVKEEIVDIFDHATVFNKNTPHVELAAELKNRGHHIILVDYQPTSEMMVIDFAKKIKDRLPQNIHLHSIKLQETDTSFAEWFASEN

SEQ ID NO: 24116 - protein, 149 aa, Polaribacter glomeratus
  misc_feature (1)..(149): tr|A0A2S7WI72|A0A2S7WI72_9FLAO 6-carboxy-5,6,7,8-tetrah ydropterin synthase OS=Polaribacter glomeratus OX=102 G N=BTO16_14030 PE=3 SV=1
MSTIRITKQFNFETGHALYGYDGKCKNVHGHSYKLSVTVSGKPIADSNNVKFGMVIDFGDLKKIVKEEIVDLFDHATVFNQNTPHIELAKELIDRDHHVILVDYQPTSEMMVIDFAQKIKSRLPSNIKLHSIKLSETDTSFAEWFASEN

SEQ ID NO: 24117 - protein, 136 aa, Polaribacter glomeratus
  misc_feature (1)..(136): tr|A0A2S7WXF7|A0A2S7WXF7_9FLAO 6-pyruvoyl tetrahydrobio pterin synthase OS=Polaribacter glomeratus OX=102 GN=BT O16_06480 PE=4 SV=1
MPKVTVHRKAHFNSAHRLYRKDWSDEKNFEVFNKCSNPNFHGHNYELIVSLTGAIDKETGYVYDLGILSSLIKLHIEENFDHKNLNIEVEEFKNLNPTAENISVVIYDKLRKHIPNHLELEITLYETPRNFVTYSG

SEQ ID NO: 24118 - protein, 149 aa, Polaribacter irgensii
  misc_feature (1)..(149): tr|A4BXT3|A4BXT3_9FLAO 6-carboxy-5,6,7,8-tetrahydropter in synthase OS=Polaribacter irgensii 23-P OX=313594 GN= PI23P_04732 PE=3 SV=1
MSTIRITKKFNFETGHALYGYDGKCKNVHGHSYKLSVTVSGKPITDNTNPKFGMVIDFTDLKKIVNEEIVDVFDHATVFNQNTPHVELAKELMARDHHVLLVDYQPTSEMMVIDFAQKIRSRLPENIKLHAIKLQETESSFAEWFASEN

SEQ ID NO: 24119 - protein, 137 aa, Polaribacter irgensii
  misc_feature (1)..(137): tr|A4C0Y2|A4C0Y2_9FLAO Putative 6-pyruvoyl tetrahydropt erin synthase OS=Polaribacter irgensii 23-P OX=313594 G N=PI23P_10615 PE=4 SV=1
MPKVTVHRKAHFNAAHRLYRKDWSDEKNFEVFNKCSNPHFHGHNYELIVSLTGEIDQETGYVFDLGILKNHIKVEIEDAFDHKNLNIEVPEFKDLNPTAENICVVTYKKLRNLLPENLDLEVTLYETPRNFVSYSGE

SEQ ID NO: 24120 - protein, 149 aa, Polaribacter porphyrae
  misc_feature (1)..(149): tr|A0A2S7WQN8|A0A2S7WQN8_9FLAO 6-carboxy-5,6,7,8-tetrah ydropterin synthase OS=Polaribacter porphyrae OX=113778 0 GN=BTO18_12480 PE=3 SV=1
MSTIRITKQFTFEAGHALYGYDGKCKNLHGHSYKLFVTVSGVPISDEKNVKYGMVIDFGDLKKIVNEEIVDIFDHATVFNKNTPHLELAQELIDREHHVLLVDYQPTTEMMVIDFAKKIKTRLPENIKLQAIKLQETETSFAEWYASEN

SEQ ID NO: 24121 - protein, 137 aa, Polaribacter porphyrae
  misc_feature (1)..(137): tr|A0A2S7WMH5|A0A2S7WMH5_9FLAO 6-pyruvoyl tetrahydrobio pterin synthase OS=Polaribacter porphyrae OX=1137780 GN =BTO18_06290 PE=4 SV=1
MPKVTVHRKAHFNAAHRLYRKDWSNEKNFEVFNKCSNEYYHGHNYELIVSLTGEINKETGYVYDLGILRNLIKSEIEECFDHKNLNIEVPEFKNLNPTAENICVVTFDKLRKHLPETLDLKITLYETPRNFVSYSGE

SEQ ID NO: 24122 - protein, 137 aa, Polaribacter reichenbachii
  misc_feature (1)..(137): tr|A0A1B8TPM3|A0A1B8TPM3_9FLAO 6-carboxy-5,6,7,8-tetrah ydropterin synthase OS=Polaribacter reichenbachii OX=99 6801 GN=LPB301_16050 PE=3 SV=1
MPRVTVHRKAHFNAAHRLYCKDWSSEKNFEVFSKCSNPNFHGHNYELIVSLTGEVNPITGYVYDLGVLKNIIKEEIEEAFDHKNLNIEVPEFKNLNPTAENICVVIYDKLRTHIPNHLDLKITLYETPRNFVSYSGD

SEQ ID NO: 24123 - protein, 149 aa, Polaribacter reichenbachii
  misc_feature (1)..(149): tr|A0A1B8TYG0|A0A1B8TYG0_9FLAO 6-carboxy-5,6,7,8-tetrah ydropterin synthase OS=Polaribacter reichenbachii OX=99 6801 GN=LPB301_09520 PE=3 SV=1
MSTIRITKQFNFETGHALYGYDGKCKNVHGHSYKLSVTVSGKPIKDSTNVKFGMVIDFGDLKKIVNEEVVDLFDHATVFNKNTPHVELAKELSDRGHHVILVDYQPTSEMMVIDFAQKIKKRLPDNIKLHSIKLQETDTSFAEWFSSEN

SEQ ID NO: 24124 - protein, 137 aa, Polaribacter sejongensis
  misc_feature (1)..(137): tr|A0A2K8VNH3|A0A2K8VNH3_9FLAO 6-pyruvoyl tetrahydrobio pterin synthase OS=Polaribacter sejongensis OX=985043 G N=BTO15_11450 PE=4 SV=1
MPKVKVYRRAHFNAAHRLFNSEWSDEKNAEVFGKCSNPNYHGHNYEMIVALFGEVDPITGFVYDLGLLRELIKEEIEEPFDHKNLNIEVPEFKNLNPTAENISIIIYNKLRAHIPANLEIEVTLYETRRNFVRYSGE

SEQ ID NO: 24125 - protein, 149 aa, Polaribacter sejongensis
  misc_feature (1)..(149): tr|A0A2K8VK42|A0A2K8VK42_9FLAO 6-carboxy-5,6,7,8-tetrah ydropterin synthase OS=Polaribacter sejongensis OX=9850 43 GN=BTO15_04885 PE=3 SV=1
MSTIRITKQFSFETGHALYGYDGKCKNVHGHSYKLSVTVSGKPIADNTNVKFGMVIDFGDLKKIVNEEIVDIFDHATVFNKNTPHVDLAKELMDRGHHVLLVDYQPTSEMMVIDFAEKIKGRLPENIKLHAIKLQETDSSFAEWYASEN

SEQ ID NO: 24126 - protein, 149 aa, Polaribacter sp.
  misc_feature (1)..(149): tr|A0A395JWV0|A0A395JWV0_9FLAO 6-carboxy-5,6,7,8-tetrah ydropterin synthase OS=Polaribacter sp. WD7 OX=2269061 GN=DUT90_10350 PE=3 SV=1
MSTIRITKQFSFETGHALYGYDGKCKNVHGHSYKLSVTVSGKPIKDNTNVKFGMVIDFGDLKKIVNEEVVDLFDHATVFNKNTPHVDLAKELQVRGHHVLLVDYQPTSEMMVIDFAKKIKKRLPKNIKLHAIKLQETDTSFAEWFASDN

SEQ ID NO: 24127 - protein, 137 aa, Polaribacter sp.
  misc_feature (1)..(137): tr|A0A1Y0M508|A0A1Y0M508_9FLAO 6-carboxy-5,6,7,8-tetrah ydropterin synthase OS=Polaribacter sp. SA4-10 OX=75439 7 GN=BTO04_01155 PE=3 SV=1
MSRVTVNRKAHFNAAHRLFRKEWSDDKNLEVFGKCSNPNYHGHNYELTVSLTGEIDGETGFVFDLGVLRKIINTEIEEYLDHKNLNVEVPEFKDLNPTAENISVVIYNKLRVRIPEKLDLKVILYETPRNFVSYCGE

SEQ ID NO: 24128 - protein, 137 aa, Polaribacter vadi
  misc_feature (1)..(137): tr|A0A1B8TXW0|A0A1B8TXW0_9FLAO 6-pyruvoyl tetrahydrobio pterin synthase OS=Polaribacter vadi OX=1774273 GN=LPB3 _08385 PE=4 SV=1
MPKVTVHRKAHFNAAHRLYRKDWSEEKNLEVFSKCSNPNFHGHNYELIVSLTGEIDKETGYVYDLGVLSSLIKAEIENSFDHKNLNVEVKEFKNLNPTAENIAVVIYDKLRPHIPTHLDLKITLYETPRNFVSYAGE

SEQ ID NO: 24129 - protein, 149 aa, Polaribacter vadi
  misc_feature (1)..(149): tr|A0A1B8TTQ3|A0A1B8TTQ3_9FLAO 6-carboxy-5,6,7,8-tetrah ydropterin synthase OS=Polaribacter vadi OX=1774273 GN= LPB3_12225 PE=3 SV=1
MSTIRITKQFNFETGHALYGYDGKCKNVHGHSYKLSVTVSGKPISDNTNVKFGMVIDFSDLKKIVNEEIVDIFDHATVFNKNTPHVELAKELMDRGHDVLLVDYQPTSEMMVIDFAKKIKKRLPNNIKLHSIKLQETDSSFAEWFAKDN

SEQ ID NO: 24130 - protein, 126 aa, Polaromonas naphthalenivorans
  misc_feature (1)..(126): tr|A1VL35|A1VL35_POLNA 6-carboxy-5,6,7,8-tetrahydropter in synthase OS=Polaromonas naphthalenivorans (strain CJ 2) OX=365044 GN=Pnap_1046 PE=3 SV=1
MNGVSMMMCELSQTFFFDAAHTLDRAIETASSKRIHGHTYNAEVFLTGQPDPTTGMVIDLGLVRREVALLREQLDHHLLDEVEGLGPPTLENLCQFIFRKLLPALPALTSVRVWRTSIGDGCRVSR

SEQ ID NO: 24131 - protein, 120 aa, Polaromonas sp.
  misc_feature (1)..(120): tr|A0A1S8FCB3|A0A1S8FCB3_9BURK 6-carboxy-5,6,7,8-tetrah ydropterin synthase OS=Polaromonas sp. A23 OX=1944133 G N=B0B52_20770 PE=3 SV=1
MSYTISQKFFFDAAHTLKREIEVDSSRRVHGHTYNAEVFLSGQPDPDSGMVMDLALVRLEIEQLRQLLDHHLLDDVPGLGPATMENLCRFIAGKLQPRLPALSSVRVWRESVGDSCMWSL

SEQ ID NO: 24132 - protein, 120 aa, Polaromonas sp.
  misc_feature (1)..(120): tr|A0A258TT93|A0A258TT93_9BURK 6-carboxy-5,6,7,8-tetrah ydropterin synthase OS=Polaromonas sp. 28-63-22 OX=1970 416 GN=B7Y42_11065 PE=3 SV=1
MNYEISQTFFFDAAHTLRREIEADSSRRVHGHTYHAEVMLSGQPDVATGMVVDLGLVRRAIEQLRPMLDHRMLDDIAGLGPATLENLCAFIWRELLPALPALAAVRVWRTGVGDSCTLRR

SEQ ID NO: 24133 - protein, 124 aa, [Polyangium] brachysporum
  misc_feature (1)..(124): tr|A0A0G3BFI8|A0A0G3BFI8_9BURK 6-carboxy-5,6,7,8-tetrah ydropterin synthase OS=[Polyangium] brachysporum OX=413 882 GN=queD PE=3 SV=1
MQYELTQRFFFEAAHTLERKVDAEPSRRIHGHTYFAEVAVRGAPQADTGMVMDLGHLRRAIDPVRDALDHRLLDEVEGLTRPTLEGLCSYIASALSDSVPQLAWVRVWREASGDTCTLTLRAPA

SEQ ID NO: 24134 - protein, 139 aa, Polyangium fumosum
  misc_feature (1)..(139): tr|A0A4U1JCM1|A0A4U1JCM1_9DELT 6-carboxytetrahydropteri n synthase OS=Polyangium fumosum OX=889272 GN=E8A74_158 30 PE=4 SV=1
MYTVGVRDHIMVAHRLDGDFFGPAQRMHGATYVVSIEVEQEELDEHCVVCDIGMLRAKLRGVLEQLDYRNLDDHPGFSPGRSTTEVIARYIHRELGHVLPLRAGTMLTVVLDESPNAWAKYRGPIRPASTMPGVEPGVA

SEQ ID NO: 24135 - protein, 134 aa, Polyangium fumosum
  misc_feature (1)..(134): tr|A0A4U1JEN4|A0A4U1JEN4_9DELT 6-carboxytetrahydropteri n synthase OS=Polyangium fumosum OX=889272 GN=E8A74_167 00 PE=4 SV=1
MFRVTEEVRFCYGHRLLDYEGPCARIHGHNARVEIELSSPTLDRKGFVADFFDIEKAGKDWILAQFDHRLILREDDPVIPFLKQAGEAFVTLPVNPSAENFAKLIFDHLRGHGVPVTAVSFYETDTAVATYDER

SEQ ID NO: 24136 - protein, 134 aa, Polyangium sp.
  misc_feature (1)..(134): tr|A0A4U1H4F0|A0A4U1H4F0_9DELT 6-carboxytetrahydropteri n synthase OS=Polyangium sp. SDU3-1 OX=2567896 GN=E8A73 _36935 PE=4 SV=1
MFRVSEEVRFCYGHRLMEYQGKCARIHGHNARVEIVLAGSGLNRLGFVADFADIEAAAHEWIEQFDHKLVLRQDDPVIPYLEQAGEAYVTLPVNPSAENFARLIYEHLRGKGHPVAAVRFWETETANATYEGEG

SEQ ID NO: 24137 - protein, 139 aa, Polyangium sp.
  misc_feature (1)..(139): tr|A0A4V5PFN3|A0A4V5PFN3_9DELT 6-carboxytetrahydropteri n synthase OS=Polyangium sp. SDU3-1 OX=2567896 GN=E8A73 _42730 PE=4 SV=1
MYTVGVRDHFHVAHRLEGDVFGPAQRMHGATYTVSVEIDHEELDEHGIVCDANMLRARLRQVLSEIDYRNLDEHPAFEPGKSTSEHIARFIHRELGRTLPVAAGTLLTISLEQSPACWVKYRAAVRGGSMVPREELGQA

SEQ ID NO: 24138 - protein, 283 aa, Polycyclovorans sp.
  misc_feature (1)..(283): tr|A0A2E2JCS6|A0A2E2JCS6_9GAMM Uncharacterized protein OS=Polycyclovorans sp. OX=2024852 GN=CMK02_12535 PE=4 S V=1
MATLFVDHLTVIDCAYLDLQRGLVGESWIVDLMLEGALDAQSMVLDFGEVKRRIKRAIDRGPDHTLLVPCSAKGVRLDHPAPNRTRLQADTALGPITLDAPAVSITPLAVSAIDGDAVTRHCADLVRDLVPASVTRISLQLRVEAIDGAYYQYVHGLKKHDGACQRIAHGHRSRLMITVDGARDTALEAQLADALRDTYFVSADDVVGLTDSHLHTAYDAPEGRFDLRLPRSAVTHIDRDSTVECLADWLLAQARRHHPQAAIVVRAFEGVQKGAIATAERSG

SEQ ID NO: 24139 - protein, 133 aa, Polymorphum gilvum
  misc_feature (1)..(133): tr|F2J5H7|F2J5H7_POLGS Uncharacterized protein OS=Polym orphum gilvum (strain LMG 25793 / CGMCC 1.9160 / SL003B -26A1) OX=991905 GN=SL003B_3927 PE=4 SV=1
MFAVEVRDHVMIAHSFRGELFGPAQALHGATFVIDAAFLSRTLDANGVVIDIGRAHEVLKEVLGPLNYRNLDELPQFAGVNTTTEYLTRYIHDHLSAAARSGSLGRPAAEIDAIRVTISESHVARAWYEAPVD

SEQ ID NO: 24140 - protein, 154 aa, Polynucleobacter aenigmaticus
  misc_feature (1)..(154): tr|A0A254PZ53|A0A254PZ53_9BURK 6-carboxytetrahydropteri n synthase QueD OS=Polynucleobacter aenigmaticus OX=174 3164 GN=CBI30_08705 PE=4 SV=1
MTTKQEAISITRRLEFDSGHRIPNHDGQCRHLHGHRYAIEVTLTGVIADHPGKADDGMVLDFGDIKRLTNQYVVEPWDHAFLVAKEDAGLVEYLNTIPDHKTVVMEHVPTVENLASAAFNLLQPVFEKAFEGRLKLSSIRLYETPNCWADVSHS

SEQ ID NO: 24141 - protein, 154 aa, Polynucleobacter asymbioticus
  misc_feature (1)..(154): tr|A0A1J0D6P1|A0A1J0D6P1_9BURK 6-carboxy-5,6,7,8-tetrah ydropterin synthase OS=Polynucleobacter asymbioticus OX =576611 GN=A4F89_08130 PE=4 SV=1
MTSKQPILSITRRLEFDSGHRIPNHDGQCKHLHGHRYAIEITLTGEVADHPGKADDGMVLDFGDIKRLANQYVVEPWDHAFLVAKEDAGLVAFLGTLPNHKTVIMEHVPTVENLAHAAFTILKPIFSKAFGGRLELSVIRLYETPNCWADVNHA

SEQ ID NO: 24142 - protein, 154 aa, Polynucleobacter asymbioticus
  misc_feature (1)..(154): tr|A4SYR7|A4SYR7_POLAQ Uncharacterized protein OS=Polyn ucleobacter asymbioticus (strain DSM 18221 / CIP 109841 / QLW-P1DMWA-1) OX=312153 GN=Pnuc_1417 PE=4 SV=1
MTSKQPILSITRRLEFDSGHRIPNHDGQCKHLHGHRYAIEITLTGEVADHPGKADDGMVLDFGDIKRLANQYIVEPWDHAFLVAKEDAGLVAFLGTLPNHKTVIMEHVPTVENLAHAAFTILKPVFSKAFSGRLELSMIRLYETPNCWADVNHA

SEQ ID NO: 24143 - protein, 154 aa, Polynucleobacter campilacus
  misc_feature (1)..(154): tr|A0A254PWJ0|A0A254PWJ0_9BURK 6-carboxytetrahydropteri n synthase QueD OS=Polynucleobacter campilacus OX=17431 63 GN=CBI31_01220 PE=4 SV=1
MTSKQAAISITRRLEFDSGHRIPNHDGQCKHLHGHRYAIEVTLTGEVADHPGKADDGMVLDFGDIKRLTNQYIVDLWDHAFLVAKEDEGLVAFLATLPNHKTVVMEHVPTVENLANTAFAILQPVFSKAFGGRLELSALRLYETPNCWADVHHP

SEQ ID NO: 24144 - protein, 150 aa, Polynucleobacter cosmopolitanus
  misc_feature (1)..(150): tr|A0A229FSR9|A0A229FSR9_9BURK 6-carboxytetrahydropteri n synthase QueD OS=Polynucleobacter cosmopolitanus OX=3 51345 GN=queD PE=4 SV=1
MNKKIEITRKLEFDAGHRIPHHDGHCRHIHGHRYVIEVTLMGNVLNHQGHGDDGMVLDFGDIKKITNEAIVQQWDHAFLVAKEDVTLVNFLATIPGHKTIVLNSIPTVENLAQEAFATLDPIFKDKFGGRLNLSRLRLYETPNCWADVHA

SEQ ID NO: 24145 - protein, 154 aa, Polynucleobacter duraquae
  misc_feature (1)..(154): tr|A0A0E3ZMN4|A0A0E3ZMN4_9BURK Queuosine biosynthesis p rotein QueD OS=Polynucleobacter duraquae OX=1835254 GN= CL55_00013730 PE=4 SV=1
MTAKQEAISITRRLEFDSGHRIPNHDGQCRHLHGHRYAIEVTLTGVIADHPGKADDGMVLDFGDIKRLTNQYVVEPWDHAFLVAKEDAGLVDYLNSIPNHKTVVMEHVPTVENLASAAFRVLQPVFEKAFDGRLKLASIRLYETPNCWADVSHS

SEQ ID NO: 24146 - protein, 154 aa, Polynucleobacter hirudinilacicola
  misc_feature (1)..(154): tr|A0A210RWN4|A0A210RWN4_9BURK 6-carboxytetrahydropteri n synthase QueD OS=Polynucleobacter hirudinilacicola OX =1743166 GN=B6A14_06360 PE=4 SV=1
MTSKQPAISITRRLEFDSGHRIPNHDGQCKHLHGHRYAIEVTLTGEVADHPGKADDGMVLDFGDIKRLTNQYIVDLWDHAFLVAKEDESVVAFLATLPNHKTVVMEHVPTVENLANAAFAILQPVFSKNFGGRLELSALRLYETPNCWADVHHP

SEQ ID NO: 24147 - protein, 154 aa, Polynucleobacter meluiroseus
  misc_feature (1)..(154): tr|A0A240E1W6|A0A240E1W6_9BURK 6-pyruvoyltetrahydropter in/6-carboxytetrahydropterin synthase OS=Polynucleobact er meluiroseus OX=1938814 GN=SAMN06295945_1802 PE=4 SV= 1
MSNKSKAISITRRLEFDAGHRIPNHDGQCKHLHGHRYAIEVTLTGVIANHPGQADDGMLLDFGDIKRLTNQYVVEPWDHAFLVAKEDVALVAFLNSLPDHKTVVMDSVPTVENLGNAAFAILEPIFAKAFAGSLQLTSLRLYETPNCWVDITQS

SEQ ID NO: 24148 - protein, 87 aa, Polynucleobacter necessarius
  misc_feature (1)..(87): tr|B1XTX6|B1XTX6_POLNS Uncharacterized protein OS=Polyn ucleobacter necessarius subsp. necessarius (strain STIR 1) OX=452638 GN=Pnec_0541 PE=4 SV=1
MADHPGKADDGMVLDFGDIKRLTNQYIVDLWDHAFLVAKEDEGLVAFLSTLPNHKTVIMEHVPTVENLANAAFSILKPVFSKALVAA

SEQ ID NO: 24149 - protein, 152 aa, Polynucleobacter paneuropaeus
  misc_feature (1)..(152): tr|A0A2Z4JSY8|A0A2Z4JSY8_9BURK 6-carboxytetrahydropteri n synthase QueD OS=Polynucleobacter paneuropaeus OX=252 7775 GN=queD PE=4 SV=1
MKPAPISITRRLEFDAGHRIPNHDGQCKHLHGHRYAIELTLSGEIANHPGQADDGMVLDFADIKRLSNQYVVEPWDHAFLVAKEDQGLVDFLNSLPNHKTVVMEHVPTVENLAQAAFNILSPLFDKAFAGRLQLTAIRLYETPNCWADVHRP

SEQ ID NO: 24150 - protein, 152 aa, Polynucleobacter paneuropaeus
  misc_feature (1)..(152): tr|A0A2Z4JMN3|A0A2Z4JMN3_9BURK 6-carboxytetrahydropteri n synthase QueD OS=Polynucleobacter paneuropaeus OX=252 7775 GN=queD PE=4 SV=1
MKPAPISITRRLEFDAGHRIPNHDGQCKHLHGHRYAIEITLSGEIANHPGQADDGMVLDFADIKRLSNQYVVEPWDHAFLVAKEDQGLVDFLNSLPNHKTVVMEHVPTVENLAQAAFNILSPLFDKAFAGRLHLTAIRLYETPNCWADVHRP

SEQ ID NO: 24151 - protein, 154 aa, Polynucleobacter sp.
  misc_feature (1)..(154): tr|A0A258X8V2|A0A258X8V2_9BURK 6-carboxytetrahydropteri n synthase QueD OS=Polynucleobacter sp. 16-46-70 OX=197 0421 GN=B7Y22_04335 PE=4 SV=1
MTTNSEAISITRRLEFDSGHRIPNHDGQCRHLHGHRYAIEVTLTGVIADHPGKADDGMVLDFGDIKRLTNQFVVEPWDHAFLVAKEDSGLVQYLNSIPNHKTVVMDHVPTVENLASAAFKILQPVFEKAFDGRLKLSSIRLYETPNCWADVSHP

SEQ ID NO: 24152 - protein, 154 aa, Polynucleobacter sp.
  misc_feature (1)..(154): tr|A0A258B852|A0A258B852_9BURK 6-carboxytetrahydropteri n synthase QueD OS=Polynucleobacter sp. 32-46-5 OX=1970 424 GN=B7Z19_05360 PE=4 SV=1
MTTNSEAISITRRLEFDSGHRIPNHDGQCRHLHGHRYAIEVTLTGVIADHPGKADDGMVLDFGDIKRLTNQFVVEPWDHAFLVAKEDSGLVQYLNSIPNHKTVVMEHVPTVENLASAAFKILQPVFEKAFDGRLKLSSIRLYETPNCWADVSHP

SEQ ID NO: 24153 - protein, 152 aa, Polynucleobacter sphagniphilus
  misc_feature (1)..(152): tr|A0A1R0HG95|A0A1R0HG95_9BURK 6-carboxytetrahydropteri n synthase QueD OS=Polynucleobacter sphagniphilus OX=17 43169 GN=BOQ04_01270 PE=4 SV=1
MKSSPISITRRLEFDSGHRIPNHDGQCRHLHGHRYAIEVTLTGDVANHPGKADDGMVLDFGDIKRLTNQYLVDLWDHAFLVAQEDQGLVNFLATMPNHKTVIMEHVPTVENLAAAAFAILQPIFEKAFSGSLRLTNIRLFETPNCWADVSHP

SEQ ID NO: 24154 - protein, 150 aa, Polynucleobacter victoriensis
  misc_feature (1)..(150): tr|A0A212SZF9|A0A212SZF9_9BURK 6-pyruvoyltetrahydropter in/6-carboxytetrahydropterin synthase OS=Polynucleobact er victoriensis OX=2049319 GN=SAMN06295916_0011 PE=4 SV =1
MNKKIEITRRLEFDAGHRIPHHDGHCKHVHGHRYVIEVTLMGNVLSHQGHGDDGMVLDFGDIKKITNEEIVQKWDHAFLVAKEDHALVNFLASIPNHKTVVMDSIPTVENLAQTAFSTLEPIFKERFGGRLNLSRLRLYETPNCWADVHA

SEQ ID NO: 24155 - protein, 154 aa, Polynucleobacter wuianus
  misc_feature (1)..(154): tr|A0A191UDX7|A0A191UDX7_9BURK 6-carboxytetrahydropteri n synthase QueD OS=Polynucleobacter wuianus OX=1743168 GN=A8O14_03025 PE=4 SV=1
MTSTQPTISITRRLEFDSGHRIPNHDGQCKHLHGHRYAIEVTLTGEVADHPGKADDGMVLDFGDIKKLTNQYIVEQWDHAFLVAKEDKGLVNFLATLPNHKTVIMEHVPTVENLANVAFAIMQPVFAKAFGGRLQLSAIRLYETPNCWADVHPA

SEQ ID NO: 24156 - protein, 159 aa, Pontibacillus chungwhensis
  misc_feature (1)..(159): tr|A0A0A2UW72|A0A0A2UW72_9BACI 6-pyruvoyl tetrahydrobio pterin synthase OS=Pontibacillus chungwhensis BH030062 OX=1385513 GN=N780_17075 PE=4 SV=1
MAMDQYGFRIVEDLQKIDQDIKRSDLQYHKKRVMVSKEFTFDAAHHLHCYEGKCKNLHGHTYRVVFGISGYTDEIGIVMDFGDIKQIWKEQIEVHLDHRYINETLPLMNTTAENMVVWIYEKMAGALPQNDQSLRVEFVKLYETPTSFAEARREWMELE

SEQ ID NO: 24157 - protein, 158 aa, Pontibacillus halophilus
  misc_feature (1)..(158): tr|A0A0A5GL24|A0A0A5GL24_9BACI 6-pyruvoyl tetrahydrobio pterin synthase OS=Pontibacillus halophilus JSM 076056 = DSM 19796 OX=1385510 GN=N781_01950 PE=4 SV=1
MFNDFGFRIVEQLQKIDEDIRRSELKYHHKRVMVSKEFTFDAAHHLHCYEGKCKNLHGHTYKVIFGVSGYVDEIGIVIDFGDLKNIWKNEIEIYLDHRYLNETLPLMNTTAENMVVWIYEKMDEALQAQFEGARVEFVKLYETPTSYAEARREWMIDE

SEQ ID NO: 24158 - protein, 273 aa, Pontibacillus marinus
  misc_feature (1)..(273): tr|A0A0A5GIE3|A0A0A5GIE3_9BACI 6-pyruvoyl tetrahydropte rin synthase OS=Pontibacillus marinus BH030004 = DSM 16 465 OX=1385511 GN=N783_00685 PE=4 SV=1
MLYLSRRVDFSSMHSYRNPKWSDERNQEVFGLCSNPSGHGHDYQLEVMVKGALNEASGVVVNTVDIKKIVGGFVDQELDGKFLNKEHPHFMTKIPTTENLVTYLWDAISPKLQNCELHRLRLHENPFLYAEKEEEKMVRLTRKYHFSAAHRLHSDQLSDEENIRLFGKCNNPYGHGHNYYLEVTVEGIPDPVTGMITDLSYLDEIVDSVVLNKFDHKHLNLDTSEFEGLNPTSEVAAKVMYDMLSPYLPNLYKIGLWETEKNYFEYMGPGVSA

SEQ ID NO: 24159 - protein, 158 aa, Pontibacillus marinus
  misc_feature (1)..(158): tr|A0A0A5GEB1|A0A0A5GEB1_9BACI 6-pyruvoyl tetrahydrobio pterin synthase OS=Pontibacillus marinus BH030004 = DSM 16465 OX=1385511 GN=N783_05380 PE=4 SV=1
MFGFRIVEDLEKIDQDIQRSELKYHNKRVMVSKEFTFDAAHHLHCYEGKCKNLHGHTYKVVFGISGFVNDIGLVIDFGDIKEIWKNEIEIYLDHRYLNETLPKMNTSAENMVVWIYEKMSESLKNREDQYDGARVEFVRLFETPTSYAEVKREWMEVE

SEQ ID NO: 24160 - protein, 158 aa, Pontibacillus yanchengensis
  misc_feature (1)..(158): tr|A0A0A2TD48|A0A0A2TD48_9BACI 6-pyruvoyl tetrahydrobio pterin synthase OS=Pontibacillus yanchengensis Y32 OX=1 385514 GN=N782_14565 PE=4 SV=1
MDQYGFRIVEDLQKIDKDIDRSQLKYHNKRVMVSKEFTFDAAHHLHLYDGKCKNLHGHTYTVVFGISGYVNDIGIVMDFGDIKQIWKEQIEIHLDHKYVNETLPPMNTTAENMVVWIYEKMAEALSHEDYQGTRVEFVKLYETPTSFAEVRREWMESE

SEQ ID NO: 24161 - protein, 149 aa, Pontibacter actiniarum
  misc_feature (1)..(149): tr|A0A1X9YQS6|A0A1X9YQS6_9BACT 6-carboxy-5,6,7,8-tetrah ydropterin synthase OS=Pontibacter actiniarum OX=323450 GN=CA264_07125 PE=3 SV=1
MANIRLTRLFTFETAHALLHYNGPCRRIHGHSYKLEVTVLGTPLVAEQHPKNGMVMDFGDLKRLVQEHVVSLFDHALVLQADSPRDLIEALEKHEHRLVLTPYQPTCENMLLDFQHRLQRALPANVTLHHLKLWETQNSFAEWYAEDNQ

SEQ ID NO: 24162 - protein, 135 aa, Pontibacter actiniarum
  misc_feature (1)..(135): tr|A0A1X9YXF8|A0A1X9YXF8_9BACT 6-carboxy-5,6,7,8-tetrah ydropterin synthase OS=Pontibacter actiniarum OX=323450 GN=CA264_20555 PE=3 SV=1
MKVTVCRKEHFNAAHRLHNPAWTDEQNNAVFGLCNNPNYHGHNYELIVKLTGTVNPDTGYVYDMKKLSDLVKEQVVNKFDHKNLNLDTEEFSNLNPTAENIAVVIWNKLREQISSDYELAITLYETERNFVEYNG

SEQ ID NO: 24163 - protein, 135 aa, Pontibacter akesuensis
  misc_feature (1)..(135): tr|A0A1I7JAP5|A0A1I7JAP5_9BACT 6-carboxy-5,6,7,8-tetrah ydropterin synthase OS=Pontibacter akesuensis OX=388950 GN=SAMN04487941_2650 PE=3 SV=1
MRITICRKEHFNAAHRLHNPVWTEEQNKAVFGLCNNPNYHGHNYELIVKLTGTVDPDTGYVYDMKKLSDLVKQEVTNKFDHRNLNLDTEEFSNLNPTAENIAMVVWEKLRAKISTDYELAVTLYETERNFVEYNG

SEQ ID NO: 24164 - protein, 140 aa, Pontibacter akesuensis
  misc_feature (1)..(140): tr|A0A1I7J036|A0A1I7J036_9BACT 6-pyruvoyltetrahydropter in/6-carboxytetrahydropterin synthase OS=Pontibacter ak esuensis OX=388950 GN=SAMN04487941_2365 PE=4 SV=1
MIYVSRLEHFNAAHKLFNPNWSLAKNKEVFGPCANTNWHGHNYELIVTVKGKPDPDTGFVIDLKKLSTLIRTHIIDKVDHKNLNLDVAFMEDKLASTENLVVEFWKILEPRVREISNNIATLHSLKLYETPRNYVEYFGE

SEQ ID NO: 24165 - protein, 135 aa, Pontibacter chinhatensis
  misc_feature (1)..(135): tr|A0A1I2VDP7|A0A1I2VDP7_9BACT 6-carboxy-5,6,7,8-tetrah ydropterin synthase OS=Pontibacter chinhatensis OX=1436 961 GN=SAMN05421739_10475 PE=3 SV=1
MRVTVCRKEHFNAAHRLHNPAWTEEQNDAVFGLCSNPNYHGHNYELIVRLTGPVNPETGYVYDMKKLSDLVKEEVVNKFDHKNLNLDTEEFRQLNPTAENIAAVIWNKLRGRISPDYDLAVTLYETERNFVEYNG

SEQ ID NO: 24166 - protein, 149 aa, Pontibacter chinhatensis
  misc_feature (1)..(149): tr|A0A1I2NBB6|A0A1I2NBB6_9BACT 6-carboxy-5,6,7,8-tetrah ydropterin synthase OS=Pontibacter chinhatensis OX=1436 961 GN=SAMN05421739_101665 PE=3 SV=1
MTKIRLTRLFTFETAHALLHYDGPCRRIHGHSYKLEVTVIGTPLVEEEHPKNGMVMDFGDLKQLVQEHIVQPFDHALVLAQESPQDLLEQLRKYDHKLVLTPYQPTCENMLIDFQHRLQQRLPGHVQLHHLKLWETQNSFAEWYAEDNR

SEQ ID NO: 24167 - protein, 140 aa, Pontibacter diazotrophicus
  misc_feature (1)..(140): tr|A0A3D8L6W9|A0A3D8L6W9_9BACT 6-carboxytetrahydropteri n synthase OS=Pontibacter diazotrophicus OX=1400979 GN= DXT99_21280 PE=4 SV=1
MIYVSRLEHFNAAHKLHNPNWSLAKNKEVFGPCANTNWHGHNYELIVTVKGKPDPDTGFVIDLKKLSTLIRTHIIEKVDHKNLNLDVAFMEDKLASTENLIVEFWKILEPRILDISNKNAQLHSLKLYETPRNYVEYFGE

SEQ ID NO: 24168 - protein, 135 aa, Pontibacter diazotrophicus
  misc_feature (1)..(135): tr|A0A3D8LHT1|A0A3D8LHT1_9BACT 6-carboxy-5,6,7,8-tetrah ydropterin synthase OS=Pontibacter diazotrophicus OX=14 00979 GN=DXT99_00375 PE=3 SV=1
MKVTICRKEHFNAAHRLHNPAWTDEKNAKVFGLCNNPNYHGHNYELYVKLTGAVNPETGYVYDLKKLSDLVKQEVVDKFDHKNLNLDTEEFRDLNPTAENIAVVIWEKLRTNISTEYELAVTLYETERNFVEYNG

SEQ ID NO: 24169 - protein, 138 aa, Pontibacter indicus
  misc_feature (1)..(138): tr|A0A1R3XQ42|A0A1R3XQ42_9BACT 6-pyruvoyltetrahydropter in/6-carboxytetrahydropterin synthase OS=Pontibacter in dicus OX=1317125 GN=SAMN05444128_2965 PE=4 SV=1
MIYVSRLEHFNAAHKLHNPNWSLAKNKEVFGPCANTNWHGHNYELIVTVKGKPDPDTGFVIDLKKLSTLIRKNIIEKVDHKNLNLDVAFMEDKLASTENLVVEFWKILEPKIAEISQARLHSLKLYETPRNYVEYFGE

SEQ ID NO: 24170 - protein, 149 aa, Pontibacter indicus
  misc_feature (1)..(149): tr|A0A1R3WAC4|A0A1R3WAC4_9BACT 6-carboxy-5,6,7,8-tetrah ydropterin synthase OS=Pontibacter indicus OX=1317125 G N=SAMN05444128_0163 PE=3 SV=1
MSKIRLTRLFTFEAAHALQNYKGGCRNIHGHSYRLEVTIIGTPIVNEMHPNDGMVMDFKDLKKIVQETIIDPIDHALLLREDAPSELVEALRHLNHKLVLTPFQPTCENMLLDFKQRLHPLLPQQAELHSLKLWETEKSFAEWYAADNV

SEQ ID NO: 24171 - protein, 135 aa, Pontibacter korlensis
  misc_feature (1)..(135): tr|A0A0E3ZIV4|A0A0E3ZIV4_9BACT 6-carboxy-5,6,7,8-tetrah ydropterin synthase OS=Pontibacter korlensis OX=400092 GN=PKOR_09705 PE=3 SV=1
MKLTICRKEHFNAAHRLHNPAWTDEQNSDVFGLCNNPNYHGHNYELIVKLTGTVDPETGYVYDMKKLSDLVKEEVINKYDHRNLNLDTEDFKQLNPTAENIAVVIWNKLRDRISPDYDLAVILYETERNFVEYNG

SEQ ID NO: 24172 - protein, 140 aa, Pontibacter korlensis
  misc_feature (1)..(140): tr|A0A0E3UXH5|A0A0E3UXH5_9BACT 6-pyruvoyl tetrahydrobio pterin synthase OS=Pontibacter korlensis OX=400092 GN=P KOR_11110 PE=4 SV=1
MIYVSRLEHFNAAHKLFNPNWSLAKNKEVFGPCANTNWHGHNYELIVTVKGMPDPDTGFVIDLKKLSTLIRTHIIAKVDHKNLNLDVAFMEDKLASTENLIVEFWKILEPRVKEISNNNASLHSLKLYETPRNYVEYFGE

SEQ ID NO: 24173 - protein, 149 aa, Pontibacter lucknowensis
  misc_feature (1)..(149): tr|A0A1N7B202|A0A1N7B202_9BACT 6-carboxy-5,6,7,8-tetrah ydropterin synthase OS=Pontibacter lucknowensis OX=1077 936 GN=SAMN05421545_3739 PE=3 SV=1
MSSIRLTRLFTFEAAHALQNYKGGCRNIHGHSYKLEVTIIGTPIVSETHPNDGMVMDFKELKKIVQETIIEPIDHALLLRQDAPLELVEALRHLSHKLVLTPFQPTCENMLIDFKQKLRHLLPPQVRLHSLKLWETEKSFAEWYASDNL

SEQ ID NO: 24174 - protein, 138 aa, Pontibacter lucknowensis
  misc_feature (1)..(138): tr|A0A1N6SXE1|A0A1N6SXE1_9BACT 6-pyruvoyltetrahydropter in/6-carboxytetrahydropterin synthase OS=Pontibacter lu cknowensis OX=1077936 GN=SAMN05421545_0011 PE=4 SV=1
MIYVSRLEHFNAAHKLHNPNWSLAKNKEVFGPCANTNWHGHNYELIVTVKGKPDPDTGFVIDLKKLSTLIRKHIIEKVDHKNLNLDVAFMEDKLASTENLVVEFWKILEPKIAEISQARLHSLKLYETPRNYVEYFGE

SEQ ID NO: 24175 - protein, 135 aa, Pontibacter mucosus
  misc_feature (1)..(135): tr|A0A2T5YJR6|A0A2T5YJR6_9BACT 6-carboxy-5,6,7,8-tetrah ydropterin synthase OS=Pontibacter mucosus OX=1649266 G N=C8N40_104282 PE=3 SV=1
MRVTVCRKEHFNAAHRLHNPAWTEEQNDAVFGLCSNPNYHGHNYELIVRLTGPVNPETGYVYDMKKLSDLVKEEVVNRFDHKNLNLDTEEFRQLNPTAENIAVVIWNKLRDRISPDYDLAVTLYETERNFVEYNG

SEQ ID NO: 24176 - protein, 149 aa, Pontibacter mucosus
  misc_feature (1)..(149): tr|A0A2T5YG99|A0A2T5YG99_9BACT 6-carboxy-5,6,7,8-tetrah ydropterin synthase OS=Pontibacter mucosus OX=1649266 G N=C8N40_106113 PE=3 SV=1
MTKIRLTRLFTFETAHALLHYDGPCRRIHGHSYKLEVTVIGTPLVEEEHPKNGMVMDFGDLKQLVQEHIVQPFDHALVLAQESPQDLLEQLRKYDHKLVLTPYQPTCENMLIDFQHRLRQRLPGHVQLHHLKLWETQNSFAEWYAEDNR

SEQ ID NO: 24177 - protein, 138 aa, Pontibacter ramchanderi
  misc_feature (1)..(138): tr|A0A2N3UA87|A0A2N3UA87_9BACT 6-pyruvoyltetrahydropter in/6-carboxytetrahydropterin synthase OS=Pontibacter ra mchanderi OX=1179743 GN=BD749_1402 PE=4 SV=1
MIYVSRLEHFNAAHKLHNPNWSLAKNKEVFGPCANTNWHGHNYELIVTVKGKPDPDTGFVIDLKKLSSLIRKNIIEKVDHKNLNLDVAFMEDKLASTENLVVEFWKILEPKIAEISSAKLHSLKLYETPRNYVEYFGE

SEQ ID NO: 24178 - protein, 135 aa, Pontibacter ramchanderi
  misc_feature (1)..(135): tr|A0A2N3UAX0|A0A2N3UAX0_9BACT 6-carboxy-5,6,7,8-tetrah ydropterin synthase OS=Pontibacter ramchanderi OX=11797 43 GN=BD749_1679 PE=3 SV=1
MKITICRKEHFNAAHRLHNPAWSDEQNAEVFGLCNNPNFHGHNYELIVKLTGAVNEETGYVYDMKKLSTLVKEEVIDRFDHKNLNLDTEEFRQLNPTAEHIAMVIWNRLREKISQEYELAVTLYETERNFVEYNG

SEQ ID NO: 24179 - protein, 138 aa, Pontibacter sp.
  misc_feature (1)..(138): tr|A0A364RH50|A0A364RH50_9BACT 6-carboxytetrahydropteri n synthase OS=Pontibacter sp. 2b14 OX=2080288 GN=DP923_ 00060 PE=4 SV=1
MIYVSRLEHFNAAHKLHNPNWSLSKNQEIFGPCANANWHGHNYELVVTVKGKPDPDTGFVIDLKKLSTLIRTHIIEKVDHKNLNLDVPFMEDKLASTENLVIEFWKILAPQIEAISKAKLHSLKLYETPRNYVEYFGE

SEQ ID NO: 24180 - protein, 153 aa, Pontibacter sp.
  misc_feature (1)..(153): tr|A0A5C8J4C9|A0A5C8J4C9_9BACT 6-carboxytetrahydropteri n synthase OS=Pontibacter sp. GY10130 OX=2603253 GN=FVR 03_19510 PE=4 SV=1
MSLTRSKIRLTRLFTFEAAHVLQNYDGACRNIHGHSYKLEVTIMGTPITDKQHAKYGMVMDFDDLKKIVHESLLQPVDHALLLREDSPKELVQTLQKLHHKLVLTPYQPTCERILIDFKAKLRNQLPVYVELHSLKLWETQNSFAEWYSSDEL

SEQ ID NO: 24181 - protein, 140 aa, Pontibacter ummariensis
  misc_feature (1)..(140): tr|A0A239KXI7|A0A239KXI7_9BACT 6-pyruvoyltetrahydropter in/6-carboxytetrahydropterin synthase OS=Pontibacter um mariensis OX=1610492 GN=SAMN06296052_13236 PE=4 SV=1
MIYVSRLEHFNAAHKLHNPNWSLAKNKEVFGPCANTNWHGHNYELIVTVKGKPDSDTGFVIDLKKLSTLIRTHIIAKVDHKNLNLDVPFMEDKLASTENLVVEFWKILEPRILEISNKNAQLHSLKLYETPRNYVEYFGE

SEQ ID NO: 24182 - protein, 148 aa, Pontibacter ummariensis
  misc_feature (1)..(148): tr|A0A239F7D0|A0A239F7D0_9BACT 6-carboxy-5,6,7,8-tetrah ydropterin synthase OS=Pontibacter ummariensis OX=16104 92 GN=SAMN06296052_10846 PE=3 SV=1
MTKIRLTRRFTFEAAHALLRYDGPCRHIHGHSYKLEVTVIGTPLVDEEHPKNGMVMDFGDLKQIVQEHIIARVDHALLLRADSSKDLKEALRKTDQKLLLTPYQPTCENMLIDFKTRLLDILPAHVTLHSLKLWETENAFAEWYASDN

SEQ ID NO: 24183 - protein, 149 aa, Pontibacter virosus
  misc_feature (1)..(149): tr|A0A2U1ASU5|A0A2U1ASU5_9BACT 6-carboxy-5,6,7,8-tetrah ydropterin synthase OS=Pontibacter virosus OX=1765052 G N=C8E01_11187 PE=3 SV=1
MSRIRLTRLFTFEAAHALQNYKGGCRNIHGHSYRLEVTITGTPIVSETHPNDGMVMDFKDLKKIVQETLIDPIDHALLLRQDAPQELVEALRHLDHKLVLTPFQPTCENMLIDFKQRLRHLLPSHVELHSLKLWETEKSFAEWYATDNV

SEQ ID NO: 24184 - protein, 135 aa, Pontibacter virosus
  misc_feature (1)..(135): tr|A0A2U1AZU7|A0A2U1AZU7_9BACT 6-carboxy-5,6,7,8-tetrah ydropterin synthase OS=Pontibacter virosus OX=1765052 G N=C8E01_104310 PE=3 SV=1
MKITICRKEHFNAAHRLHNPAWSDEQNAEVFGLCNNPNFHGHNYELIVKLTGAVDEETGYVYDMKKLSTLVKEEVIDRFDHKNLNLDTEEFRQLNPTAENIAMVIWKRLREKISREYELAVTLYETERNFVEYNG

SEQ ID NO: 24185 - protein, 145 aa, Ponticaulis sp.
  misc_feature (1)..(145): tr|A0A2E7EWI3|A0A2E7EWI3_9RHOB 6-carboxy-5,6,7,8-tetrah ydropterin synthase OS=Ponticaulis sp. OX=2020902 GN=CM K08_05300 PE=3 SV=1
MTSNPTKPATDTGAAKPSLAGRTFEVTRAGNFEAAHHLAPKDPDHPYGKLHGHSFRVEIGVSGVVKQGEDWVADFAQLGNVLAKVTGELDHSYLNEIPGLELPTLERLCVWIAERVAEDLPRLTRVSVSRPSLSETCTLRLDGES

SEQ ID NO: 24186 - protein, 144 aa, Ponticaulis sp.
  misc_feature (1)..(144): tr|A0A2D7IX75|A0A2D7IX75_9RHOB 6-carboxy-5,6,7,8-tetrah ydropterin synthase OS=Ponticaulis sp. OX=2020902 GN=CM K05_07345 PE=3 SV=1
MTSQTTRPEPASGSTAPSLSGRTFEVSRAGHFEAAHHLAPKDPNHPYGQLHGHSFRVEIAVSGVVKEGEDWVADFAILGDVLANVTGILDHSYLNEIPGLELPTLERICVWIADRVLPDLPRLTRVSVSRPSLSETCTLRLGES

SEQ ID NO: 24187 - protein, 131 aa, Pontimonas salivibrio
  misc_feature (1)..(131): tr|A0A2L2BPV2|A0A2L2BPV2_9MICO Queuosine biosynthesis p rotein OS=Pontimonas salivibrio OX=1159327 GN=C3B54_116 96 PE=4 SV=1
MFALEVRDHIMIGHSLPSPVFGPAQGLHGATFTVDAAFFTEDIDQHGLVVDIGLASQALSEVLEPLRYKNLDDVPGFEGKFTTTEFLCKHIFDGLAERIRTGQLGDGGRVQRLKIMLHESHIARAWFESEL

SEQ ID NO: 24188 - protein, 130 aa, Pontivivens insulae
  misc_feature (1)..(130): tr|A0A2R8AFA4|A0A2R8AFA4_9RHOB Uncharacterized protein OS=Pontivivens insulae OX=1639689 GN=POI8812_03210 PE=4 SV=1
MFAVEVRDHIMIAHSLKGEVFGPAQKMHGATFVVDVCFLRETLSADNIVVDMGRAHDVLKDVLGPLNYANLDEVFPGEVTTTEFLCRHIHGAIASAAREGALGPGSEGLSALRITLNESHVAKAWYEAPL

SEQ ID NO: 24189 - protein, 120 aa, Porphyromonadaceae bacterium
  misc_feature (1)..(120): tr|A0A354X020|A0A354X020_9PORP 6-carboxy-5,6,7,8-tetrah ydropterin synthase OS=Porphyromonadaceae bacterium OX= 2049046 GN=queD PE=3 SV=1
MYKISKEFSFSAAHQLKGLPDDHPCSRLHGHNYVVRIHLRSEKLSENGFVRDYNDLKPVKSYIDEHLDHRNLNDIMAPLNSTAENLARLLYEVFKPMFPELYAVEVSETPKTSAIYEPDR

SEQ ID NO: 24190 - protein, 121 aa, Porphyromonadaceae bacterium; identical to SEQ ID NO: 23889
  misc_feature (1)..(121): tr|A0A1I7HRK6|A0A1I7HRK6_9PORP 6-carboxy-5,6,7,8-tetrah ydropterin synthase OS=Porphyromonadaceae bacterium KHP 3R9 OX=1855398 GN=SAMN05216364_104314 PE=3 SV=1

SEQ ID NO: 24191 - protein, 141 aa, Porphyromonas asaccharolytica
  misc_feature (1)..(141): tr|F4KJI6|F4KJI6_PORAD Uncharacterized protein OS=Porph yromonas asaccharolytica (strain ATCC 25260 / DSM 20707 / BCRC 10618 / JCM 6326 / LMG 13178 / VPI 4198) OX=879 243 GN=Poras_1677 PE=4 SV=1
MTTVERYHDISMGHRVVGHESKCRHLHGHNYRIHFTCSAAQLDELGRVIDFGVIKELLCMWLEEHWDHKMMIYDEDPLLPSLRELVPEDLVVVPFNPTAEAMAHYLVETVAPAQLAGTGVTLVSCRVEETARCSATYSLPI

SEQ ID NO: 24192 - protein, 139 aa, Porphyromonas catoniae
  misc_feature (1)..(139): tr|L1NB77|L1NB77_9PORP Uncharacterized protein OS=Porph yromonas catoniae F0037 OX=1127696 GN=HMPREF9134_01365 PE=4 SV=1
MITAERYHDISMGHRVVGHENKCRHLHGHNYRIHFVCEADQLDALGRVIDFGLINDRLCQWLEEHWDHRLMIWQEDPLLPELQRIASEDLCIVPFNPTAEQIAQHLVHVVGPQCLAGTGIRLTSCRVDETRKCSATCRL

SEQ ID NO: 24193 - protein, 139 aa, Porphyromonas catoniae; identical to SEQ ID NO: 24192
  misc_feature (1)..(139): tr|Z4WTE3|Z4WTE3_9PORP 6-pyruvoyl tetrahydropterin synt hase OS=Porphyromonas catoniae ATCC 51270 OX=887901 GN= HMPREF0636_1584 PE=4 SV=1

SEQ ID NO: 24194 - protein, 152 aa, Porphyromonas circumdentaria
  misc_feature (1)..(152): tr|A0A1T4Q320|A0A1T4Q320_9PORP 6-pyruvoyltetrahydropter in/6-carboxytetrahydropterin synthase OS=Porphyromonas circumdentaria OX=29524 GN=SAMN02745171_01680 PE=4 SV=1
MEQKNNYQPLLTVERYHDISMGHRVVGHEHKCRHLHGHNYRIHFVCSAQQVDSLGRIIDFGIIKSLLCEWLEEHWDHRMMLWNEDPLLTSLLEVVPDDIVIVPFNPTAEAIATYLVEEVAPQLLQGTEVSLIACRVEETAKCSASYHRLPQL

SEQ ID NO: 24195 - protein, 139 aa, Porphyromonas crevioricanis
  misc_feature (1)..(139): tr|T1CHB6|T1CHB6_9PORP Queuosine biosynthesis QueD, PTP S-I OS=Porphyromonas crevioricanis JCM 15906 OX=1305617 GN=PORCRE_956 PE=4 SV=1
MITAERYHDISMGHRVVGHQHKCKHLHGHNYRIHFCCISDEIDELGMVIDFGTIKSTLCAYLEREWDHKFMIWQEDPLLEQLQAIVPQDIVIVPFNPTAENMARYLVEDIAPSLLQGSRVTLHSCRVEETAKCSATYSL

SEQ ID NO: 24196 - protein, 139 aa, Porphyromonas crevioricanis
  misc_feature (1)..(139): tr|A0A2X4SRJ4|A0A2X4SRJ4_9PORP Queuosine biosynthesis p rotein QueD OS=Porphyromonas crevioricanis OX=393921 GN =NCTC12858_00324 PE=4 SV=1
MITAERYHDISMGHRVVGHQHKCKHLHGHNYRIHFCCISDETDELGMVIDFGTIKSTLCAYLEREWDHKFMIWQEDPLLEQLQAIVPQDIVIVPFNPTAENMARYLVEDIAPSLLQGSRVTLHSCRVEETAKCSATYSL

SEQ ID NO: 24197 - protein, 153 aa, Porphyromonas endodontalis
  misc_feature (1)..(153): tr|C3JCW3|C3JCW3_POREA 6-pyruvoyl tetrahydropterin synt hase/QueD family protein OS=Porphyromonas endodontalis (strain ATCC 35406 / BCRC 14492 / JCM 8526 / NCTC 13058 / HG 370) OX=553175 GN=queD PE=4 SV=1
MKMNENKNRPSLLTAERYHDISMGHRVVGHESKCRHLHGHNYRIHFVCTAPELDALGRVIDFGVIKERLCLWVEEAWDHKMMLWQEDPLLPQLKEIAPEDLVIVPFNPTAEAMARYLVEEVAPHNLEGTGVTLVACTVEETAKCRASYRLLPC

SEQ ID NO: 24198 - protein, 139 aa, Porphyromonas gingivalis
  misc_feature (1)..(139): tr|A0A212GAW7|A0A212GAW7_PORGN 6-pyruvoyl tetrahydrobio pterin synthase OS=Porphyromonas gingivalis SJD12 OX=12 97567 GN=SJDPG12_03840 PE=4 SV=1
MITAERYHDISMGHRVVGHDHKCRHLHGHNYRIHFICSAPALDSIGRVVDFGVIKELLCQWLEDHWDHKMMLWEQDPLLPALRATVPDDLVAVPFNPTAENMAVYLTEVVGPMQLAGTGVTLIGCRVDETRKCSASYTL

SEQ ID NO: 24199 - protein, 139 aa, Porphyromonas gingivalis; identical to SEQ ID NO: 24198
  misc_feature (1)..(139): tr|A0A134DM60|A0A134DM60_PORGN 6-carboxytetrahydropteri n synthase OS=Porphyromonas gingivalis OX=837 GN=CBG53_ 06825 PE=4 SV=1

SEQ ID NO: 24200 - protein, 152 aa, Porphyromonas gingivicanis
  misc_feature (1)..(152): tr|A0A0A2G999|A0A0A2G999_9PORP 6-pyruvoyl tetrahydrobio pterin synthase OS=Porphyromonas gingivicanis OX=266762 GN=HQ36_00185 PE=4 SV=1
MEQTNNYQPLLTAERYHDISMGHRVVGHEHKCRHLHGHNYRIHFICSARQVDSLGRVIDFGVIKSLLCEWLEEHWDHKMMLWSEDPLLSSLSEIVPDDIVVVPFNPTAEAIASYLVEELGPQLLKGSEVSLIACRVEETAKCSASYHRLPQL

SEQ ID NO: 24201 - protein, 139 aa, Porphyromonas gulae
  misc_feature (1)..(139): tr|A0A0A2GIQ1|A0A0A2GIQ1_9PORP 6-pyruvoyl tetrahydrobio pterin synthase OS=Porphyromonas gulae OX=111105 GN=HR0 8_07115 PE=4 SV=1
MITAERYHDISMGHRVVGHDHKCRHLHGHNYRIHFICSAPALDSIGRVVDFGVIKELLCQWLEDHWDHKMMLWEQDPLLPALRETVPDDLVVVPFNPTAENMAVYLTEVIGPMQLADTGVTLIGCRVDETRKCSASYTL

SEQ ID NO: 24202 - protein, 139 aa, Porphyromonas gulae
  misc_feature (1)..(139): tr|A0A0A2FXR3|A0A0A2FXR3_9PORP 6-pyruvoyl tetrahydrobio pterin synthase OS=Porphyromonas gulae OX=111105 GN=HR1 5_00530 PE=4 SV=1
MITAERYHDISMGHRVVGHDHKCRHLHGHNYRIHFICSAPALDSIGRVVDFGVIKELLCQWLEEHWDHKMMLWEQDPLLPALRETVPDDLVVVPFNPTAENMAVYLTEVIGPMQLADTGVTLIGCRVDETRKCSSSYTL

SEQ ID NO: 24203 - protein, 146 aa, Porphyromonas levii
  misc_feature (1)..(146): tr|A0A4Y8WQH1|A0A4Y8WQH1_9PORP 6-carboxytetrahydropteri n synthase OS=Porphyromonas levii OX=28114 GN=E4P47_028 95 PE=4 SV=1
MIKKRIRAERYHDICCGHRVVNHESKCKHLHGHNYRFHFAIEAEAGLDELGRVLDFSVIKDTLCEWLEEHWDHKFLIYDRDPFLPTLKELSPESLVVVPFNPTAENIAEYMLSQIAPPLLAPYQCRLTEVRIEETRKCSVTAQLEE

SEQ ID NO: 24204 - protein, 139 aa, Porphyromonas loveana
  misc_feature (1)..(139): tr|A0A2U1F6G6|A0A2U1F6G6_9PORP 6-pyruvoyltetrahydropter in/6-carboxytetrahydropterin synthase OS=Porphyromonas loveana OX=1884669 GN=C7382_1182 PE=4 SV=1
MITAERYHDISMGHRVVGHDHKCRHLHGHNYRIHFICSAPSLDEIGRVVDFGVIKQLLCLWLENHWDHKMMLWEQDPLLPALRETVPDDLVVVPFNPTAENMAVYLTEVIGPKQLAGTGVTLVSCKVDETRKCSATYTI

SEQ ID NO: 24205 - protein, 140 aa, Porphyromonas macacae
  misc_feature (1)..(140): tr|A0A379EAP4|A0A379EAP4_9PORP Queuosine biosynthesis p rotein QueD OS=Porphyromonas macacae OX=28115 GN=NCTC11 632_01535 PE=4 SV=1
MIITAERYHDISMGHRVVGHEHKCRHLHGHNYRIHFSCTAAQLDDLGRIIDFSIIKEKLCIWLEDNWDHKMMIWEEDPMLPDLQKIAPDDLVIVPFNPTAEKIAQYLVEEIAPGQLKNTGVTLIECRVEETRKCAATYKL

SEQ ID NO: 24206 - protein, 139 aa, Porphyromonas macacae
  misc_feature (1)..(139): tr|A0A0A2G9P8|A0A0A2G9P8_9PORP 6-pyruvoyl tetrahydrobio pterin synthase OS=Porphyromonas macacae OX=28115 GN=HQ 47_08920 PE=4 SV=1
MITAERYHDISMGHRVVGHEHKCRHLHGHNYRIHFSCTAAQLDDLGRIIDFSIIKEKLCIWLEDNWDHKMMIWEEDPMLPDLQKIAPDDLVIVPFNPTAEKIAQYLVEEIAPGQLKNTGVTLIECRVEETRKCAATYKL

SEQ ID NO: 24207 - protein, 153 aa, Porphyromonas somerae
  misc_feature (1)..(153): tr|A0A134BEY6|A0A134BEY6_9PORP Uncharacterized protein OS=Porphyromonas somerae OX=322095 GN=HMPREF3185_00161 PE=4 SV=1
MGKMPYLCLANRIDMITVERYHDISMGHRVVGHESKCRHLHGHNYRIHFVCTAPELDGVGRVIDFSEIKERLCQWLEENWDHKMVLWSEDPLLPELRRLVPEDLCVVPFNPTAEQIAMHLVSVVGPQQLEGTGITLVACRVEETRKCSASYQL

SEQ ID NO: 24208 - protein, 139 aa, Porphyromonas sp.
  misc_feature (1)..(139): tr|A0A0A2DPR1|A0A0A2DPR1_9PORP 6-pyruvoyl tetrahydrobio pterin synthase OS=Porphyromonas sp. COT-239 OH1446 OX= 1515613 GN=HQ37_08145 PE=4 SV=1
MTTVQRYHDISMGHRVVGHENKCRHLHGHNYRIHFTCTAEQLDALGRVIDFGVIKERLCLWLEEHWDHRMMLWSEDPLLSELRRIAAEDLIVVPFNPTAEQMAAYLLHEVGPRQLVGTGVRLVSVSVEETRKCSAACAL

SEQ ID NO: 24209 - protein, 110 aa, Porphyromonas sp.; identical to SEQ ID NO: 23600
  misc_feature (1)..(110): tr|A0A073ILW9|A0A073ILW9_9PORP 6-carboxy-5,6,7,8-tetrah ydropterin synthase OS=Porphyromonas sp. 31_2 OX=658663 GN=HMPREF1002_00609 PE=3 SV=1

SEQ ID NO: 24210 - protein, 141 aa, Porphyromonas uenonis
  misc_feature (1)..(141): tr|C2M9Z5|C2M9Z5_9PORP 6-pyruvoyl tetrahydropterin synt hase/QueD family protein OS=Porphyromonas uenonis 60-3 OX=596327 GN=queD PE=4 SV=1
MTTVERYHDISMGHRVVGHESKCRHLHGHNYRIHFTCSAAQLDELGRVIDFGVIKELLCMWLEEHWDHKMMIYDEDPLLPSLRELVPEDLVVVPFNPTAEAMAHYLVETIAPAQLAGTGVTLVSCRVEETARCSATYSLPI

SEQ ID NO: 24211 - protein, 57 aa, Porticoccaceae bacterium
  misc_feature (1)..(57): tr|A0A2D5R4P8|A0A2D5R4P8_9GAMM 6-carboxytetrahydropteri n synthase QueD (Fragment) OS=Porticoccaceae bacterium OX=2026782 GN=CMK24_01215 PE=4 SV=1
MQIYKEFSIEAAHRLPNVPEGHKCARLHGHSFQVTIYVEGPVGAETGWIMDFGDIKA

SEQ ID NO: 24212 - protein, 118 aa, Porticoccaceae bacterium
  misc_feature (1)..(118): tr|A0A3B9AA08|A0A3B9AA08_9GAMM 6-carboxy-5,6,7,8-tetrah ydropterin synthase OS=Porticoccaceae bacterium OX=2026 782 GN=queD PE=3 SV=1
MEIFKSFTFEAAHMLPHVADNHKCKRLHGHSFHVTVYVSGPVKDRSGWVMDFGDIKQACEPIYQALDHRYLNDIPGLENPTSEHIARWIWVKLLPDLPMLNKVEVRETCTSGCVYQGE

SEQ ID NO: 24213 - protein, 118 aa, Porticoccus sp.
  misc_feature (1)..(118): tr|A0A2E5C8M9|A0A2E5C8M9_9GAMM 6-carboxy-5,6,7,8-tetrah ydropterin synthase OS=Porticoccus sp. OX=2024853 GN=qu eD PE=3 SV=1
MEIFKEFTFEAAHLLPNVAEGHKCGRLHGHSYHIRLYLSGTVGDKTGWVMDFGDLKDYFKPVYDQLDHHYLNEIDGLENPTSENIARWIWARLKPTLPLLSKIEVRETCTSGCIYCGD

SEQ ID NO: 24214 - protein, 118 aa, Porticoccus sp.
  misc_feature (1)..(118): tr|A0A2G2QWE3|A0A2G2QWE3_9GAMM 6-carboxy-5,6,7,8-tetrah ydropterin synthase OS=Porticoccus sp. OX=2024853 GN=qu eD PE=3 SV=1
MEIFKEFTFEAAHLLPNVAEGHKCGRLHGHSYHIRLYLDGTVGDKTGWVMDFGDLKDYFKPVYDQLDHHYLNEIDGLENPTSENIARWIWARLKPTLPLLSKIEVRETCTSGCIYCGD

SEQ ID NO: 24215 - protein, 147 aa, Pradoshia eiseniae
  misc_feature (1)..(147): tr|A0A2S7N044|A0A2S7N044_9BACI 6-carboxy-5,6,7,8-tetrah ydropterin synthase OS=Pradoshia eiseniae OX=2064768 GN =CYL18_08755 PE=3 SV=1
MFILKSEIQFDTAHFLSGYTGKCANLHGHRYRVIAKVASNTLHTDGQLRGMVEDFGTIKQALKKIEKLFDHKLLIENNDEGREVARQLKEGPTDFDLYMVPYRPTAEEMSRHIYQLIKEMGVQVCEVEVFETPANSCSYSEGPVCSE

SEQ ID NO: 24216 - protein, 120 aa, Pragia fontium
  misc_feature (1)..(120): tr|A0A0G3CNR1|A0A0G3CNR1_9GAMM 6-carboxy-5,6,7,8-tetrah ydropterin synthase OS=Pragia fontium OX=82985 GN=queD PE=3 SV=1
MVTTLFKDFTFEAAHHLPHVPTGHKCGRLHGHSFMVRVEVTGEVDPHTGWVIDFSEIKAAFKPILDRLDHYYLNDIAGLENPTSEVLAQWIWQQLKPQLPILSAIMVKETCTAGCIYRGE

SEQ ID NO: 24217 - protein, 120 aa, Pragia sp.
  misc_feature (1)..(120): tr|A0A411WLL1|A0A411WLL1_9GAMM 6-carboxy-5,6,7,8-tetrah ydropterin synthase OS=Pragia sp. CF-458 OX=2498113 GN= queD PE=3 SV=1
MVTTLFKDFTFEAAHRLPNVPEGHKCSRLHGHSFVVRIEVTGEVNPITGWVMDFSEIKAAFKPILDRLDHYYLNDISGLENPTSEVLAHWIWQQLKPGLPLLSGVRVKETCSAGCVYKGE

SEQ ID NO: 24218 - protein, 229 aa, Prauserella endophytica
  misc_feature (1)..(229): tr|A0A4U2IUS2|A0A4U2IUS2_9PSEU Uncharacterized protein OS=Prauserella endophytica OX=1592324 GN=FCN18_37045 PE =4 SV=1
MKATEEKCVADGQVTISQSFGFSASHELRQLPASHKCRRNHGHNYTVTASALVHDDAPGDLSPLGDYLAATFDHRLLNEQVTFHPTSELLAAHLAEWFRDNMESAMPITLVEMVVSETATTSARCDGVTGEVTISKTFKTSHGDVALVLGADGLNEVGFITDFGDLKPFGTYLQASDADAGLRAAGPALVAHLAGWFVDNVEPEIRGRLVSVRVDSGTTTGLWERGDAS

SEQ ID NO: 24219 - protein, 132 aa, Prauserella muralis
  misc_feature (1)..(132): tr|A0A2V4AJZ6|A0A2V4AJZ6_9PSEU 6-pyruvoyl-tetrahydropte rin synthase OS=Prauserella muralis OX=588067 GN=BAY60_ 30640 PE=4 SV=1
MFSITVRDHIMVAHSFRGEVFGPAQRLHGATFVVDATFRRAELDADNIVVDIGLATEQLRAVLAELNYRNLDDEPAFAGTNTSTEYLAKVIADRLADRVHAGSLGEGARALAGLAVTLHESPVAWASYERPL

SEQ ID NO: 24220 - protein, 122 aa, Prauserella shujinwangii
  misc_feature (1)..(122): tr|A0A2T0M300|A0A2T0M300_9PSEU 6-pyruvoyl tetrahydropte rin synthase-like protein OS=Prauserella shujinwangii O X=1453103 GN=B0I33_101253 PE=4 SV=1
MVAHSFRGEVFGPAQRLHGATFVVDATFTRAELDADNIVVDIGLATEQLHDVLGEINYRNLDEVPALAGVNTTTEFLARYIADRLAERVRSGALGEGALGLASIRVTLHESHVASGSYERAL

SEQ ID NO: 24221 - protein, 169 aa, Prauserella sp.
  misc_feature (1)..(169): tr|A0A318LRD4|A0A318LRD4_9PSEU 6-pyruvoyl tetrahydrobio pterin synthase OS=Prauserella sp. YIM 121212 OX=147750 6 GN=BA062_07070 PE=4 SV=1
MDDRVPTAHQITVEHSFETAHRLPHLGGKCTSLHGHSWRVAVSVIAPRLSDEATVVEFSALKAGIRHWIDTHLDHGTMLGVQDALVEPLAAAECKVFRFGTGHACLAGEAEALAADLMWPTVEAVAVLVRRMSQVVLAGLPCAAGARVGRVFVRETDLNSATTGPLDGS

SEQ ID NO: 24222 - protein, 187 aa, Prauserella sp.
  misc_feature (1)..(187): tr|A0A365ZHM6|A0A365ZHM6_9PSEU 6-pyruvoyl tetrahydrobio pterin synthase OS=Prauserella sp. PE36 OX=1504709 GN=D I005_18295 PE=4 SV=1
MHGSATTDHATAYLANLVTDDHAPTAHQITIEHTFETAHRLPHLGGKCTSLHGHSWRVAVPVIAPTLSDDVTVVEFGALKAGVRQWIDTYLDHGTMLGIHDPLAVHLAVAKCKVFRFGADRYTTVEDAELLAADLAWPTVEAVAVLLRRVSQAVLATLPCAPDARVGRVFVRETHLNAATYGPVDAL

SEQ ID NO: 24223 - protein, 141 aa, Prevotella bivia
  misc_feature (1)..(141): tr|A0A096ACV1|A0A096ACV1_9BACT 6-pyruvoyl tetrahydrobio pterin synthase OS=Prevotella bivia DNF00320 OX=1401068 GN=HMPREF0647_06970 PE=4 SV=1
MTRIIIERYHDISCGHRVVGHENKCKHLHGHNYRFTFTLEADKLDDLGRVIDFGIVKTLLCQWLEDHYDHKFLMWQDDPFLPTLLELSQESMVVVPFNPTAENIAQHFLVNIAPTLLHGTGVRLIQCKLEETRKCSATVML

SEQ ID NO: 24224 - protein, 141 aa, Prevotella bivia
  misc_feature (1)..(141): tr|A0A137STH1|A0A137STH1_9BACT Putative queuosine biosy nthesis protein QueD OS=Prevotella bivia OX=28125 GN=HM PREF3202_01585 PE=4 SV=1
MTRIIIERYHDISCGHRVVGHENKCKHLHGHNYRFTFTLEADKLDDLGRVIDFGVVKTLLCQWLEDHYDHKFLMWQDDPFLPTLLELSQESMVVVPFNPTAENIAQHFLVNIAPTLLHGTGVRLIQCKLEETRKCSATVML

SEQ ID NO: 24225 - protein, 110 aa, Prevotella bryantii
  misc_feature (1)..(110): tr|D8DYC2|D8DYC2_PREBR 6-carboxy-5,6,7,8-tetrahydropter in synthase OS=Prevotella bryantii B14 OX=752555 GN=PBR _1743 PE=3 SV=1
MYYIEKSLEVSASHHLNLSYESKCSNVHGHNWHIKVYCKSKTLNKDGMVEDFGAIKQRIHGVLDHADLNEVLPFNPTAENIARWITEQIPTCYKATVQESDNNIATYEED

SEQ ID NO: 24226 - protein, 110 aa, Prevotella bryantii; identical to SEQ ID NO: 24225
  misc_feature (1)..(110): tr|A0A255STY3|A0A255STY3_PREBR 6-carboxy-5,6,7,8-tetrah ydropterin synthase OS=Prevotella bryantii OX=77095 GN= CIK91_03735 PE=3 SV=1

SEQ ID NO: 24227 - protein, 111 aa, Prevotella buccae
  misc_feature (1)..(111): tr|D3HV36|D3HV36_9BACT 6-carboxy-5,6,7,8-tetrahydropter in synthase OS=Prevotella buccae D17 OX=575611 GN=queD PE=3 SV=1
MFYVQKTLEISASHHLSLSYESKCTRIHGHNWKITVFCKARELNADGMVVDFTLIKQKIMEPLDHADLNEVLPFNPTAENIARWVTEQIPLCYKAVVQESEGNIAIYEKDE

SEQ ID NO: 24228 - protein, 111 aa, Prevotella buccae
  misc_feature (1)..(111): tr|E6K735|E6K735_9BACT 6-carboxy-5,6,7,8-tetrahydropter in synthase OS=Prevotella buccae ATCC 33574 OX=873513 G N=queD PE=3 SV=1
MFYVQKTLEISASHHLSLSYESKCTRIHGHNWKITVFCKARELNADGMVVDFTLIKQKIKEPLDHADLNEVLPFNPTAENIARWVTEQIPLCYKAVVQESEGNIAIYEKDE

SEQ ID NO: 24229 - protein, 141 aa, Prevotella buccalis
  misc_feature (1)..(141): tr|D1W7N3|D1W7N3_9BACT Putative queuosine biosynthesis protein QueD OS=Prevotella buccalis ATCC 35310 OX=67919 0 GN=HMPREF0650_1928 PE=4 SV=1
MKKEPMRFFQRLLVTSRNMIYCVSKRMEISAAHRLSLSYESKCQCLHGHNWIITVYLFKKDKLNADGMVFDFTHIKKAIHDQLDHAYINDVIPYNPTAENIARWVVNQFDECYKAEVQESEGNVAQAIDETKIVGIENLVM

SEQ ID NO: 24230 - protein, 123 aa, Prevotella colorans
  misc_feature (1)..(123): tr|A0A2U0UIG2|A0A2U0UIG2_9BACT 6-pyruvoyltetrahydropter in/6-carboxytetrahydropterin synthase OS=Prevotella col orans OX=1703337 GN=C7379_10444 PE=4 SV=1
MIYCISKRMEVAAAHKLELSYESKCRRLHGHNYIITVYMVCRDQLNKDGMVYDFKHVKDRVHDYLDHGYLNELLPFNTTAENMARWIVEQFAECYKAVVQESEGNVAQAVDETKIKGIENLVM

SEQ ID NO: 24231 - protein, 188 aa, Prevotella copri
  misc_feature (1)..(188): tr|D1PDL9|D1PDL9_9BACT Uncharacterized protein OS=Prevo tella copri DSM 18205 OX=537011 GN=PREVCOP_05309 PE=4 S V=1
MRSITTFDLQYAHRFYGFQGEAQYLHGHTGTLTIEVEDTVEEGVNMVYPCNEIQKVAWSLLKNFDHALVLREDDPLLPAILDVYEKQGIKNGHPQNKMKGEAFKTELATAYPDARLVVTKETMTVEGMIKIVYDLLKDKLNIAKITFTSGVNAASAEFTTKNNIDRCPLCGVALNEDGVCPKCGYRKK

SEQ ID NO: 24232 - protein, 121 aa, Prevotella copri
  misc_feature (1)..(121): tr|A0A229I9U3|A0A229I9U3_9BACT 6-carboxytetrahydropteri n synthase QueD OS=Prevotella copri OX=165179 GN=CFT61_ 00080 PE=4 SV=1
MYFISKKLEISAAHSLTLSYESKCSSLHGHNWQIELFFVGRELNQDGMVIDFTHVKKAVHGKMDHANLNEVFDFNPTAENIGRWLVDLFPECYKATVQESFGNTAVVVDEEKIRGIEHLVP

SEQ ID NO: 24233 - protein, 111 aa, Prevotella maculosa
  misc_feature (1)..(111): tr|H1HIZ1|H1HIZ1_9BACT 6-carboxy-5,6,7,8-tetrahydropter in synthase OS=Prevotella maculosa OT 289 OX=999422 GN= HMPREF9944_00135 PE=3 SV=1
MYYIQKSFEVSASHHLKLSYKSKCTNVHGHNWHITVYCKARELNKDGMVADFSEVKRLIHGRLDHADLNKVLPFNPTAENIARWITEQIPTCYKATVQESDGNIATYEEDV

SEQ ID NO: 24234 - protein, 109 aa, Prevotella multisaccharivorax
  misc_feature (1)..(109): tr|F8NB12|F8NB12_9BACT Uncharacterized protein OS=Prevo tella multisaccharivorax DSM 17128 OX=688246 GN=Premu_2 566 PE=4 SV=1
MYYIEKSFEISACHHLILDHGSKCENIHGHNWQVTVYCKSEELDNNGMVVDFTLIKNKIHGRLDHQDLNQKLDFNPTAENIAKWIVDEIPHCYKARVAETASNVAIYER

SEQ ID NO: 24235 - protein, 111 aa, Prevotella oris
  misc_feature (1)..(111): tr|D7ND71|D7ND71_9BACT 6-carboxy-5,6,7,8-tetrahydropter in synthase OS=Prevotella oris C735 OX=563008 GN=HMPREF 0665_01487 PE=3 SV=1
MYYIQKSFEVSASHHLTLSYKSKCSNVHGHNWHITVFCKARELNKDGMVADFSEVKRLIHGRLDHADINKVLPFNPTAENIARWITEQIPTYYKATVQESDGNIATYEEDV

SEQ ID NO: 24236 - protein, 111 aa, Prevotella oris
  misc_feature (1)..(111): tr|A0A448L9Y7|A0A448L9Y7_9BACT 6-carboxy-5,6,7,8-tetrah ydropterin synthase OS=Prevotella oris OX=28135 GN=queD PE=3 SV=1
MYYIQKSFEVSASHHLTLSYKSKCSNVHGHNWHITVFCKARELNKDGMVADFSEVKRLIHGRLDHADINKVLPFNPTAENIARWITEQIPTCYKATVQESDGNIATYEEDV

SEQ ID NO: 24237 - protein, 111 aa, Prevotella salivae
  misc_feature (1)..(111): tr|E6MSV7|E6MSV7_9BACT 6-carboxy-5,6,7,8-tetrahydropter in synthase OS=Prevotella salivae DSM 15606 OX=888832 G N=ygcM PE=3 SV=1
MYYIKKSFEISASHHLKLSYQSKCCNVHGHNWHITIYCKSRELNKDGMVADFSEVKRLIHDRLDHADLNKVLPFNPTAENIAHWITEQIPTCYKAEVQESEGNVAIYEEDL

SEQ ID NO: 24238 - protein, 111 aa, Prevotella salivae
  misc_feature (1)..(111): tr|U2LB67|U2LB67_9BACT 6-carboxy-5,6,7,8-tetrahydropter in synthase OS=Prevotella salivae F0493 OX=1395125 GN=q ueD PE=3 SV=1
MYYIKKSFEISASHHLKLSYQSKCSNVHGHNWHITIYCKSRELNKDGMVADFSEVKRLIHDRLDHADLNKVLPFNPTAENIAHWITKQIPTCYKAEVQESEGNVAIYEEDL

SEQ ID NO: 24239 - protein, 121 aa, Prevotella sp.
  misc_feature (1)..(121): tr|A0A414BLM8|A0A414BLM8_9BACT 6-carboxytetrahydropteri n synthase OS=Prevotella sp. AM34-19LB OX=2292364 GN=DW 830_09245 PE=4 SV=1
MYFISKKLEISAAHSLALSYESKCSSLHGHNWQIELFFVGRELNQDGMVIDFTHVKKAVHGKMDHANLNEVFDFNPTAENIGRWLVNLFPECYKATVQESFGNTAVVVDEEKIRGIEHLVP

SEQ ID NO: 24240 - protein, 116 aa, Prevotella sp.
  misc_feature (1)..(116): tr|R7HP35|R7HP35_9BACT 6-carboxy-5,6,7,8-tetrahydropter in synthase OS=Prevotella sp. CAG:279 OX=1262924 GN=BN5 85_01130 PE=3 SV=1
MYYVSKRIEIAGCHSLKLDYESKCSQMHGHNWIVTIHCRARSLNHNGMVCDFTHIKEKIHGYLDHGNFNELLPFNPTAENIAKWICDQIPECYKVSVQESEGNTATYTTDDDEQDL

SEQ ID NO: 24241 - protein, 70 aa, Prevotella timonensis
  misc_feature (1)..(70): tr|D1W1T6|D1W1T6_9BACT Uncharacterized protein (Fragmen t) OS=Prevotella timonensis CRIS 5C-B1 OX=679189 GN=HMP REF9019_0443 PE=4 SV=1
MIYCVSKRMEISAAHRLSLSYESKCQCLHGHNWIITVYLFKKDKLNGDGMVFDFTHIKKAIHDQLDHAYI

SEQ ID NO: 24242 - protein, 122 aa, Prevotella timonensis
  misc_feature (1)..(122): tr|A0A2K0XNN9|A0A2K0XNN9_9BACT 6-carboxy-5,6,7,8-tetrah ydropterin synthase OS=Prevotella timonensis OX=386414 GN=BFS16_03405 PE=3 SV=1
MYCVSKRMEISAAHRLSLSYESKCQCLHGHNWIITVYLFKKDKLNGDGMVFDFTHIKKAIHDQLDHAYINDIIPYNPTAENIARWVVNQFDECYKAEVRESEGNVAQAIDETKIVGIENLVM

SEQ ID NO: 24243 - protein, 117 aa, Prevotellaceae bacterium
  misc_feature (1)..(117): tr|A0A316NLU1|A0A316NLU1_9BACT 6-carboxy-5,6,7,8-tetrah ydropterin synthase OS=Prevotellaceae bacterium OX=2049 047 GN=DBY24_11245 PE=3 SV=1
MYYVKKRLEVAMAHQLTLPYESKCTRLHGHNAIITVYCCSEKLNESGMVVDFKKIKNIVEDMLDHRVVNDIVTFNPTAENLAKYICESIDKCYKVTFQETEGNVACYIKDSAKDVEF

SEQ ID NO: 24244 - protein, 152 aa, Pricia antarctica
  misc_feature (1)..(152): tr|A0A1G7H9P0|A0A1G7H9P0_9FLAO 6-pyruvoyltetrahydropter in/6-carboxytetrahydropterin synthase OS=Pricia antarct ica OX=641691 GN=SAMN05421636_10973 PE=4 SV=1
MGKIRITKQFNFETGHALYGYDGKCRNVHGHSYKLSVTVIGTPISDTSNVKLGMVIDFGDLKKIVKEEIVDQFDHATVFNKNTPHVELAKELIDRNHQVILADYQPTSENMVIDFAVKIKARLPENIQLYSLKLQETETSYAEWYAVDNTPL

SEQ ID NO: 24245 - protein, 135 aa, Pricia antarctica
  misc_feature (1)..(135): tr|A0A1G7GCB1|A0A1G7GCB1_9FLAO 6-carboxy-5,6,7,8-tetrah ydropterin synthase OS=Pricia antarctica OX=641691 GN=S AMN05421636_10870 PE=3 SV=1
MKVKVSRKAHFNAAHRLYRKDWSDEKNDAVFGKCNNPNFHGHNYELIVSVYGEIDPETGFVMDMKVLKDLIKEKIEDALDHKNLNVEVPEFKDLNPTAENISVVIWNNLRPYIEERHELEVQLYETPRNFVTFNG

SEQ ID NO: 24246 - protein, 156 aa, Prochlorococcus marinus
  misc_feature (1)..(156): tr|A0A0A1ZH99|A0A0A1ZH99_PROMR Queuosine biosynthesis Q ueD OS=Prochlorococcus marinus str. GP2 OX=59925 GN=EU9 1_0075 PE=4 SV=1
MNIHSIKFSCSKSYEDFPCSHRQWRHQGHCRFVHGYSRSFTFWFTAKKLDHNGFVVDFSSLKPLENRLKEQFDHTFLINKDDPLLNYWEKLHDLDALDLRIMDNVGMEFTSELIWRWANEYLQDKDKGRTCCWKTESKENKSNKASFEEIPDWFKS

SEQ ID NO: 24247 - protein, 157 aa, Prochlorococcus marinus
  misc_feature (1)..(157): tr|A0A318R5B0|A0A318R5B0_PROMR 6-pyruvoyl tetrahydropte rin synthase OS=Prochlorococcus marinus XMU1408 OX=2213 228 GN=DNJ73_03130 PE=4 SV=1
MTIKDIPFKCSKHFRDYPCSHRQWRHKGHCRYVHGYSRSFTFWFASNELDENGFVVDFSSLKALEEKLRGYFDHTFLVNFDDPLLETWKKLHSEEALDLRVMDNVGMESTAKLIWGWANDLLFSREKGRSCCFKAIAHENDINSASYNLWPDWFRPI

SEQ ID NO: 24248 - protein, 128 aa, Prochlorococcus sp.
  misc_feature (1)..(128): tr|A0A0A2CHW4|A0A0A2CHW4_9PROC Queuosine biosynthesis Q ueD OS=Prochlorococcus sp. MIT 0701 OX=1499502 GN=EV12_ 2952 PE=4 SV=1
MHGYSRSFTFWFAAQELDPYGFVVDFSSLRPLEQQLNNQFDHTFLANADDPLLPQWQSLNDQGAIDLRVMDNVGMESSAALVWQWANALLLDRDAGRSCCWRVEARENEANAACYEAIPQWYATKTML

SEQ ID NO: 24249 - protein, 308 aa, Prochlorococcus sp.
  misc_feature (1)..(308): tr|A0A089P7Z0|A0A089P7Z0_9PROC 6-pyruvoyl tetrahydrobio pterin synthase OS=Prochlorococcus sp. MIT 0801 OX=1501 269 GN=EW15_0194 PE=4 SV=1
MEAITSNFPHGEGRTCVITRRACFSASHLYRLPELSDDDNSALFGPCSIAPGHGHNYELIVTMEGDLNKYGMVLNLSDVKHAIKNEVTSQLDFRFLNDTWPEFDLSKPEGCLPTTESLVRIIWERLKSHLPLKSLRLYENPKLWADYQGNAMDAYLTVQTHFSAAHRLAREDLPQTENEKIFGKCARPNGHGHNYLVDITVKGKINPRTGMICDLSALNSLINDLVVEPFDHTFLNKDIPYFANCVPTAENIALHISDKLTNPINAIGANLYKIKLQESPNNAAEVYANVPESTSDTKDSKNQVGLLR

SEQ ID NO: 24250 - protein, 128 aa, Prochlorothrix hollandica
  misc_feature (1)..(128): tr|A0A0M2PY42|A0A0M2PY42_PROHO 6-carboxy-5,6,7,8-tetrah ydropterin synthase OS=Prochlorothrix hollandica PCC 90 06 = CALU 1027 OX=317619 GN=PROH_03020 PE=3 SV=1
MPWKVTTEFSFSAAHCIKDYDGPCGRMHGHTYTVRIEAHAHQLQGSEFCPHSVMVADFKTLRWAKRDVDKGGLDHCVLNDVMPPEYETTAEMIAKFIFDRTQAKLPPGITLKVGVSESPNSWAEYWED

SEQ ID NO: 24251 - protein, 271 aa, Prochlorothrix hollandica
  misc_feature (1)..(271): tr|A0A0M2PXY8|A0A0M2PXY8_PROHO 6-pyruvoyl tetrahydropte rin synthase OS=Prochlorothrix hollandica PCC 9006 = CA LU 1027 OX=317619 GN=PROH_12640 PE=4 SV=1
MKCIINRRAQFSASHRYWLPELSEAENQDRFGACARAPGHGHNYVLYVAMEGELDQYGMVLNLSDVKTVIQREIIDPLDFSHLNDTWPELQTTLPTTEHLARSMWQRLSPHLPLVNLQLFEHPQLWADYQGHDMEASLTLSTHFSAAHRLALTHLSYEENCEIYGKCARPHGHGHNYHLEVTVTGDIDPRTGMIADLSKLQHIIKSQVVEPFDHTFLNKDIPYFAEVVPTAENIAVHIRDLLQAPLAVTGARLHKVKLIESPNNSAEVYGS

SEQ ID NO: 24252 - protein, 198 aa, Prolinoborus fasciculus; identical to SEQ ID NO: 16948
  misc_feature (1)..(198): tr|A0A2U3MHL1|A0A2U3MHL1_9NEIS 6-pyruvoyl tetrahydropte rin synthase OS=Prolinoborus fasciculus OX=1056810 GN=P FCIP103579_1315 PE=4 SV=1

SEQ ID NO: 24253 - protein, 190 aa, Prolixibacter denitrificans
  misc_feature (1)..(190): tr|A0A2P8CG87|A0A2P8CG87_9BACT 6-pyruvoyltetrahydropter in/6-carboxytetrahydropterin synthase OS=Prolixibacter denitrificans OX=1541063 GN=CLV93_103407 PE=4 SV=1
MIIRKKFRFEGAHIVRNCSSKLCRENIHGHSYEVEVFIKSNKLDKGFMVLDFILLSKVGEFINSFDHAYSLWQGEKPEIKDAVYQINQRVAEIPVSPSAEGYALMFLYVIDKIIRNTERKNGEGDIQLQSVRVHETQTGYAEAFTEDFALVDFTLDDIKLSEGIRTEWDDMDWWEELKQQKIFKNTHLEN

SEQ ID NO: 24254 - protein, 149 aa, Prolixibacteraceae bacterium
  misc_feature (1)..(149): tr|A0A399T1Y5|A0A399T1Y5_9BACT 6-carboxytetrahydropteri n synthase OS=Prolixibacteraceae bacterium XSD2 OX=2305 463 GN=D1614_03655 PE=4 SV=1
MPRIRVTKRFDFEMAHALLAYNGVCKNVHGHTYELEVTLIGDAKNEPGHPEDGMVMDFGQLKNIVNTKIIQFFDHALVINALTPAPQKEALALTTERLTVLGFQPTSENLVTYFAGILQQEIPSNVSLFSLRLYETKTSFAEWFASDNQ

SEQ ID NO: 24255 - protein, 149 aa, Prolixibacteraceae bacterium
  misc_feature (1)..(149): tr|A0A350YYR3|A0A350YYR3_9BACT 6-carboxy-5,6,7,8-tetrah ydropterin synthase OS=Prolixibacteraceae bacterium OX= 2053594 GN=queD PE=3 SV=1
MTKIRVTKRFHFEMAHALHGYDGLCRNIHGHSYNLEITIYGNVFRSPGDPKDGMVMDFHELKMLVKTHVTEKLDHALMVNRLIDHRHMEALQLTTSRILVVDFQPTTENILQYIADMLKPLLPEGVTLYSIRLYETITSFAEWVASDNP

SEQ ID NO: 24256 - protein, 306 aa, Propionibacteriaceae bacterium
  misc_feature (1)..(306): tr|A0A2E0EB30|A0A2E0EB30_9ACTN 6-pyruvoyl tetrahydropte rin synthase OS=Propionibacteriaceae bacterium OX=20213 80 GN=CMK50_05775 PE=4 SV=1
MTNAITTAPHGQGRGCVITRRACFSASHRYWLPELHADDNAARFGSCAMAPGHGHNYELIVSMAGGLDANGMVLNLSEVKHAIRSQVTEQLDFRFLNEAWPEFDVTSSEGCLPTTEALVRIIWSRLANQLPLVALRLYESSGLWADYLGQAMDAYLTIRTHFAAAHRLARPELSQEENEQIYGKCARPHGHGHNYLVDVTVRGTIDPRTGMVCDLAALQRLVSDLVVEPFDHTFLNKDVAHFSECVPTAENIALHIVDRLTSPVRAIGAQLHKVRLQESPNNAAEVYAEAPALNAMPEAMHCVVNG

SEQ ID NO: 24257 - protein, 126 aa, Propioniciclava tarda
  misc_feature (1)..(126): tr|A0A4Q9KQ87|A0A4Q9KQ87_9ACTN 6-carboxytetrahydropteri n synthase OS=Propioniciclava tarda OX=433330 GN=ET996_ 00680 PE=4 SV=1
MYTLTVRDHVMLAHSLPDPAFGPAQGLHGVTYVVEASWSASELTEQNIVLDIGVATEALRGVLAPLAYANLDERPEFAGVLTTTEFLCRWVADQLAEAVVAGNQSGLTVTLREHPDAWASYARALP

SEQ ID NO: 24258 - protein, 126 aa, Propionispira arboris
  misc_feature (1)..(126): tr|A0A1H6WDW9|A0A1H6WDW9_9FIRM 6-carboxy-5,6,7,8-tetrah ydropterin synthase OS=Propionispira arboris OX=84035 G N=SAMN05660742_103248 PE=3 SV=1
MFELTVIVEFEAAHRIVGYPGKCNRLHGHNWSIEVSVVGNKLNELGMLVDFKELKQEVNKIMDRLDHQYLNELPIFQENNNPTAENIAIYIYNELENSPLFEANSKVKTVKVWESQKSAVSYSKGE

SEQ ID NO: 24259 - protein, 127 aa, Propionispora hippei
  misc_feature (1)..(127): tr|A0A1M6AV12|A0A1M6AV12_9FIRM 6-carboxy-5,6,7,8-tetrah ydropterin synthase OS=Propionispora hippei DSM 15287 O X=1123003 GN=SAMN02745170_00300 PE=3 SV=1
MFELTIIVDFEAAHHIPDYPGKCCRLHGHNWKVEVSVKGKQLNTLGMLIDFKELKAEVQVIIGKLDHFYLNEIEPFCRISPTAENIARYIYDELANHAGLAETVTVASVKVWESAHSAVRYSGEEQQ

SEQ ID NO: 24260 - protein, 130 aa, Propionispora sp.
  misc_feature (1)..(130): tr|A0A0K8JD41|A0A0K8JD41_9FIRM 6-carboxy-5,6,7,8-tetrah ydropterin synthase OS=Propionispora sp. 2/2-37 OX=1677 858 GN=P22_1303 PE=3 SV=1
MTGFTIKATKIFTFDAAHFLVGHKGKCASTHGHTYRLEVTVSRKKQAAIAGGSSDSMVIDFTDLKKIVHEEIIDQVDHKMLNDVYDFRTTSENLAVHFFRVLTGRLDLLDIQVERIKLWESASSYVEVET

SEQ ID NO: 24261 - protein, 127 aa, Propionispora vibrioides
  misc_feature (1)..(127): tr|A0A1H8NK87|A0A1H8NK87_9FIRM 6-carboxy-5,6,7,8-tetrah ydropterin synthase OS=Propionispora vibrioides OX=1129 03 GN=SAMN04490178_101131 PE=3 SV=1
MFELTIIVDFEAAHHIPDYPGKCCRLHGHNWKVEVSVKGNQLNTLGMLIDFKELKAEVQAIIGKLDHFYLNEIEPFCRISPTAENIAKYIYDELANHAGLAETVTVASVKVWESAHSAVSYSGEEQQ

SEQ ID NO: 24262 - protein, 151 aa, Propionivibrio dicarboxylicus
  misc_feature (1)..(151): tr|A0A1G8EBJ5|A0A1G8EBJ5_9RHOO 6-pyruvoyltetrahydropter in/6-carboxytetrahydropterin synthase OS=Propionivibrio dicarboxylicus OX=83767 GN=SAMN05660652_02090 PE=4 SV= 1
MFITRRLEFDAGHRIPDHKSQCRHLHGHRYAIEITLGGDIIQQAGNAANGMVMDFSEVKALAKTHLVDLWDHAFLAFAGDTAIVEFLGSLPGHKTVILDCVPTAENLAEKAFAILDAVYRDSFGNHLHLERIRLYETPNCWADAVRKAPIA

SEQ ID NO: 24263 - protein, 121 aa, Prosthecobacter debontii
  misc_feature (1)..(121): tr|A0A1T4YRJ5|A0A1T4YRJ5_9BACT 6-carboxy-5,6,7,8-tetrah ydropterin synthase OS=Prosthecobacter debontii OX=4846 7 GN=SAMN02745166_04046 PE=3 SV=1
MRCRIIKDFRFEAAQTLPNLPDSHKCTRMHGHSFKVEIAVEGEVDPHIGWVYDHAEISKAMKPLVDRMDHAYLNEIEGLENPTIENMAAWLWRKLAPQLPGLCEIVIYETPSARCVFRGEF

SEQ ID NO: 24264 - protein, 121 aa, Prosthecobacter fusiformis
  misc_feature (1)..(121): tr|A0A4R7S7K4|A0A4R7S7K4_9BACT 6-carboxy-5,6,7,8-tetrah ydropterin synthase OS=Prosthecobacter fusiformis OX=48 464 GN=EI77_01665 PE=3 SV=1
MRCRIIKDFRFEAAQTLPNLPGHHKCTQMHGHSFKVEIAIEGEVDPHIGWVYDHAEISKAMKPLLDRMDHAYLNEIEGLENPTIENMAAWLWRKLSPQLPGLCEIVIYETPTARCVFRGEF

SEQ ID NO: 24265 - protein, 144 aa, Prosthecochloris aestuarii
  misc_feature (1)..(144): tr|B4S932|B4S932_PROA2 Uncharacterized protein OS=Prost hecochloris aestuarii (strain DSM 271 / SK 413) OX=2905 12 GN=Paes_1550 PE=4 SV=1
MIISRKIELDYGHTLPNSFSFCNQLHGHRGVVEATVEGRMIDKKGDAQEGMVMDFKFLNDIMMTHIHDVLDHGFAVWKDDHEDLEFITRRNKRVVITNEPPTAECLAKWAFNQIEPHLPANVSLINLRWYETPNNWADYTGEEE

SEQ ID NO: 24266 - protein, 149 aa, Prosthecochloris aestuarii
  misc_feature (1)..(149): tr|B4S769|B4S769_PROA2 6-carboxy-5,6,7,8-tetrahydropter in synthase OS=Prosthecochloris aestuarii (strain DSM 2 71 / SK 413) OX=290512 GN=Paes_0860 PE=3 SV=1
MNDVLEKPRKVYVTRTVEFNAAHRLFNPSISDEENLKTYGKCSNLYGHGHNYELEITVSGTVDRKTGFLLDMKELKIILENEIMSRFDHKHLNFDVEELKNTVPSTEILAVTVWDILHDALQSYSNKEITLHEVKIHETRKNSVRYLGE

SEQ ID NO: 24267 - protein, 149 aa, Prosthecochloris marina
  misc_feature (1)..(149): tr|A0A317T593|A0A317T593_9CHLB 6-pyruvoyl tetrahydrobio pterin synthase OS=Prosthecochloris marina OX=2017681 G N=CR164_08165 PE=4 SV=1
MNDILQKPRKVYVTRTIEFNAAHRLYSTDLSDDENREIYGKCSNTYGHGHNYELEITVSGFVDRTTGFLLDMKELKKILEKEIMNRFDHKHLNFDVEELRDTVPSTEILAVTVWDILTTALQSYINKGITLHEVKIHETRKNSVRYLGE

SEQ ID NO: 24268 - protein, 142 aa, Prosthecochloris marina
  misc_feature (1)..(142): tr|A0A317T5Y9|A0A317T5Y9_9CHLB 6-pyruvoyl tetrahydropte rin synthase OS=Prosthecochloris marina OX=2017681 GN=C R164_07025 PE=4 SV=1
MIISRKIELDYGHTLPNSFSFCNQLHGHRGIVVATVEGKIIDREGDPQEGMVMDFKFLNDIMMKHVHDVLDHGFAVWKNDHEDLAFITKRNKRVVITDEPPTAECLAKWAFNQIIPHLPENVILKNLRWYETPNNWADYEGE

SEQ ID NO: 24269 - protein, 149 aa, Prosthecochloris sp.
  misc_feature (1)..(149): tr|A0A1B1Q2U9|A0A1B1Q2U9_9CHLB 6-carboxy-5,6,7,8-tetrah ydropterin synthase OS=Prosthecochloris sp. CIB 2401 OX =1868325 GN=queD_2 PE=3 SV=1
MNDILTKPRKVYVTRTVEFNAAHRLFNPEFSEEKNLKMYGSCSNLYGHGHNYEAEITVSGMVDRATGFLMDLKELKALLEKEVTERFDHKHLNYDVAELSNTVPSTEILAVTVWDILADALAEHPNKNLTLHEVRINETRKNSVRYLGE

SEQ ID NO: 24270 - protein, 144 aa, Prosthecochloris sp.
  misc_feature (1)..(144): tr|A0A369RBM0|A0A369RBM0_9CHLB 6-pyruvoyl tetrahydropte rin synthase OS=Prosthecochloris sp. ZM OX=2283143 GN=C R161_03915 PE=4 SV=1
MIISRKIELDYGHTLPNSFSFCNQLHGHRGVVEATVEGRMIDKKGDAQEGMVMDFKFLNDIMMTHIHDVLDHGFAVWKDDHEDLEFITRRNKRVVITNEPPTAECLAKWAFNQIEPHLPANVSLINLRWYETPNNWADYTGKND

SEQ ID NO: 24271 - protein, 149 aa, Prosthecochloris vibrioformis; identical to SEQ ID NO: 24269
  misc_feature (1)..(149): tr|A0A5C4RZ76|A0A5C4RZ76_PROVB 6-carboxy-5,6,7,8-tetrah ydropterin synthase OS=Prosthecochloris vibrioformis OX =1098 GN=FGF68_08930 PE=3 SV=1

SEQ ID NO: 24272 - protein, 144 aa, Prosthecochloris vibrioformis
  misc_feature (1)..(144): tr|A0A5C4S1D2|A0A5C4S1D2_PROVB 6-carboxytetrahydropteri n synthase OS=Prosthecochloris vibrioformis OX=1098 GN= FGF68_03495 PE=4 SV=1
MIISRKIELDYGHTLPNSFSFCNQLHGHRGIVEATVEGRMIDRKGDAEEGMVMDFKFLNDIMMTHIHGILDHGFAVWKDDHEDLEFITKRNKRVVITNEPPTAECLAKWAFNQIEAHLPENVTLINLRWYETPNNWADYTGEEE

SEQ ID NO: 24273 - protein, 134 aa, Prosthecomicrobium hirschii
  misc_feature (1)..(134): tr|A0A0P6VUR4|A0A0P6VUR4_9RHIZ 6-pyruvoyl tetrahydropte rin synthase OS=Prosthecomicrobium hirschii OX=665126 G N=ABB55_25880 PE=4 SV=1
MFAVEVRDHIMIAHSFRGAVFGPAQALHGATFVVDLAFFRAELDENGIVVDIGLAHDALKAVLGPLTYRNLDELPEFAGRNTTTEVLARHIFDAMAAAIARGDLGADARAIAKLRVTLHESHVARAWYEAPIGG

SEQ ID NO: 24274 - protein, 121 aa, Proteiniphilum saccharofermentans
  misc_feature (1)..(121): tr|A0A1R3T3R3|A0A1R3T3R3_9BACT 6-carboxy-5,6,7,8-tetrah ydropterin synthase OS=Proteiniphilum saccharofermentan s OX=1642647 GN=PSM36_0302 PE=3 SV=1
MYKISKEFSFSAAHSLFGLPDDHPCSRLHGHNYVVTVHLRSKELNRQGFVRDYTELKIVKEYIDTRLDHRNLNDILSPLNSSAENLAKMLYDVFKPRIPELYAVEVSETPKTSAIYEPECE

SEQ ID NO: 24275 - protein, 121 aa, Proteiniphilum sp.
  misc_feature (1)..(121): tr|A0A3M8EG48|A0A3M8EG48_9BACT 6-carboxy-5,6,7,8-tetrah ydropterin synthase OS=Proteiniphilum sp. X52 OX=238215 9 GN=queD PE=3 SV=1
MYKISKEFSFSAAHSLFGMPDDHPCSRLHGHNYVVTVHLRSKELNKQGFVRDYTELKIVKKYIDSRLDHRNLNDILSPLNSSAENLAKMLYDEFKPQIPELYAVEVSETPKTSAIYEPECE

SEQ ID NO: 24276 - protein, 187 aa, Proteobacteria bacterium
  misc_feature (1)..(187): tr|R6A239|R6A239_9PROT Uncharacterized protein OS=Prote obacteria bacterium CAG:139 OX=1262986 GN=BN492_01144 P E=4 SV=1
MRSITSFDLQYAHRFLNFQGEAQYLHGHTGVLTIEVEDTIEPGVNMVFPCNEIRKTAWEVLKNFDHALILREDDPLLPAILAVYDAQGIRNGAPSNRMKGAPVKTDLITCYPDCRLVVTKETLTTEGMIKIAYDLLKDKLNIAKITFTSGVNAASQEYKPQGTVDRCPLCGIALDENGVCPKCGYRK

SEQ ID NO: 24277 - protein, 173 aa, Proteobacteria bacterium
  misc_feature (1)..(173): tr|A0A1W9IAK5|A0A1W9IAK5_9PROT Uncharacterized protein OS=Proteobacteria bacterium HN_bin10 OX=1827386 GN=A4S1 7_05100 PE=4 SV=1
MAALEFTRRYAMAHRLLATKSPKCAIPHGHNEFVTVRLDPLATFRFSDANSAAPFEQVKLRWHRWIDEHVDHALHLGEGDPLIGYFREHEPALLKQIMTFQGDPTTEALAACFFLKLSAFIANDNLPFSIREVRIEETPTNTVIVSRDVFDPGSCGLRANAWPWRADMSINDF

SEQ ID NO: 24278 - protein, 120 aa, Proteus hauseri
  misc_feature (1)..(120): tr|A0A410X7H9|A0A410X7H9_PROHU 6-carboxy-5,6,7,8-tetrah ydropterin synthase OS=Proteus hauseri OX=183417 GN=que D PE=3 SV=1
MITTIFKDFQFEAAHHLPHVPEGHKCGRLHGHSFLVRLELTGEVDAQSGWLIDFADVKAAFKPTLDSLDHYYLNDIAGLENPTSEVLAKWIWQQVKPTLPLLSAVMVKETCTAGCIYRGE

SEQ ID NO: 24279 - protein, 120 aa, Proteus hauseri
  misc_feature (1)..(120): tr|V6MHR8|V6MHR8_PROHU 6-carboxy-5,6,7,8-tetrahydropter in synthase OS=Proteus hauseri ZMd44 OX=1312367 GN=K151 _2198 PE=3 SV=1
MTTTIFKDFQFEAAHHLPHVPEGHKCGRLHGHSFLVRLELTGEVDAHSGWLIDFADVKAAFKPTLERLDHYYLNEIEGLENPTSEVLAKWIWQQVKPSLPLLSAVMVKETCTAGCIYRGE

SEQ ID NO: 24280 - protein, 121 aa, Proteus mirabilis
  misc_feature (1)..(121): tr|A0A2J9L846|A0A2J9L846_PROMI 6-carboxy-5,6,7,8-tetrah ydropterin synthase OS=Proteus mirabilis OX=584 GN=queD PE=3 SV=1
MMTTTIFKDFQFEAAHHLPHVPEGHKCGRLHGHSFLVRLELTGEVDAHSGWLIDFADVKAAFKPTLERLDHYYLNEIEGLENPTSEVLAKWIWQQVKPSLPLLSAVMVKETCTAGCIYRGE

SEQ ID NO: 24281 - protein, 120 aa, Proteus mirabilis
  misc_feature (1)..(120): tr|A0A1Z1SS52|A0A1Z1SS52_PROMI 6-carboxy-5,6,7,8-tetrah ydropterin synthase OS=Proteus mirabilis OX=584 GN=queD PE=3 SV=1
MITTIFKDFQFEAAHHLPHVPKGHKCGRLHGHSFLVRLEITGEVDAQSGWLIDFADVKAAFKPTLDRLDHYYLNDIEGLENPTSEVLAKWIWQQVKPSLPLLSAVMVKETCTAGCIYRGE

SEQ ID NO: 24282 - protein, 120 aa, Proteus penneri
  misc_feature (1)..(120): tr|C0AXE9|C0AXE9_9GAMM 6-carboxy-5,6,7,8-tetrahydropter in synthase OS=Proteus penneri ATCC 35198 OX=471881 GN= queD PE=3 SV=1
MTTTIFKDFQFEAAHHLPHVPEGHKCGRLHGHSFLVRLELTGEVNAHSGWLIDFADVKAAFKPTLERLDHYYLNEIEGLENPTSEVLAKWIWQQVKPSLPLLSAVMVKETCTAGCIYRGE

SEQ ID NO: 24283 - protein, 120 aa, Proteus penneri; identical to SEQ ID NO: 24282
  misc_feature (1)..(120): tr|A0A379EQ81|A0A379EQ81_9GAMM 6-carboxy-5,6,7,8-tetrah ydropterin synthase OS=Proteus penneri OX=102862 GN=que D PE=3 SV=1

SEQ ID NO: 24284 - protein, 120 aa, Proteus sp.; identical to SEQ ID NO: 21437
  misc_feature (1)..(120): tr|A0A1F2H5H2|A0A1F2H5H2_9GAMM 6-carboxy-5,6,7,8-tetrah ydropterin synthase OS=Proteus sp. HMSC10D02 OX=1581079 GN=HMPREF3111_25410 PE=3 SV=1

SEQ ID NO: 24285 - protein, 120 aa, Proteus sp.
  misc_feature (1)..(120): tr|A0A5J6RT42|A0A5J6RT42_9GAMM 6-carboxytetrahydropteri n synthase QueD OS=Proteus sp. CD3 OX=1921565 GN=BTA34_ 13075 PE=4 SV=1
MTTTIFKDFQFEAAHHLPHVPEGHKCGRLHGHSFLVRLELTGEVDAHSGWLIDFADVKAAFKPTLERLDHYYLNEIKGLENPTSEVLAKWIWQQVKPSLPLLSAVMVKETCTAGCIYRGE

SEQ ID NO: 24286 - protein, 120 aa, Proteus vulgaris; identical to SEQ ID NO: 24282
  misc_feature (1)..(120): tr|A0A0G4QI26|A0A0G4QI26_PROVU 6-carboxy-5,6,7,8-tetrah ydropterin synthase OS=Proteus vulgaris OX=585 GN=queD PE=3 SV=1

SEQ ID NO: 24287 - protein, 121 aa, Proteus vulgaris; identical to SEQ ID NO: 24280
  misc_feature (1)..(121): tr|A0A292C8G4|A0A292C8G4_PROVU 6-carboxy-5,6,7,8-tetrah ydropterin synthase OS=Proteus vulgaris OX=585 GN=queD PE=3 SV=1

SEQ ID NO: 24288 - protein, 121 aa, Providencia alcalifaciens
  misc_feature (1)..(121): tr|B6XG76|B6XG76_9GAMM 6-carboxy-5,6,7,8-tetrahydropter in synthase OS=Providencia alcalifaciens DSM 30120 OX=5 20999 GN=queD PE=3 SV=1
MSTTIYKDFHFEAAHRLPHVPEGHKCGRLHGHSFMVRLEITGEIDAHTGWIMDFADVKNAFNPIYERLDHHYLNEIEGLENPTSEVLARWIWQQTKPLLPLLSAITVKETCNAGCVYRGDE

SEQ ID NO: 24289 - protein, 121 aa, Providencia alcalifaciens
  misc_feature (1)..(121): tr|X6QCP9|X6QCP9_9GAMM 6-carboxy-5,6,7,8-tetrahydropter in synthase OS=Providencia alcalifaciens F90-2004 OX=12 56987 GN=queD PE=3 SV=1
MSTTIYKDFHFEAAHRLPHVPEGHKCGRLHGHSFMVRLEITGEIDAHTGWIMDFADVKSAFNPIYERLDHHYLNEIEGLENPTSEVLARWIWQQTKPLLPLLSAITVKETCNAGCVYRGDE

SEQ ID NO: 24290 - protein, 124 aa, Providencia burhodogranariea
  misc_feature (1)..(124): tr|K8WY57|K8WY57_9GAMM 6-carboxy-5,6,7,8-tetrahydropter in synthase OS=Providencia burhodogranariea DSM 19968 O X=1141662 GN=OOA_00045 PE=3 SV=1
MSTINKTSIYKDFHFEAAHKLPHVPEGHQCGRLHGHSFMVRLELTGDVDKKTGWIIDFSDVKEAFKPILNQLDHYYLNDIEGLENPTSEVLASWIWDKTKPLLPLLSAVTVKETCNAGCIYRGE

SEQ ID NO: 24291 - protein, 121 aa, Providencia heimbachae
  misc_feature (1)..(121): tr|A0A4D7IMI6|A0A4D7IMI6_9GAMM 6-carboxy-5,6,7,8-tetrah ydropterin synthase OS=Providencia heimbachae OX=333962 GN=queD PE=3 SV=1
MSTTIYKDFYFEAAHKLPHVPEGHKCGRLHGHSFMVRLEITGNVDAHTGWIIDFSDVKKAFKPILEQLDHHYLNDIDGLENPTSEVLARWVWLKTKPLLPLLSAVTIKETCNAGCIYRGED

SEQ ID NO: 24292 - protein, 121 aa, Providencia heimbachae; identical to SEQ ID NO: 24291
  misc_feature (1)..(121): tr|A0A1B7JNM7|A0A1B7JNM7_9GAMM 6-carboxy-5,6,7,8-tetrah ydropterin synthase OS=Providencia heimbachae ATCC 3561 3 OX=1354272 GN=M998_3030 PE=3 SV=1

SEQ ID NO: 24293 - protein, 121 aa, Providencia rettgeri
  misc_feature (1)..(121): tr|A0A1J0EAZ0|A0A1J0EAZ0_PRORE 6-carboxy-5,6,7,8-tetrah ydropterin synthase OS=Providencia rettgeri OX=587 GN=q ueD PE=3 SV=1
MSTTIYKDFTFEAAHKLPHVPAGHKCGRLHGHSFMVRLEITGEVDKQSGWIIDFADVKAVFKPIWEQLDHHYLNEIKGLENPTSEVLAQWIWQQTKPHLPLLSAVTVKETCNAGCVYRGQA

SEQ ID NO: 24294 - protein, 121 aa, Providencia rettgeri
  misc_feature (1)..(121): tr|A0A264VW77|A0A264VW77_PRORE 6-carboxy-5,6,7,8-tetrah ydropterin synthase OS=Providencia rettgeri OX=587 GN=q ueD PE=3 SV=1
MSTTIYKDFTFEAAHKLPHVPEGHKCGRLHGHSFMVRLEITGEVDSHSGWIIDFSDVKAAFKPIWERLDHHYLNDIEGLENPTSEVLAQWIWQQTKPLLPLLSAVTVKETCNAGCVYRGEA

SEQ ID NO: 24295 - protein, 120 aa, Providencia rustigianii
  misc_feature (1)..(120): tr|A0A379G6K1|A0A379G6K1_9GAMM 6-carboxy-5,6,7,8-tetrah ydropterin synthase OS=Providencia rustigianii OX=15885 0 GN=queD PE=3 SV=1
MSTTIYKDFQFEAAHKLPHVPAGHKCGRLHGHSFMVRLEITGDVDAHTGWIIDFADVKSAFKPIYERLDHHYLNDIEGLENPTSEVLSRWIWQQVKPLLPLLSAVTVQETCNAGCVYRGE

SEQ ID NO: 24296 - protein, 126 aa, Providencia rustigianii
  misc_feature (1)..(126): tr|D1P4S2|D1P4S2_9GAMM 6-carboxy-5,6,7,8-tetrahydropter in synthase OS=Providencia rustigianii DSM 4541 OX=5006 37 GN=queD PE=3 SV=1
MSKEKLMSTTIYKDFQFEAAHKLPHVPAGHKCGRLHGHSFMVRLEITGDVDAHTGWIIDFADVKSAFKPIYERLDHHYLNDIEGLENPTSEVLSRWIWQQVKPLLPLLSAVTVQETCNAGCVYRGE

SEQ ID NO: 24297 - protein, 120 aa, Providencia sneebia
  misc_feature (1)..(120): tr|K8W0J3|K8W0J3_9GAMM 6-carboxy-5,6,7,8-tetrahydropter in synthase OS=Providencia sneebia DSM 19967 OX=1141660 GN=OO7_14218 PE=3 SV=1
MITSIYKDFRFEAAHKLPYVPEGHQCGRLHGHSFMVRLELTGKVNPNTGWLIDFADVKQAFKPILDQLDHYYLNDIEGLENPTSEVLASWIWHKTKPLLPLLSAVTVKETCNAGCVYRGE

SEQ ID NO: 24298 - protein, 121 aa, Providencia sp.; identical to SEQ ID NO: 24294
  misc_feature (1)..(121): tr|A0A345M1R3|A0A345M1R3_9GAMM 6-carboxy-5,6,7,8-tetrah ydropterin synthase OS=Providencia sp. WCHPHu000369 OX= 2027290 GN=queD PE=3 SV=1

SEQ ID NO: 24299 - protein, 121 aa, Providencia sp.
  misc_feature (1)..(121): tr|A0A356DBH9|A0A356DBH9_PROSP 6-carboxy-5,6,7,8-tetrah ydropterin synthase OS=Providencia sp. OX=589 GN=queD P E=3 SV=1
MSTTIYKDFTFEAAHKLPHVPEGHKCGRLHGHSFMVRLEITGEVDAYSGWIIDFSDVKKVFKPILEQLDHHYLNDITGLENPTSEVLSRWIWLQTKPLLPQLSAVTVKETCTAGCIYRGEN

SEQ ID NO: 24300 - protein, 120 aa, Providencia stuartii
  misc_feature (1)..(120): tr|B2PZ86|B2PZ86_PROST 6-carboxy-5,6,7,8-tetrahydropter in synthase OS=Providencia stuartii ATCC 25827 OX=47187 4 GN=queD PE=3 SV=1
MRTSIYKDFHFEAAHKLPYVPEGHKCGRLHGHSFMVRLELTGEVEEKSGWLIDFSDVKKAFKPILDQLDHYYLNDIEGLENPTSEVLASWIWHKTKPLLPLLSAVTVKETCNAGCIYRGE

SEQ ID NO: 24301 - protein, 120 aa, Providencia stuartii; identical to SEQ ID NO: 24300
  misc_feature (1)..(120): tr|A0A379GJV3|A0A379GJV3_PROST 6-carboxy-5,6,7,8-tetrah ydropterin synthase OS=Providencia stuartii OX=588 GN=q ueD PE=3 SV=1

SEQ ID NO: 24302 - protein, 123 aa, Unknown
  misc_feature (1)..(123): tr|A0A368DZM1|A0A368DZM1_9PROT 6-carboxy-5,6,7,8-tetrah ydropterin synthase OS=PS1 clade bacterium OX=2175152 G N=DBW69_05155 PE=3 SV=1
MQLTREFCFDAAHCLESYDPGHPNRRIHGHSFRVRVTLTGMPNDKTGQIVDLAEFGTILEHLREQLDHHMLNEIDGLETPTLENICLWLWEHLMPDLPDLSAVEVFRDSLGQSCLYQGSRHVN

SEQ ID NO: 24303 - protein, 124 aa, Pseudacidovorax intermedius
  misc_feature (1)..(124): tr|A0A147H7N4|A0A147H7N4_9BURK 6-carboxy-5,6,7,8-tetrah ydropterin synthase OS=Pseudacidovorax intermedius OX=4 33924 GN=NS331_04025 PE=3 SV=1
MDFEFELSQRFFFDAAHTLRRAHETAGSLRVHGHTYHGEVSVRGRRDATSGMVVDLAVLRAEIEAVRGTLDHHLLDEVPGLGTPTLENLCAYIATALRARQLPVSAVRVWREAGGDSCRLVLPH

SEQ ID NO: 24304 - protein, 124 aa, Pseudacidovorax intermedius
  misc_feature (1)..(124): tr|A0A370F5L3|A0A370F5L3_9BURK 6-carboxy-5,6,7,8-tetrah ydropterin synthase OS=Pseudacidovorax intermedius OX=4 33924 GN=DFR41_1134 PE=3 SV=1
MEFEFELSQRFFFDAAHTLRRAHDTASSLRVHGHTYHAEVSVQGARDAATGMVVDLAVLRAEIETLRQTLDHHLLDEVPGLGTPTLENLCAYIATALRERQLPVSAVRVWREAGGDSCRLVLPR

SEQ ID NO: 24305 - protein, 290 aa, Pseudanabaena biceps
  misc_feature (1)..(290): tr|L8N7M5|L8N7M5_9CYAN Uncharacterized protein OS=Pseud anabaena biceps PCC 7429 OX=927668 GN=Pse7429DRAFT_0530 PE=4 SV=1
MAKCVINRRAEFSASHRYWLPEIPPEENLAKFGACTNFPPHGHNYVMYVGMVGEIDHTGMVLNLSDVKHTIAREVTTQLNFSYLNQAWEEFQETLPTTENIARVIWQRLEAHLPLVNIRLYEHPELWADYQGNNMQAHLTISTHFSAAHRLALDTLSLEENTAIYGKCARVNGHGHNYHLEVAIAGDIDPRTGMIADLCAFQNAIDKYVLEPMDHTFLNKDIPYFSEVVPTAENIAVYIQKLLTKPIREIGAKLHSIKLIESPNNSCEVYGEYQLSDIEHSLEEALAKAS

SEQ ID NO: 24306 - protein, 290 aa, Pseudanabaena frigida
  misc_feature (1)..(290): tr|A0A2W4W8E5|A0A2W4W8E5_9CYAN 6-pyruvoyl tetrahydropte rin synthase OS=Pseudanabaena frigida OX=945775 GN=DCF1 9_09450 PE=4 SV=1
MAKCVINRRAEFSASHRYWLPEIPDEENLAKFGACTNFPPHGHNYVLYVGMQGEIDNTGMVLNLSDVKHTIAREVTAQLNFSYLNQAWEEFQQTLPTTENIARIIWQRLEPYLPLVNIRLYEHPELWADYKGNDMQAYLTISTHFSAAHRLALDALSLEENTAIYGKCARVHGHGHNYHLEVAIAGEIDPRTGMIADLSDFQKALDLYVLDPMDHTFLNKDIPYFAEVVPTAENIAVYIQKVLTQPIREIGAKLHSIKLIESPNNSCEVYGEYQLSDIEYSLEEALAKSA

SEQ ID NO: 24307 - protein, 290 aa, Pseudanabaena sp.
  misc_feature (1)..(290): tr|A0A256BIA4|A0A256BIA4_9CYAN 6-pyruvoyl tetrahydropte rin synthase OS=Pseudanabaena sp. SR411 OX=1980935 GN=B 9G53_06810 PE=4 SV=1
MAKCVINRRAEFSASHRYWLPEIPDEENQAKFGLCTNFPPHGHNYVLYVGMQGEIDNTGMVLNLSDVKHTIAREVTTQLNFSYLNQAWEEFQQTLPTTENIARVIWQRLAPHLPLVNIRLYEHPELWADYQGNDMQAHLTVSTHFSAAHRLALDTLSLEENTAIYGKCARVHGHGHNYHLEVSIAGEIDPRTGMIADLGDFQKALDQYVLDPMDHTFLNKDIPYFAEVVPTAENIAVYIQKVLTQPIREIGAKLHSIKLIESPNNSCEVYGEYQLSEIEHSLEEALAKSA

SEQ ID NO: 24308 - protein, 290 aa, Pseudanabaena sp.
  misc_feature (1)..(290): tr|A0A2Z5WUH4|A0A2Z5WUH4_9CYAN 6-pyruvoyl tetrahydropte rin synthase OS=Pseudanabaena sp. ABRG5-3 OX=685565 GN= ABRG53_0695 PE=4 SV=1
MAKCVINRRAEFSASHRYWLPEIPDEENLAKFGACTNFPPHGHNYVLFVGMQGEIDHTGMVLNLSDVKQIIAREITTQLNFSYLNQAWEEFQQTLPTTENIARVIWQRLAPYLPLVNIRLYEHPELWADYQGNDMQAHLTISTHFSAAHRLALDTLSLEENSAIYGKCARVHGHGHNYHLEVSISGEIDPRTGMIADLSDFQKALDQYVLDPMDHTFLNKDIPYFAEVVPTAENIAVYIQKVLTQPIREIGAKLHSIKLIESPNNSCEVYGEYQLSDIEHSLEEALAKAA

SEQ ID NO: 24309 - protein, 139 aa, Pseudarcicella hirudinis
  misc_feature (1)..(139): tr|A0A1I5MGX5|A0A1I5MGX5_9BACT 6-pyruvoyltetrahydropter in/6-carboxytetrahydropterin synthase OS=Pseudarcicella hirudinis OX=1079859 GN=SAMN04515674_101301 PE=4 SV=1
MVYVSRKEHFNAAHRLYNPNWTEEKNREVFGPCANINWHGHNFELIVTVKGKPDYDTGFVIDLKVLGDIIKTEVIEKVDHKNLNLDVDFMQGKMASCEIFVMEIWNILAPKIEAASSTARLHSIQLFETQKNFVEYFGE

SEQ ID NO: 24310 - protein, 139 aa, Pseudarcicella hirudinis
  misc_feature (1)..(139): tr|A0A1I5N407|A0A1I5N407_9BACT 6-carboxy-5,6,7,8-tetrah ydropterin synthase OS=Pseudarcicella hirudinis OX=1079 859 GN=SAMN04515674_101569 PE=3 SV=1
MTLKKVAVFRKEHFNAAHRLNNPNWSEEKNERVYGKCNNYNFHGHNYDLVVQVVGPLDPETGYVMDMKLLSELIKEEILDRFDHKNLNLDTEEFKDLNPSAENIAIVIYDKLRNKLKTELELKIRLYETERNFVEYPVG

SEQ ID NO: 24311 - protein, 139 aa, Pseudarcicella sp.
  misc_feature (1)..(139): tr|A0A2S2DVF6|A0A2S2DVF6_9BACT 6-carboxy-5,6,7,8-tetrah ydropterin synthase OS=Pseudarcicella sp. HME7025 OX=21 83547 GN=HME7025_01525 PE=3 SV=1
MELPRVSVFRKEHFNAAHRLYNTNWSDEKNQEVFGLCNNPNFHGHNYELIVQITGTINPETGYVIDMKEVSQLVQKEIIQKFDHKNLNLDVPEFANLNPTAENIALVIYQKMRAVLATNFDLKIRLYETERNFVEFPAH

SEQ ID NO: 24312 - protein, 140 aa, Pseudarcicella sp.
  misc_feature (1)..(140): tr|A0A2S2DUY9|A0A2S2DUY9_9BACT 6-pyruvoyltetrahydropter in synthase OS=Pseudarcicella sp. HME7025 OX=2183547 GN =queD PE=4 SV=1
MVYVIRKEHFNAAHRLYNPNWSEEKNDEVFGPCANKNWHGHNFELIVTVKGNPDPETGFVFDLKELGKLIKKEIIDKVDHKNLNMDVDFMSGKLASCENLVMEFWKILAPKIQSASTSAQLHKIHLVETNKNSVEYYGEI

SEQ ID NO: 24313 - protein, 131 aa, Pseudarthrobacter chlorophenolicus
  misc_feature (1)..(131): tr|B8HCK8|B8HCK8_PSECP Uncharacterized protein OS=Pseud arthrobacter chlorophenolicus (strain ATCC 700700 / DSM 12829 / CIP 107037 / JCM 12360 / KCTC 9906 / NCIMB 137 94 / A6) OX=452863 GN=Achl_0796 PE=4 SV=1
MFSLTVRRHFMIAHSLPREAFGPAQGLHGATFVAEVAFRRRALNDNAIVLDIGAAGTVIEEVLDGLNYKNLDEHPDFEGKLSTTEALAQYIAQAVAAKISNDDDGRHLDGIDVTLRENPDAWATFSLDLNA

SEQ ID NO: 24314 - protein, 131 aa, Pseudarthrobacter equi
  misc_feature (1)..(131): tr|A0A1H1VNC4|A0A1H1VNC4_9MICC 6-pyruvoyltetrahydropter in/6-carboxytetrahydropterin synthase OS=Pseudarthrobac ter equi OX=728066 GN=SAMN04489743_1049 PE=4 SV=1
MFSLTVRRHFMIAHSLPREAFGPAQGLHGATFVAEVAFRRRALNDNAIVLDIGAAGTVIEEVLDGLNYKNLDEHPDFEGKLSTTEALAQYIAQAVAEKISDDDDGRHLDGIDVTLRENPDAWATFSLDLNA

SEQ ID NO: 24315 - protein, 137 aa, Pseudarthrobacter phenanthrenivorans
  misc_feature (1)..(137): tr|F0M126|F0M126_PSEPM 6-pyruvoyl-tetrahydropterin synt hase OS=Pseudarthrobacter phenanthrenivorans (strain DS M 18606 / JCM 16027 / LMG 23796 / Sphe3) OX=930171 GN=A sphe3_07010 PE=4 SV=1
MFSLTVRRHFMIAHSLPREAFGPAQALHGATFVAEVAFRRRTLNDDAIVLDIGAAGTIIEEVLAGLNYRNLDEHPDFEGKLTTTEALAHYIARSVAEKLKDDDDGAQLAGIDVTLRENPDAWATFSLDLPAVDLPAS

SEQ ID NO: 24316 - protein, 131 aa, Pseudarthrobacter phenanthrenivorans
  misc_feature (1)..(131): tr|A0A0B4DEA8|A0A0B4DEA8_9MICC 6-pyruvoyl tetrahydrobio pterin synthase OS=Pseudarthrobacter phenanthrenivorans OX=361575 GN=RM50_09050 PE=4 SV=1
MFSLTVRRHFMIAHSLPREAFGPAQGLHGATFVAEVAFRRRALNDDAIVLDIGAAGTIIEEVLAGLNYRNLDEHPDFKDKLSTTEALAEYVAQQVAARIKDTNDGPELAGIEVTLRENPDAWATYSLDLTA

SEQ ID NO: 24317 - protein, 132 aa, Pseudarthrobacter siccitolerans
  misc_feature (1)..(132): tr|A0A024H6M1|A0A024H6M1_9MICC Uncharacterized protein OS=Pseudarthrobacter siccitolerans OX=861266 GN=ARTSIC4 J27_3501 PE=4 SV=1
MFSLTVRRHFMIAHSLPREAFGPAQALHGATFVAEVTFRRRTLNDNAIVLDIGAAGTLIEEVLAGLNYRNLDEHPDFEGKLSTTEALAEYIAQSVAEKLKEDDDGGQLAGIDVTLRENPDAWATYSLDLPAA

SEQ ID NO: 24318 - protein, 131 aa, Pseudarthrobacter sp.
  misc_feature (1)..(131): tr|A0A5C4IVJ4|A0A5C4IVJ4_9MICC 6-carboxytetrahydropteri n synthase OS=Pseudarthrobacter sp. NamE5 OX=2576839 GN =FDW84_05410 PE=4 SV=1
MFSLTVRRHFMIAHSLPREAFGPAQGLHGATLVAEVTFRRRRLNDNAIVLDIGAAGTIIEEVLARLDYRNLDEHPDFAGKLTTTEALAEYVARAVADRLKDDDDGGRLAGIDVTLRENPDAWATFALDLTA

SEQ ID NO: 24319 - protein, 131 aa, Pseudarthrobacter sp.
  misc_feature (1)..(131): tr|A0A365D4K8|A0A365D4K8_9MICC 6-carboxytetrahydropteri n synthase OS=Pseudarthrobacter sp. AG30 OX=2249742 GN= DC347_05945 PE=4 SV=1
MFSLTVRRHFMIAHSLPREAFGPAQALHGATFVAEVSFRRRALNTDAIVLDIGAAGTIIEDVLGGLNYRNLDEHPDFEGKLTTTEALAEYIARKVAARIKDTADGPELAGIDVTLRENPDAWATYALDLSD

SEQ ID NO: 24320 - protein, 133 aa, Pseudarthrobacter sulfonivorans
  misc_feature (1)..(133): tr|A0A0U3GP17|A0A0U3GP17_9MICC 6-pyruvoyl tetrahydrobio pterin synthase OS=Pseudarthrobacter sulfonivorans OX=1 21292 GN=AU252_06895 PE=4 SV=1
MFSLTVRRHFMIAHSLPREVFGPAQALHGATFVAEVTFRRRALNQDSIVLDIGAAGGIIENVLSGLNYKNLDEHPDFEGKLSTTEALAEYIAHAVAAKLTDDGDGDGRELAGIDVTLRENPDAWATYTLDLSA

SEQ ID NO: 24321 - protein, 120 aa, Pseudescherichia vulneris
  misc_feature (1)..(120): tr|A0A090VNB7|A0A090VNB7_PSEVU 6-carboxy-5,6,7,8-tetrah ydropterin synthase OS=Pseudescherichia vulneris NBRC 1 02420 OX=1115515 GN=queD PE=3 SV=1
MSTTLFKDFIFEAAHRLPHVPEGHKCGRLHGHSFMVRLEITGEVDPHTGWIMDFSELKAAFKPTYDRLDHYYLNDIPGLENPTSEVLAKWIWEEMKPLVPLLSAVTIKETCTAGCVYRGE

SEQ ID NO: 24322 - protein, 293 aa, Pseudidiomarina sp.
  misc_feature (1)..(293): tr|A0A443Z5S3|A0A443Z5S3_9GAMM Uncharacterized protein OS=Pseudidiomarina sp. R04H25 OX=2487740 GN=EGC76_02870 PE=4 SV=1
MQLFVNDLTVIDFSYLCPERGMVGESWIVDIILDGSLNEQSMVLDFGRVKKQIKRIIDSAVDHKLAVPAEHEYTQVSHHEDGNSYWVDFMRPNNRSIHLFCPADAFAFIDAQQVTMASITDYLRAVIKRELPDNVQGLELQLRAEEIPGAFYHYTHGLKKHDGNCQRIAHGHRSRIYIALNDQRDTTLEQFWATTWQDIYLGSEEDIVAFDVLQLSEHSQQLSPSTHVAYSYTADQGLFELLVPTAENYTIPTDSTVECIATYLAQKIKHEQPDASVKVTGFEGVGKGAIGYA

SEQ ID NO: 24323 - protein, 175 aa, Pseudoalteromonadaceae bacterium
  misc_feature (1)..(175): tr|A0A2D7MWR1|A0A2D7MWR1_9GAMM QueD like 2 OS=Pseudoalt eromonadaceae bacterium OX=2026783 GN=CMK62_03280 PE=4 SV=1
MQIDDLLITESQLKTRLNKSVHENRRGEFSLLLAMLSHDALDFSQFHLPKIETHSAYVDEKQLRERFGAGPKQLLAPEKFDMTIGQKHASVIVQQGEQAGMKAIKLSHCLNPEPLAIRDDKLHIPLTVIDNCELSVRRRLNDTHTALASPQMDAAAFYDDLTNEAIHKPLLVANA

SEQ ID NO: 24324 - protein, 285 aa, Pseudoalteromonadaceae bacterium
  misc_feature (1)..(285): tr|A0A2D6VMM9|A0A2D6VMM9_9GAMM Uncharacterized protein OS=Pseudoalteromonadaceae bacterium OX=2026783 GN=CMK61 _03125 PE=4 SV=1
MILFVNSLTVIDFSYLCNKRGAVGESWIVDLTLHGQLNDESMVLDFGLVKKQIKGIIDNCIDHKLAVPATLNGSLTQHAEHSVLDCHFGDNYHLAMSAPNQAYCLIDADVIDEKSVTEFLIKTIMPELPSNIEKIEINLYPEHSQSFYYHYSHGLKKHDGNCQRIIHGHRSQIGISLDGMAMPRLQKEWADKWEDIYLATAEDEINKSDLKHVTAQENDVCFAYTSQQGYFEMAIDKSRCDILPCDTTVECIADYLSSQVKNQYPDSEVKITAYEGVGKGSISYA

SEQ ID NO: 24325 - protein, 285 aa, Pseudoalteromonas agarivorans
  misc_feature (1)..(285): tr|A0A290RNF1|A0A290RNF1_9GAMM Uncharacterized protein OS=Pseudoalteromonas agarivorans DSM 14585 OX=1312369 G N=PAGA_a2016 PE=4 SV=1
MILFVNSLTVIDFSYLCNKRGAVGESWIVDLTLHGKLNEESMVLDFGLVKKQIKGIIDDCLDHKLAIAKGLNGTVQEFDSHKTLDCTFGDNHHLAMSAPHQAYCMIDAPEISVESVTEFLIDTILPKLPGNIEKIELSLKPEHSQSFYYHYSHGLKKHDGNCQRIIHGHRSQIGISLDGMSMPRLQKQWAEKWQDIYLATREDQIAASELKHISAKNDDVCFAYTAAQGYFEMAISESRCDILPVDTTVECIAQHLAEQVKAEYPDKDVKITAYEGVGKGSISYA

SEQ ID NO: 24326 - protein, 285 aa, Pseudoalteromonas agarivorans
  misc_feature (1)..(285): tr|N6W2Y1|N6W2Y1_9GAMM Uncharacterized protein OS=Pseud oalteromonas agarivorans S816 OX=1307437 GN=J139_04110 PE=4 SV=1
MILFVNSLTVIDFSYLCNKRGAVGESWIVDLTLHGKLNEESMVLDFGLVKKQIKGIIDDCLDHKLAIAKGLNGTVQEFDSHKTLDCTFGDNHHLAMSAPHQAYCMIDAPEISVESVTEFLIDTILPKLPGNIEEIELSLKPEHSQSFYYHYSHGLKKHDGNCQRIIHGHRSQIGISLDGMSMPRLQKQWAEKWQDIYLATAEDQIAASELKHISAKKDDVCFAYTAAQGYFEMAISESRCDILPVDTTVECIAQHLAEQVKAEYPNKDVKITAYEGVGKGSISYA

SEQ ID NO: 24327 - protein, 175 aa, Pseudoalteromonas aliena
  misc_feature (1)..(175): tr|A0A1Q2H0U4|A0A1Q2H0U4_9GAMM QueD like 2 OS=Pseudoalt eromonas aliena OX=247523 GN=B0W48_15065 PE=4 SV=1
MQIDDLLITENQLSTRLNKSVHEQRRGEFSLLLAMLSHDALDFSQFHLPKTELEDAIITDDALRKQLGVGPKQLLAPDKFDMLIGQHNASLLISAGERSGMNDIKLNHCLNPEPLFIRDDVTHIPLNIIDNCELAVRRRIKNTETQLSNPAMDAAAFYDLLNNDALHEPLHLVTA

SEQ ID NO: 24328 - protein, 285 aa, Pseudoalteromonas aliena
  misc_feature (1)..(285): tr|A0A1Q2H1M2|A0A1Q2H1M2_9GAMM Uncharacterized protein OS=Pseudoalteromonas aliena OX=247523 GN=B0W48_16710 PE =4 SV=1
MILFVNSLTVIDFSYLCNKRGAVGESWIVDLTLHGKLNKESMVLDFGLVKKQIKGIIDECIDHRLAIPTGLNGTVSAFDEHKTLDCTFGENNHLAMSAPHQAYCMINADEVTVESVTDFLVATILPKLPDNIEKIELSLKPEHSQSFYYHYSHGLKKHDGNCQRIIHGHRSQIGISLDGISMPRLQKEWSLKWQDIYLATSEDQINAPDLKHITAKVDDVCFAYTSAQGYFEMAISESRCDILPVDTTVECIAEHVAGQIKAQYPEKAVKVTAYEGVGKGSISYV

SEQ ID NO: 24329 - protein, 173 aa, Pseudoalteromonas amylolytica
  misc_feature (1)..(173): tr|A0A1S1MS19|A0A1S1MS19_9GAMM QueD like 2 OS=Pseudoalt eromonas amylolytica OX=1859457 GN=BET10_18985 PE=4 SV= 1
MQFDVVLTREDQLGNALSVSVTEHRRADFSMLLAMLSQDALEFSQFHLPESELNEADLSELALKKELQIGPQQALAPETYDMSIGQNNASRLAQSSLTTLKLQQCLSPEPLAIRNDKTHIPLEVVDNCEIAVRKRLESIKSGASIEEKPAMNAAGFYDQLASGQMQSALQLTA

SEQ ID NO: 24330 - protein, 288 aa, Pseudoalteromonas amylolytica
  misc_feature (1)..(288): tr|A0A1S1MVD1|A0A1S1MVD1_9GAMM Uncharacterized protein OS=Pseudoalteromonas amylolytica OX=1859457 GN=BET10_12 040 PE=4 SV=1
MILFVDSLTVIDFSYLCNQRGAVGESWIVDLTLHGQLNDESMVLDFALVKKQIKRIIDDTIDHKLAIAKGLNGTVAMKDGRVELDCQFGQGDQSHHLAMSAPEQAVCLLDGDKVDEQSVIEFLKSVIMAQMPENVKDIGIELRPEQAESFYYHYSHGLKKHDGNCQRIIHGHRSQIGVFVDGMKHPRLQKQWASKWQDIYLGTEEDIITPQQLRNVQAHEGDVCFAYDATQGYFELAISAKRCDILPCDTTVECIAEYLAQQIKLESANREIMVKAYEGVGKGAIAYA

SEQ ID NO: 24331 - protein, 285 aa, Pseudoalteromonas arctica
  misc_feature (1)..(285): tr|A0A290S388|A0A290S388_9GAMM Uncharacterized protein OS=Pseudoalteromonas arctica A 37-1-2 OX=1117313 GN=PAR C_a2063 PE=4 SV=1
MILFVNSLTVIDFSYLCNKRGAVGESWIVDLTLHGKLNEESMVLDFGLVKKQIKGIIDECIDHRLAIPTGLNGTVSEFDEHKTLDCTFGENNHLAMSAPHQAYCMINADEVTVESVTEFLIATILPKLPDNIEKIELSLKPEHSQSFYYHYSHGLKKHDGNCQRIIHGHRSQIGISLDGISMPRLQKEWSQKWEDIYLATSEDQINAPDLKHITAKAGDVCFAYTSAQGYFEMAISESRCDILPVDTTVECIAEHVAGQIKAQYPEKAVKVTAYEGVGKGSISYV

SEQ ID NO: 24332 - protein, 291 aa, Pseudoalteromonas atlantica
  misc_feature (1)..(291): tr|Q15QF5|Q15QF5_PSEA6 Uncharacterized protein OS=Pseud oalteromonas atlantica (strain T6c / ATCC BAA-1087) OX= 342610 GN=Patl_3377 PE=4 SV=1
MQLFVNDLTVMDFSYLCPKRGMVGESWIVDVVLDGDLNEESMVLDFSKVKKQLKHLIDEYVDHKLLIPVEHEYSHIWRDEKNDRVSVDFMRPEGRSIHLNCPSEAYAFVYSKHVTMSSVSQYLKQVIATHLPDNVAGLELTLRAEVINTPYYHYTHGLKKHDGNCQRIAHGHRSKITIVENQHESLEWQQYWAERWCDIYVGSNEDLVSADKVNFVKNQTDFTEHYLFGYESSQGWFELAIPKAETEMVDTDTTVECLAQYIADEQKRLVPESEFKIFAFEGVGKGAIAYA

SEQ ID NO: 24333 - protein, 285 aa, Pseudoalteromonas atlantica
  misc_feature (1)..(285): tr|A0A510ZGF0|A0A510ZGF0_PSEAF Uncharacterized protein OS=Pseudoalteromonas atlantica OX=288 GN=queD PE=4 SV=1
MILFVNSLTVIDFSYLCNKRGAVGESWIVDLTLHGKLNEESMVLDFGLVKKQIKGIIDDCLDHKLAIAKGLNGTVQEFDSHKTLDCTFGDNHHLAMSAPHQAYCMIDAPEISVESVTEFLIDTILPKLPGNIEKIELSLKPEHSQSFYYHYSHGLKKHDGNCQRIIHGHRSQIGISLDGMSMPRLQKQWAEKWQDIYLATREDQIAASELKHISAKNDDVCFAYTAAQGYFEMAISESRCDILPVDTTVECIAQHLAEQVKAEYPNKDVKITAYEGVGKGSISYA

SEQ ID NO: 24334 - protein, 173 aa, Pseudoalteromonas byunsanensis
  misc_feature (1)..(173): tr|A0A1S1N5X3|A0A1S1N5X3_9GAMM QueD like 2 OS=Pseudoalt eromonas byunsanensis OX=327939 GN=BIW53_12530 PE=4 SV= 1
MQFDVVLTREDQLGNALSVSVTEHRRADFSMLLAMLSQDALEFSQFHLPESELIEAELSESALKKELQIGPQQALAPETYDMLIGQDNAARLAQSSLTTLKLQQCLSPEPLAIRNDKAHIPLVVVDNCEIAVRKRLESVKNGASKEEKPAMNAAGFYDQLASGQMQSALQLTA

SEQ ID NO: 24335 - protein, 285 aa, Pseudoalteromonas byunsanensis
  misc_feature (1)..(285): tr|A0A1S1NAZ6|A0A1S1NAZ6_9GAMM Uncharacterized protein OS=Pseudoalteromonas byunsanensis OX=327939 GN=BIW53_04 300 PE=4 SV=1
MILFVDSLTVIDFSYLCNQRGAVGESWIVDLTLHGQLNNESMVLDFALVKKQIKRIIDDTIDHKLAIAKGLNGTVDIKDGRVELDCQFGDGYHLAMSAPEQSVCLLDGDKVDEHSVVEFLKSVIMPKMPENVKDIGIELRAEKAESFYYHYSHGLKKHDGNCQRIIHGHRSQIGVFVDGMKHPRLQKLWASKWQDIYLGTEEDIIQPQQLRHVKALDGDVCFAYDATQGYFELAISRKRCDILPCDTTVECIAEYLAHQIKLESAEKEIMVKAYEGVGKGAIAYA

SEQ ID NO: 24336 - protein, 175 aa, Pseudoalteromonas carrageenovora
  misc_feature (1)..(175): tr|A0A2K4X838|A0A2K4X838_PSEVC QueD like 2 OS=Pseudoalt eromonas carrageenovora IAM 12662 OX=1314868 GN=PCAR9_A 20933 PE=4 SV=1
MQIDDLLITESQLNSKLNNSVHENRRGEFALLLAMLSHDALDFSQFHLPKTEIDSTATSEDSLRKKFGAGPKQSLAPGEFDMLIGQFNAALISEHGAQAGMKSIKLNQYLKPEPLTIRDDDKHIPLNVLDNCEIAVRRRIKSEYTQLANPPIDASAFYDSLNDDSIHQPLHLIAV

SEQ ID NO: 24337 - protein, 285 aa, Pseudoalteromonas carrageenovora
  misc_feature (1)..(285): tr|A0A2K4X970|A0A2K4X970_PSEVC 6-pyruvoyl tetrahydropte rin synthase OS=Pseudoalteromonas carrageenovora IAM 12 662 OX=1314868 GN=PCAR9_A30030 PE=4 SV=1
MILFVNSLTVIDFSYLCNKRGAVGESWIVDLTLHGKLNDKSMVLDFGLVKKQIKGIIDDCIDHRLAIPSGLTGSVNEFENHKTLDCTFGDNKHLAMSAPHQAYCMIDAEQVNVESVTEFLIATILPKLPDNIEKIELELKPEHSQSFYYHYSHGLKKHDGNCQRIIHGHRSQIGISLDGISMPRLQKEWSQKWEDIYLATSEDKIDAKDLKHVSAKSDDVCFAYTSAQGYFEMAISESRCDILPVDTTVECIAEHVAGQVKAQYPDKDVKITAYEGVGKGSISYA

SEQ ID NO: 24338 - protein, 285 aa, Pseudoalteromonas citrea
  misc_feature (1)..(285): tr|U1JPS6|U1JPS6_9GAMM Uncharacterized protein OS=Pseud oalteromonas citrea DSM 8771 OX=1117314 GN=PCIT_10819 P E=4 SV=1
MILFVDALTVIDFSYLCNRRGAVGESWIVDLTLHGQLNDESMVLDFALVKKQIKKIIDETIDHKLAIANGVNGEVSVANERVELDCLFGDNYHLAMSAPSEAVCLLPSEHVDESAVITFLKSVIMPAMPNNVKDIGIELRPEPSTSFYYHYSHGLKKHDGNCQRIVHGHRSLIGIALDGMSMPRLQKEWAMKWQDIYLGTLEDQVSAADLKHVTALSTDYCFAYEATQGYFELAISQARCDVLPCDTTVECIAEYLACEIKKSHPSQQVTVKAYEGVGKGAIAYA

SEQ ID NO: 24339 - protein, 285 aa, Pseudoalteromonas denitrificans
  misc_feature (1)..(285): tr|A0A1I1FZA6|A0A1I1FZA6_9GAMM 6-pyruvoyl tetrahydropte rin synthase OS=Pseudoalteromonas denitrificans DSM 605 9 OX=1123010 GN=SAMN02745724_00760 PE=4 SV=1
MILFVNDLTVIDFSYLCEKRGAVGESWIVDLTLHGSLNEESMILDFGLVKKQIKKIIDEKLDHKLALPINSNISVKSSNTQTNINFSFADEKEINISAPHEAFCSINATNITEQTVIDYLTAQIMPLLPKNIEKIELTLRAEDTNGFYYHYSHGLKKHDGNCQRIVHGHRSTIGIFENDMKSVRLQKEWALRWEDIYLGSAEDIIVASLLKFVSPVENAWHFAYEAPQGYFELSISKSQCEILPVDTTVECIAQYIADELKSNAKSNTYKVIAYEGVGKGAIAYA

SEQ ID NO: 24340 - protein, 285 aa, Pseudoalteromonas distincta
  misc_feature (1)..(285): tr|F3BL45|F3BL45_9GAMM Uncharacterized protein OS=Pseud oalteromonas distincta OX=77608 GN=PH505_bg00240 PE=4 S V=1
MILFVNSLTVIDFSYLCNKRGAVGESWIVDLTLHGKLNEESMVLDFGLVKKQIKGIIDECIDHRLAIPTGLNGTVSEFDEHKTLDCTFGENNHLAMSAPHQAYCMINADEVTVESVTEFLIATILPKLPDNIEKIELSLKPEHSQSFYYHYSHGLKKHDGNCQRIIHGHRSQIGISLDGISMPRLQKEWSQKWEDIYLATSEDQINAADLKHIPAKAGDVCFAYTSAQGYFEMAISESRCDILPVDTTVECIAEHVAGQIKAQYPEKAVKVTAYEGVGKGSISYV

SEQ ID NO: 24341 - protein, 285 aa, Pseudoalteromonas distincta
  misc_feature (1)..(285): tr|A0A5B0UGZ1|A0A5B0UGZ1_9GAMM Uncharacterized protein OS=Pseudoalteromonas distincta OX=77608 GN=EU511_08160 PE=4 SV=1
MILFVNSLTVIDFSYLCNKRGAVGESWIVDLTLHGKLNEESMVLDFGLVKKQIKGIIDECIDHRLAIPTGLNGTVSEFDEHKTLDCTFGENNHLAMSAPHQAYCMINADEVTVESVTEFLIATILPKLPDNIEKIELSLKPEHSQSFYYHYSHGLKKHDGNCQRIIHGHRSQIGISLDGISMPRLQKEWSQKWEDIYLATSEDQINAADLKHIPAKAGDVCFAYTSAQGYFEMAISESRCDILPVDTTVECIAEHVAGQIKAQYPEKAVKVMAYEGVGKGSISYV

SEQ ID NO: 24342 - protein, 285 aa, Pseudoalteromonas elyakovii
  misc_feature (1)..(285): tr|A0A558I7E8|A0A558I7E8_9GAMM Uncharacterized protein OS=Pseudoalteromonas elyakovii OX=81037 GN=FQP81_04145 PE=4 SV=1
MILFVNSLTVIDFSYLCNKRGAVGESWIVDLTLHGKLNEESMVLDFGLVKKQIKGIIDECIDHRLAIPTGLNGTVSEFDEHKTLDCTFGENNHLAMSAPHQAYCMINANEVTVESVTEFLIATILPKLPDNIEKIELSLKPEHSQSFYYHYSHGLKKHDGNCQRIIHGHRSQIGISLDGISMPRLQKEWSQKWEDIYLATSEDQINAPDLKHLTAKADDVCFAYTSAQGYFEMAISESRCDILPVDTTVECIAEHVAGQIKAQYPEKAVKVTAYEGVGKGSISYV

SEQ ID NO: 24343 - protein, 175 aa, Pseudoalteromonas elyakovii
  misc_feature (1)..(175): tr|A0A558HPI1|A0A558HPI1_9GAMM QueD like 2 OS=Pseudoalt eromonas elyakovii OX=81037 GN=FQP81_17640 PE=4 SV=1
MQIDDLLITESQLNSRLNNSVHENRRGEFSLLLAMLSHDALDFSQFHLPKTEIDNLVIEEEALRKQLGAGPKQLLAPDEYNMLVGQFNASLISQEGERCGMTSIKLRQCLKPEPLAIRNDDKHIPLNIIDNCELAVRRRIKSEQTQLANPPIDAAAFYDSLNNDAIHQPLQLIAV

SEQ ID NO: 24344 - protein, 285 aa, Pseudoalteromonas espejiana
  misc_feature (1)..(285): tr|A0A510XU37|A0A510XU37_9GAMM Uncharacterized protein OS=Pseudoalteromonas espejiana OX=28107 GN=queD PE=4 SV =1
MILFVNSLTVIDFSYLCNKRGAVGESWIVDLTLHGKLNEESMVLDFGLVKKQIKGIIDECLDHKLAIAKGLNGTVEEFAEHKTLDCTFGDSHHLAMSAPHQAYCMIDAPEITVESVTEFLIATILPQLPDNIEKIELSLKPEHSQSFYYHYSHGLKKHDGNCQRIIHGHRSQIGISLDGMSMPRLQKQWAEKWQDIYLATSEDQISASDLKHINAKSDDVCFAYTAAQGYFEMAISESRCDILPVDTTVECIAQHLAEQVKIEYPDKDVKITAYEGVGKGSISYA

SEQ ID NO: 24345 - protein, 175 aa, Pseudoalteromonas espejiana
  misc_feature (1)..(175): tr|A0A510XXZ0|A0A510XXZ0_9GAMM QueD-like protein OS=Pse udoalteromonas espejiana OX=28107 GN=s4P PE=4 SV=1
MQIDDLLITESQLKTRLNKSVHENRRGEFSLLLAMLSHDALDFSEFHLPKSEMHNDYTDEETLRKRFGAGPKQLLAPEQFDMLIGQTHSSTIYEQGVATGMKNIKLTQYLNPEPLAIRDDKTHIPLTIIDNCELSVRRRIAKKHTDLTNPQMDAAAFYDDLNNDAVHKPLLLASA

SEQ ID NO: 24346 - protein, 285 aa, Pseudoalteromonas fuliginea; identical to SEQ ID NO: 24340
  misc_feature (1)..(285): tr|A0A063KTE4|A0A063KTE4_9GAMM 6-pyruvoyl tetrahydropte rin synthase OS=Pseudoalteromonas fuliginea OX=1872678 GN=DC53_09995 PE=4 SV=1

SEQ ID NO: 24347 - protein, 175 aa, Pseudoalteromonas fuliginea
  misc_feature (1)..(175): tr|A0A5B0UPH7|A0A5B0UPH7_9GAMM QueD like 2 OS=Pseudoalt eromonas fuliginea OX=1872678 GN=EU509_02950 PE=4 SV=1
MQIDDLLITESQLSTRLNKSVHEQRRGEFSLLLAMLSQDALDFSQFHFPKTDIENPIVEEETLRKQFGSGPKQPLAPDEFNMLIGQHNAALLSNVGEHAGMSDIKLRHCLNPEPLSIRNDLAHIPLNVLDNCELAVRRRIKNKETQLSHPQMDVASFYDGLNDESLHQPLHLATA

SEQ ID NO: 24348 - protein, 285 aa, Pseudoalteromonas haloplanktis
  misc_feature (1)..(285): tr|Q3IGG7|Q3IGG7_PSEHT Uncharacterized protein OS=Pseud oalteromonas haloplanktis (strain TAC 125) OX=326442 GN =PSHAa1493 PE=4 SV=1
MILFVNSLTVIDFSYLCNKRGAVGESWIVDLTLHGKLNNESMVLDFGLVKKQIKGIIDECIDHRLAVPNNLNGVVSEFSDHKTLDCTFGDNHHLAMSAPHQAYCMINADEVTIASVTDFLIATILPQLPDNIEKIELSLKPEHNQSYYYHYSHGLKKHDGNCQRIIHGHRSQIGISLDGISMPRLQKEWSQKWQDIYLATAEDQIKADELQHVSAKAGDVCFAYTSAQGYFEMAISESRCDILPSDTTVECIAEYLAGQVKAQYPEKAVKITAYEGVGKGSISHA

SEQ ID NO: 24349 - protein, 285 aa, Pseudoalteromonas issachenkonii
  misc_feature (1)..(285): tr|A0A290SLD4|A0A290SLD4_9GAMM Uncharacterized protein OS=Pseudoalteromonas issachenkonii OX=152297 GN=PISS_a1 696 PE=4 SV=1
MTLFVNSLTVIDFSYLCNKRGAVGESWIVDLTLHGKLNEESMVLDFGLVKKQIKGIIDECIDHRLAVPNNINGSINEFADHKTLDCTFGENKHIAMSAPHQAFCLIDTDKITIESVTEYLVATILPQLPDNIEKIELVLKPEHNQSFYYHYSHGLKKHDGNCQRIIHGHRSQIGISLGGISMPRLQKQWADKWQDIYLATSEDQISASELKHIIAKEDDVCFAYTAAQGYFEMAISESRCDILPIDTTVECIAEYIAGQVKLQHPEKDVKITAYEGVGKGSISYA

SEQ ID NO: 24350 - protein, 285 aa, Pseudoalteromonas lipolytica
  misc_feature (1)..(285): tr|A0A0P7D2N2|A0A0P7D2N2_9GAMM 6-pyruvoyl tetrahydropte rin synthase OS=Pseudoalteromonas lipolytica OX=570156 GN=AOG27_15005 PE=4 SV=1
MILFVNSLTVIDFSYLCNKRGAVGESWIVDLTLHGQLNDESMVLDFGLVKKQIKGIIDNCIDHKLAVPATLNGSLTQHAEHSVLDCHFGDNYHLAMSAPNQAYCLIDADVIDEKSVTEFLIKTIMPELPSNIEKIEINLYPEHSQSFYYHYSHGLKKHDGNCQRIIHGHRSQIGISLDGMAMPRLQKEWADKWEDIYLATAEDEINKSDLKHVTAQENDVCFAYTSQQGYFEMAIDKSRCDILPCDTTVECIADYLSSQVKNQYPDTEVKITAYEGVGKGSISYA

SEQ ID NO: 24351 - protein, 199 aa, Pseudoalteromonas lipolytica
  misc_feature (1)..(199): tr|Z5XR39|Z5XR39_9GAMM Putative QueD like protein OS=Ps eudoalteromonas lipolytica SCSIO 04301 OX=1452721 GN=AT 00_09585 PE=4 SV=1
MEFALLSILVLVVVASVVASKFSDDGGNPYPFTRKQSVFTQVESAFLNLLERAVGDQYKIVSRVKLIDLIDCKQGLSVKAKRAAMTKAKGKQLDYVLIDKEKLTIVAAVDLVNNTNKDGHKAQRDWFVSGALEAAGIPHIRMKVKSGYQPREVRDAIMFKLGKPAAAPIRPTRNRVTKPAVLSPSQAKAHTSSTALAEI

SEQ ID NO: 24352 - protein, 196 aa, Pseudoalteromonas luteoviolacea
  misc_feature (1)..(196): tr|A0A167CEE7|A0A167CEE7_9GAMM Putative QueD like prote in OS=Pseudoalteromonas luteoviolacea DSM 6061 OX=13652 50 GN=N475_06705 PE=4 SV=1
MELTLLAILALVVVASIVISKYTDAGGNPYPFNRKDSVFTTVEASFLQLLERAVGDKFKIVSRVKLVDVIECKPGLSKKARRSAITKAQNKQLDYVLVDKSTLNIVAAVDLVNNANKNGHKAQKDWFVSGALESAGIPHIRMKIKSGYKSPEVRAAILFKLGQKPEQTKPVRNRSYKPAVLSPSQAKAASTQLAEI

SEQ ID NO: 24353 - protein, 284 aa, Pseudoalteromonas luteoviolacea
  misc_feature (1)..(284): tr|A0A0C1QPG1|A0A0C1QPG1_9GAMM 6-pyruvoyl tetrahydropte rin synthase OS=Pseudoalteromonas luteoviolacea OX=4365 7 GN=JF50_13760 PE=4 SV=1
MILFVDALTVIDFSYLCAKRGAVGESWIVDMTLHGQLNEESMVLDFAKVKKQIKAIIDNTIDHKLAIPSALNCQLNSDDGRTSFDYEFNGHHLAMSAPDEAVCIVEGDKIDEESVIAFLKQQILPKMPENVKDIDITLRAEETSSFYYHYSHGLKKHDGNCQRIIHGHRSLIGIFFDGVSMPRMQKEWSQKWEDIYLGTQEDLIEHAQLKYISAKDGDYSFAYESSQGYFEMCISQARCDILPCDTTVECIAEYLANEIKKENPDKEVKVRAYEGVGKGAIAYA

SEQ ID NO: 24354 - protein, 285 aa, Pseudoalteromonas marina
  misc_feature (1)..(285): tr|U1JLR7|U1JLR7_9GAMM Uncharacterized protein OS=Pseud oalteromonas marina DSM 17587 OX=1117316 GN=PMAN_11991 PE=4 SV=1
MILFVNSLTVIDFSYLCNKRGAVGESWIVDLTLHGKLNDESMVLDFGLVKKQIKGIIDECIDHRLAIPNSINGSVTEFDDHKTLDCTFGDNHHLAMSAPHQAYCMIESDEINVESVTAFLVDTILPKLPSNIEKIELSLKPEHSQSFYYHYSHGLKKHDGNCQRIIHGHRSQIGISLDGISMPRLQKEWAMQWEDIYLATSEDQIEPQNLKHISARDNDVCFAYTSAQGYFEMAISETRCDILPIDTTVECIAGYIAGQVKAKHPEQNVKITAYEGVGKGAISYA

SEQ ID NO: 24355 - protein, 285 aa, Pseudoalteromonas neustonica
  misc_feature (1)..(285): tr|A0A558IXF3|A0A558IXF3_9GAMM Uncharacterized protein OS=Pseudoalteromonas neustonica OX=1840331 GN=FQP85_029 70 PE=4 SV=1
MILFVNALTVIDFSYLCNKRGAVGESWIVDLTLHGKLNEESMVLDFGLVKKQIKGIIDQCIDHKLAIGNQINGQVENHADYTTLDCTFGDDHHLAMSAPNQAFCLIDADVINEQSVIEFLIATIMPQLPSNIDKIEIELKPEHSKSFYYHYSHGLKKHDGNCQRIIHGHRSQIGIALDGMAMPRLQKQWADKWQDIYLATAEDQIQAPQLQHISAKENDLCFAYTAAQGYFEMAISKERCDILPIDTTVECIAGYLAEQVKAQHPDNDVKVTAYEGVAKGSICYA

SEQ ID NO: 24356 - protein, 173 aa, Pseudoalteromonas neustonica
  misc_feature (1)..(173): tr|A0A558IGY8|A0A558IGY8_9GAMM QueD like 2 OS=Pseudoalt eromonas neustonica OX=1840331 GN=FQP85_18620 PE=4 SV=1
MQIDDLLITESQLNNRLAKSVSEHRRGEFALLLAMLSHDVLDFSQFHLPKTPFDAHASTPTEAQLREQLGAGPEQALAPDEFDMLIGQHNAQLLQQGSMADIRLRSCLAPEPLVIRDDKNHIPLMVIDNCELVVRKRHLDKETQLDHPQMDAAAFYDSLNNAELHQPLHLAQA

SEQ ID NO: 24357 - protein, 285 aa, Pseudoalteromonas nigrifaciens
  misc_feature (1)..(285): tr|A0A379HAS7|A0A379HAS7_9GAMM Queuosine biosynthesis p rotein QueD OS=Pseudoalteromonas nigrifaciens OX=28109 GN=NCTC10691_01662 PE=4 SV=1
MILFVNSLTVIDFSYLCNKRGAVGESWIVDLTLHGKLNDESMVLDFGLVKKQIKGIIDECIDHRLAVPNNLNGVVSEFSDHKTLDCTFGDNHHLAMSAPHQAYCMINADEVTIASVTDFLIATILPQLPDNIEKIELSLKPEHNQSYYYHYSHGLKKHDGNCQRIIHGHRSQIGISLDGISMPRLQKEWSQKWQDIYLATAEDQIKADDLQHVSAKAGDVCFAYTSAQGYFEMAISESRCDILPSDTTVECIAEYLAGQVKAQYPEKAVKITAYEGVGKGSISHA

SEQ ID NO: 24358 - protein, 284 aa, Pseudoalteromonas peptidolytica
  misc_feature (1)..(284): tr|A0A510UBE9|A0A510UBE9_9GAMM Uncharacterized protein OS=Pseudoalteromonas peptidolytica OX=61150 GN=queD PE= 4 SV=1
MILFVDSLTVIDFSYLCPRRGAVGESWITDIVLHGDLNAESMVLDFAKVKKQIKQIIDEKLDHKLAIPSALSANTKHTNGRFELDLHIGDSHLAMSAPEQAVCMIEGEEVNEVNTIAYLKSVILPHLPDNVKDLDITLRPEATSGFYYHYSHGLKKHDGNCQRIIHGHRSLIGIKLNDVSMPRLQKQWADKWQDIYLGSEEDLISSAELKHIVAEEGDYAFAYTSSQGYFELAISKSRCDILPCDTTVECIAEYLAGQVKVQHPNDHVQVRAYEGVGKGAIAYA

SEQ ID NO: 24359 - protein, 285 aa, Pseudoalteromonas phenolica
  misc_feature (1)..(285): tr|A0A0S2K1B7|A0A0S2K1B7_9GAMM 6-pyruvoyl-tetrahydropte rin synthase OS=Pseudoalteromonas phenolica OX=161398 G N=PP2015_1557 PE=4 SV=1
MILFVDALTVIDFSYFCNKRGPVGESWIADLTLHGDLNNESMVLDFALVKKQIKRIIDDTIDHKLAIPKRLNGTCSIENEQVKIDAQFGEEHHIAMYAPEQAVCLIDAETVNEQSVIEFLKQQIMPKMPENVKDIDIELRPEQTSSFYYHYSHGLKKHDGNCQRIVHGHRSLIGISLDNIVMPRLQKEWSRKWEDIYLGSEEDLINNSELKHIKALDSDYAFSYTSTQGYFELAISKARCDLLPCDTTVECIADYLATEIKKTHPDNAVKVKAFEGVGKGAIAYA

SEQ ID NO: 24360 - protein, 173 aa, Pseudoalteromonas phenolica
  misc_feature (1)..(173): tr|A0A4Q7INU8|A0A4Q7INU8_9GAMM QueD like 2 OS=Pseudoalt eromonas phenolica OX=161398 GN=C1E23_12605 PE=4 SV=1
MQLERILNKEHQLGDTLAKSVAQDRRADFALCLAMLSPNALDFSEFHLPESELIEPDRSEAALKKELNLGPQQQMAPTTFDMTIGQSNSRLLLEQGLTELRLRHCLSPEPLHIRDDKKHIELAIIDNCEPTVQAKIFAQRAGALEIDKPKIDAAGFYDQLASGEMQKAVQLSA

SEQ ID NO: 24361 - protein, 284 aa, Pseudoalteromonas piratica
  misc_feature (1)..(284): tr|A0A0A7EHQ3|A0A0A7EHQ3_9GAMM 6-pyruvoyl tetrahydropte rin synthase OS=Pseudoalteromonas piratica OX=1348114 G N=OM33_10770 PE=4 SV=1
MILFVKDLTVIDFSYLCSARGPLGESWIVDLEMHGDLNEESMVLDFSLVKKQVKRIIDDVIDHKLAIATQGDAIVSTSGEQTNVNFSFGNHQLAVSSPHQAFCLIDTDKINEASVKQFLEDTILPQLPKNVSKIVLNLRPEHTNGFYYHYSHGLKKHDGNCQRIIHGHRSTIEIEENGMRSPRLNKLWCQKWQDIYLVSAEDRISAAELKFVTPIENGVHSAYTASQGYFELSISEAVVDILPVDSTVECIAQHIAQTLKLDNPDSSFRVAAYEGVGKGAIAYA

SEQ ID NO: 24362 - protein, 196 aa, Pseudoalteromonas piratica
  misc_feature (1)..(196): tr|A0A0A7EH83|A0A0A7EH83_9GAMM QueD like protein OS=Pse udoalteromonas piratica OX=1348114 GN=OM33_13260 PE=4 S V=1
MELVSLLILVLVVVAAFVASKFTHSGNPYPFTQKKSLFTQVETAFLNLLEKAIGSDYKIVSRVKLIDILEFQPGTDEKSRRSALAKAQNKQLDYVLLDKDSLKIVAAIDLVNNASKNGHKAKKDWFVNGALESAGIPLIRIKVKSGYKAQEVRQAILFKLGKQTNNSKPIRKSTIKNTPVLSPSQVKSASTALAQI

SEQ ID NO: 24363 - protein, 284 aa, Pseudoalteromonas piscicida
  misc_feature (1)..(284): tr|A0A3B6Y1W5|A0A3B6Y1W5_PSEO7 Uncharacterized protein OS=Pseudoalteromonas piscicida OX=43662 GN=D0N37_10070 PE=4 SV=1
MILFVDSLTVIDFSYLCPRRGAVGESWITDIVLHGELNEESMVLDFAKVKKQIKRIIDEKLDHKLAVPSALACNAKHSEGRFEFDMQFDGNHLAMNAPEEAVCVVGGNEINEANAIAYLKSVIMPHMPENVKDLDITLRPEAATGFYYHYSHGLKKHDGNCQRIIHGHRSLIGVKLNDISMPRLQKQWADKWQDIYLGSEEDLIDPSLLQYVTAQDKDYAFAYTSSQGYFELAISKSRCDILPCDTTVECIADYLAGQIKAQNPHDKVEVRAYEGVGKGAIAYA

SEQ ID NO: 24364 - protein, 284 aa, Pseudoalteromonas piscicida
  misc_feature (1)..(284): tr|A0A0F4P1Z8|A0A0F4P1Z8_PSEO7 6-pyruvoyl tetrahydropte rin synthase OS=Pseudoalteromonas piscicida OX=43662 GN =PPIS_a1344 PE=4 SV=1
MILFVDSLTVIDFSYLCPRRGAVGESWITDIVLHGELNEESMVLDFAKVKKQIKRIIDEKLDHKLAVPSALACNAKHSEGRFEFDMQFDGNHLAMNAPEEAVCVVEGDEINEANAIAYLKSVIMPHMPENVKGLDITLRPEAATGFYYHYSHGLKKHDGNCQRIIHGHRSLIGVKLNDISMPRLQKQWADKWQDIYLGSEEDLIDPSLLQYVTAHDKDYAFAYTSSQGYFELAISKSRCDILPCDTTVECIAEYLAGQIKLQNPHDKVEVRAYEGVGKGAIAYA

SEQ ID NO: 24365 - protein, 285 aa, Pseudoalteromonas porphyrae
  misc_feature (1)..(285): tr|A0A0N0M0I7|A0A0N0M0I7_9GAMM 6-pyruvoyl tetrahydropte rin synthase OS=Pseudoalteromonas porphyrae OX=187330 G N=ADS77_06730 PE=4 SV=1
MILFVNALTVIDFSYLCNKRGAVGESWIVDLTLHGQLNEESMVLDFGLVKKQIKGIIDDCIDHKLAIPSIIQGEVVAYDDYRTLDCTFGDGHHLAMSAPHQAFCMIDAPVINEQSVIDFLIATIMPQLPSNIDKIEIELKPEHSKSFYYHYSHGLKKHDGNCQRIIHGHRSQIGIALDGMAMPRLQKQWADKWQDIYLATAEDEIKAEQLIHITAKKDDLCFAYTAAQGYFEMVLSKVRCDILPVDTTVECIAAYLAEQVKLVHPDNDVKITAYEGVAKGSICYA

SEQ ID NO: 24366 - protein, 197 aa, Pseudoalteromonas porphyrae
  misc_feature (1)..(197): tr|A0A0N1EMI1|A0A0N1EMI1_9GAMM QueD like protein OS=Pse udoalteromonas porphyrae OX=187330 GN=ADS77_04860 PE=4 SV=1
MEFALLSILVLVVGASVVASKFTDDGGNPYPFTRKESVFTQVESAFLNLLERAVGDQYKIVSRVKLIDIIDCKHGLSPKAKRAAIAKAKNKQLDYVLIDKEKMTIVAAVDLVNNANKDGHKAQRDWFVNGALEAAGIPHIRMKVKSGYRPSEVRDAIMFKLGKPAAPSIRPSRNRVTKPAVLSPSQAKAHSTALAEI

SEQ ID NO: 24367 - protein, 285 aa, Pseudoalteromonas profundi
  misc_feature (1)..(285): tr|A0A3A3EKK6|A0A3A3EKK6_9GAMM Uncharacterized protein OS=Pseudoalteromonas profundi OX=1774956 GN=D4741_01910 PE=4 SV=1
MILFVNSLTVIDFSYLCNKRGAVGESWIVDLTLHGQLNDESMVLDFGLVKKQIKGIIDNCIDHKLAVPAKLNGSLTQHAEHSVLDCHFGDNYHLAMSAPNQAFCLIDADVVDEKSVTEFLIKTIMPELPSNIEKIEINLYPEHSQSFYYHYSHGLKKHDGNCQRIIHGHRSQIGISLDGMAMPRLQKEWADKWEDIYLATAEDEINKTDLKHVTAHDNDVCFAYTSQQGYFEMAIDKSRCDILPCDTTVECIADYLSSQVKIQYPESEVKITAYEGVGKGSISYA

SEQ ID NO: 24368 - protein, 171 aa, Pseudoalteromonas profundi
  misc_feature (1)..(171): tr|A0A3A3EN06|A0A3A3EN06_9GAMM QueD like 2 OS=Pseudoalt eromonas profundi OX=1774956 GN=D4741_12855 PE=4 SV=1
MQIDGLLLTESQLDNRLNKSVHEHRSGEFALLLAMLSHDALDFSQFHLPKTELTSPDVSESVLRKELGAGPSQPLAPEQFDMLIGQDNAFKLLQGGLSDIRLHHCLNPEPLNVRDDKLHVPLEVIDNCEPAVRKRFYEKNKPVERPQIDAAAFYDSLTDEAIHQPLHLATA

SEQ ID NO: 24369 - protein, 196 aa, Pseudoalteromonas rubra
  misc_feature (1)..(196): tr|A0A0F4QK08|A0A0F4QK08_9GAMM DUF2726 domain-containin g protein OS=Pseudoalteromonas rubra OX=43658 GN=C3B51_ 09500 PE=4 SV=1
MELTLLSILALVVIASIVISKYTDTGGNPYPFNRKDSVFTTVEASFLQLLERSVGDKFKVVSRVKLIEIIECKPGLSKKARRSAITKAQNKQLDYVLVDKETLNIVAAVDLVNNANKNGHKAQKDWFVSGALESAGIPHIRMKVKSGYKSAEVRAAILFKLGKKPEPQAKPRNRNYKPAVLSPSQAKAASTQLAEI

SEQ ID NO: 24370 - protein, 196 aa, Pseudoalteromonas rubra
  misc_feature (1)..(196): tr|A0A0L0ERN5|A0A0L0ERN5_9GAMM QueD like protein OS=Pse udoalteromonas rubra OX=43658 GN=AC626_13095 PE=4 SV=1
MELTLLSILALVVIASIVISKYTDNGGNPYPFNRKESVFTTVEASFLQLLERSVGDKFKVVSRVKLIEIIECKPGLSKKARRAAITKAQNKQLDYVLVDKETLNIVAAVDLVNNANKNGHKAQKDWFVSGALESAGIPHIRMKVKSGYKSAEVRAAILFKLGKKPEPQGKPRNRNYKPAVLSPSQAKAAATQLAEI

SEQ ID NO: 24371 - protein, 287 aa, Pseudoalteromonas ruthenica
  misc_feature (1)..(287): tr|A0A0F4PXP4|A0A0F4PXP4_9GAMM 6-pyruvoyl tetrahydropte rin synthase OS=Pseudoalteromonas ruthenica OX=151081 G N=TW72_09430 PE=4 SV=1
MTLFVNDLTVIDFSFFCPQRGPVGESWIVDLTLDGDLNDESMLLDFGLVKKQIKGIIDSSVDHTLAVPTKANIDILQGDDKVTLESNFGDNNEHHFAMSGPKQAVCLIDAPSINEQVVTEYLVAEITPQLPENVKGITLTLRAEQHQSFYYHYSHGLKKHDGNCQRIVHGHRSTLGVWLDGMAMPSVQKQWAQRWADIYLVSEEDVVEAAHLQDISAAPGDICSRYHANQGEFELAISAKRTEVLPCDTTVECIADYMAKQIKQAYPDKQVEVRAYEGVGKGAIGYA

SEQ ID NO: 24372 - protein, 205 aa, Pseudoalteromonas ruthenica
  misc_feature (1)..(205): tr|A0A0F4PNQ6|A0A0F4PNQ6_9GAMM QueD like protein OS=Pse udoalteromonas ruthenica OX=151081 GN=TW72_15040 PE=4 S V=1
MEFALLSILVLVVVASVVASKFTDNNENPYPFVRKKEIYTQVESAFLSLLERAVGDNYRIVSRVKLADVIDCKAGLSSKSRRIAMTKTKNKQLDYVLLDKQKMTIVAAVDLVNNANKDGHKAQRDWFVSGALETAGIPHIRMKVKSGYRVEDVRNAILFKIGKPETATKRKPTRTPTRPAVLSPSQAKAQASGSALATSTQLAEI

SEQ ID NO: 24373 - protein, 287 aa, Pseudoalteromonas sp.
  misc_feature (1)..(287): tr|A0A4Q6YDD6|A0A4Q6YDD6_9GAMM Uncharacterized protein OS=Pseudoalteromonas sp. CO325X OX=1777262 GN=EXT46_041 10 PE=4 SV=1
MTLFVNDLTVIDFSFFCPQRGPVGESWIVDLTLDGDLNDESMLLDFGLVKKQIKGIIDNSVDHTLAVPTKANIDILQGDDKVTLESNFGDNNEHHFAMSGPKQAVCLIDAPSINEQVVTEYLVAEITPQLPENVKGITLTLRAEQHQSFYYHYSHGLKKHDGNCQRIVHGHRSTLGVWLDGMAMPSVQKQWAQRWADIYLVSEEDVVEAAHLQDISAAPGDICSRYHANQGEFELAISAKRTEVLPCDTTVECIADYMAKQIKQAYPDKQVEVRAYEGVGKGAIGYA

SEQ ID NO: 24374 - protein, 285 aa, Pseudoalteromonas sp.
  misc_feature (1)..(285): tr|A0A4S1F7R1|A0A4S1F7R1_9GAMM Uncharacterized protein OS=Pseudoalteromonas sp. MEBiC 03607 OX=2563601 GN=E5N7 2_11090 PE=4 SV=1
MILFVNSLTVIDFSYLCNKRGAVGESWIVDLTLHGQLNDESMVLDFGLVKKQIKGIIDNCIDHKLAVPAKLNGSLTQHAEHSVLDCHFGDNYHLAMSAPNQAFCLIDADVVDEKSVTEFLIKTIMPELPSNIEKIEINLYPEHSQSFYYHYSHGLKKHDGNCQRIIHGHRSQIGISLDGMAMPRLQKEWADKWEDIYLATAEDEINKADLKHVTAQDNDVCFAYTSQQGYFEMAIDKSRCDILPCDTTVECIADYLSSQVKNQYPESEVKITAYEGVGKGSISYA

SEQ ID NO: 24375 - protein, 284 aa, Pseudoalteromonas spongiae
  misc_feature (1)..(284): tr|A0A290T540|A0A290T540_9GAMM Uncharacterized protein OS=Pseudoalteromonas spongiae UST010723-006 OX=1117319 GN=PSPO_a1637 PE=4 SV=1
MILFVKDLTVIDFSYLCKDRGPLGESWIVDLEMHGDLNDESMVLDFSLVKKQVKRIIDDVIDHKLAIATQGDAVISEAGEQTNVSFSFGEHQLAVSSPHQAFCLIDTDKINETSVKGFLEQTILPQLPSNVSKIILNLRPEHTNGFYYHYSHGLKKHDGNCQRIIHGHRSTIEIEENGMRSPRLNKLWCQKWQDIYLVSAEDRINANELKFVAPIENGVHSAYNASQGYFELSISEAVTDILPVDSTVECIAQHVVQTLKNDNPENSYRVAAYEGVGKGAIAYA

SEQ ID NO: 24376 - protein, 285 aa, Pseudoalteromonas tetraodonis
  misc_feature (1)..(285): tr|A0A1E3WWW7|A0A1E3WWW7_9GAMM Uncharacterized protein OS=Pseudoalteromonas tetraodonis OX=43659 GN=BCD66_1009 5 PE=4 SV=1
MTLFVNSLTVIDFSYLCNKRGAVGESWIVDLTLHGKLNEESMVLDFGLVKKQIKGIIDECIDHRLAVPNNINGSINEFADHKILDCTFGENKHLAMSAPHQAFCLIDTDKITIESVTEYLVATILPQLPDNIEKIELVLKPEHNQSFYYHYSHGLKKHDGNCQRIIHGHRSQIGISLGGISMPRLQKQWADKWQDIYLATSEDKISASELKHIIAKEDDVCFAYTAAQGYFEMAISESRCDILPMDTTVECIAEYIAGQVKLQHPEKDVKITAYEGVGKGSISYA

SEQ ID NO: 24377 - protein, 175 aa, Pseudoalteromonas tetraodonis
  misc_feature (1)..(175): tr|A0A1E3WXZ3|A0A1E3WXZ3_9GAMM QueD like 2 OS=Pseudoalt eromonas tetraodonis OX=43659 GN=BCD66_11680 PE=4 SV=1
MQIGDLLITESQLKTRLNESVHENRRGEFALLLAMLSHDALDFSEFHLPKSDTKHYQADEDALRKQFGAGPKQPLAPDTFNMLIGKNNTELLAKMGSAVGMSDIKLTQCLKPEPFNIRDDKNHIPLTVIDNCELAVRRRIQNTNTELSNPQMDPVAFYDDLQNEAIHQPLHLFSA

SEQ ID NO: 24378 - protein, 285 aa, Pseudoalteromonas translucida
  misc_feature (1)..(285): tr|A0A0U2WZH8|A0A0U2WZH8_9GAMM Uncharacterized protein OS=Pseudoalteromonas translucida KMM 520 OX=1315283 GN= PTRA_a1887 PE=4 SV=1
MILFVNSLTVIDFSYLCNKRGAVGESWIVDLTLHGKLNDESMVLDFGLVKKQIKGIIDECIDHRLAVPNNLNGMVSEFSDHKTLDCTFGDNHHLAMSAPHQAYCMINADEVTIASVTDFLIATILPQLPDNIEKIELSLKPEHNQSYYYHYSHGLKKHDGNCQRIIHGHRSQIGISLDGISMPRLQKEWSQKWQDIYLATAEDQIKADELQHVSAKAGDVCFAYTSAQGYFEMAISESRCDILPSDTTVECIAEYLAGQVKAQYPEKAVKITAYEGVGKGSISHA

SEQ ID NO: 24379 - protein, 284 aa, Pseudoalteromonas tunicata
  misc_feature (1)..(284): tr|A4C9L6|A4C9L6_9GAMM Uncharacterized protein OS=Pseud oalteromonas tunicata D2 OX=87626 GN=PTD2_19702 PE=4 SV =1
MILFVNDLTVIDFSYLCHQRGAVGESWIVDLTLHGSLNAQSMVLDFALVKKQVKRIIDEQIDHKLAVPKHPNVTVTHQDVQTNVSFNYADAQLALSCPAQAYCFIESPEINIASVTEYLIKTIMPQLPQNIDKIEITLRPEKIDTFYYHYSHGLKKHDGNCQRIVHGHRSKIEIYENGMKSPRLQKQWAELWQDIYLVSEEDIITAGQLKFISAHENSLCCAYIAPQGYFELAINQNRTHLLPYDTTVECIAQYIAEQLKAQNPNNDFKVVAYEGVAKGSIAYA

SEQ ID NO: 24380 - protein, 285 aa, Pseudoalteromonas ulvae
  misc_feature (1)..(285): tr|A0A244CMF7|A0A244CMF7_9GAMM Uncharacterized protein OS=Pseudoalteromonas ulvae OX=107327 GN=B1199_15530 PE= 4 SV=1
MILFVNDLTVIDFSYLCHQRGAVGESWIVDLTLHGSLNEESMVLDFALVKKQVKKIIDEHIDHKLALPMAKNVCLEQQGEQTNVTFMYADNKRLAMSCPAQAYCPIDADEINQQTVTAFLINTILPLLPNNIDKIEINLRPENIDSFYYHYSHGLKKHDGNCQRIVHGHRSKIEIFENGMKSPRLQKQWAEAFEDIYLVSQEDIIEPDALKFIDSSPSHLCCAYTAPQGYFELSIEQSVTHTLPCDTTVECIADYLAKALKQANPNSDFKVVAYEGVAKGSIAYA

SEQ ID NO: 24381 - protein, 177 aa, Pseudoarcobacter caeni
  misc_feature (1)..(177): tr|A0A363D1N0|A0A363D1N0_9PROT 6-pyruvoyl tetrahydrobio pterin synthase OS=Pseudoarcobacter caeni OX=1912877 GN =B0174_05735 PE=4 SV=1
MHWKISKEFEFCYGHRVWSQTLDTEFSLDSCLKCRHLHGHQGKILVYLEAQELKDGMVTDFKHLNWFKQFIDDILDHKFILDINDPLFFTLIPNVNKNELINFEEGYYLVNLTKFKDDEIHIKELYEGYIIVDFVPTSENLSAWFLKIVQKKMDKLNVKVSHVEFLETPKSRSTFYA

SEQ ID NO: 24382 - protein, 136 aa, Pseudobacter ginsenosidimutans
  misc_feature (1)..(136): tr|A0A4Q7MKU1|A0A4Q7MKU1_9BACT 6-pyruvoyltetrahydropter in/6-carboxytetrahydropterin synthase OS=Pseudobacter g insenosidimutans OX=661488 GN=EV199_4728 PE=4 SV=1
MVYLTRVEHFNAAHKLYNPAWSKEKNEQVFGKCANEHWHGHNYELLVTIKGKPDPDTGFLYDVKQLSKLIQQHVLDKLDHKNLNMDVDFMQGQLCSTENLAIAIWQQLQPHLPQTVKLHCIKLYETPRIFVEYFGG

SEQ ID NO: 24383 - protein, 118 aa, Pseudobacter ginsenosidimutans
  misc_feature (1)..(118): tr|A0A4Q7MFD2|A0A4Q7MFD2_9BACT 6-carboxy-5,6,7,8-tetrah ydropterin synthase OS=Pseudobacter ginsenosidimutans O X=661488 GN=EV199_5854 PE=3 SV=1
MLIYKEFTFDSAHFLPNVPDGHKCKEMHGHTYRLRVWIEGKPDPQLGWVMDFAVLKKIIKPVVSTLDHKCLNNIPGLSNPTCELIAVWIWDQLKPSIPAMKRLELHETPTSGVVYEGE

SEQ ID NO: 24384 - protein, 311 aa, Pseudobacteriovorax antillogorgiicola
  misc_feature (1)..(311): tr|A0A1Y6B328|A0A1Y6B328_9PROT 6-pyruvoyl tetrahydropte rin synthase OS=Pseudobacteriovorax antillogorgiicola O X=1513793 GN=SAMN06296036_1017 PE=4 SV=1
MDNTFSQTVNREPVGTLFIKDVDRIDCATFDPSVGVTGKSWYVDVEVGGALDDNGFVYDFSLLKKLVKKILKETVDHALLIPIKSSSVEFESAGDNERWTLSAKTKLIGNNSTWTYECPKGSVYPVRSLKITRNIIEQECTKLVRHRLPNTIQKVAVKLRKEEGDAHSTFFRYTHGITGHEGLCQRLFHGHRSRVEVFVADERRTDLERYVAHDLFGSIVHIASVDQVTSGVYEPGMRMNRDESVSLAYTGSLGTYKAEIPLSRTFFVKSFTSIESITTEVAMHLKERFHIQAPVRVHCYEGIDKGAITEV

SEQ ID NO: 24385 - protein, 126 aa, Pseudobacteriovorax antillogorgiicola
  misc_feature (1)..(126): tr|A0A1Y6C5K7|A0A1Y6C5K7_9PROT 6-pyruvoyltetrahydropter in/6-carboxytetrahydropterin synthase OS=Pseudobacterio vorax antillogorgiicola OX=1513793 GN=SAMN06296036_1136 1 PE=4 SV=1
MYEVGIKREVICQHYLIGGDWGHENCPHSHHFVIEMILSSPNLDDHGYVADISKLNVALERLVDKYRDRLLNDLPEFDGLNPSIENFSRIIASELFEDLDRRRFSQGMIKVWEDGQSWASYRETFI

SEQ ID NO: 24386 - protein, 127 aa, Pseudobacteroides cellulosolvens
  misc_feature (1)..(127): tr|A0A0L6JPI0|A0A0L6JPI0_9FIRM 6-carboxy-5,6,7,8-tetrah ydropterin synthase OS=Pseudobacteroides cellulosolvens ATCC 35603 = DSM 2933 OX=398512 GN=Bccel_2543 PE=3 SV= 1
MNNRLMSITKVFTFDSAHHLYEYEGKCKYIHGHTYKLEVTLKGPVNKNGFVIDFHDLKRIINDEVISVVDHRYLNEIFEFNPTCELLGFWIWDKIDASIKGEEYFLEKVVLWETPTSFITIDRKDMV

SEQ ID NO: 24387 - protein, 139 aa, Pseudobutyrivibrio ruminis
  misc_feature (1)..(139): tr|A0A285RDW8|A0A285RDW8_9FIRM 6-carboxy-5,6,7,8-tetrah ydropterin synthase OS=Pseudobutyrivibrio ruminis DSM 9 787 OX=1123011 GN=SAMN02910411_0895 PE=3 SV=1
MYYLTAEASFDGAHFLSGYEGKCSNLHGHRWRVILKIKANELQAEGQQRGMVVDFGDVKNALKKETDFFDHTFIYEEGSLKETTVAALKDEDFLMRVVPFRPTAENFSKYFYEKFEEYGFEVAEVTVYETPNNCASYSK

SEQ ID NO: 24388 - protein, 139 aa, Pseudobutyrivibrio ruminis; identical to SEQ ID NO: 24387
  misc_feature (1)..(139): tr|A0A1H7G947|A0A1H7G947_9FIRM 6-carboxy-5,6,7,8-tetrah ydropterin synthase OS=Pseudobutyrivibrio ruminis OX=46 206 GN=SAMN02910377_00616 PE=3 SV=1

SEQ ID NO: 24389 - protein, 139 aa, Pseudobutyrivibrio sp.
  misc_feature (1)..(139): tr|A0A1I5D431|A0A1I5D431_9FIRM 6-carboxy-5,6,7,8-tetrah ydropterin synthase OS=Pseudobutyrivibrio sp. JW11 OX=1 855302 GN=SAMN05216351_10245 PE=3 SV=1
MYYLTAEASFDGAHFLSGYEGKCSNLHGHRWRVILKIKANELQAEGQQRGMVVDFGDVKNALKKETDFFDHSFIYEEGSLKETTVAALKDEDFLMRVVPFRPTAENFSKYFYEKFEEYGFEVAEVTVYETPNNCASYSK

SEQ ID NO: 24390 - protein, 140 aa, Pseudobutyrivibrio sp.
  misc_feature (1)..(140): tr|A0A1G6DYC8|A0A1G6DYC8_9FIRM 6-carboxy-5,6,7,8-tetrah ydropterin synthase OS=Pseudobutyrivibrio sp. YE44 OX=1 520802 GN=SAMN02910298_02513 PE=3 SV=1
MYYLTAEASFDGAHFLAGYEGKCSNLHGHRWRVILKIKTEKLQSEGQQRGMVVDFGDVKDALKKETDFFDHSFIYELGSLKDETVAALKAENFEMHEVPFRPTAENFSRYFFYKFKEYGFTVAEVTVYETPNNCASYSED

SEQ ID NO: 24391 - protein, 140 aa, Pseudobutyrivibrio xylanivorans
  misc_feature (1)..(140): tr|A0A1G5S2D6|A0A1G5S2D6_PSEXY 6-carboxy-5,6,7,8-tetrah ydropterin synthase OS=Pseudobutyrivibrio xylanivorans OX=185007 GN=SAMN02910350_02349 PE=3 SV=1
MYYLTAEASFDGAHFLAGYEGKCSNLHGHRWRVILKIKTDKLQKEGQQRGMVVDFGDVKNALKKETDFFDHSFIYEEGSLKEATVAALTAEDFEMHVVPFRPTAENFAKYFFDKFKEYGFTVAEVTVYETPNNCASYSED

SEQ ID NO: 24392 - protein, 140 aa, Pseudobutyrivibrio xylanivorans
  misc_feature (1)..(140): tr|A0A1M6FNF8|A0A1M6FNF8_PSEXY 6-carboxy-5,6,7,8-tetrah ydropterin synthase OS=Pseudobutyrivibrio xylanivorans DSM 14809 OX=1123012 GN=SAMN02745725_01508 PE=3 SV=1
MYYLTAEASFDGAHFLAGYDGKCSNLHGHRWRVILKIKTDKLQSEGQQRGMVVDFGDVKNALKKETDFFDHSFIYEEGSLKEATVAALLAEDFEMHVVPFRPTAENFARYFFDKFKDYGFTVAEVTVYETPNNCASYSED

SEQ ID NO: 24393 - protein, 121 aa, Pseudocitrobacter faecalis
  misc_feature (1)..(121): tr|A0A366FDB1|A0A366FDB1_9ENTR 6-carboxy-5,6,7,8-tetrah ydropterin synthase OS=Pseudocitrobacter faecalis OX=13 98493 GN=DFQ50_103211 PE=3 SV=1
MMSTTLFKDFTFEAAHRLPHVPEGHKCGRLHGHSFMVRLEITGEVDPHTGWIMDFAELKAAFKPTYDRLDHYYLNDIPGLENPTSEVLSRWIWEQVKPVVPLLSAVMVKETCTAGCVYRGE

SEQ ID NO: 24394 - protein, 120 aa, Pseudocitrobacter sp.
  misc_feature (1)..(120): tr|A0A5B0K9W1|A0A5B0K9W1_9ENTR 6-carboxy-5,6,7,8-tetrah ydropterin synthase OS=Pseudocitrobacter sp. 73 OX=2605 731 GN=queD PE=3 SV=1
MSTTLFKDFTFEAAHHLPHVPEGHKCGRLHGHSFMVRLEITSEVDPHTGWIMDFAELKAAFKPTYDRLDHYYLNDIPGLENPTSEVLSRWIWEQVKPVVPLLSAVMVKETCTAGCVYRGE

SEQ ID NO: 24395 - protein, 126 aa, Pseudodesulfovibrio aespoeensis
  misc_feature (1)..(126): tr|E6VYW7|E6VYW7_PSEA9 6-carboxy-5,6,7,8-tetrahydropter in synthase OS=Pseudodesulfovibrio aespoeensis (strain ATCC 700646 / DSM 10631 / Aspo-2) OX=643562 GN=Daes_061 2 PE=3 SV=1
MAGKWRLTITQDFSAAHQLRNYGGKCENMHGHNFGVEVAVEGDRLDDKVHYLVDFKEIKRLTKAVLDRLDHKHLNEVECFTEINPSSENLAMFIYKELKDSMPENVRLAEVSVSEKDSSKATYWEE

SEQ ID NO: 24396 - protein, 126 aa, Pseudodesulfovibrio hydrargyri
  misc_feature (1)..(126): tr|A0A1J5N492|A0A1J5N492_9DELT 6-carboxy-5,6,7,8-tetrah ydropterin synthase OS=Pseudodesulfovibrio hydrargyri O X=2125990 GN=queD_2 PE=3 SV=1
MPGKWKLTIAQEFSASHQLRNYCGKCENMHGHNFGVEVVVEGDTLDPEVQYLVDFKTLKGMTKSVLERLDHTHLNEVECFKEINPSSENLAMFIYRNLKAGMPENVSLVEVSVSENNTSKATYWEE

SEQ ID NO: 24397 - protein, 160 aa, Pseudodesulfovibrio hydrargyri
  misc_feature (1)..(160): tr|A0A1J5N7C3|A0A1J5N7C3_9DELT 6-carboxy-5,6,7,8-tetrah ydropterin synthase OS=Pseudodesulfovibrio hydrargyri O X=2125990 GN=queD_1 PE=4 SV=1
MHSLKVDSGHLNFSAAHFITFAGKCERLHGHNYAVEVQLEGGLTGDGYVYDFVELKRTVKTLCDTLDHRFLLPTGNGQFTVTRADGEVEIRVRDRRYVFPERDVLDLPVANITAEYLAQYLAGELFKTLSGCDNISSVQVGVEEAPGQAARFRIETGRQG

SEQ ID NO: 24398 - protein, 126 aa, Pseudodesulfovibrio indicus
  misc_feature (1)..(126): tr|A0A140D8T8|A0A140D8T8_9DELT 6-carboxy-5,6,7,8-tetrah ydropterin synthase OS=Pseudodesulfovibrio indicus OX=1 716143 GN=AWY79_00030 PE=3 SV=1
MPGKWKLTITQEFSASHQLRNYCGKCENMHGHNFGVEVVVEGDTLDEKVQYLLDFKDLKARTRTVLDKLDHKHLNDVECFTEINPSSENLAMFIYRNLKGNLPGHVSLVEVSVSEKGSSKATYWEE

SEQ ID NO: 24399 - protein, 158 aa, Pseudodesulfovibrio piezophilus
  misc_feature (1)..(158): tr|M1WRX9|M1WRX9_PSEP2 6-pyruvoyl tetrahydropterin synt hase (Modular protein) OS=Pseudodesulfovibrio piezophil us (strain DSM 21447 / JCM 15486 / C1TLV30) OX=1322246 GN=BN4_12594 PE=4 SV=1
MREERSQVSSGSVSGQLLSSPRIQESKEIGDPMPGKWKLTITQDFSASHQLRNYGGKCENMHGHNFGVEVVVEGDKLDKKVHYLVDFKEIKQCTKDILERLDHKHLNDVECFTEINPSSENIAMFIYKEMKDALPKQVRLSEVSVSEKDSSKATYWEE

SEQ ID NO: 24400 - protein, 126 aa, Pseudodesulfovibrio profundus
  misc_feature (1)..(126): tr|A0A2C8F8M2|A0A2C8F8M2_9DELT 6-carboxy-5,6,7,8-tetrah ydropterin synthase OS=Pseudodesulfovibrio profundus OX =57320 GN=DPRO_1493 PE=3 SV=1
MPGKWKLTITQDFSASHQLRNYGGKCENMHGHNFGVEVVVEGDKLDEKVQYLVDFKEIKRRTKEVLEKLDHKHLNEVECFTEVNPSSENIAMFIYQELKGNMPENVRLSEVSVSEKDSSKATYWEE

SEQ ID NO: 24401 - protein, 126 aa, Pseudodesulfovibrio sp.
  misc_feature (1)..(126): tr|A0A443YEX3|A0A443YEX3_9DELT 6-carboxy-5,6,7,8-tetrah ydropterin synthase OS=Pseudodesulfovibrio sp. S3 OX=22 83629 GN=queD PE=3 SV=1
MPGKWRLTITQDFSSSHQLRNYGGKCENMHGHNFGVEVAVEGDKLDDKVHYLVDFKEIKRRTKDVLDRLDHRHLNEVPPFTEINPSSENLAMFIYNELKGNMPENVRLAEVSVSEKDSSKATYWEE

SEQ ID NO: 24402 - protein, 117 aa, Pseudoflavitalea sp.
  misc_feature (1)..(117): tr|A0A3B7MJD7|A0A3B7MJD7_9BACT 6-carboxy-5,6,7,8-tetrah ydropterin synthase OS=Pseudoflavitalea sp. 5GH32-13 OX =2315862 GN=queD PE=3 SV=1
MTIYKEFTFDAAHFLANVPEGHKCKQLHGHTYFLKVYVSGEPELPEQWVMDYSDLKAIVKPVIDQLDHKFLNDVQGLENPTAEVVTRWIWQKIKPTLPKLKRIELKETPTSGVIYEE

SEQ ID NO: 24403 - protein, 118 aa, Pseudoflavitalea sp.
  misc_feature (1)..(118): tr|A0A3B7MPL2|A0A3B7MPL2_9BACT 6-carboxy-5,6,7,8-tetrah ydropterin synthase OS=Pseudoflavitalea sp. 5GH32-13 OX =2315862 GN=queD PE=3 SV=1
MLIYKEFTFDSAHFLPNVPDGHKCKEMHGHTYRLRIWIKGQPDPQLGWVMDFAVLKSVVKPVVAELDHKCMNYVAGLENPTCELIAVWIWDRLKPLLPAMDHLELHETPTSGVVYNGN

SEQ ID NO: 24404 - protein, 117 aa, Pseudofulvimonas gallinarii
  misc_feature (1)..(117): tr|A0A4S3KXH7|A0A4S3KXH7_9GAMM 6-carboxy-5,6,7,8-tetrah ydropterin synthase OS=Pseudofulvimonas gallinarii OX=6 34155 GN=B1808_05540 PE=3 SV=1
MDIFKIFTIEAAHRLPNVPPGHKCARLHGHSFRVEIHVSGEPGPESGWVMDFADVKSAFQPLYDQLDHHYLNDIEGLDNPTSERLADWIWQRLQPRLPGLARVVVHETCTSGAIRSG

SEQ ID NO: 24405 - protein, 339 aa, Pseudogulbenkiania ferrooxidans
  misc_feature (1)..(339): tr|U0ZHR7|U0ZHR7_9NEIS 6-pyruvoyl tetrahydrobiopterin s ynthase OS=Pseudogulbenkiania ferrooxidans EGD-HP2 OX=1 388764 GN=O166_11880 PE=4 SV=1
MHASYLIAGAGFEAARRLPADHGQAARPHGHSFRLSVRSDAQNTSQEALQAAVQAAVAPLDYTDLNAALAASDDLSLARHIADALPHPAAIQLRGAPDRGVMLDGARALSWINSSFEAAHYLPHVPPGHKCGRLHGHGFGVRIVADAALSGQHDLARAWATLHGRLNHRYLNDIPGLDNPTSEVLAQWLHQQLRDAVPGLAWVEVRETHSAGSQFDGKTFRIWKEQRFESAMPFDAAGNYTGHSYLVRLMLSGGIDRTMGWLLDFGDVKDRFKPIYRQLDHNPLDKLAGLRRADNAAVAEWIHAQLAPLVPELSRIDLMESDDAGVSLHFRQDMRWPLL

SEQ ID NO: 24406 - protein, 341 aa, Pseudogulbenkiania ferrooxidans
  misc_feature (1)..(341): tr|B9Z1F8|B9Z1F8_9NEIS 6-pyruvoyl tetrahydropterin synt hase OS=Pseudogulbenkiania ferrooxidans 2002 OX=279714 GN=FuraDRAFT_1193 PE=4 SV=1
MHASYLLAGARFEAARQLSADWFEPQFASLHGHSFRVQLRVENIHTNQAGLAETLQRAVQPLNYASLNQRMAAVDDLAIAEHLSEQLSFPHSLTLTSAPERGVILDNGTRLVWLNAGFEAAHQLPHVPAGHKCGRLHGHGFGVRLVADAASANHVDLAAAWGRLFLRLNHRYLNDIPGLANPTSEVLAQWIYRELSADLAGLAWVEVRETHTAGSQFDGRTFRIWKEQHFESAVPFDADGNYTGHSYLIRLMLQGELDGAMGWLLDFGDVKDRFKPVYRQLDHNPLDRLAGIRNGHPASVAEWVHAELSPLVPELARVDLMERDERGVSVLFKDNMRWPLL

SEQ ID NO: 24407 - protein, 341 aa, Pseudogulbenkiania sp.
  misc_feature (1)..(341): tr|G2IYU6|G2IYU6_PSEUL 6-pyruvoyl tetrahydropterin synt hase OS=Pseudogulbenkiania sp. (strain NH8B) OX=748280 GN=NH8B_0867 PE=4 SV=1
MHASYLLAGARFEAARQLPADWFEPQFASLHGHSFRVQLRVENIHTNQAGLAETLQRAVQPLHYASLNQRMAVVDDLAIAEHLSEQLSFPHSLTLTSAPERGVILDNGTRLVWLNAGFEAAHQLPHVPAGHKCGRLHGHGFGVRLVADAASANHVGLAAAWGRLFLRLNHRYLNDIPGLANPTSEVLAQWIYRELSADLAGLAWVEVRETHTAGSQFDGRTFRIWKEQHFESAVPFDADGNYTGHSYLIRLMLQGELDGAMGWLLDFGDVKDRFKPVYRQLDHNPLDRLAGIRNGHPASVAEWVHAELSPLVPELARVDLMERDERGVSVLFKDNMRWPLL

SEQ ID NO: 24408 - protein, 341 aa, Pseudogulbenkiania subflava
  misc_feature (1)..(341): tr|A0A1Y6B8X6|A0A1Y6B8X6_9NEIS 6-pyruvoyltetrahydropter in/6-carboxytetrahydropterin synthase OS=Pseudogulbenki ania subflava DSM 22618 OX=1123014 GN=SAMN02745746_0058 1 PE=4 SV=1
MHASYLLAGARFEAARQLPADWFEPQFASLHGHSFRVQLRVENIHTNQAGLAETLQRAVQPLNYASLNQHMASVDDLAIAEHLSEQLSFPHSLTLTSAPERGVILDNGTRLVWLNAGFEAAHQLPHVPAGHKCGRLHGHGFGVRLVADAASANHIDLAAAWGRLFLRLNHRYLNDIPGLANPTSEVLAQWIYRELSADLAGLAWVEVRETHTAGSQFDGHSFRIWKEQHFESAVPFDAEGNYTGHSYLIRLMLQGELDGAMGWLLDFGDVKDRFKPVYRQLDHNPLDRLAGIRNGHPASVAEWVHAELSPLVPELARVDLMERDERGVSVLFKDNMRWPLL

SEQ ID NO: 24409 - protein, 163 aa, Pseudohaliea rubra
  misc_feature (1)..(163): tr|A0A095X331|A0A095X331_9GAMM Folate biosynthesis prot ein PTPS-III, catalyzes a reaction that bypasses dihydr oneopterin aldolase OS=Pseudohaliea rubra DSM 19751 OX= 1265313 GN=HRUBRA_00106 PE=4 SV=1
MSNRERLTTLYIDKESHKFSVAHYTIFAAGDRERLHGHNYAVSAKIVAPMGNNGFAADYNVYKDRIKALCDELDEYLILPADSPYQRIEEHGHEYRVTFGDEVMHFLRSDTLVLPIVNATVEELSRYLLERLQHTSRGDDLRELRVCVASGPGQKGCASWRAG

SEQ ID NO: 24410 - protein, 118 aa, Pseudohaliea rubra
  misc_feature (1)..(118): tr|A0A095VUY4|A0A095VUY4_9GAMM 6-carboxy-5,6,7,8-tetrah ydropterin synthase OS=Pseudohaliea rubra DSM 19751 OX= 1265313 GN=HRUBRA_00342 PE=3 SV=1
MDIYKDFHFEAAHRLPNVPEGHKCARLHGHSYQLRVTVSGDAPEPSGWVMDFADLKAVIRPVIDRLDHYYLNDIEGLENPTSENLCRWIWARLAPTLPSLRAVEIRETCTSGCIYRGD

SEQ ID NO: 24411 - protein, 132 aa, Pseudohoeflea suaedae
  misc_feature (1)..(132): tr|A0A4R5PI68|A0A4R5PI68_9RHIZ 6-carboxytetrahydropteri n synthase OS=Pseudohoeflea suaedae OX=877384 GN=E2A64_ 14435 PE=4 SV=1
MFAIEVRDHVMIAHSLPRPVFGPAQGMHGATFVVDAAFYTRELDKDGLAVDIGLATTVLKDVLAPLNYQNLDELEVFKGQVTTTEFLAKHVFDRIADAIREGRLGDGGGRICKLRIMLHESHTARGWYEADL

SEQ ID NO: 24412 - protein, 125 aa, Pseudohongiella acticola
  misc_feature (1)..(125): tr|A0A1E8CGI1|A0A1E8CGI1_9GAMM 6-pyruvoyl tetrahydropte rin synthase OS=Pseudohongiella acticola OX=1524254 GN= PHACT_13625 PE=4 SV=1
MYTVAVTKDFIANHYLIGGDWGSENSPHAHHYVAEVSIEAAELDKHGYLVDIVEIEAALDSIVEDFRDSMLNDKPEFAGLNPSIEHFSRIICERLMANIKPPGSGLLNVKLWENATCWAAYRQSF

SEQ ID NO: 24413 - protein, 118 aa, Pseudohongiella acticola
  misc_feature (1)..(118): tr|A0A1E8CGG8|A0A1E8CGG8_9GAMM 6-carboxy-5,6,7,8-tetrah ydropterin synthase OS=Pseudohongiella acticola OX=1524 254 GN=PHACT_13255 PE=3 SV=1
MEIYKEFNFEAAHRLPNVPAGHKCARLHGHSFQVTLVVSGPVGEHSGWVMDFGDIKSAFKPVWEQLDHHYLNEIDGLDNPTSENIARWIWQQLKPGLPELCRIEIRETCTSGCIYTGD

SEQ ID NO: 24414 - protein, 125 aa, Pseudohongiella sp.
  misc_feature (1)..(125): tr|A0A2D9DQA0|A0A2D9DQA0_9GAMM 6-carboxy-5,6,7,8-tetrah ydropterin synthase OS=Pseudohongiella sp. OX=1979412 G N=queD PE=3 SV=1
MEIYKEFNFEAAHRLPNVPEGHKCARLHGHSFQVRLVVAGPVGERSGWVMDFGDIKSAFKPVWEQLDHHYLNDIAGLDNPTSENIARWIWQKLRPTLPQLVRVEIRETCTSGCIYDGADQQTVEA

SEQ ID NO: 24415 - protein, 126 aa, Pseudohongiella sp.
  misc_feature (1)..(126): tr|A0A2D9DV69|A0A2D9DV69_9GAMM 6-pyruvoyl tetrahydropte rin synthase OS=Pseudohongiella sp. OX=1979412 GN=CMK70 _11520 PE=4 SV=1
MYTVAVTRDFIANHYLIGGDWGSENNPHAHHYVAEVRIESDTLNQHGYLVDIVEIEAALDDIVTYFRDSMLNDKPEFAGLNPSIEHFSRILVEKLMPKITPPGEGVLTVKLWENETCWAAYRQAFA

SEQ ID NO: 24416 - protein, 118 aa, Pseudohongiella spirulinae
  misc_feature (1)..(118): tr|A0A0S2KF27|A0A0S2KF27_9GAMM 6-carboxy-5,6,7,8-tetrah ydropterin synthase OS=Pseudohongiella spirulinae OX=12 49552 GN=PS2015_1899 PE=3 SV=1
MEIYKEFSFEAAHRLPNVPEGHKCARLHGHSFQVRLVVAGPVGEHSGWVMDFGDIKKAFKPVWERLDHHYLNEIPGLENPTSENIAAWIWQELKPQLPELARIEIRETCTSGCIYSGE

SEQ ID NO: 24417 - protein, 126 aa, Pseudohongiella spirulinae
  misc_feature (1)..(126): tr|A0A0S2KBW8|A0A0S2KBW8_9GAMM 6-pyruvoyl tetrahydropte rin synthase OS=Pseudohongiella spirulinae OX=1249552 G N=PS2015_1143 PE=4 SV=1
MYTVAVTQDFIANHYLIGGDWGAENQPHAHHYVAEVQIESDTLNEHGYLVDIVEIEAALGDIVAYFRDSMLNDKPEFAGLNPSIEHFSRILAEKLVNSISPPGRGSLTVKLWENATCWAAYRHAFA

SEQ ID NO: 24418 - protein, 134 aa, Pseudokineococcus lusitanus
  misc_feature (1)..(134): tr|A0A3N1HK01|A0A3N1HK01_9ACTN 6-pyruvoyl-tetrahydropte rin synthase OS=Pseudokineococcus lusitanus OX=763993 G N=EDC03_2066 PE=4 SV=1
MYRVSVRDHVMVAHSLPHPFFGPAQAKHGATYDVELVLAARELDEHGVVADIGAASAALAAVLDELRYRDLDEHPAFVGRLTTTEVLARWVADRVVEAGREGGGAAGLTRGLASLEVVLRETPDAWASYRTDLP

SEQ ID NO: 24419 - protein, 118 aa, Pseudomonadaceae bacterium
  misc_feature (1)..(118): tr|A0A3T0SFT3|A0A3T0SFT3_9GAMM 6-carboxy-5,6,7,8-tetrah ydropterin synthase OS=Pseudomonadaceae bacterium SI-3 OX=2079806 GN=queD PE=3 SV=1
MEIFKEFTFESAHRLPHVPEGHKCGRLHGHSFRVAIYLEGEVNAQTGWIRDFSEIKQIFNPIYERLDHHYLNDLPGLDNPTSENLAIWIWNELKPLLPELSRIRIHETCTSGCEYRGQ

SEQ ID NO: 24420 - protein, 118 aa, Pseudomonadaceae bacterium
  misc_feature (1)..(118): tr|A0A2D5CIT5|A0A2D5CIT5_9GAMM 6-carboxy-5,6,7,8-tetrah ydropterin synthase OS=Pseudomonadaceae bacterium OX=19 14538 GN=queD PE=3 SV=1
MELFKEFIFEAAHRLPHVPEGHKCGRLHGHSFRVAVYIEGEVNPHTGWIRDFSEIKAIFKPLYEQLDHNYLNDIPGLENPTSEVLCQWIWKQLKPLLPELSRIRIHETCTSGCEYRGD

SEQ ID NO: 24421 - protein, 121 aa, Pseudomonadales bacterium
  misc_feature (1)..(121): tr|A0A1G3DIJ8|A0A1G3DIJ8_9GAMM 6-carboxy-5,6,7,8-tetrah ydropterin synthase OS=Pseudomonadales bacterium RIFCSP HIGHO2_01_FULL_64_12 OX=1802004 GN=A2883_07200 PE=3 SV= 1
MHTVEIFKEFTFESAHRLPHVPQGHKCGRLHGHSFRVALYISGPVDPHTGWIRDFGELKSIFKPLYERLDHNYLNDIPGLENPTSENLAKWIWNELKPLLPELSRVRIHETCTSGCEYRGE

SEQ ID NO: 24422 - protein, 198 aa, Pseudomonadales bacterium
  misc_feature (1)..(198): tr|A0A1G3DX77|A0A1G3DX77_9GAMM 6-carboxytetrahydropteri n synthase QueD OS=Pseudomonadales bacterium RIFCSPHIGH O2_12_FULL_40_16 OX=1802006 GN=A3F63_07915 PE=4 SV=1
MLIRKLFKFENAHIVRNCTSDRCKRSIHGHSYKVELLLKASKLDHGQMVYDFGLLKGVIKDLYDSFDHAICFWQNDDPEYILACKTFSARWVSLPVSPSAEQFSRIFFYLAQQVLASTVTQNGEGDVEVYSVIVHETDTGYAQSFIEDIENTQMGLLDLSQIEFSEQIQAEWADTEMYTKLKEGIQFHNPNVELQVKL

SEQ ID NO: 24423 - protein, 118 aa, Pseudomonas abietaniphila
  misc_feature (1)..(118): tr|A0A1G8J052|A0A1G8J052_9PSED 6-carboxy-5,6,7,8-tetrah ydropterin synthase OS=Pseudomonas abietaniphila OX=890 65 GN=SAMN05216605_111223 PE=3 SV=1
MEIFKEFTFESAHRLPHVPEGHKCGRLHGHSFRVAIYLQGEPDPHTGWIRDFSEIKTIFKPLYERLDHNYLNDIPGLENPTSEVLVKWIWNELKPLLPELSAIRIHETCTSGCVYRGD

SEQ ID NO: 24424 - protein, 148 aa, Pseudomonas acidophila
  misc_feature (1)..(148): tr|A0A2A4F0G5|A0A2A4F0G5_9PSED 6-carboxy-5,6,7,8-tetrah ydropterin synthase OS=Pseudomonas acidophila OX=191259 9 GN=BWP39_16185 PE=3 SV=1
MLTITRKLEFDAGHRIPDHRSQCRNLHGHRYVLEITLQGDLVETEGAPDRGMVMDFAEVKSLAIEHLVDKWDHAFLVFEGDTRVRGFLESMPDHKTVVLDRIPTVENLAAIAFDILANVYDAHYGVNLRLHHVRLYETPNCWADVVRD

SEQ ID NO: 24425 - protein, 118 aa, Pseudomonas aeruginosa
  misc_feature (1)..(118): tr|A6V4B2|A6V4B2_PSEA7 6-carboxy-5,6,7,8-tetrahydropter in synthase OS=Pseudomonas aeruginosa (strain PA7) OX=3 81754 GN=queD PE=3 SV=1
MELFKEFTFESAHRLPHVPEGHKCGRLHGHSFRVAIHIEGEVDPHTGWIRDFAEIKAIFKPIYEQLDHNYLNDIPGLENPTSENLCRWIWQQLKPLLPELSKVRVHETCTSGCEYRGD

SEQ ID NO: 24426 - protein, 118 aa, Pseudomonas aeruginosa
  misc_feature (1)..(118): tr|A0A2S5IHU4|A0A2S5IHU4_PSEAI 6-carboxy-5,6,7,8-tetrah ydropterin synthase OS=Pseudomonas aeruginosa OX=287 GN =queD PE=3 SV=1
MEIFKEFTFESAHRLPHVPAGHKCGRLHGHSFKVGLHLTGPLDPHTGWIRDFAEVKAIFKPIYEQLDHNYLNDIPGLENPTSEVIAKWIWDQVKPLLPELSKVRIHETCTSGCEYYGD

SEQ ID NO: 24427 - protein, 119 aa, Pseudomonas agarici
  misc_feature (1)..(119): tr|A0A0X1T2V2|A0A0X1T2V2_PSEAA 6-carboxy-5,6,7,8-tetrah ydropterin synthase OS=Pseudomonas agarici OX=46677 GN= AWM79_14170 PE=3 SV=1
MVEIFKEFTFESAHRLPHVPDGHKCGRLHGHSFKVAIHLSGEIDRHTGWIRDFSEIKAIFKPLYERLDHNYLNDIPGLENPTSENLAKWIWRELKPLLPELSAIRIHETCTSGCIYRGE

SEQ ID NO: 24428 - protein, 118 aa, Pseudomonas alcaligenes
  misc_feature (1)..(118): tr|A0A142ISN2|A0A142ISN2_PSEAC 6-carboxy-5,6,7,8-tetrah ydropterin synthase OS=Pseudomonas alcaligenes OX=43263 GN=queD PE=3 SV=1
MELFKEFTFESAHLLPHVPAGHKCGRLHGHSFRAAIYIEGEVDPHTGWIRDFAEIKAIFKPIYERLDHNYLNDIPGLENPTSENLAKWIWQELKPLLPELSRIRVHETCTSGCEYRGD

SEQ ID NO: 24429 - protein, 46 aa, Pseudomonas alcaligenes
  misc_feature (1)..(46): tr|A0A1N6NEK3|A0A1N6NEK3_PSEAC 6-pyruvoyl tetrahydropte rin synthase OS=Pseudomonas alcaligenes OX=43263 GN=SAM N05878282_101250 PE=4 SV=1
MLIRKLLKFESPHIVRGCSSRRCSRSLHGHSYRIELLLEVHALDNG

SEQ ID NO: 24430 - protein, 118 aa, Pseudomonas alcaliphila
  misc_feature (1)..(118): tr|A0A1G7DJX8|A0A1G7DJX8_9PSED 6-carboxy-5,6,7,8-tetrah ydropterin synthase OS=Pseudomonas alcaliphila OX=10156 4 GN=SAMN05216575_1031 PE=3 SV=1
MELFKEFIFEAAHRLPHVPEGHKCGRLHGHSFRVAIYIEGDVDPYTGWIRDFSEIKAIFKPIYELLDHNYLNDIPGLENPTSEVLAKWIWQQVKPLLPELSRVRIHETCTSGCEYRGD

SEQ ID NO: 24431 - protein, 118 aa, Pseudomonas alcaliphila
  misc_feature (1)..(118): tr|A0A1L7G0Z7|A0A1L7G0Z7_9PSED 6-carboxy-5,6,7,8-tetrah ydropterin synthase OS=Pseudomonas alcaliphila JAB1 OX= 741155 GN=UYA_13920 PE=3 SV=1
MELFKEFIFEAAHRLPHVPEGHKCGRLHGHSFRVAIYIEGEVDPYTGWIRDFSEIKTIFKPIYEQLDHNYLNDIPGLENPTSEVLAKWIWQQVKPLLPELSRVRIHETCTSGCEYRGD

SEQ ID NO: 24432 - protein, 118 aa, Pseudomonas alkylphenolica
  misc_feature (1)..(118): tr|A0A077FBP9|A0A077FBP9_9PSED 6-carboxy-5,6,7,8-tetrah ydropterin synthase OS=Pseudomonas alkylphenolica OX=23 7609 GN=PSAKL28_35160 PE=3 SV=1
MEIFKEFTFESAHRLPHVPEGHKCGRLHGHSFKVALHLTGPLDPHTGWIRDFSEIKAIFKPLYEQLDHNYLNDIPGLENPTSEVIAKWIWDQVKPLLPELSKVRIHETCTSGCEYYGD

SEQ ID NO: 24433 - protein, 118 aa, Pseudomonas alkylphenolica
  misc_feature (1)..(118): tr|A0A443ZHL8|A0A443ZHL8_9PSED 6-carboxy-5,6,7,8-tetrah ydropterin synthase OS=Pseudomonas alkylphenolica OX=23 7609 GN=queD PE=3 SV=1
MEIFKEFTFESAHRLPHVPEGHKCGRLHGHSFKVALHLTGPLDPHTGWIRDFSEIKAIFKPLYEQLDHNYLNDIPGLENPTSEVIAKWIWEQVKPLLPELSKVRIHETCTSGCEYYGD

SEQ ID NO: 24434 - protein, 123 aa, Pseudomonas amygdali
  misc_feature (1)..(123): tr|A0A3M4CAY2|A0A3M4CAY2_PSEAV 6-carboxy-5,6,7,8-tetrah ydropterin synthase (Fragment) OS=Pseudomonas amygdali pv. lachrymans OX=53707 GN=ALQ26_05273 PE=4 SV=1
MHLSRLRSPFFRGQYTVEIFKEFTFESAHRLPHVPEGHKCGRLHGHSFRVGIHLAGKVDPHTGWIRDFSEIKAIFKPLYERLDHNYLNDIPGLENPTSENLAKWIWDELKPLLPELSAVRIHE

SEQ ID NO: 24435 - protein, 195 aa, Pseudomonas amygdali
  misc_feature (1)..(195): tr|A0A3M2WM49|A0A3M2WM49_PSEA0 6-carboxy-5,6,7,8-tetrah ydropterin synthase OS=Pseudomonas amygdali pv. morspru norum OX=129138 GN=ALQ94_05237 PE=4 SV=1
MSAFSLFRRVHSGRCFYDVYLNGCNLTQPESVWPSAIKNTPKRSLRPGPAWRFRSLLLDSTPAFIASAIAIFRGQYTVEIFKEFTFESAHLLPHVPEGHKCGRLHGHSFRVGIHLAGKVDPHTGWIRDFSEIKAIFKPLYERLDHNYLNDIPGLENPTSENLAKWIWNELKPLLPELSAIRIHETCTSGCEYRGD

SEQ ID NO: 24436 - protein, 118 aa, Pseudomonas anguilliseptica
  misc_feature (1)..(118): tr|A0A1H5GNY4|A0A1H5GNY4_PSEAG 6-carboxy-5,6,7,8-tetrah ydropterin synthase OS=Pseudomonas anguilliseptica OX=5 3406 GN=SAMN05421553_4186 PE=3 SV=1
MELFKEFMFEAAHRLPHVPEGHKCGRLHGHSFKVAVYIEGEVDPYTGWIRDFSEIKAIFNPLYEQLDHNYLNDIPGLENPTSEVLAKWIWQQLKPLLPELSRIRIHETCTSGCEYRGD

SEQ ID NO: 24437 - protein, 118 aa, Pseudomonas antarctica
  misc_feature (1)..(118): tr|A0A1H0C5W4|A0A1H0C5W4_9PSED 6-carboxy-5,6,7,8-tetrah ydropterin synthase OS=Pseudomonas antarctica OX=219572 GN=SAMN04490179_4671 PE=3 SV=1
MEIFKEFTFESAHRLPHVPQDHKCGRLHGHSFKVAIHLSGDLDPHTGWIRDFSQIKAIFKPLYERLDHNYLNDIPGLENPTSEVLAKWIWNELKPLLPELSAIRIHETCTSGCIYRGE

SEQ ID NO: 24438 - protein, 118 aa, Pseudomonas antarctica
  misc_feature (1)..(118): tr|A0A172YZB6|A0A172YZB6_9PSED 6-carboxy-5,6,7,8-tetrah ydropterin synthase OS=Pseudomonas antarctica OX=219572 GN=A7J50_2116 PE=3 SV=1
MEIFKEFTFESAHRLPHVPEGHKCGRLHGHSFKVAIHLSGDLDPHTGWIRDFSEIKAIFKPLYERLDHNYLNDIPGLENPTSEVLAKWIWNELKPLLPELSAIRIHETCTSGCIYRGE

SEQ ID NO: 24439 - protein, 146 aa, Pseudomonas argentinensis
  misc_feature (1)..(146): tr|A0A1I3GKS5|A0A1I3GKS5_9PSED 6-carboxy-5,6,7,8-tetrah ydropterin synthase OS=Pseudomonas argentinensis OX=289 370 GN=SAMN05216602_0172 PE=3 SV=1
MSTPVAAPPSPSSAAETMVNSNSKTVCELSQRFFFEAAHTLNRDIETESSRRIHGHTYEAEVTVAGQPDATTGMLIDLGYLRSEIARVREMLDHRLLDEVQDLGPATIENLCAFIRKQLEDSVPSLCAVMVERRLSGDRCVLRWTR

SEQ ID NO: 24440 - protein, 118 aa, Pseudomonas argentinensis
  misc_feature (1)..(118): tr|A0A1I3P3I7|A0A1I3P3I7_9PSED 6-carboxy-5,6,7,8-tetrah ydropterin synthase OS=Pseudomonas argentinensis OX=289 370 GN=SAMN05216602_4179 PE=3 SV=1
MELFKEFIFEAAHRLPHVPEGHKCGRLHGHSFRIAVYIEGEVDPHTGWIRDFSEIKAIFKPIYEQLDHNYLNDIPGLENPTSEILAKWVWQQLKPLLPELSRIRIHETCTSGCEYRGD

SEQ ID NO: 24441 - protein, 118 aa, Pseudomonas arsenicoxydans
  misc_feature (1)..(118): tr|A0A1H0RFR2|A0A1H0RFR2_9PSED 6-carboxy-5,6,7,8-tetrah ydropterin synthase OS=Pseudomonas arsenicoxydans OX=70 2115 GN=queD PE=3 SV=1
MEIFKEFTFESAHRLPHVPEGHKCGRLHGHSFKVAIHLSGDLDPHTGWIRDFSEIKAIFKPLYERLDHNYLNDIPGLENPTSEVLAKFIWNELKPLLPELSAIRIHETCTSGCIYHGE

SEQ ID NO: 24442 - protein, 118 aa, Pseudomonas arsenicoxydans
  misc_feature (1)..(118): tr|A0A4P6G8V1|A0A4P6G8V1_9PSED 6-carboxy-5,6,7,8-tetrah ydropterin synthase OS=Pseudomonas arsenicoxydans OX=70 2115 GN=queD PE=3 SV=1
MEIFKEFTFESAHRLPHVPEGHKCGRLHGHSFKVAIHLSGDLDPHTGWIRDFSEIKAIFKPLYERLDHNYLNDIPGLENPTSEVLAKFIWKELKPLLPELSAIRIHETCTSGCIYHGE

SEQ ID NO: 24443 - protein, 127 aa, Pseudomonas asplenii
  misc_feature (1)..(127): tr|A0A1H1ZVV1|A0A1H1ZVV1_9PSED 6-carboxy-5,6,7,8-tetrah ydropterin synthase OS=Pseudomonas asplenii OX=53407 GN =SAMN05216598_5351 PE=3 SV=1
MHPSELNNTVEIFKEFTFESAHRLPHVPDGHKCGRLHGHSFKVAIHLSGEIDQHTGWIRDFSEIKAIFKPLYERLDHNYLNDIPGLENPTSENLAKWIWEELKPLLPELSAIRIHETCTSGCIYRGE

SEQ ID NO: 24444 - protein, 118 aa, Pseudomonas asplenii
  misc_feature (1)..(118): tr|A0A3S3AQF1|A0A3S3AQF1_9PSED 6-carboxy-5,6,7,8-tetrah ydropterin synthase OS=Pseudomonas asplenii OX=53407 GN =DFH15_2923 PE=3 SV=1
MEIFKEFTFESAHKLPHVPDGHKCGRLHGHSFKVAIHLSGEMDPHTGWIRDFSEIKAIFKPLYERLDHNYLNDIPGLENPTSENLAKWIWQELKPLLPELSAIRIHETCTSGCIYRGE

SEQ ID NO: 24445 - protein, 118 aa, Pseudomonas asturiensis
  misc_feature (1)..(118): tr|A0A1M7L2E5|A0A1M7L2E5_9PSED 6-carboxy-5,6,7,8-tetrah ydropterin synthase OS=Pseudomonas asturiensis OX=11904 15 GN=SAMN05216593_102527 PE=3 SV=1
MEIFKEFTFESAHRLPHVPEGHKCGRLHGHSFRVGIHLAGKVDPHTGWIRDFSEIKAIFKPLYERLDHNYLNDIPGLENPTSENLAKWIWGELKPLLPELSAVRIHETCTSGCEYRGE

SEQ ID NO: 24446 - protein, 118 aa, Pseudomonas avellanae
  misc_feature (1)..(118): tr|A0A261WED4|A0A261WED4_9PSED 6-carboxy-5,6,7,8-tetrah ydropterin synthase OS=Pseudomonas avellanae OX=46257 G N=queD PE=3 SV=1
MEIFKEFTFESAHLLPHVPEGHKCGRLHGHSFRVGIHLAGKVDPHTGWIRDFSEIKAIFKPLYERLDHNYLNDIPGLENPTSENLAKWIWNELKPLLPELSAIRIHETCTSGCEYRGD

SEQ ID NO: 24447 - protein, 195 aa, Pseudomonas avellanae
  misc_feature (1)..(195): tr|A0A3M5TPZ4|A0A3M5TPZ4_9PSED 6-carboxy-5,6,7,8-tetrah ydropterin synthase OS=Pseudomonas avellanae OX=46257 G N=ALP32_03799 PE=4 SV=1
MSACSLFRRVHSGRCVYGVYLKGCNLTQAESVWPSAIKNTPKRSLRPGPAWRFRSLLLDSTPAFIASAIAIFRGQYTVEIFKEFTFESAHLLPHVPEGHKCGRLHGHSFRVGIHLAGKVDPHTGWIRDFSEIKAIFKPLYERLDHNYLNDIPGLENPTSENLAKWIWNELKPLLPELSAIRIHETCTSGCEYRGD

SEQ ID NO: 24448 - protein, 118 aa, Pseudomonas azotoformans
  misc_feature (1)..(118): tr|A0A4Q0HMF3|A0A4Q0HMF3_PSEAZ 6-carboxy-5,6,7,8-tetrah ydropterin synthase OS=Pseudomonas azotoformans OX=4787 8 GN=B4O85_26685 PE=3 SV=1
MEIFKEFTFESAHRLPHVPEGHKCGRLHGHSFKVAIHLSGDLDPHTGWIRDFSEIKAIFKPLYERLDHNYLNDIPGLENPTSEVLAKWIWNELKLLLPELSAIRIHETCTSGCIYRGE

SEQ ID NO: 24449 - protein, 118 aa, Pseudomonas azotoformans; identical to SEQ ID NO: 24438
  misc_feature (1)..(118): tr|A0A127HZG4|A0A127HZG4_PSEAZ 6-carboxy-5,6,7,8-tetrah ydropterin synthase OS=Pseudomonas azotoformans OX=4787 8 GN=ALP43_03690 PE=3 SV=1

SEQ ID NO: 24450 - protein, 118 aa, Pseudomonas baetica
  misc_feature (1)..(118): tr|A0A2N0DK80|A0A2N0DK80_9PSED 6-carboxy-5,6,7,8-tetrah ydropterin synthase OS=Pseudomonas baetica OX=674054 GN =queD PE=3 SV=1
MEIFKEFTFESAHRLPHVPDGHKCGRLHGHSFKVALHLSGDLDPHTGWIRDFSEIKAIFKPLYERLDHNYLNDIPGLENPTSEVLAKFIWNEMKPLLPELSAIRIHETCTSGCIYRGE

SEQ ID NO: 24451 - protein, 118 aa, Pseudomonas batumici
  misc_feature (1)..(118): tr|A0A0C2EVJ0|A0A0C2EVJ0_9PSED 6-carboxy-5,6,7,8-tetrah ydropterin synthase OS=Pseudomonas batumici OX=226910 G N=UCMB321_3589 PE=3 SV=1
MEIFKEFTFESAHKLPHVPDGHKCGRLHGHSFKVAIHLSGEVDPYTGWIRDFSEIKAIFKPLYERLDHNYLNDIPGLENPTSEVLAKWIWQELKPLLPELSAIRIHETCTSGCIYRGE

SEQ ID NO: 24452 - protein, 118 aa, Pseudomonas bauzanensis
  misc_feature (1)..(118): tr|A0A4U0YJ15|A0A4U0YJ15_9PSED 6-carboxy-5,6,7,8-tetrah ydropterin synthase OS=Pseudomonas bauzanensis OX=65393 0 GN=FA869_06480 PE=3 SV=1
MYTIKKEFHFSASHQLKQMPDWHPCARLHGHNYMVVLELQSKTLDQYGFVRDYLELKAFKEYIDAELDHRHLNDVLGDECTTAERLARHLCEWAQARWPEVTAAAVSETPKTWAEYRP

SEQ ID NO: 24453 - protein, 118 aa, Pseudomonas bauzanensis
  misc_feature (1)..(118): tr|A0A031MGG4|A0A031MGG4_9PSED 6-carboxy-5,6,7,8-tetrah ydropterin synthase OS=Pseudomonas bauzanensis OX=65393 0 GN=SAMN04487855_2767 PE=3 SV=1
MYTIKKEFHFSASHQLKQMPDWHPCARLHGHNYVVVLELQSKTLDQYGFVRDYLELKAFKEYIDAELDHRHLNDVLGDECTTAERLARHLCEWAQARWPEVTAAAVSETPKTWAEYRP

SEQ ID NO: 24454 - protein, 118 aa, Pseudomonas benzenivorans
  misc_feature (1)..(118): tr|A0A1G8J115|A0A1G8J115_9PSED 6-carboxy-5,6,7,8-tetrah ydropterin synthase OS=Pseudomonas benzenivorans OX=556 533 GN=SAMN05216603_12824 PE=3 SV=1
MELFKEFIFEAAHRLPRVPEGHKCGRLHGHSFRVAVYIEGEVDPDTGWIRDFSEIKAIFKPLYEQLDHNYLNEIPGLENPTSEVIAKWIWQQLKPLLPELSRIRIHETCTSGCEYRGD

SEQ ID NO: 24455 - protein, 186 aa, Pseudomonas borbori
  misc_feature (1)..(186): tr|A0A1I5R7Z2|A0A1I5R7Z2_9PSED 6-pyruvoyltetrahydropter in/6-carboxytetrahydropterin synthase OS=Pseudomonas bo rbori OX=289003 GN=SAMN05216190_112117 PE=4 SV=1
MLIRKLFKFESAHIVRGCSSRRCSHSLHGHSYKIELLQAHALDQGQMVYDFGLLKGDVRDLIDAFDHALTFWDADDADYIASCLRFSERWISLPVSPSAEQFSRVIFRLVDALLQLTEMINGEQDVRMHSVIVHETDTGYAQCFREDAYNPRMGAFELAQIEFSTQVKREWNDPQLFDRLLTALKP

SEQ ID NO: 24456 - protein, 118 aa, Pseudomonas borbori
  misc_feature (1)..(118): tr|A0A1I5NXC5|A0A1I5NXC5_9PSED 6-carboxy-5,6,7,8-tetrah ydropterin synthase OS=Pseudomonas borbori OX=289003 GN =SAMN05216190_107125 PE=3 SV=1
MELFKEFIFEAAHRLPHVPEGHKCGRLHGHSFRVAVYIEGEVDPYTGWIRDFSEIKAIFKPLYEQLDHNYLNEIPGLENPTSEVIAKWIWQQLKPLLPELSRIRIHETCTSGCEYRGN

SEQ ID NO: 24457 - protein, 118 aa, Pseudomonas brassicacearum
  misc_feature (1)..(118): tr|A0A423GR18|A0A423GR18_9PSED 6-carboxy-5,6,7,8-tetrah ydropterin synthase OS=Pseudomonas brassicacearum OX=93 0166 GN=BK658_14440 PE=3 SV=1
MEIFKEFTFESAHRLPHVPEGHKCGRLHGHSFKVAIHLSGDLDPHTGWIRDFSEIKAIFKPLYERLDHNYLNDIPGLENPTSEVLAKWIWNELKPLLPELSAIRIHETCTSGCIYHGE

SEQ ID NO: 24458 - protein, 118 aa, Pseudomonas brassicacearum
  misc_feature (1)..(118): tr|A0A423H3K8|A0A423H3K8_9PSED 6-carboxy-5,6,7,8-tetrah ydropterin synthase OS=Pseudomonas brassicacearum OX=93 0166 GN=BK659_18675 PE=3 SV=1
MEIFKEFTFESAHRLPHVPEGHKCGRLHGHSFKVAIHLSGDLDPHTGWIRDFSEIKEIFKPLYERLDHNYLNDIPGLENPTSEVLAKFIWNELKPLLPELSAIRIHETCTSGCIYHGE

SEQ ID NO: 24459 - protein, 129 aa, Pseudomonas brenneri
  misc_feature (1)..(129): tr|A0A176V8H3|A0A176V8H3_9PSED 6-carboxy-5,6,7,8-tetrah ydropterin synthase OS=Pseudomonas brenneri OX=129817 G N=A2T76_10055 PE=3 SV=1
MVNSNSNTICELSQRFYFEAAHTLNRGIETESSRRIHGHTYEAEVTVAGQPDANSGMLIDLGYLRGEIARVREMLDHRLLDEVEDLGPATIENLCAFIRKQLEDSVTSLCAVMVERRLSGDRCVLRWTR

SEQ ID NO: 24460 - protein, 118 aa, Pseudomonas brenneri; identical to SEQ ID NO: 24438
  misc_feature (1)..(118): tr|A0A176V4G0|A0A176V4G0_9PSED 6-carboxy-5,6,7,8-tetrah ydropterin synthase OS=Pseudomonas brenneri OX=129817 G N=A2T76_23380 PE=3 SV=1

SEQ ID NO: 24461 - protein, 118 aa, Pseudomonas canadensis; identical to SEQ ID NO: 24438
  misc_feature (1)..(118): tr|A0A423FH46|A0A423FH46_9PSED 6-carboxy-5,6,7,8-tetrah ydropterin synthase OS=Pseudomonas canadensis OX=915099 GN=BK649_02340 PE=3 SV=1

SEQ ID NO: 24462 - protein, 186 aa, Pseudomonas cannabina
  misc_feature (1)..(186): tr|A0A0P9RAU5|A0A0P9RAU5_PSECA 6-carboxy-5,6,7,8-tetrah ydropterin synthase OS=Pseudomonas cannabina OX=86840 G N=ALO81_00308 PE=4 SV=1
MAVRCFYEDYFNRNNLIQAEGFWPSAIKQPGAEVNIGEGLAWRFGALLLNSPPAFIASAIAIFRGQYTVEIFKEFTFESAHLLPNVPEGHKCGRLHGHSFRVGIHLAGKVDPHTGWIRDFSEIKAIFKPLYERLDHHYLNDIPGLENPTSENLAKWIWEELKPLLPELSAVRIHETCTSGCEYRGD

SEQ ID NO: 24463 - protein, 186 aa, Pseudomonas cannabina
  misc_feature (1)..(186): tr|A0A3M3QZT1|A0A3M3QZT1_PSECA 6-carboxy-5,6,7,8-tetrah ydropterin synthase OS=Pseudomonas cannabina OX=86840 G N=ALQ51_03762 PE=4 SV=1
MAVRCFYEDYFNRNNLIQAEGFWPSAIKQPGAEVNIGEGLAWRFGALLLNSPPAFIASAIAIFRGQYTVEIFKEFTFESAHLLPNVPEGHKCGRLHGHSFRVGIHLAGKVDPHTGWIRDFSEIKAIFKPLYERLDHHYLNDIPGLENPTSENLAKWIWEKLKPLLPELSAVRIHETCTSGCEYRGD

SEQ ID NO: 24464 - protein, 118 aa, Pseudomonas capeferrum
  misc_feature (1)..(118): tr|A0A084CHS2|A0A084CHS2_9PSED 6-carboxy-5,6,7,8-tetrah ydropterin synthase OS=Pseudomonas capeferrum OX=149506 6 GN=PC358_09445 PE=3 SV=1
MEIFKEFTFESAHRLPHVPAGHKCGRLHGHSFKVGLHLTGPLDPHTGWIRDFSEIKAIFKPIYEQLDHNYLNDIPGLENPTSEVIAKWIWEQVKPLLPELSKVRIHETCTSGCEYTGD

SEQ ID NO: 24465 - protein, 81 aa, Pseudomonas caricapapayae
  misc_feature (1)..(81): tr|A0A3M3B7A3|A0A3M3B7A3_9PSED 6-carboxy-5,6,7,8-tetrah ydropterin synthase OS=Pseudomonas caricapapayae OX=466 78 GN=ALQ84_101901 PE=4 SV=1
MAGKVDPHTGWIRDFSEIKAIFKPLYERLDHNYLNDIPGLENPTSENLAKWIWNELKPLLPELSAVRIHETCTSGCEYRGD

SEQ ID NO: 24466 - protein, 118 aa, Pseudomonas caricapapayae
  misc_feature (1)..(118): tr|A0A0P9PVE3|A0A0P9PVE3_9PSED 6-carboxy-5,6,7,8-tetrah ydropterin synthase OS=Pseudomonas caricapapayae OX=466 78 GN=ALO80_01752 PE=3 SV=1
MEIFKEFTFESAHRLPHVPEGHKCGRLHGHSFRVGIHLAGKVDPHTGWIRDFSEIKAIFKPLYERLDHNYLNDIPGLENPTSENLAKWIWNELKPLLPELSAVRIHETCTSGCEYRGD

SEQ ID NO: 24467 - protein, 118 aa, Pseudomonas caspiana; identical to SEQ ID NO: 24442
  misc_feature (1)..(118): tr|A0A502IYW9|A0A502IYW9_9PSED 6-carboxy-5,6,7,8-tetrah ydropterin synthase OS=Pseudomonas caspiana OX=1451454 GN=queD PE=3 SV=1

SEQ ID NO: 24468 - protein, 119 aa, Pseudomonas caspiana
  misc_feature (1)..(119): tr|A0A1Y3P961|A0A1Y3P961_9PSED 6-carboxy-5,6,7,8-tetrah ydropterin synthase OS=Pseudomonas caspiana OX=1451454 GN=AUC60_06555 PE=3 SV=1
MVEIFKEFTFESAHFLPHVPEGHKCGRLHGHSFRIAIHLEGEVDPHIGWIRDFSEIKAIFKPLYERLDHHYLNDIPGLENPTSENLAKWIFAELKPLLPELSAIRIHETCTSGCIYRGE

SEQ ID NO: 24469 - protein, 118 aa, Pseudomonas cedrina; identical to SEQ ID NO: 24438
  misc_feature (1)..(118): tr|A0A2S9DML6|A0A2S9DML6_PSECE 6-carboxy-5,6,7,8-tetrah ydropterin synthase OS=Pseudomonas cedrina OX=651740 GN =queD PE=3 SV=1

SEQ ID NO: 24470 - protein, 118 aa, Pseudomonas cedrina
  misc_feature (1)..(118): tr|A0A1V2JXW4|A0A1V2JXW4_PSECE 6-carboxy-5,6,7,8-tetrah ydropterin synthase OS=Pseudomonas cedrina subsp. cedri na OX=76762 GN=BLL36_26575 PE=3 SV=1
MEIFKEFTFESAHRLPHVPEGHKCGRLHGHSFKVAIHLSGDLDPHTGWIRDFSEIKAIFKPLYERLDHNYLNDIPGLENPTSEVLAKWIWKELQPLLPELSAIRIHETCTSGCIYRGE

SEQ ID NO: 24471 - protein, 118 aa, Pseudomonas cerasi; identical to SEQ ID NO: 24466
  misc_feature (1)..(118): tr|A0A193SN09|A0A193SN09_9PSED 6-carboxy-5,6,7,8-tetrah ydropterin synthase OS=Pseudomonas cerasi OX=1583341 GN =queD PE=3 SV=1

SEQ ID NO: 24472 - protein, 118 aa, Pseudomonas chengduensis
  misc_feature (1)..(118): tr|A0A1G6WUD5|A0A1G6WUD5_9PSED 6-carboxy-5,6,7,8-tetrah ydropterin synthase OS=Pseudomonas chengduensis OX=4896 32 GN=SAMN05216576_1293 PE=3 SV=1
MELFKEFIFEAAHRLPHVPEGHKCGRLHGHSFRVAIYIEGEVDPYTGWIRDFSEIKAIFKPIYEQLDHNYLNDIPGLENPTSEVLAKWIWQQVKPLLPELSRVRIHETCTSGCEYRGD

SEQ ID NO: 24473 - protein, 118 aa, Pseudomonas chlororaphis; identical to SEQ ID NO: 24450
  misc_feature (1)..(118): tr|A0A0A6DBC0|A0A0A6DBC0_9PSED 6-carboxy-5,6,7,8-tetrah ydropterin synthase OS=Pseudomonas chlororaphis OX=5877 53 GN=NZ35_12510 PE=3 SV=1

SEQ ID NO: 24474 - protein, 118 aa, Pseudomonas chlororaphis
  misc_feature (1)..(118): tr|A0A0E1ECF1|A0A0E1ECF1_9PSED 6-carboxy-5,6,7,8-tetrah ydropterin synthase OS=Pseudomonas chlororaphis OX=5877 53 GN=C4K04_4167 PE=3 SV=1
MEIFKEFTFESAHRLPHVPAGHKCGRLHGHSFKVAIHLSGDLDPHTGWIRDFSEIKEIFKPLYERLDHNYLNDIPGLENPTSEVLAKWIWNELKPLLPELSAIRIHETCTSGCIYRGE

SEQ ID NO: 24475 - protein, 118 aa, Pseudomonas cichorii
  misc_feature (1)..(118): tr|A0A3M4LX35|A0A3M4LX35_PSECI 6-carboxy-5,6,7,8-tetrah ydropterin synthase OS=Pseudomonas cichorii OX=36746 GN =ALQ04_01597 PE=3 SV=1
MEIFKEFTFESAHLLPHVPEGHKCGRLHGHSFRVGIHLSGKVDPHIGWIRDFSEIKAIFKPLYERLDHNYLNDIPGLENPTSENLAKWIWDELKPLLPELSAVRIHETCTSGCEYRGE

SEQ ID NO: 24476 - protein, 118 aa, Pseudomonas cichorii
  misc_feature (1)..(118): tr|A0A3M3SRZ5|A0A3M3SRZ5_PSECI 6-carboxy-5,6,7,8-tetrah ydropterin synthase OS=Pseudomonas cichorii OX=36746 GN =ALP84_01899 PE=3 SV=1
MEIFKEFTFESAHRLPHVPEGHKCGRLHGHSFRVGIHLSGKVDPHIGWIRDFSEIKAIFKPLYERLDHNYLNDIPGLENPTSENLAKWIWDELKPLLPELSAVRIHETCTSGCEYRGE

SEQ ID NO: 24477 - protein, 118 aa, Pseudomonas citronellolis
  misc_feature (1)..(118): tr|A0A127MVR8|A0A127MVR8_9PSED 6-carboxy-5,6,7,8-tetrah ydropterin synthase OS=Pseudomonas citronellolis OX=534 08 GN=queD PE=3 SV=1
MELFKEFTFESAHRLPHVPEGHKCGRLHGHSFRVALYIEGEVDPHTGWIRDFSEIKQIFKPIYEQLDHNYLNDIPGLENPTSENLSRWIWQQVKPLLPELSRVRVHETCTSGCEYRGD

SEQ ID NO: 24478 - protein, 118 aa, Pseudomonas coleopterorum
  misc_feature (1)..(118): tr|A0A1H5IUV7|A0A1H5IUV7_9PSED 6-carboxy-5,6,7,8-tetrah ydropterin synthase OS=Pseudomonas coleopterorum OX=160 5838 GN=SAMN05216510_2631 PE=3 SV=1
MEIFKEFTFESAHRLPHVPEGHKCGRLHGHSFKVAIYLKGDVDPHTGWIRDFSEIKAIFKPLYERLDHNYLNDLPGLENPTSENLAKWIWHELKPLLPELSKIRIHETCTSGCEYTGD

SEQ ID NO: 24479 - protein, 147 aa, Pseudomonas coleopterorum
  misc_feature (1)..(147): tr|A0A1H5DY78|A0A1H5DY78_9PSED 6-carboxy-5,6,7,8-tetrah ydropterin synthase OS=Pseudomonas coleopterorum OX=160 5838 GN=SAMN05216510_0546 PE=3 SV=1
MMSTSPGAPTSPSPDAEFMLNSTRNTICELSQRFFFEAAHTLSRGIETESSRRIHGHTYEAEVTVAGQPDATSGMLIDLGYLRSEIARVREMLDHRLLDEVQDLGPATIENLCAFIRKQLEDSVPSLCAVMVERRLSGDRCVLRWTR

SEQ ID NO: 24480 - protein, 118 aa, Pseudomonas composti; identical to SEQ ID NO: 24472
  misc_feature (1)..(118): tr|A0A1I5QQF4|A0A1I5QQF4_9PSED 6-carboxy-5,6,7,8-tetrah ydropterin synthase OS=Pseudomonas composti OX=658457 G N=SAMN05216601_112158 PE=3 SV=1

SEQ ID NO: 24481 - protein, 118 aa, Pseudomonas congelans; identical to SEQ ID NO: 24466
  misc_feature (1)..(118): tr|A0A0N8R1C0|A0A0N8R1C0_9PSED 6-carboxy-5,6,7,8-tetrah ydropterin synthase OS=Pseudomonas congelans OX=200452 GN=ALO92_01833 PE=3 SV=1

SEQ ID NO: 24482 - protein, 140 aa, Pseudomonas coronafaciens
  misc_feature (1)..(140): tr|A0A3M4C7L8|A0A3M4C7L8_9PSED 6-carboxy-5,6,7,8-tetrah ydropterin synthase OS=Pseudomonas coronafaciens pv. at ropurpurea OX=129135 GN=ALQ25_00237 PE=3 SV=1
MLLNLPPAFIASAIAIFRGQYTVEIFKEFTFESAHLLPHVPEGHKCGRLHGHSFRVGIHLAGKVDPHTGWIRDFSEIKAIFKPLYERLDHHYLNDIPGLENPTSENLAKWIWDELKPLLPELSAIRIHETCTSGCEYRGD

SEQ ID NO: 24483 - protein, 140 aa, Pseudomonas coronafaciens; identical to SEQ ID NO: 24482
  misc_feature (1)..(140): tr|A0A0Q0FPC8|A0A0Q0FPC8_9PSED 6-carboxy-5,6,7,8-tetrah ydropterin synthase OS=Pseudomonas coronafaciens pv. zi zaniae OX=251700 GN=ALO38_02537 PE=3 SV=1

SEQ ID NO: 24484 - protein, 118 aa, Pseudomonas corrugata
  misc_feature (1)..(118): tr|A0A3M3EM98|A0A3M3EM98_9PSED 6-carboxy-5,6,7,8-tetrah ydropterin synthase OS=Pseudomonas corrugata OX=47879 G N=ALQ77_02564 PE=3 SV=1
MEIFKEFTFESAHRLPHVPDGHKCGRLHGHSFKVAIHLSGEIDSHTGWIRDFSEIKAIFKPLYERLDHNYLNDIPGLENPTSEVLAKWIWNELKPLLPELSAIRIHETCTSGCIYRGE

SEQ ID NO: 24485 - protein, 118 aa, Pseudomonas costantinii; identical to SEQ ID NO: 24438
  misc_feature (1)..(118): tr|A0A1S2V547|A0A1S2V547_9PSED 6-carboxy-5,6,7,8-tetrah ydropterin synthase OS=Pseudomonas costantinii OX=16846 9 GN=BFL40_08150 PE=3 SV=1

SEQ ID NO: 24486 - protein, 124 aa, Pseudomonas cremoricolorata
  misc_feature (1)..(124): tr|A0A089YI61|A0A089YI61_9PSED 6-carboxy-5,6,7,8-tetrah ydropterin synthase OS=Pseudomonas cremoricolorata OX=1 57783 GN=LK03_19880 PE=3 SV=1
MQECLRVEIFKEFTFESAHRLPNVPAGHKCGRLHGHSFKVALHLTGPLDPHTGWIRDFSEIKAVFKPIYDQLDHNYLNDIPGLENPTSEVIAKWIWDQVKPLLPELSKVRIHETCTSGCEYTGD

SEQ ID NO: 24487 - protein, 118 aa, Pseudomonas cuatrocienegasensis
  misc_feature (1)..(118): tr|A0A1H9MRT7|A0A1H9MRT7_9PSED 6-carboxy-5,6,7,8-tetrah ydropterin synthase OS=Pseudomonas cuatrocienegasensis OX=543360 GN=SAMN05216600_1203 PE=3 SV=1
MELFKEFMFEAAHRLPHVPAGHKCGRLHGHSFRVAIYIEGEVDPHTGWIRDFSEIKAIFKPLYEQLDHNYLNDLPGLENPTSEVLAKWIWKELKPLLPELSRIRIHETCTSGCEYRGD

SEQ ID NO: 24488 - protein, 118 aa, Pseudomonas daroniae
  misc_feature (1)..(118): tr|A0A4Q9QEZ3|A0A4Q9QEZ3_9PSED 6-carboxy-5,6,7,8-tetrah ydropterin synthase OS=Pseudomonas daroniae OX=2487519 GN=queD PE=3 SV=1
MELFKEFIFEAAHHLPHVPEGHKCGRLHGHSFRIAVYIEGEVDPHTGWIRDFAELKAIFKPIYEQLDHNYLNDIPGLENPTSEVIAKWVWQQLKPLLPELSRIRIHETCSSGCEYRGD

SEQ ID NO: 24489 - protein, 118 aa, Pseudomonas deceptionensis
  misc_feature (1)..(118): tr|A0A1H5NYY0|A0A1H5NYY0_PSEDM 6-carboxy-5,6,7,8-tetrah ydropterin synthase OS=Pseudomonas deceptionensis OX=88 2211 GN=SAMN04489800_4131 PE=3 SV=1
MEIFKEFTFESAHRLPYVPEGHKCGRLHGHSFKVAIHLSGDIDPATGWIRDFSEIKAIFKPLYERLDHNYLNDIPGLENPTSEVLAKWIWQQLKPLLPELSAIRIHETCTSGCIYYGD

SEQ ID NO: 24490 - protein, 118 aa, Pseudomonas delhiensis
  misc_feature (1)..(118): tr|A0A239JS42|A0A239JS42_9PSED 6-carboxy-5,6,7,8-tetrah ydropterin synthase OS=Pseudomonas delhiensis OX=366289 GN=SAMN05216189_10283 PE=3 SV=1
MELFKEFTFESAHRLPHVPEGHKCGRLHGHSFRVALYIEGEVDPYTGWIRDFSEIKQIFKPIYEQLDHNYLNDIPGLENPTSENLSRWIWQQVKPLLPELSRVRVHETCTSGCEYRGD

SEQ ID NO: 24491 - protein, 118 aa, Pseudomonas denitrificans
  misc_feature (1)..(118): tr|A0A5J6R0Q3|A0A5J6R0Q3_PSEDE 6-carboxytetrahydropteri n synthase QueD OS=Pseudomonas denitrificans OX=43306 G N=queD PE=4 SV=1
MELFKEFTFESAHRLPHVPAGHQCGRLHGHSFRAAIYIEGEVDPHTGWIRDFAEIKQIFKPIYDQLDHNYLNDIPGLENPTSENLCRWIWQQLKPLLPELSKVRVHETCTSGCEYRGD

SEQ ID NO: 24492 - protein, 118 aa, Pseudomonas donghuensis; identical to SEQ ID NO: 24432
  misc_feature (1)..(118): tr|A0A2M9VJ87|A0A2M9VJ87_9PSED 6-carboxy-5,6,7,8-tetrah ydropterin synthase OS=Pseudomonas donghuensis OX=11633 98 GN=queD PE=3 SV=1

SEQ ID NO: 24493 - protein, 118 aa, Pseudomonas dryadis
  misc_feature (1)..(118): tr|A0A4V2KD82|A0A4V2KD82_9PSED 6-carboxy-5,6,7,8-tetrah ydropterin synthase OS=Pseudomonas dryadis OX=2487520 G N=queD PE=3 SV=1
MELFKEFIFEAAHRLPHVPAGHKCGRLHGHSFRIAVYIEGEVDPHTGWIRDFSEIKAIFKPIYEQLDHNYLNDIPGLENPTSEVIVKWVWQQLKPLLPELSRIRIHETCSSGCEYRGD

SEQ ID NO: 24494 - protein, 118 aa, Pseudomonas duriflava
  misc_feature (1)..(118): tr|A0A562Q7W1|A0A562Q7W1_9PSED 6-carboxy-5,6,7,8-tetrah ydropterin synthase OS=Pseudomonas duriflava OX=459528 GN=IQ22_03219 PE=3 SV=1
MEIFKEFIFEAAHFLPNVPPGHKCGRLHGHSFKVALHIAGPVDPHTGWVRDFADIKAIFKPLYERLDHHYLNEIPGLENPTSENLSIWIWNELKPLLPELSRVRVHETCTSGCEYRGT

SEQ ID NO: 24495 - protein, 135 aa, Pseudomonas duriflava
  misc_feature (1)..(135): tr|A0A562PZ07|A0A562PZ07_9PSED 6-carboxy-5,6,7,8-tetrah ydropterin synthase OS=Pseudomonas duriflava OX=459528 GN=IQ22_03956 PE=3 SV=1
MSTSTDNALDNCRSVYELSQRFFFEAAHTLNRTIETEGSLRIHGHTYEAEVTVAGQPDPTSGMLIDLGYLRSEIARVKEMLDHRFLDEVQGLGSATIENLCAFIRAQMADSVPGLCAVMIERRASGDRCVLRWTR

SEQ ID NO: 24496 - protein, 121 aa, Pseudomonas endophytica
  misc_feature (1)..(121): tr|A0A0Q1CCJ7|A0A0Q1CCJ7_9PSED 6-carboxy-5,6,7,8-tetrah ydropterin synthase OS=Pseudomonas endophytica OX=15631 57 GN=AQS70_04020 PE=3 SV=1
MNIVEIFKEFTFESAHRLPYVPEGHKCGRLHGHSFKVAIHLSGDIDPATGWIRDFSEIKAIFKPLYEQLDHNYLNDIPGLENPTSEVLAKWIWQQLKPLLPELSAIRIHETCTSGCIYYGD

SEQ ID NO: 24497 - protein, 118 aa, Pseudomonas entomophila
  misc_feature (1)..(118): tr|A0A3Q8TTU4|A0A3Q8TTU4_9PSED 6-carboxy-5,6,7,8-tetrah ydropterin synthase OS=Pseudomonas entomophila OX=31230 6 GN=queD PE=3 SV=1
MEIFKEFTFESAHRLPNVPAGHKCGRLHGHSFKVGLHLTGPLDPHTGWIRDFSEIKAIFKPIYEQLDHNYLNDIPGLENPTSEVLAKWIWEQVKPLLPELSKVRIHETCTSGCEYTGD

SEQ ID NO: 24498 - protein, 118 aa, Pseudomonas entomophila
  misc_feature (1)..(118): tr|Q1IC67|Q1IC67_PSEE4 6-carboxy-5,6,7,8-tetrahydropter in synthase OS=Pseudomonas entomophila (strain L48) OX= 384676 GN=PSEEN1910 PE=3 SV=1
MEIFKEFTFESAHRLPNVPAGHKCGRLHGHSFKVALHLTGPLDPHTGWIRDFSEIKAIFKPIYEQLDHNYLNDIPGLENPTSEVIAKWIWEQVKPLLPELSKVRIHETCTSGCEYTGD

SEQ ID NO: 24499 - protein, 118 aa, Pseudomonas extremaustralis
  misc_feature (1)..(118): tr|A0A5C5Q8L5|A0A5C5Q8L5_9PSED 6-carboxy-5,6,7,8-tetrah ydropterin synthase OS=Pseudomonas extremaustralis OX=3 59110 GN=queD PE=3 SV=1
MEIFKEFTFESAHRLPHVPEGHKCGRLHGHSFKVAIHLSGDLDPHTGWIRDFSEIKAIFKPLYERLDHNYLNDIPGLENPTSEVLAKWIWTELKPLLPELSAIRIHETCTSGCIYRGE

SEQ ID NO: 24500 - protein, 118 aa, Pseudomonas extremorientalis; identical to SEQ ID NO: 24438
  misc_feature (1)..(118): tr|A0A1H0WC51|A0A1H0WC51_9PSED 6-carboxy-5,6,7,8-tetrah ydropterin synthase OS=Pseudomonas extremorientalis OX= 169669 GN=BFN10_10875 PE=3 SV=1

SEQ ID NO: 24501 - protein, 118 aa, Pseudomonas ficuserectae
  misc_feature (1)..(118): tr|A0A0P9QPF2|A0A0P9QPF2_9PSED 6-carboxy-5,6,7,8-tetrah ydropterin synthase OS=Pseudomonas ficuserectae OX=5341 0 GN=ALO69_00954 PE=3 SV=1
MEIFKEFTFESAHRLPHVPEGHKCGRLHGHSFRVGIHLAGKVDPHTGWIRDFSEIKAIFKPLYERLDHNYLNDIPGLENPTSENLAKWIWDELKPLLPELSAVRIHETCTSGCEYRGD

SEQ ID NO: 24502 - protein, 118 aa, Pseudomonas flavescens
  misc_feature (1)..(118): tr|A0A1G7YLX9|A0A1G7YLX9_9PSED 6-carboxy-5,6,7,8-tetrah ydropterin synthase OS=Pseudomonas flavescens OX=29435 GN=SAMN05216588_1022 PE=3 SV=1
MELFKEFIFEAAHRLPHVPEGHKCGRLHGHSFRIAVYIEGEVDPYTGWIRDFSEIKAIFKPIYEQLDHNYLNDIPGLENPTSEILAKWVWQQLKPLLPELSRIRIHETCTSGCEYRGD

SEQ ID NO: 24503 - protein, 118 aa, Pseudomonas flexibilis
  misc_feature (1)..(118): tr|A0A1N6RB06|A0A1N6RB06_9PSED 6-carboxy-5,6,7,8-tetrah ydropterin synthase OS=Pseudomonas flexibilis OX=706570 GN=SAMN05421672_104192 PE=3 SV=1
MYTIKKEFHFSASHQLKQMPAGHPCARLHGHNYVVVLELRGEQLNPYGFVRDYLELKPFKDYIDDTLDHRHLNEVLGDERTTAERLARHLYDWARARWPEVSAVSVSETPKTWAEYRP

SEQ ID NO: 24504 - protein, 118 aa, Pseudomonas flexibilis
  misc_feature (1)..(118): tr|A0A0B3BMU7|A0A0B3BMU7_9PSED 6-carboxy-5,6,7,8-tetrah ydropterin synthase OS=Pseudomonas flexibilis OX=706570 GN=PT85_07025 PE=3 SV=1
MYTIKKEFHFSASHQLKQMPDGHPCARLHGHNYVVVLELKGEQLNPYGFVRDYLELQAFKDYIDDTLDHRHLNEVLGDECTTAERLARHLYDWARARWPEVSAVAVSETPKTWAEYRP

SEQ ID NO: 24505 - protein, 118 aa, Pseudomonas floridensis
  misc_feature (1)..(118): tr|A0A1X0MZ96|A0A1X0MZ96_9PSED 6-carboxy-5,6,7,8-tetrah ydropterin synthase OS=Pseudomonas floridensis OX=19589 50 GN=BZK31_25400 PE=3 SV=1
MEIFKEFTFESAHRLPHVPEGHKCGRLHGHSFRVGIHLAGKVDPHTGWIRDFSEIKAIFKPLYERLDHNYLNDIPGLENPTSENLAKWIWNELKPLLPELSAVRIHETCTSGCEYRGE

SEQ ID NO: 24506 - protein, 118 aa, Pseudomonas fluorescens
  misc_feature (1)..(118): tr|Q4K9G7|Q4K9G7_PSEF5 6-carboxy-5,6,7,8-tetrahydropter in synthase OS=Pseudomonas fluorescens (strain ATCC BAA -477 / NRRL B-23932 / Pf-5) OX=220664 GN=queD PE=3 SV=1
MEIFKEFTFESAHRLPFVPEGHKCGRLHGHSFKVAIHLSGEVDAHTGWIRDFSEIKAIFKPLYERLDHNYLNDIPGLENPTSEVLAKWIWNELKPLLPELSAIRIHETCTSGCIYRGE

SEQ ID NO: 24507 - protein, 118 aa, Pseudomonas fluorescens
  misc_feature (1)..(118): tr|A0A2A5R4H0|A0A2A5R4H0_PSEFL 6-carboxy-5,6,7,8-tetrah ydropterin synthase OS=Pseudomonas fluorescens OX=294 G N=queD PE=3 SV=1
MEIFKEFTFESAHRLPHVPDGHKCGRLHGHSFKVAIHLSGDLDPHTGWIRDFSEIKAIFKPLYERLDHNYLNDIPGLENPTSEVLAKFIWNELKPLLPELSAIRIHETCTSGCIYRGE

SEQ ID NO: 24508 - protein, 118 aa, Pseudomonas fragi
  misc_feature (1)..(118): tr|A0A267A5T2|A0A267A5T2_PSEFR 6-carboxy-5,6,7,8-tetrah ydropterin synthase OS=Pseudomonas fragi OX=296 GN=queD PE=3 SV=1
MEIFKEFTFESAHRLPYVPEGHKCGRLHGHSFKVAIHLSGDIDPATGWIRDFSEIKAIFKPLYELLDHNYLNDIPGLENPTSEVLAKWIWQQLKPLLAELSAIRIHETCTSGCIYYGD

SEQ ID NO: 24509 - protein, 118 aa, Pseudomonas fragi
  misc_feature (1)..(118): tr|A0A267B6M7|A0A267B6M7_PSEFR 6-carboxy-5,6,7,8-tetrah ydropterin synthase OS=Pseudomonas fragi OX=296 GN=queD PE=3 SV=1
MEIFKEFTFESAHRLPYVPEGHKCGRLHGHSFKVAIHLSGDIDPATGWIRDFSEIKAIFKPLYELLDHNYLNDIPGLENPTSEVLAKWIWQQLKPLLPELSAIRIHETCTSGCIYYGD

SEQ ID NO: 24510 - protein, 118 aa, Pseudomonas frederiksbergensis
  misc_feature (1)..(118): tr|A0A0B1YXT4|A0A0B1YXT4_9PSED 6-carboxy-5,6,7,8-tetrah ydropterin synthase OS=Pseudomonas frederiksbergensis O X=104087 GN=JZ00_25640 PE=3 SV=1
MEIFKEFTFESAHRLPHVPEGHKCGRLHGHSFKVAIHLSGDIDPHTGWIRDFSEIKAIFKPLYERLDHNYLNDIPGLENPTSEVLAKWIWNELKPLLPELSAIRIHETCTSGCIYHGE

SEQ ID NO: 24511 - protein, 118 aa, Pseudomonas frederiksbergensis; identical to SEQ ID NO: 24442
  misc_feature (1)..(118): tr|A0A1H5GNH3|A0A1H5GNH3_9PSED 6-carboxy-5,6,7,8-tetrah ydropterin synthase OS=Pseudomonas frederiksbergensis O X=104087 GN=SAMN04490185_5100 PE=3 SV=1

SEQ ID NO: 24512 - protein, 118 aa, Pseudomonas fulva
  misc_feature (1)..(118): tr|F6AFL3|F6AFL3_PSEF1 6-carboxy-5,6,7,8-tetrahydropter in synthase OS=Pseudomonas fulva (strain 12-X) OX=74372 0 GN=Psefu_2604 PE=3 SV=1
MELFKEFIFEAAHRLPHVPEGHKCGRLHGHSFRIAVYIEGDVDPYTGWIRDFSEIKAIFKPIYEQLDHNYLNDIPGLENPTSEILAKWVWQQLKPLLPELSRIRIHETCTSGCEYRGD

SEQ ID NO: 24513 - protein, 118 aa, Pseudomonas fulva
  misc_feature (1)..(118): tr|A0A2V4JT33|A0A2V4JT33_9PSED 6-carboxy-5,6,7,8-tetrah ydropterin synthase OS=Pseudomonas fulva OX=47880 GN=qu eD PE=3 SV=1
MEIFKEFMFESAHRLPHVPEGHKCGRLHGHSFKVGLHLTGPLDPHTGWIRDFAEIKAVFKPIYEQLDHNYLNDIPGLENPTSEVIAKWIWDQVKPLLPELSKVRIHETCTSGCEYSGD

SEQ ID NO: 24514 - protein, 118 aa, Pseudomonas furukawaii
  misc_feature (1)..(118): tr|L8MQA6|L8MQA6_PSEFK 6-carboxy-5,6,7,8-tetrahydropter in synthase OS=Pseudomonas furukawaii OX=1149133 GN=ppK F707_1468 PE=3 SV=1
MEIFKEFVFEAAHRLPHVPAGHKCGRLHGHSFRVAIYIEGEPDPHTGWIRDFSELKAIFKPLYEQLDHNYLNEIPGLENPTSEVLAKWIWKSLKPLLPELSRIRIHETCTSGCEYRGD

SEQ ID NO: 24515 - protein, 118 aa, Pseudomonas fuscovaginae
  misc_feature (1)..(118): tr|A0A0N0E4C7|A0A0N0E4C7_9PSED 6-carboxy-5,6,7,8-tetrah ydropterin synthase OS=Pseudomonas fuscovaginae OX=5034 0 GN=PF66_02450 PE=3 SV=1
MEIFKEFTFESAHRLPNVPAGHKCGRLHGHSFKVAIHLSGDIDQHTGWIRDFSEIKAIFKPLYERLDHNYLNEIPGLENPTSENLAKWIWKELKPLLPELSAIRIHETCTSGCIYRGE

SEQ ID NO: 24516 - protein, 127 aa, Pseudomonas fuscovaginae; identical to SEQ ID NO: 24443
  misc_feature (1)..(127): tr|A0A1H6NYU4|A0A1H6NYU4_9PSED 6-carboxy-5,6,7,8-tetrah ydropterin synthase OS=Pseudomonas fuscovaginae OX=5034 0 GN=SAMN05216581_3138 PE=3 SV=1

SEQ ID NO: 24517 - protein, 120 aa, [Pseudomonas] geniculata
  misc_feature (1)..(120): tr|A0A0L8AB11|A0A0L8AB11_9GAMM 6-carboxy-5,6,7,8-tetrah ydropterin synthase OS=[Pseudomonas] geniculata N1 OX=1 167641 GN=W7K_09860 PE=3 SV=1
MEIFKVFMLEAAHRLPNVPPGHKCARLHGHSFRVELKVEGEPGAQTGWIMDFGDVKAAFQPIYDRLDHHYLNDIPGLENPTSENLAVWIWNELKPSLPALSEITVHETCTSGCRYRGPEI

SEQ ID NO: 24518 - protein, 118 aa, Pseudomonas gessardii
  misc_feature (1)..(118): tr|A0A1V2J2R6|A0A1V2J2R6_9PSED 6-carboxy-5,6,7,8-tetrah ydropterin synthase OS=Pseudomonas gessardii OX=78544 G N=BLL38_21655 PE=3 SV=1
MEIFKEFTFESAHRLPHVPDGHKCGRLHGHSFKVAIHLSGDLDPHTGWIRDFSEIKAIFKPLYERLDHNYLNDIPGLENPTSEVLAKWIWNELKPLLPELSAIRIHETCTSGCIYRGE

SEQ ID NO: 24519 - protein, 118 aa, Pseudomonas gingeri
  misc_feature (1)..(118): tr|A0A2K1FP47|A0A2K1FP47_9PSED 6-carboxy-5,6,7,8-tetrah ydropterin synthase OS=Pseudomonas gingeri NCPPB 3146 = LMG 5327 OX=707248 GN=queD PE=3 SV=1
MEIFKEFTFESAHRLPHVPDGHKCGRLHGHSFKVAIHLSGEIDQHTGWIRDFSEIKAIFKPLYERLDHNYLNDIPGLENPTSENLAKWIWQELKPLLPELSAIRIHETCTSGCIYRGE

SEQ ID NO: 24520 - protein, 118 aa, Pseudomonas graminis
  misc_feature (1)..(118): tr|A0A1I0JRY0|A0A1I0JRY0_9PSED 6-carboxy-5,6,7,8-tetrah ydropterin synthase OS=Pseudomonas graminis OX=158627 G N=EC919_1192 PE=3 SV=1
MEIFKEFTFESAHRLPHVPDGHKCGRLHGHSFRVAIYLQGEPDPHTGWIRDFSEIKTIFKPLYERLDHNYLNDIPGLENPTSEVLVKWIWKELKPLLPELSAIRIHETCTSGCVYRGD

SEQ ID NO: 24521 - protein, 118 aa, Pseudomonas graminis
  misc_feature (1)..(118): tr|A0A1X0VKQ7|A0A1X0VKQ7_9PSED 6-carboxy-5,6,7,8-tetrah ydropterin synthase OS=Pseudomonas graminis OX=158627 G N=BW687_18935 PE=3 SV=1
MEIFKEFTFESAHLLPNVPEGHKCGRLHGHSFRVGIHLAGKVDPHTGWIRDFSEIKAIFKPLYERLDHHYLNDIPGLENPTSENLAKWIWDELKPLLPELSAIRIHETCTSGCEYRGD

SEQ ID NO: 24522 - protein, 118 aa, Pseudomonas grimontii; identical to SEQ ID NO: 24438
  misc_feature (1)..(118): tr|A0A1H1FKH7|A0A1H1FKH7_9PSED 6-carboxy-5,6,7,8-tetrah ydropterin synthase OS=Pseudomonas grimontii OX=129847 GN=queD PE=3 SV=1

SEQ ID NO: 24523 - protein, 118 aa, Pseudomonas guangdongensis
  misc_feature (1)..(118): tr|A0A1H2HY36|A0A1H2HY36_9PSED 6-carboxy-5,6,7,8-tetrah ydropterin synthase OS=Pseudomonas guangdongensis OX=12 45526 GN=SAMN05216580_2581 PE=3 SV=1
MELFKEFTFEAAHLLPHVPEGHKCGRLHGHSFRVAIYIEGEVDPYTGWIRDFGEIKAIFKPIYDRLDHYYLNDIPGLENPTSENLAKWVWQQLKPLLPELSRVRIHETCTSGCEYRGD

SEQ ID NO: 24524 - protein, 118 aa, Pseudomonas guariconensis
  misc_feature (1)..(118): tr|A0A1G7AES0|A0A1G7AES0_9PSED 6-carboxy-5,6,7,8-tetrah ydropterin synthase OS=Pseudomonas guariconensis OX=128 8410 GN=queD PE=3 SV=1
MEIFKEFTFESAHRLPNVPAGHKCGRLHGHSFKVGLHLTGPLDPHTGWIRDFAEIKAIFKPIYEQLDHNYLNDIPGLENPTSEVIAKWIWDQVKPLLPELSKVRIHETCTSGCEYSGD

SEQ ID NO: 24525 - protein, 118 aa, Pseudomonas guguanensis; identical to SEQ ID NO: 24472
  misc_feature (1)..(118): tr|A0A1H0XDF6|A0A1H0XDF6_9PSED 6-carboxy-5,6,7,8-tetrah ydropterin synthase OS=Pseudomonas guguanensis OX=11984 56 GN=SAMN05216213_1133 PE=3 SV=1

SEQ ID NO: 24526 - protein, 118 aa, Pseudomonas guineae
  misc_feature (1)..(118): tr|A0A1I3I3T4|A0A1I3I3T4_9PSED 6-carboxy-5,6,7,8-tetrah ydropterin synthase OS=Pseudomonas guineae OX=425504 GN =SAMN05216206_2218 PE=3 SV=1
MELFKEFMFEAAHRLPHVPEGHKCGRLHGHSFKVAVYIEGEVDPYTGWIRDFSEIKAIFKPLYEQLDHNYLNDIPGLENPTSEVLAKWIWQQLKPLLPELSRIRIHETCTSGCEYRGD

SEQ ID NO: 24527 - protein, 121 aa, Pseudomonas helleri
  misc_feature (1)..(121): tr|A0A0J6I8Z3|A0A0J6I8Z3_9PSED 6-carboxy-5,6,7,8-tetrah ydropterin synthase OS=Pseudomonas helleri OX=1608996 G N=TU84_18710 PE=3 SV=1
MNTVEIFKEFTFESAHRLPYVPEGHKCGRLHGHSFKVAIHLSGDIDPATGWIRDFSEIKAIFKPLYEQLDHNYLNDIPGLENPTSEVLAKWIWQQLKPLLPELSAIRIHETCTSGCIYYGD

SEQ ID NO: 24528 - protein, 118 aa, Pseudomonas helmanticensis; identical to SEQ ID NO: 24450
  misc_feature (1)..(118): tr|A0A4R7V2Y0|A0A4R7V2Y0_9PSED 6-carboxy-5,6,7,8-tetrah ydropterin synthase OS=Pseudomonas helmanticensis OX=14 71381 GN=EDF87_11368 PE=3 SV=1

SEQ ID NO: 24529 - protein, 118 aa, Pseudomonas hunanensis
  misc_feature (1)..(118): tr|A0A2I0CFG3|A0A2I0CFG3_9PSED 6-carboxy-5,6,7,8-tetrah ydropterin synthase OS=Pseudomonas hunanensis OX=124754 6 GN=queD PE=3 SV=1
MEIFKEFTFESAHRLPHVPEGHKCGRLHGHSFKVGLHLTGPLDPHTGWIRDFAEVKAIFKPIYDQLDHNYLNDIPGLENPTSEVIAKWIWDQVKPLMPELSKVRIHETCTSGCEYTGD

SEQ ID NO: 24530 - protein, 118 aa, Pseudomonas hussainii
  misc_feature (1)..(118): tr|A0A1H7KDC7|A0A1H7KDC7_9PSED 6-carboxy-5,6,7,8-tetrah ydropterin synthase OS=Pseudomonas hussainii OX=1429083 GN=SAMN05216214_105216 PE=3 SV=1
MELFKEFTFEAAHLLPHVPAGHKCGRLHGHSFKVALYIEGDVDPHTGWIRDFAEIKAIFKPIYERLDHNYLNEIPGLENPTSEVLAKWIWQQVKPLLPELSRVRIHETCTSGCEYRGD

SEQ ID NO: 24531 - protein, 158 aa, Pseudomonas indica
  misc_feature (1)..(158): tr|A0A1G8XFE3|A0A1G8XFE3_9PSED 6-pyruvoyltetrahydropter in/6-carboxytetrahydropterin synthase OS=Pseudomonas in dica OX=137658 GN=SAMN05216186_103166 PE=4 SV=1
MTVMARNDDTPAMSMVRSPDARNLLKYRLCPSSGPSERCPLELFKEFIFEAAHRLPHVPEGHKCGRLHGHSFRVAIYIEGEVDPYTGWIRDFSEIKQIFKPLYEQLDHNYLNDIPGLENPTSEVLAKWIWQKLKPLLPELSRVRIHETCTSGCEYRGD

SEQ ID NO: 24532 - protein, 118 aa, Pseudomonas indoloxydans; identical to SEQ ID NO: 24431
  misc_feature (1)..(118): tr|A0A2T5PSC7|A0A2T5PSC7_9PSED 6-carboxy-5,6,7,8-tetrah ydropterin synthase OS=Pseudomonas indoloxydans OX=4044 07 GN=queD PE=3 SV=1

SEQ ID NO: 24533 - protein, 118 aa, Pseudomonas japonica
  misc_feature (1)..(118): tr|A0A239F8Y8|A0A239F8Y8_9PSED 6-carboxy-5,6,7,8-tetrah ydropterin synthase OS=Pseudomonas japonica OX=256466 G N=SAMN05444352_109196 PE=3 SV=1
MEIFKEFTFESAHRLPNVPAGHKCGRLHGHSFKVALHLSGPLDPHTGWIRDFAEIKAVFKPLYEQLDHNYLNDIPGLENPTSEVIAKWIWDNVKPLLPELSKVRIHETCTSGCIYQGE

SEQ ID NO: 24534 - protein, 118 aa, Pseudomonas jessenii
  misc_feature (1)..(118): tr|A0A231G3B7|A0A231G3B7_9PSED 6-carboxy-5,6,7,8-tetrah ydropterin synthase OS=Pseudomonas jessenii OX=77298 GN =SAMN04490187_5266 PE=3 SV=1
MEIFKEFTFESAHRLPHVPDGHKCGRLHGHSFKVAIHLSGDLDPHTGWIRDFSEIKEIFKPLYERLDHNYLNDIPGLENPTSEVLAKFIWQELKPLLPELSAIRIHETCTSGCIYRGE

SEQ ID NO: 24535 - protein, 118 aa, Pseudomonas jessenii
  misc_feature (1)..(118): tr|A0A2W0EPL6|A0A2W0EPL6_9PSED 6-carboxy-5,6,7,8-tetrah ydropterin synthase OS=Pseudomonas jessenii OX=77298 GN =queD PE=3 SV=1
MEIFKEFTFESAHRLPHVPDGHKCGRLHGHSFKVAIHLSGDLDPHTGWIRDFSEIKAIFKPLYERLDHNYLNDIPGLENPTSEVLAKFIWNEMKPLLPELSAIRIHETCTSGCIYRGE

SEQ ID NO: 24536 - protein, 118 aa, Pseudomonas jinjuensis
  misc_feature (1)..(118): tr|A0A1H0JEH7|A0A1H0JEH7_9PSED 6-carboxy-5,6,7,8-tetrah ydropterin synthase OS=Pseudomonas jinjuensis OX=198616 GN=SAMN05216193_11155 PE=3 SV=1
MEIFKEFTFESAHHLPNVPAGHKCGRLHGHSFRAAIYIEGDVDPHTGWIRDFSEIKEIFKPIYDQLDHNYLNEIPGLENPTSENLARWIWQQLKPVLPELSRIRVHETCTSGCEYRGD

SEQ ID NO: 24537 - protein, 118 aa, Pseudomonas kairouanensis; identical to SEQ ID NO: 24518
  misc_feature (1)..(118): tr|A0A4Z0AJH6|A0A4Z0AJH6_9PSED 6-carboxy-5,6,7,8-tetrah ydropterin synthase OS=Pseudomonas kairouanensis OX=229 3832 GN=queD PE=3 SV=1

SEQ ID NO: 24538 - protein, 118 aa, Pseudomonas kilonensis
  misc_feature (1)..(118): tr|A0A0F4XQU0|A0A0F4XQU0_9PSED 6-carboxy-5,6,7,8-tetrah ydropterin synthase OS=Pseudomonas kilonensis OX=132476 GN=C7317_1370 PE=3 SV=1
MEIFKEFTFESAHRLPHVPDGHKCGRLHGHSFKVAIHLSGDIDPHTGWIRDFSEIKAIFKPLYERLDHNYLNDIPGLENPTSEVLAKWIWNELKPLLPELSAIRIHETCTSGCIYHGE

SEQ ID NO: 24539 - protein, 118 aa, Pseudomonas knackmussii
  misc_feature (1)..(118): tr|A0A024HI99|A0A024HI99_PSEKB 6-carboxy-5,6,7,8-tetrah ydropterin synthase OS=Pseudomonas knackmussii (strain DSM 6978 / LMG 23759 / B13) OX=1301098 GN=PKB_3417 PE=3 SV=1
MELFKEFVFESAHRLPHVPEGHKCGRLHGHSFRVALYIEGDVDPYTGWIRDFSEIKQIFKPIYEQLDHNYLNDIPGLENPTSENLSRWIWQQVKPLLPELSRVRVHETCTSGCEYRGD

SEQ ID NO: 24540 - protein, 118 aa, Pseudomonas koreensis; identical to SEQ ID NO: 24450
  misc_feature (1)..(118): tr|A0A142NC66|A0A142NC66_9PSED 6-carboxy-5,6,7,8-tetrah ydropterin synthase OS=Pseudomonas koreensis OX=198620 GN=queD PE=3 SV=1

SEQ ID NO: 24541 - protein, 118 aa, Pseudomonas koreensis; identical to SEQ ID NO: 24535
  misc_feature (1)..(118): tr|A0A1A9JEK8|A0A1A9JEK8_9PSED 6-carboxy-5,6,7,8-tetrah ydropterin synthase OS=Pseudomonas koreensis OX=198620 GN=A8L59_09380 PE=3 SV=1

SEQ ID NO: 24542 - protein, 118 aa, Pseudomonas kribbensis; identical to SEQ ID NO: 24507
  misc_feature (1)..(118): tr|A0A345RT33|A0A345RT33_9PSED 6-carboxy-5,6,7,8-tetrah ydropterin synthase OS=Pseudomonas kribbensis OX=162808 6 GN=queD PE=3 SV=1

SEQ ID NO: 24543 - protein, 118 aa, Pseudomonas kunmingensis
  misc_feature (1)..(118): tr|A0A2N8SKF1|A0A2N8SKF1_9PSED 6-carboxy-5,6,7,8-tetrah ydropterin synthase OS=Pseudomonas kunmingensis OX=1211 807 GN=queD PE=3 SV=1
MEIFKEFTFESAHRLPNVPQGHKCGRLHGHSFRVALYISGTVDPHTGWIRDFGEIKSVFKPLYELLDHNYLNDIPGLENPTSENLAKWIWTELKPLLPELSRIRIHETCTSGCEYCGD

SEQ ID NO: 24544 - protein, 118 aa, Pseudomonas lactis; identical to SEQ ID NO: 24448
  misc_feature (1)..(118): tr|A0A0R3C9B3|A0A0R3C9B3_9PSED 6-carboxy-5,6,7,8-tetrah ydropterin synthase OS=Pseudomonas lactis OX=1615674 GN =TX25_17680 PE=3 SV=1

SEQ ID NO: 24545 - protein, 118 aa, Pseudomonas lactis; identical to SEQ ID NO: 24438
  misc_feature (1)..(118): tr|I4K6A6|I4K6A6_9PSED 6-carboxy-5,6,7,8-tetrahydropter in synthase OS=Pseudomonas lactis OX=1615674 GN=queD PE =3 SV=1

SEQ ID NO: 24546 - protein, 120 aa, Pseudomonas laurylsulfatiphila
  misc_feature (1)..(120): tr|A0A2S6FL28|A0A2S6FL28_9PSED 6-carboxy-5,6,7,8-tetrah ydropterin synthase OS=Pseudomonas laurylsulfatiphila O X=2011015 GN=queD PE=3 SV=1
MEIFKEFVFEAAHRLPNVPDGHKCGRLHGHSFRIAIYIDGPVDRTSGWVRDFSEIKEIFAPLYERLDHNYLNEIPGLENPTSEVLAVWVWQELKPLLPELSAVRIHETCTSGCIYKGPEV

SEQ ID NO: 24547 - protein, 118 aa, Pseudomonas laurylsulfatiphila; identical to SEQ ID NO: 24535
  misc_feature (1)..(118): tr|A0A2S6FTK4|A0A2S6FTK4_9PSED 6-carboxy-5,6,7,8-tetrah ydropterin synthase OS=Pseudomonas laurylsulfatiphila O X=2011015 GN=queD PE=3 SV=1

SEQ ID NO: 24548 - protein, 125 aa, Pseudomonas laurylsulfativorans
  misc_feature (1)..(125): tr|A0A2S3VMY0|A0A2S3VMY0_9PSED 6-carboxy-5,6,7,8-tetrah ydropterin synthase OS=Pseudomonas laurylsulfativorans OX=1943631 GN=B0D71_13955 PE=3 SV=1
MNRAENTVEIFKEFTFESAHRLPHVPDGHKCGRLHGHSFKVAIHLSGDLDPHTGWIRDFSEIKAIFKPLYERLDHNYLNDIPGLENPTSEVLAKFIWQELKPLLPELSAIRIHETCTSGCIYRGE

SEQ ID NO: 24549 - protein, 118 aa, Pseudomonas libanensis; identical to SEQ ID NO: 24438
  misc_feature (1)..(118): tr|A0A0R2Y029|A0A0R2Y029_9PSED 6-carboxy-5,6,7,8-tetrah ydropterin synthase OS=Pseudomonas libanensis OX=75588 GN=TU73_25315 PE=3 SV=1

SEQ ID NO: 24550 - protein, 118 aa, Pseudomonas lini; identical to SEQ ID NO: 24518
  misc_feature (1)..(118): tr|A0A1H1X3K9|A0A1H1X3K9_9PSED 6-carboxy-5,6,7,8-tetrah ydropterin synthase OS=Pseudomonas lini OX=163011 GN=SA MN04490191_2973 PE=3 SV=1

SEQ ID NO: 24551 - protein, 120 aa, Pseudomonas lini
  misc_feature (1)..(120): tr|A0A423IQD0|A0A423IQD0_9PSED 6-carboxy-5,6,7,8-tetrah ydropterin synthase OS=Pseudomonas lini OX=163011 GN=BK 663_10555 PE=3 SV=1
MTVEIFKEFTFESAHRLPHVPDGHKCGRLHGHSFKVAIHLSGDLDPHTGWIRDFSEIKAIFKPLYERLDHNYLNDIPGLENPTSEVLAKWIWNELKPLLPELSAIRIHETCTSGCIYRGE

SEQ ID NO: 24552 - protein, 118 aa, Pseudomonas linyingensis
  misc_feature (1)..(118): tr|A0A1H7BU83|A0A1H7BU83_9PSED 6-carboxy-5,6,7,8-tetrah ydropterin synthase OS=Pseudomonas linyingensis OX=9154 71 GN=SAMN05216201_11923 PE=3 SV=1
MELFKEFTFEAAHLLPHVPQGHKCGRLHGHSFRVAIYIEGEVDPYTGWIRDFGEIKAIFKPIYDRLDHYYLNDIPGLENPTSENLSKWIWQQLKPQLPELSRVRVHETCTSGCEYRGD

SEQ ID NO: 24553 - protein, 118 aa, Pseudomonas lundensis
  misc_feature (1)..(118): tr|A0A266NEE2|A0A266NEE2_9PSED 6-carboxy-5,6,7,8-tetrah ydropterin synthase OS=Pseudomonas lundensis OX=86185 G N=queD PE=3 SV=1
MEIFKEFTFESAHRLPFVPQGHKCGRLHGHSFKVAIHLSGEIDASTGWIRDFSEIKAIFKPLYEQLDHNYLNDIPGLENPTSEVLAKWIWQELKPLLPELSAIRIHETCTSGCIYRGE

SEQ ID NO: 24554 - protein, 118 aa, Pseudomonas lundensis
  misc_feature (1)..(118): tr|A0A1D9IQC2|A0A1D9IQC2_9PSED 6-carboxy-5,6,7,8-tetrah ydropterin synthase OS=Pseudomonas lundensis OX=86185 G N=ygcM PE=3 SV=1
MEIFKEFTFESAHRLPFVPQGHKCGRLHGHSFKVAIHLSGEIDASTGWIRDFSEIKAIFKPLYEVLDHNYLNDIPGLENPTSEVLATWIWQQLKPLLPELSAIRIHETCTSGCIYRGE

SEQ ID NO: 24555 - protein, 118 aa, Pseudomonas lurida
  misc_feature (1)..(118): tr|A0A2A9DAX7|A0A2A9DAX7_9PSED 6-carboxy-5,6,7,8-tetrah ydropterin synthase OS=Pseudomonas lurida OX=244566 GN= queD PE=3 SV=1
MEIFKEFTFESAHRLPHVPEGHKCGRLHGHSFKVAIHLSGDLDPHTGWIRDFSEIKTIFKPLYERLDHNYLNDIPGLENPTSEVLAKWIWNELKPLLPELSAIRIHETCTSGCIYRGE

SEQ ID NO: 24556 - protein, 120 aa, Pseudomonas lutea
  misc_feature (1)..(120): tr|A0A098SXP6|A0A098SXP6_9PSED 6-carboxy-5,6,7,8-tetrah ydropterin synthase OS=Pseudomonas lutea OX=243924 GN=L T42_00030 PE=3 SV=1
MTVEIFKEFTFESAHRLPHVPEGHKCGRLHGHSFRVAIYLKGEPDPHTGWIRDFSEIKTIFKPLYERLDHNYLNDIPGLENPTSEVLVKWIWNELKPLLPELSAIRIHETCTSGCVYRGD

SEQ ID NO: 24557 - protein, 118 aa, Pseudomonas luteola
  misc_feature (1)..(118): tr|A0A2X2CCW6|A0A2X2CCW6_PSELU 6-carboxy-5,6,7,8-tetrah ydropterin synthase OS=Pseudomonas luteola OX=47886 GN= queD PE=3 SV=1
MEIFKEFTFEAAHFLPNVPEGHKCGRLHGHSFKVAIYLEGPVDPHTGWLRDFADIKAIFKPIYERLDHYYLNDIQGLENPTSENLAIWIWRELKPQLPELSRVRVHETCTSGCEYRGD

SEQ ID NO: 24558 - protein, 118 aa, Pseudomonas luteola
  misc_feature (1)..(118): tr|A0A3R8WGK8|A0A3R8WGK8_PSELU 6-carboxy-5,6,7,8-tetrah ydropterin synthase OS=Pseudomonas luteola OX=47886 GN= queD PE=3 SV=1
MEIFKEFTFEAAHFLPNVPEGHKCGRLHGHSFKVAIYLEGPVDPHTGWLRDFADIKAIFKPIYERLDHYYLNDIQGLENPTSENLAVWIWRELKPQLPELSRVRVHETCTSGCEYRGD

SEQ ID NO: 24559 - protein, 118 aa, Pseudomonas mandelii
  misc_feature (1)..(118): tr|A0A255Y482|A0A255Y482_9PSED 6-carboxy-5,6,7,8-tetrah ydropterin synthase OS=Pseudomonas mandelii OX=75612 GN =queD PE=3 SV=1
  misc_feature (10)..(10): Xaa can be any naturally occurring amino acid
MEIFKEFTFXSAHRLPHVPEGHKCGRLHGHSFKVAIHLSGDLDPHTGWIRDFSEIKAIFKPLYERLDHNYLNDIPGLENPTSEVLAKWIWNELKPLLPELSAIRIHETCTSGCIYHGE

SEQ ID NO: 24560 - protein, 118 aa, Pseudomonas mandelii; identical to SEQ ID NO: 24442
  misc_feature (1)..(118): tr|A0A5C5QRS4|A0A5C5QRS4_9PSED 6-carboxy-5,6,7,8-tetrah ydropterin synthase OS=Pseudomonas mandelii OX=75612 GN =queD PE=3 SV=1

SEQ ID NO: 24561 - protein, 118 aa, Pseudomonas marginalis; identical to SEQ ID NO: 24438
  misc_feature (1)..(118): tr|A0A3M4A033|A0A3M4A033_PSEMA 6-carboxy-5,6,7,8-tetrah ydropterin synthase OS=Pseudomonas marginalis pv. margi nalis OX=97473 GN=ALQ29_02607 PE=3 SV=1

SEQ ID NO: 24562 - protein, 119 aa, Pseudomonas marginalis
  misc_feature (1)..(119): tr|A0A0W0MIN4|A0A0W0MIN4_PSEMA 6-carboxy-5,6,7,8-tetrah ydropterin synthase OS=Pseudomonas marginalis ICMP 1128 9 OX=1198318 GN=AO390_13710 PE=3 SV=1
MLEIFKEFTFESAHRLPHVPEGHKCGRLHGHSFRVGIHLAGKVDPHTGWIRDFSEIKAIFKPLYERLDHNYLNDIPGLENPTSENLAKWIWNELKPLLPELSAVRIHETCTSGCEYRGE

SEQ ID NO: 24563 - protein, 118 aa, Pseudomonas marincola; identical to SEQ ID NO: 24420
  misc_feature (1)..(118): tr|A0A1I7BWS4|A0A1I7BWS4_9PSED 6-carboxy-5,6,7,8-tetrah ydropterin synthase OS=Pseudomonas marincola OX=437900 GN=SAMN05216264_10664 PE=3 SV=1

SEQ ID NO: 24564 - protein, 118 aa, Pseudomonas mediterranea
  misc_feature (1)..(118): tr|A0A0A4GLP8|A0A0A4GLP8_9PSED 6-carboxy-5,6,7,8-tetrah ydropterin synthase OS=Pseudomonas mediterranea CFBP 54 47 OX=1348058 GN=N005_07145 PE=3 SV=1
MEIFKEFTFESAHRLPHVPDGHKCGRLHGHSFKVAIHLSGDIDPHTGWIRDFSEIKAIFKPLYERLDHNYLNDIPGLENPTSEVLAKWIWNELKPLLPELSAIRIHETCTSGCIYRGE

SEQ ID NO: 24565 - protein, 118 aa, Pseudomonas meliae
  misc_feature (1)..(118): tr|A0A0P9W7T3|A0A0P9W7T3_9PSED 6-carboxy-5,6,7,8-tetrah ydropterin synthase OS=Pseudomonas meliae OX=86176 GN=A LO64_02515 PE=3 SV=1
MEIFKEFTFESAHRLPNVPEGHKCGRLHGHSFRVGIHLAGKVDPHTGWIRDFSEIKAIFKPLYERLDHNYLNDIPGLENPTSENLAKWIWDELKPLLPELSAVRIHETCTSGCEYRGD

SEQ ID NO: 24566 - protein, 118 aa, Pseudomonas mendocina
  misc_feature (1)..(118): tr|A4XTT5|A4XTT5_PSEMY 6-carboxy-5,6,7,8-tetrahydropter in synthase OS=Pseudomonas mendocina (strain ymp) OX=39 9739 GN=Pmen_1990 PE=3 SV=1
MELFKEFIFEAAHRLPHVPEGHKCGRLHGHSFRVALYIEGEVDPYTGWIRDFSEIKAIFKPIYEQLDHNYLNDIPGLENPTSEVLAKWIWQQVKPLLPELSRVRIHETCTSGCEYRGD

SEQ ID NO: 24567 - protein, 118 aa, Pseudomonas mendocina; identical to SEQ ID NO: 24472
  misc_feature (1)..(118): tr|A0A2R3QW53|A0A2R3QW53_PSEME 6-carboxy-5,6,7,8-tetrah ydropterin synthase OS=Pseudomonas mendocina OX=300 GN= queD PE=3 SV=1

SEQ ID NO: 24568 - protein, 150 aa, [Pseudomonas] mesoacidophila
  misc_feature (1)..(150): tr|A0A2A4FD36|A0A2A4FD36_9BURK 6-carboxytetrahydropteri n synthase QueD OS=[Pseudomonas] mesoacidophila OX=2652 93 GN=BZL54_16995 PE=4 SV=1
MLITRKLEFDAGHRIPDHRSQCRNLHGHRYVLEITLRGDLVDTEGAPDRGMVMDFADVKALAMEHLVSKWDHAFLVYARDEVVRSFLEQMADHKTVVIDRIPTVENLAAIAFDILANVYDAHYGINLRLERVRLYETPNCWADVERAPGR

SEQ ID NO: 24569 - protein, 118 aa, Pseudomonas migulae
  misc_feature (1)..(118): tr|A0A1H5LV97|A0A1H5LV97_9PSED 6-carboxy-5,6,7,8-tetrah ydropterin synthase OS=Pseudomonas migulae OX=78543 GN= SAMN04490194_4191 PE=3 SV=1
MEIFKEFTFESAHRLPHVPDGHKCGRLHGHSFKVAIHLSGDLDPHTGWIRDFSEIKAIFKPLYERLDHNYLNDIPGLENPTSEVLAKWIWGELKPLLPELSAIRIHETCTSGCIYRGE

SEQ ID NO: 24570 - protein, 118 aa, Pseudomonas mohnii
  misc_feature (1)..(118): tr|A0A1H5AL62|A0A1H5AL62_9PSED 6-carboxy-5,6,7,8-tetrah ydropterin synthase OS=Pseudomonas mohnii OX=395600 GN= SAMN05216205_5196 PE=3 SV=1
MEIFKEFTFESAHRLPHVPDGHKCGRLHGHSFKVAIHLSGDIDPHTGWIRDFSEIKAIFKPLYERLDHNYLNDIPGLENPTSEVLAKFIWAELKPLLPELSAIRIHETCTSGCIYRGE

SEQ ID NO: 24571 - protein, 118 aa, Pseudomonas monteilii
  misc_feature (1)..(118): tr|V9UXW9|V9UXW9_9PSED 6-carboxy-5,6,7,8-tetrahydropter in synthase OS=Pseudomonas monteilii SB3101 OX=1435058 GN=X970_07550 PE=3 SV=1
MEIFKEFTFESAHRLPHVPAGHKCGRLHGHSFKVGLHLTGPLDPHTGWIRDFAEIKAIFKPIYEQLDHNYLNDIPGLENPTSEVIAKWIWDQVKPLLPELSKVRIHETCTSGCEYTGD

SEQ ID NO: 24572 - protein, 118 aa, Pseudomonas monteilii
  misc_feature (1)..(118): tr|A0A136QMY6|A0A136QMY6_9PSED 6-carboxy-5,6,7,8-tetrah ydropterin synthase OS=Pseudomonas monteilii OX=76759 G N=BC89_04310 PE=3 SV=1
MEIFKEFTFESAHRLPHVPAGHKCGRLHGHSFKVGLHLTGPLDPHTGWIRDFAEIKAVFKPIYEQLDHNYLNDIPGLENPTSEVIAKWIWDQVKPLLPELSKVRIHETCTSGCEYTGD

SEQ ID NO: 24573 - protein, 118 aa, Pseudomonas moorei; identical to SEQ ID NO: 24570
  misc_feature (1)..(118): tr|A0A1H1GWK9|A0A1H1GWK9_9PSED 6-carboxy-5,6,7,8-tetrah ydropterin synthase OS=Pseudomonas moorei OX=395599 GN= SAMN04490195_3593 PE=3 SV=1

SEQ ID NO: 24574 - protein, 119 aa, Pseudomonas moorei
  misc_feature (1)..(119): tr|A0A4Q7H3B0|A0A4Q7H3B0_9PSED 6-carboxy-5,6,7,8-tetrah ydropterin synthase OS=Pseudomonas moorei OX=395599 GN= queD PE=3 SV=1
MEIFKEFTFESAHRLPHVPDGHKCGRLHGHSFKVAIHLSGDIDPHTGWIRDFSEIKAIFKPLYERLDHNYLNDIPGLENPTSEVLAKFIWAELKPLLPELSAIRIHETCTSGCIYRGEL

SEQ ID NO: 24575 - protein, 118 aa, Pseudomonas moraviensis; identical to SEQ ID NO: 24450
  misc_feature (1)..(118): tr|V8R5I4|V8R5I4_9PSED 6-carboxy-5,6,7,8-tetrahydropter in synthase OS=Pseudomonas moraviensis R28-S OX=1395516 GN=PMO01_17480 PE=3 SV=1

SEQ ID NO: 24576 - protein, 118 aa, Pseudomonas moraviensis; identical to SEQ ID NO: 24450
  misc_feature (1)..(118): tr|A0A1Q3IC36|A0A1Q3IC36_9PSED 6-carboxy-5,6,7,8-tetrah ydropterin synthase OS=Pseudomonas moraviensis OX=32166 2 GN=queD PE=3 SV=1

SEQ ID NO: 24577 - protein, 118 aa, Pseudomonas mosselii
  misc_feature (1)..(118): tr|A0A135NWT3|A0A135NWT3_9PSED 6-carboxy-5,6,7,8-tetrah ydropterin synthase OS=Pseudomonas mosselii OX=78327 GN =queD PE=3 SV=1
MEIFKEFTFESAHRLPNVPAGHKCGRLHGHSFKVALHLTGPLDPHTGWIRDFSEIKAIFKPIYEQLDHNYLNDIPGLENPTSEVIAKWIWDQVKPLLPELSKVRIHETCTSGCEYTGD

SEQ ID NO: 24578 - protein, 118 aa, Pseudomonas mosselii; identical to SEQ ID NO: 24498
  misc_feature (1)..(118): tr|A0A2V4KET9|A0A2V4KET9_9PSED 6-carboxy-5,6,7,8-tetrah ydropterin synthase OS=Pseudomonas mosselii OX=78327 GN =queD PE=3 SV=1

SEQ ID NO: 24579 - protein, 163 aa, Pseudomonas mucidolens
  misc_feature (1)..(163): tr|A0A1H2MA34|A0A1H2MA34_9PSED 6-pyruvoyltetrahydropter in/6-carboxytetrahydropterin synthase OS=Pseudomonas mu cidolens OX=46679 GN=SAMN05216202_1305 PE=4 SV=1
MSSSNWPITAVSASAWFPSDQPLCAAANQAVKLAACQTLTELKNTVEIFKEFTFESAHRLPHVPEGHKCGRLHGHSFKVAIHLSGDLDPHTGWIRDFSEIKAIFKPLYERLDHNYLNDIPGLENPTSEVLAKWIWNELKPLLPELSAIRIHETCTSGCIYRGE

SEQ ID NO: 24580 - protein, 214 aa, Pseudomonas nabeulensis
  misc_feature (1)..(214): tr|A0A4Z0B7Z3|A0A4Z0B7Z3_9PSED 6-carboxytetrahydropteri n synthase OS=Pseudomonas nabeulensis OX=2293833 GN=DYL 61_04310 PE=4 SV=1
MLIRKLFKFENAHIVRGCSTQRCAYSIHGHSYKVELLLEAHALDNGQMIYDFGLLKGDIRDLIDAFDHAVALWSGDDPDYLATMRKHSERWVLIPVSPSAEQFARLFFRLVDTALSLTVMANGEDDVRLHSVIVHETETGYAQCFREDVDNPRMGQIDLDSITFSPAVIQEWRDPNLFERLKRGESQENPRPGERYMHQAHATHVDSDQGGTHA

SEQ ID NO: 24581 - protein, 118 aa, Pseudomonas nabeulensis; identical to SEQ ID NO: 24438
  misc_feature (1)..(118): tr|A0A4Z0AXH9|A0A4Z0AXH9_9PSED 6-carboxy-5,6,7,8-tetrah ydropterin synthase OS=Pseudomonas nabeulensis OX=22938 33 GN=queD PE=3 SV=1

SEQ ID NO: 24582 - protein, 118 aa, Pseudomonas nitroreducens
  misc_feature (1)..(118): tr|A0A239NC10|A0A239NC10_9PSED 6-carboxy-5,6,7,8-tetrah ydropterin synthase OS=Pseudomonas nitroreducens OX=466 80 GN=SAMN05216209_0191 PE=3 SV=1
MELFKEFTFESAHRLPHVPAGHQCGRLHGHSFRAAIYIEGEVDPHTGWIRDFAEIKQIFKPIYDQLDHNYLNDIPGLDNPTSENLCRWIWQQLKPLLPELSKVRVHETCTSGCEYRGD

SEQ ID NO: 24583 - protein, 118 aa, Pseudomonas nitroreducens
  misc_feature (1)..(118): tr|A0A2D0ABX5|A0A2D0ABX5_9PSED 6-carboxy-5,6,7,8-tetrah ydropterin synthase OS=Pseudomonas nitroreducens OX=466 80 GN=queD PE=3 SV=1
MELFKEFTFESAHRLPHVPAGHQCGRLHGHSFRAAIYIEGEVDPHTGWIRDFAEIKQIFKPIYDQLDHNYLNDIPGLENPTSESLCRWIWQQLKPLLPELSKVRVHETCTSGCEYRGD

SEQ ID NO: 24584 - protein, 118 aa, Pseudomonas oleovorans; identical to SEQ ID NO: 24431
  misc_feature (1)..(118): tr|A0A2S7FJG7|A0A2S7FJG7_PSEOL 6-carboxy-5,6,7,8-tetrah ydropterin synthase OS=Pseudomonas oleovorans OX=301 GN =queD PE=3 SV=1

SEQ ID NO: 24585 - protein, 118 aa, Pseudomonas oleovorans
  misc_feature (1)..(118): tr|A0A397NK22|A0A397NK22_PSEOL 6-carboxy-5,6,7,8-tetrah ydropterin synthase OS=Pseudomonas oleovorans OX=301 GN =DFO61_0001 PE=3 SV=1
MELFKEFIFEAAHRLPHVPEGHKCGRLHGHSFRVAIYIEGEVDPYTGWIRDFSEIKAIFKPIYEQLDHNYLNEIPGLENPTSEVLAKWIWQQVKPLLPELSRVRIHETCTSGCEYRGD

SEQ ID NO: 24586 - protein, 118 aa, Pseudomonas orientalis
  misc_feature (1)..(118): tr|A0A0R2ZFN6|A0A0R2ZFN6_9PSED 6-carboxy-5,6,7,8-tetrah ydropterin synthase OS=Pseudomonas orientalis OX=76758 GN=C4J96_1893 PE=3 SV=1
MEIFKEFTFESAHRLPHVPDGHKCGRLHGHSFKVAIHLSGDLDPHTGWIRDFSEIKAIFKPLYERLDHNYLNDIPGLENPTSEVLAKWIWTELKPLLPELSAIRIHETCTSGCIYRGE

SEQ ID NO: 24587 - protein, 118 aa, Pseudomonas orientalis
  misc_feature (1)..(118): tr|A0A2L0RUG9|A0A2L0RUG9_9PSED 6-carboxy-5,6,7,8-tetrah ydropterin synthase OS=Pseudomonas orientalis OX=76758 GN=queD PE=3 SV=1
MEIFKEFTFESAHRLPHVPDGHKCGRLHGHSFKVAIHLSGDLDPHTGWIRDFSEIKAIFKPLYERLDHNYLNDIPGLENPTSEVLAKWIWVELKPLLPELSAIRIHETCTSGCIYRGE

SEQ ID NO: 24588 - protein, 118 aa, Pseudomonas oryzae
  misc_feature (1)..(118): tr|A0A1H1RTZ0|A0A1H1RTZ0_9PSED 6-carboxy-5,6,7,8-tetrah ydropterin synthase OS=Pseudomonas oryzae OX=1392877 GN =SAMN05216221_1716 PE=3 SV=1
MELFKEFTFEAAHLLPHVPQGHKCGRLHGHSFRVAIYIEGEVDPYTGWIRDFSEIKAIFKPIYDRLDHYYLNDIPGLENPTSENLAKWIWQQLKPLLPELSRVRVHETCTSGCEYRGD

SEQ ID NO: 24589 - protein, 121 aa, Pseudomonas oryzihabitans
  misc_feature (1)..(121): tr|A0A178L936|A0A178L936_9PSED 6-carboxy-5,6,7,8-tetrah ydropterin synthase OS=Pseudomonas oryzihabitans OX=478 85 GN=A4V15_06695 PE=3 SV=1
MVIVEIFKEFIFEAAHFLPNVPAGHKCGRLHGHSFKVGLHIEGAVDPHTGWVRDFADIKAAFKPLYERLDHHYLNDIPGLENPTSEVLARWIWQQLKPLLPELSQVRVHETCTCGCIYRGD

SEQ ID NO: 24590 - protein, 121 aa, Pseudomonas oryzihabitans
  misc_feature (1)..(121): tr|A0A0U4WL53|A0A0U4WL53_9PSED 6-carboxy-5,6,7,8-tetrah ydropterin synthase OS=Pseudomonas oryzihabitans OX=478 85 GN=APT59_13445 PE=3 SV=1
MVIVEIFKEFVFEAAHFLPNVPPGHKCGRLHGHSFKVGLHIEGAVDPHTGWVRDFADIKAAFKPLYERLDHHYLNDIPGLENPTSEVLARWIWQQLKPLLPELSQVRVHETCTCGCIYRGD

SEQ ID NO: 24591 - protein, 118 aa, Pseudomonas otitidis
  misc_feature (1)..(118): tr|A0A1I0SUQ6|A0A1I0SUQ6_9PSED 6-carboxy-5,6,7,8-tetrah ydropterin synthase OS=Pseudomonas otitidis OX=319939 G N=SAMN05216263_1022 PE=3 SV=1
MEIFKEFIFEAAHRLPHVPAGHKCGRLHGHSFRVALYIEGDVDPHTGWIRDFSEIKALFRPIYEQLDHNYLNDIPGLENPTSEVLAKWIWQQVKPLIPELSRVRIHETCTSGCEYRGD

SEQ ID NO: 24592 - protein, 118 aa, Pseudomonas palleroniana; identical to SEQ ID NO: 24438
  misc_feature (1)..(118): tr|A0A1H5PC37|A0A1H5PC37_9PSED 6-carboxy-5,6,7,8-tetrah ydropterin synthase OS=Pseudomonas palleroniana OX=1913 90 GN=queD PE=3 SV=1

SEQ ID NO: 24593 - protein, 118 aa, Pseudomonas panacis; identical to SEQ ID NO: 24586
  misc_feature (1)..(118): tr|A0A1H4I4W4|A0A1H4I4W4_PSEPA 6-carboxy-5,6,7,8-tetrah ydropterin synthase OS=Pseudomonas panacis OX=307251 GN =SAMN04490199_0098 PE=3 SV=1

SEQ ID NO: 24594 - protein, 118 aa, Pseudomonas panipatensis; identical to SEQ ID NO: 24490
  misc_feature (1)..(118): tr|A0A1G8CXI7|A0A1G8CXI7_9PSED 6-carboxy-5,6,7,8-tetrah ydropterin synthase OS=Pseudomonas panipatensis OX=4289 92 GN=SAMN05216272_101824 PE=3 SV=1

SEQ ID NO: 24595 - protein, 118 aa, Pseudomonas parafulva; identical to SEQ ID NO: 24535
  misc_feature (1)..(118): tr|A0A497UQR7|A0A497UQR7_9PSED 6-carboxy-5,6,7,8-tetrah ydropterin synthase OS=Pseudomonas parafulva OX=157782 GN=C8F02_2493 PE=3 SV=1

SEQ ID NO: 24596 - protein, 118 aa, Pseudomonas parafulva
  misc_feature (1)..(118): tr|A0A0A7JIL9|A0A0A7JIL9_9PSED 6-carboxy-5,6,7,8-tetrah ydropterin synthase OS=Pseudomonas parafulva OX=157782 GN=NJ69_04930 PE=3 SV=1
MEIFKEFTFESAHRLPNVPAGHKCGRLHGHSFKVALHLTGPLDPHTGWIRDFAEVKAIFKPIYERLDHNYLNDIPGLENPTSEVIAKWIWEQVKPLLPELSKVRIHETCTSGCEYTGD

SEQ ID NO: 24597 - protein, 118 aa, Pseudomonas paralactis; identical to SEQ ID NO: 24438
  misc_feature (1)..(118): tr|A0A0R3AAI2|A0A0R3AAI2_9PSED 6-carboxy-5,6,7,8-tetrah ydropterin synthase OS=Pseudomonas paralactis OX=161567 3 GN=TX23_24010 PE=3 SV=1

SEQ ID NO: 24598 - protein, 118 aa, Pseudomonas pelagia
  misc_feature (1)..(118): tr|A0A2A4AY17|A0A2A4AY17_9PSED 6-carboxy-5,6,7,8-tetrah ydropterin synthase OS=Pseudomonas pelagia OX=553151 GN =queD PE=3 SV=1
MEIFKEFTFEAAHLLPHVPQGHKCGRLHGHSFMVAVHISGEPDAHTGWIRDFSELKAIFKPLYDQLDHNYLNDIPGLENPTSEVLAKWIWRELKPLLPELSQITIRETCTSGCVYRGD

SEQ ID NO: 24599 - protein, 118 aa, Pseudomonas peli
  misc_feature (1)..(118): tr|A0A1G4SLU8|A0A1G4SLU8_9PSED 6-carboxy-5,6,7,8-tetrah ydropterin synthase OS=Pseudomonas peli OX=592361 GN=SA MN05216370_2887 PE=3 SV=1
MELFKEFMFEAAHRLPHVPEGHKCGRLHGHSFKVAVYIEGDVDPYTGWIRDFSEIKAIFKPLYEQLDHNYLNDIPGLENPTSEVLAKWIWQQLKPLLPELSRIRIHETCTSGCEYRGD

SEQ ID NO: 24600 - protein, 118 aa, Pseudomonas plecoglossicida
  misc_feature (1)..(118): tr|A0A2R7UNM7|A0A2R7UNM7_9PSED 6-carboxy-5,6,7,8-tetrah ydropterin synthase OS=Pseudomonas plecoglossicida OX=7 0775 GN=queD PE=3 SV=1
MEIFKEFTFESAHRLPHVPAGHKCGRLHGHSFKVGLHLTGPLDPHTGWIRDFAEIKAIFKPIYEQLDHNYLNDIPGLENPTSEVIAKWIWDQVKPLLPELSKVRIHETCTSGCEYSGD

SEQ ID NO: 24601 - protein, 118 aa, Pseudomonas plecoglossicida; identical to SEQ ID NO: 24571
  misc_feature (1)..(118): tr|A0A099MWY4|A0A099MWY4_9PSED 6-carboxy-5,6,7,8-tetrah ydropterin synthase OS=Pseudomonas plecoglossicida OX=7 0775 GN=queD PE=3 SV=1

SEQ ID NO: 24602 - protein, 118 aa, Pseudomonas poae; identical to SEQ ID NO: 24499
  misc_feature (1)..(118): tr|A0A1H0DSG2|A0A1H0DSG2_9PSED 6-carboxy-5,6,7,8-tetrah ydropterin synthase OS=Pseudomonas poae OX=200451 GN=DM 05_3063 PE=3 SV=1

SEQ ID NO: 24603 - protein, 118 aa, Pseudomonas poae; identical to SEQ ID NO: 24438
  misc_feature (1)..(118): tr|A0A2S9EHK3|A0A2S9EHK3_9PSED 6-carboxy-5,6,7,8-tetrah ydropterin synthase OS=Pseudomonas poae OX=200451 GN=qu eD PE=3 SV=1

SEQ ID NO: 24604 - protein, 118 aa, Pseudomonas pohangensis
  misc_feature (1)..(118): tr|A0A1H2EZ26|A0A1H2EZ26_9PSED 6-carboxy-5,6,7,8-tetrah ydropterin synthase OS=Pseudomonas pohangensis OX=36419 7 GN=SAMN05216296_1191 PE=3 SV=1
MELFKEFIFEAAHRLPHVPQGHKCGRLHGHSFRVAIFIEGEVDPHTGWIRDFSEIKAIFKPIYERLDHNYLNEIPGLENPTSEVLAKWIWQELKPLLPDLSRIRIMETCTSGCEYRGN

SEQ ID NO: 24605 - protein, 118 aa, Pseudomonas prosekii
  misc_feature (1)..(118): tr|A0A3L8CGI2|A0A3L8CGI2_9PSED 6-carboxy-5,6,7,8-tetrah ydropterin synthase OS=Pseudomonas prosekii OX=1148509 GN=queD PE=3 SV=1
MEIFKEFTFESAHRLPHVPEGHKCGRLHGHSFKVAIHLSGDLDPHTGWIRDFSEIKTIFKPLYERLDHNYLNDIPGLENPTSEVLAKWIWNELKPLLPELSAIRIHETCTSGCIYHGE

SEQ ID NO: 24606 - protein, 118 aa, Pseudomonas prosekii
  misc_feature (1)..(118): tr|A0A1H2AVM8|A0A1H2AVM8_9PSED 6-carboxy-5,6,7,8-tetrah ydropterin synthase OS=Pseudomonas prosekii OX=1148509 GN=queD PE=3 SV=1
MEIFKEFTFESAHRLPHVPDGHKCGRLHGHSFKVAIHLSGDLDPHTGWIRDFSEIKAIFKPLYERLDHNYLNDIPGLENPTSEVLAKWIWNELKPLLPELSAIRIHETCTSGCIYHGE

SEQ ID NO: 24607 - protein, 118 aa, Pseudomonas protegens; identical to SEQ ID NO: 24506
  misc_feature (1)..(118): tr|A0A2C9EQ96|A0A2C9EQ96_PSEPH 6-carboxy-5,6,7,8-tetrah ydropterin synthase OS=Pseudomonas protegens (strain DS M 19095 / LMG 27888 / CHA0) OX=1124983 GN=queD PE=3 SV= 1

SEQ ID NO: 24608 - protein, 118 aa, Pseudomonas protegens; identical to SEQ ID NO: 24506
  misc_feature (1)..(118): tr|A0A2J7TQR5|A0A2J7TQR5_9PSED 6-carboxy-5,6,7,8-tetrah ydropterin synthase OS=Pseudomonas protegens OX=380021 GN=queD PE=3 SV=1

SEQ ID NO: 24609 - protein, 118 aa, Pseudomonas pseudoalcaligenes; identical to SEQ ID NO: 24472
  misc_feature (1)..(118): tr|W6QVF9|W6QVF9_PSEP5 6-carboxy-5,6,7,8-tetrahydropter in synthase OS=Pseudomonas pseudoalcaligenes (strain CE CT 5344) OX=1182590 GN=ptpS PE=3 SV=1

SEQ ID NO: 24610 - protein, 121 aa, Pseudomonas psychrophila
  misc_feature (1)..(121): tr|A0A0J6KTK2|A0A0J6KTK2_9PSED 6-carboxy-5,6,7,8-tetrah ydropterin synthase OS=Pseudomonas psychrophila OX=1223 55 GN=TU76_09080 PE=3 SV=1
MNIVEIFKEFTFESAHRLPYVPEGHKCGRLHGHSFKVAIHLSGDIDPATGWIRDFSEIKAIFKPLYELLDHNYLNDIPGLENPTSEVLAKWIWQQLKPLLPELSAIRIHETCTSGCIYYGD

SEQ ID NO: 24611 - protein, 118 aa, Pseudomonas psychrophila
  misc_feature (1)..(118): tr|A0A3N1Z9J6|A0A3N1Z9J6_9PSED 6-carboxy-5,6,7,8-tetrah ydropterin synthase OS=Pseudomonas psychrophila OX=1223 55 GN=EDF86_4940 PE=3 SV=1
MEIFKEFTFESAHRLPYVPEGHKCGRLHGHSFKVAIHLSGDIDPATGWIRDFSEIKAIFKPLYEQLDHNYLNDIPGLENPTSEVLAKWIWQQLKPLLPELSAIRIHETCTSGCIYYGD

SEQ ID NO: 24612 - protein, 118 aa, Pseudomonas psychrotolerans
  misc_feature (1)..(118): tr|A0A1G5M9Y9|A0A1G5M9Y9_9PSED 6-carboxy-5,6,7,8-tetrah ydropterin synthase OS=Pseudomonas psychrotolerans OX=2 37610 GN=SAMN05216279_101475 PE=3 SV=1
MEIFKEFIFEAAHFLPNVPAGHKCGRLHGHSFKVGLHIEGAVDPHTGWVRDFADIKAVFKPLYERLDHHYLNDIPGLENPTSEVLARWIWQQLKPQLPELSQVRVHETCTCGCIYRGD

SEQ ID NO: 24613 - protein, 118 aa, Pseudomonas psychrotolerans
  misc_feature (1)..(118): tr|A0A4Y5W2V5|A0A4Y5W2V5_9PSED 6-carboxy-5,6,7,8-tetrah ydropterin synthase OS=Pseudomonas psychrotolerans OX=2 37610 GN=queD PE=3 SV=1
MEIFKEFIFEAAHFLPNVPAGHKCGRLHGHSFKVALHIEGTIDPHTGWVRDFADIKAVFKPLYERLDHHYLNDIPGLENPTSEVLARWIWQQLKPLLPELSQVRIHETCTSGCIYRGD

SEQ ID NO: 24614 - protein, 118 aa, Pseudomonas punonensis
  misc_feature (1)..(118): tr|A0A1M7LYQ3|A0A1M7LYQ3_9PSED 6-carboxy-5,6,7,8-tetrah ydropterin synthase OS=Pseudomonas punonensis OX=122049 5 GN=SAMN05216288_4431 PE=3 SV=1
MELFKEFIFEAAHRLPHVPEGHKCARLHGHSFRIAVYIEGEVNPHTGWIRDFSEIKAIFKPIYEQLDHNYLNDIPGLENPTSEVLAKWVWQQLKPLLPELSRIRIHETCSSGCEYRGD

SEQ ID NO: 24615 - protein, 118 aa, Pseudomonas putida; identical to SEQ ID NO: 24529
  misc_feature (1)..(118): tr|Q88KE9|Q88KE9_PSEPK 6-carboxy-5,6,7,8-tetrahydropter in synthase OS=Pseudomonas putida (strain ATCC 47054 / DSM 6125 / NCIMB 11950 / KT2440) OX=160488 GN=queD PE=3 SV=1

SEQ ID NO: 24616 - protein, 118 aa, Pseudomonas putida
  misc_feature (1)..(118): tr|A0A083UHQ7|A0A083UHQ7_PSEPU 6-carboxy-5,6,7,8-tetrah ydropterin synthase OS=Pseudomonas putida OX=303 GN=HA6 2_24955 PE=3 SV=1
MEIFKEFTFESAHRLPHVPDGHKCGRLHGHSFKVAIHLSGDLDPHTGWIRDFSEIKAIFKPLYERLDHNYLNDIPGLENPTSEVLAKFIWAELKPLLPELSAIRIHETCTSGCIYRGE

SEQ ID NO: 24617 - protein, 118 aa, Pseudomonas reidholzensis
  misc_feature (1)..(118): tr|A0A383RTM3|A0A383RTM3_9PSED 6-carboxy-5,6,7,8-tetrah ydropterin synthase OS=Pseudomonas reidholzensis OX=178 5162 GN=queD PE=3 SV=1
MEIFKEFTFESAHRLPHVPEGHKCGRLHGHSFKVALHLTGPLDPHTGWIRDFSEIKAIFKPLYEQLDHNYLNDIPGLENPTSEVIAKWIWEQVKPLLPELSKVRIHETCTSGCEYTGD

SEQ ID NO: 24618 - protein, 118 aa, Pseudomonas reinekei; identical to SEQ ID NO: 24616
  misc_feature (1)..(118): tr|A0A1H0T952|A0A1H0T952_9PSED 6-carboxy-5,6,7,8-tetrah ydropterin synthase OS=Pseudomonas reinekei OX=395598 G N=SAMN04490202_4558 PE=3 SV=1

SEQ ID NO: 24619 - protein, 125 aa, Pseudomonas reinekei
  misc_feature (1)..(125): tr|A0A1Q9WPH7|A0A1Q9WPH7_9PSED 6-carboxy-5,6,7,8-tetrah ydropterin synthase OS=Pseudomonas reinekei OX=395598 G N=BVK86_21115 PE=3 SV=1
MNRAENTVEIFKEFTFESAHRLPHVPDGHKCGRLHGHSFKVAIHLSGDLDPHTGWIRDFSEIKAIFKPLYERLDHNYLNDIPGLENPTSEVLAKFIWAELKPLLPELSAIRIHETCTSGCIYRGE

SEQ ID NO: 24620 - protein, 118 aa, Pseudomonas resinovorans
  misc_feature (1)..(118): tr|S6AKX5|S6AKX5_PSERE 6-carboxy-5,6,7,8-tetrahydropter in synthase OS=Pseudomonas resinovorans NBRC 106553 OX= 1245471 GN=queD PE=3 SV=1
MEIFKEFIFEAAHQLPHVPAGHKCGRLHGHSFRVAIYIEGEPDPHTGWIRDFSELKAIFKPLYEQLDHNYLNEIPGLENPTSEVLAKWIWQQLKPLLPELSRIRIHETCTSGCEYRGD

SEQ ID NO: 24621 - protein, 118 aa, Pseudomonas rhizosphaerae
  misc_feature (1)..(118): tr|A0A089YV06|A0A089YV06_9PSED 6-carboxy-5,6,7,8-tetrah ydropterin synthase OS=Pseudomonas rhizosphaerae OX=216 142 GN=LT40_12940 PE=3 SV=1
MEIFKEFTFESAHRLPHVPEGHKCGRLHGHSFKVAIYLKGDVDPHTGWIRDFSEIKSIFKPLYERLDHNYLNDISGLENPTSENLAKWIWQELKPLLPELSKIRIHETCTSGCEYVGD

SEQ ID NO: 24622 - protein, 118 aa, Pseudomonas rhodesiae; identical to SEQ ID NO: 24518
  misc_feature (1)..(118): tr|A0A5C5NDT3|A0A5C5NDT3_9PSED 6-carboxy-5,6,7,8-tetrah ydropterin synthase OS=Pseudomonas rhodesiae OX=76760 G N=queD PE=3 SV=1

SEQ ID NO: 24623 - protein, 118 aa, Pseudomonas sagittaria
  misc_feature (1)..(118): tr|A0A1I5PWI1|A0A1I5PWI1_9PSED 6-carboxy-5,6,7,8-tetrah ydropterin synthase OS=Pseudomonas sagittaria OX=113599 0 GN=SAMN05216229_10273 PE=3 SV=1
MELFKEFTFEAAHLLPHVPQGHKCGRLHGHSFRVAIYIEGEVDPYTGWIRDFSEIKAIFKPIYDRLDHYYLNDIPGLENPTSENLSKWIWQQLKPALPELSRVRVHETCTSGCEYRGD

SEQ ID NO: 24624 - protein, 118 aa, Pseudomonas salegens
  misc_feature (1)..(118): tr|A0A1H2ETQ6|A0A1H2ETQ6_9PSED 6-carboxy-5,6,7,8-tetrah ydropterin synthase OS=Pseudomonas salegens OX=1434072 GN=SAMN05216210_1030 PE=3 SV=1
MEIFKEFTFEAAHRLPNVPAGHKCGRLHGHSFQVAIHISGPVDPHTGWVRDFADIKAIFKPIYDQLDHNYLNDLPGLENPTSEVIARWIWHKLKPDLPELSQITLRETCTCGCIYRGE

SEQ ID NO: 24625 - protein, 118 aa, Pseudomonas salomonii; identical to SEQ ID NO: 24499
  misc_feature (1)..(118): tr|A0A1H3SAZ5|A0A1H3SAZ5_9PSED 6-carboxy-5,6,7,8-tetrah ydropterin synthase OS=Pseudomonas salomonii OX=191391 GN=ALP97_00900 PE=3 SV=1

SEQ ID NO: 24626 - protein, 118 aa, Pseudomonas saponiphila
  misc_feature (1)..(118): tr|A0A1H4LM20|A0A1H4LM20_9PSED 6-carboxy-5,6,7,8-tetrah ydropterin synthase OS=Pseudomonas saponiphila OX=55653 4 GN=SAMN05216178_1981 PE=3 SV=1
MEIFKEFTFESAHRLPFVPEGHKCGRLHGHSFKVAIHLSGEIDAHTGWIRDFSEIKAIFKPLYERLDHNYLNDIPGLENPTSEVLAKWIWNELKPLLPELSAIRIHETCTSGCIYRGE

SEQ ID NO: 24627 - protein, 118 aa, Pseudomonas saudiphocaensis
  misc_feature (1)..(118): tr|A0A078LS01|A0A078LS01_9PSED 6-carboxy-5,6,7,8-tetrah ydropterin synthase OS=Pseudomonas saudiphocaensis OX=1 499686 GN=BN1079_00423 PE=3 SV=1
MEIFKEFTFESAHRLPHVPEGHKCGRLHGHSFRVALYIEGQVDPHTGWIRDFGEIKSIFKPLLEQLDHNYLNDLPGLENPTSENLAKWIWGELKPLLPELSRIRIHETCTSGCEYRGD

SEQ ID NO: 24628 - protein, 118 aa, Pseudomonas saudiphocaensis
  misc_feature (1)..(118): tr|A0A3R8VFQ9|A0A3R8VFQ9_9PSED 6-carboxy-5,6,7,8-tetrah ydropterin synthase OS=Pseudomonas saudiphocaensis OX=1 499686 GN=queD PE=3 SV=1
MEIFKEFTFESAHRLPHVPEGHKCGRLHGHSFRVALYIEGQVDPHTGWIRDFGEIKSIFKPLLERLDHNYLNDLPGLENPTSENLAKWIWVELKPLLPELSRIRIHETCTSGCEYRGD

SEQ ID NO: 24629 - protein, 118 aa, Pseudomonas savastanoi
  misc_feature (1)..(118): tr|A0A3M4S0M9|A0A3M4S0M9_PSESG 6-carboxy-5,6,7,8-tetrah ydropterin synthase OS=Pseudomonas savastanoi pv. glyci nea OX=318 GN=ALP94_00715 PE=3 SV=1
MEIFKEFTFESAHFLPHVPEGHKCGRLHGHSFRIAIHLEGEVDPHIGWIRDFSEIKAIFKPLYERLDHHYLNDIPGLENPTSENLAKWIFAELKPLLPELSAIRIHETCTSGCIYRGE

SEQ ID NO: 24630 - protein, 118 aa, Pseudomonas savastanoi
  misc_feature (1)..(118): tr|A0A3M5J8J0|A0A3M5J8J0_PSESS 6-carboxy-5,6,7,8-tetrah ydropterin synthase OS=Pseudomonas savastanoi OX=29438 GN=ALP51_03689 PE=3 SV=1
MEIFKEFIFESAHRLPHVPEGHKCGRLHGHSFRVGIHLAGKVDPHTGWIRDFSEIKAIFKPLYERLDHNYLNDIPGLENPTSENLAKWIWDELKPLLPELSAVRIHETCTSGCEYRGD

SEQ ID NO: 24631 - protein, 118 aa, Pseudomonas segetis
  misc_feature (1)..(118): tr|A0A239J7K7|A0A239J7K7_9PSED 6-carboxy-5,6,7,8-tetrah ydropterin synthase OS=Pseudomonas segetis OX=298908 GN =SAMN05216255_4204 PE=3 SV=1
MELFKEFMFEAAHRLPHVPDGHKCGRLHGHSFKVAVYIEGEVDPHTGWIRDFSEIKAIFKPLYEQLDHNYLNDIPGLENPTSEVLAKWIWQQLKPLLPELSRIRIHETCTSGCEYRGD

SEQ ID NO: 24632 - protein, 118 aa, Pseudomonas seleniipraecipitans
  misc_feature (1)..(118): tr|A0A1G7RTH8|A0A1G7RTH8_9PSED 6-carboxy-5,6,7,8-tetrah ydropterin synthase OS=Pseudomonas seleniipraecipitans OX=640205 GN=SAMN05216381_3275 PE=3 SV=1
MELFKEFIFEAAHRLPHVPEGHKCARLHGHSFRIAVYIEGDVDPHTGWIRDFSEIKAIFKPIYEQLDHNYLNDIPGLENPTSEVLAKWVWQQLKPLLPELSRIRIHETCSSGCEYRGD

SEQ ID NO: 24633 - protein, 118 aa, Pseudomonas sihuiensis; identical to SEQ ID NO: 24472
  misc_feature (1)..(118): tr|A0A1H2LHV1|A0A1H2LHV1_9PSED 6-carboxy-5,6,7,8-tetrah ydropterin synthase OS=Pseudomonas sihuiensis OX=127435 9 GN=SAMN05216363_1596 PE=3 SV=1

SEQ ID NO: 24634 - protein, 118 aa, Pseudomonas silesiensis
  misc_feature (1)..(118): tr|A0A191YWP4|A0A191YWP4_9PSED 6-carboxy-5,6,7,8-tetrah ydropterin synthase OS=Pseudomonas silesiensis OX=18531 30 GN=PMA3_19955 PE=3 SV=1
MEIFKEFTFESAHRLPHVPDGHKCGRLHGHSFKVAIHLSGDLDPHTGWIRDFSEIKAIFKPLYERLDHNYLNDIPGLENPTSEVLAKFIWKELKPLLPELSAIRIHETCTSGCIYHGE

SEQ ID NO: 24635 - protein, 118 aa, Pseudomonas simiae; identical to SEQ ID NO: 24438
  misc_feature (1)..(118): tr|A0A1N7TY10|A0A1N7TY10_9PSED 6-carboxy-5,6,7,8-tetrah ydropterin synthase OS=Pseudomonas simiae OX=321846 GN= queD PE=3 SV=1

SEQ ID NO: 24636 - protein, 118 aa, Pseudomonas soli; identical to SEQ ID NO: 24577
  misc_feature (1)..(118): tr|A0A1H9KSZ4|A0A1H9KSZ4_9PSED 6-carboxy-5,6,7,8-tetrah ydropterin synthase OS=Pseudomonas soli OX=1306993 GN=q ueD PE=3 SV=1

SEQ ID NO: 24637 - protein, 118 aa, Pseudomonas songnenensis
  misc_feature (1)..(118): tr|A0A482UDZ8|A0A482UDZ8_9PSED 6-carboxy-5,6,7,8-tetrah ydropterin synthase OS=Pseudomonas songnenensis OX=1176 259 GN=queD PE=3 SV=1
MEIFKEFTFESAHRLPHVPQGHKCGRLHGHSFRVALYISGPVDPHTGWIRDFGEIKTIFKPLYDLLDHNYLNDIPGLENPTSENLAKWIWHELKPLLPELSCIRIHETCTSGCEYRGD

SEQ ID NO: 24638 - protein, 118 aa, Pseudomonas sp.; identical to SEQ ID NO: 24506
  misc_feature (1)..(118): tr|A0A0D6BLM1|A0A0D6BLM1_9PSED 6-carboxy-5,6,7,8-tetrah ydropterin synthase OS=Pseudomonas sp. Os17 OX=1500686 GN=queD PE=3 SV=1

SEQ ID NO: 24639 - protein, 118 aa, Pseudomonas sp.
  misc_feature (1)..(118): tr|A0A2V5AT22|A0A2V5AT22_9PSED 6-carboxy-5,6,7,8-tetrah ydropterin synthase OS=Pseudomonas sp. OV467 OX=2135592 GN=C7538_109114 PE=3 SV=1
MELFKEFIFEAAHRLPHVPAGHKCGRLHGHSFRVAIYIEGEVDPYTGWIRDFSEIKAIFKPLYEQLDHNYLNDIPGLENPTSEVLSKWIWQQLKPLLPELSRVRIHETCTSGCEYRGD

SEQ ID NO: 24640 - protein, 118 aa, Pseudomonas straminea; identical to SEQ ID NO: 24502
  misc_feature (1)..(118): tr|A0A1I1W108|A0A1I1W108_PSEOC 6-carboxy-5,6,7,8-tetrah ydropterin synthase OS=Pseudomonas straminea OX=47882 G N=SAMN05216372_1051 PE=3 SV=1

SEQ ID NO: 24641 - protein, 118 aa, Pseudomonas stutzeri
  misc_feature (1)..(118): tr|I4JGK6|I4JGK6_PSEST 6-carboxy-5,6,7,8-tetrahydropter in synthase OS=Pseudomonas stutzeri TS44 OX=477228 GN=Y O5_11075 PE=3 SV=1
MEIFKEFTFESAHRLPNVPTGHKCGRLHGHSFRVAIYIAGEVDPFTGWIRDFSELKAIFRPIYERLDHNYLNDLPGLENPTSENLAKWIWNELKPLLPELSRVRIHETCTSGCEYHGD

SEQ ID NO: 24642 - protein, 137 aa, Pseudomonas stutzeri
  misc_feature (1)..(137): tr|A0A2N8RGL6|A0A2N8RGL6_PSEST 6-carboxy-5,6,7,8-tetrah ydropterin synthase OS=Pseudomonas stutzeri OX=316 GN=q ueD PE=3 SV=1
MAKRVKSRLDSASSLRVHTVEIFKEFTFESAHRLPHVPQGHKCGRLHGHSFRVALYISGPVDSHTGWIRDFGEIKSIFKPLYERLDHNYLNDIPGLENPTSENLAKWIWNELKPLLPELSRIRIHETCTSGCEYRGE

SEQ ID NO: 24643 - protein, 118 aa, Pseudomonas synxantha; identical to SEQ ID NO: 24438
  misc_feature (1)..(118): tr|I4KVC2|I4KVC2_9PSED 6-carboxy-5,6,7,8-tetrahydropter in synthase OS=Pseudomonas synxantha BG33R OX=96901 GN= queD PE=3 SV=1

SEQ ID NO: 24644 - protein, 118 aa, Pseudomonas synxantha; identical to SEQ ID NO: 24438
  misc_feature (1)..(118): tr|A0A0R2YXT7|A0A0R2YXT7_9PSED 6-carboxy-5,6,7,8-tetrah ydropterin synthase OS=Pseudomonas synxantha OX=47883 G N=BFW89_09305 PE=3 SV=1

SEQ ID NO: 24645 - protein, 118 aa, Pseudomonas syringae; identical to SEQ ID NO: 24501
  misc_feature (1)..(118): tr|A0A0P9RZ54|A0A0P9RZ54_PSESX 6-carboxy-5,6,7,8-tetrah ydropterin synthase OS=Pseudomonas syringae pv. castane ae OX=264450 GN=ALO79_03880 PE=3 SV=1

SEQ ID NO: 24646 - protein, 118 aa, Pseudomonas syringae; identical to SEQ ID NO: 24466
  misc_feature (1)..(118): tr|A0A3M5E742|A0A3M5E742_PSESX 6-carboxy-5,6,7,8-tetrah ydropterin synthase OS=Pseudomonas syringae pv. aceris OX=199198 GN=ALP62_01252 PE=3 SV=1

SEQ ID NO: 24647 - protein, 111 aa, Pseudomonas taeanensis
  misc_feature (1)..(111): tr|A0A0A1YKP8|A0A0A1YKP8_9PSED 6-carboxy-5,6,7,8-tetrah ydropterin synthase OS=Pseudomonas taeanensis MS-3 OX=1 395571 GN=TMS3_0114020 PE=3 SV=1
MFEAAHRLPHVPEGHKCGRLHGHSFRVAVYIEGEVDPYTGWIRDFSEIKAIFKPLYEQLDHNYLNEIPGLENPTSEVIAKWIWQQLKPLLPELSRIRIHETCTSGCEYRGD

SEQ ID NO: 24648 - protein, 118 aa, Pseudomonas taetrolens
  misc_feature (1)..(118): tr|A0A0J6GL21|A0A0J6GL21_PSETA 6-carboxy-5,6,7,8-tetrah ydropterin synthase OS=Pseudomonas taetrolens OX=47884 GN=TU78_17795 PE=3 SV=1
MEIFKEFTFESAHRLPYVPQGHKCGRLHGHSFKVAIHLSGDIDPATGWIRDFSEIKAIFKPLYEQLDHNYLNDIPGLENPTSEVLAKWIWQQLKPLLPELSAIRIHETCTSGCIYYGD

SEQ ID NO: 24649 - protein, 118 aa, Pseudomonas taiwanensis; identical to SEQ ID NO: 24571
  misc_feature (1)..(118): tr|V7DFH9|V7DFH9_9PSED 6-carboxy-5,6,7,8-tetrahydropter in synthase OS=Pseudomonas taiwanensis SJ9 OX=1388762 G N=O164_08365 PE=3 SV=1

SEQ ID NO: 24650 - protein, 118 aa, Pseudomonas thivervalensis
  misc_feature (1)..(118): tr|A0A176NUK4|A0A176NUK4_9PSED 6-carboxy-5,6,7,8-tetrah ydropterin synthase OS=Pseudomonas thivervalensis OX=86 265 GN=APS14_17465 PE=3 SV=1
MEIFKEFTFESAHRLPHVPEGHKCGRLHGHSFKVAIHLSGDIDPHTGWIRDFSEIKAIFKPLYERLDHNYLNDIPGLENPTSEVLAKWIWNELKPLLPDLSAIRIHETCTSGCIYHGE

SEQ ID NO: 24651 - protein, 118 aa, Pseudomonas thivervalensis; identical to SEQ ID NO: 24510
  misc_feature (1)..(118): tr|A0A2Z4ZKE6|A0A2Z4ZKE6_9PSED 6-carboxy-5,6,7,8-tetrah ydropterin synthase OS=Pseudomonas thivervalensis OX=86 265 GN=queD PE=3 SV=1

SEQ ID NO: 24652 - protein, 118 aa, Pseudomonas tolaasii; identical to SEQ ID NO: 24438
  misc_feature (1)..(118): tr|A0A2N0EEK2|A0A2N0EEK2_PSETO 6-carboxy-5,6,7,8-tetrah ydropterin synthase OS=Pseudomonas tolaasii NCPPB 2192 OX=564423 GN=ATI14_5619 PE=3 SV=1

SEQ ID NO: 24653 - protein, 118 aa, Pseudomonas toyotomiensis
  misc_feature (1)..(118): tr|A0A1I5YZE4|A0A1I5YZE4_9PSED 6-carboxy-5,6,7,8-tetrah ydropterin synthase OS=Pseudomonas toyotomiensis OX=554 344 GN=queD PE=3 SV=1
MELFKEFIFEAAHRLPHVPEGHKCGRLHGHSFRVAIYIEGDVDPYTGWIRDFSEIKAIFKPIYEQLDHNYLNDIPGLENPTSEVLAKWIWQQVKPLLPELSRVRIHETCTSGCEYRGD

SEQ ID NO: 24654 - protein, 140 aa, Pseudomonas tremae
  misc_feature (1)..(140): tr|A0A0Q0C514|A0A0Q0C514_9PSED 6-carboxy-5,6,7,8-tetrah ydropterin synthase OS=Pseudomonas tremae OX=200454 GN= ALO43_00114 PE=3 SV=1
MLLNLPPAFIASAIAIFRGQYTVEIFKEFTFESAHLLPNVPEGHKCGRLHGHSFRVGIHLAGKVDPHTGWIRDFSEIKAIFKPLYERLDHHYLNDIPGLENPTSENLAKWIWDELKPLLPELSAIRIHETCTSGCEYRGD

SEQ ID NO: 24655 - protein, 118 aa, Pseudomonas trivialis; identical to SEQ ID NO: 24457
  misc_feature (1)..(118): tr|A0A0H5AMN5|A0A0H5AMN5_9PSED 6-carboxy-5,6,7,8-tetrah ydropterin synthase OS=Pseudomonas trivialis OX=200450 GN=AA957_04280 PE=3 SV=1

SEQ ID NO: 24656 - protein, 118 aa, Pseudomonas trivialis; identical to SEQ ID NO: 24499
  misc_feature (1)..(118): tr|A0A0R2ZDF5|A0A0R2ZDF5_9PSED 6-carboxy-5,6,7,8-tetrah ydropterin synthase OS=Pseudomonas trivialis OX=200450 GN=TU79_16465 PE=3 SV=1

SEQ ID NO: 24657 - protein, 118 aa, Pseudomonas umsongensis; identical to SEQ ID NO: 24616
  misc_feature (1)..(118): tr|A0A1H2BH19|A0A1H2BH19_9PSED 6-carboxy-5,6,7,8-tetrah ydropterin synthase OS=Pseudomonas umsongensis OX=19861 8 GN=SAMN04490206_3773 PE=3 SV=1

SEQ ID NO: 24658 - protein, 118 aa, Pseudomonas vancouverensis; identical to SEQ ID NO: 24450
  misc_feature (1)..(118): tr|A0A1H2P0F9|A0A1H2P0F9_9PSED 6-carboxy-5,6,7,8-tetrah ydropterin synthase OS=Pseudomonas vancouverensis OX=95 300 GN=queD PE=3 SV=1

SEQ ID NO: 24659 - protein, 118 aa, Pseudomonas veronii; identical to SEQ ID NO: 24586
  misc_feature (1)..(118): tr|A0A1D3K0K9|A0A1D3K0K9_9PSED 6-carboxy-5,6,7,8-tetrah ydropterin synthase OS=Pseudomonas veronii 1YdBTEX2 OX= 1295141 GN=queD PE=3 SV=1

SEQ ID NO: 24660 - protein, 118 aa, Pseudomonas veronii; identical to SEQ ID NO: 24586
  misc_feature (1)..(118): tr|A0A0R3B1X5|A0A0R3B1X5_9PSED 6-carboxy-5,6,7,8-tetrah ydropterin synthase OS=Pseudomonas veronii OX=76761 GN= queD PE=3 SV=1

SEQ ID NO: 24661 - protein, 121 aa, Pseudomonas versuta
  misc_feature (1)..(121): tr|A0A0M4QH03|A0A0M4QH03_9PSED 6-carboxy-5,6,7,8-tetrah ydropterin synthase OS=Pseudomonas versuta OX=1788301 G N=AOC04_13290 PE=3 SV=1
MNTVEIFKEFTFESAHRLPYVPQGHKCGRLHGHSFKVAIHLSGDIDPATGWIRDFSEIKAIFKPLYEQLDHNYLNDIPGLENPTSEVLAKWIWQQLKPLLPELSAIRIHETCTSGCIYYGD

SEQ ID NO: 24662 - protein, 118 aa, Pseudomonas viridiflava; identical to SEQ ID NO: 24501
  misc_feature (1)..(118): tr|A0A3M4NTF7|A0A3M4NTF7_PSEVI 6-carboxy-5,6,7,8-tetrah ydropterin synthase OS=Pseudomonas viridiflava OX=33069 GN=ALP98_03831 PE=3 SV=1

SEQ ID NO: 24663 - protein, 118 aa, Pseudomonas viridiflava; identical to SEQ ID NO: 24505
  misc_feature (1)..(118): tr|A0A0Q0FLD7|A0A0Q0FLD7_PSEVI 6-carboxy-5,6,7,8-tetrah ydropterin synthase OS=Pseudomonas viridiflava OX=33069 GN=queD PE=3 SV=1

SEQ ID NO: 24664 - protein, 119 aa, Pseudomonas vranovensis
  misc_feature (1)..(119): tr|A0A423CZ09|A0A423CZ09_9PSED 6-carboxy-5,6,7,8-tetrah ydropterin synthase OS=Pseudomonas vranovensis OX=32166 1 GN=BHU25_21540 PE=3 SV=1
MVEIFKEFTFESAHRLPHVPEGHKCGRLHGHSFKVALHLTGPLDPHTGWIRDFSEIKAIFKPLYEQLDHNYLNDIPGLENPTSEVIAKWIWDQVKPLLPELSKVRIHETCTSGCEYYGD

SEQ ID NO: 24665 - protein, 118 aa, Pseudomonas wadenswilerensis; identical to SEQ ID NO: 24432
  misc_feature (1)..(118): tr|A0A380T1U7|A0A380T1U7_9PSED 6-carboxy-5,6,7,8-tetrah ydropterin synthase OS=Pseudomonas wadenswilerensis OX= 1785161 GN=queD PE=3 SV=1

SEQ ID NO: 24666 - protein, 121 aa, Pseudomonas weihenstephanensis
  misc_feature (1)..(121): tr|A0A0J6IWQ4|A0A0J6IWQ4_9PSED 6-carboxy-5,6,7,8-tetrah ydropterin synthase OS=Pseudomonas weihenstephanensis O X=1608994 GN=TU86_21745 PE=3 SV=1
MNTVEIFKEFTFESAHRLPFVPEGHKCGRLHGHSFKVAIHLSGDIDPNTGWIRDFSEIKAIFKPLYEQLDHNYLNDIPGLENPTSEVLAKWIWQQLKPLLPELSAIRIHETCTSGCIYYGD

SEQ ID NO: 24667 - protein, 118 aa, Pseudomonas xanthomarina; identical to SEQ ID NO: 24543
  misc_feature (1)..(118): tr|A0A098FP08|A0A098FP08_9PSED 6-carboxy-5,6,7,8-tetrah ydropterin synthase OS=Pseudomonas xanthomarina OX=2714 20 GN=ygcM PE=3 SV=1

SEQ ID NO: 24668 - protein, 118 aa, Pseudomonas xanthomarina
  misc_feature (1)..(118): tr|A0A1M5N546|A0A1M5N546_9PSED 6-carboxy-5,6,7,8-tetrah ydropterin synthase OS=Pseudomonas xanthomarina DSM 182 31 OX=1403346 GN=SAMN02744645_1668 PE=3 SV=1
MEIFKEFTFESAHRLPHVPEGHKCGRLHGHSFRVAIYLEGEVNAHTGWIRDFSEIKQIFKPVYERLDHNYLNDLPGLDNPTSENLAIWIWNELKPLLPELSRVRVHETCTSGCEYRGQ

SEQ ID NO: 24669 - protein, 118 aa, Pseudomonas xinjiangensis
  misc_feature (1)..(118): tr|A0A1H1PW63|A0A1H1PW63_9PSED 6-carboxy-5,6,7,8-tetrah ydropterin synthase OS=Pseudomonas xinjiangensis OX=487 184 GN=SAMN05216421_1002 PE=3 SV=1
MEIFKEFTFEAAHRLPHVPEGHKCGRLHGHSFMVAIHIAGEVDPHTGWIRDFSELKSIFKPIYDRLDHNYLNDIPGLENPTSEVMARWIWSELKPLLPELCQVTIRETCTSGCIYRGD

SEQ ID NO: 24670 - protein, 118 aa, Pseudomonas yamanorum; identical to SEQ ID NO: 24438
  misc_feature (1)..(118): tr|A0A1H2EL33|A0A1H2EL33_9PSED 6-carboxy-5,6,7,8-tetrah ydropterin synthase OS=Pseudomonas yamanorum OX=515393 GN=AK972_3675 PE=3 SV=1

SEQ ID NO: 24671 - protein, 118 aa, Pseudomonas zeshuii; identical to SEQ ID NO: 24557
  misc_feature (1)..(118): tr|A0A1M6L393|A0A1M6L393_9PSED 6-carboxy-5,6,7,8-tetrah ydropterin synthase OS=Pseudomonas zeshuii OX=1076620 G N=SAMN05216295_1214 PE=3 SV=1

SEQ ID NO: 24672 - protein, 118 aa, Pseudomonas zhaodongensis
  misc_feature (1)..(118): tr|A0A3M2HLU4|A0A3M2HLU4_9PSED 6-carboxy-5,6,7,8-tetrah ydropterin synthase OS=Pseudomonas zhaodongensis OX=117 6257 GN=queD PE=3 SV=1
MEIFKEFTFESAHRLPHVPEGHKCGRLHGHSFRVAIYLEGEVDAHTGWIRDFSEIKEIFKPIYERLDHNYLNDLPGLENPTSENLAKWVWQELKPLLPELSRVRIHETCTSGCEYRGD

SEQ ID NO: 24673 - protein, 118 aa, Pseudomonas zhaodongensis; identical to SEQ ID NO: 24419
  misc_feature (1)..(118): tr|A0A365PRA9|A0A365PRA9_9PSED 6-carboxy-5,6,7,8-tetrah ydropterin synthase OS=Pseudomonas zhaodongensis OX=117 6257 GN=queD PE=3 SV=1

SEQ ID NO: 24674 - protein, 132 aa, Pseudonocardia alni
  misc_feature (1)..(132): tr|A0A2N0IG99|A0A2N0IG99_9PSEU 6-pyruvoyl-tetrahydropte rin synthase OS=Pseudonocardia alni OX=33907 GN=ATL51_4 072 PE=4 SV=1
MFSITVRDHVMVAHSLRGEVFGPAQQRHGATFLVDATFRRPELDPDGIVVDIGLATAQLAETLADLNHRDLDDHPEFAGVNTTTEFLARAIADRLADRIGAGKLGGNAGGLTGVTVTLHESHVAWASYERDL

SEQ ID NO: 24675 - protein, 159 aa, Pseudonocardia ammonioxydans
  misc_feature (1)..(159): tr|A0A1I5E1B7|A0A1I5E1B7_9PSEU 6-pyruvoyl-tetrahydropte rin synthase OS=Pseudonocardia ammonioxydans OX=260086 GN=SAMN05216207_102862 PE=4 SV=1
MNRAGSASVSGTGSSDSLHPSGPRESALFSITVRDHVMIAHSLRGEVFGPAQQRHGATYLVDATFRRRELDADGIVVDIALATAQLSATLADLNHRDLDEHPEFAGLNTTTEFLARTIADRLAERIAAGALGPGAAGLTGLAVTLHESHVAWASYEREL

SEQ ID NO: 24676 - protein, 132 aa, Pseudonocardia asaccharolytica
  misc_feature (1)..(132): tr|A0A511D356|A0A511D356_9PSEU Uncharacterized protein OS=Pseudonocardia asaccharolytica DSM 44247 = NBRC 1622 4 OX=1123024 GN=ptpS PE=4 SV=1
MFSITVRDHVMIAHSFRGEVFGPAQRLHGATYIVDATFRRADLDADGIVVDIGLATSGLGAALADLNYRNLDDEPAFAGVNTSTEFLAKVIADRLAEKVQAGALGEGARGLAGIAVTLHESHVAWASYERAL

SEQ ID NO: 24677 - protein, 84 aa, Pseudonocardia autotrophica
  misc_feature (1)..(84): tr|A0A1Y2MH14|A0A1Y2MH14_PSEAH 6-carboxy-5,6,7,8-tetrah ydropterin synthase OS=Pseudonocardia autotrophica OX=2 074 GN=queD PE=4 SV=1
MEVEATGPVDERGVVADFAELDAQVEQHVLARLDHSYLNDLLNNPTAELTACMIGDWLSEAAVPWTMLRLWETERGSVVLRRPS

SEQ ID NO: 24678 - protein, 132 aa, Pseudonocardia autotrophica
  misc_feature (1)..(132): tr|A0A1Y2MR11|A0A1Y2MR11_PSEAH 6-pyruvoyl tetrahydropte rin synthase OS=Pseudonocardia autotrophica OX=2074 GN= BG845_05031 PE=4 SV=1
MFSITVRDHFMIAHSFRGEVFGPAQRLHGATYVVDATFRRRELDADGIVVDIGRATDELKAILAELDYRNLDEEPVFDGVNTSTEFLAKVVADRLAERVHAGALGEGARGLAGLAVSLSESHVASAAYERDL

SEQ ID NO: 24679 - protein, 132 aa, Pseudonocardia cypriaca
  misc_feature (1)..(132): tr|A0A543G9V9|A0A543G9V9_9PSEU 6-pyruvoyl-tetrahydropte rin synthase OS=Pseudonocardia cypriaca OX=882449 GN=FB 388_0188 PE=4 SV=1
MFSITVRDHMMVAHSFRGAVFGPAQRLHGATFLVDATFRRPELDEDGIVVDIGLATQQLGEVLGELNFRNLDDEPAFEGVNTSTEFLAKVVADRLADRLHGGALGENARGISSIVVTLHESHVAWASYELSL

SEQ ID NO: 24680 - protein, 132 aa, Pseudonocardia dioxanivorans
  misc_feature (1)..(132): tr|F4CP86|F4CP86_PSEUX 6-pyruvoyl tetrahydropterin synt hase OS=Pseudonocardia dioxanivorans (strain ATCC 55486 / DSM 44775 / JCM 13855 / CB1190) OX=675635 GN=Psed_14 05 PE=4 SV=1
MFAITVRDHFMVAHSFRGEVFGPAQALHGATYVVDAVFRRAALDDDGIVVDIGLATAQLGEVLGELNYRNLDDEPAFAGHNTSTEFLAKVVADRLADRVHAGALGEGARGLAGIGVTLHESHVASASYERAL

SEQ ID NO: 24681 - protein, 132 aa, Pseudonocardia endophytica
  misc_feature (1)..(132): tr|A0A4R1I724|A0A4R1I724_9PSEU 6-pyruvoyl-tetrahydropte rin synthase OS=Pseudonocardia endophytica OX=401976 GN =EV378_1729 PE=4 SV=1
MYRITVRDHVMVAHSFRGEVFGPAQALHGATFVVDATFRRTDLDADGIVVDIGLATTQLGEVLADLNYRNLDEHPDFAGVNTTTEFLARVVADRLVARVHGGALGEGARGLSGVEVTLHESHVASASYERDL

SEQ ID NO: 24682 - protein, 132 aa, Pseudonocardia hierapolitana
  misc_feature (1)..(132): tr|A0A561SV59|A0A561SV59_9PSEU 6-pyruvoyl-tetrahydropte rin synthase OS=Pseudonocardia hierapolitana OX=1128676 GN=FHX44_114655 PE=4 SV=1
MFSITVRDHMMVAHSFRGAVFGPAQRLHGATFVVDATFRRPVLDSDGIVVDIGLATQQLGEVLAELNYRNLDDEPAFEGANTSTEFLARVVADRLAERLDAGALGDNARGITTIVVTLHESHVAWASYERSL

SEQ ID NO: 24683 - protein, 132 aa, Pseudonocardia hydrocarbonoxydans
  misc_feature (1)..(132): tr|A0A4Y3WPM3|A0A4Y3WPM3_9PSEU Uncharacterized protein OS=Pseudonocardia hydrocarbonoxydans OX=76726 GN=ptpS P E=4 SV=1
MFSITVRDHVMVAHSFRGEVFGPAQRLHGATFVVDATFRRPELDADNIVVDIGLATTELKAVLADLNYRNLDDEPAFAGVNTSTEFLAKVVADRLAARVHAGALGDGARGLAGITVSLHESHVAWASYERAL

SEQ ID NO: 24684 - protein, 148 aa, Pseudonocardia kunmingensis
  misc_feature (1)..(148): tr|A0A543D9L4|A0A543D9L4_9PSEU 6-pyruvoyltetrahydropter in/6-carboxytetrahydropterin synthase OS=Pseudonocardia kunmingensis OX=630975 GN=FB558_6261 PE=4 SV=1
MNNAPEDIDAGAFARYRGTVTVRFSAALRIAGLEPGETAGRLHGHDFTAVFLFESATLTYPGVVVDHDMRDEITGRITDRLHHRDLDRLLDRAATCEALADYLATWYVRSARPPGHARLLAVTVTTAAGDHGEIHLPAPRHHPAGGSR

SEQ ID NO: 24685 - protein, 132 aa, Pseudonocardia kunmingensis
  misc_feature (1)..(132): tr|A0A543E0C1|A0A543E0C1_9PSEU 6-pyruvoyl-tetrahydropte rin synthase OS=Pseudonocardia kunmingensis OX=630975 G N=FB558_1817 PE=4 SV=1
MFSITVRDHVMVAHSFRGEVFGPAQRLHGATFVVDATFRRPDLDADGIVVDIGLATQQLGAVLAGLNYRNLDDEPAFAGVNTSTEFLARHIADRLAEQVHAGALGEGARGIAAIAVTLHESHVAWASYERTL

SEQ ID NO: 24686 - protein, 132 aa, Pseudonocardia oroxyli
  misc_feature (1)..(132): tr|A0A1G7VTX4|A0A1G7VTX4_9PSEU 6-pyruvoyl-tetrahydropte rin synthase OS=Pseudonocardia oroxyli OX=366584 GN=SAM N05216377_113184 PE=4 SV=1
MFGITVRDHMMVAHSFTGAVFGPAQRLHGATFVVDATFRRPELDADDLVVDIGLASEALKAVLAELTYRNLDDLPEFAGRNTSTEFLAQVVADRLAGRIAADELGPGASGLTALEVTLHESHVAWATYTRPL

SEQ ID NO: 24687 - protein, 132 aa, Pseudonocardia sp.
  misc_feature (1)..(132): tr|A0A1Q8JEH7|A0A1Q8JEH7_9PSEU PTPS-like type 4 OS=Pseu donocardia sp. Ae356_Ps1 OX=1885032 GN=Ae356Ps1_0505 PE =4 SV=1
MFSITVRDHVMIAHSLRGDVFGPAQQRHGATFLVDATFRRPELDPDGIVVDIALATTQLGEVLADLNHRDLDEHSDFAGVNTTTEFLARAIADRLAERVRAGGLGPGARGLAGLVVTLHESHVAWASYERTL

SEQ ID NO: 24688 - protein, 132 aa, Pseudonocardia sp.
  misc_feature (1)..(132): tr|A0A1Q4DGY6|A0A1Q4DGY6_9PSEU Uncharacterized protein OS=Pseudonocardia sp. 73-21 OX=1895809 GN=BGP03_26105 P E=4 SV=1
MFSITVRDHVMVAHSFRGEVFGPAQRLHGATFVVDATFRRAALDADNIVVDIGLATRELGAVLAEVNYRNLDDEPEFAGVNTSTEFLAQVVADRLAARVHAGALGEGARGLAGITVTLTESHVAWASYERAL

SEQ ID NO: 24689 - protein, 132 aa, Pseudonocardia sulfidoxydans
  misc_feature (1)..(132): tr|A0A511DBP1|A0A511DBP1_9PSEU Uncharacterized protein OS=Pseudonocardia sulfidoxydans NBRC 16205 OX=1223511 G N=PSU4_07670 PE=4 SV=1
MFAITVRDHFMVAHSFRGEVFGPAQALHGATYVVDATFRRTDLDDDGIVVDIGLATAQLGEVLGELNYRNLDDEPAFAGRNTSTEFLAKVVADRLAERVHAGALGEGARGLAGIAVTLNESHVASASYERAL

SEQ ID NO: 24690 - protein, 130 aa, Pseudonocardia thermophila
  misc_feature (1)..(130): tr|A0A1M6T586|A0A1M6T586_PSETH 6-pyruvoyl-tetrahydropte rin synthase OS=Pseudonocardia thermophila OX=1848 GN=S AMN05443637_107160 PE=4 SV=1
MFSITVRDHVMVAHSFRGEVFGPAQRLHGATFVVDATFQRPELDPDGVVVDIGLATEQLKAVLADLDYRNLDEVFPGVNTTTEFLAKEIADRLVSRIHAGALGESARGLTGIVVTLHESHVAWASYEREL

SEQ ID NO: 24691 - protein, 132 aa, Pseudonocardiaceae bacterium
  misc_feature (1)..(132): tr|A0A431NE51|A0A431NE51_9PSEU 6-carboxytetrahydropteri n synthase OS=Pseudonocardiaceae bacterium OX=1873463 G N=EKK42_14460 PE=4 SV=1
MFAITVRDHFMVAHSFRGEVFGPAQALHGATYVVDATFRRTDLDDDGIVVDIGLATAQLGDVLGELNYRNLDDEPAFKGVNTSTEYLAKVVADRLAERVHAGALGEGARGLAGIAVTLNESHVASASYERAL

SEQ ID NO: 24692 - protein, 132 aa, Pseudonocardiaceae bacterium
  misc_feature (1)..(132): tr|A0A419HH38|A0A419HH38_9PSEU 6-carboxytetrahydropteri n synthase OS=Pseudonocardiaceae bacterium YIM PH 21723 OX=2340915 GN=D5S17_24920 PE=4 SV=1
MFSVTVRDHIMVAHSFRGEVFGPAQRLHGATFVVDATFKRSELDADNIVVDIGLATTRLGAVLGELNYRNLDDVPEFAGINTSTEFLAKVIADRLADSVHRGELGEGARGLTGIQVTLHESHAAWAGYEREL

SEQ ID NO: 24693 - protein, 132 aa, Pseudonocardiales bacterium
  misc_feature (1)..(132): tr|A0A2W6DKD5|A0A2W6DKD5_9PSEU Uncharacterized protein OS=Pseudonocardiales bacterium OX=2201155 GN=DLM57_0593 0 PE=4 SV=1
MFTVTVRDHMMIAHSFRGEVFGPAQRLHGATYVVDATFRRDALDADNLVVDIGRAAEELHAVLGDLSYRNLDDEAAFTGMNTSTEALAQVIADRLAERVHAGALGAGAQGIAGIAITLHESHIAWASYERTL

SEQ ID NO: 24694 - protein, 132 aa, Pseudonocardiales bacterium
  misc_feature (1)..(132): tr|A0A2W6EIL4|A0A2W6EIL4_9PSEU Uncharacterized protein OS=Pseudonocardiales bacterium OX=2201155 GN=DLM58_1602 0 PE=4 SV=1
MFSVTVRDHMMIAHSFRGEVFGPAQRLHGATYVVDATFSRVALDADNLVVDIGRAAEELRAIVGELSYRNLDDEAAFAGMNTSTEALAQVVADRLVAQVQAGGLGEGARGLAGVKVTLHESHIAWASYEREL

SEQ ID NO: 24695 - protein, 136 aa, Pseudopedobacter saltans
  misc_feature (1)..(136): tr|A0A2W5F917|A0A2W5F917_9SPHI Uncharacterized protein OS=Pseudopedobacter saltans OX=151895 GN=DI598_00515 PE =4 SV=1
MVYLTRLEHFNAAHKLYNPKWSVEKNEDVFGPCANENFHGHNYELFVTVKGQPNPDTGFVMDVKKLSILIRENVIKKVDHRNLNMDVDFLKDQFASTENVVVAFWNILAPLMPEGVQLHRLKLYETPRIYVEYYGD

SEQ ID NO: 24696 - protein, 137 aa, Pseudopedobacter saltans
  misc_feature (1)..(137): tr|F0S8G0|F0S8G0_PSESL Uncharacterized protein OS=Pseud opedobacter saltans (strain ATCC 51119 / DSM 12145 / JC M 21818 / LMG 10337 / NBRC 100064 / NCIMB 13643) OX=762 903 GN=Pedsa_2885 PE=4 SV=1
MIYITRKEHFNAAHKLYREDWSKEKNEEVFGICANANWHGHNYDLYVTVKGEINEETGFVIDLKDLKDIIITHVIDKVDHRNLNLDVDFMRGKMASTEILAVEFWKQLDGPIKERGAQLHSIKLYETVNNYVEYFGE

SEQ ID NO: 24697 - protein, 132 aa, Pseudorhizobium pelagicum
  misc_feature (1)..(132): tr|A0A081MNH9|A0A081MNH9_9RHIZ 6-pyruvoyl tetrahydropte rin synthase OS=Pseudorhizobium pelagicum OX=1509405 GN =GV67_20350 PE=4 SV=1
MFAVEVRDHIMIAHSLPRPVFGPAQGMHGATFVVDAAFFTADLDEDGLAVDIGLAMQVLGEVLKPLNYQNLDEVEEFAGKVTTTEFLAKFIFDQLAKAIAGGRLGDGSGRIRRLKVMLHESHTARGWYEADL

SEQ ID NO: 24698 - protein, 135 aa, Pseudorhodoferax soli
  misc_feature (1)..(135): tr|A0A368XMW6|A0A368XMW6_9BURK 6-pyruvoyl-tetrahydropte rin synthase OS=Pseudorhodoferax soli OX=545864 GN=DES4 1_106191 PE=4 SV=1
MYSVNVRDHFMIAHSFRGEAFGPAQRLHGATYVVDATFRRRALDADGMVVDIALATSVLREVLSEFNFRNLDDESAFTGQNTTTEFMARVVFERIAARAQAGELGPHAHGLASLRVRLHESHVAWAEYEGPLAPA

SEQ ID NO: 24699 - protein, 135 aa, Pseudorhodoferax sp.
  misc_feature (1)..(135): tr|A0A0Q4XYG9|A0A0Q4XYG9_9BURK 6-pyruvoyl tetrahydropte rin synthase OS=Pseudorhodoferax sp. Leaf267 OX=1736316 GN=ASF43_10975 PE=4 SV=1
MYTVNVRDHFMIAHSFHGEAFGPAQRLHGATYVVDAAFSRRALDADGMVVDIARATEVLRSVLAEFNLRNLDDDAAFTGQNTTTEFMARVVFERIAARAQAGELGAHASGIESLRVQLHESHVAWASYEGVLGAG

SEQ ID NO: 24700 - protein, 135 aa, Pseudorhodoferax sp.
  misc_feature (1)..(135): tr|A0A0S9L0V7|A0A0S9L0V7_9BURK 6-pyruvoyl tetrahydropte rin synthase OS=Pseudorhodoferax sp. Leaf265 OX=1736315 GN=ASF45_09450 PE=4 SV=1
MYSVNVRDHFMIAHSFRGEAFGPAQRLHGATYVVDATFRRRALDADGMVVDIALATSVLREVLAEFNFRNLDDESAFAGQNTTTEFMARVVFERIAARAQAGELGPHAHGLASLRVRLHESHVAWAEYEGPLAPA

SEQ ID NO: 24701 - protein, 137 aa, Pseudosphingobacterium domesticum
  misc_feature (1)..(137): tr|A0A1H7S517|A0A1H7S517_9SPHI 6-pyruvoyltetrahydropter in/6-carboxytetrahydropterin synthase OS=Pseudosphingob acterium domesticum OX=407022 GN=SAMN05661044_03067 PE= 4 SV=1
MIYITRRERFSAAHKLYRDDWSLEENEAAFGKCSNPNWHGHNYELFVTVKGEIDPITGFVIDLRALKTIILNHVIDKIDHRNVNLDVDFMLGKMASTEVLAVEIFNQLKDPIQAEGAILHAIKLQETENNSVEYFGN

SEQ ID NO: 24702 - protein, 132 aa, Pseudosporangium ferrugineum
  misc_feature (1)..(132): tr|A0A2T0SIM3|A0A2T0SIM3_9ACTN 6-pyruvoyl-tetrahydropte rin synthase OS=Pseudosporangium ferrugineum OX=439699 GN=CLV70_101438 PE=4 SV=1
MFSVTVRDHIMIAHSFSGEVFGPAQKLHGATFVVDATFKRPELDADNIVVDIGLASQELHAICGALSYRNLDDEPDFRGVNTSTEFLAKVIADRLAGKAADGGLGAGAGGLTGIAVTLHESHIAWASYERDL

SEQ ID NO: 24703 - protein, 129 aa, Pseudothermotoga hypogea
  misc_feature (1)..(129): tr|A0A0X1KP70|A0A0X1KP70_9THEM 6-carboxy-5,6,7,8-tetrah ydropterin synthase OS=Pseudothermotoga hypogea DSM 111 64 = NBRC 106472 OX=1123384 GN=AJ81_01390 PE=3 SV=1
MFFLSKEFVFDAAHRLDKYKGKCENLHGHTYRLRVTLVGLPDEEGMIMDFVELKRLVHEQVISLLDHNYLNQIIPQPTAENIARWVWNKLEPLLKNERRKLYEVTVWETADSFVTYRGSNDERCAESEG

SEQ ID NO: 24704 - protein, 118 aa, Pseudothermotoga lettingae
  misc_feature (1)..(118): tr|A8F7Q9|A8F7Q9_PSELT 6-carboxy-5,6,7,8-tetrahydropter in synthase OS=Pseudothermotoga lettingae (strain ATCC BAA-301 / DSM 14385 / NBRC 107922 / TMO) OX=416591 GN=T let_1639 PE=3 SV=1
MYLSRDFTFDAAHRLEKYHGKCEELHGHTYKLRVTVEGDPDEEGMVVDFLYLKKTVNELVISVLDHRYLNEIISQPTAENIAKWVWDKLKNPLSTQRYRLYEVSVWESENSFVSYRGE

SEQ ID NO: 24705 - protein, 129 aa, Pseudothermotoga sp.
  misc_feature (1)..(129): tr|A0A3D3V3S5|A0A3D3V3S5_9THEM 6-carboxy-5,6,7,8-tetrah ydropterin synthase OS=Pseudothermotoga sp. OX=2033661 GN=queD PE=3 SV=1
MFLLSKEFVFDAAHRLDKYKGKCENLHGHTYRLRVTLVGVPDEEGMVMDFVELKRLVHEQVISLLDHNYLNQIIPQPTAENIARWVWNRLEPLLKSERRKLYEVTVWETADSFVTYRGSNDERCTESEG

SEQ ID NO: 24706 - protein, 119 aa, Pseudothermotoga thermarum
  misc_feature (1)..(119): tr|F7YU56|F7YU56_9THEM 6-carboxy-5,6,7,8-tetrahydropter in synthase OS=Pseudothermotoga thermarum DSM 5069 OX=6 88269 GN=Theth_0045 PE=3 SV=1
MYLISRDFKFDAAHKLEKYHGKCEALHGHTYKLRVTLIGIPNEEGMVVDFVQLKTIVQEKVLKVLDHSYLNEIIPQPTAENIAKWIWQMLEESLTFSNCKLYEVIVWETEDCFVTYRGG

SEQ ID NO: 24707 - protein, 118 aa, Pseudovibrio axinellae
  misc_feature (1)..(118): tr|A0A165UN81|A0A165UN81_9RHOB 6-carboxy-5,6,7,8-tetrah ydropterin synthase OS=Pseudovibrio axinellae OX=989403 GN=queD PE=3 SV=1
MYKITKEFHFSASHQLCEMPEDHPCARLHGHNYIVEIELSSASLNAFGFVVDFTELKPLKGFIDEELDHRHLNDVFKHDQVTSEFLSKFIFEFCKEHWSETSAVRVSETQKTWAEYRP

SEQ ID NO: 24708 - protein, 139 aa, Pseudovibrio axinellae
  misc_feature (1)..(139): tr|A0A165YUY7|A0A165YUY7_9RHOB 6-pyruvoyl tetrahydropte rin synthase OS=Pseudovibrio axinellae OX=989403 GN=PsA D2_02009 PE=4 SV=1
MYSVEINDHIMIAHSLKGEVFGPASQLHGLTAHVHVAIFAEELDENGIVIDIGNALAVLEEILRPFNYKNLDELPQFKGRNTTVDFLCSYIYQRVSDAAYLHKLGREPSELSKVRVTIAENPDARASYEAPLTAALAHE

SEQ ID NO: 24709 - protein, 118 aa, Pseudovibrio denitrificans
  misc_feature (1)..(118): tr|A0A1I6XP91|A0A1I6XP91_9RHOB 6-carboxy-5,6,7,8-tetrah ydropterin synthase OS=Pseudovibrio denitrificans OX=25 8256 GN=SAMN05444141_101343 PE=3 SV=1
MYKITKEFHFSASHQLCEMPEGHPCARLHGHNYIVVVELASEFLNEYGFVVDFTELKPLKRFIDDELDHRHLNEVFGHDQVTSEFLAKTIYEFCKGHWTETCAVRVSETPKTWAEYRP

SEQ ID NO: 24710 - protein, 139 aa, Pseudovibrio denitrificans
  misc_feature (1)..(139): tr|A0A1I7BAK9|A0A1I7BAK9_9RHOB 6-pyruvoyl-tetrahydropte rin synthase OS=Pseudovibrio denitrificans OX=258256 GN =SAMN05444141_103807 PE=4 SV=1
MYSVEISNHIMIAHSLKGEVFGPASQLHGLTAHVHVAIFAEELDENGIVIDIGNALDVLAEILHPFNYKNLDDLPQFKGRNTTVDFLCSYIYQRVCDAAYLHKLGREPGELSKVRVTISENPNARASYEAPLTASEAHE

SEQ ID NO: 24711 - protein, 118 aa, Pseudovibrio sp.
  misc_feature (1)..(118): tr|A0A1H1FAU0|A0A1H1FAU0_9RHOB 6-carboxy-5,6,7,8-tetrah ydropterin synthase OS=Pseudovibrio sp. Tun.PSC04-5.I4 OX=1798213 GN=SAMN04515695_2155 PE=3 SV=1
MYKITKEFHFSASHQLCEMPEDHPCARLHGHNYVVVVELSCETLDKYGFVVDFTALKPLKRYIDDELDHRHLNEVFDHDQVTSEFLATEIYSWCKQRWDETSAVRVSETPKTWAEYRP

SEQ ID NO: 24712 - protein, 118 aa, Pseudovibrio sp.
  misc_feature (1)..(118): tr|A0A165UC65|A0A165UC65_9RHOB 6-carboxy-5,6,7,8-tetrah ydropterin synthase OS=Pseudovibrio sp. Ad26 OX=989410 GN=queD_2 PE=3 SV=1
MYKITKEFHFSASHQLCEMPEGHPCARLHGHNYIVVIELASKNLDEHGFVVDFTELKPLKRFIDDELDHRHLNEVFGHDQVTSEFLAKTIYEFCKGHWVETCAVRVSETPKTWAEYRP

SEQ ID NO: 24713 - protein, 118 aa, Pseudoxanthomonas composti
  misc_feature (1)..(118): tr|A0A4Q1JTV1|A0A4Q1JTV1_9GAMM 6-carboxy-5,6,7,8-tetrah ydropterin synthase OS=Pseudoxanthomonas composti OX=21 37479 GN=queD PE=3 SV=1
MDIFKVFTLEAAHRLPNVPEGHKCARLHGHSFRIELHVSGQIDPHTGWVMDFADLKAAFKPLYERLDHHYLNDIPGLENPTSERIAVWIWEQLKPDLPGLSEVVVHETCTAGSRYRGV

SEQ ID NO: 24714 - protein, 118 aa, Pseudoxanthomonas dokdonensis
  misc_feature (1)..(118): tr|A0A0R0D216|A0A0R0D216_9GAMM 6-carboxy-5,6,7,8-tetrah ydropterin synthase OS=Pseudoxanthomonas dokdonensis OX =344882 GN=ABB29_02340 PE=3 SV=1
MDIFKVFTLEAAHRLPNVPAGHKCARLHGHSFRVELHLSGELDPHTGWVMDFAEVKAAFKPTYDRLDHHYLNDIPGLENPTSERLAVWIWEQVKPALPLLSEVVVHETCTAGSRYRGP

SEQ ID NO: 24715 - protein, 117 aa, Pseudoxanthomonas indica
  misc_feature (1)..(117): tr|A0A1T5LBJ2|A0A1T5LBJ2_9GAMM 6-carboxy-5,6,7,8-tetrah ydropterin synthase OS=Pseudoxanthomonas indica OX=4289 93 GN=SAMN06296058_2254 PE=3 SV=1
MDIFKIFTLEAAHRLPNVPEGHKCARLHGHSFRVELHVSGDLDPHTGWVMDFADVKAAFKPIYDRLDHHYLNDIPGLENPTSERLSMWIWEQLKPALPNLSEVVVHETCTAGSRYRG

SEQ ID NO: 24716 - protein, 121 aa, Pseudoxanthomonas sp.
  misc_feature (1)..(121): tr|A0A4Q8LDF9|A0A4Q8LDF9_9GAMM 6-carboxy-5,6,7,8-tetrah ydropterin synthase OS=Pseudoxanthomonas sp. NML171200 OX=2480816 GN=queD PE=3 SV=1
MDIFKVFTFEAAHRLPNVPEGHKCARLHGHSFRVELHLTGPLDPHTGWVMDFADVKAAFKPLYERLDHHYLNDIEGLDNPTSERIAEWIWDHLKPALPMLSQVVVHETCTAGSRYRGPRAD

SEQ ID NO: 24717 - protein, 121 aa, Pseudoxanthomonas sp.; identical to SEQ ID NO: 24716
  misc_feature (1)..(121): tr|A0A4Q8LLD7|A0A4Q8LLD7_9GAMM 6-carboxy-5,6,7,8-tetrah ydropterin synthase OS=Pseudoxanthomonas sp. NML171202 OX=2480817 GN=queD PE=3 SV=1

SEQ ID NO: 24718 - protein, 121 aa, Pseudoxanthomonas spadix
  misc_feature (1)..(121): tr|A0A3M6Q263|A0A3M6Q263_9GAMM 6-carboxy-5,6,7,8-tetrah ydropterin synthase OS=Pseudoxanthomonas spadix OX=4152 29 GN=queD PE=3 SV=1
MDIFKVFSIEAAHRLPNVPDGHKCARLHGHSFRIEIHLSGPLDPHTGWVMDFADVKAAFRPIFQRLDHHYLNDIQGLDNPTSERIAEWIWDHLKPALPLLSQVVVHETCTAGSRYRGPAAG

SEQ ID NO: 24719 - protein, 121 aa, Pseudoxanthomonas spadix
  misc_feature (1)..(121): tr|G7UUN9|G7UUN9_PSEUP 6-carboxy-5,6,7,8-tetrahydropter in synthase OS=Pseudoxanthomonas spadix (strain BD-a59) OX=1045855 GN=DSC_14340 PE=3 SV=1
MDIFKVFSIEAAHRLPNVPDGHKCARLHGHSFRIEIHLSGPLDPHTGWVMDFAEVKAAFRPIFQRLDHHYLNDIQGLDNPTSERIAEWIWDHLKPALPLLSQVVVHETCTAGSRYRGPAAG

SEQ ID NO: 24720 - protein, 117 aa, Pseudoxanthomonas suwonensis
  misc_feature (1)..(117): tr|A0A0E3Z1P2|A0A0E3Z1P2_9GAMM 6-carboxy-5,6,7,8-tetrah ydropterin synthase OS=Pseudoxanthomonas suwonensis OX= 314722 GN=WQ53_11090 PE=3 SV=1
MDIFKVFTLEAAHRLPNVPEGHKCARLHGHSFRVEIHVSGEVDPHTGWVMDFADIKAAFKPLYEQLDHHYLNEIEGLENPTSERLAGWIWDRLKPVLPLLSEVVVHETCTSGCRYRG

SEQ ID NO: 24721 - protein, 125 aa, Pseudoxanthomonas suwonensis
  misc_feature (1)..(125): tr|A0A2W4Y2P6|A0A2W4Y2P6_9GAMM 6-carboxy-5,6,7,8-tetrah ydropterin synthase OS=Pseudoxanthomonas suwonensis OX= 314722 GN=queD PE=3 SV=1
MTASIFKVFTLEAAHRLPHVPDGHKCSRLHGHSFRVEIHASGPVGQHSGWVMDFADLKVAFQPLYEQLDHHYLNDIPGLENPTSERLAMWIWERLQPRLPGLSEVAVHETCTSGCRYHGPSQAID

SEQ ID NO: 24722 - protein, 117 aa, Pseudoxanthomonas taiwanensis
  misc_feature (1)..(117): tr|A0A562D3C2|A0A562D3C2_9GAMM 6-carboxy-5,6,7,8-tetrah ydropterin synthase OS=Pseudoxanthomonas taiwanensis J1 9 OX=935569 GN=L613_007100000160 PE=3 SV=1
MEIFKVFTLEAAHRLPNVPEGHKCARLHGHSFRVELHAEGPVDPQAGWVMDFADLKAAFKPLYEQLDHHYLNEIPGLENPTSENLAAWIWARLKPSVPLLSEVVVHETCTSGCRYRG

SEQ ID NO: 24723 - protein, 117 aa, Pseudoxanthomonas wuyuanensis
  misc_feature (1)..(117): tr|A0A286D1X2|A0A286D1X2_9GAMM 6-carboxy-5,6,7,8-tetrah ydropterin synthase OS=Pseudoxanthomonas wuyuanensis OX =1073196 GN=SAMN06296416_1028 PE=3 SV=1
MDIFKVFTIEAAHRLPNVPAGHKCARLHGHSFRIELHVSGDLDPHTGWVMDFADIKAVFKPIYERLDHHYLNDIEGLENPTSERIAVWIWEQLKPQLPLLSEVVVHETCTAGSRYRG

SEQ ID NO: 24724 - protein, 153 aa, Pseudozobellia sp.
  misc_feature (1)..(153): tr|A0A3B0CDK9|A0A3B0CDK9_9FLAO 6-carboxytetrahydropteri n synthase OS=Pseudozobellia sp. CCMM003 OX=2419782 GN= D7Z94_03770 PE=4 SV=1
MGKIRITKQFTFETGHALYGYDGKCRNIHGHSYKLSVTVIGEPIVDTSHVKLGMVIDFGDLKKIVKEEIVDPFDHATVFNKNTPHIELAKELENRGHKVIMADYQPTSENMVIDFAEKIKSRLSKDINLHSLKLRETETAFAEWYAEDNGPLP

SEQ ID NO: 24725 - protein, 150 aa, Pseudozobellia sp.
  misc_feature (1)..(150): tr|A0A2E5BH81|A0A2E5BH81_9FLAO 6-carboxytetrahydropteri n synthase QueD OS=Pseudozobellia sp. OX=2024854 GN=CML 05_00125 PE=4 SV=1
MANIRITKQFNFETGHALFGYDGKCRNVHGHSYKLSVTVIGRPITDTSHVKLGMVIDFGDLKKIVKEEIVDKFDHATVFNKNTPHVELAQELTDRGHNVILAEYQPTSENMVIDFAKKIGDRLPENIKLHSLKLQETDTSYAEWYANDNS

SEQ ID NO: 24726 - protein, 150 aa, Pseudozobellia thermophila
  misc_feature (1)..(150): tr|A0A1M6B3N4|A0A1M6B3N4_9FLAO 6-pyruvoyltetrahydropter in/6-carboxytetrahydropterin synthase OS=Pseudozobellia thermophila OX=192903 GN=SAMN04488513_101275 PE=4 SV=1
MGNIRITKQFNFEAGHALYGYDGKCRNVHGHSYKLSVTVIGRPITDVGHVKLGMVIDFGDLKKIVKEEIVDKFDHATVFNKNTPHIELAKELIDRGHNVILADYQPTSENMVIDFAKKIKARLPENVKLHSLRLQETDTSYAEWFASENE

SEQ ID NO: 24727 - protein, 135 aa, Pseudozobellia thermophila
  misc_feature (1)..(135): tr|A0A1M6MRG1|A0A1M6MRG1_9FLAO 6-carboxy-5,6,7,8-tetrah ydropterin synthase OS=Pseudozobellia thermophila OX=19 2903 GN=SAMN04488513_110106 PE=3 SV=1
MKVKVSRKAHFNAAHRLYCPEWDDEKNQAVFGKCNNPNYHGHNYELIVSVTGEIDPKTGFVMDMKVLKELIADKVEDALDHKNLNLEVPEFKALNPTAENIAVVIWNKLRPHIHDDNELEVTLFETPRNFVTFSG

SEQ ID NO: 24728 - protein, 139 aa, Psychrilyobacter sp.
  misc_feature (1)..(139): tr|A0A369XSN0|A0A369XSN0_9FUSO 6-carboxytetrahydropteri n synthase OS=Psychrilyobacter sp. S5 OX=2283384 GN=DV8 67_12895 PE=4 SV=1
MYILKGEHSFDSAHFLAGYQGKCSNIHGHRWRVIAEICGGELKQEGQLRGMVVDFGDIKKDIKKMVDDHDHALIIEKGTMKEMTLNCLREEGFYIIEVDFRPTAEEFSRYFYEILEGKGYSVKRVTVYETPTNSATYEK

SEQ ID NO: 24729 - protein, 157 aa, Psychrobacillus insolitus
  misc_feature (1)..(157): tr|A0A2W7MM90|A0A2W7MM90_9BACI 6-pyruvoyltetrahydropter in/6-carboxytetrahydropterin synthase OS=Psychrobacillu s insolitus OX=1461 GN=C7437_10249 PE=4 SV=1
MTGFRIVDKLQKIDEDIQSSQLKYHSKRVLVSKEFTFDAAHHLHNYEGKCKNLHGHTYRAVLGLSGYTDERGLMIDFGDIKEIWKQKIEIYLDHHYLNETLPAMNTTAENIVVWVYEKLAEHLLDEQRYNGARVEFIRLYETPTSYAEARREWMEVE

SEQ ID NO: 24730 - protein, 157 aa, Psychrobacillus lasiicapitis
  misc_feature (1)..(157): tr|A0A544T6X8|A0A544T6X8_9BACI 6-carboxytetrahydropteri n synthase QueD OS=Psychrobacillus lasiicapitis OX=1636 719 GN=queD PE=4 SV=1
MSDFRIVDKLQKIEEDIQSSQLKYHAKRVLVSKEFTFDAAHHLHNYEGKCKNLHGHTYRAVLGVSGYTDERGLMIDFGDLKEIWKQKIEIYLDHRYLNETLPPMNTTAENIAVWIYEKLSEALIEGQRYNGARVEFIRLYETPTSYAEARREWMEVE

SEQ ID NO: 24731 - protein, 157 aa, Psychrobacillus psychrodurans
  misc_feature (1)..(157): tr|A0A1I4X9B6|A0A1I4X9B6_9BACI 6-pyruvoyltetrahydropter in/6-carboxytetrahydropterin synthase OS=Psychrobacillu s psychrodurans OX=126157 GN=SAMN05421832_12223 PE=4 SV =1
MTGFRIVDKLQKIDEDIHSSQLKYHSNRVLVSKEFTFDAAHHLHNYEGKCKNLHGHTYRAVLGLSGYTDARGLMIDFGDIKEIWKQKIEIYLDHRYLNETLPPMNTTAENIVVWIYAKLAEHLLVEQRYNGARVEFIRLYETPTSYAEVRREWMEVE

SEQ ID NO: 24732 - protein, 157 aa, Psychrobacillus soli
  misc_feature (1)..(157): tr|A0A544TGC5|A0A544TGC5_9BACI 6-carboxytetrahydropteri n synthase QueD OS=Psychrobacillus soli OX=1543965 GN=q ueD PE=4 SV=1
MTDFRIVDKLQKIEEDIQSNQLKYHTKRVLVSKEFTFDAAHHLHNYEGKCKNLHGHTYRAVLGLSGYTDDRGLMIDFGDIKEIWKQKIEIYLDHRYLNETLPPMNTTAENIVVWIYEKLTEALLDEQRYDGARVEFIRLYETPTSYAEARREWMEVE

SEQ ID NO: 24733 - protein, 157 aa, Psychrobacillus sp.
  misc_feature (1)..(157): tr|A0A1H9VVZ1|A0A1H9VVZ1_9BACI 6-pyruvoyltetrahydropter in/6-carboxytetrahydropterin synthase OS=Psychrobacillu s sp. OK032 OX=1884358 GN=SAMN05518872_106235 PE=4 SV=1
MTDFRIVDKLQKIDVDIQSNQLKHHSKRVLVSKEFTFDAAHHLHNYEGKCKNLHGHTYRAVLGLSGYTDERGLMIDFGDIKEIWKQKIEIYLDHRYLNETLPPMNTTAENIVVWIYEKLAKALLDEQRYNGARVEFIKLYETPTSYAEARREWMEVE

SEQ ID NO: 24734 - protein, 157 aa, Psychrobacillus sp.
  misc_feature (1)..(157): tr|A0A544TMH9|A0A544TMH9_9BACI 6-carboxytetrahydropteri n synthase QueD OS=Psychrobacillus sp. Z8 OX=2325572 GN =queD PE=4 SV=1
MSDFRIVDKLQKIDEDIQSSQLKYHSKRVLVSKEFTFDAAHHLHNYEGKCKNLHGHTYRAVLGVSGYTDERGLMIDFGDIKEIWKQEIEIYLDHRYLNETLPSMNTTAENIVVWIYEKLAEALIDEQQYNGARVEFIRLYETPTSYAEARREWMEVE

SEQ ID NO: 24735 - protein, 200 aa, Psychrobacter alimentarius
  misc_feature (1)..(200): tr|A0A144PDE6|A0A144PDE6_9GAMM 6-carboxy-5,6,7,8-tetrah ydropterin synthase OS=Psychrobacter alimentarius OX=26 1164 GN=A3K91_1507 PE=4 SV=1
MRIRKLFKFENAHIVRNCSSERCKHSIHGHSYQIELILEAKRLDHGQMVYDFGLLKSSIKDIIDSFDHAICFWSKDDPEYIAACKKFSARWISLPVSPSAEQFSRVIFFWAQEILQQTQMQNGETDVSVYSVIAHETATGYAQCFADDVANEQMGKLVLGDFEFSDQVRAEWHDTDLYAKLIRGESFVNPSVTMQVQPDV

SEQ ID NO: 24736 - protein, 203 aa, Psychrobacter aquaticus
  misc_feature (1)..(203): tr|U4T6T6|U4T6T6_9GAMM Queuosine biosynthesis QueD, PTP S-I OS=Psychrobacter aquaticus CMS 56 OX=1354303 GN=M91 7_2612 PE=4 SV=1
MRIRKLFKFENAHIVRNCSSERCKHSIHGHSYQIELILEAKRLDQGQMVYDFGLLKSSIKDIIDSFDHAICFWNKDDPDYIAACKKFSARWISLPVSPSAEQFSRVIFFWAQEILQQTQMQNGETDVSVYSVIAHETATGYAQCFADDVANEQMGKLDLEAFEFSEQVCAEWHDPELYAKLIRGERFVNPSVTMQVQTQVKAD

SEQ ID NO: 24737 - protein, 201 aa, Psychrobacter arcticus
  misc_feature (1)..(201): tr|Q4FT88|Q4FT88_PSYA2 Uncharacterized protein OS=Psych robacter arcticus (strain DSM 17307 / 273-4) OX=259536 GN=Psyc_0917 PE=4 SV=1
MRIRKLFKFENAHIVRNCSSERCKHSIHGHSYQIELILEAKRLDHGQMVYDFGLLKSSIKDIIDSFDHAICFWSKDDPEYIAACKKFSARWISLPVSPSAEQFSRVIFFWAQEILQKTQMQNGEADVSVYSVIAHETATGYAQCFADDVTNEQMGKLVLEDFEFSEQVCAEWHDPDLYAKLIRGESFSNPSVTMQVQAGTA

SEQ ID NO: 24738 - protein, 199 aa, Psychrobacter cryohalolentis
  misc_feature (1)..(199): tr|Q1QAM7|Q1QAM7_PSYCK Uncharacterized protein OS=Psych robacter cryohalolentis (strain K5) OX=335284 GN=Pcryo_ 1497 PE=4 SV=1
MRIRKLFKFENAHIVRNCSSERCKHSIHGHSYQIELILEAKRLDHGQMVYDFGLLKSSIKDIIDSFDHAICFWSKDDPEYIAACKKFSARWISLPVSPSAEQFSRVIFFWAQEILQQTQMQNGEADVSVYSVIAHETATGYAQCFADDVSNEQMGKLVLKDFEFSEQVCAEWHDPELYAKLIRGESFVNPAVTMQVQVD

SEQ ID NO: 24739 - protein, 231 aa, Psychrobacter fozii
  misc_feature (1)..(231): tr|A0A2V4VSG4|A0A2V4VSG4_9GAMM 6-pyruvoyltetrahydropter in/6-carboxytetrahydropterin synthase OS=Psychrobacter fozii OX=198480 GN=DFP82_10859 PE=4 SV=1
MDLTILISSTVVLTVLVKIIMRIRKLFKFENAHIVRNCSSERCKHSIHGHSYQIELILEAKRLDHGQMVYDFGLLKSSIKDIIDSFDHAICFWNKDDPEYIDACKKFSARWISLPVSPSAEQFSRVIFFWAQEILRQTQMQNGESDVSVYSVIAHETATGYAQCFADDVANDQMGKLVLEEFAFSDQVSKEWHDPDLYAKLIRGESFINPSVTMQVQTEQVQTEQVQAGSD

SEQ ID NO: 24740 - protein, 204 aa, Psychrobacter frigidicola
  misc_feature (1)..(204): tr|A0A5C7A3M6|A0A5C7A3M6_9GAMM 6-carboxytetrahydropteri n synthase OS=Psychrobacter frigidicola OX=45611 GN=ES7 54_03445 PE=4 SV=1
MRIRKLFKFENAHIVRNCSSERCKHSIHGHSYQIELILEAQRLDHGQMVYDFGLLKSSIKDIIDSFDHAICFWNQDDPEYIAACKKFSARWISLPVSPSAEQFSRVIFFWAQEILQQTKMQNGEADVSVYSVIAHETATGYAQCFAEDVANEQMGKLELDAFEFSSQVSSEWTDPELYTKLIRGERFINPTVTMQVTASDIGTV

SEQ ID NO: 24741 - protein, 207 aa, Psychrobacter immobilis
  misc_feature (1)..(207): tr|A0A2V2A571|A0A2V2A571_PSYIM 6-pyruvoyltetrahydropter in/6-carboxytetrahydropterin synthase OS=Psychrobacter immobilis OX=498 GN=C8D84_102246 PE=4 SV=1
MRIRKLFKFENAHIVRNCSSERCKHSIHGHSYQIELILEAKRLDHGQMVYDFGLLKSSIKDIIDSFDHAICFWNKDDPEYVAACKKFSARWISLPVSPSAEQFSRVIFFWAQEILKQTQMQNGESDVSVYSVIAHETATGYAQCFADDVANEQMGKLHLEAFEFSDQVSAEWHDPELYAKLIRGESFINPTVTMQVQTQVQAGKPDA

SEQ ID NO: 24742 - protein, 200 aa, Psychrobacter pacificensis
  misc_feature (1)..(200): tr|A0A1G6XUS4|A0A1G6XUS4_9GAMM 6-pyruvoyltetrahydropter in/6-carboxytetrahydropterin synthase OS=Psychrobacter pacificensis OX=112002 GN=SAMN05660405_01452 PE=4 SV=1
MRIRKLFKFENAHIVRNCSSERCKHSIHGHSYQIELILEATRLDHGQMVYDFGLLKSSIKDIIDSFDHAICFWNKDDPEYVAACKKFSARWISLPVSPSAEQFSRVIFFWAQEILRQTQMQNGEADVRVYSVIAHETATGYAQCFADDVANEQMGKLVLEDFEFSEQVRAEWTDSDLYAKLIRGESFTNPTVTMQVQTDA

SEQ ID NO: 24743 - protein, 198 aa, Psychrobacter pasteurii
  misc_feature (1)..(198): tr|A0A1R4EG88|A0A1R4EG88_9GAMM 6-pyruvoyl tetrahydropte rin synthase OS=Psychrobacter pasteurii OX=1945520 GN=A 1019T_01468 PE=4 SV=1
MRIRKLFKFENAHIVRNCSSDRCKRSIHGHSYQIELILQADRLDNGQMVYDFGLLKSSIKDIIDSFDHAICFWNKDDPEYIEMCKKFSARWISLPVSPSAEQFSRVIFFWAQSILDQTKMANGEAGVSVYSVIAHETATGYAQCFAEDITNEHMGLLKLEDFEFSEQVMQEWTDPKMYQKLIAGETFVNPEVTLQVKA

SEQ ID NO: 24744 - protein, 198 aa, Psychrobacter phenylpyruvicus
  misc_feature (1)..(198): tr|A0A379LKV7|A0A379LKV7_9GAMM Queuosine biosynthesis p rotein QueD OS=Psychrobacter phenylpyruvicus OX=29432 G N=NCTC10526_01564 PE=4 SV=1
MRIRKLFKFENAHIVRNCSSDRCKRSIHGHSYQIELILQADRLDNGQMVYDFGLLKSSIKDIIDSFDHAICFWNKDEPEYIEMCKKFSARWISLPVSPSAEQFSRVIFFWAQSILDQTKMVNGEAGVSVYSVIAHETATGYAQCFAEDISNEHMGLLRLEDFEFSEQVMQEWTDPKMYQKLIAGEPFVNPEVTLQVKA

SEQ ID NO: 24745 - protein, 198 aa, Psychrobacter piechaudii
  misc_feature (1)..(198): tr|A0A1R4GY50|A0A1R4GY50_9GAMM 6-pyruvoyl tetrahydropte rin synthase OS=Psychrobacter piechaudii OX=1945521 GN= A1232T_02297 PE=4 SV=1
MRIRKLFKFENAHIVRNCSSDRCKHSIHGHSYQIELILQADRLDNGQMVYDFGLLKSSIKDIIDSFDHAICFWNKDDPEYIEMCKKFSARWISLPVSPSAEQFSRVIFFWAQSILDQTKMANGEAGVSVYSVIAHETATGYAQCFAEDITNEHMGLLRLEDFEFSEQVMQEWTDPKMYQKLIAGEPFVNPEVTLQVKA

SEQ ID NO: 24746 - protein, 200 aa, Psychrobacter piscatorii
  misc_feature (1)..(200): tr|A0A0T6DU53|A0A0T6DU53_9GAMM 6-carboxy-5,6,7,8-tetrah ydropterin synthase OS=Psychrobacter piscatorii OX=5543 43 GN=AS194_05820 PE=4 SV=1
MRIRKLFKFENAHIVRNCSSERCKHSIHGHSYQIELILEATRLDHGQMVYDFGLLKSSIKDIIDSFDHAICFWNKDDPEYVAACKKFSARWISLPVSPSAEQFSRVIFFWAQEILRQTQMQNGEADVSVYSVIAHETATGYAQCFADDVANEQMGKLVLEDFEFSEQVRAEWTDSDLYAKLIRGESFTNPTVTMQVQTDA

SEQ ID NO: 24747 - protein, 206 aa, Psychrobacter sp.
  misc_feature (1)..(206): tr|A0A1D9CWL0|A0A1D9CWL0_9GAMM Uncharacterized protein OS=Psychrobacter sp. AntiMn-1 OX=1720344 GN=AOT82_570 P E=4 SV=1
MRIRKLFKFENAHIVRNCSSERCKHSIHGHSYQIELILEATRLDHGQMVYDFGLLKSSIKDIIDSFDHAICFWNKDDPEYVAACKKFSARWISLPVSPSAEQFSRVIFFWAQEILRQTQMQNGEADVSVYSVIAHETATGYAQCFADDVANEQMGKLVLEDFEFSEQVRAEWTDSELYAKLIRGESFTNPTVTMQVQPEQAQAGSD

SEQ ID NO: 24748 - protein, 206 aa, Psychrobacter sp.
  misc_feature (1)..(206): tr|A0A455UU25|A0A455UU25_9GAMM 6-carboxytetrahydropteri n synthase QueD OS=Psychrobacter sp. KH172YL61 OX=25178 99 GN=PKHYL_17590 PE=4 SV=1
MRIRKLFKFENAHIVRNCSSERCKHSIHGHSYQIELILEATRLDHGQMVYDFGLLKSSIKDIIDSFDHAICFWNKDDPEYVAACKKFSARWISLPVSPSAEQFSRVIFFWAQEILRQTQMQNGEADVSVYSVIAHETATGYAQCFADDVANEQMGKLVLEDFEFSEQVRAEWTDSDLYAKLIRGESFTNPTVTMQVQPEQAQAGSD

SEQ ID NO: 24749 - protein, 208 aa, Psychrobacter urativorans
  misc_feature (1)..(208): tr|A0A0M4U2Y9|A0A0M4U2Y9_9GAMM 6-carboxy-5,6,7,8-tetrah ydropterin synthase OS=Psychrobacter urativorans OX=456 10 GN=AOC03_00110 PE=4 SV=1
MRIRKLFKFENAHIVRNCSSERCKHSIHGHSYQIELILEAQRLDHGQMVYDFGLLKSSIKDIIDSFDHAICFWNQDDPEYIAACKKFSARWISLPVSPSAEQFSRVIFFWAQEILKQTQMQNGESDVSVYSVIAHETATGYAQCFSDDVANEQMGKLELGAFEFSEQVSSEWHDPELYAKLIRGERFINPTVMMQVSSQLEPQVQPDV

SEQ ID NO: 24750 - protein, 150 aa, Psychroflexus gondwanensis
  misc_feature (1)..(150): tr|N1X001|N1X001_9FLAO 6-pyruvoyl tetrahydrobiopterin s ynthase QueD OS=Psychroflexus gondwanensis ACAM 44 OX=1 189619 GN=pgond44_01065 PE=4 SV=1
MAKIRITKQFTFETAHALYGYDGKCRNIHGHSYKLDVTVIGEPITDMDNVKCGMVIDFGDLKQIVKSQVVDKMDHAIILNKETPHIELAQTLKSSGHDVILVDYQPTSENMVIDFAKSIQSRLDPKIKLHSLKLRETGTAFAEWFASDNA

SEQ ID NO: 24751 - protein, 136 aa, Psychroflexus gondwanensis
  misc_feature (1)..(136): tr|N1WYJ3|N1WYJ3_9FLAO 6-carboxy-5,6,7,8-tetrahydropter in synthase OS=Psychroflexus gondwanensis ACAM 44 OX=11 89619 GN=pgond44_02993 PE=3 SV=1
MKVTVHRKAHFNAAHRLYRKDWDFEKNNEVFGKCNNPQYHGHNYELIASVTGDIDPETGYVIDIKVLKDMIKAEVEDAFDHKNLNEQVPEFKDLNPTAENISVVIWNKLKAKLDKNHDLEVTLYETPRNFVTYKGE

SEQ ID NO: 24752 - protein, 150 aa, Psychroflexus halocasei
  misc_feature (1)..(150): tr|A0A1H4BGC5|A0A1H4BGC5_9FLAO 6-pyruvoyltetrahydropter in/6-carboxytetrahydropterin synthase OS=Psychroflexus halocasei OX=908615 GN=SAMN05421540_10633 PE=4 SV=1
MAKIRITKQFTFETAHALYGYDGKCKNIHGHSYKLDVCVIGEPITDTSNVKCGMVIDFGDLKKIVKKEVVDVLDHAIMLNKNTPHIELAQDLKKANHNVVLVDYQPTSENMVIDFADKIKSKLDSNLELHSLKLRETGTAFAEWYAADNA

SEQ ID NO: 24753 - protein, 136 aa, Psychroflexus halocasei
  misc_feature (1)..(136): tr|A0A1H3WR65|A0A1H3WR65_9FLAO 6-carboxy-5,6,7,8-tetrah ydropterin synthase OS=Psychroflexus halocasei OX=90861 5 GN=SAMN05421540_102111 PE=3 SV=1
MPKVTVHRKAHFNAAHRLHRDDWDDAKNKEIFGKCNNPNFHGHNYKLIVSVTGEIDPETGYVIDLKILKDIIKSKVEDDFDHKNLNIEVEDFKNLNPTVENISVVIYNRIKAHLDPKLKLEITLYETPRNFVTYKA

SEQ ID NO: 24754 - protein, 136 aa, Psychroflexus salarius
  misc_feature (1)..(136): tr|A0A1M4TTL8|A0A1M4TTL8_9FLAO 6-carboxy-5,6,7,8-tetrah ydropterin synthase OS=Psychroflexus salarius OX=115568 9 GN=SAMN05444278_10211 PE=3 SV=1
MAKVTVHRKAHFNAAHRLYRKDWSEDQNEAVFGKCNNPYFHGHNYELIVSVTGEIDPETGYVIDMKVLKDLIKTEVEDQFDHKNLNEQVDVFKNLNPTAENISVVIWNNLRPHLDQSLDLEVTLYETPRNFVTYKA

SEQ ID NO: 24755 - protein, 149 aa, Psychroflexus salarius
  misc_feature (1)..(149): tr|A0A1M4UWD5|A0A1M4UWD5_9FLAO 6-carboxy-5,6,7,8-tetrah ydropterin synthase OS=Psychroflexus salarius OX=115568 9 GN=SAMN05444278_103130 PE=3 SV=1
MAKIRITKQFTFETAHALYGYDGKCKNIHGHSYKLDVTVIGQPIADTSNVKCGMVIDFGDLKKIVKTEVVDVMDHAIVLNQHTPHIQLADDLKKTGHNVVLVDYQPTSENMVIDFANRIQSKLSSELSLHSLKLRETETAFAEWYASDN

SEQ ID NO: 24756 - protein, 136 aa, Psychroflexus sediminis
  misc_feature (1)..(136): tr|A0A1G7ZAR1|A0A1G7ZAR1_9FLAO 6-carboxy-5,6,7,8-tetrah ydropterin synthase OS=Psychroflexus sediminis OX=47082 6 GN=SAMN04488027_1219 PE=3 SV=1
MKVTVHRKAHFNAAHRLYRKDWDFEKNEEVFGKCNNPNYHGHNYELIASVTGEIDPETGYVMDVKLLKDLIKSEVEDAFDHKNLNEQVPEFQSLNPTAENISVVIWNKLKPKLKDGHELEITLYETPRNFVTYKGE

SEQ ID NO: 24757 - protein, 150 aa, Psychroflexus sediminis
  misc_feature (1)..(150): tr|A0A1G7Z974|A0A1G7Z974_9FLAO 6-pyruvoyltetrahydropter in/6-carboxytetrahydropterin synthase OS=Psychroflexus sediminis OX=470826 GN=SAMN04488027_12019 PE=4 SV=1
MAKIRITKQFTFETAHALYGYDGKCKNVHGHSYKLDVTVIGEPIKDKDNVKCGMVIDFGDLKKIVKAEVVDRMDHAILLNKETPHIELAEHLKSSGHDVILVDYQPTSENMIADFASRISSKLNTDIKLHSLKLRETGTAFAEWFASDNA

SEQ ID NO: 24758 - protein, 150 aa, Psychroflexus sp.
  misc_feature (1)..(150): tr|A0A2I0D7I8|A0A2I0D7I8_9FLAO 6-carboxytetrahydropteri n synthase QueD OS=Psychroflexus sp. MES1-P1E OX=205832 0 GN=CXF67_09975 PE=4 SV=1
MAKIRITKQFTFETAHALYGYDGKCRNIHGHSYKLDVTVIGEPITDMDNVKCGMVIDFGDLKYIVKSQVVDKMDHAIILNKETPHIELAQTLKSSDHDVILVDYQPTSENMVIDFAKSIQSKLDPKIKLHSLKLRETGTAFAEWFASDNA

SEQ ID NO: 24759 - protein, 136 aa, Psychroflexus sp.
  misc_feature (1)..(136): tr|A0A4U5TRM7|A0A4U5TRM7_9FLAO 6-carboxy-5,6,7,8-tetrah ydropterin synthase OS=Psychroflexus sp. WDS2C27 OX=188 3405 GN=FCN74_06375 PE=3 SV=1
MKVTVHRKAHFNAAHRLYRKDWTDEKNEAVFGKCSNPYYHGHNYELVVAVTGEIDPETGYVIDIKVLKDLIKTEVEDEFDHKNLNEQVEVFKTLNPTAENIVVVIWDKLRKHLDNNLELSVTLYETPRNFVTYNGQ

SEQ ID NO: 24760 - protein, 150 aa, Psychroflexus torquis
  misc_feature (1)..(150): tr|K4ICW2|K4ICW2_PSYTT 6-pyruvoyl tetrahydrobiopterin s ynthase QueD OS=Psychroflexus torquis (strain ATCC 7007 55 / ACAM 623) OX=313595 GN=P700755_001321 PE=4 SV=1
MAKIRITKQFTFETAHALYGYDGKCRNIHGHSYKLDVTVIGEPITDMDNVKCGMVIDFGDLKYIVKSQVVDKMDHAIILNKETPHIELAQTLKSSGHDVILVDYQPTSENMVIDFAKSIQSKLDPTIKLHSLKLRETGTAFAEWFASDNV

SEQ ID NO: 24761 - protein, 136 aa, Psychroflexus torquis
  misc_feature (1)..(136): tr|K4IQA4|K4IQA4_PSYTT 6-carboxy-5,6,7,8-tetrahydropter in synthase OS=Psychroflexus torquis (strain ATCC 70075 5 / ACAM 623) OX=313595 GN=P700755_000659 PE=3 SV=1
MKVTVHRKAHFNAAHRLYRKDWDFEKNNKVFGKCNNPHFHGHNYELIASVTGDIDPETGYVIDIKVLKDMIKTEVEDAFDHKNLNEQVPEFKDLNPTAENISVVIWNKLKTKLNKNHDLEVTLYETPRNFVTYKGE

SEQ ID NO: 24762 - protein, 289 aa, Psychromonas ingrahamii
  misc_feature (1)..(289): tr|A1SWZ2|A1SWZ2_PSYIN Uncharacterized protein OS=Psych romonas ingrahamii (strain 37) OX=357804 GN=Ping_2266 P E=4 SV=1
MKLFVRDLTVIDASYLDKNRGFVGESYLVDVILTGALNEQSMVLDFSLVKKQIKTIIDAEVDHKLLLPQSADNCTVTPEGHRTQVNFELGDSDVIQLNCPNEAYCLLESKTVSIEVLETYLEQIILPQLPENVLGLDIKLRSENITTPYYHYTHGLKKHKGNCQRIAHGHRSKIDIFIDDKYSEALAEEWAKRWQDIYLVSAEDIITESDLSFLVAGKNNSAEIYTAYDAVQGYFELLIPAGRAEVLPNDTTVESLSEFICEQIKARMGDKKVTVYAYEGVGKGAISER

SEQ ID NO: 24763 - protein, 288 aa, Psychromonas sp.
  misc_feature (1)..(288): tr|A0A4Y7ZXC5|A0A4Y7ZXC5_9GAMM Uncharacterized protein OS=Psychromonas sp. RZ22 OX=2555643 GN=E2R68_02860 PE=4 SV=1
MKLFVRDLTVIDATYLDPERGFVGESYQVDVVLDGQLNEQSMILDFSLVKKQIKAIIDAEVDHKLLVPHASSRCSVTLEEQRTQVDYVLEDKSVIQLKSPHEAYCLLESETITVDLLETYLEQVVLIKLPENITGLSIKLRSEVLTTPYYHYTHGLKKHNGNCQRIAHGHRSKIDIFINDEYSESWVDKWAKRWADIYLASQEDVIERSELSFITSKSTVPVHCSAYHAPQGYFELLMPASRCEVLDNDTTVEELARFICETIKQQEGDNRVTVYAYEGIGKGAIVTL

SEQ ID NO: 24764 - protein, 288 aa, Psychromonas sp.
  misc_feature (1)..(288): tr|A0A366WC00|A0A366WC00_9GAMM Uncharacterized protein OS=Psychromonas sp. B3M02 OX=2267226 GN=DS885_07420 PE= 4 SV=1
MKLFVRDLTVIDSTYLEATRGFVGESYQVDVVLDGQLNEQSMILDFALVKKQIKAIIDAEVDHKLLVPSLSAACKVQAEDERTQVDYHLNDAELIQVKAPHEAYCLLDCEVINEAFIARYLEQVILEKLPENISGLQITLHPEVINTPFYHYTHGLKKHNGNCQRIAHGHRSKIDIFINDQYSEQWVEQWAARWTDIYLASESDLIKRSDLSFITQKPTAEVHCSAYHAPQGYFELLMPASRCEVLNNDTTVEELARFICETIKAEEGDNKVTVFAYEGIGKGAIVEL

SEQ ID NO: 24765 - protein, 149 aa, Psychroserpens burtonensis
  misc_feature (1)..(149): tr|A0A5C7BA56|A0A5C7BA56_9FLAO 6-carboxy-5,6,7,8-tetrah ydropterin synthase OS=Psychroserpens burtonensis OX=49 278 GN=ES692_06750 PE=3 SV=1
MSNIRITKQFSFETGHALYGYDGKCKNVHGHSYRLDVTVIGQPISDNTNVKFGMVIDFTDLKKIVKEEIVDVFDHATVFNKNTPHVELARELQKRDHNVLLVDYQPTSEMMVIDFAEKIKRRLPNNITLHSLKLQETASSYAQWFASDN

SEQ ID NO: 24766 - protein, 136 aa, Psychroserpens burtonensis
  misc_feature (1)..(136): tr|A0A5C7BEK5|A0A5C7BEK5_9FLAO 6-carboxy-5,6,7,8-tetrah ydropterin synthase OS=Psychroserpens burtonensis OX=49 278 GN=ES692_11440 PE=3 SV=1
MRVTVSRKAHFNSAHRLYRKDWSFEKNDEIFGKCNNPNYHGHNYDLIVSVTGEIDPETGYVMDVKILKDLIKSEVEDAFDHKNLNVDVPDFKDLNPTAENIVVVIYNKLKSKLNADLDMEVTLYETPRNFVSYSGE

SEQ ID NO: 24767 - protein, 136 aa, Psychroserpens sp.
  misc_feature (1)..(136): tr|A0A4P7WUE5|A0A4P7WUE5_9FLAO 6-carboxy-5,6,7,8-tetrah ydropterin synthase OS=Psychroserpens sp. NJDZ02 OX=257 0561 GN=E9099_02430 PE=3 SV=1
MRVTVSRKAHFNAAHRLYRKDWSFEKNDEIFGKCNNPNYHGHNYELIASVTGDIDQETGFVIDVKILKDIIKVEVEDAFDHKNLNLDVAEFKDLNPTAENIVVIIYNKIKAKLKPNLDLEVTLYETPRNFVSYSGK

SEQ ID NO: 24768 - protein, 150 aa, Psychroserpens sp.; identical to SEQ ID NO: 23340
  misc_feature (1)..(150): tr|A0A4P7WV49|A0A4P7WV49_9FLAO 6-carboxytetrahydropteri n synthase OS=Psychroserpens sp. NJDZ02 OX=2570561 GN=E 9099_07670 PE=4 SV=1

SEQ ID NO: 24769 - protein, 289 aa, Psychrosphaera saromensis
  misc_feature (1)..(289): tr|A0A2S7UZH3|A0A2S7UZH3_9GAMM Uncharacterized protein OS=Psychrosphaera saromensis OX=716813 GN=BTO11_14170 P E=4 SV=1
MQLFVNDLTVIDFSYLCLQRGMVGESWIVDLTLHGELDEQNMVLDFGKVKKQVKRIIDDTVDHKLVVPSEYAGCKITHVENSNYIKINFEDQQGKQIAISSPDDAFCFIDADTVSMNDVILHLASVIKPQLPDNVKKVELTLRPEDISGFHYHYTHGLKKHDGNCQRIAHGHRSRIQIFENGMKSPKLEKAFSREWADIYVATIEDKVNNEDLEFIQCTDSQFAFKYESSQGKFEIALEQDDVYIMPVDTTVELIAQYIADRMKAQYPDNTYKVIAYEGVAKGAIAYAE

SEQ ID NO: 24770 - protein, 117 aa, Puniceibacterium antarcticum
  misc_feature (1)..(117): tr|A0A2G8RER3|A0A2G8RER3_9RHOB 6-carboxy-5,6,7,8-tetrah ydropterin synthase OS=Puniceibacterium antarcticum OX= 1206336 GN=P775_11325 PE=3 SV=1
MYRITKEFHFSASHQLSHLPQGHQCARLHGHNYVVVVELAVVSLNAAGFVRDYGELKPLKTYIDDTFDHRHLNDVMDIPSTGENMARHFYEWCVARWPETTAVKVSETPKTWAEYRP

SEQ ID NO: 24771 - protein, 131 aa, Puniceibacterium antarcticum
  misc_feature (1)..(131): tr|A0A2G8R6X5|A0A2G8R6X5_9RHOB 6-pyruvoyl tetrahydropte rin synthase OS=Puniceibacterium antarcticum OX=1206336 GN=P775_24205 PE=4 SV=1
MFAVEVRDHVMIAHSLPSPVFGPAQGMHGATFVVDAAFYTGDLDENGLVVDIGLATEALSAALAPLRYCNLDEVAAFKGKITTTEFLCHHIWSQLRETTQTTGLGDGGRVRRIRVMLHESHVARGWYEADI

SEQ ID NO: 24772 - protein, 143 aa, Puniceicoccaceae bacterium
  misc_feature (1)..(143): tr|A0A2E9IM94|A0A2E9IM94_9BACT 6-pyruvoyl tetrahydropte rin synthase OS=Puniceicoccaceae bacterium OX=2026784 G N=CML13_01375 PE=4 SV=1
MLTCKKSYRDIPFAHCQHRHDGHCALIHGHNWAITLTFACRETDENGFVVDFGKVKYLKAWIDENLDHACLFNEDDPDKDALLAQFGHLFKPYVLPGTSCEAIAEHIYEIFNPLVLQQTDNRAWITEVEIEEDSKNSAAYLPA

SEQ ID NO: 24773 - protein, 146 aa, Puniceicoccaceae bacterium
  misc_feature (1)..(146): tr|A0A2E6TKY9|A0A2E6TKY9_9BACT 6-pyruvoyl tetrahydropte rin synthase OS=Puniceicoccaceae bacterium OX=2026784 G N=CML14_03160 PE=4 SV=1
MITCSKTYRDIPLSHRQPRHSGRCSRIHGHSWAITITFVAETLDENGFVIDFGDLHFIEDWIEENLDHGIVLCSTDPQKGLLESIQEQGLLKITWVDSASCEGIAEFLYHTFQPMVDAKTKGRAKIQCLRLEEDSKNSALFNPSSI

SEQ ID NO: 24774 - protein, 132 aa, Pusillimonas sp.
  misc_feature (1)..(132): tr|A0A522IEA8|A0A522IEA8_9BURK 6-carboxytetrahydropteri n synthase OS=Pusillimonas sp. OX=1979962 GN=EPN67_1235 5 PE=4 SV=1
MFSVTVRDHMMIAHSFRGEVFGPAQRLHGATFIVDATFRRAALDADNVVVDIGRASAELHAILDTLTFRNLDDEPSLVNINTTTEAMAKVVADKLADRIHAGALGANALGLSGIAVTLHESHIAWASFERAL

SEQ ID NO: 24775 - protein, 152 aa, Pusillimonas sp.
  misc_feature (1)..(152): tr|A0A2N4UBC8|A0A2N4UBC8_9BURK 6-carboxytetrahydropteri n synthase QueD OS=Pusillimonas sp. JR1/69-2-13 OX=2045 209 GN=queD PE=4 SV=1
MTSITRKLEFDAGHRIPDHRSQCKNLHGHRYVMEVTLDGDIVTVPGASSNGMVMDFSEVKSIAREHIVDKWDHAFLVFRGDTAVVEFLATLEDHKTVVLDSIPTAENLAHLAFDTLAPHYADRFEGTLRLSRVRLYETPNCWVDVVATTARL

SEQ ID NO: 24776 - protein, 149 aa, Pustulibacterium marinum
  misc_feature (1)..(149): tr|A0A1I7EVK4|A0A1I7EVK4_9FLAO 6-carboxy-5,6,7,8-tetrah ydropterin synthase OS=Pustulibacterium marinum OX=1224 947 GN=SAMN05216480_101302 PE=3 SV=1
MSTIRITKQFSFETGHALYGYDGKCKNVHGHSYKLSVTVIGSPISDNNNVKYGMVIDFGDLKKIVKEEIVDVFDHATVFNKNTPHVELAHELSTRGHNVLLVDYQPTSEMMVIDFAKKIADRLPENIKLFALKLQETESSYAEWFASDN

SEQ ID NO: 24777 - protein, 135 aa, Pustulibacterium marinum
  misc_feature (1)..(135): tr|A0A1I7IUW2|A0A1I7IUW2_9FLAO 6-carboxy-5,6,7,8-tetrah ydropterin synthase OS=Pustulibacterium marinum OX=1224 947 GN=SAMN05216480_12232 PE=3 SV=1
MRARVSRKAHFNAAHRLHNPNWSAEKNKEIYGKCNYPNYHGHNYELVVHVIGEIDQESGFVMDLGILKSLIGEHVEEALDHKNLNLDVPEFKEIIPTAENIAKVIFHKLRPHIKETLDLQVTLYETPRNFVTYPV

SEQ ID NO: 24778 - protein, 128 aa, Unknown
  misc_feature (1)..(128): tr|A0A1E4ZIN4|A0A1E4ZIN4_9BACT 6-carboxy-5,6,7,8-tetrah ydropterin synthase OS=PVC group bacterium (ex Bugula n eritina AB1) OX=1868283 GN=AB834_05995 PE=3 SV=1
MKKMFINILKQSFSSAHKIDGHKGKCAFLHGHNWTVEIAVASYKLDHLGMGMDFADIKRLVKPVIDELDHCYLNDLPYFQHFLPTAENVAKYIYESLVSIFSNEDVDIQEVIVWETDGCGVKYRDTKE

SEQ ID NO: 24779 - protein, 127 aa, Pyrinomonas methylaliphatogenes
  misc_feature (1)..(127): tr|A0A0B6WW58|A0A0B6WW58_9BACT 6-carboxy-5,6,7,8-tetrah ydropterin synthase OS=Pyrinomonas methylaliphatogenes OX=454194 GN=PYK22_00394 PE=3 SV=1
MNGYFEVMIERNFSSAHQLRGYKGKCENLHGHNYKVEIYARGRKLNEIGLLVDFAELKAAADEVIERLDHRNLNEIPPFDRELNPSAENLARYILEQIAARISDERVQIYKVRCFETPTSVATYQID

SEQ ID NO: 24780 - protein, 134 aa, Quadrisphaera sp.
  misc_feature (1)..(134): tr|A0A5C8Z4E2|A0A5C8Z4E2_9ACTN 6-carboxytetrahydropteri n synthase OS=Quadrisphaera sp. DD2A OX=2593304 GN=FMM0 8_19835 PE=4 SV=1
MYRVSVRDHVMVAHSLPRPFFGPAQGKHGATYVVELVLAATALDENGVVVDIGAASAALGSVLDELRYRDLDEHPAFAGQLTTTEVLARWVADRVAAASHCEGPAAGLVKGLDHLEVVLHETPDAWASYRLDAL

SEQ ID NO: 24781 - protein, 144 aa, Quasibacillus thermotolerans
  misc_feature (1)..(144): tr|A0A0F5I8P8|A0A0F5I8P8_9BACI 6-carboxy-5,6,7,8-tetrah ydropterin synthase OS=Quasibacillus thermotolerans OX= 1221996 GN=QY95_00432 PE=3 SV=1
MMQQIYPAPSHSYRYELNKDLQFAAAHYVPHEDAGVCRRLHGHTYFVNVTVVGNDLNESGFLVNFKDIKDLIHKRFDHTVLNEDTAFNEETADDFPTTEVVARKFWEIVQEALNKMPNRPRCLQVFLRETPTSYVVFRPRKEDF

SEQ ID NO: 24782 - protein, 369 aa, Quisquiliibacterium sp.
  misc_feature (1)..(369): tr|A0A5C8NSI2|A0A5C8NSI2_9BURK 6-pyruvoyl tetrahydropte rin synthase OS=Quisquiliibacterium sp. CC-CFT501 OX=24 98847 GN=FHP08_14440 PE=4 SV=1
MPDHLLHVAAAGFESACRIDVLPEGHRSRRLHGHSFLAKVRARLPQGWASFPGGEVDDLRARLSEAIAPLDYALLNERVAHPTDENLARWIRGRLAAAGRGVPGLEQVGIQSTLHSGVDLDAKDHAHVWRRYVFEAAHQLTGVPAGHKCGRMHGHGFEVILHADQDLGARDLGIDYDHLDACWAPIHAQFHHACLNDIPGLENPTSEIIGAWIWERLKPRLPELSWVTVYETATCGAHYDGRHYRIWKELSLDSSLRLRRAPEGDPRRRIHGHTYNLRLHLCAPLDEVRGWTVDFGDVKALFDPIFRDLDHQPLHELQGVEDNDPASLAKWIRDRALPALPALDRIDLYETRGSGAILSWGEEGPALPV

SEQ ID NO: 24783 - protein, 119 aa, Rahnella aquatilis
  misc_feature (1)..(119): tr|H2IV82|H2IV82_RAHAC 6-carboxy-5,6,7,8-tetrahydropter in synthase OS=Rahnella aquatilis (strain ATCC 33071 / DSM 4594 / JCM 1683 / NBRC 105701 / NCIMB 13365 / CIP 7 8.65) OX=745277 GN=Rahaq2_0685 PE=3 SV=1
MTTTLFKDFQFEAAHHLPHVPAGHKCGRLHGHSFTVRLEITGEVDPHTGWVMDFAELKAAFNPTLDRLDHYNLNDIPGLENPTSEVLAAWIWNEMKPKLPLLSAVRVKETCTAGCVYKG

SEQ ID NO: 24784 - protein, 119 aa, Rahnella aquatilis; identical to SEQ ID NO: 24783
  misc_feature (1)..(119): tr|H8NR47|H8NR47_RAHAQ 6-carboxy-5,6,7,8-tetrahydropter in synthase OS=Rahnella aquatilis HX2 OX=1151116 GN=Q7S _03075 PE=3 SV=1

SEQ ID NO: 24785 - protein, 119 aa, Rahnella inusitata
  misc_feature (1)..(119): tr|A0A419M5H0|A0A419M5H0_9GAMM 6-carboxy-5,6,7,8-tetrah ydropterin synthase OS=Rahnella inusitata OX=58169 GN=q ueD PE=3 SV=1
MTTTLFKDFQFEAAHHLPHVPAGHKCGRLHGHSFTVRLEITGEVDPHTGWVMDFADLKAAFNPTLDRLDHYNLNDIPGLENPTSEVLAEWIWNEMKPTLPLLSAVRVKETCTAGCIYRG

SEQ ID NO: 24786 - protein, 119 aa, Rahnella sp.
  misc_feature (1)..(119): tr|A0A2N0VZT7|A0A2N0VZT7_9GAMM 6-carboxy-5,6,7,8-tetrah ydropterin synthase OS=Rahnella sp. AA OX=2057180 GN=qu eD PE=3 SV=1
MTTTLFKDFQFEAAHHLPHVPAGHKCGRLHGHSFTVRLEITGEVDPHTGWVMDFADLKAAFNPTLDRLDHYYLNDIPGLENPTSEVLAEWIWNEMKPKLPLLSAVRVKETCTAGCVYKG

SEQ ID NO: 24787 - protein, 119 aa, Rahnella sp.; identical to SEQ ID NO: 24783
  misc_feature (1)..(119): tr|A0A4V3EDK9|A0A4V3EDK9_9GAMM 6-carboxy-5,6,7,8-tetrah ydropterin synthase OS=Rahnella sp. BIGb0236 OX=2485117 GN=EDF78_10677 PE=3 SV=1

SEQ ID NO: 24788 - protein, 119 aa, Rahnella woolbedingensis
  misc_feature (1)..(119): tr|A0A419N4R5|A0A419N4R5_9GAMM 6-carboxy-5,6,7,8-tetrah ydropterin synthase OS=Rahnella woolbedingensis OX=1510 574 GN=queD PE=3 SV=1
MTTTLFKDFQFEAAHHLPHVPAGHKCGRLHGHSFTVRIEITGEVDPHTGWVMDFADLKAAFNPTLDRLDHYNLNDIPGLENPTSEVLAEWIWNEMKPKLPLLSAVRVKETCTAGCVYKG

SEQ ID NO: 24789 - protein, 135 aa, Raineya orbicola
  misc_feature (1)..(135): tr|A0A2N3IF19|A0A2N3IF19_9BACT 6-carboxy-5,6,7,8-tetrah ydropterin synthase OS=Raineya orbicola OX=2016530 GN=R ain11_1566 PE=3 SV=1
MKIKVCRKEHFNAAHRLHNPAWDETTNQKVFGKCNNPYFHGHNYELIVEVVGEINPETGYVMDMKELSDIIKTHVTERFDHKNLNLEIDEFRNLNPTAENIAVVIWNILRKQINSQYELKIKLYETERNFVEYPA

SEQ ID NO: 24790 - protein, 142 aa, Raineya orbicola
  misc_feature (1)..(142): tr|A0A2N3IFA3|A0A2N3IFA3_9BACT 6-pyruvoyl-tetrahydropte rin synthase OS=Raineya orbicola OX=2016530 GN=Rain11_1 568 PE=4 SV=1
MVFVCRKEHFNAAHRLFNPSWSKEKNEEVFGICANEHYHGHNFELIVIVKGTPDEDTGCVIDLKKLSKLIHSEVIEKLDHKNINLEVDFMQGKIPSCENLVVAIWEILAPKIADIAYDPHARLHCIRLFETQNNFVEYYGEW

SEQ ID NO: 24791 - protein, 158 aa, Ralstonia insidiosa
  misc_feature (1)..(158): tr|A0A191ZWE1|A0A191ZWE1_9RALS 6-carboxytetrahydropteri n synthase QueD OS=Ralstonia insidiosa OX=190721 GN=A9Y 76_08395 PE=4 SV=1
MTKTVSITRRLEFDAGHRIPGHAGQCRNLHGHRYQLELTLTGEVLHNDKAADDGMILDFGDVKQLANKHLVDLWDHAFLVYRGDTKLVEFLNDMEGGHKTVVLNDVPTVENLAQVAFDILEPVFRNTFGHHLRLSKLVLYETPNCWADVKLARPHEQD

SEQ ID NO: 24792 - protein, 158 aa, Ralstonia mannitolilytica; identical to SEQ ID NO: 24791
  misc_feature (1)..(158): tr|A0A0D5AQK1|A0A0D5AQK1_9RALS 6-carboxy-5,6,7,8-tetrah ydropterin synthase OS=Ralstonia mannitolilytica OX=105 219 GN=queD PE=4 SV=1

SEQ ID NO: 24793 - protein, 158 aa, Ralstonia pickettii
  misc_feature (1)..(158): tr|B2UBF2|B2UBF2_RALPJ Queuosine biosynthesis protein Q ueD OS=Ralstonia pickettii (strain 12J) OX=402626 GN=Rp ic_1330 PE=4 SV=1
MTKTVSITRRLEFDAGHRIPGHAGQCRNLHGHRYQLELTLTGEVLHNDKAADDGMILDFGDVKQLANKHLVDLWDHAFLVYRGDTKLVEFLNDMEGGHKTVVLNDVPTVENLAQVAFDILEPVFRNAFGHHLRLSKLVLYETPNCWADVKLARPHEQD

SEQ ID NO: 24794 - protein, 158 aa, Ralstonia pickettii; identical to SEQ ID NO: 24791
  misc_feature (1)..(158): tr|A0A1C0XNA2|A0A1C0XNA2_RALPI 6-carboxytetrahydropteri n synthase QueD OS=Ralstonia pickettii OX=329 GN=queD P E=4 SV=1

SEQ ID NO: 24795 - protein, 158 aa, Ralstonia pseudosolanacearum
  misc_feature (1)..(158): tr|A0A223GLV2|A0A223GLV2_9RALS 6-carboxytetrahydropteri n synthase QueD OS=Ralstonia pseudosolanacearum OX=1310 165 GN=queD PE=4 SV=1
MTKTVSITRRLEFDAGHRIPGHAGQCRNLHGHRYQLELTLSGEVLHNDKATDDGMILDFGDVKTLAAKHLVELWDHAFLVYRGDTKVVEFLEGMEGGHKTVVLDDVPTVENLAQIAFDILEPVFRNVYGHHLRLSKLVLYETPNCWADVKLARPHEQD

SEQ ID NO: 24796 - protein, 399 aa, Ralstonia solanacearum
  misc_feature (1)..(399): tr|A0A0S4V914|A0A0S4V914_RALSL 3,4-dihydroxy-2-butanone 4-phosphate synthase OS=Ralstonia solanacearum OX=305 GN=ribB PE=3 SV=1
MGSHFCRRAAANALAGGPLQLPAMSIATVEEIIAEIRAGRMVILVDEEDRENEGDLILAADFVTPEAINFMARFGRGLICLTLTAERCRQLDLPLMVTRNGTPHGTNFTVSIEAAEGVTTGISAADRARTVQVAVARSASPDDLVQPGHIFPLMAQPGGVLMRAGHTEAGCDLASLAGLTPASVICEIMKDDGTMARLPDLVEFAREHGLKIGTIADLIQYRSRTESIVERIGERNMETQFGTFRAVAFRDHAAGRAHLALVKGTPTPATETLVRVHEPLSVLDLLECQRTTHSWSVPAALRAVQAAPTGVVVLLNCGDSPERLFTQFSALDAPQERPRSKPDPRIYGIGAQILKDVGVGKMRVLASPLKLPSMAGYDLEVTAYQSMADTPQATTAATH

SEQ ID NO: 24797 - protein, 158 aa, Ralstonia solanacearum; identical to SEQ ID NO: 24795
  misc_feature (1)..(158): tr|A0A0K1ZKI6|A0A0K1ZKI6_RALSL 6-carboxytetrahydropteri n synthase QueD OS=Ralstonia solanacearum OX=305 GN=que D PE=4 SV=1

SEQ ID NO: 24798 - protein, 158 aa, Ralstonia sp.; identical to SEQ ID NO: 24791
  misc_feature (1)..(158): tr|U3GA72|U3GA72_9RALS Queuosine biosynthesis protein Q ueD OS=Ralstonia sp. 5_2_56FAA OX=658080 GN=HMPREF0989_ 03624 PE=4 SV=1

SEQ ID NO: 24799 - protein, 158 aa, Ralstonia sp.; identical to SEQ ID NO: 24791
  misc_feature (1)..(158): tr|A0A100HX77|A0A100HX77_9RALS Uncharacterized protein OS=Ralstonia sp. NT80 OX=1218247 GN=SAMD00023378_4476 P E=4 SV=1

SEQ ID NO: 24800 - protein, 158 aa, Ralstonia syzygii
  misc_feature (1)..(158): tr|G3A838|G3A838_9RALS Putative 6-pyruvoyl tetrahydrobi opterin synthase (PtpS) (PTP synthase) OS=Ralstonia syz ygii R24 OX=907261 GN=RALSY_40920 PE=4 SV=1
MTKTVSITRRLEFDAGHRIPGHAGQCRNLHGHRYQLELTLTGEVLHNDKSTDDGMILDFGDVKTLATKHLVELWDHAFLVYRGDTKLVEFLDGMEGGHKTVVLDDVPTVENLAQIAFDILEPVFRNVYGHHLRLSKLVLYETPNCWADVKLARPHEQD

SEQ ID NO: 24801 - protein, 120 aa, Raoultella electrica
  misc_feature (1)..(120): tr|A0A514EME1|A0A514EME1_9ENTR 6-carboxy-5,6,7,8-tetrah ydropterin synthase OS=Raoultella electrica OX=1259973 GN=queD PE=3 SV=1
MSTTLFKDFTFEAAHRLPHVPEGHKCGRLHGHSFMVRLEITGEVDPHTGWIMDFAELKAAFKPTYDRLDHYYLNDIPGLENPTSEVLAKWIWQQMKPLVPLLSAVMIKETCTAGCIYRGE

SEQ ID NO: 24802 - protein, 120 aa, Raoultella ornithinolytica
  misc_feature (1)..(120): tr|A0A225TTW0|A0A225TTW0_RAOOR 6-carboxy-5,6,7,8-tetrah ydropterin synthase OS=Raoultella ornithinolytica OX=54 291 GN=CAC00_31260 PE=3 SV=1
MEIFKVFMLEAAHRLPNVPPGHKCARLHGHSFRVELKVEGEPGAQTGWIMDFGDVKAAFQPIYDRLDHHYLNDIPGLENPTSENLAVWIWNELKPSLPALSEITVHETCTSGCRYRGPTA

SEQ ID NO: 24803 - protein, 120 aa, Raoultella ornithinolytica
  misc_feature (1)..(120): tr|A0A1Y6GH86|A0A1Y6GH86_RAOOR 6-carboxy-5,6,7,8-tetrah ydropterin synthase OS=Raoultella ornithinolytica OX=54 291 GN=queD PE=3 SV=1
MSTTLFKDFTFEAAHHLPHVPEGHKCGRLHGHSFMVRLEITGEVDPHTGWIMDFAELKAAFKPTYDRLDHYYLNDIPGLENPTSEVLAKWIWQQMKPLVPLLSAVMIKETCTAGCIYRGE

SEQ ID NO: 24804 - protein, 120 aa, Raoultella planticola; identical to SEQ ID NO: 24803
  misc_feature (1)..(120): tr|A0A2X2EB03|A0A2X2EB03_RAOPL 6-carboxy-5,6,7,8-tetrah ydropterin synthase OS=Raoultella planticola OX=575 GN= queD PE=3 SV=1

SEQ ID NO: 24805 - protein, 61 aa, Raoultella planticola
  misc_feature (1)..(61): tr|A0A485BTG8|A0A485BTG8_RAOPL 6-carboxy-5,6,7,8-tetrah ydropterin synthase OS=Raoultella planticola OX=575 GN= queD PE=4 SV=1
MSTTLFKDFTFEAAHHLPHVPEGHKCGRLHGHSFMVRLEITGEVDPHTGWIMDFCRAQGRV

SEQ ID NO: 24806 - protein, 120 aa, Raoultella sp.
  misc_feature (1)..(120): tr|A0A509BNN0|A0A509BNN0_9ENTR 6-carboxy-5,6,7,8-tetrah ydropterin synthase OS=Raoultella sp. NCTC 9189 OX=2583 577 GN=queD PE=3 SV=1
MSTTLFKDFIFEAAHHLPHVPEGHKCGRLHGHSFMVRLEITGEVDPHTGWIMDFSELKAAFKPTYDRLDHYYLNDIPGLENPTSEVLSRWIWQQVKPVVPLLSAVMIKETCTAGCIYRGE

SEQ ID NO: 24807 - protein, 120 aa, Raoultella sp.
  misc_feature (1)..(120): tr|A0A4V2W6G7|A0A4V2W6G7_9ENTR 6-carboxy-5,6,7,8-tetrah ydropterin synthase OS=Raoultella sp. BIGb0138 OX=24851 15 GN=EDF73_108126 PE=3 SV=1
MSTTLFKDFTFEAAHRLPHVPEGHKCGRLHGHSFMVRLEITGEVDPHTGWIMDFAELKAAFKPTYDRLDHYYLNDIPGLENPTSEVLAKWIWEQMKPLVPLLSAVMIKETCTAGCVYRGE

SEQ ID NO: 24808 - protein, 95 aa, Raoultella terrigena
  misc_feature (1)..(95): tr|A0A3P8LYV3|A0A3P8LYV3_RAOTE 6-carboxy-5,6,7,8-tetrah ydropterin synthase OS=Raoultella terrigena OX=577 GN=q ueD PE=4 SV=1
MSTTLFKDFIFEAAHHLPHVPEGHKCGRLHGHSFMVRLEITGEVDPHTGWIMDFAELKAAFKPTYDRLDHYYLNDIPGLENPTSEVLAALDLATG

SEQ ID NO: 24809 - protein, 120 aa, Raoultella terrigena
  misc_feature (1)..(120): tr|A0A3N2DHP4|A0A3N2DHP4_RAOTE 6-carboxy-5,6,7,8-tetrah ydropterin synthase OS=Raoultella terrigena OX=577 GN=E DF76_2659 PE=3 SV=1
MSTTLFKDFIFEAAHHLPHVPEGHKCGRLHGHSFMVRLEITGEVDPHTGWIMDFAELKAAFKPTYDRLDHYYLNDIPGLENPTSEVLARWIWQQVKPVVPLLSAVMIKETCTAGCIYRGE

SEQ ID NO: 24810 - protein, 129 aa, Raphidiopsis brookii
  misc_feature (1)..(129): tr|D4TQ50|D4TQ50_9CYAN 6-carboxy-5,6,7,8-tetrahydropter in synthase OS=Raphidiopsis brookii D9 OX=533247 GN=CRD _01347 PE=3 SV=1
MPRWKLSTEFTFDSAHYIKDYKGPCGRMHGHTYKVKIEVTSSQLHSSEYCPHPVMVADFKSLRWAKKDVTQGGLDHCVLNEVLPPEYETTAEMIAKYIYDETKRRLPTEVKLKVAVSETPNSWAEYEDD

SEQ ID NO: 24811 - protein, 450 aa, Raphidiopsis brookii
  misc_feature (1)..(450): tr|D4TNQ4|D4TNQ4_9CYAN Dihydropteroate synthase OS=Raph idiopsis brookii D9 OX=533247 GN=CRD_00431 PE=4 SV=1
MLTIEYIYEIHEKYHDALQVKVEEFTIGDKKFNFNTDSAILGVINLSNDSWYRESVCLSSEQAIRRGLVLKAQGADIIDIGAESTLEKAERVEDIRQNSQILPVLRSLSQQGVLTSIETYYPQVARECLQAGANVINLTGAFDSEKIYQAVSEFDAGVIICYVQGKNVREVGDFDFGDDPTKLMYEYFANEIEIAAKFGVRKIFVDAGLGFYYKNLQDSSLRIRYQMKTFLTTFRLRKLGFPVCHALPHAFEYFGEEVRSAESFFAVLAALGKTDLFRTHEVPKVKAVLDTLYSFLIIQLLGNLGYNDDFKPESESFLETWIIGKEFRFEAAHQLPNHDGKCARLHDHSWRGVVYVAGDKLINSGVKQGMIMDYGDISKYIKPLLENYLDHYHLNESTGLANPTSEAIAKWIYEQLEPQIPGLVAVRIDETCTSQCIYSKGKVNFFGLLN

SEQ ID NO: 24812 - protein, 129 aa, Raphidiopsis curvata
  misc_feature (1)..(129): tr|A0A1Z4VCI6|A0A1Z4VCI6_9CYAN 6-carboxy-5,6,7,8-tetrah ydropterin synthase OS=Raphidiopsis curvata NIES-932 OX =1973482 GN=NIES932_06030 PE=3 SV=1
MPRWKLSTEFTFDSAHYIKDYKGPCGRMHGHTYRVKMEVTSSQLHSSEYCPHPVMVADFKSLRWAKKDVTQGGLDHCVLNDVLPPEYETTAEMIAKYIYDETKRRLPTGVKLKVAVSETPNSWAEYEDD

SEQ ID NO: 24813 - protein, 420 aa, Raphidiopsis curvata
  misc_feature (1)..(420): tr|A0A1Z4VDU6|A0A1Z4VDU6_9CYAN Uncharacterized protein OS=Raphidiopsis curvata NIES-932 OX=1973482 GN=NIES932_ 12740 PE=4 SV=1
MECIINKRAQFSASRRYWLPELGEAQNVEKFGLCAKFPGHGHNYVLFISMSGELDEYGMVLNLSDVKQVIKSEVTSELDFSYLNEVWEEFQATLPTTENIARVIWNRLAPHLPLVRVQLFEHPQLWTEYEGEKSSLTVRSHFSAAHRLAPNLSAEKYGKCTRTHGHNYHLEVTVEGEMDGRTGMIVDLGCLHEIVEREILELFDHSCINEDIPYFSTSHIVPTTENIARYMSDLLQFPISQLGVKLSRVKLFESDHLWVEYEGKDSEIFFSVATGFSAAHRLADPTLSLEKNQTIYGKCSRINGHGHNYYLEVTVQGEIDSVTGMSVDLVGLNQIIQHYVIEPMDHSFLNQDLPYFTEVVPTAENIAVYITNVVRSPIEELGAKLHKVKLIESPNNSCEIYARDIEESKVDRIYRELAAV

SEQ ID NO: 24814 - protein, 118 aa, Reichenbachiella agariperforans
  misc_feature (1)..(118): tr|A0A1M6LPM1|A0A1M6LPM1_9BACT 6-carboxy-5,6,7,8-tetrah ydropterin synthase OS=Reichenbachiella agariperforans OX=156994 GN=SAMN04488028_1011049 PE=3 SV=1
MVIFKKFAFDSAHFLPNVPEGHKCKNIHGHTYHLTVFLEGDLDEDFQWVMDFKDLKDVVKPVIDRLDHNMINDIPGLENPTAERITVWIWDQIKPHLPLLSKLELNETPTSGVVYEGK

SEQ ID NO: 24815 - protein, 135 aa, Reichenbachiella agariperforans
  misc_feature (1)..(135): tr|A0A1M6TP68|A0A1M6TP68_9BACT 6-pyruvoyltetrahydropter in/6-carboxytetrahydropterin synthase OS=Reichenbachiel la agariperforans OX=156994 GN=SAMN04488028_106124 PE=4 SV=1
MKTAVIREEHFNAAHRLHNPAWSDQQNQEVFGKCNNPNYHGHNYELHVKLIGEIDPETGYVYDIKILSDMIKRLVVDRFDHKNLNLDVAEFKDLNPTAENIVVVIYDLLREEIDEKYDIKIQLYETKRNYVEYPA

SEQ ID NO: 24816 - protein, 135 aa, Reichenbachiella faecimaris
  misc_feature (1)..(135): tr|A0A1W2GE64|A0A1W2GE64_9BACT 6-pyruvoyltetrahydropter in/6-carboxytetrahydropterin synthase OS=Reichenbachiel la faecimaris OX=692418 GN=SAMN04488029_2269 PE=4 SV=1
MRAAVYRVEHFNAAHRLHNPDWNDEKNQAVFGKCNNPNYHGHNYNLEVGLFGEINPETGYVFDLKVLSDLIEEKILNRFDHKNLNLDVPAFKDLNPTAENIVVVIYNLLRSEIDEKYDLKIKLYETERNYVQYPI

SEQ ID NO: 24817 - protein, 118 aa, Reichenbachiella faecimaris
  misc_feature (1)..(118): tr|A0A1W2G7D3|A0A1W2G7D3_9BACT 6-carboxy-5,6,7,8-tetrah ydropterin synthase OS=Reichenbachiella faecimaris OX=6 92418 GN=SAMN04488029_0938 PE=3 SV=1
MVIYKKFAFDSAHFLPNVPEGHKCKNMHGHTYNLTVYLEGDLDTELQWVMDFKELKDVVKPVIERIDHQLLNSIKGLENPTAERIVVWIWEQIQPKLPLLSKLELNETPTSGAIYEGK

SEQ ID NO: 24818 - protein, 135 aa, Reichenbachiella sp.
  misc_feature (1)..(135): tr|A0A2G5L560|A0A2G5L560_9BACT 6-pyruvoyl tetrahydrobio pterin synthase OS=Reichenbachiella sp. 5M10 OX=1889772 GN=BFP72_16290 PE=4 SV=1
MKTAVIREEHFNAAHRLHNSAWSDQQNQEIFGKCNNPNYHGHNYELHVKLIGEIDPETGYVYDIKILSDMIKRLVVDRFDHKNLNLDVAEFKDLNPTAENIVVVIYDLLREEIDEKYDIKIQLYEIKRNYVEYPA

SEQ ID NO: 24819 - protein, 118 aa, Reichenbachiella sp.
  misc_feature (1)..(118): tr|A0A2G5L3Z0|A0A2G5L3Z0_9BACT 6-carboxy-5,6,7,8-tetrah ydropterin synthase OS=Reichenbachiella sp. 5M10 OX=188 9772 GN=BFP72_11600 PE=3 SV=1
MVIFKKFAFDSAHFLPNVPEGHKCKNVHGHTYHLTVFLEGDLDEDFQWVMDFKDLKDVVKPVIDRLDHNMINDIPGLENPTAERITVWIWDQIKPHLPLLSKLELNETPTSGVVYEGK

SEQ ID NO: 24820 - protein, 287 aa, Reinekea blandensis
  misc_feature (1)..(287): tr|A4BIB2|A4BIB2_9GAMM Uncharacterized protein OS=Reine kea blandensis MED297 OX=314283 GN=MED297_00485 PE=4 SV =1
MNRLFVDNLTVIDFSYFHPRRGVVGESWIVDVELDGELNDEGMVFDFGHVKKLLKQAIDEGMDHTLVVPTQLPGLTIEEDTIQERVRIDYRPDSETLAFAYESPREAVFMIDSADVSIDSARPLLETHLNNLVPDNVSHVSLNLRTERIDGDYYHYSHGLKKHQGDCQRICHGHRSRIEIYRNNKRDVEAEAQWANTFADIYLITAEDALSSDYEGLTHVGYDAEQGRFDVWLNPNQCYTMATDTTVELIATHLAEQLANEFPEDYWKVKAFEGVAKGAIAVAGPSA

SEQ ID NO: 24821 - protein, 284 aa, Reinekea forsetii
  misc_feature (1)..(284): tr|A0A2K8KSG3|A0A2K8KSG3_9GAMM 6-pyruvoyl tetrahydropte rin synthase family protein OS=Reinekea forsetii OX=133 6806 GN=REIFOR_02550 PE=4 SV=1
MNRLFVNNLTVIDFSYFHPQRGVVGESWIVDVELVGELNDEGMVFDFGHVKKMLKAALDSGMDHTLVVPEHLPGLTIETLADGNQIHIEYRRPDGELAFVYQSPREAVFIVDSDKVTIDSARPLLESHLNTLVPANVRQVSLQLRTEEIAGDFYHYSHGLKKHQGDCQRICHGHRSRIEIYRNHKRDIESEQEWAKRFADIYLVTAEDQMPSSHRHLQHIGYDAEQGRFDVWLNPDQCYLMATDSTVELIASHIANALQQEAPEDHWRVKAFEGVQKGAIASNH

SEQ ID NO: 24822 - protein, 283 aa, Reinekea marinisedimentorum
  misc_feature (1)..(283): tr|A0A4R3I687|A0A4R3I687_9GAMM 6-pyruvoyl tetrahydropte rin synthase-like protein OS=Reinekea marinisedimentoru m OX=230495 GN=BCF53_1059 PE=4 SV=1
MNRLFVDNLTVLDFSYFHPKRGVVGESWIVDVELMGELNEEGMVFDFGHVKKLLKQALDGGLDHTLAIPTELAGVSIEMLELNDEIKVEYRDSKGELAFAYQSPRDAVYLVDAERITIDSALPLLENHLNSLVPSNVKQVKLNLRTEDINGAFYHYSHGLKKHLGDCQRICHGHRSKIEIFKNGVRDTDTEQEWAQRFADIYLITDEDLLESEHKGLNHAGYDSEQGRFDVWLNPKQCYMMPTDTTVELIATHICSSLAAEQPDYSWRVKAFEGVQKGAIAGS

SEQ ID NO: 24823 - protein, 283 aa, Reinekea sp.
  misc_feature (1)..(283): tr|A0A5C8Z473|A0A5C8Z473_9GAMM 6-pyruvoyl tetrahydropte rin reductase OS=Reinekea sp. SSH23 OX=2593301 GN=FME95 _11865 PE=4 SV=1
MNRLFVDNLTVLDFSYFHPKRGVVGESWIVDVELVGELNDEGMVFDFGHVKKLLKQALDNGMDHTLVVPTQLAGVEVIHHADSDMIEIRYHNSDNALAFAYQSPRDAVYLVDAEQVSIATALPLLQNHLNSLVPSNVKQVSLKLRAENIDAAFYHYSHGLKKHLGDCQRICHGHRSRVEIFRNGKRDFDVEQEWAQRFCDIYLITEDDLLPSEHQGLTHVGYDAEQGRFDVWLNPKQCYNMNSDTTVELIGSHICDQLKLESPNDHWLVRAFEGVQKGSIAER

SEQ ID NO: 24824 - protein, 136 aa, Reyranella soli
  misc_feature (1)..(136): tr|A0A512NGU8|A0A512NGU8_9PROT Uncharacterized protein OS=Reyranella soli OX=1230389 GN=ptpS PE=4 SV=1
MYAVEVRDHIMIAHSFKGAVFGPAQALHGATFVIDAAIMADTLDANAVVVDIGRAHEVLKGVLEPLNYKNLDTIPELAGKNTTTEFLTRHVYDRLAEAARDGKLGREGRDLKAIRVTISESHLARAWYEAPLWPGA

SEQ ID NO: 24825 - protein, 504 aa, Reyranella soli
  misc_feature (1)..(504): tr|A0A512NPG2|A0A512NPG2_9PROT Glyco_trans_2-like domai n-containing protein OS=Reyranella soli OX=1230389 GN=R SO01_80060 PE=4 SV=1
MERRGIVDQELHGSELGTRGAEKLDDACFRADVAGHGQDAPARPGLDLMPGALQLVLSTAHDRDVGTQLGEAQGAGLADTASAARDQRNCILERGRHGVSLYNATIGVEQPFMPSTFLHLSKDSFKFSAGHMTVFPDGTKERLHGHNFQVAVTIELAADEFIAFERFKQVIRAACEAWDERVLLPRLSPHLQILPSAEAEIDFVLCGDRYVMPRRDVIWLDVDTVTTEKLAAQLCKMLAGGLLPLWLDGQILSLAVEVEETAGQAASCRMSAAEVLSLNAPQQVATIPRVSIVMSCFNKAATVADSARSVLTQTHRDLELVIIDDGSTDDSPQVLEGLKSDGRVRVERTPNAGQAAALNLGLSLARGDYVGFIDADDEYYPDHVEALVDACDSGGFDVAFAGIDIVSCGTQTHVVDYYDRSRLIPISEIDCVTGIIFGRRHVLAGLGFVGDYLDIDLYQRVTTSALKWAKIDRKTYRYYFGRCEGSNSARMVEEAGLGPEKAQA

SEQ ID NO: 24826 - protein, 133 aa, Reyranella sp.
  misc_feature (1)..(133): tr|A0A5C5S8I7|A0A5C5S8I7_9PROT 6-carboxytetrahydropteri n synthase OS=Reyranella sp. CPCC 100927 OX=2599616 GN= FQU96_41245 PE=4 SV=1
MFAVEVRDHIMVAHSFRGEIFGPAQRMHGATFVVDAAFLTRDLDAAGLVVDIGRAITVLREVLEPLNYRNLDEMPDFAGKNTTTEFLARYIHDRIADGARAGKLGRPASEIDILRVTLSESHVARGWYEAPLG

SEQ ID NO: 24827 - protein, 176 aa, Reyranella sp.
  misc_feature (1)..(176): tr|A0A522Z8H3|A0A522Z8H3_9PROT 6-carboxytetrahydropteri n synthase OS=Reyranella sp. OX=1929291 GN=EPO10_21250 PE=4 SV=1
MFSLVFTRRYSMAHRLIADASSKCAIPHGHNEQVIARIQPVAPQRLDGDANMVAPFDRAKARWHRFIDDRVDHAFQLGERDPMIDWFRAHERERLSRLLVTPGDPTTEMLAACFMAKLNAFLAADGNGLHCVELTVEETPTNAVTLTGDPADVLPALGGGGWWVRADDSINDLAPS

SEQ ID NO: 24828 - protein, 285 aa, Rheinheimera nanhaiensis
  misc_feature (1)..(285): tr|I1DYL6|I1DYL6_9GAMM Uncharacterized protein OS=Rhein heimera nanhaiensis E407-8 OX=562729 GN=RNAN_2136 PE=4 SV=1
MILFVRDLTVIDFSYLCPKRGMLGESYIVDVELHGGLDQTSMVLDFSKVKKVIKQAIDNLVDHKLALPAANPALQLSQTGDSSVLRFDSLRGVIKMAAPQQAVVAIPTEQINEHSVSAFLIEQIMPLLPANVKQLNLTLRPEATTGFYYHYSHGLKKHDGNCQRIAHGHRSTIQIYTDGMLAPRLNKYWCERWQDIYLGTAEDQVAPTELKVLMAEAGDYCFAYQAAQGWFELTMPPTHCEIVPCDTTVECLAEFIAMSLKQQDASKNYKVVAYEGVGKGAIAAC

SEQ ID NO: 24829 - protein, 285 aa, Rheinheimera pacifica
  misc_feature (1)..(285): tr|A0A1H6LXS6|A0A1H6LXS6_9GAMM 6-pyruvoyl tetrahydropte rin synthase OS=Rheinheimera pacifica OX=173990 GN=SAMN 05660691_02034 PE=4 SV=1
MILFVRDLTVIDFSYLCQKRGMLGESYIVDVELHGGLDQTSMVLDFGKVKKVIKHAIDQLIDHKLAVPELSAAVKLRNAKGLQQLSFESNRGHIQMAAPAEAIVAIKADAINLQTVTEFLQHSIKPLLPANIDKLIFTLRAETVSGFFYHYSHGLKKHDGNCQRIAHGHRSTIQIYADGMLTPRLNKYWCERWQDIYLGSAEDLCNADVLQHLTAGADDYSFCYQAAQGWFELTIPKAHCEIVPCDTTVECLAEYIAAELKQLDNTRQYKVVAYEGVGKGAIAVS

SEQ ID NO: 24830 - protein, 287 aa, Rheinheimera salexigens
  misc_feature (1)..(287): tr|A0A1E7Q6L8|A0A1E7Q6L8_9GAMM Uncharacterized protein OS=Rheinheimera salexigens OX=1628148 GN=BI198_09045 PE =4 SV=1
MILFVRDLTVIDFSYLCTERGMLGESYIVDVELHGKLDDVSMVLDFSIVKKRIKTAIDKLVDHKLALPTLAAGLTVTSEQTQQLVKFDSARGQINMAAPAEAIASIATDQITPASVTEFLQQHIMPLMPSNVEKLVFTLRPEPISGFYYHYSHGLKKHDGNCQRIAHGHRSMIQIYTDGMLSPRLNKYWSERWQDIYLGSVEDVCEPKQLASIKPATETDMCFRYQAQQGWFELTMPAAHCEIISTDTTVECLAQYIVSELEQLDASKAYKVVAYEGVGKGAIAQSV

SEQ ID NO: 24831 - protein, 285 aa, Rheinheimera sp.
  misc_feature (1)..(285): tr|A0A4P6VT98|A0A4P6VT98_9GAMM Uncharacterized protein OS=Rheinheimera sp. D18 OX=2545632 GN=E0Z06_07600 PE=4 SV=1
MILFVRDLTVIDFSYLCEKRGMLGESYIVDVELHGGLDQTSMVLDFSHVKKLIKRTIDELVDHKLVLPEQSAALSLSVIDQTHILRFNSQRGLIQMAAPAQASVAIATTAINEHSITEFLQQVLKPLLPDNIDQVIFTLRPENSTSFYYHYSHGLKKHDGNCQRIAHGHRSTIQIYTDGMLAPRLNKYWSERWQDIYLATAEDVCDAAAMQHLRAGNDDYSFRYQAAQGWFELTMPKAHCEIVSCDTTVECLADYIATELKLLDQTKQYKVVAYEGVGKGAIAFS

SEQ ID NO: 24832 - protein, 217 aa, Rheinheimera sp.
  misc_feature (1)..(217): tr|A0A486XJK5|A0A486XJK5_9GAMM Potential queD like OS=R heinheimera sp. BAL341 OX=1708203 GN=BAL341_740 PE=4 SV =1
MEFVLLLILLLVIVVAMVASRFIDSGNPFPVQKKNTLFTPVERSFMQLLEKAVASEYKIVNRVKLADVMELKAGISDKARASTMQKLNAKYLDFVLCNPNDFSIVAVLDLVNNTSKDGHKAVPDWFVNGALDAAGVPYLRMKIKAGYTAADIQAAIAARLGKTVVKPEPMFKGLVKKGPTRPVRSLKPATASGNTLPAPALSPSQIKAQQTALIQAS

SEQ ID NO: 24833 - protein, 285 aa, Rheinheimera tuosuensis
  misc_feature (1)..(285): tr|A0A285I4Q7|A0A285I4Q7_9GAMM 6-pyruvoyl tetrahydropte rin synthase OS=Rheinheimera tuosuensis OX=1323745 GN=S AMN06297280_0366 PE=4 SV=1
MILFVNSLTVIDFSYLDLQRGMVGESYIVDVELHGSLDDTAMVFDFSKVKKVIKQAIDQSVDHKLALPSDCDALTLKDDSTCSMVNYKSLRGTISLASPAEAFACIPTKQINEQSVAHYLEQLIKPLLPDNVDALKIALRPEASTGFYYHYSHGLKKHDGNCQRIAHGHRSTIQIYTDGMLSPRLNKMWSERWQDSYLGSEADLCDAAALQLLNAEEDAYCFRYKATQGWFELVIPRSHCDIVPCDTTVECLADFIASELKTLDNSKTYKVVAYEGVAKGAIAQR

SEQ ID NO: 24834 - protein, 126 aa, Rhizobacter sp.
  misc_feature (1)..(126): tr|A0A0Q6X812|A0A0Q6X812_9BURK 6-carboxy-5,6,7,8-tetrah ydropterin synthase OS=Rhizobacter sp. Root1221 OX=1736 433 GN=ASC87_24540 PE=3 SV=1
MSYEVSQRFYFEAAHTLDRQVDAAGSRRIHGHTYLAEVTVAGQPDPATGMVVDLGLLRRHIQTVRDALDHAMLDDVPDLGPATLENLCAYIARGLRDVRPSVAAVRISREASGDSCLLRVDPTETM

SEQ ID NO: 24835 - protein, 368 aa, Rhizobacter sp.
  misc_feature (1)..(368): tr|A0A1M7NPG9|A0A1M7NPG9_9BURK 6-pyruvoyltetrahydropter in/6-carboxytetrahydropterin synthase OS=Rhizobacter sp . OV335 OX=1500264 GN=SAMN02787076_03120 PE=4 SV=1
MPIKTLHCAASGFESACEVSLLPAGHRSRRLHGHSFLATLRAELPPGWAAFEGGEVERLRADLESRTAQLDYRLLNDIVAQPTDENLARWIRSQLDAPGITQLGIQSTAHGGVDLDAAGQAHVWRRYLFQAAHQLPNVPLGHKCGRMHGHGFEVIVHANQDLGARDLSIDYDHLDDCWAPLHHELNYGCLNDLPGLQNPTSELMSSWIWERLKPTLPELSWITVYETASCGANFDGRHHRIWKEFTLDSALQLKHAPDGSPLRRIHGHTYTLRLHLAAPLDTLMGWTVDFGDVKTLFDPIFKALDHRPLHEIDGLADCDTATLAAWILQQARAVLPMVDRVDLYETRGCGAIVIADQAEAQAGLAIPI

SEQ ID NO: 24836 - protein, 118 aa, Rhizobiaceae bacterium
  misc_feature (1)..(118): tr|A0A4U5ZUF0|A0A4U5ZUF0_9RHIZ 6-carboxy-5,6,7,8-tetrah ydropterin synthase OS=Rhizobiaceae bacterium LC148 OX= 1120689 GN=queD PE=3 SV=1
MYRITKEFHFSASHQLTHLPADHQCARLHGHNYIVVVELAAAELDEDGFVRDYHELKPLKQYIDEKFDHRHLNEVFGHERVTSEFLARHFYDWCKARLPETSAVRVSETPKTWAEYRP

SEQ ID NO: 24837 - protein, 132 aa, Rhizobiaceae bacterium
  misc_feature (1)..(132): tr|A0A2D8JY50|A0A2D8JY50_9RHIZ Uncharacterized protein OS=Rhizobiaceae bacterium OX=1913961 GN=CML23_01200 PE= 4 SV=1
MFAVEVRDHIMIAHSLPRPVFGPAQAMHGATFVTDAAFFTADLDEDGLAVDIGAATTVLGDALKPLNYQNLDELQAFSGKVTTTEVIAKYIFDQLAEAVAEGRLGPGSGRIRKIRVTLHESHAARGWYEADL

SEQ ID NO: 24838 - protein, 120 aa, Rhizobiales bacterium
  misc_feature (1)..(120): tr|A0A3R7UAJ0|A0A3R7UAJ0_9RHIZ 6-carboxy-5,6,7,8-tetrah ydropterin synthase OS=Rhizobiales bacterium TMED83 OX= 1986857 GN=CBC43_004905 PE=3 SV=1
MKLTREILFDAAHSLAQYGPDHPNARVHGHSFRARITLSGAPDGNGQIMDFESFGDVLEKLRTRLDHNMLNDIDGLGTPTLENLCLWIWSELHNELPQISAVEVFRDSLGQSCLYEGETA

SEQ ID NO: 24839 - protein, 131 aa, Rhizobiales bacterium
  misc_feature (1)..(131): tr|A0A257ZI34|A0A257ZI34_9RHIZ Uncharacterized protein OS=Rhizobiales bacterium 12-68-15 OX=1970546 GN=B7Z30_1 0145 PE=4 SV=1
MYAVEVRDHIMIAHSFRGDMFGPAQALHGATFVVDVAFFSADLTEEGVVVDIGKAHQVLKQVLAPLSYRNLDDLPEFAGRNTTTEVLCRHIFDAMADAARAGQLGAGQLVRLKVTLHESHVARAWFEADLS

SEQ ID NO: 24840 - protein, 118 aa, Rhizobium acidisoli
  misc_feature (1)..(118): tr|A0A0N0LAW8|A0A0N0LAW8_9RHIZ 6-carboxy-5,6,7,8-tetrah ydropterin synthase OS=Rhizobium acidisoli OX=1538158 G N=AOG23_32355 PE=3 SV=1
MYRITKEFHLSASHQLDHLPADHQCARLHGHNYVVVVELSAENLNADGFVRDYHDLSPLKRYIDEALDHRHLNEVFGHSKVTSEFLAKHFYDWCKERFPETSSVRVSETPKTWAEYRP

SEQ ID NO: 24841 - protein, 118 aa, Rhizobium aethiopicum
  misc_feature (1)..(118): tr|A0A1C3YCB7|A0A1C3YCB7_9RHIZ 6-carboxy-5,6,7,8-tetrah ydropterin synthase OS=Rhizobium aethiopicum OX=1138170 GN=GA0061105_13717 PE=3 SV=1
MYRITKEFHLSASHQLDHLPADHQCARLHGHNYVVVVELSAETLNDDGFVRDYHDLSPLKRYIDEALDHRHLNDVFGHSKVTSEFLAKHLYDWCKQRFPETSSVRVSETPKTWAEYRP

SEQ ID NO: 24842 - protein, 118 aa, Rhizobium album
  misc_feature (1)..(118): tr|A0A2U2DK08|A0A2U2DK08_9RHIZ 6-carboxy-5,6,7,8-tetrah ydropterin synthase OS=Rhizobium album OX=2182425 GN=qu eD PE=3 SV=1
MKLTQAFTFEAAHRLPNVPATHKCHRMHGHSYRLELQLEGPVDPQTGFVIDFFDVEKVFGPVLERLDHHTLNDIEGLENPTAENIAVWVWDKVKPLLDNVSSVKVFETPFCWAEYEGQ

SEQ ID NO: 24843 - protein, 118 aa, Rhizobium altiplani
  misc_feature (1)..(118): tr|A0A109JB64|A0A109JB64_9RHIZ 6-carboxy-5,6,7,8-tetrah ydropterin synthase OS=Rhizobium altiplani OX=1864509 G N=AS026_15750 PE=3 SV=1
MFRITKEFHFSASHQLTHLPADHQCARLHGHNYIVVVELAAAELDENGFVRDYQELSPLKCYIDERFDHRHLNEVFGHDRVTSEYLAKHFYDWCKERLPETSAVRVSETPKTWAEYRP

SEQ ID NO: 24844 - protein, 118 aa, Rhizobium anhuiense
  misc_feature (1)..(118): tr|A0A432N7L6|A0A432N7L6_9RHIZ 6-carboxy-5,6,7,8-tetrah ydropterin synthase OS=Rhizobium anhuiense OX=1184720 G N=queD PE=3 SV=1
MYRITKEFHLSASHQLDHLPADHQCARLHGHNYIVVVELSAESLNDDGFVRDYHDLSSLKRYIDETFDHRHLNDVFGHSKVTSEFLARHFYDWCKQRFPETSSVRVSETPKTWAEYRP

SEQ ID NO: 24845 - protein, 118 aa, Rhizobium azibense
  misc_feature (1)..(118): tr|A0A4R7ZQ62|A0A4R7ZQ62_9RHIZ 6-carboxy-5,6,7,8-tetrah ydropterin synthase OS=Rhizobium azibense OX=1136135 GN =EV128_12910 PE=3 SV=1
MFRITKEFHFSASHRLTSLPADHQCGRLHGHNYVVEVELSAATLNSHGFVRDYHELAPLKSYIDETFDHRHLNEVLGHDQVTAECLAKHFYDWCKDRLPETSAVRVSETPKTWAEYRP

SEQ ID NO: 24846 - protein, 118 aa, Rhizobium azibense
  misc_feature (1)..(118): tr|A0A4R3RI04|A0A4R3RI04_9RHIZ 6-carboxy-5,6,7,8-tetrah ydropterin synthase OS=Rhizobium azibense OX=1136135 GN =EV129_101289 PE=3 SV=1
MFRITKEFHFSASHRLTSLPADHQCGRLHGHNYIVEVELSAATLNSHGFVRDYHELAPLKSYIDEHFDHRHLNEVLGHDQVTAECLAKHFYDWCKDRLPETSAVRVSETPKTWAEYRP

SEQ ID NO: 24847 - protein, 118 aa, Rhizobium esperanzae
  misc_feature (1)..(118): tr|A0A246DL25|A0A246DL25_9RHIZ 6-carboxy-5,6,7,8-tetrah ydropterin synthase OS=Rhizobium esperanzae OX=1967781 GN=B5E41_29470 PE=3 SV=1
MYRITKEFHLSASHQLDHLPVDHQCARLHGHNYVVVVELSAENLNDDGFVRDYHDLAPLKRYIDEYLDHRHLNEVFGHSKVTSEFLAKHFYDWCRERFPETSSVRVSETPKTWAEYRP

SEQ ID NO: 24848 - protein, 118 aa, Rhizobium etli
  misc_feature (1)..(118): tr|S5SN68|S5SN68_RHIET 6-carboxy-5,6,7,8-tetrahydropter in synthase OS=Rhizobium etli bv. mimosae str. Mim1 OX= 1328306 GN=queD PE=3 SV=1
MYRITKEFHLSASHQLDHLPADHQCARLHGHNYVVVVELSAENLNDDGFVRDYHDLAPLKRYIDESLDHRHLNEVFGHSKVTSEFLAKHFYDWCRERFPETSSVRVSETPKTWAEYRP

SEQ ID NO: 24849 - protein, 118 aa, Rhizobium etli
  misc_feature (1)..(118): tr|B3Q0Y1|B3Q0Y1_RHIE6 6-carboxy-5,6,7,8-tetrahydropter in synthase OS=Rhizobium etli (strain CIAT 652) OX=4919 16 GN=exsC PE=3 SV=1
MYRITKEFHLSASHQLHHLPADHQCARLHGHNYIVVVELSAESLNDDGFVRDYHDLSPLKRYIDEALDHRHLNEVFGHSKVTSEFLAKHFYDWCRERFPETSSVRVSETPKTWAEYRP

SEQ ID NO: 24850 - protein, 134 aa, Rhizobium favelukesii
  misc_feature (1)..(134): tr|W6RMQ5|W6RMQ5_9RHIZ 6-pyruvoyl-tetrahydropterin synt hase OS=Rhizobium favelukesii OX=348824 GN=LPU83_pLPU83 b_0214 PE=4 SV=1
MLGTKASAGICTGITTVCISAAELDNVGRVIDFSDMKSKLCMWLEENWDHKMLMWERDPVANALIDGIIKTGDGTTIGDGIVLVPFNPTAENIAQHLVLVVGPQQLKGTGIKLVRCEVEETRKCSAVYALQPQK

SEQ ID NO: 24851 - protein, 118 aa, Rhizobium favelukesii
  misc_feature (1)..(118): tr|W6RY29|W6RY29_9RHIZ 6-carboxy-5,6,7,8-tetrahydropter in synthase OS=Rhizobium favelukesii OX=348824 GN=exsC PE=3 SV=1
MFRITKEFHFSASHQLTHLPADHQCARLHGHNYIVVVELAAAELDENGFVRDYHELSPLKRYIDERFDHRHLNEVFGHDRVTSEYLAKHFYDWCKEWLPETSAVRVSETPKTWAEYRP

SEQ ID NO: 24852 - protein, 118 aa, Rhizobium fredii
  misc_feature (1)..(118): tr|A0A2L0HEL6|A0A2L0HEL6_RHIFR 6-carboxy-5,6,7,8-tetrah ydropterin synthase OS=Rhizobium fredii OX=380 GN=queD PE=3 SV=1
MFRITKEFHFSASHQLTSLPPEHQCARLHGHNYVVEVELSAETLNEHGFVRDYHELAPLKHYIDEAFDHRHLNDVLGHDRVTAECLAQHFYEWCKAWLPETSAVRVSETEKTWAEYRP

SEQ ID NO: 24853 - protein, 119 aa, Rhizobium fredii
  misc_feature (1)..(119): tr|A0A0B7MT60|A0A0B7MT60_RHIFH 6-carboxy-5,6,7,8-tetrah ydropterin synthase OS=Rhizobium fredii (strain HH103) OX=1117943 GN=exsC PE=3 SV=1
MMFRITKEFHFSASHQLKSLPPEHQCARLHGHNYVVEVELSAETLNEHGFVRDYHELAPLKHYIDEAFDHRHLNDVLGHDRVTAECLARHFYEWCKARLPETSAVRVSETAKTWAEYRP

SEQ ID NO: 24854 - protein, 118 aa, Rhizobium freirei
  misc_feature (1)..(118): tr|N6UXP7|N6UXP7_9RHIZ 6-carboxy-5,6,7,8-tetrahydropter in synthase OS=Rhizobium freirei PRF 81 OX=363754 GN=ex sC PE=3 SV=1
MFRITKEFHFSASHQLSHLPDDHQCARLHGHNYIVVVELSAAELDENGFVRDYHELQPLKRYIDDEFDHRHLNDVLGHDRVTSEYLAKHFYDWCKAHLPETSAVRVSETPKTWAEYRP

SEQ ID NO: 24855 - protein, 118 aa, Rhizobium gallicum
  misc_feature (1)..(118): tr|A0A1L5NXU7|A0A1L5NXU7_9RHIZ 6-carboxy-5,6,7,8-tetrah ydropterin synthase OS=Rhizobium gallicum OX=56730 GN=q ueD PE=3 SV=1
MFRITKEFHFSASHRLTSLPADHQCGRLHGHNYVVEVELSAATLNSHGFVRDYHELAPLKSYIDESFDHRHLNEVLGHDQVTAECLAKHFYDWCKDRLPETSAVRVSETPKTWAEYRP

SEQ ID NO: 24856 - protein, 118 aa, Rhizobium gallicum
  misc_feature (1)..(118): tr|A0A0B4XDX6|A0A0B4XDX6_9RHIZ 6-carboxy-5,6,7,8-tetrah ydropterin synthase OS=Rhizobium gallicum bv. gallicum R602 OX=1418105 GN=queD PE=3 SV=1
MFRITKEFHFSASHRLTTLPADHQCGRLHGHNYVVEVELSAATLNSHGFVRDYHELAPLKSYIDESFDHRHLNEVLGHDQVTAECLAKHFYDWCKDRLPETSAVRVSETPKTWAEYRP

SEQ ID NO: 24857 - protein, 118 aa, Rhizobium grahamii
  misc_feature (1)..(118): tr|A0A370KL33|A0A370KL33_9RHIZ 6-carboxy-5,6,7,8-tetrah ydropterin synthase OS=Rhizobium grahamii OX=1120045 GN =B5K06_20275 PE=3 SV=1
MFRITKEFHFSASHQLTHLPADHQCARLHGHNYIVVVELASAELDENGFVRDYHELSPLKSYIDERFDHRHLNEVFGHDRVTSEYLAKHFYDWCKERLPETSAVRVSETPKTWAEYRP

SEQ ID NO: 24858 - protein, 118 aa, Rhizobium grahamii
  misc_feature (1)..(118): tr|S3HAX2|S3HAX2_9RHIZ 6-carboxy-5,6,7,8-tetrahydropter in synthase OS=Rhizobium grahamii CCGE 502 OX=990285 GN =RGCCGE502_25903 PE=3 SV=1
MFRITKEFHFSASHQLTHLPADHQCARLHGHNYIVVVELAAAELDENGFVRDYHELSPLKRYIDERFDHRHLNEVFGHDRVTSEYLARHFYDWCKERLPETSAVRVSETPKTWAEYRP

SEQ ID NO: 24859 - protein, 118 aa, Rhizobium hainanense
  misc_feature (1)..(118): tr|A0A1C3W2F0|A0A1C3W2F0_9RHIZ 6-carboxy-5,6,7,8-tetrah ydropterin synthase OS=Rhizobium hainanense OX=52131 GN =GA0061100_110119 PE=3 SV=1
MYRITKEFHFSASHQLSHLPDDHQCARMHGHNYIVVVELSAAELDENGFVRDYHELQPLKRYIDETFDHRHLNEVFGHDRVTSEYLARHFYDWCKERLPEASAVRVSETPKTWAEYRP

SEQ ID NO: 24860 - protein, 118 aa, Rhizobium hainanense
  misc_feature (1)..(118): tr|A0A1C3WCV4|A0A1C3WCV4_9RHIZ 6-carboxy-5,6,7,8-tetrah ydropterin synthase OS=Rhizobium hainanense OX=52131 GN =GA0061100_11577 PE=3 SV=1
MKITQAFTFEAAHRLPHVPSTHKCHRMHGHSYRVELQLKGIVDAKTGFVIDFFDVEKVFGPVLESLDHHTLNDIEGLENPTAENIAVWIWKKVKPLLDELNSVKVFETPACWAEYEGE

SEQ ID NO: 24861 - protein, 118 aa, Rhizobium hidalgonense
  misc_feature (1)..(118): tr|A0A2A6K5P6|A0A2A6K5P6_9RHIZ 6-carboxy-5,6,7,8-tetrah ydropterin synthase OS=Rhizobium hidalgonense OX=153815 9 GN=queD PE=3 SV=1
MYRITKEFHLSASHQLDHLPADHQCARLHGHNYIVVVELAAESLNDDGFVRDYHDLSPLKRYIDEALDHRHLNEVFGHSKVTSEFLAKHFYDWCKQRFPETSSVRISETPKTWAEYRP

SEQ ID NO: 24862 - protein, 182 aa, Rhizobium ipomoeae
  misc_feature (1)..(182): tr|A0A4V4HM26|A0A4V4HM26_9RHIZ 6-carboxytetrahydropteri n synthase OS=Rhizobium ipomoeae OX=1210932 GN=FAA97_18 430 PE=4 SV=1
MADGHLITREIGIDAAHRIPFHASKCCNLHGHRYRIAATCSGPLFDAGEQEGMVLDFGFLKAEMMEQIDAACDHGMMIWIDDPWIRSFLALPESPQGVATLEQYRAEMRETGQKLIMGPFGKTLLMTTVPTAENLARHWFNLLAPRVKARSGNQATLLRIDVWETPNCVATYTAPQVNGGSV

SEQ ID NO: 24863 - protein, 132 aa, Rhizobium ipomoeae
  misc_feature (1)..(132): tr|A0A4S8NXK6|A0A4S8NXK6_9RHIZ 6-carboxytetrahydropteri n synthase OS=Rhizobium ipomoeae OX=1210932 GN=FAA97_17 790 PE=4 SV=1
MFAVEVRDHIMIAHSLQRPVFGPAQGMHGATFVVDAAFFTKDVDEDGLAVDIGAATTVLAEVLKPLNYQNLDEHAAFAGKISTTEVIAKHIFDELAAAVREKRLGAGSHRICRLRVLLHESHAARGWYEADL

SEQ ID NO: 24864 - protein, 118 aa, Rhizobium jaguaris
  misc_feature (1)..(118): tr|A0A387FWB4|A0A387FWB4_9RHIZ 6-carboxy-5,6,7,8-tetrah ydropterin synthase OS=Rhizobium jaguaris OX=1312183 GN =queD PE=3 SV=1
MFRITKQFHFSASHQLSHLPADHQCARLHGHNYIVEVELSAAELDADGFVRDYHELAPLKRYIDERFDHRHLNEVLGHDRVTSEYLAKHFYDWCKQRLPETSAVRVSETPRTWAEYRP

SEQ ID NO: 24865 - protein, 119 aa, Rhizobium jaguaris
  misc_feature (1)..(119): tr|A0A387G807|A0A387G807_9RHIZ 6-carboxy-5,6,7,8-tetrah ydropterin synthase OS=Rhizobium jaguaris OX=1312183 GN =queD PE=3 SV=1
MKITQAFTFEAAHRLPHVPAAHKCHRIHGHSYRIELQLEGEVDPNTGFVVDFFDVEKVFGPVIEQLDHHTLNEIPGLENPTAENIAVWIWEQIKPLVGRMRSVKVFETPFCWAEYDGKR

SEQ ID NO: 24866 - protein, 118 aa, Rhizobium laguerreae
  misc_feature (1)..(118): tr|A0A4Q9ZXD1|A0A4Q9ZXD1_9RHIZ 6-carboxy-5,6,7,8-tetrah ydropterin synthase OS=Rhizobium laguerreae OX=1076926 GN=queD PE=3 SV=1
MYRITKEFHLSASHQLDHLPAEHQCARLHGHNYIVVVELAAESLNDDGFVRDYHDLSPLKRYIDEAFDHRHLNDVFGHSKVTSEFLARHFYDWCKQRFPETSSVRVSETPKTWAEYRP

SEQ ID NO: 24867 - protein, 118 aa, Rhizobium laguerreae
  misc_feature (1)..(118): tr|A0A1S9H288|A0A1S9H288_9RHIZ 6-carboxy-5,6,7,8-tetrah ydropterin synthase OS=Rhizobium laguerreae OX=1076926 GN=BS630_04450 PE=3 SV=1
MYRITKEFHLSASHQLDHLPAEHQCARLHGHNYIVVVELAAESLNDDGFVRDYHDLSPLKRYIDETFDHRHLNDVFGHSKVTSEFLARHFYDWCKQRFPETSSVRVSETPKTWAEYRP

SEQ ID NO: 24868 - protein, 118 aa, Rhizobium leguminosarum
  misc_feature (1)..(118): tr|J0BPK1|J0BPK1_RHIL1 6-carboxy-5,6,7,8-tetrahydropter in synthase OS=Rhizobium leguminosarum bv. viciae (stra in WSM1455) OX=755176 GN=Rleg5DRAFT_4000 PE=3 SV=1
MYRITKEFHLSASHQLDHLPADHQCARLHGHNYIVVVELAAESLNDDGFVRDYHDLSPLKRYIDEALDHRHLNDVFGHSKVTSEFLAKHFYDWCKQHFPETSSVRVSETPKTWAEYRP

SEQ ID NO: 24869 - protein, 118 aa, Rhizobium leguminosarum
  misc_feature (1)..(118): tr|A0A3E1BDG2|A0A3E1BDG2_RHILT 6-carboxy-5,6,7,8-tetrah ydropterin synthase OS=Rhizobium leguminosarum bv. trif olii OX=386 GN=B5K10_20375 PE=3 SV=1
MYRITKEFHLSASHQLDHLPADHQCARLHGHNYIVVVELSAESLNDDGFVRDYHDLSPLKRYIDETLDHRHLNEVFGHSKVTSEFLAKHFYDWCRERFPETSSVRVSETPKTWAEYRP

SEQ ID NO: 24870 - protein, 118 aa, Rhizobium loessense
  misc_feature (1)..(118): tr|A0A1G4U8E1|A0A1G4U8E1_9RHIZ 6-carboxy-5,6,7,8-tetrah ydropterin synthase OS=Rhizobium loessense OX=158890 GN =SAMN02927900_06352 PE=3 SV=1
MFRITKEFHFSASHVLTSLPAEHQCGRLHGHNYVVEVELSAATLNSHGFVRDYHELAPLKSYIDEYFDHRHLNEVLGHDQVTAECLAKHFYDWCKDRLPETSAVRVSETPKTWAEYRP

SEQ ID NO: 24871 - protein, 118 aa, Rhizobium loti
  misc_feature (1)..(118): tr|A0A117N390|A0A117N390_RHILI 6-carboxy-5,6,7,8-tetrah ydropterin synthase OS=Rhizobium loti OX=381 GN=AU467_2 3875 PE=3 SV=1
MYTIAKRYSFSASHVIGGLPAQHPCARLHGHNYEVEVVLQSAELDPVGFVRDFRELSPLKAFIDEKLDHRHLNDVLGHDQTTSEVLAKWIYDWCSALWPEVAAVRVSETPKTWAEYRP

SEQ ID NO: 24872 - protein, 118 aa, Rhizobium loti
  misc_feature (1)..(118): tr|A0A1B4YS88|A0A1B4YS88_RHILI 6-carboxy-5,6,7,8-tetrah ydropterin synthase OS=Rhizobium loti OX=381 GN=MLTONO_ 5139 PE=3 SV=1
MFRITKEFHFSASHQLTSLPPDHQCARLQGHNYIVVVELSGGELDEHGFVRDYQDLAAFKHYIDGTFDHRHLNDVLGHDHATAECLARHFYDWCKVRLPETSAVRVSETPKTWAEYRP

SEQ ID NO: 24873 - protein, 172 aa, Rhizobium lusitanum
  misc_feature (1)..(172): tr|A0A1C3XIB6|A0A1C3XIB6_9RHIZ 6-pyruvoyltetrahydropter in/6-carboxytetrahydropterin synthase OS=Rhizobium lusi tanum OX=293958 GN=GA0061101_14218 PE=4 SV=1
MTSSITMPDDRVTSTRKHIETYRSTKSYDHNEGLSCCFRQWRADSHCQLIHGYALAVKFVFATHHLDERNWCFDFGALKEVKAWLHSLLDHTMIVAADDPELPRFHNLADAKLVDLRILPGVGCEALARYVHDHVATIAREKTNGRVWLESVEIREHAGNSAIYELHSHTPH

SEQ ID NO: 24874 - protein, 118 aa, Rhizobium lusitanum
  misc_feature (1)..(118): tr|A0A1C3WJR9|A0A1C3WJR9_9RHIZ 6-carboxy-5,6,7,8-tetrah ydropterin synthase OS=Rhizobium lusitanum OX=293958 GN =GA0061101_112132 PE=3 SV=1
MFRITKEFHFSASHQLAHLPDDHQCARLHGHNYIVVVELSAAELDGNGFVRDYHELQPLKRYIDDNFDHRHLNDVLGHGRVTSECLARHFYDWCKARLPETSAMRVSETPKTWAEYRP

SEQ ID NO: 24875 - protein, 118 aa, Rhizobium meliloti
  misc_feature (1)..(118): tr|A0A3S5NA08|A0A3S5NA08_RHIML 6-carboxy-5,6,7,8-tetrah ydropterin synthase OS=Rhizobium meliloti OX=382 GN=que D PE=3 SV=1
MFRITKEFHFSASHQLKSLPAEHQCARLHGHNYIVEVELSGETLNEHGFVRDYHELAPLKQYIDECFDHRHLNDVLGHDRVTAECLAKHFYEWCQARLPETTAVRVSETAKTWAEYRP

SEQ ID NO: 24876 - protein, 118 aa, Rhizobium meliloti
  misc_feature (1)..(118): tr|A0A2J0Z7Z4|A0A2J0Z7Z4_RHIML 6-carboxy-5,6,7,8-tetrah ydropterin synthase OS=Rhizobium meliloti OX=382 GN=que D PE=3 SV=1
MFRITKEFHFSASHQLKSLPAEHQCARLHGHNYIVEVELSGERLNEHGFVRDYHELAPLKQYIDECFDHRHLNDVLGHDRVTAECLAQHFYEWCRARLPETTAVRVSETAKTWAEYRP

SEQ ID NO: 24877 - protein, 118 aa, Rhizobium mesoamericanum
  misc_feature (1)..(118): tr|K0Q1T8|K0Q1T8_9RHIZ 6-carboxy-5,6,7,8-tetrahydropter in synthase OS=Rhizobium mesoamericanum STM3625 OX=1211 777 GN=ygcM PE=3 SV=1
MFRITKEFHFSASHQLTHLPSDHQCARLHGHNYIVVVELAAAELDENGFVRDYHELSPLKRYIDERFDHRHLNEVFGHDRVTSEYLAKHFYDWCKGRLPETSAVRVSETPKTWAEYRP

SEQ ID NO: 24878 - protein, 118 aa, Rhizobium miluonense
  misc_feature (1)..(118): tr|A0A1C3VN67|A0A1C3VN67_9RHIZ 6-carboxy-5,6,7,8-tetrah ydropterin synthase OS=Rhizobium miluonense OX=411945 G N=GA0061102_101559 PE=3 SV=1
MFRITKEFHFSASHQLSHLPDDHQCARLHGHNYIVVVELSAAELDGNGFVRDYHELQPLKRYIDDEFDHRHLNDVLGHDRVTSECLAKHFYDWCKVRLPETSAVRVSETPKTWAEYRP

SEQ ID NO: 24879 - protein, 118 aa, Rhizobium mongolense
  misc_feature (1)..(118): tr|A0A559TH48|A0A559TH48_9RHIZ 6-carboxy-5,6,7,8-tetrah ydropterin synthase OS=Rhizobium mongolense USDA 1844 O X=1079460 GN=BCL32_2217 PE=3 SV=1
MFRITKEFHFSASHRLTSLPADHQCGRLHGHNYVVEVELSAATLNSHGFVRDYHELAPLKSYIDEYFDHRHLNEVLGHDQVTAECLAKHFYDWCKDRLPETSAVRVSETPKTWAEYRP

SEQ ID NO: 24880 - protein, 118 aa, Rhizobium multihospitium
  misc_feature (1)..(118): tr|A0A1C3XA72|A0A1C3XA72_9RHIZ 6-carboxy-5,6,7,8-tetrah ydropterin synthase OS=Rhizobium multihospitium OX=4107 64 GN=GA0061103_0539 PE=3 SV=1
MYRITKEFHFSASHQLSHLPDDHQCARMHGHNYIVVVELSATELDRNGFVRDYHELQPLKRYIDETFDHRHLNDVFGHDRVTSEYLAKHFYDWCKERLPEASAVRVSETPKTWAEYRP

SEQ ID NO: 24881 - protein, 118 aa, Rhizobium nepotum
  misc_feature (1)..(118): tr|A0A0D8KJS3|A0A0D8KJS3_9RHIZ 6-carboxy-5,6,7,8-tetrah ydropterin synthase OS=Rhizobium nepotum 39/7 OX=136841 8 GN=RS75_04380 PE=3 SV=1
MFRITKEFHFSASHQLKSLPADHQCARLHGHNYIVEVELSGEELNEHGFVRDYHELAPLKHYIDDHFDHRHLNDVLGHDRVTAECLAKHFYDWCKTSLPETSAVRVSETAKTWAEYRP

SEQ ID NO: 24882 - protein, 132 aa, Rhizobium oryzae
  misc_feature (1)..(132): tr|A0A1X7EFB6|A0A1X7EFB6_9RHIZ 6-pyruvoyl-tetrahydropte rin synthase OS=Rhizobium oryzae OX=464029 GN=SAMN02982 989_1209 PE=4 SV=1
MFAVEVRDHIMIAHSLPRPVFGPAQGLHGATFVVDAAFFTTDLDDDGLAVDIGLATEILKEVLAPLNYQNLDALDIFAGRVTTTEFLSRHIFDGIAEAIDNGRLGEGGKRIRKLRVMLHESHTARGWYEAEL

SEQ ID NO: 24883 - protein, 149 aa, Rhizobium oryziradicis
  misc_feature (1)..(149): tr|A0A1Q8ZTL3|A0A1Q8ZTL3_9RHIZ Uncharacterized protein OS=Rhizobium oryziradicis OX=1867956 GN=BJF95_16960 PE= 4 SV=1
MYRSTKTYDHSEGLSCCFRQWRAEHSHCKLLHGYALAFKFVFATQQLDQHNWCYDFGGMKQVRQWLHDQFDHTMLVSEDDPELATFVELANKGLVDLRIMPAVGCEQTARFCYEYVSALVGRETDGRVWLESVEVREHGGNSALFEIPR

SEQ ID NO: 24884 - protein, 132 aa, Rhizobium oryziradicis
  misc_feature (1)..(132): tr|A0A1Q8ZWJ2|A0A1Q8ZWJ2_9RHIZ Uncharacterized protein OS=Rhizobium oryziradicis OX=1867956 GN=BJF95_04625 PE= 4 SV=1
MFAVEVRDHIMIAHSLPRPVFGPAQGMHGATFVVDAAFFTRDLDEDGLGVDIGAATTVLADVLKPLNYQNLDDLAVFKDTVTTTEVIAKYIFDQLADAVAAKRLGPGSHRITRLKITLHESHAARAWYEADL

SEQ ID NO: 24885 - protein, 118 aa, Rhizobium phaseoli
  misc_feature (1)..(118): tr|A0A0M3GRQ9|A0A0M3GRQ9_9RHIZ 6-carboxy-5,6,7,8-tetrah ydropterin synthase OS=Rhizobium phaseoli Ch24-10 OX=11 28399 GN=exsC PE=3 SV=1
MYRITKEFHLSASHQLDHLPADHQCARLHGHNYIVVVELSAETLNDHGFVRDYHDLSPLKRYIDEALDHRHLNEVFGHSKVTSEFLAKHFYDWCRERFPETSSVRVSETPKTWAEYRP

SEQ ID NO: 24886 - protein, 118 aa, Rhizobium phaseoli; identical to SEQ ID NO: 24849
  misc_feature (1)..(118): tr|A0A192TFR3|A0A192TFR3_9RHIZ 6-carboxy-5,6,7,8-tetrah ydropterin synthase OS=Rhizobium phaseoli OX=396 GN=que D PE=3 SV=1

SEQ ID NO: 24887 - protein, 118 aa, Rhizobium pisi
  misc_feature (1)..(118): tr|A0A3R9A768|A0A3R9A768_9RHIZ 6-carboxy-5,6,7,8-tetrah ydropterin synthase OS=Rhizobium pisi OX=574561 GN=queD PE=3 SV=1
MYRITKEFHLSASHQLDHLPADHQCARLHGHNYVVVVELAAESLNDDGFVRDYHDLSPLKRYIDETLDHRHLNDVFGHSKVTSEFLAKHFYDWCKQRFPETSSVRISETPKTWAEYRP

SEQ ID NO: 24888 - protein, 118 aa, Rhizobium pusense; identical to SEQ ID NO: 17156
  misc_feature (1)..(118): tr|A0A1L9D043|A0A1L9D043_9RHIZ 6-carboxy-5,6,7,8-tetrah ydropterin synthase OS=Rhizobium pusense OX=648995 GN=B A725_09240 PE=3 SV=1

SEQ ID NO: 24889 - protein, 118 aa, Rhizobium radiobacter; identical to SEQ ID NO: 17139
  misc_feature (1)..(118): tr|A0A024ITY2|A0A024ITY2_RHIRD 6-carboxy-5,6,7,8-tetrah ydropterin synthase OS=Rhizobium radiobacter OX=358 GN= queD PE=3 SV=1

SEQ ID NO: 24890 - protein, 118 aa, Rhizobium radiobacter
  misc_feature (1)..(118): tr|A0A1V2AI04|A0A1V2AI04_RHIRD 6-carboxy-5,6,7,8-tetrah ydropterin synthase OS=Rhizobium radiobacter OX=358 GN= BV900_20990 PE=3 SV=1
MFRITKEFHFSASHQLKSLPADHQCARLHGHNYIVEVELSGEELNEHGFVRDYHELAPLKRYIDEHFDHRHLNDVLGHDRVTAECLAKHFYDWCKTSLPETSAVRVSETAKTWAEYRP

SEQ ID NO: 24891 - protein, 132 aa, Rhizobium rhizosphaerae
  misc_feature (1)..(132): tr|A0A1Q9AK75|A0A1Q9AK75_9RHIZ Uncharacterized protein OS=Rhizobium rhizosphaerae OX=1672749 GN=BJF92_08400 PE =4 SV=1
MFAVEVRDHIMIAHSLPRPVFGPAQGMHGATFVVDAAFFTRDVDEDGLAVDIGAATTVLAEVLKPLNYQNLDTLDVFKGKVSTTEVIAKHVFDALAAAVKAERLGPGSHRICRLKVTLHESHAARGWYEADL

SEQ ID NO: 24892 - protein, 132 aa, Rhizobium rosettiformans
  misc_feature (1)..(132): tr|A0A4S8PR62|A0A4S8PR62_9RHIZ 6-carboxytetrahydropteri n synthase OS=Rhizobium rosettiformans W3 OX=538378 GN= FAA86_16965 PE=4 SV=1
MFAVEVRDHIMIAHSLPRPVFGPAQGMHGATFVVDAAFFTKDVDEDGLAVDIGAATTVLAEVLKPLNYQNLDEVEAFKGKVSTTEVIAKHIFDQLAKAVSDKRLGAGSHRICRLKVTLHESHAARGWYEADL

SEQ ID NO: 24893 - protein, 118 aa, Rhizobium selenitireducens
  misc_feature (1)..(118): tr|A0A376ABP8|A0A376ABP8_9RHIZ 6-carboxy-5,6,7,8-tetrah ydropterin synthase OS=Rhizobium selenitireducens ATCC BAA-1503 OX=1336235 GN=RHIZ70_866 PE=3 SV=1
MFRITKEFHFSASHQLKSLPDDHPCARLHGHNYVVEVELAAEMLDERGFVRDYHDLAVLKRYLDETFDHRHLNDVLGHGTITAEWLARHLFDWCRMNFPETAAVRVSETPKTWAEYRP

SEQ ID NO: 24894 - protein, 132 aa, Rhizobium selenitireducens
  misc_feature (1)..(132): tr|A0A376AL81|A0A376AL81_9RHIZ Uncharacterized protein OS=Rhizobium selenitireducens ATCC BAA-1503 OX=1336235 GN=RHIZ70_4283 PE=4 SV=1
MFAVEVRDHIMIAHSLPRPVFGPAQGMHGATFVVDAAFFTRDLDEDGLAVDIGAATNVLGEVLKPLNYQNLDELPAFSGKVTTTEVVAKHIFDALARAVADRKLGPGSHRICRLKVTLHESHTARGWYEADL

SEQ ID NO: 24895 - protein, 132 aa, Rhizobium smilacinae
  misc_feature (1)..(132): tr|A0A5C4XGT9|A0A5C4XGT9_9RHIZ 6-carboxytetrahydropteri n synthase OS=Rhizobium smilacinae OX=1395944 GN=FHP24_ 21035 PE=4 SV=1
MFAVEVRDHMMIAHSLPREVFGPAQAMHGATFVVDAAFMTEDLDEDGLGVDIGLATTVLKEAVAPLNYKNLDELDVFRGKVTTTEVLAKHIFDDLRRRIEAGELGTGGKRIRRLKITLHESHVARAWYEAAI

SEQ ID NO: 24896 - protein, 118 aa, Rhizobium sophoriradicis
  misc_feature (1)..(118): tr|A0A2A5KJ88|A0A2A5KJ88_9RHIZ 6-carboxy-5,6,7,8-tetrah ydropterin synthase OS=Rhizobium sophoriradicis OX=1535 245 GN=queD PE=3 SV=1
MYRITKEFHLSASHQLDHLPADHQCARLHGHNYIVVVELAAESLNDDGFVRDYHDLSPLKRYIDEALDHRHLNEVFGHSKVTSEFLAKHFYDWCKQRFPETSSVRVSETPKTWAEYRP

SEQ ID NO: 24897 - protein, 118 aa, Rhizobium sophoriradicis
  misc_feature (1)..(118): tr|A0A3R9B124|A0A3R9B124_9RHIZ 6-carboxy-5,6,7,8-tetrah ydropterin synthase OS=Rhizobium sophoriradicis OX=1535 245 GN=queD PE=3 SV=1
MYRITKEFHLSASHQLDYLPADHQCARLHGHNYIVVVELAAESLNDDGFVRDYHDLSPLKRYIDEALDHRHLNEVFGHSKVTSEFLAKHFYDWCKQRFPETSSVRVSETPKTWAEYRP

SEQ ID NO: 24898 - protein, 118 aa, Rhizobium sp.; identical to SEQ ID NO: 17156
  misc_feature (1)..(118): tr|U4Q5C5|U4Q5C5_9RHIZ 6-carboxy-5,6,7,8-tetrahydropter in synthase OS=Rhizobium sp. IRBG74 OX=424182 GN=queD P E=3 SV=1

SEQ ID NO: 24899 - protein, 132 aa, Rhizobium sp.
  misc_feature (1)..(132): tr|A0A2S6BH74|A0A2S6BH74_9RHIZ 6-carboxytetrahydropteri n synthase OS=Rhizobium sp. KAs_5_22 OX=2067668 GN=C007 5_14390 PE=4 SV=1
MFAVEVRDHIMIAHSLPRPVFGPAQGMHGATFVVDAAFFTRDVDEDGLAVDIGAATTVLGEVLKPLNYQNLDELSIFTGKITTTEVIAKHIFDALARAVADKKLGPGSHRICRLKVTLHESHAARGWYEADL

SEQ ID NO: 24900 - protein, 132 aa, Rhizobium straminoryzae
  misc_feature (1)..(132): tr|A0A549T7C1|A0A549T7C1_9RHIZ 6-carboxytetrahydropteri n synthase OS=Rhizobium straminoryzae OX=1387186 GN=FNA 46_14225 PE=4 SV=1
MFAVEVRDHIMIAHSLPRPVFGPAQGMHGATFVVDAAFFTRDVDEDGLAVDIGLATQVLSAVLKPLNYQNLDELAVFKGRITTTEVLAKHIFDALKEAVSEGRLGPGSARICRLRVLLHESHAARGWYEADL

SEQ ID NO: 24901 - protein, 118 aa, Rhizobium straminoryzae
  misc_feature (1)..(118): tr|A0A549SQX3|A0A549SQX3_9RHIZ 6-carboxy-5,6,7,8-tetrah ydropterin synthase OS=Rhizobium straminoryzae OX=13871 86 GN=queD PE=3 SV=1
MYRITKEFHFSASHQLAHLPADHQCARLHGHNYIVVVELAGETLNADGFVRDYHELKVLKTYIDEHFDHRHLNEVLGSSMSTAENLARHFYDWCKARFPETAAVKVSETPKTWAEYRP

SEQ ID NO: 24902 - protein, 118 aa, Rhizobium sullae
  misc_feature (1)..(118): tr|A0A4R3QPH2|A0A4R3QPH2_RHISU 6-carboxy-5,6,7,8-tetrah ydropterin synthase OS=Rhizobium sullae OX=50338 GN=EV1 32_101350 PE=3 SV=1
MFRITKEFHFSASHQLTSLPTDHQCARLHGHNYVVEVELAAVALNSHGFVRDYHELAPLKRYIDECFDHRHLNEVLGHDQVTAECLAKHFYDWCKERLPETSAVRVSETPKTWAEYRP

SEQ ID NO: 24903 - protein, 118 aa, Rhizobium sullae
  misc_feature (1)..(118): tr|A0A2N0DF75|A0A2N0DF75_RHISU 6-carboxy-5,6,7,8-tetrah ydropterin synthase OS=Rhizobium sullae OX=50338 GN=que D PE=3 SV=1
MFRITKEFHFSASHQLTSLPTDHQCARLHGHNYVVEVELGAVALNSHGFVRDYHELAPLKRYIDECFDHRHLNEVLGHDQVTAECLAKHFYDWCKERLPETSAVRVSETPKTWAEYRP

SEQ ID NO: 24904 - protein, 118 aa, Rhizobium taibaishanense
  misc_feature (1)..(118): tr|A0A1Q9A4W9|A0A1Q9A4W9_9RHIZ 6-carboxy-5,6,7,8-tetrah ydropterin synthase OS=Rhizobium taibaishanense OX=8871 44 GN=BJF91_21625 PE=3 SV=1
MYRITKEFHFSASHQLKGLPADHQCARLHGHNYVVEVELSGEELNEHGFLRDYHELKVLKTYIDECFDHRHLNEVLGHDKTTAECLARHFYDWCKQRFTETSAVRVSETQKTWAEYRP

SEQ ID NO: 24905 - protein, 118 aa, Rhizobium tibeticum
  misc_feature (1)..(118): tr|A0A1H8U0E4|A0A1H8U0E4_9RHIZ 6-carboxy-5,6,7,8-tetrah ydropterin synthase OS=Rhizobium tibeticum OX=501024 GN =queD PE=3 SV=1
MFRITKEFHFSASHQLTHLPADHQCARLHGHNYIVVVELAAAELDENGFVRDYHELSPLKRYIDERIDHRHLNEVFGHDRVTSEYLAKHFYDWCKEWLPETSAVRVSETPKTWAEYRP

SEQ ID NO: 24906 - protein, 119 aa, Rhizobium tropici
  misc_feature (1)..(119): tr|L0LUB6|L0LUB6_RHITR 6-carboxy-5,6,7,8-tetrahydropter in synthase OS=Rhizobium tropici CIAT 899 OX=698761 GN= queD PE=3 SV=1
MMYRITKEFHFSASHQLSHLPADHQCARLHGHNYIVVVELSAGELDENGFVRDYHELQPLKRYIDEGFDHRHLNDVFGHDRVTSEYLAKHFYDWCKERLPQTSAVRVSETPKTWAEYRP

SEQ ID NO: 24907 - protein, 118 aa, Rhizobium tropici
  misc_feature (1)..(118): tr|A0A5B0VRT9|A0A5B0VRT9_RHITR 6-carboxy-5,6,7,8-tetrah ydropterin synthase OS=Rhizobium tropici OX=398 GN=queD PE=3 SV=1
MFRITKEFHFSASHQLSHLPDDHQCARMHGHNYIVVVELSADELDGNGFVRDYHELQPLKRYIDNEFDHRHLNDVLGHDRVTSEYLAKHFYDWCKSRLPETSAVRVSETPKTWAEYRP

SEQ ID NO: 24908 - protein, 118 aa, Rhizobium tubonense
  misc_feature (1)..(118): tr|A0A2W4ESC7|A0A2W4ESC7_9RHIZ 6-carboxy-5,6,7,8-tetrah ydropterin synthase OS=Rhizobium tubonense OX=484088 GN =queD PE=3 SV=1
MYRITKEFHFSASHQLRALPLEHQCARLHGHNYIVEVELSAPELNEHGFVRDYQELAALKHYIDDSFDHRHLNEVLAHDQVTAECLAKHFYDWCKARLPETSAVRVSETTKTWAEYRP

SEQ ID NO: 24909 - protein, 118 aa, Rhizobium tumorigenes
  misc_feature (1)..(118): tr|A0A2W4AXJ5|A0A2W4AXJ5_9RHIZ 6-carboxy-5,6,7,8-tetrah ydropterin synthase OS=Rhizobium tumorigenes OX=2041385 GN=queD PE=3 SV=1
MFRITKEFHFSASHQLTRLPADHQCARLHGHNYIVIVELSSPDLNEDGFVRDYHELAPLKRYIDDTFDHRHLNDVLGHDAVTSEYLAKHFFDWCRAILPETSAVRVSETPKTWAEYRP

SEQ ID NO: 24910 - protein, 118 aa, Rhizobium vallis
  misc_feature (1)..(118): tr|A0A432PAS5|A0A432PAS5_9RHIZ 6-carboxy-5,6,7,8-tetrah ydropterin synthase OS=Rhizobium vallis OX=634290 GN=qu eD PE=3 SV=1
MYRITKEFHLSASHQLNHLPADHQCARLHGHNYVVVVELAAETLNDDGFVRDYHDLSPLKRYIDEALDHRHLNDVFGHSKVTSEFLAKHFYDWCKQRFPETSSVRVSETPKTWAEYRP

SEQ ID NO: 24911 - protein, 118 aa, Rhizobium yanglingense
  misc_feature (1)..(118): tr|A0A245ZAU6|A0A245ZAU6_9RHIZ 6-carboxy-5,6,7,8-tetrah ydropterin synthase OS=Rhizobium yanglingense OX=61013 GN=AJ87_47175 PE=3 SV=1
MFRITKEFHFSASHRLTSLPADHQCGRLHGHNYVVEVELSAATLNSHGFVRDYHELAPLKSYIDENFDHRHLNEVLGHDQVTAECLAKHFYDWCKDRLPETSAVRVSETAKTWAEYRP

SEQ ID NO: 24912 - protein, 117 aa, Rhizomicrobium sp.
  misc_feature (1)..(117): tr|A0A177Q9A0|A0A177Q9A0_9PROT 6-carboxy-5,6,7,8-tetrah ydropterin synthase OS=Rhizomicrobium sp. SCGC AG-212-E 05 OX=1799655 GN=AYO42_01090 PE=3 SV=1
MIELSQEFGFDAAHYLGNSAPENRRLHGHSFYAEVTLRGEPDAVTGFLRDLGEVDAALKVIRGELDHRLLNEIEGLGTPTLENLARFIFVRAKAALPEVVRVKLRRPSYGQTCVYEA

SEQ ID NO: 24913 - protein, 120 aa, Rhodanobacter denitrificans
  misc_feature (1)..(120): tr|I4WMY2|I4WMY2_9GAMM 6-carboxy-5,6,7,8-tetrahydropter in synthase OS=Rhodanobacter denitrificans OX=666685 GN =R2APBS1_3783 PE=3 SV=1
MHIFKVFQIEAAHRLPNVPAGHKCARLHGHSFRIEIHLAGEPDPQLGWVMDFADVKAAFAPLFDQLDHHYLNEIEGLENPTSEMLARWIWQRLQPRLSGLDKVVVHETCTSGASCSRDSF

SEQ ID NO: 24914 - protein, 120 aa, Rhodanobacter denitrificans
  misc_feature (1)..(120): tr|A0A368KC45|A0A368KC45_9GAMM 6-carboxy-5,6,7,8-tetrah ydropterin synthase OS=Rhodanobacter denitrificans OX=6 66685 GN=queD PE=3 SV=1
MHIFKVFQLEAAHRLPNVPAGHKCARLHGHSFRVEIHVTGEPDPQLGWVMDFADVKTAFAPLFDQLDHHYLNEIEGLENPTSEMLARWIWQRLQPRLAGLDKVVVHETCTSGASCSRDSF

SEQ ID NO: 24915 - protein, 129 aa, Rhodanobacter fulvus
  misc_feature (1)..(129): tr|I4VLS1|I4VLS1_9GAMM 6-carboxy-5,6,7,8-tetrahydropter in synthase OS=Rhodanobacter fulvus Jip2 OX=1163408 GN= UU9_13638 PE=3 SV=1
MPAVQCRMDIFKVFNVEAAHRLPHVPAGHKCSRLHGHSFRVEIHVSGEPGVDTGWVMDFADVKAAFAPIHDQLDHYYLNDIEGLDNPTSERLSIWIWDRLKPALPLLSEVVVHETCTSGCRYRGPSVAR

SEQ ID NO: 24916 - protein, 120 aa, Rhodanobacter glycinis
  misc_feature (1)..(120): tr|A0A502BZR7|A0A502BZR7_9GAMM 6-carboxy-5,6,7,8-tetrah ydropterin synthase OS=Rhodanobacter glycinis OX=582702 GN=queD PE=3 SV=1
MHIFKVFQLEAAHRLPHVPAGHKCARLHGHSFRIEIHVTGEPDPQLGWVMDFADLKTAFAPLYDQLDHHYLNDIEGLENPTSEMLARWIWQRLLPRLPGLDKVVVHETCTSGASCSRDSF

SEQ ID NO: 24917 - protein, 120 aa, Rhodanobacter glycinis
  misc_feature (1)..(120): tr|A0A1I4B223|A0A1I4B223_9GAMM 6-carboxy-5,6,7,8-tetrah ydropterin synthase OS=Rhodanobacter glycinis OX=582702 GN=queD PE=3 SV=1
MHIFKIFQIEAAHRLPHVPEGHKCARLHGHSFRIEIHLAGEPDPQMGWVMDFGDVKAAFAPLYDQLDHHYLNDIEGLENPTSEMLARWIWQRLAPRLPGLDKVVVHETCTSGASCSRDSF

SEQ ID NO: 24918 - protein, 120 aa, Rhodanobacter lindaniclasticus
  misc_feature (1)..(120): tr|A0A4S3KK29|A0A4S3KK29_9GAMM 6-carboxy-5,6,7,8-tetrah ydropterin synthase OS=Rhodanobacter lindaniclasticus O X=75310 GN=B1991_03130 PE=3 SV=1
MHIFKVFQLEAAHRLPHVPEGHKCARLHGHSFRVEIHVSGEPDPRLGWVMDFAELKTAFQPLYDQLDHHYLNDIEGLENPTSEMLARWIWQRLEPRLAGLDKVVVHETCTSGASCSRVDF

SEQ ID NO: 24919 - protein, 120 aa, Rhodanobacter sp.
  misc_feature (1)..(120): tr|A0A1V3PT86|A0A1V3PT86_9GAMM 6-carboxy-5,6,7,8-tetrah ydropterin synthase OS=Rhodanobacter sp. C03 OX=1945858 GN=B0E48_14790 PE=3 SV=1
MNIFKVFTLEAAHRLPNVPAGHKCARLHGHSFRVEIHVAGEPDPQLGWVMDFADLKTAFAPLYDQLDHHYLNDIDGLENPTSEMLARWIWQRLQPRLPGLDKVVVHETCTSGASCSRGSF

SEQ ID NO: 24920 - protein, 120 aa, Rhodanobacter sp.
  misc_feature (1)..(120): tr|A0A522SM55|A0A522SM55_9GAMM 6-carboxy-5,6,7,8-tetrah ydropterin synthase OS=Rhodanobacter sp. OX=1883446 GN= queD PE=3 SV=1
MHIFKVFQIEAAHRLPNVPAGHKCARLHGHSFRVEIHVTGEPDPQLGWVMDFADVKAAFAPLFDQLDHHYLNEIEGLENPTSEMLARWIWRRLQPRLTGLDKVVVHETCTSGASCSRDSF

SEQ ID NO: 24921 - protein, 118 aa, Rhodanobacter spathiphylli
  misc_feature (1)..(118): tr|I4W2K4|I4W2K4_9GAMM 6-carboxy-5,6,7,8-tetrahydropter in synthase OS=Rhodanobacter spathiphylli B39 OX=116340 7 GN=UU7_07626 PE=3 SV=1
MNIFKVFTLEAAHRLPNVPEGHKCARLHGHSFRVELHLTGDVGAESGWVMDFGDVKAVFQPLYEQLDHHYLNDIQGLENPTSERLAVWIWDRLKPALPLLSEVVVHETCTSGCRYRGM

SEQ ID NO: 24922 - protein, 120 aa, Rhodanobacter thiooxydans
  misc_feature (1)..(120): tr|A0A154QFR1|A0A154QFR1_9GAMM 6-carboxy-5,6,7,8-tetrah ydropterin synthase OS=Rhodanobacter thiooxydans OX=416 169 GN=RHOFW104T7_15840 PE=3 SV=1
MHIFKVFQIEAAHRLPNVPVGHKCARLHGHSFRVEIHVSGEPGSQTGWVMDFADVKAAFAPLFDQLDHHYLNEIEGLENPTSEMLARWIWRRLQPRLAGLDKVVVHETCTSGASCSRDSF

SEQ ID NO: 24923 - protein, 119 aa, Rhodanobacter thiooxydans
  misc_feature (1)..(119): tr|A0A154QFQ8|A0A154QFQ8_9GAMM 6-carboxy-5,6,7,8-tetrah ydropterin synthase OS=Rhodanobacter thiooxydans OX=416 169 GN=RHOFW104T7_15835 PE=3 SV=1
MDIFKVFTLEAAHRLPNVPEGHKCARLHGHSFRVEVHLAGEPGAGTGWVMDFGDVKVAFQPIYDQLDHHYLNDIDGLDNPTSERLAVWIWERLKPRLPLLSEIVVRETCTSGCRYRAPK

SEQ ID NO: 24924 - protein, 120 aa, Rhodanobacteraceae bacterium
  misc_feature (1)..(120): tr|A0A2Z6E275|A0A2Z6E275_9GAMM 6-carboxy-5,6,7,8-tetrah ydropterin synthase OS=Rhodanobacteraceae bacterium Dys h456 OX=2010829 GN=ALSL_0192 PE=3 SV=1
MRIFKSFQIEAAHRLPHVPAGHKCARLHGHSFHIELHVAGEPDPTLGWIMDFAELKAAFQPLFEQLDHRYLNDIEGLENPTSETLARWIYERLAPRVPGLDEVVVRETCTAGASYRGPRG

SEQ ID NO: 24925 - protein, 125 aa, Rhodanobacteraceae bacterium
  misc_feature (1)..(125): tr|A0A522RVJ0|A0A522RVJ0_9GAMM 6-carboxy-5,6,7,8-tetrah ydropterin synthase OS=Rhodanobacteraceae bacterium OX= 2052182 GN=EPN36_06275 PE=3 SV=1
MSEQLFNVWKTFYFDAAHQLDAGPGGDPRYRRMHGHSYQVEVWLRGPLTERGWVVDMGDLERGIDTARDALDHRLLNDVEGLGIPTMENIARFVWERLDHLPQLQRVVVKREQNGEGCEYLGPGR

SEQ ID NO: 24926 - protein, 131 aa, Rhodobaca barguzinensis
  misc_feature (1)..(131): tr|A0A2K8K5C3|A0A2K8K5C3_9RHOB 6-carboxytetrahydropteri n synthase OS=Rhodobaca barguzinensis OX=441209 GN=BG45 4_01420 PE=4 SV=1
MFAVEVRDHIMIAHSLPSPVFGPAQGMHGATFTVDAAFMTESIDQHGLVVDIGLATDALAQVLAPLRYKNLDEVPEFEGKFTTTEFLCHHIFEQMATRVRAGQLSDAGRVLRLRITLHESHTARAWYEGDI

SEQ ID NO: 24927 - protein, 329 aa, Rhodobacteraceae bacterium
  misc_feature (1)..(329): tr|A0A3N9QCM4|A0A3N9QCM4_9RHOB 6-pyruvoyl tetrahydrobio pterin synthase OS=Rhodobacteraceae bacterium CH30 OX=2 490538 GN=EHS17_10465 PE=4 SV=1
MLMRMLHIAKAGFEAARSLSAILHGHSFSVTAKADLPLADLRARLGAICAGLDYCDLNTRFSCPDDLTLIRHLASDLAMPAALSLRSAPGRGVELDAEGQARVWLKTGFEAAHWLPHVPEGHQCGRLHGHGFGVRLLADAGLADYAALEKAWQPLHALLQHGTLNRIAGLENPTSEVLACWLFDALSARLPAMAAVEVFETATAGSRFDAQGLRIWKEQRFEAAVPFDGQGRYTGHSYLVRLHLAGDIDPEQGWVRDFGEVKALFKPLYARLDHHALDQLPGIDATDCAGIARYLATHFALPQLVRIDLLENETDGALLWLDGGRACTR

SEQ ID NO: 24928 - protein, 135 aa, Rhodobacteraceae bacterium
  misc_feature (1)..(135): tr|A0A2V2LDX7|A0A2V2LDX7_9RHOB Uncharacterized protein OS=Rhodobacteraceae bacterium TG-679 OX=2072018 GN=DKT7 7_05600 PE=4 SV=1
MFALEVRDHIMIAHSLPGEAFGPAQGMHGATFVIDVAFFRETLTENDIVVDIGLAADALKRVIAPVNYKNLDELDLFGGKRSTTEVLCKYVFDAMAAEIAAGRLGEDAREIVRMKVTLNESHVARAWLEGPVAGA

SEQ ID NO: 24929 - protein, 117 aa, Rhodobacterales bacterium
  misc_feature (1)..(117): tr|B6B7B1|B6B7B1_9RHOB 6-carboxy-5,6,7,8-tetrahydropter in synthase OS=Rhodobacterales bacterium Y4I OX=439496 GN=queD PE=3 SV=1
MFRITKEFHFSASHQLTHLPPDHQCARLHGHNYVVVVELAAKELNSDGFVRDYHELKPLKDYIDGTFDHRHLNDVLDGYSTAENMAKHFYDWCHARWPEVAAVKVSETPKTWAEYRP

SEQ ID NO: 24930 - protein, 118 aa, Rhodobacterales bacterium
  misc_feature (1)..(118): tr|A0A1Z8A3A9|A0A1Z8A3A9_9RHOB 6-carboxy-5,6,7,8-tetrah ydropterin synthase OS=Rhodobacterales bacterium 52_120 _T64 OX=1856301 GN=A9Q96_13970 PE=3 SV=1
MYRITKEFHFSASHQLKDLPSDHQCARLHGHNYIVVVELSSGTLNEHGFVRDYHELSALKRYIDDELDHRHLNDVLGDDLVTSERLAKHFYDWCKARLPETSAVRVSETPKTWAEYRP

SEQ ID NO: 24931 - protein, 122 aa, Rhodobiaceae bacterium
  misc_feature (1)..(122): tr|A0A349J564|A0A349J564_9RHIZ 6-carboxy-5,6,7,8-tetrah ydropterin synthase OS=Rhodobiaceae bacterium OX=202678 5 GN=DCS39_06710 PE=3 SV=1
MKLSREFSFDAAHSLGHYPGGHANTRVHGHSFRARVTLEGMPDENGQIVDLEEMGRLLNELRNQLDHQMLNEIDGLEQPTLENLCLFIWDNLQNSLPQISAVEVFRDSLGQSCLYQGSQHVH

SEQ ID NO: 24932 - protein, 120 aa, Rhodobiaceae bacterium
  misc_feature (1)..(120): tr|A0A2D7FSU8|A0A2D7FSU8_9RHIZ 6-carboxy-5,6,7,8-tetrah ydropterin synthase OS=Rhodobiaceae bacterium OX=202678 5 GN=CML80_03995 PE=3 SV=1
MKLTREILFDAAHSLAQYGPGHPNARVHGHSFRARITLSGAPDANGQIMDFESFGDVLEKLRKRLDHNMLNDIDGLGTPTLENLCLWMWSELHGDLPHISAIEVFRDSLGQSCLYEGEAT

SEQ ID NO: 24933 - protein, 119 aa, Rhodoblastus acidophilus
  misc_feature (1)..(119): tr|A0A212RWT2|A0A212RWT2_RHOAC 6-carboxy-5,6,7,8-tetrah ydropterin synthase OS=Rhodoblastus acidophilus OX=1074 GN=SAMN06265338_108100 PE=3 SV=1
MPITITQAFTFEAAHRLPHVPETHRCRRLHGHSYRVELTLGGEVDPHTGFVVDFFDVEAAFAPVLATLDHHLLNEIEGLDNPTAENIALWIYRKVSPNLPPLQAVKVFETPMCWAEYRA

SEQ ID NO: 24934 - protein, 134 aa, Rhodoblastus acidophilus
  misc_feature (1)..(134): tr|A0A212RHI0|A0A212RHI0_RHOAC 6-pyruvoyl-tetrahydropte rin synthase OS=Rhodoblastus acidophilus OX=1074 GN=SAM N06265338_104230 PE=4 SV=1
MYAVEVRDHIMIAHSFRGELFGPAQRLHGATFIVDVAFFREELTDDGVVADIGRAHEALKAALAPLAYRNLDDLDLFNGRQTTTEVLARHIFDALAAATRSGALGPGGEGVERIRVTLHESHLARAWFEGRVAL

SEQ ID NO: 24935 - protein, 117 aa, Rhodoblastus sphagnicola
  misc_feature (1)..(117): tr|A0A2S6N5K9|A0A2S6N5K9_9RHIZ 6-carboxy-5,6,7,8-tetrah ydropterin synthase OS=Rhodoblastus sphagnicola OX=3333 68 GN=CCR94_14000 PE=3 SV=1
MTITQGFTFEAAHHLPHVPETHRCRRLHGHSYRVELTLSGEVDPHTGFVIDFFDVEAAFAPVLARLDHHLLNEVEGLQNPTAENIALWIFRKVSPDLPRLTAVKVFETPMCWAEFQA

SEQ ID NO: 24936 - protein, 134 aa, Rhodococcus enclensis
  misc_feature (1)..(134): tr|A0A1C4GBK1|A0A1C4GBK1_9NOCA 6-pyruvoyltetrahydropter in/6-carboxytetrahydropterin synthase OS=Rhodococcus en clensis OX=1049584 GN=GA0061093_11958 PE=4 SV=1
MNIDTLVRMFSIEIRRTFAVRQGLPAPVRDAKNLPPLMPADGFRVTMRVAFSFEDDQLGERGWFVDTDALDESVDRCAEQLASGAWPEIFDFRPSFENVAKWAFTELASSIPQLTYVELDNETIGVATRYVRSQ

SEQ ID NO: 24937 - protein, 129 aa, Rhodococcus erythropolis
  misc_feature (1)..(129): tr|T5HR89|T5HR89_RHOER Uncharacterized protein OS=Rhodo coccus erythropolis DN1 OX=1381122 GN=N601_21810 PE=4 S V=1
MVVMFSIEIRRTFAVRQGLPAPVRDAKNLPPLMPAEGFRVTMRVGFSFEDDQLGERGWFVDTDALDESVDRCAERLASGVWPEIFDFRPSFENVAKWSFTELASTIPQLTYVELDNETIGVATRYVRSH

SEQ ID NO: 24938 - protein, 90 aa, Rhodococcus erythropolis
  misc_feature (1)..(90): tr|A0A1F2PMI3|A0A1F2PMI3_RHOER Uncharacterized protein OS=Rhodococcus erythropolis OX=1833 GN=RERY_67050 PE=4 SV=1
MTMRVGFSFEDDQLGERGWFVDTDALDESVDRCAERLASGVWPEIFDFRPSFENVAKWSFTELASTIPQLTYVELDNETIGVATRYVRSH

SEQ ID NO: 24939 - protein, 134 aa, Rhodococcus qingshengii
  misc_feature (1)..(134): tr|A0A1X0M593|A0A1X0M593_9NOCA Uncharacterized protein OS=Rhodococcus qingshengii OX=334542 GN=BXO91_00330 PE= 4 SV=1
MNIDTLVRMFSIEIRRTFAVRQGLPAPVRDAKNLPPLMPAEGFRVTMRVAFSFEDDQLGERGWFVDTDALDESVDRCAEQLASGAWPEIFDFRPSFENVAKWAFSELASSIPQLTYVELDNETIGVATRYVRSH

SEQ ID NO: 24940 - protein, 160 aa, Rhodococcus qingshengii
  misc_feature (1)..(160): tr|A0A4R5ZVP0|A0A4R5ZVP0_9NOCA 6-carboxytetrahydropteri n synthase QueD OS=Rhodococcus qingshengii OX=334542 GN =queD PE=4 SV=1
MYGFRIVDKLQKIDEDIQRKELKYHTKRVLVSKEFTFDAAHHLHCYEGKCKNLHGHTYKVVFGISGYVDDRGLMMDFGDIKVIWKNEIEIHLDHRYLNETLPPMNTTAENIVVWIYEKMQTALAKEENKDQFLGARVEFVRLFETPTSYAEARREWMENE

SEQ ID NO: 24941 - protein, 134 aa, Rhodococcus sp.
  misc_feature (1)..(134): tr|A0A3G8ZTQ9|A0A3G8ZTQ9_9NOCA Uncharacterized protein OS=Rhodococcus sp. NJ-530 OX=2490853 GN=EHW12_02945 PE= 4 SV=1
MNIDTLVRMFSIEIRRTFAVRQGLPAPVRDAKNLPPLMPAEGFRVTMRVAFSFEDDQLGERGWFVDTDALDESVDRCAEQLASGVWPEIFDFRPSFENVAKWAFSELASSIPQLTYVELDNETIGVATRYVRSQ

SEQ ID NO: 24942 - protein, 116 aa, Rhodococcus sp.; identical to SEQ ID NO: 21985
  misc_feature (1)..(116): tr|A0A2S7TR45|A0A2S7TR45_9NOCA 6-carboxy-5,6,7,8-tetrah ydropterin synthase OS=Rhodococcus sp. SAORIC-690 OX=19 23970 GN=BSZ31_07655 PE=3 SV=1

SEQ ID NO: 24943 - protein, 128 aa, Rhodococcus wratislaviensis
  misc_feature (1)..(128): tr|X0RB86|X0RB86_9NOCA 6-carboxy-5,6,7,8-tetrahydropter in synthase OS=Rhodococcus wratislaviensis NBRC 100605 OX=1219028 GN=RW1_051_00490 PE=3 SV=1
MTEHMEIFREFNFEAAHRLPNVPDGHKCSRLHGHSYRFTVHVAGPVDEQFGWVMDFGDLKSVVNPVVARLDHYYLNDIDGLKNPTSEVLAKWIWDELEENLPLMTAVTVRETCTSGCTYRGTRAVLTS

SEQ ID NO: 24944 - protein, 150 aa, Rhodocyclaceae bacterium
  misc_feature (1)..(150): tr|A0A5C7KFS3|A0A5C7KFS3_9RHOO 6-carboxytetrahydropteri n synthase QueD OS=Rhodocyclaceae bacterium OX=1898103 GN=queD PE=4 SV=1
MLITRRLEFDAGHRIPDHKSQCRHLHGHRYAIEITLSGSVIDKAGDAANGMVMDFSQVKDLANTHLVKEWDHAFLAFAGDTAIVDFLSSLPGHKTVLLDRVPTAENLARIAFERLDAVYRDTYGNHLRLEQVRLYETPNCWADAIRTRLD

SEQ ID NO: 24945 - protein, 150 aa, Rhodocyclaceae bacterium
  misc_feature (1)..(150): tr|A0A524BBQ1|A0A524BBQ1_9RHOO 6-carboxytetrahydropteri n synthase QueD OS=Rhodocyclaceae bacterium OX=1898103 GN=queD PE=4 SV=1
MLITRRLEFDAGHRIPDHKSQCRHLHGHRYAIEITLSGSVIDKAGDAANGMVMDFSQVKDLAKAHLVDLWDHAFLAFAGDTKIVEFLQSIPGHKTVILDRVPTAENLARLAFEILDGAYRDTYGNHLRLEQVRLYETPNCWSDAIRSRLD

SEQ ID NO: 24946 - protein, 150 aa, Rhodocyclales bacterium
  misc_feature (1)..(150): tr|A0A1G3HLR8|A0A1G3HLR8_9RHOO 6-carboxytetrahydropteri n synthase QueD OS=Rhodocyclales bacterium RIFCSPLOWO2_ 02_FULL_63_24 OX=1802018 GN=A3H93_10565 PE=4 SV=1
MRITRRLEFDAGHRIPNHQSQCRHLHGHRYALEITLAGGVIDAAGQPDDGMVMDFSELKAIAKQHVVDAWDHAFLVWRGDRTVADFLASLPNHKTVVLDAVPTAENLARIAFSILDPLYHDNYGNHLQLERIRLYETPNCWADATRQDLA

SEQ ID NO: 24947 - protein, 152 aa, Rhodocyclales bacterium
  misc_feature (1)..(152): tr|A0A363SG74|A0A363SG74_9RHOO 6-carboxytetrahydropteri n synthase QueD OS=Rhodocyclales bacterium OX=2072421 G N=queD PE=4 SV=1
MRITRRLEFDSGHRIPDHQSQCRHLHGHRYAIEITLLGDIIRQAGSPLNGMVMDFSDIKTLARQNLVDAWDHAFLVWRGDSALMSFLESLPGHKTVVLEVVPTAENLAAEAFRLLDRVYRDTYGNHLRLEQVRLYETPNCWADALRGEAGQD

SEQ ID NO: 24948 - protein, 147 aa, Rhodoferax ferrireducens
  misc_feature (1)..(147): tr|Q21V74|Q21V74_RHOFT Uncharacterized protein OS=Rhodo ferax ferrireducens (strain ATCC BAA-621 / DSM 15236 / T118) OX=338969 GN=Rfer_2613 PE=4 SV=1
MLTITRKMEFDAGHRIPDHKSQCRNMHGHRYTLLITLTGDVVQQEGESDNGMIMDFGDIKALANQHLVKLWDHAFIVYAHDTVVRDFLDSMPNHKTVVIDRVPTVENLAKIAFDILKEVYHGRYGRHLSLAKVTLYETPNCWAEIDG

SEQ ID NO: 24949 - protein, 134 aa, Rhodoferax koreense
  misc_feature (1)..(134): tr|A0A1P8JQ13|A0A1P8JQ13_9BURK 6-carboxy-5,6,7,8-tetrah ydropterin synthase OS=Rhodoferax koreense OX=1842727 G N=RD110_00115 PE=3 SV=1
MSQPHTPGTEALLGRFEVSQRFFFDAAHTLQREIEAESSARIHGHTYHAEVTLAGQPDPQTGMVVDLGQVRAHIATLREQLDHRLLDEVPGLGVPTLENLCRFIADGMASYASMLSAVRVWRESTGDGCVLRLG

SEQ ID NO: 24950 - protein, 122 aa, Rhodoferax sp.
  misc_feature (1)..(122): tr|A0A515EMA4|A0A515EMA4_9BURK 6-carboxy-5,6,7,8-tetrah ydropterin synthase OS=Rhodoferax sp. Gr-4 OX=2527691 G N=EXZ61_06070 PE=3 SV=1
MMFEISQRFFFDAAHTLQREIEAEGSRRVHGHTYHAEVFVQGEANASGMVMDLGFIRREVAVLRESLDHHFLDEVPDLGTPTLENLCAYIYKRLKPILPNLSAVTVERHSIGDKCTYRPAQG

SEQ ID NO: 24951 - protein, 134 aa, Rhodoferax sp.
  misc_feature (1)..(134): tr|A0A255ZK02|A0A255ZK02_9BURK 6-carboxy-5,6,7,8-tetrah ydropterin synthase OS=Rhodoferax sp. TH121 OX=2022803 GN=CHU94_05855 PE=3 SV=1
MTQAPAIPIPRRCEVSQKFFFDAAHTLKRTLDDAEEVAGSRRIHGHTYHAEVTVAGNADEDTGMVVDLGHLRNAIAVLRPQLDHHLLDEVEGLGPPTLENLAAFIWRAMAREFSGLWQVRVWREGIGDSCTLRA

SEQ ID NO: 24952 - protein, 129 aa, Rhodohalobacter barkolensis
  misc_feature (1)..(129): tr|A0A2N0VMD6|A0A2N0VMD6_9BACT 6-carboxy-5,6,7,8-tetrah ydropterin synthase OS=Rhodohalobacter barkolensis OX=2 053187 GN=CWD77_04295 PE=3 SV=1
MPTWTLHTEFKFDAAHFIDGYDGKCGRMHGHTYKVHISAKSHELNPSKYLKSADMVCDFKELKWAASDSKKGGFDHSVLNEEIPVATTAERIAEYIHKETVKRIPGNIELKVTVWETDTSWVEYTDQDV

SEQ ID NO: 24953 - protein, 145 aa, Rhodohalobacter barkolensis
  misc_feature (1)..(145): tr|A0A2N0VLS6|A0A2N0VLS6_9BACT 6-carboxy-5,6,7,8-tetrah ydropterin synthase OS=Rhodohalobacter barkolensis OX=2 053187 GN=CWD77_06585 PE=3 SV=1
MALIFVTRKAHFNASHRLHNPGKSDEWNQKTFGKCNNPNWHGHNYVLEVTVAGEPDPETGYVIDLGKLKSIIQERILDPCDHKNLNIEVPFLDNIIPTSENLVKAFFDELEHDVTDAAYGKSKLYSVKLFETERNIAEYCPYRAV

SEQ ID NO: 24954 - protein, 129 aa, Rhodohalobacter sp.
  misc_feature (1)..(129): tr|A0A371QN11|A0A371QN11_9BACT 6-carboxy-5,6,7,8-tetrah ydropterin synthase OS=Rhodohalobacter sp. SW132 OX=229 3433 GN=DYD21_09385 PE=3 SV=1
MPTWVLHTEFKFDAAHFIDGYDGKCGRMHGHTYKVHIKAKSHKLNPSKYLKTPDMVCDFKELKWAASDSKKGGLDHSVLNEEIPVATTAERIAEYIHKETKNRIPADIDLHVTVWETETSWVEYTDQDV

SEQ ID NO: 24955 - protein, 143 aa, Rhodohalobacter sp.
  misc_feature (1)..(143): tr|A0A371QN22|A0A371QN22_9BACT 6-carboxy-5,6,7,8-tetrah ydropterin synthase OS=Rhodohalobacter sp. SW132 OX=229 3433 GN=DYD21_09145 PE=3 SV=1
MIYVTRKSHFNAAHRLHNPDKTEEWNVKTFGKCNNPNWHGHNYRLEVTVAGEADPDTGYVIDLGVLKNIIQKRILDKCDHKNLNLEVSFLKGINPTSENLVKAFFQELEDDINAKSYGSSFLYSVKLYETERNIAEYRPNPRI

SEQ ID NO: 24956 - protein, 118 aa, Rhodomicrobium udaipurense
  misc_feature (1)..(118): tr|A0A037UZQ1|A0A037UZQ1_9RHIZ 6-carboxy-5,6,7,8-tetrah ydropterin synthase OS=Rhodomicrobium udaipurense JA643 OX=858455 GN=T281_02105 PE=3 SV=1
MKVTQSFRFEAAHRLPFVKDTHPCRRVHGHSYRVELQLEGPVDPETGFVVDFFDIEAAFGPLLKRLDHYYLNEVEGLENPTAENIAAWIWDRVKDALPQLTAVRVYETPECWAEYNGA

SEQ ID NO: 24957 - protein, 118 aa, Rhodomicrobium vannielii; identical to SEQ ID NO: 24956
  misc_feature (1)..(118): tr|E3I8B0|E3I8B0_RHOVT 6-carboxy-5,6,7,8-tetrahydropter in synthase OS=Rhodomicrobium vannielii (strain ATCC 17 100 / ATH 3.1.1 / DSM 162 / LMG 4299) OX=648757 GN=Rvan _0453 PE=3 SV=1

SEQ ID NO: 24958 - protein, 139 aa, Rhodonellum psychrophilum
  misc_feature (1)..(139): tr|U5BZ45|U5BZ45_9BACT 6-pyruvoyl tetrahydrobiopterin s ynthase OS=Rhodonellum psychrophilum GCM71 = DSM 17998 OX=1123057 GN=P872_07990 PE=4 SV=1
MIHVCRKEHFNAAHKLWNPNWTEEKNFQIFGPCSNVNWHGHNFELIVTVKGLPDPETGFVVDLKHLSTLIQTLVIEKVDHKNLNLDVDFMFGKMASCENLVMEFWKILAPAVNQIVPHGKLYKLTLYETPRNFVEYFGE

SEQ ID NO: 24959 - protein, 136 aa, Rhodonellum psychrophilum
  misc_feature (1)..(136): tr|U5C2U5|U5C2U5_9BACT 6-carboxy-5,6,7,8-tetrahydropter in synthase OS=Rhodonellum psychrophilum GCM71 = DSM 17 998 OX=1123057 GN=P872_15010 PE=3 SV=1
MKVTVFRKEHFNAAHRLNNPFWSDEKNENIFGKCNNKNFHGHNYELIVQIRGSVDPETGYLIDLKILSDIIKEHVLNRFDHKNLNLDTDEFQNLNPTAENIAVVIWNILRKQLEDKYDLTIRLYETERNFVEYDGN

SEQ ID NO: 24960 - protein, 164 aa, Rhodopirellula bahusiensis
  misc_feature (1)..(164): tr|A0A2G1WDL1|A0A2G1WDL1_9PLAN 6-pyruvoyl tetrahydrobio pterin synthase OS=Rhodopirellula bahusiensis OX=201406 5 GN=CEE69_01755 PE=4 SV=1
MSATFRVEVSKEQFIFSAAHFITFAGDICERIHGHNYGVRVSVEGPLDENRYVVDFIALRDAVLKQTQALDHHVILPRDHQEILITQDETETTARFRERRWVFPNEDCIIMPVINTTAEEIARVIAENVREQTREQFGSALSSIEVAVDENAGQWGVCKLPWNE

SEQ ID NO: 24961 - protein, 137 aa, Rhodopirellula bahusiensis
  misc_feature (1)..(137): tr|A0A2G1VYE6|A0A2G1VYE6_9PLAN 6-carboxytetrahydropteri n synthase QueD OS=Rhodopirellula bahusiensis OX=201406 5 GN=queD PE=4 SV=1
MRRFSFCAGHRLVGHEGKCQNLHGHNYVLEVYVTGAEQDAVGRILDFKQLKTRCKDWIDENWDHTFVLWEKDQNGLDAIRSSEPHRIYELDSNPTAENMAKHFLEQICPKILGDSGATAYKVRLWESEETYAEVELD

SEQ ID NO: 24962 - protein, 126 aa, Rhodopirellula baltica
  misc_feature (1)..(126): tr|L7CJY9|L7CJY9_RHOBT 6-pyruvoyl tetrahydrobiopterin s ynthase OS=Rhodopirellula baltica SWK14 OX=993516 GN=RB SWK_01697 PE=4 SV=1
MVGHEGKCQNLHGHNYVLEVYVTGEEQDAIGRILDFKQLKTRCKNWIDENWDHTFVLWEKDQNGLDAIRSSEPHRIYELESNPTAENMAKHFLEKICPSILGDSGATAYKVRLWESEETYAEVELD

SEQ ID NO: 24963 - protein, 164 aa, Rhodopirellula baltica
  misc_feature (1)..(164): tr|K5DNV8|K5DNV8_RHOBT 6-pyruvoyl-tetrahydropterin synt hase OS=Rhodopirellula baltica SH28 OX=993517 GN=RBSH_0 0179 PE=4 SV=1
MSATFRVDVSKEQFIFSAAHFITFAGDICERIHGHNYGVRVSVEGPLDENRYVVDFIALRDAVLKQTQALDHHVILPRDHKEILVTQDETETTARFRERRWVFPNEDCIIMPVINTTAEEIARVIAENVREQTKEQFGKALSSIEVAVDENAGQWGVCKLPWNE

SEQ ID NO: 24964 - protein, 142 aa, Rhodopirellula europaea
  misc_feature (1)..(142): tr|M5RYS1|M5RYS1_9PLAN 6-pyruvoyl tetrahydrobiopterin s ynthase OS=Rhodopirellula europaea SH398 OX=1263868 GN= RESH_04816 PE=4 SV=1
MSIRIMRRFTFCAGHRLVGHEGKCQNLHGHNYVLEVYVTGAEQDAVGRILDFKQLKTRCKNWIDENWDHTFVLWEKDQNGLDAIRSSEPHRIYELDSNPTAENMAKHFLEQICPSILGDSGATAYKVRLWESEETYAEVELD

SEQ ID NO: 24965 - protein, 137 aa, Rhodopirellula europaea
  misc_feature (1)..(137): tr|M2AX27|M2AX27_9PLAN 6-pyruvoyl tetrahydrobiopterin s ynthase OS=Rhodopirellula europaea 6C OX=1263867 GN=RE6 C_05197 PE=4 SV=1
MRRFTFCAGHRLVGHEGKCQNLHGHNYVLEVYVTGAEQDAVGRILDFKQLKTRCKNWIDENWDHTFVLWEKDQNGLDAIRSSEPHRIYELDSNPTAENMAKHFLEQICPAILGDSGATAYKVRLWESEETYAEVELD

SEQ ID NO: 24966 - protein, 142 aa, Rhodopirellula islandica
  misc_feature (1)..(142): tr|A0A0J1BJA3|A0A0J1BJA3_RHOIS 6-carboxy-5,6,7,8-tetrah ydropterin synthase OS=Rhodopirellula islandica OX=5954 34 GN=RISK_001719 PE=3 SV=1
MSIRIMRRFTFCAGHRLVGHEGKCQSLHGHNYVLEVYVTGKKQDAVGRILDFKQLKARCKDWIDENWDHTFVLWEKDQNGLDAIRSSEPHRIYELDSNPTAENMAKHFLEKVCPEILGDSGATAYKVRLWESEETYAEAELD

SEQ ID NO: 24967 - protein, 164 aa, Rhodopirellula islandica
  misc_feature (1)..(164): tr|A0A0J1BA84|A0A0J1BA84_RHOIS Queuosine biosynthesis Q ueD, PTPS-I / Folate biosynthesis protein PTPS-III OS=R hodopirellula islandica OX=595434 GN=RISK_004725 PE=4 S V=1
MSATFRVDVSKEQFIFSAAHFITFAGDICERIHGHNYGVRVSVEGPLDENRYVVDFIALRDAVLKQTQALDHHVILPRDHKEILITQDETETTARFRERRWVFPNEDCILLPVINTTAEEIARVIAENVREQTREQFGDALSSIEVAVDENAGQWGICKLPWNE

SEQ ID NO: 24968 - protein, 138 aa, Rhodopirellula maiorica
  misc_feature (1)..(138): tr|M5RKX6|M5RKX6_9PLAN 6-pyruvoyl tetrahydrobiopterin s ynthase OS=Rhodopirellula maiorica SM1 OX=1265738 GN=RM SM_03249 PE=4 SV=1
MRRFTFCAGHRLVGHEGKCQNLHGHNYLVEIYVTGREQDSVGRILDFKMLKERCKGWLDENWDHSFILWDQDENGLAAIRSSEPHRIYELASNPTAENMALHLLNEVCPKILEGTGASAFKVRLWESEETCAEVELDA

SEQ ID NO: 24969 - protein, 166 aa, Rhodopirellula maiorica
  misc_feature (1)..(166): tr|M5S2D6|M5S2D6_9PLAN 6-pyruvoyl-tetrahydropterin synt hase OS=Rhodopirellula maiorica SM1 OX=1265738 GN=RMSM_ 01297 PE=4 SV=1
MTQATFRVDVTKEQFVFSAAHFITFAGDICERIHGHNYAVRASVEGPLDENRYVVDFIALRDAVLEQTTRLDHHIILPQDHAEIKVTSDETETTARFRDRRWVFPNDDCVILPVINTTAEEIARVIAERVREATRAKFGDALTWIEVAVDENCGQWGVCRLPWQNG

SEQ ID NO: 24970 - protein, 166 aa, Rhodopirellula sallentina
  misc_feature (1)..(166): tr|M5TYL2|M5TYL2_9PLAN 6-pyruvoyl-tetrahydropterin synt hase OS=Rhodopirellula sallentina SM41 OX=1263870 GN=RS SM_04266 PE=4 SV=1
MTQPTFRVDVSKEQFVFSAAHFITFAGDICERIHGHNYGVRVSVEGPLDENRYVVDFIALRDAVLLQTQALDHHVILPRHHHEIKVSQDETETTVRFRERRWVFPNEDAVILPVINTTAEEIARVIAERVREQTREQFGDALTFIEVAVDENCGQWGVCRLPWHVG

SEQ ID NO: 24971 - protein, 136 aa, Rhodopirellula sallentina
  misc_feature (1)..(136): tr|M5U4X5|M5U4X5_9PLAN 6-pyruvoyl tetrahydrobiopterin s ynthase OS=Rhodopirellula sallentina SM41 OX=1263870 GN =RSSM_02059 PE=4 SV=1
MRRFTFCAGHRLVGHEGKCQNLHGHNYVLEVYVTGQEQDAVGRILDFKQLKTRCKTWIDENWDHTFVLWDKDQNGLDAIRSSVPHRIYELDCNPTAENMAKHFLHEICPKLLDQSGATAFKVRLWESEETYAEVTI

SEQ ID NO: 24972 - protein, 158 aa, Rhodopirellula sp.
  misc_feature (1)..(158): tr|A0A2A2WGJ5|A0A2A2WGJ5_9PLAN 6-pyruvoyl tetrahydrobio pterin synthase OS=Rhodopirellula sp. SM50 OX=595453 GN =CKO51_06635 PE=4 SV=1
MALTIMRRIKFCAGHRLFGHGGKCEHFHGHNYVADFFVQGEVQDDVGRILDFSVLKQRVKGWIDEHWDHSFLIHQDDANARQALELVKPCRFFVMPYNPTAENMAKYLLEEMCPDVLEGTGARACQVRIWETDESYAEASLDPTGGEAVTYSAMAVGE

SEQ ID NO: 24973 - protein, 158 aa, Rhodopirellula sp.
  misc_feature (1)..(158): tr|A0A255R8J0|A0A255R8J0_9PLAN 6-pyruvoyl tetrahydrobio pterin synthase OS=Rhodopirellula sp. MGV OX=2023130 GN =CGZ80_06520 PE=4 SV=1
MALTIMRRIKFCAGHRLLHHGGKCENFHGHNYVADFFVQGEQQDDVGRVIDFSDLKSRVKGWIDENWDHGFLIHQDDDNARTALEMVTPSRIFLMPYNPTAENMAKYLLEEMCPAALDGSGAKAVRVRVWETDESFAEASLDPVGGSTNLYSEMAVGQ

SEQ ID NO: 24974 - protein, 133 aa, Rhodoplanes elegans
  misc_feature (1)..(133): tr|A0A327JRX0|A0A327JRX0_9RHIZ Uncharacterized protein OS=Rhodoplanes elegans OX=29408 GN=CH338_29465 PE=4 SV= 1
MYAVEVRHHIMIAHSFRGAVFGPAQALHGATFVVDAAILAEALDQNGIVVDIGRLDEALKAVLAPLNYKNLDDLPQFAGKNTTTEFLTRHVHDTLAETARAGGLGRDGRELHAIRVTISESHVARAWYEAPLW

SEQ ID NO: 24975 - protein, 133 aa, Rhodoplanes piscinae
  misc_feature (1)..(133): tr|A0A327K047|A0A327K047_9RHIZ Uncharacterized protein OS=Rhodoplanes piscinae OX=444923 GN=CH340_16490 PE=4 S V=1
MYAVEVRHHIMIAHSFRGAVFGPAQALHGATFVIDAAILAETLDENGIVVDIGRAHEALKAVLAPLDYQNLDALPEFAGQNTTTEFLTRHVFDRLAAAARAGDLGRDGRALAAIRVTISESHVARAWYEAPLW

SEQ ID NO: 24976 - protein, 133 aa, Rhodoplanes piscinae
  misc_feature (1)..(133): tr|A0A447D0U6|A0A447D0U6_9RHIZ Uncharacterized protein OS=Rhodoplanes piscinae OX=444923 GN=RHODGE_RHODGE_0469 7 PE=4 SV=1
MYAVEVRHHIMIAHSFRGAVFGPAQALHGATFVVDAAILAETLDENGIVVDIGRAHEALKAVLAPLDYQNLDALPEFAGQNTTTEFLTRHIFDRLAAAARAGDLGRDGRALAAIRVTISESHVARAWYEAPLW

SEQ ID NO: 24977 - protein, 133 aa, Rhodoplanes roseus
  misc_feature (1)..(133): tr|A0A327KKK8|A0A327KKK8_9RHIZ Uncharacterized protein OS=Rhodoplanes roseus OX=29409 GN=CH341_28530 PE=4 SV=1
MYAVEVRHHIMIAHSFRGAVFGPAQALHGATFVIDAAFLAETLDDNGIVVDIGRADTALKEVLAPLNYKNLDDVEEFAGRNTTTEVLTRHVFDRLAEAARAGALGRDGRALAAIRVTISESHVARAWYEAPLW

SEQ ID NO: 24978 - protein, 118 aa, Rhodoplanes sp.
  misc_feature (1)..(118): tr|A0A127EXY1|A0A127EXY1_9RHIZ 6-carboxy-5,6,7,8-tetrah ydropterin synthase OS=Rhodoplanes sp. Z2-YC6860 OX=674 703 GN=RHPLAN_37990 PE=3 SV=1
MYTICKRFAFSASHVIGGLAPDHPCGRLHGHNYQVEVNLQSSALDDTGFVRDFHELAALKQFIDGTLDHKHLNDVLGHDRTTTEVICKWLYDWCKTRWPEVTAVRVSETPNTWAEYRP

SEQ ID NO: 24979 - protein, 133 aa, Rhodoplanes sp.
  misc_feature (1)..(133): tr|A0A127EVW2|A0A127EVW2_9RHIZ 6-pyruvoyl tetrahydropte rin synthase OS=Rhodoplanes sp. Z2-YC6860 OX=674703 GN= RHPLAN_29890 PE=4 SV=1
MFTVEVRDHIMIAHSFRGAVFGPAQALHGATFVVDAAFIADTLDANSIVIDIGRAHEVLKATLGPLNYKNLDDVPEFKGKNTTTEFLTKHIYDQLAKAARGDGLGRPGRELKAIRITISESHVARASYEAPLW

SEQ ID NO: 24980 - protein, 118 aa, Rhodopseudomonas faecalis
  misc_feature (1)..(118): tr|A0A318TSA5|A0A318TSA5_9BRAD 6-carboxy-5,6,7,8-tetrah ydropterin synthase OS=Rhodopseudomonas faecalis OX=996 55 GN=BJ122_11117 PE=3 SV=1
MKITQAFRFEAAHRLPNVPPTHRCHRMHGHSYRVELQLQGDVDATTGFVVDFFEIEAAFGGLLAQLDHHCLNDIEGLENPTAENIAIWIWQRTKPALPQLAQVRVFETPDCWAEYDGA

SEQ ID NO: 24981 - protein, 122 aa, Rhodopseudomonas palustris
  misc_feature (1)..(122): tr|Q2IT94|Q2IT94_RHOP2 6-carboxy-5,6,7,8-tetrahydropter in synthase OS=Rhodopseudomonas palustris (strain HaA2) OX=316058 GN=RPB_3873 PE=3 SV=1
MKITQAFRFEAAHQLPNVPETHRCRRMHGHSYRVELQLSGPINPTTGFVLDFFEIEAAFGPLLARLDHYCLNDIEGLENPTAENIAIWIWDRTKPGLPALSNVRVYETPDCWADYAGEDTGV

SEQ ID NO: 24982 - protein, 120 aa, Rhodopseudomonas palustris
  misc_feature (1)..(120): tr|E6VHW7|E6VHW7_RHOPX 6-carboxy-5,6,7,8-tetrahydropter in synthase OS=Rhodopseudomonas palustris (strain DX-1) OX=652103 GN=Rpdx1_3859 PE=3 SV=1
MKITQAFRFEAAHYLPNVPETHRCKRMHGHSYRVELQLSGPVDPLTGFVVDFFEIEAAFGPLLKRLDHHCLNEIEGLDNPTAENIAVWIWQRTKPELPQLCGVRVYETSDCWADYAGEDD

SEQ ID NO: 24983 - protein, 120 aa, Rhodopseudomonas pentothenatexigens
  misc_feature (1)..(120): tr|A0A336JYU6|A0A336JYU6_9BRAD 6-carboxy-5,6,7,8-tetrah ydropterin synthase OS=Rhodopseudomonas pentothenatexig ens OX=999699 GN=SAMN05892882_14319 PE=3 SV=1
MKITQAFRFEAAHYLPNVPETHRCKRMHGHSYRVELQLCGPVNPDTGFVLDFFEIEAVFGPLLKRLDHYCLNEIEGLENPTAENIAVWIWRRTKPELPQLCGVRVYETSDCWADYAGEDD

SEQ ID NO: 24984 - protein, 122 aa, Rhodopseudomonas pseudopalustris
  misc_feature (1)..(122): tr|A0A1H8PBR4|A0A1H8PBR4_9BRAD 6-carboxy-5,6,7,8-tetrah ydropterin synthase OS=Rhodopseudomonas pseudopalustris OX=1513892 GN=SAMN05444123_102490 PE=3 SV=1
MKITQAFRFEAAHQLPNVPETHRCRRMHGHSYRVELQLSGPVNPTTGFVLDFFEIEASFGPLLARLDHYCLNDIEGLENPTAENIAIWIWTRTKPSLSALSNVRVYETPDCWADYAGEDAGD

SEQ ID NO: 24985 - protein, 122 aa, Rhodopseudomonas sp.
  misc_feature (1)..(122): tr|A0A0N0KJB8|A0A0N0KJB8_9BRAD 6-carboxy-5,6,7,8-tetrah ydropterin synthase OS=Rhodopseudomonas sp. AAP120 OX=1 523430 GN=IP86_05100 PE=3 SV=1
MKITQAFRFEAAHHLPHVPETHRCKRMHGHSYRVELQLSGPVNPKTGFVLDFFEIEAAFGPLLARLDHYCLNDVEGLENPTAENIAIWIWDRTKPTLAALSNVRVYETQDCWADYGGEDRGV

SEQ ID NO: 24986 - protein, 131 aa, Rhodospirillaceae bacterium; identical to SEQ ID NO: 22137
  misc_feature (1)..(131): tr|A0A1Z8LM99|A0A1Z8LM99_9PROT Uncharacterized protein OS=Rhodospirillaceae bacterium TMED8 OX=1986645 GN=CBB6 8_09345 PE=4 SV=1

SEQ ID NO: 24987 - protein, 118 aa, Rhodospirillaceae bacterium; identical to SEQ ID NO: 22136
  misc_feature (1)..(118): tr|A0A2E2MM33|A0A2E2MM33_9PROT 6-carboxy-5,6,7,8-tetrah ydropterin synthase OS=Rhodospirillaceae bacterium OX=1 898112 GN=CMM77_08075 PE=3 SV=1

SEQ ID NO: 24988 - protein, 132 aa, Rhodospirillales bacterium
  misc_feature (1)..(132): tr|A0A257VL86|A0A257VL86_9PROT Uncharacterized protein OS=Rhodospirillales bacterium 12-71-4 OX=1970563 GN=B7Z 53_00765 PE=4 SV=1
MFSLTVVDHIMIAHSFRGAAFGPAQRLHGATFIVEAEFRAPQLDDLHLLVDIGLAKDQLRAILAPLDYRNLDAEEAFAGKNTTTEYLCLHIHGLLAQACRDGVLGDGGRAVTGLKILLRESHVAWAAFEGPV

SEQ ID NO: 24989 - protein, 175 aa, Rhodospirillales bacterium
  misc_feature (1)..(175): tr|A0A259MFM2|A0A259MFM2_9PROT 6-pyruvoyl tetrahydropte rin synthase OS=Rhodospirillales bacterium 39-66-50 OX= 1970570 GN=B7X63_20315 PE=4 SV=1
MFSLVFTRRYSMAHRLIADPAGKCAIPHGHNEQVIARLQSAAPQRLDGGANMVVPFDRAKARWHRFIDDQVDHAFQLGAGDPMIDWFRAHEPQRLGRLLVTPGDPTTEMLAACLMAKLNAFLAADGNGLRCVELTVEETPTNAVTLAGDPADVLPAGDGAGWWVRADDSINDLAS

SEQ ID NO: 24990 - protein, 133 aa, Rhodospirillum centenum
  misc_feature (1)..(133): tr|B6IVH4|B6IVH4_RHOCS 6-pyruvoyl tetrahydropterin synt hase, putative OS=Rhodospirillum centenum (strain ATCC 51521 / SW) OX=414684 GN=RC1_2930 PE=4 SV=1
MYSLTVRDHMMIAHSFVGAVFGPAQELHGATFLVDAEFRRPSLSADGLVVDIGLASALLKEVLAPLTYRNLDGLPDFRGRNTTTEFLAGEIFRRLRARIADGALGDDGRALVGLRVELHESHVARAAFEGPLP

SEQ ID NO: 24991 - protein, 191 aa, Rhodospirillum rubrum
  misc_feature (1)..(191): tr|Q2RTB4|Q2RTB4_RHORT Uncharacterized protein OS=Rhodo spirillum rubrum (strain ATCC 11170 / ATH 1.1.1 / DSM 4 67 / LMG 4362 / NCIB 8255 / S1) OX=269796 GN=Rru_A1831 PE=4 SV=1
MFEITRKIEIDAGHRIREHGSKCRNLHGHRYQIHVSVRSDQLVAGGSESGMVADFSFLKELMISEIDGPCDHAFILDAEDTLYVELFGLREVAQAVRRDARAAPALSAQGSKMYVVPFAPTAENLAAHWHALLAPLVSAHGKGGIFLAAVRAFETPNCEATFPAPGRFSVIEEAPPRLAEPLALAAYRDHA

SEQ ID NO: 24992 - protein, 135 aa, Rhodothermaceae bacterium
  misc_feature (1)..(135): tr|A0A2E3QZ45|A0A2E3QZ45_9BACT 6-carboxy-5,6,7,8-tetrah ydropterin synthase OS=Rhodothermaceae bacterium OX=202 6787 GN=CMM85_13870 PE=3 SV=1
MPTVYVTRKAHFNAAHRLHNPDQSAEWNQATFGKCNSPNWHGHNYELDVTVAGEPDPQTGFVVDLAALKHLIEAHVVEPLDHKNLNLDVPFLEGKKTSTETLAVAIWEQLAPHVPGLYEVVLRETHNNSVVYRGE

SEQ ID NO: 24993 - protein, 127 aa, Rhodothermaceae bacterium
  misc_feature (1)..(127): tr|A0A424HMT1|A0A424HMT1_9BACT 6-carboxy-5,6,7,8-tetrah ydropterin synthase OS=Rhodothermaceae bacterium TMED10 5 OX=1986665 GN=CBC65_006525 PE=3 SV=1
MPTWTLHTVFTFDAAHYIEGYDGKCANMHGHTYKVQMSAKSTVLHPSKYLPTADMVCDFKELKWPATDTEKGGFDHGLLNDVMETATTAERLAELIHKRTMERIPSSIQLTVTVWETPTSWVEYSDE

SEQ ID NO: 24994 - protein, 139 aa, Rhodothermaeota bacterium; identical to SEQ ID NO: 20366
  misc_feature (1)..(139): tr|A0A2A5XA94|A0A2A5XA94_9BACT 6-carboxytetrahydropteri n synthase QueD OS=Rhodothermaeota bacterium MED-G18 OX =1986239 GN=CNE34_01700 PE=4 SV=1

SEQ ID NO: 24995 - protein, 127 aa, Rhodothermaeota bacterium; identical to SEQ ID NO: 24993
  misc_feature (1)..(127): tr|A0A368D8J1|A0A368D8J1_9BACT 6-carboxy-5,6,7,8-tetrah ydropterin synthase OS=Rhodothermaeota bacterium MED-G6 4 OX=2164156 GN=DBW78_01645 PE=3 SV=1

SEQ ID NO: 24996 - protein, 138 aa, Rhodothermus marinus
  misc_feature (1)..(138): tr|D0MCY8|D0MCY8_RHOM4 6-carboxy-5,6,7,8-tetrahydropter in synthase OS=Rhodothermus marinus (strain ATCC 43812 / DSM 4252 / R-10) OX=518766 GN=Rmar_0192 PE=3 SV=1
MPTVYVTRRVHFNAAHRLHNPARSEAWNRETFGPCNHPNWHGHNYVLEVTVAGEPDPETGFVLNLSHLKEILETRILQKLDHKNLNLDVDFLQGVIPTTENLAVAIWRELEDALPAGRLHRIRLYETEHNYVEYYGEE

SEQ ID NO: 24997 - protein, 156 aa, Rhodothermus marinus
  misc_feature (1)..(156): tr|D0MDN2|D0MDN2_RHOM4 Uncharacterized protein OS=Rhodo thermus marinus (strain ATCC 43812 / DSM 4252 / R-10) O X=518766 GN=Rmar_0320 PE=4 SV=1
MKVAKRFRFEAAHRLPWHPGACRHLHGHSYRLVVGLEGNPDARGILVDFQDLKRLVQPLIDTWDHATLVASDDTALQDALDALGSRYVVLPFDSTAENLCAYVADYLIREAGDWLRARGVRRLWVRLAETETSFAETERALIRDVRPEPAAHAEAR

SEQ ID NO: 24998 - protein, 156 aa, Rhodothermus profundi
  misc_feature (1)..(156): tr|A0A1M6VW74|A0A1M6VW74_9BACT 6-pyruvoyltetrahydropter in/6-carboxytetrahydropterin synthase OS=Rhodothermus p rofundi OX=633813 GN=SAMN04488087_2138 PE=4 SV=1
MKIAKQFRFEAAHRLPWHPGACRHLHGHSYRLTVGLEGTPDARGILVDFQDLKRLLNPLIESWDHATLVASDDTALQEALDVLGSRYVVLPFDSTAENLCTYVADYLIREAGEWLRARGVRRLWVRLAETETSFAETECALVSDVRPQPATHAETH

SEQ ID NO: 24999 - protein, 138 aa, Rhodothermus profundi
  misc_feature (1)..(138): tr|A0A1M6TV62|A0A1M6TV62_9BACT 6-carboxy-5,6,7,8-tetrah ydropterin synthase OS=Rhodothermus profundi OX=633813 GN=SAMN04488087_1548 PE=3 SV=1
MPTVYVTRRVRFSAAHRLHNPARSEAWNQKTFGLCNHPNWHGHNYVLEVTVAGEPDPETGFVLNLSHLKEILETCILKKLDHKNLNLDVDFLQGVIPTTENLAIAIWRELESALPKGRLHCVRLYETEHNYVEYYGEE

SEQ ID NO: 25000 - protein, 179 aa, Rhodovarius sp.
  misc_feature (1)..(179): tr|A0A437MEF6|A0A437MEF6_9PROT 6-carboxytetrahydropteri n synthase OS=Rhodovarius sp. CCP-6 OX=1979269 GN=EOD42 _13010 PE=4 SV=1
MFSLVFSRRYAMAHRLTSGLSEACAIPHGHNETVTVTLRATSPSRLDGGANMVEPFERAKATWHRWIDQSLDHSLHLSGDDPLLDWFRVREPHRLARILVTPGDPTTEVLALCLMSKLNAFLAADGGRLFCAAIRVEETPTNTVTFEGDPLPMLPRLMQAEPWWLRADMSINDLMQVPA

SEQ ID NO: 25001 - protein, 133 aa, Rhodovarius sp.
  misc_feature (1)..(133): tr|A0A437MNM5|A0A437MNM5_9PROT 6-carboxytetrahydropteri n synthase OS=Rhodovarius sp. CCP-6 OX=1979269 GN=EOD42 _03670 PE=4 SV=1
MFSLTVVDHIMVAHSFRGKEFGPAQRLHGATFVVEAEFRAPKLDDLHLLIDIGLAKDELRKILSAIDYRNLDEEPVFAGKNTTTEYLCLHIHGLLAEACRDGRMGPGGAGVTGIKVLLRESHVAWAAFEGPVA

SEQ ID NO: 25002 - protein, 132 aa, Rhodovulum sp.
  misc_feature (1)..(132): tr|J5PUW0|J5PUW0_9RHOB PTPS-like protein OS=Rhodovulum sp. PH10 OX=1187851 GN=A33M_3862 PE=4 SV=1
MFALEVRRHVMIAHSFRGAVFGPAQALHGATFLVDAAFMTETLDPHGLVVDIGRAGDVLEGALAPLAYRNLDDLPDFLGVNTTTEFLAKHIHDRLAEAARAGALGRAASEIAAIRVTLSESHVARAWYEAPP

SEQ ID NO: 25003 - protein, 132 aa, Rhodovulum sp.; identical to SEQ ID NO: 21007
  misc_feature (1)..(132): tr|A0A2E2JV44|A0A2E2JV44_9RHOB 6-carboxytetrahydropteri n synthase OS=Rhodovulum sp. OX=34009 GN=CMM86_10795 PE =4 SV=1

SEQ ID NO: 25004 - protein, 131 aa, Rhodovulum sulfidophilum
  misc_feature (1)..(131): tr|A0A2W5NBK0|A0A2W5NBK0_RHOSU Uncharacterized protein OS=Rhodovulum sulfidophilum OX=35806 GN=DI556_07785 PE= 4 SV=1
MFAVEVRDHVMVAHSLPSKTFGPAQGLHGATFVVDAAFFAEELDPEGLVVDIGLATEALGEVLAPLRYANLDEKPEFLGRFTTTEFLCKHIFDDLAALIETGRLGDSKRLARLRITLHESHVAKAWYEARL

SEQ ID NO: 25005 - protein, 280 aa, Richelia intracellularis
  misc_feature (1)..(280): tr|M1WZP4|M1WZP4_9NOST 6-pyruvoyl tetrahydrobiopterin s ynthase OS=Richelia intracellularis HH01 OX=1165094 GN= RINTHH_16070 PE=4 SV=1
MQCIVNRRAKFSASHRYWLPEISESENLEKFSACSKYPGHGHNYVLFVSMAGKLNEYGMVLNLSDVKHIIKKEITSQLDFSYLNNVWSEFEETLPTTENIARVIWQRLAPHLPLVRVRLFESSELWTDYMGNSMESYLTISTHFSAAHRLASPLLNDEKNAEIYGKCSRPHGHGHNYHLEVTVKGEIDERTGMIVDLGTLHQVIENYVVELFDHTFLNKDILFFTQVVPTAENIALHISNLLQQPIQELGIQLYKVKLIESPNNSCEIYCDQPVLRGVQL

SEQ ID NO: 25006 - protein, 280 aa, Richelia sp.; identical to SEQ ID NO: 25005
  misc_feature (1)..(280): tr|A0A3B9F5P2|A0A3B9F5P2_9NOST 6-carboxytetrahydropteri n synthase OS=Richelia sp. OX=2053605 GN=DCG18_01125 PE =4 SV=1

SEQ ID NO: 25007 - protein, 172 aa, Rickettsia africae
  misc_feature (1)..(172): tr|C3PML9|C3PML9_RICAE Putative 6-pyruvoyl tetrahydropt erin synthase OS=Rickettsia africae (strain ESF-5) OX=3 47255 GN=RAF_ORF0217 PE=4 SV=1
MLRQLLRNFPHNDVVPFLLFAKKVKSFKERKYIIMIKCTRRIEFDAGHRIIEHQNKCQFLHGHRYVLEIAIAANKTDKLGMVIDFGLIKDLAKKWIDENFDHSLILHQDDKEMGQQIENCTGQKIYYMQNNPTAENIAMHLKNEIFPKLFVSQNFFVTSLKLYETPNCFVEV

SEQ ID NO: 25008 - protein, 147 aa, Rickettsia akari
  misc_feature (1)..(147): tr|A8GMF1|A8GMF1_RICAH Uncharacterized protein OS=Ricke ttsia akari (strain Hartford) OX=293614 GN=A1C_01290 PE =4 SV=1
MTIEKKYIIMIKCTRRIEFDAGHRIIGHQNKCQFLHGHRYVLEITIAAHETDKLGMIVDFGLIKDLAKKWIDEHFDHSLILHQDDKEMGQQIANCTGQKIYYMQNNPTAENIATHLKNEILPKLFVGQNFFVASLKLYETPNCFVEV

SEQ ID NO: 25009 - protein, 138 aa, Rickettsia amblyommatis
  misc_feature (1)..(138): tr|A0A0F3N0R7|A0A0F3N0R7_RICAM 6-pyruvoyl tetrahydropte rin synthase family protein OS=Rickettsia amblyommatis str. Ac/Pa OX=1359164 GN=APHACPA_0636 PE=4 SV=1
MIKCTRRIEFDAGHRIIEHQNKCQFLHGHRYVLEIAIAANKTDKLGMVIDFGLIKDLAKKWIDENFDHSLILHQDDKEMGQQIENCTGQKIYYMQNNPTAENIATHLKNEIFPKLFVSQNFFITSLKLYETPNCFVEV

SEQ ID NO: 25010 - protein, 138 aa, Rickettsia amblyommatis; identical to SEQ ID NO: 25009
  misc_feature (1)..(138): tr|A0A0F3QXV6|A0A0F3QXV6_RICAM 6-pyruvoyl tetrahydropte rin synthase family protein OS=Rickettsia amblyommatis str. Darkwater OX=1359166 GN=RAMDARK_0407 PE=4 SV=1

SEQ ID NO: 25011 - protein, 138 aa, Rickettsia argasii
  misc_feature (1)..(138): tr|A0A0F3RGC3|A0A0F3RGC3_9RICK 6-pyruvoyl tetrahydropte rin synthase family protein OS=Rickettsia argasii T170- B OX=1268837 GN=RAT170B_0132 PE=4 SV=1
MIKCTRRIEFDAGHRIIEHQNKCQFLHGHRYVLEIAIAANKTDKLGMVIDFGLIKDLAKKWIDENFDHSLILHQDDKEMGQQIENCTGQKIYYMQNNPTAENIATHLKNEIFPKLFVSQNFFVTSLKLYETPNCFVEV

SEQ ID NO: 25012 - protein, 138 aa, Rickettsia asembonensis
  misc_feature (1)..(138): tr|A0A0C2QXU7|A0A0C2QXU7_9RICK 6-carboxy-5,6,7,8-tetrah ydropterin synthase OS=Rickettsia asembonensis OX=10685 90 GN=SB78_04310 PE=4 SV=1
MIKCTRRIEFDAGHRIIGHQNKCQFLHGHRYVLEIAIAANKTDKLGMVIDFGLIKDLAKKWIDENFDHSLILHQDDKEMGQQIENCTGQKIYYMQNNPTAENIATHLKDEIFPKLFVGQNFFVASLKLYETPNCFVEV

SEQ ID NO: 25013 - protein, 162 aa, Rickettsia asiatica
  misc_feature (1)..(162): tr|A0A510G6K3|A0A510G6K3_9RICK 6-carboxy-5,6,7,8-tetrah ydropterin synthase OS=Rickettsia asiatica OX=238800 GN =queD PE=4 SV=1
MTICVPFLLLEKEVKLFKERKYIIMIKCTRRIEFDAGHRIIGHQNKCQFLHGHRYVLEITIAANEIDKLGMVIDFGLIKDLAKKWIDENFDHSLILHQDDKKMGQQIENCTGQKIYYMQNNPTAENIAMHLKNEIFPKLFIGQNFFIASLKLYETPNCFVEV

SEQ ID NO: 25014 - protein, 138 aa, Rickettsia australis
  misc_feature (1)..(138): tr|H8K8M0|H8K8M0_RICAC 6-carboxy-5,6,7,8-tetrahydropter in synthase OS=Rickettsia australis (strain Cutlack) OX =1105110 GN=MC5_06875 PE=4 SV=1
MIKCTRRIEFDAGHRIIGHQNKCQFLHGHRYVLEITIAAHETDKLGMIVDFGLIKDLAKKWIDKHFDHSLILHQDDKDMGQQIENCTGQKIYYMQNNPTAENIATHLKNEIFSKLFVGHNFFVASLKLYETPNCFVEV

SEQ ID NO: 25015 - protein, 138 aa, Rickettsia bellii
  misc_feature (1)..(138): sp|Q1RHI6|QUED_RICBR 6-carboxy-5,6,7,8-tetrahydropterin synthase OS=Rickettsia bellii (strain RML369-C) OX=336 407 GN=queD PE=3 SV=1
MIKCTRRIEFDAGHRIIGHQNKCQYLHGHRYVLEITIAAKNTDELGMVVDFGLIKDLAKGWVDENFDHSLILHQGDKEIGQKIESHTGQKVYYLKNNPTAENIALHLKNEIFPKLFESQKFFVTNIKLFETPNCFVEV

SEQ ID NO: 25016 - protein, 138 aa, Rickettsia bellii; identical to SEQ ID NO: 25015
  misc_feature (1)..(138): tr|A0A0F3QFS3|A0A0F3QFS3_RICBE 6-pyruvoyl tetrahydropte rin synthase family protein OS=Rickettsia bellii str. R ML Mogi OX=1359194 GN=RBEMOGI_0036 PE=4 SV=1

SEQ ID NO: 25017 - protein, 60 aa, Rickettsia buchneri
  misc_feature (1)..(60): tr|A0A067AA71|A0A067AA71_9RICK Uncharacterized protein OS=Rickettsia buchneri OX=1462938 GN=REISMN_06080 PE=4 SV=1
MGQQIENCTGQKIYYMQNNPTAENIATHLKNEIFPKLFVGQNFFIASLKLYETLNCFVEV

SEQ ID NO: 25018 - protein, 60 aa, Rickettsia buchneri
  misc_feature (1)..(60): tr|A0A067A9C9|A0A067A9C9_9RICK Queuosine biosynthesis p rotein QueD OS=Rickettsia buchneri OX=1462938 GN=REISMN _06085 PE=4 SV=1
MIKCTRRIEFDAGHRIIGHQNKCQFLHGHRYVLEITIATNETDKLGMIIDFGLIKDLAKK

SEQ ID NO: 25019 - protein, 138 aa, Rickettsia canadensis
  misc_feature (1)..(138): tr|A8EXQ3|A8EXQ3_RICCK Uncharacterized protein OS=Ricke ttsia canadensis (strain McKiel) OX=293613 GN=A1E_00940 PE=4 SV=1
MIKCTRRIEFDSGHRIIGHQNKCQFLHGHRYVLEITIAANKTDTLGMVIDFGLIKDLAKKWIDKNFDHSLILHQDDKEMGQQIENCTGQKIYYMRNNPTAENIAIHLKNEIFPKLFINQQFSVTSLKLFETPNCFVEV

SEQ ID NO: 25020 - protein, 138 aa, Rickettsia conorii; identical to SEQ ID NO: 25011
  misc_feature (1)..(138): sp|Q92J44|QUED_RICCN 6-carboxy-5,6,7,8-tetrahydropterin synthase OS=Rickettsia conorii (strain ATCC VR-613 / M alish 7) OX=272944 GN=queD PE=3 SV=2

SEQ ID NO: 25021 - protein, 60 aa, Rickettsia endosymbiont; identical to SEQ ID NO: 25018
  misc_feature (1)..(60): tr|C4YW53|C4YW53_9RICK Queuosine biosynthesis protein Q ueD OS=Rickettsia endosymbiont of Ixodes scapularis OX= 444612 GN=REIS_1699 PE=4 SV=1

SEQ ID NO: 25022 - protein, 138 aa, Rickettsia endosymbiont
  misc_feature (1)..(138): tr|A0A0F3REA9|A0A0F3REA9_9RICK 6-pyruvoyl tetrahydropte rin synthase family protein OS=Rickettsia endosymbiont of Ixodes pacificus OX=1133329 GN=ptpS PE=4 SV=1
MIKCTRRIEFDAGHRIIGHQNKCQFLHGHRYILEITIATNETDKLGMVIDFGLIKDLAKKWIDENFDHSLILNQDDKEMGQQIENCTGQKIYYMQNNPTAENIATHLKNEIFPKLFVSQNFFIASLKLYETLNCFVEV

SEQ ID NO: 25023 - protein, 138 aa, Rickettsia felis
  misc_feature (1)..(138): sp|Q4UKI6|QUED_RICFE 6-carboxy-5,6,7,8-tetrahydropterin synthase OS=Rickettsia felis (strain ATCC VR-1525 / UR RWXCal2) OX=315456 GN=queD PE=3 SV=1
MIKCTRRIEFDAGHRIIGHQNKCQFLHGHRYVLEIAIAANKTDKLGMVIDFGLIKDVAKKWIDENFDHSLILHQDDKEMGQQIENCTGQKIYYMQNNPTAENIATHLKNEIFPKLFVGQNFFVSNLKLYETPNCFVEV

SEQ ID NO: 25024 - protein, 138 aa, Rickettsia felis; identical to SEQ ID NO: 25023
  misc_feature (1)..(138): tr|A0A0F3MWH4|A0A0F3MWH4_RICFI 6-pyruvoyl tetrahydropte rin synthase family protein OS=Rickettsia felis str. Pe dreira OX=1359196 GN=RFEPED_1314 PE=4 SV=1

SEQ ID NO: 25025 - protein, 138 aa, Rickettsia heilongjiangensis; identical to SEQ ID NO: 25011
  misc_feature (1)..(138): tr|G0GX08|G0GX08_RICH0 6-carboxy-5,6,7,8-tetrahydropter in synthase OS=Rickettsia heilongjiangensis (strain ATC C VR-1524 / 054) OX=1032845 GN=Rh054_01325 PE=4 SV=1

SEQ ID NO: 25026 - protein, 138 aa, Rickettsia japonica; identical to SEQ ID NO: 25011
  misc_feature (1)..(138): tr|A0A3B7DJK9|A0A3B7DJK9_RICJA 6-pyruvoyl tetrahydropte rin synthase family protein OS=Rickettsia japonica OX=3 5790 GN=D0Z68_01395 PE=4 SV=1

SEQ ID NO: 25027 - protein, 138 aa, Rickettsia japonica; identical to SEQ ID NO: 25011
  misc_feature (1)..(138): tr|G4KM97|G4KM97_RICJY Putative 6-pyruvoyl tetrahydropt erin synthase OS=Rickettsia japonica (strain ATCC VR-13 63 / YH) OX=652620 GN=RJP_0184 PE=4 SV=1

SEQ ID NO: 25028 - protein, 138 aa, Rickettsia massiliae
  misc_feature (1)..(138): tr|H6QL20|H6QL20_RICMA 6-carboxy-5,6,7,8-tetrahydropter in synthase OS=Rickettsia massiliae str. AZT80 OX=11051 12 GN=RMB_01295 PE=4 SV=1
MIKCIRRIEFDAGHRIIEHQNKCQFLHGHRYVLEIAIAANQTDKLGMVIDFGLIKDLAKKWIDENFDHSLILHQDDKEMGQQIENCTGQKIYYMQNNPTAENIATHLKNEIFPKLFVSQNFFVTSLKLYETPNCFVEV

SEQ ID NO: 25029 - protein, 140 aa, Rickettsia massiliae
  misc_feature (1)..(140): tr|A8F0T5|A8F0T5_RICM5 Putative 6-pyruvoyl tetrahydropt erin synthase OS=Rickettsia massiliae (strain Mtu5) OX= 416276 GN=RMA_0237 PE=4 SV=1
MIMIKCTRRIEFDAGHRIIEHQNKCQFLHGHRYVLEITIAANQTDKLGMVIDFGLIKDLAKKWIDENFDHSLILHQDDKEMGQQIENCTGQKIYYMQNNPTAENIATHLKNEIFPKLFVSQNFFVTSLKLYETPNCFVEV

SEQ ID NO: 25030 - protein, 138 aa, Rickettsia monacensis
  misc_feature (1)..(138): tr|A0A0B7IYW9|A0A0B7IYW9_9RICK 6-pyruvoyl tetrahydropte rin synthase OS=Rickettsia monacensis OX=109232 GN=RMON A_03675 PE=4 SV=1
MIKCTRRIEFDAGHRIIGHQNKCQFLHGHRYVLEITIATNETDKLGMVIDFGLIKDLAKKWIDENFDHSLILNQGDKEMGQQIENCTGQKIYYMQNNPTAENIATHLKNEIFPKLFVSQNFFIASLKLYETLNCFVEV

SEQ ID NO: 25031 - protein, 138 aa, Rickettsia montanensis
  misc_feature (1)..(138): tr|H8KC97|H8KC97_RICMS 6-carboxy-5,6,7,8-tetrahydropter in synthase OS=Rickettsia montanensis (strain OSU 85-93 0) OX=1105114 GN=MCI_05365 PE=4 SV=1
MIKCTRRIEFDAGHRIIEHQNKCQFLHGHRYVLEIAIAANKTDKLGMVIDFGLIKDLAKKWIDENFDHSLILHQDDKEMGQQIENCTGQKIYYMQSNPTAENIATHLKNEIFPKLFVSQNFFVTSLKLYETPNCFVEV

SEQ ID NO: 25032 - protein, 138 aa, Rickettsia parkeri; identical to SEQ ID NO: 25011
  misc_feature (1)..(138): tr|A0A0F3QNQ5|A0A0F3QNQ5_RICPA 6-pyruvoyl tetrahydropte rin synthase family protein OS=Rickettsia parkeri str. Grand Bay OX=1359203 GN=RPAGB_1413 PE=4 SV=1

SEQ ID NO: 25033 - protein, 138 aa, Rickettsia peacockii
  misc_feature (1)..(138): tr|C4K117|C4K117_RICPU Uncharacterized protein OS=Ricke ttsia peacockii (strain Rustic) OX=562019 GN=RPR_02095 PE=4 SV=1
MIKCTRRIEFDAGHRIIEHQNKCQFLHGHRYVLEIAIAANKTDKLGMVIDFGLIKDLAKKWIDENFDHSLILHQDDKEMGQQIENCTGQKIYYMQNNPTAENIATHLKNEIFPKLFVSQNFFVTSLKLYETPHCFVEV

SEQ ID NO: 25034 - protein, 138 aa, Rickettsia philipii
  misc_feature (1)..(138): tr|H6PWF0|H6PWF0_RICP3 6-carboxy-5,6,7,8-tetrahydropter in synthase OS=Rickettsia philipii (strain 364D) OX=481 009 GN=RSA_01235 PE=4 SV=1
MIKCTRRIEFDAGHRIIEHQNKCQFLHGHRYVLEIAIAANKTDKLGMVIDFGLIKDLAKKWIDENFDHSLILHQDDNEMGQQIENCTGQKIYYMQNNPTAENIATHLKNEIFPKLFVSQNFFVTSLKLYETPNCFVEV

SEQ ID NO: 25035 - protein, 138 aa, Rickettsia prowazekii
  misc_feature (1)..(138): sp|Q9ZDY5|QUED_RICPR 6-carboxy-5,6,7,8-tetrahydropterin synthase OS=Rickettsia prowazekii (strain Madrid E) OX =272947 GN=queD PE=3 SV=1
MIKCTRRINFDAGHRIIGHKNKCQFLHGHHYVLEITIAANKTDTLGMVIDFGLIKNLAKKWIDANFDHNLILHQDDKEMGQQIENYTRQKIYYMRNNPTAENIATHLKNEIFPKLFVSQNFFVTSLKLYETQNCFVEV

SEQ ID NO: 25036 - protein, 138 aa, Rickettsia prowazekii; identical to SEQ ID NO: 25035
  misc_feature (1)..(138): tr|D5AWA0|D5AWA0_RICPP Putative 6-pyruvoyl tetrahydropt erin synthase OS=Rickettsia prowazekii (strain Rp22) OX =449216 GN=rpr22_CDS170 PE=4 SV=1

SEQ ID NO: 25037 - protein, 138 aa, Rickettsia raoultii; identical to SEQ ID NO: 25011
  misc_feature (1)..(138): tr|A0A126EB83|A0A126EB83_9RICK 6-carboxy-5,6,7,8-tetrah ydropterin synthase OS=Rickettsia raoultii OX=369822 GN =UQ52_01280 PE=4 SV=1

SEQ ID NO: 25038 - protein, 138 aa, Rickettsia rhipicephali
  misc_feature (1)..(138): tr|A0A0S2CC41|A0A0S2CC41_RICRH 6-carboxy-5,6,7,8-tetrah ydropterin synthase OS=Rickettsia rhipicephali OX=33992 GN=ASQ44_06460 PE=4 SV=1
MIKCTRRIEFDAGHRIIEHQNKCQFLHGHRYVLEIAIAANQTDKLGMVIDFGLIKDLAKKWIDENFDHSLILHQDDKAMGQQIENCTGQKIYYMQNNPTAENIATHLKNEIFPKLFVSQNFFVTSLKLYETPNCFVEV

SEQ ID NO: 25039 - protein, 138 aa, Rickettsia rhipicephali; identical to SEQ ID NO: 25028
  misc_feature (1)..(138): tr|A0A0F3PG77|A0A0F3PG77_RICRH 6-pyruvoyl tetrahydropte rin synthase family protein OS=Rickettsia rhipicephali str. Ect OX=1359199 GN=RMAECT_0454 PE=4 SV=1

SEQ ID NO: 25040 - protein, 138 aa, Rickettsia rickettsii
  misc_feature (1)..(138): tr|A0A0H3AVG5|A0A0H3AVG5_RICRS Uncharacterized protein OS=Rickettsia rickettsii (strain Sheila Smith) OX=39202 1 GN=A1G_01285 PE=4 SV=1
MIKCTRRIEFDAGHRIIKHQNKCQFLHGHRYVLEITIAANKTDKLGMVIDFGLIKDLAKKWIDENFDHSLILHQDDKEMGQQIENCTGQKIYYMQNNPTAENIATHLKNEIFPKLFVSQNFFVTSLKLYETPNCFVEV

SEQ ID NO: 25041 - protein, 161 aa, Rickettsia rickettsii
  misc_feature (1)..(161): tr|B0BWG2|B0BWG2_RICRO 6-pyruvoyl tetrahydropterin synt hase OS=Rickettsia rickettsii (strain Iowa) OX=452659 G N=RrIowa_0279 PE=4 SV=1
MTWSRFYSLKKKVKSFKERKYIIMIKCTRRIEFDAGHRIIKHQNKCQFLHGHRYVLEITIAANKTDKLGMVIDFGLIKDLAKKWIDENFDHSLILHQDDKEMGQQIENCTGQKIYYMQNNPTAENIATHLKNEIFPKLFVSQNFFVTSLKLYETPNCFVEV

SEQ ID NO: 25042 - protein, 138 aa, Rickettsia sibirica; identical to SEQ ID NO: 25011
  misc_feature (1)..(138): tr|Q7PAX3|Q7PAX3_RICS2 Uncharacterized protein OS=Ricke ttsia sibirica (strain ATCC VR-151 / 246) OX=272951 GN= rsib_orf479 PE=4 SV=1

SEQ ID NO: 25043 - protein, 138 aa, Rickettsia slovaca; identical to SEQ ID NO: 25011
  misc_feature (1)..(138): tr|H8LM62|H8LM62_RICSL 6-carboxy-5,6,7,8-tetrahydropter in synthase OS=Rickettsia slovaca str. D-CWPP OX=110510 9 GN=MC3_01315 PE=4 SV=1

SEQ ID NO: 25044 - protein, 138 aa, Rickettsia sp.
  misc_feature (1)..(138): tr|A0A1C3EXM9|A0A1C3EXM9_9RICK 6-carboxy-5,6,7,8-tetrah ydropterin synthase OS=Rickettsia sp. wb OX=1851512 GN= A8V33_01240 PE=4 SV=1
MIKCTRRIEFDAGHRIIGHKNKCQYLHGHRYVLEITIAAKNTDELGMVVDFGLIKDLAKGWIDENFDHSLILHQDDKEIGQKIESHTGQKVYYLKNNPTAENIALHLKNEIFPKLFESQKFFVTSIKLFETPNCFVEV

SEQ ID NO: 25045 - protein, 138 aa, Rickettsia sp.; identical to SEQ ID NO: 25044
  misc_feature (1)..(138): tr|A0A249E3C6|A0A249E3C6_9RICK 6-carboxy-5,6,7,8-tetrah ydropterin synthase OS=Rickettsia sp. MEAM1 (Bemisia ta baci) OX=1182263 GN=BA173_05205 PE=4 SV=1

SEQ ID NO: 25046 - protein, 138 aa, Rickettsia typhi
  misc_feature (1)..(138): sp|Q68XI9|QUED_RICTY 6-carboxy-5,6,7,8-tetrahydropterin synthase OS=Rickettsia typhi (strain ATCC VR-144 / Wil mington) OX=257363 GN=queD PE=3 SV=1
MIKCTRRIDFDAGHRIIGHKNKCQFLHGHHYVLEITIAANKTDKLGMVIDFGLIKNLAKKWIDANFDHNLILHQDDKEIGKQIENYTGQKIYYMRNNPTAENIAIHLKNEIFPKLFIDQNFFVTSLKLYETQNCFVEV

SEQ ID NO: 25047 - protein, 118 aa, Rickettsiales bacterium
  misc_feature (1)..(118): tr|A0A1Z9MWX1|A0A1Z9MWX1_9RICK 6-carboxy-5,6,7,8-tetrah ydropterin synthase OS=Rickettsiales bacterium TMED211 OX=1986869 GN=CBD71_02110 PE=3 SV=1
MIIYKKYYFDTAHFMPNHSKNHKYSKVHGHSYEITIFLNGKQNKKKGWVMDFEKIDIFMKPILKKIDHNLLNDLHGLENPTSENIAKWFWLHLKGKIKNLEKIEINRPRIGGCVYSGE

SEQ ID NO: 25048 - protein, 118 aa, Rickettsiales bacterium
  misc_feature (1)..(118): tr|A0A2E3SSF8|A0A2E3SSF8_9RICK 6-carboxy-5,6,7,8-tetrah ydropterin synthase OS=Rickettsiales bacterium OX=20267 88 GN=queD PE=3 SV=1
MEIYKTFIFHAAHRMTNMPKGHEYSKIHGHSFTVDIYVKGSLDRENGWVMDFKEIEKAFKPIHASLDHGFLNDIKGLNNPTSENLARWIWKELKPSLPKLSKVVVGRSSIGGAVYKGR

SEQ ID NO: 25049 - protein, 149 aa, Rickettsiales endosymbiont
  misc_feature (1)..(149): tr|A0A3S8T1W3|A0A3S8T1W3_9RICK Uncharacterized protein OS=Rickettsiales endosymbiont of Stachyamoeba lipophora OX=2486578 GN=EF513_02300 PE=4 SV=1
MNLAKVILSYSSKFSCSLELVNPILNEGEHQLVYGSEDRKYLGEIKFEILAGDNIEQVTGMNINHTILKKAAKQIVEEFNGQNLNEAMEEFKTIPPTLENIAKTIWDKLNQHSDLKDKLKAIKLIDQNNFAVIYSQQESGYDDVAGFMA

SEQ ID NO: 25050 - protein, 147 aa, Rickettsiales endosymbiont
  misc_feature (1)..(147): tr|A0A4Q7DMM1|A0A4Q7DMM1_9RICK 6-carboxytetrahydropteri n synthase OS=Rickettsiales endosymbiont of Peranema tr ichophorum OX=2486577 GN=EDM53_01740 PE=4 SV=1
MLTCTKRIEFDAAHRVREHRSVCKMLHGHRYAIEATFASQELNQIGMIIDFGEIKDKLKSWIDKYWDHNTILHADDENLGRAIGQITTQNVFFMNCNPTAENMANFVLHEICPSLFVDTNVQCIKIRLYETPSCYAEATIEKINAHV

SEQ ID NO: 25051 - protein, 147 aa, Riemerella anatipestifer
  misc_feature (1)..(147): tr|E4TBV1|E4TBV1_RIEAD Uncharacterized protein OS=Rieme rella anatipestifer (strain ATCC 11845 / DSM 15868 / JC M 9532 / NCTC 11014) OX=693978 GN=RA0C_1082 PE=4 SV=1
MIRITKIFSFETAHVLYNYDGKCKNMHGHSYKLFVTVKGVPINDLDHPKNGMVVDFGDIKKIVKEEIVDVWDHAVLLNANSPHISLGKELEEKGHKVIFCNYQPTCENMLYDIAAKIKNRLPESVQLAYLKLHETENSYGEWLAEEN

SEQ ID NO: 25052 - protein, 147 aa, Riemerella anatipestifer
  misc_feature (1)..(147): tr|J9R5A2|J9R5A2_RIEAN 6-carboxy-5,6,7,8-tetrahydropter in synthase OS=Riemerella anatipestifer RA-CH-1 OX=1228 997 GN=B739_1039 PE=3 SV=1
MIRITKIFSFETAHVLYNYDGKCKNMHGHSYKLFVTVKGVPINDLDHPKNGMVVDFGDIKKIVKEEIVDVWDHAVLLNASSPHISLGKELEEKGHKVIFCNYQPTCENMLYDIAAKIKNRLPKSVQLAYLKLHETENSYGEWLAEEN

SEQ ID NO: 25053 - protein, 148 aa, Riemerella columbipharyngis
  misc_feature (1)..(148): tr|A0A1G7CZG5|A0A1G7CZG5_9FLAO 6-carboxy-5,6,7,8-tetrah ydropterin synthase OS=Riemerella columbipharyngis OX=1 071918 GN=SAMN05421544_10986 PE=3 SV=1
MIRITKIFTFETAHVLYNYDGKCKNMHGHSYKLFVTVKGKPISDLNHPKNGMVVDFGDIKKIVKEEIVDCWDHAVLVNGLSPHKELGDELASKGHKVIYCDYQPTCENMLYDIAEKIKQRLPSPLQLAYLKLHETENSYGEWLAEENP

SEQ ID NO: 25054 - protein, 148 aa, Riemerella sp.
  misc_feature (1)..(148): tr|A0A496P3F3|A0A496P3F3_9FLAO 6-carboxy-5,6,7,8-tetrah ydropterin synthase OS=Riemerella sp. OX=2382126 GN=D8B 49_05330 PE=3 SV=1
MIRVTKIFTFETAHVLYGYDGKCKNIHGHSYKLFVTIKGKPIDDINNEKNGMVLDFGDLKAIVKEEIVDEWDHGLMVNALSPHKDLGKELEQKGHKVIYCDYQPTCENMLYEIADKIKKRLPSQVQLVYLKLHETENSYGEWFAEDNE

SEQ ID NO: 25055 - protein, 151 aa, Rikenella microfusus
  misc_feature (1)..(151): tr|A0A379MRQ9|A0A379MRQ9_9BACT 6-pyruvoyl tetrahydropte rin synthase/QueD family protein OS=Rikenella microfusu s OX=28139 GN=NCTC11190_00519 PE=4 SV=1
MATIRLTREFSFETAHALEGYDGLCRHVHGHSYKLFVTVSGIPCDDPSSPKYGMVMDFGDLKRIVNELVVDRYDHALVLRRTSGNTELLERVREKWERVYLVDYQPTCEMMLSRFAEQIAAALPAGVRLAELSLYETAKSHATWRAEDNPL

SEQ ID NO: 25056 - protein, 142 aa, Rikenellaceae bacterium
  misc_feature (1)..(142): tr|A0A359H1F6|A0A359H1F6_9BACT 6-carboxy-5,6,7,8-tetrah ydropterin synthase OS=Rikenellaceae bacterium OX=20490 48 GN=DEG92_05090 PE=3 SV=1
MTKEFRFEGAHALTDYDGKCRHIHGHSYKLYVTLKGMPRDELHHPKNGMVVDFTDLKGVVNRLIVDPFDHALLLRQDAKLASEISDAYENVIILDFQPTCENLTIYFAKLLQGNMPAGVSLHSIKLYETPTSFVEWVASENN

SEQ ID NO: 25057 - protein, 109 aa, Rikenellaceae bacterium
  misc_feature (1)..(109): tr|A0A351NH55|A0A351NH55_9BACT 6-carboxytetrahydropteri n synthase QueD OS=Rikenellaceae bacterium OX=2049048 G N=DCW53_04890 PE=4 SV=1
MYYVSKRFEVSAAHYVTTDHRSKCEALHGHNWIVIVHCKSETLNDDGMVTDFTVIKQNIMSKIDHKNLNEVLPFSPTAENLAKWICDETPNCYRVEIWESENNKAEYEI

SEQ ID NO: 25058 - protein, 136 aa, Rippkaea orientalis
  misc_feature (1)..(136): tr|B7K1S3|B7K1S3_RIPO1 6-carboxy-5,6,7,8-tetrahydropter in synthase OS=Rippkaea orientalis (strain PCC 8801) OX =41431 GN=PCC8801_0124 PE=3 SV=1
MTANFHDNWLIFKEFRFEAAHRLPHYDGKCHRLHGHSWVGRIYVQGDRLVKDGPKQGMIMDFSDIQRYLEPLLENFLDHYYLNETMGLENPTCEAVAQWIFEKLEKAGLQGLQAVEIQETCTSGVRYSRSQKSVGA

SEQ ID NO: 25059 - protein, 291 aa, Rippkaea orientalis
  misc_feature (1)..(291): tr|B7K2P5|B7K2P5_RIPO1 Uncharacterized protein OS=Rippk aea orientalis (strain PCC 8801) OX=41431 GN=PCC8801_24 27 PE=4 SV=1
MQCVINRRAQFSASHRYWLSELDEQENRLKFGDCTRFPGHGHNYVLYVSLLGEIDSYGMVENLSTVKRVIKEEITSQLDYCYLNDVWEEFQDSLPTTENLARVIWQRLAPHLPLVNIQLFEHPQLWADYQGNAMKATLTIQTHFSAAHRLALPELTLEQNSEIYGKCARIHGHGHNYHLEVSVTGEIDPRTGMLVDLGILQQVVKDYVVEPFDHTFLNKDIPYFAQVVPTAENIALYIAQLLQTPIQQLGAELDKVKLIESPNNSCEIYCRHLPQPPESLASRQPILVGTR

SEQ ID NO: 25060 - protein, 133 aa, Rivibacter subsaxonicus
  misc_feature (1)..(133): tr|A0A4Q7VGB0|A0A4Q7VGB0_9BURK 6-carboxy-5,6,7,8-tetrah ydropterin synthase OS=Rivibacter subsaxonicus OX=45757 5 GN=EV670_2775 PE=3 SV=1
MFELSQSFYFEAAHTLRRNVDDATEAAGSRRIHGHTYQAEVTVCGQRDPATGMVLDLALLRAVVARVRTTLDHHFLDEIEGLGVPTLENLCLYIHRSLAAAVPGVTQVSVWRESSGDRCTYRPDRSSTAGGPR

SEQ ID NO: 25061 - protein, 326 aa, Rivicola pingtungensis
  misc_feature (1)..(326): tr|A0A318KJQ4|A0A318KJQ4_9NEIS 6-pyruvoyltetrahydropter in/6-carboxytetrahydropterin synthase OS=Rivicola pingt ungensis OX=1054498 GN=DFR34_12733 PE=4 SV=1
MPLMHAASCGFEAARSVRNVADLRRCLHGHSFLCSARWADGAPDVGAALSTALAPLDYADLNQAVAVPDDASLLGWIAGHLPHADGLWLRSAPDRGVLRASAQTPLLHWLHADFEAAHQLPNVPPGHQCGRLHGHGFGVTLCAAASHAELEQAWARLRPLLHQRMLNDIPGLENPTSEVISAWLWRQLADVLALDHVIVRETATAGSQFNGHTHRIWKTQRFEAATPFDAHGRYTGHSYSLRLHLSGQLDEVMGWVQDFGDVKTRFKPFYQQLDHYPLDQVDGLSVANCAGIAQWAAAKLANTPELCRVDVYQRPGEGSLFSVEAA

SEQ ID NO: 25062 - protein, 129 aa, Rivularia sp.
  misc_feature (1)..(129): tr|K9R8S3|K9R8S3_9CYAN 6-carboxy-5,6,7,8-tetrahydropter in synthase OS=Rivularia sp. PCC 7116 OX=373994 GN=Riv7 116_0915 PE=3 SV=1
MPKWKLVTEFTFDSAHYIKDYNGPCGRMHGHSYTVRIEAISTKLHSSEFCPHPVMVADFRSLRWAKKDVAKGGLDHCVLNEVMPPEYETTAEMIAKYIYDETKKKLPEGVKIKVAVSETANSWAEYEDD

SEQ ID NO: 25063 - protein, 290 aa, Rivularia sp.
  misc_feature (1)..(290): tr|K9RLR4|K9RLR4_9CYAN 6-pyruvoyl-tetrahydropterin synt hase OS=Rivularia sp. PCC 7116 OX=373994 GN=Riv7116_567 0 PE=4 SV=1
MQCIVNRRAQFSASHRYWLPELSEAENNEKFAACANFPGHGHNYVLFISLQGELDEYGMVLNLSDVKKVIKREITSQLDFSYLNDVWEEFGQTLPTTENIARVIYKRLSSYLPIVRVQLFEHPQLWADYMGNSMEAYLTVGTHFSAAHRLASPKLSKEENLEIYGKCARPHGHGHNYHLEITVKGEIAERTGMLVDLGALNKVIDDYVLEPFDHTFLNKDIPYFAEIVPTAENIALYISNTLREPIAKLGATLYKVKLIESPNNSCEIYCNNSESNLSGATQEQPVLVKL

SEQ ID NO: 25064 - protein, 151 aa, Robbsia andropogonis
  misc_feature (1)..(151): tr|A0A0F5K3W1|A0A0F5K3W1_9BURK 6-carboxy-5,6,7,8-tetrah ydropterin synthase OS=Robbsia andropogonis OX=28092 GN =WM40_04100 PE=4 SV=1
MIRITRRLEFDAGHRIPDHRSQCRNLHGHRYVLELTLEGEVVEESGSPECGMVMDFADVKSLANAHLVDRWDHAFLVYQGDEAVMRFLETLPGHKTVVIDRIPTVENLAQWAYETLAPVYDGHYGRALRLIRVRLYETPNCWADAGPKLEG

SEQ ID NO: 25065 - protein, 148 aa, Robbsia sp.
  misc_feature (1)..(148): tr|A0A494Y799|A0A494Y799_9BURK 6-carboxytetrahydropteri n synthase OS=Robbsia sp. DHC34 OX=2419776 GN=D7S86_011 95 PE=4 SV=1
MLSITRKLEFDAGHRIPDHRSQCRNLHGHRYVLEITLEGELVDVEGAPDRGMVMDFADVKSLANTHLVDLWDHAFLVFEGDTQVRDFLATMPGHKTVVLDRIPTVENLALAAFGILSKVYDQHYGVDLRLKRVRLYETPNCWADAERA

SEQ ID NO: 25066 - protein, 136 aa, Robertkochia marina
  misc_feature (1)..(136): tr|A0A4V3UXU2|A0A4V3UXU2_9FLAO 6-carboxy-5,6,7,8-tetrah ydropterin synthase OS=Robertkochia marina OX=1227945 G N=E7Z59_13735 PE=3 SV=1
MRVKVSRKAHFNAAHRLYRKDWSFEKNEQVFGKCNNPHYHGHNYELIASVSGPIDPETGFVIDVKVLKDLIKAEVEDYMDHKNLNEEVEEFKTLNPTAENIAVVIYNRLKPHLKADLDLEVVLYETPRNFVTYSGE

SEQ ID NO: 25067 - protein, 150 aa, Robertkochia marina
  misc_feature (1)..(150): tr|A0A4S3M2W6|A0A4S3M2W6_9FLAO 6-carboxytetrahydropteri n synthase OS=Robertkochia marina OX=1227945 GN=E7Z59_0 2500 PE=4 SV=1
MSKIRITKMFNFETGHALYGYDGKCRNVHGHSYKLSVTVIGTPIADTSHVKYGMVIDFGDLKKIVKEEIVDKFDHATVFNKNTPHIELAKELEERGHNVILVNYQPTSEEMIIDFAAKIKARLPENITLHSLKLQETETSFAEWHAADQV

SEQ ID NO: 25068 - protein, 151 aa, Robiginitalea biformata
  misc_feature (1)..(151): tr|A4CIF9|A4CIF9_ROBBH 6-pyruvoyl tetrahydropterin synt hase OS=Robiginitalea biformata (strain ATCC BAA-864 / HTCC2501 / KCTC 12146) OX=313596 GN=RB2501_07445 PE=4 S V=1
MARVRITKEFTFETGHALYGYDGKCRNVHGHSYHLSVTVIGTPIAEDGAVKLGMVMDFGDLKKVVREEVVDRFDHATIFNRNTPHVELARTLEREGHRVILADYQPTSENMVVDFAHRISKRLPEHIRLHSLRLRETGTAYAEWFASDNPD

SEQ ID NO: 25069 - protein, 137 aa, Robiginitalea biformata
  misc_feature (1)..(137): tr|A4CQ76|A4CQ76_ROBBH 6-carboxy-5,6,7,8-tetrahydropter in synthase OS=Robiginitalea biformata (strain ATCC BAA -864 / HTCC2501 / KCTC 12146) OX=313596 GN=RB2501_02005 PE=3 SV=1
MRVTVSRKAHFNAAHRLYRPDWDDARNREVFGKCSNPLYHGHNYELIVSVTGPIDPETGFVVDMAELKVLIRDKVEDALDHKNLNEEVPEFRELNPTAENIAVVIWDKLRPHIPASCDLEITLYETPRNFVSYRGAE

SEQ ID NO: 25070 - protein, 154 aa, Robiginitalea myxolifaciens
  misc_feature (1)..(154): tr|A0A1I6G4P6|A0A1I6G4P6_9FLAO 6-pyruvoyltetrahydropter in/6-carboxytetrahydropterin synthase OS=Robiginitalea myxolifaciens OX=400055 GN=SAMN04490243_1239 PE=4 SV=1
MSRIRITKEFNFETGHALYGYDGKCRNVHGHSYHLSVTIIGTPITETGHIKLGMVMDFGDLKKIVNEEVVDLFDHATVFNKNSPHIELARTLESQGHRVILADYQPTSENMVIDFAERISKRLPANIQLHSLKLRETGTAYAEWVAADNPESAS

SEQ ID NO: 25071 - protein, 135 aa, Robiginitalea myxolifaciens
  misc_feature (1)..(135): tr|A0A1I6FP16|A0A1I6FP16_9FLAO 6-carboxy-5,6,7,8-tetrah ydropterin synthase OS=Robiginitalea myxolifaciens OX=4 00055 GN=SAMN04490243_0294 PE=3 SV=1
MRVKVSRKAHFNAAHRLYRPDWDDAKNLRVFGKCSNPKYHGHNYELIVSVTGEIDPETGFVIDLKVLKDLIREQVEDAMDHKNLNEEVEEFKELNPTAEHIAMVIWKRLRPHLPEGSDLEVQLYETPRNFVTFTG

SEQ ID NO: 25072 - protein, 125 aa, Robiginitomaculum sp.
  misc_feature (1)..(125): tr|A0A2G1YV57|A0A2G1YV57_9RHOB 6-carboxy-5,6,7,8-tetrah ydropterin synthase OS=Robiginitomaculum sp. OX=2030823 GN=COB92_04300 PE=3 SV=1
MNADIILSRSFTFEAAHSIDLPDGTNPGYKNLHGHSFSASLSVKGRQADIDKWLLDFGSLDPVIEKIRAKLDHAYLNDIEGLKYSTLENLCAYIFKLAKPMVPGLHGVEISRHTCGQTCKLVVDD

SEQ ID NO: 25073 - protein, 124 aa, Robiginitomaculum sp.
  misc_feature (1)..(124): tr|A0A2G2G5F5|A0A2G2G5F5_9RHOB 6-carboxy-5,6,7,8-tetrah ydropterin synthase OS=Robiginitomaculum sp. OX=2030823 GN=COA43_13055 PE=3 SV=1
MQANIILSKTFTFEAAHSLDLKDGTDLGYKRLHGHSFTATLSIKGPKSEIDDWLMDFGSFAPTIEQLKDKLDHAFLNELVGLKSPTLENMCAYIFDLASKSLPNLFAVDIARITCGQNCRLEVG

SEQ ID NO: 25074 - protein, 139 aa, Robinsoniella sp.
  misc_feature (1)..(139): tr|A0A371AXT7|A0A371AXT7_9FIRM 6-carboxy-5,6,7,8-tetrah ydropterin synthase OS=Robinsoniella sp. MCWD5 OX=18128 58 GN=DWV06_04765 PE=3 SV=1
MYSIIVEESFDSAHFLSGYNGKCSHIHGHRWRLLVEVQTKELQDEGQCKGMVVDFTQLKKDLKKLAEDFDHCLIIEKETMREQTLNCLVEDGFRIVSIPFRPTAEKFAEFFFHSIEKKGYQVKRVSVYETPNNCAVYEG

SEQ ID NO: 25075 - protein, 141 aa, Rodentibacter genomosp.; identical to SEQ ID NO: 23748
  misc_feature (1)..(141): tr|A0A1V3JR50|A0A1V3JR50_9PAST 6-carboxy-5,6,7,8-tetrah ydropterin synthase OS=Rodentibacter genomosp. 2 OX=190 8266 GN=BKK55_01090 PE=3 SV=1

SEQ ID NO: 25076 - protein, 141 aa, Rodentibacter genomosp.
  misc_feature (1)..(141): tr|A0A1V3JNK6|A0A1V3JNK6_9PAST 6-carboxy-5,6,7,8-tetrah ydropterin synthase OS=Rodentibacter genomosp. 2 OX=190 8266 GN=BKK56_00325 PE=3 SV=1
MFKISKEFSFDMAHLLDGHDGKCQNLHGHTYKLQVEIMGDLSPLGAKKSMVIDFSDLKTIVKKAILEPMDHAFIYDETNERESKIAKLLQSLDSKTFGVPFRTTAEELARFIFNRLKYDEKLAVSTIRLWETPTSFCEYSE

SEQ ID NO: 25077 - protein, 141 aa, Rodentibacter heidelbergensis
  misc_feature (1)..(141): tr|A0A1V3IBI1|A0A1V3IBI1_9PAST 6-carboxy-5,6,7,8-tetrah ydropterin synthase OS=Rodentibacter heidelbergensis OX =1908258 GN=BKK48_01025 PE=3 SV=1
MFKISKEFSFDMAHLLDGHDGKCQNLHGHTYKLQVEMSGDLSPSGTKKSMVMDFSDLKAIVKKAILIPMDHAFIYDETNERESKIAQLLQELHSKTFGVPFRTTAEELARFIFNRLKYDEKLPVSTIRLWETPTSFCEYSE

SEQ ID NO: 25078 - protein, 141 aa, Rodentibacter heylii; identical to SEQ ID NO: 23748
  misc_feature (1)..(141): tr|A0A1V3KPU2|A0A1V3KPU2_9PAST 6-carboxy-5,6,7,8-tetrah ydropterin synthase OS=Rodentibacter heylii OX=1906744 GN=BKG96_01715 PE=3 SV=1

SEQ ID NO: 25079 - protein, 141 aa, Rodentibacter heylii; identical to SEQ ID NO: 23741
  misc_feature (1)..(141): tr|A0A1V3KSA8|A0A1V3KSA8_9PAST 6-carboxy-5,6,7,8-tetrah ydropterin synthase OS=Rodentibacter heylii OX=1906744 GN=BKG97_06060 PE=3 SV=1

SEQ ID NO: 25080 - protein, 141 aa, Rodentibacter mrazii
  misc_feature (1)..(141): tr|A0A1V3IDD4|A0A1V3IDD4_9PAST 6-carboxy-5,6,7,8-tetrah ydropterin synthase OS=Rodentibacter mrazii OX=1908257 GN=BKK47_10260 PE=3 SV=1
MFKISKEFSFDMAHLLDGHDGKCQNLHGHTYKLQVEISKDLVHCGAKKSMVMDFSDLKNIVKKAVLDPMDHAFIYDQTSERESKIAALLQELNSKTFAVPFRTTAEEMARFIFKRLKYDEKLAVSAIRLWETPTSFCEYSE

SEQ ID NO: 25081 - protein, 141 aa, Rodentibacter myodis
  misc_feature (1)..(141): tr|A0A1V3JRD9|A0A1V3JRD9_9PAST 6-carboxy-5,6,7,8-tetrah ydropterin synthase OS=Rodentibacter myodis OX=1907939 GN=BKL49_05380 PE=3 SV=1
MFKVSKEFSFDMAHLLDGHDGKCQNLHGHTYKLQVEIAGDLHQYGAKKAMVMDFSDLKAIVKKAILDPMDHAFIYDQTSERESKIAHLLQDLRSKTFGVPFRTTAEEMARFIFNRLKYEEKLPVSAIRLWETPTSFCEYGE

SEQ ID NO: 25082 - protein, 141 aa, Rodentibacter pneumotropicus
  misc_feature (1)..(141): tr|A0A1V3K3R7|A0A1V3K3R7_9PAST 6-carboxy-5,6,7,8-tetrah ydropterin synthase OS=Rodentibacter pneumotropicus OX= 758 GN=queD PE=3 SV=1
MFKISKEFSFDMAHLLDGHDGKCQNLHGHTYKLQVEIMGDLSPLGAKKSMVIDFSDLKTIVKKAILEPMDHAFIYDETNERESKIAKLLQEVDSKIFGVPFRTTAEELARFIFNRLKYDEKLAVSTIRLWETPTSFCEYSE

SEQ ID NO: 25083 - protein, 115 aa, Rodentibacter pneumotropicus
  misc_feature (1)..(115): tr|A0A448MQM5|A0A448MQM5_9PAST 6-carboxy-5,6,7,8-tetrah ydropterin synthase OS=Rodentibacter pneumotropicus OX= 758 GN=queD PE=4 SV=1
MFKISKEFSFDMAHLLDGHDGKCQNLHGHTYKLQVEIMGDLSPLGAKKSMVIDFSDLKTIVKKAILEPMDHAFIYDETNERESKIAKLLQEVDSKIFGVPFRTTAEELARFILIA

SEQ ID NO: 25084 - protein, 141 aa, Rodentibacter rarus
  misc_feature (1)..(141): tr|A0A1V3IJT6|A0A1V3IJT6_9PAST 6-carboxy-5,6,7,8-tetrah ydropterin synthase OS=Rodentibacter rarus OX=1908260 G N=BKK50_08410 PE=3 SV=1
MFKISKEFSFDMAHLLDGHDGKCQNLHGHTYKLQVEISGDLSPIGAKKSMVMDFSDLKAIVKKAILIPMDHAFIYDETNERESKIAQLLQELHSKTFGVPFRTTAEELARFIFNRLKYDEKLPVSTIRLWETPTSFCEYSE

SEQ ID NO: 25085 - protein, 141 aa, Rodentibacter ratti
  misc_feature (1)..(141): tr|A0A1V3L882|A0A1V3L882_9PAST 6-carboxy-5,6,7,8-tetrah ydropterin synthase OS=Rodentibacter ratti OX=1906745 G N=BKG93_03725 PE=3 SV=1
MFKISKEFSFDMAHLLDGHDGKCQNLHGHTYKLQVEIMGDLSPLGAKKSMVMDFSDLKTIVKKAILEPMDHAFIYDETNERENKIAKLLQSLDSKTFGVPFRTTAEELARFIFNRLKYDEKLAVSTIRLWETPTSFCEYSE

SEQ ID NO: 25086 - protein, 141 aa, Rodentibacter ratti
  misc_feature (1)..(141): tr|A0A1V3LB10|A0A1V3LB10_9PAST 6-carboxy-5,6,7,8-tetrah ydropterin synthase OS=Rodentibacter ratti OX=1906745 G N=BKG88_02340 PE=3 SV=1
MFKISKEFSFDMAHLLDGHDGKCQNLHGHTYKLQVEIMGDLSPLGAKKSMVIDFSDLKTIVKKAILEPMDHAFIYDETNERESKIAKLLQSLDSKTFGVPFRTTAEELARFIFNRLKYDEKLTISTIRLWETPTSFCEYSE

SEQ ID NO: 25087 - protein, 141 aa, Rodentibacter sp.
  misc_feature (1)..(141): tr|A0A1V3JY22|A0A1V3JY22_9PAST 6-carboxy-5,6,7,8-tetrah ydropterin synthase OS=Rodentibacter sp. Ppn85 OX=19085 25 GN=BKL51_03865 PE=3 SV=1
MFKISKEFSFDMAHLLDNHDGKCQNLHGHTYKLQVEISKDLVNYGEKKSMVMDFSDLKNTVKKAILDPMDHAFIYDQTSKRESKIAALLQELNSKTFAVPFRTTAEEMARFIFNRLKYDEKLAISAIRLWETPTSFCEYSE

SEQ ID NO: 25088 - protein, 141 aa, Rodentibacter trehalosifermentans; identical to SEQ ID NO: 25084
  misc_feature (1)..(141): tr|A0A1V3INK0|A0A1V3INK0_9PAST 6-carboxy-5,6,7,8-tetrah ydropterin synthase OS=Rodentibacter trehalosifermentan s OX=1908263 GN=BKK51_10850 PE=3 SV=1

SEQ ID NO: 25089 - protein, 370 aa, Roseateles aquatilis
  misc_feature (1)..(370): tr|A0A246IY52|A0A246IY52_9BURK 6-pyruvoyl tetrahydropte rin synthase OS=Roseateles aquatilis OX=431061 GN=CDN99 _23305 PE=4 SV=1
MSSFPSPLFTASAGFESACQIDALPPGHRSRGLHGHSYLATVRAELPNGWAPFPGSEVHALRDCLERCIAPLDHALLNQHITQPTDENVARWIRHRLETEFKVPGITQVGIQSTAHSGVDLDANGHAHVWRRYRFQAAHQLPNVPMGHKCGRMHGHGFELILHANQDLGGRDLSIDYDHLDDLWAPFHAQLNYQCLNEIEGLSNPTSELISSWLWERLKPKLPELSWVTVYETGSSGANFDGERYRIWKEFTLDSAVKLTRAPDGHPLAGIHGHTFTLRLHLNAPLDEVHGWAMDFSDVKQLFDPIYKAMDHHPLHELAGLPDADTASLAAWVLQHAKAQLPPLERVDLYETRGSGAIVSHGPVEELIPV

SEQ ID NO: 25090 - protein, 370 aa, Roseateles depolymerans
  misc_feature (1)..(370): tr|A0A0U3MRU4|A0A0U3MRU4_9BURK 6-pyruvoyl tetrahydropte rin synthase OS=Roseateles depolymerans OX=76731 GN=RD2 015_91 PE=4 SV=1
MSAFPSSLFTASAGFESACHIDALPESHRSRRLHGHSYLATVRAELPAGWAPFPGGEVHALRECLERCIAPLDHALLNDHIAQPTDENIARWIRSRLVDEFGVPGISQVGIQSTTHCGVDLDAQGQAHVWRRYRFQAAHQLPNVPMGHKCGRMHGHGFELILHANQDLGERDLSIDYDRLDEIWAPFHAQLNYQCLNEIEGLSNPTSEIISSWLWARIKPQLPELSWVTVYETGSSGANFDGERYRIWKEFTLDSAVKLRRAPGDHPLAGIHGHTFTLRLHLSALLDQVYGWAMDFGDVKRLFDPIFKSLDHHPLHEIPGLADTDTATLAAWILEQSRAQLPPLERVDLYETRGSGAIVSLVPFEELIPV

SEQ ID NO: 25091 - protein, 370 aa, Roseateles depolymerans
  misc_feature (1)..(370): tr|A0A2W5DC24|A0A2W5DC24_9BURK 6-pyruvoyl tetrahydropte rin synthase OS=Roseateles depolymerans OX=76731 GN=DI6 03_20630 PE=4 SV=1
MSVSVLHCGSAGFESACRIPALPATHRSHGLHGHSYFATVRADLRPGWAAASGGFPGGEVELLRGLMADAVAPLDHALLNDHLPDPTDENLARWVRAHLATQVSGIRQVGVQSTAHSGVDLDAAGQAHVWRRYRFQAAHQLPNVPLGHKCGRMHGHGFEVILHANADLGERALAIDYDHLDEVWAPLHMALNYQCLNQIEGLENPTSEVISAWLWQRLKPVLPELSWVTVYETGSSGANFNGTHYRIWKEMTLDSAVRLNHAPAGHPLGGIHGHTFTLRLHLAAPLDAVMGWTVDFGDVKTLFNPLFKRLDHHPLHELAGLPDGDTASLAAWVLREGGAVLPQIDRVDLYETRGNGAIVSRADSQELIPV

SEQ ID NO: 25092 - protein, 370 aa, Roseateles sp.
  misc_feature (1)..(370): tr|A0A1H7KH67|A0A1H7KH67_9BURK 6-pyruvoyltetrahydropter in/6-carboxytetrahydropterin synthase OS=Roseateles sp. YR242 OX=1855305 GN=SAMN05216359_103376 PE=4 SV=1
MSAFPSSLFTASAAFESACHIDALPKSHRSHRLHGHSYLATVRAQLPAGWAPFPGGEVHALREALERCVAPLDHALLNDQIAQPTDENIARWIRHRLAHEFGVPGISQVGIQSTTHSGVDLDAEGRAHVWRRYRFQAAHQLPNVPLGHKCGRMHGHGFELILHANQDLGERDLSIDYDHLDEIWAPFHALLNYQCLNEIDGLSNPTSEIISSWLWARIKPQLPELSWVTVYETGSSGANFDGERYRIWKEFTLDSAVKLNRAPGDHPLAGIHGHTFTLRLHLSALLDQVYGWAMDFGDVKQLFEPIYKSLDHHPLHEIPGLADTDTASLAAWILEQSRAQLPPLERVDLYETRGSGAIVSLVPFEELIPV

SEQ ID NO: 25093 - protein, 141 aa, Roseburia sp.
  misc_feature (1)..(141): tr|A0A1Q6U107|A0A1Q6U107_9FIRM 6-carboxy-5,6,7,8-tetrah ydropterin synthase OS=Roseburia sp. CAG:197_41_10 OX=1 897018 GN=BHW45_02325 PE=3 SV=1
MYILKTEASFDSAHFLAGYEGKCSNIHGHRWKIILEVKTEELKDDVQHRGMYVDFGELKKDLRELADSMDHALIIEKNTLKETTLEALKSENFHIIALDFRPTAENMARYFHEKIKALGYNMHAVTVYETPTNGATYMEQC

SEQ ID NO: 25094 - protein, 139 aa, Roseburia sp.; identical to SEQ ID NO: 20243
  misc_feature (1)..(139): tr|R5U7A7|R5U7A7_9FIRM 6-carboxy-5,6,7,8-tetrahydropter in synthase OS=Roseburia sp. CAG:50 OX=1262949 GN=BN683 _01979 PE=3 SV=1

SEQ ID NO: 25095 - protein, 131 aa, Roseibaca calidilacus
  misc_feature (1)..(131): tr|A0A0P8AGX1|A0A0P8AGX1_9RHOB 6-pyruvoyl-tetrahydropte rin synthase OS=Roseibaca calidilacus OX=1666912 GN=HLU CCA05_11205 PE=4 SV=1
MFAVEVRDHIMIAHSLPSPVFGPAQGMHGATFTVDAAFYTEDIDAHGLVVDIGLATEALADTLAPLRYKNLDEVPEFTGKFTTTEFLCKHIFDSMKARIAAGDLNDGGRVKKLRILLHESHMARAWFEGQV

SEQ ID NO: 25096 - protein, 131 aa, Roseibaca ekhonensis
  misc_feature (1)..(131): tr|A0A3B0MWV9|A0A3B0MWV9_9RHOB Uncharacterized protein OS=Roseibaca ekhonensis OX=254356 GN=ROE7235_02052 PE=4 SV=1
MFAVEVRDHIMIAHSLPSPVFGPAQGMHGATFTVDAAFYTEDIDAHGLVVDIGLATEALAEVLQPLRYQNLDEVPEFKAKFTTTEFLCKHIFDAMQARISSGFLKDEGRVKRLRILLHESHTARAWYEGQV

SEQ ID NO: 25097 - protein, 121 aa, Roseibacillus sp.
  misc_feature (1)..(121): tr|A0A3R7RK53|A0A3R7RK53_9BACT 6-carboxy-5,6,7,8-tetrah ydropterin synthase OS=Roseibacillus sp. TMED18 OX=1986 590 GN=queD PE=3 SV=1
  misc_feature (30)..(30): Xaa can be any naturally occurring amino acid
  misc_feature (36)..(36): Xaa can be any naturally occurring amino acid
  misc_feature (48)..(48): Xaa can be any naturally occurring amino acid
MRARLTKEFRFEAAHTLPSLPEGHKCRQMXGHSFKXEISVEGEVDEEXGWVYDHKRISSAMEPLLEELDHGYLNDIEGLDSPTIERMAGWFWKKLEKDLPGLCEIVIFETPTARCVFRGEF

SEQ ID NO: 25098 - protein, 121 aa, Roseibacillus sp.
  misc_feature (1)..(121): tr|A0A2E3NAR8|A0A2E3NAR8_9BACT 6-carboxy-5,6,7,8-tetrah ydropterin synthase OS=Roseibacillus sp. OX=2024856 GN= queD PE=3 SV=1
MRARLTKEFRFEAAHTLPSLPEGHKCRKMHGHSFKVEISVEGAVDEEIGWVYDHKQISLAMEPLLAELDHGYLNDIEGLESPTIERMAGWFWKKLEKDLPGLCEIVIFETPTARCVFRGEF

SEQ ID NO: 25099 - protein, 133 aa, Roseibium hamelinense
  misc_feature (1)..(133): tr|A0A562T0L9|A0A562T0L9_9RHOB 6-pyruvoyl-tetrahydropte rin synthase OS=Roseibium hamelinense OX=150831 GN=JM93 _02326 PE=4 SV=1
MFAVEVRDHVMIAHSFKGELFGPAQALHGATFVVDAAFLASELDNNGVVIDIGRAHEALKEVLRPLNYQNLDELPQFKGINTTTEFLTKHIYDHLAAAAKADRLGRAGSELDAIRITISESHVARAWYEAPVG

SEQ ID NO: 25100 - protein, 123 aa, Roseibium hamelinense
  misc_feature (1)..(123): tr|A0A562SKP3|A0A562SKP3_9RHOB 6-carboxy-5,6,7,8-tetrah ydropterin synthase OS=Roseibium hamelinense OX=150831 GN=JM93_03807 PE=3 SV=1
MFRITKEFHFSASHQLFGLEEDHPCARLHGHNYVVEVELESSELNRIGFVRDYRELGAFKTYLDDCLDHRHLNDVLGDDCVTAETMARHFYNWCRQHWPETSAVRVKETPKTCAEYRPIGIAA

SEQ ID NO: 25101 - protein, 134 aa, Roseibium sp.
  misc_feature (1)..(134): tr|E2CF19|E2CF19_9RHOB 6-pyruvoyl tetrahydropterin synt hase OS=Roseibium sp. TrichSKD4 OX=744980 GN=TRICHSKD4_ 1646 PE=4 SV=1
MFAVEVRDHIMIAHSFRGELFGPAQALHGATFVVDAAFFSRELDANGVVIDIGRAHEVLKEILAPLNYKNLDAVEAFEGQNTTTEFLTKHIHDRLALAARELRLGRADGEITLIRVTLSESHVARAWYEAPVEG

SEQ ID NO: 25102 - protein, 124 aa, Roseibium sp.
  misc_feature (1)..(124): tr|E2CGX8|E2CGX8_9RHOB 6-carboxy-5,6,7,8-tetrahydropter in synthase OS=Roseibium sp. TrichSKD4 OX=744980 GN=que D PE=3 SV=1
MFRIWKEFHFSASHQLFGLPEDHPCARLHGHNYVVEVELASEELDSVGFVRDYRELGAFKSYIDDTLDHLHLNDILGDDGVTAERMAQHFHDWCKARWPEVVAVRVRETPKTCAEYRPMRCTHG

SEQ ID NO: 25103 - protein, 131 aa, Roseicitreum antarcticum
  misc_feature (1)..(131): tr|A0A1H2TH68|A0A1H2TH68_9RHOB 6-pyruvoyl-tetrahydropte rin synthase OS=Roseicitreum antarcticum OX=564137 GN=S AMN04488238_10258 PE=4 SV=1
MYAVEVRDHIMIAHSFPSPVFGPAQGVHGATFTVDAAFFAEDIDEHGLVVDIGLAIDALAQVLEPLRYKNLDDESQFKGTFTTTEFLSGHIFRALAEKVRAGELKDAKRVKRLRITLHESHLARGWFEAEI

SEQ ID NO: 25104 - protein, 280 aa, Roseiflexus castenholzii
  misc_feature (1)..(280): tr|A7NG46|A7NG46_ROSCS Uncharacterized protein OS=Rosei flexus castenholzii (strain DSM 13941 / HLO8) OX=383372 GN=Rcas_0300 PE=4 SV=1
MIYATRRFEFSAAHRYWRSDWSAEENERVFGPCAYPYGHGHNYTLDVTITGDLDPRTGMVMNMTELKALVSEVLEEFDHKHLNEDTPYFCEQLPTTENIVRVLWRLIAARLPHTARLARLRLYETSDLWAEYDGAEETTFARMYAFSAAHRLHSPLLSDKENLAIYGKCNNPNGHGHTYTLEVTVAGPVDPETGMVIDLTAMDRTVRSVLDRLDYRHLDREIAAFATQPSTAENIVIYLWQELAPRFEGRLRHLKLWETRKNVFEYTGPGAALPHTRHNR

SEQ ID NO: 25105 - protein, 275 aa, Roseiflexus sp.
  misc_feature (1)..(275): tr|A5UR67|A5UR67_ROSS1 Uncharacterized protein OS=Rosei flexus sp. (strain RS-1) OX=357808 GN=RoseRS_0704 PE=4 SV=1
MVYATRRFEFSAAHRYWRPDWSAEENERVFGPCAYPYGHGHNYTLDVTITGELDPRTGMVMNMTELKSLVSEVLNEFDHKHLNEDTPYFRDQLPTTENIVRVLWRLIAARLPVAARLVRLRLYETGDLWAEYDGADETTFARVYTFSAAHRLHSPLLSDEENLAIYGKCNNPNGHGHTYTLEVSVAGPVDPDTGMVIDLATMDRTVRSVLDRIDYRHLDREIAAFATKPSTAENIVIYLWDELAPRFEGRLRHLTLWETRKNVFEYAGPDARHHG

SEQ ID NO: 25106 - protein, 143 aa, Roseimaritima ulvae
  misc_feature (1)..(143): tr|A0A5B9QUN7|A0A5B9QUN7_9PLAN 6-carboxy-5,6,7,8-tetrah ydropterin synthase OS=Roseimaritima ulvae OX=980254 GN =queD_2 PE=4 SV=1
MSLTVMRRVTFCAGHRLLNHDGKCVNLHGHNYVAEFYVVADQQDEVGRVIDFKLLKIRCKGWLDEHWDHAFLLWDKDTEALNAIRQTNPHRIFELPYNPTAENLAKYLLEIACPQMLEGTGARAQRVVIWESEESCAEVTVAD

SEQ ID NO: 25107 - protein, 169 aa, Roseimaritima ulvae
  misc_feature (1)..(169): tr|A0A5B9QIL5|A0A5B9QIL5_9PLAN 6-carboxy-5,6,7,8-tetrah ydropterin synthase OS=Roseimaritima ulvae OX=980254 GN =queD_1 PE=4 SV=1
MPAPQQATFRVDVSKEAFVFSAAHFITFAGDICERLHGHNYGVRVTVEGPLDDNRYVVDFIALRDAVLAETGQWDHHVLLPTEHAEIRVHSDDKETTATFRERRWVFPNEDCILLPVINTTAEEMARVLAERVRQRTREQFGETLTWIEVAVDENHGQWGVCRLPWNAS

SEQ ID NO: 25108 - protein, 121 aa, Roseimicrobium gellanilyticum
  misc_feature (1)..(121): tr|A0A366H2P9|A0A366H2P9_9BACT 6-carboxy-5,6,7,8-tetrah ydropterin synthase OS=Roseimicrobium gellanilyticum OX =748857 GN=DES53_1195 PE=3 SV=1
MRCRLVKDYRFEAAQTLPSLPGNHKCKKMHGHSFKVEIAVEGEVDPKIGWVYDHAEISRAMNPLLEQLDHSYLNEIEGLENPTIEIMAAWLWKKLAPQLPGLCEIVIHETPTARCVFRGEF

SEQ ID NO: 25109 - protein, 131 aa, Roseinatronobacter monicus
  misc_feature (1)..(131): tr|A0A543K9C3|A0A543K9C3_9RHOB 6-pyruvoyl-tetrahydropte rin synthase OS=Roseinatronobacter monicus OX=393481 GN =BD293_0219 PE=4 SV=1
MYAVEVRDHIMIAHSFPSPLFGPAQGMHGATFTVDAAFFADDIDEHGLVVDIGLATEALAQVLEPLRYKNLDEVAQFKGVFTTTEFLSGHIFREMADRVRAGDLKDSGRVKRLRITLHESHLARGWFEAEI

SEQ ID NO: 25110 - protein, 117 aa, Roseinatronobacter monicus
  misc_feature (1)..(117): tr|A0A543KBB9|A0A543KBB9_9RHOB 6-carboxy-5,6,7,8-tetrah ydropterin synthase OS=Roseinatronobacter monicus OX=39 3481 GN=BD293_0979 PE=3 SV=1
MFRITKEFHFSASHQLSHLPADHQCARLHGHNYIVVVELAAPDLNADGFVRDYHELKPLKAYIDDTFDHHHLDDVLEVPSTAENLARHFYDWCKARWSETAAVKVSETPKTWAEYRP

SEQ ID NO: 25111 - protein, 131 aa, Roseinatronobacter thiooxidans
  misc_feature (1)..(131): tr|A0A2W7QB26|A0A2W7QB26_9RHOB 6-pyruvoyl-tetrahydropte rin synthase OS=Roseinatronobacter thiooxidans OX=12182 1 GN=LY56_01461 PE=4 SV=1
MFAVEVRDHIMIGHSLPSPVFGPAQGMHGATFTVDAAFMTEDIDQHGLVVDIGLATDALAQVLAPLRYKNLDEVPEFEGKFTTTEFLCRHIFDQMAMRVRAGQLSDAGRVLRLRIMLHESHLARAWYEGSI

SEQ ID NO: 25112 - protein, 117 aa, Roseinatronobacter thiooxidans
  misc_feature (1)..(117): tr|A0A2W7Q889|A0A2W7Q889_9RHOB 6-carboxy-5,6,7,8-tetrah ydropterin synthase OS=Roseinatronobacter thiooxidans O X=121821 GN=LY56_02302 PE=3 SV=1
MFRITKEFHFSASHQLSHLPSDHQCARLHGHNYIVVVELAAHSLNTDGFVRDYHELKPLKSYIDDTFDHHHLDDILDIPSTAENLARHFYDWCKARWPETAAVKVSETPKTWAEYRP

SEQ ID NO: 25113 - protein, 139 aa, Roseivirga echinicomitans
  misc_feature (1)..(139): tr|A0A150XUF5|A0A150XUF5_9BACT 6-pyruvoyl tetrahydrobio pterin synthase OS=Roseivirga echinicomitans OX=296218 GN=AWN68_13980 PE=4 SV=1
MIYISRKEHFNAAHKLYNPNWSEEKNVEVFGPCANANWHGHNFELITTVKGKPDPETGFVVDLKQLSNVIRAEVIEKLDHKNLNIDVDFMQGKMASCEILVMEIWKILEPEVAKITSTGKLHSLRLYETPRNFVEYFGE

SEQ ID NO: 25114 - protein, 135 aa, Roseivirga echinicomitans
  misc_feature (1)..(135): tr|A0A150XJG4|A0A150XJG4_9BACT 6-carboxy-5,6,7,8-tetrah ydropterin synthase OS=Roseivirga echinicomitans OX=296 218 GN=AWN68_04420 PE=3 SV=1
MKIAVYRKEHFNAAHRLHNPKWTEEKNDEIFGKCNNPSFHGHNYELIVKVVGEQDPETGYVCDMKILKDIIKAHVTDKFDHRNLNLDVTEFKNLNPTAENIAVVIYNLLRPEIDQKLELKIRLYETERNFVEYPA

SEQ ID NO: 25115 - protein, 139 aa, Roseivirga ehrenbergii
  misc_feature (1)..(139): tr|A0A150XND2|A0A150XND2_9BACT 6-pyruvoyl tetrahydrobio pterin synthase OS=Roseivirga ehrenbergii OX=279360 GN= MB14_16810 PE=4 SV=1
MIYISRKEHFNAAHKLYNPNWSEEKNVEVFGPCANANWHGHNFELITTVKGKPDPETGFVVDLKQLSNVIRAEVIEKLDHKNLNMDVDFMQGKMASCEILVMEIWKILEPEVTKITSTGKLHSLRLYETPRNFVEYFGE

SEQ ID NO: 25116 - protein, 135 aa, Roseivirga ehrenbergii
  misc_feature (1)..(135): tr|A0A150XP96|A0A150XP96_9BACT 6-carboxy-5,6,7,8-tetrah ydropterin synthase OS=Roseivirga ehrenbergii OX=279360 GN=MB14_15325 PE=3 SV=1
MKIAVYRKEHFNAAHRLYNPKWSEEKNDEVFGKCNNPSFHGHNYELIVKVVGEQDPETGYVCDMKILKDIIKTHVTDKFDHKNLNLDVTEFKNLNPTAENIAVVIYNLLRPEIDQKLELKIRLYETERNFVEYPA

SEQ ID NO: 25117 - protein, 135 aa, Roseivirga seohaensis; identical to SEQ ID NO: 25116
  misc_feature (1)..(135): tr|A0A0L8ALN6|A0A0L8ALN6_9BACT 6-carboxy-5,6,7,8-tetrah ydropterin synthase OS=Roseivirga seohaensis subsp. aqu iponti OX=1566026 GN=OB69_05840 PE=3 SV=1

SEQ ID NO: 25118 - protein, 135 aa, Roseivirga seohaensis
  misc_feature (1)..(135): tr|A0A150Y1V8|A0A150Y1V8_9BACT 6-carboxy-5,6,7,8-tetrah ydropterin synthase OS=Roseivirga seohaensis OX=1914963 GN=AWW67_16880 PE=3 SV=1
MKIAVYRKEHFNAAHRLYNPKWSEEKNDEVFGKCNNPSFHGHNYELIVKVVGEQDPETGYVCDMKILKDIIKTHVTDKFDHKNLNLDVTEFKNLNPTAENIALVIYNLLRPEIDQKLELKIRLYETERNFVEYPA

SEQ ID NO: 25119 - protein, 139 aa, Roseivirga sp.
  misc_feature (1)..(139): tr|A0A316KA77|A0A316KA77_9BACT 6-carboxytetrahydropteri n synthase QueD OS=Roseivirga sp. XM-24bin3 OX=2133949 GN=DCO95_07350 PE=4 SV=1
MVYVSRKEHFNAAHKLYNPNWSEEKNVELFGPCANANWHGHNFELITTVKGQPDAETGFVVDLKQLSNLIRAEVIDKLDHKNLNVDVDFMRGKMASCENLVMEIWKILAPRVAEITPQGQLHSLKLYETPRNFVEYFGE

SEQ ID NO: 25120 - protein, 135 aa, Roseivirga sp.
  misc_feature (1)..(135): tr|A0A316KCS7|A0A316KCS7_9BACT 6-carboxy-5,6,7,8-tetrah ydropterin synthase OS=Roseivirga sp. XM-24bin3 OX=2133 949 GN=DCO95_03525 PE=3 SV=1
MKVAVFRKEHFNAAHRLHNPKWSKEKNESIFGKCNNEYYHGHNYELIIKVSGEPDPDTGYVYDMKVLSDMIKDNVTDKFDHRNLNLDVEEFKDLNPTAENIAVVIYNILRDKIEPRFDLKVTLYETERNFVEYPA

SEQ ID NO: 25121 - protein, 139 aa, Roseivirga spongicola
  misc_feature (1)..(139): tr|A0A150WXU4|A0A150WXU4_9BACT 6-pyruvoyl tetrahydrobio pterin synthase OS=Roseivirga spongicola OX=333140 GN=A WW68_18735 PE=4 SV=1
MVYVSRKEHFNAAHKLYNPNWSEEKNVEVFGPCANANWHGHNFELITTVKGQPDAETGFVVDLKQLSNLIRAEVIDKLDHRNLNVDVDFMEGKMASCENLVMEIWKILAPRVAEITPQGQLHSLKLYETPRNFVEYFGE

SEQ ID NO: 25122 - protein, 135 aa, Roseivirga spongicola; identical to SEQ ID NO: 25120
  misc_feature (1)..(135): tr|A0A150X5W6|A0A150X5W6_9BACT 6-carboxy-5,6,7,8-tetrah ydropterin synthase OS=Roseivirga spongicola OX=333140 GN=AWW68_15750 PE=3 SV=1

SEQ ID NO: 25123 - protein, 131 aa, Roseivivax halotolerans
  misc_feature (1)..(131): tr|A0A1I6AML5|A0A1I6AML5_9RHOB 6-pyruvoyl-tetrahydropte rin synthase OS=Roseivivax halotolerans OX=93684 GN=SAM N05421853_12611 PE=4 SV=1
MFAVEVRDHIMIGHSLPSPVFGPAQGMHGATFTVDVAFYTEDIDEHGLVVDIGLATEALTATLNPLRYQNLDEVPEFKGKFTTTEFLCKHIFDQMAKAVRDGDLQDKSRVKKLRILLHESHVARAWYEGVI

SEQ ID NO: 25124 - protein, 131 aa, Roseivivax isoporae
  misc_feature (1)..(131): tr|X7F870|X7F870_9RHOB 6-pyruvoyl tetrahydropterin synt hase OS=Roseivivax isoporae LMG 25204 OX=1449351 GN=RIS W2_04235 PE=4 SV=1
MFAVEVRDHIMIAHSFPSELFGPAQGMHGATFIVDAAFFTDDIDEHGLVVDIGLATEVLTDALGPLRYKNLDEVPEFAGKFTTTEFLCGHIFKVMAERVRAGDLKDSGRVKRLRIQLHESHTARAWYEAEI

SEQ ID NO: 25125 - protein, 131 aa, Roseivivax jejudonensis
  misc_feature (1)..(131): tr|A0A1X7AAI9|A0A1X7AAI9_9RHOB 6-pyruvoyl tetrahydropte rin synthase OS=Roseivivax jejudonensis OX=1529041 GN=R OJ8625_04012 PE=4 SV=1
MFAVEVTDHIMIGHSLPSEVFGPAQGMHGATFTVDAAFFTNDIDDHGLVVDIGLATEALNEVLGPLRYKNLDEVPEFKGKFTTTEFLCGHIFARMAEKVRSGALNDGGRVKRLRILLHESHVARAWFEDEI

SEQ ID NO: 25126 - protein, 131 aa, Roseivivax lentus
  misc_feature (1)..(131): tr|A0A1N7PAH8|A0A1N7PAH8_9RHOB 6-pyruvoyl-tetrahydropte rin synthase OS=Roseivivax lentus OX=633194 GN=SAMN0542 1759_11423 PE=4 SV=1
MFAVEVRDHIMIAHSFASPIFGPAQNMHGATFTVDAAFYTEDIDQHGLVVDIGLATDMLSEVLAPLKFQNLDEVPEFEGKFTTTEFLCRHIFDRMAGFVREGRLKDDGRVKKLRILLHESHVARAWYEGEV

SEQ ID NO: 25127 - protein, 121 aa, Rosenbergiella nectarea
  misc_feature (1)..(121): tr|A0A1H9ITS7|A0A1H9ITS7_9ENTR 6-carboxy-5,6,7,8-tetrah ydropterin synthase OS=Rosenbergiella nectarea OX=98880 1 GN=SAMN05216522_106176 PE=3 SV=1
MAVTTLFKEFQFEAAHFLPHVPEGHKCGRLHGHSFLVRLEITGEVDAHTGWVMDFAELKAAFKPLYERLDHHYLNDIAGLENPTSEVLAVWIWQQMKPKLPLLSAVMIKETCTAGCTYRGE

SEQ ID NO: 25128 - protein, 117 aa, Roseobacter sp.
  misc_feature (1)..(117): tr|B7RRH7|B7RRH7_9RHOB 6-carboxy-5,6,7,8-tetrahydropter in synthase OS=Roseobacter sp. GAI101 OX=391589 GN=queD PE=3 SV=1
MYRITKEFHFSASHQLSHLPDGHQCARLHGHNYIVVVELAAADLNADGFVRDYGELKPLKTYIDDTFDHRHLNDVMDVASTGENMARHFYDWCVALWPETTAVKVSETPKTWAEYRP

SEQ ID NO: 25129 - protein, 121 aa, Roseobacter sp.
  misc_feature (1)..(121): tr|A4EQD4|A4EQD4_9RHOB 6-carboxy-5,6,7,8-tetrahydropter in synthase OS=Roseobacter sp. SK209-2-6 OX=388739 GN=R SK20926_13174 PE=3 SV=1
MFRITKEFHFSASHQLTHLPADHQCARMHGHNYIVMIELAARELNTDGFVRDYHELKPLKDYIDGTFDHRHLNDVLEGPSTAENMAKHFYDWSHARWPEVTAVKVSETPKTWAEYRPEVRP

SEQ ID NO: 25130 - protein, 133 aa, Roseococcus sp.
  misc_feature (1)..(133): tr|A0A4R0YLP5|A0A4R0YLP5_9PROT 6-carboxytetrahydropteri n synthase OS=Roseococcus sp. SYP-B2431 OX=2496640 GN=E JV46_07590 PE=4 SV=1
MFSLTVVDHIMVAHSFRGAEFGPAQRLHGATFVVEAEFRAPKLDDLHLLIDIGLAKDELRKILAALDYRNLDEVPEFAAKNTTTEFLCLHIHGLLAAACRDGRMGPGGDGVTGIKVLLRESHVAWAAFEGPLE

SEQ ID NO: 25131 - protein, 122 aa, Roseococcus sp.
  misc_feature (1)..(122): tr|A0A4R0YCJ3|A0A4R0YCJ3_9PROT 6-carboxy-5,6,7,8-tetrah ydropterin synthase OS=Roseococcus sp. SYP-B2431 OX=249 6640 GN=EJV46_00775 PE=3 SV=1
MFELSKQFRFEAAHTLHRAIDAEPSRRIHGHSYRAEVTLRGPRDPETGMVMDLGLFRRALEGVRDGLDHRFLDEVPDLGPPTLESLSAWIWQRLETDCPNLAKVTVYRDSEGDTCSYFGPNS

SEQ ID NO: 25132 - protein, 169 aa, Roseofilum reptotaenium
  misc_feature (1)..(169): tr|A0A1L9QUH6|A0A1L9QUH6_9CYAN Uncharacterized protein OS=Roseofilum reptotaenium AO1-A OX=1925591 GN=BI308_06 790 PE=4 SV=1
MEIVSVSEPIDKQPKLKYQSTKVFDGFSTCFRQWRSQGSHCHFLHGYSVSFKVWFEGELDHHCWVWDFGGMKKARTQIDGMNPKAWMEYMFDHTVIVAEDDPYLPSFYQLQEQGVIQLRVLQAVSAEKFAELVLTKLNEFVQTETAGRVRVKRVEFREHERNSAVVESN

SEQ ID NO: 25133 - protein, 132 aa, Roseomonas aestuarii
  misc_feature (1)..(132): tr|A0A2U1V921|A0A2U1V921_9PROT Uncharacterized protein OS=Roseomonas aestuarii OX=568898 GN=CR165_00375 PE=4 S V=1
MFSLTVADHIMVAHSFRGEEFGPAQRVHGATFVVEAEFRAARLDASNLLVDIAAARVELRRILDAIDYRNLDTVPEFAGQNTSTEFLCQHIHGRLGAAVKDGRLGESGRKVEAIKVLLRESPLAWAAYEAAV

SEQ ID NO: 25134 - protein, 135 aa, Roseomonas cervicalis
  misc_feature (1)..(135): tr|D5RRW6|D5RRW6_9PROT Uncharacterized protein OS=Roseo monas cervicalis ATCC 49957 OX=525371 GN=HMPREF0731_382 8 PE=4 SV=1
MPMFSLTVADHIMVAHSFRGEGFGPAQRVHGATFVVEAEFRAPRLGPDNLLIDIAAARVELRRILDGFDYNNLDTLPQFAGQNTSTEFLCQHIHALLSAALREGRLGAGGGAVTGIKVLLRESPLAWAAYEAEPA

SEQ ID NO: 25135 - protein, 133 aa, Roseomonas deserti
  misc_feature (1)..(133): tr|A0A1V2GVY9|A0A1V2GVY9_9PROT Uncharacterized protein OS=Roseomonas deserti OX=1817963 GN=BKE38_24175 PE=4 SV =1
MFSLTVADHIMVAHSFRGEGFGPAQRVHGATFVVEAEFRAPRLDEANLLVDIAAARVELRKILDAIDYRNLDTVPEFAGQNTSTEFLCHHIHGLLSAAVKDGRLGDSGRKVEAIKVLLRESPLAWAAYEAPVA

SEQ ID NO: 25136 - protein, 178 aa, Roseomonas deserti
  misc_feature (1)..(178): tr|A0A1V2H4L4|A0A1V2H4L4_9PROT 6-pyruvoyl tetrahydropte rin synthase OS=Roseomonas deserti OX=1817963 GN=BKE38_ 07325 PE=4 SV=1
MFGLVFSRRFSMAHRLTAGLSEKCALPHGHNETVTVRLTATQPQRLDGAANMVEPFERAKARWHGWIDDAVDHAFQVNAADPLLGWFRQHEPTRAARLLVTPGDPTTEMLACLMMTKISAFLAADGGVLRCASIRIEETPTNSVTFDGDPAAFLPEGLPADAWWHRADASINDLGAAA

SEQ ID NO: 25137 - protein, 132 aa, Roseomonas gilardii
  misc_feature (1)..(132): tr|A0A1L7ACA9|A0A1L7ACA9_9PROT 6-carboxy-5,6,7,8-tetrah ydropterin synthase OS=Roseomonas gilardii OX=257708 GN =RGI145_04290 PE=3 SV=1
MIETLKEFTFEAAHQLPPFSGLHGHSFLVQVFLRGEPDPVYGWSHNLYEVEKVVEKVRLKVDHTYLNDIEGLEHPSLENVARWIWTQLASDLDGLDRVVVRRGPDGLAEGCTYSGRTSGEKRGAGEIYNLGG

SEQ ID NO: 25138 - protein, 132 aa, Roseomonas gilardii
  misc_feature (1)..(132): tr|A0A379NEQ3|A0A379NEQ3_9PROT 6-carboxy-5,6,7,8-tetrah ydropterin synthase OS=Roseomonas gilardii subsp. rosea OX=243956 GN=queD PE=3 SV=1
MIETLKEFTFEAAHQLPPFSGLHGHSFLVQVFLRGEPDPVYGWSHNLYEVEKVVEKVRLKVDHTYLNDIEGLEHPSLENVARWIWNQLAGDLDGLDRVMVRRGPDGLAEGCTYSGRPISEKQGAGEIYNLGG

SEQ ID NO: 25139 - protein, 187 aa, Roseomonas mucosa
  misc_feature (1)..(187): tr|A0A1S8D9G1|A0A1S8D9G1_9PROT 6-pyruvoyl tetrahydropte rin synthase OS=Roseomonas mucosa OX=207340 GN=APZ41_00 0050 PE=4 SV=1
MFGLVFSRRYAMGHRLLSGGSEKCAVPHGHNETVTVRLEAARPAPLDGHANMVEPFERAKSRWHRWIDGAVDHAFQIAEHDPLLAWFRQNEPHRLDRLLVTPGDPTTEVLACLFMSKLNTFLAEDGGRLRCVGIRIEETPTNTVTFDGDPLAFLPAAALDGAPRWWQRADDSINNLSMPLRAVVGAA

SEQ ID NO: 25140 - protein, 132 aa, Roseomonas mucosa
  misc_feature (1)..(132): tr|A0A4Y1MWD4|A0A4Y1MWD4_9PROT 6-carboxy-5,6,7,8-tetrah ydropterin synthase OS=Roseomonas mucosa OX=207340 GN=R ADP37_01288 PE=3 SV=1
MIETLKEFTFEAAHQLPPFSGLHGHSFLVQVFLRGEPDPVYGWSHNLYEVEKVVEKVRLKVDHTYLNDIEGLEHPSLENVARWIWGQLSTELDGLDRVVVRRGPDGLAEGCTYSGHSDAGKLVTERIHNLGG

SEQ ID NO: 25141 - protein, 170 aa, Roseomonas nepalensis
  misc_feature (1)..(170): tr|A0A502G818|A0A502G818_9PROT 6-pyruvoyl tetrahydrobio pterin synthase OS=Roseomonas nepalensis OX=1854500 GN= EAH89_08695 PE=4 SV=1
MDTLPQRVAVPAIWRSTKTYGHEEGLSCCFRQWRATHSHCQLLHGYALSFRLTFASSELDERYWCFDFGGLKPIKAWLHEMFDHTLLVAADDPGLPEFQRLAAGGLAELRVLPAVGCEATARHAFDYIARYVDTSTDGRVWLEEVEVREHSGNSAIYTPNSQSRRSGPSS

SEQ ID NO: 25142 - protein, 170 aa, Roseomonas nepalensis
  misc_feature (1)..(170): tr|A0A502EFB3|A0A502EFB3_9PROT 6-pyruvoyl tetrahydrobio pterin synthase OS=Roseomonas nepalensis OX=1854500 GN= EAH89_30175 PE=4 SV=1
MDTLTQRAAVPASWRSTKTYGHEEGLSCCFRQWRATHSHCQLLHGYALSFRLTFASSELDERHWCFDFGGLKPIKAWLHEMFDHTLLVAADDPSLPEFQGLAASGLAELRVLPAVGCEATARYAFDYIARYVDMSTGGRVWLEEVEVREHSGNSAMYTPNGQSRGISASS

SEQ ID NO: 25143 - protein, 133 aa, Roseomonas oryzae
  misc_feature (1)..(133): tr|A0A5B2TFB0|A0A5B2TFB0_9PROT 6-carboxytetrahydropteri n synthase OS=Roseomonas oryzae OX=1608942 GN=F0Q34_139 45 PE=4 SV=1
MFSLTVADHIMVAHSFRGEAFGPAQRVHGATFVVEAEFRAPKLDDANLLVDIAAARVELRRILDEIDYRNLDEEPRFAGQNTSTEFLCHHIHGALAAAVREGRLGESGRSVRSIKVLMRESPLAWAAYEADLA

SEQ ID NO: 25144 - protein, 137 aa, Roseomonas rhizosphaerae
  misc_feature (1)..(137): tr|A0A2C7AGI5|A0A2C7AGI5_9PROT Uncharacterized protein OS=Roseomonas rhizosphaerae OX=1335062 GN=CR162_02790 P E=4 SV=1
MFSLTVADHIMVAHSFRGEAFGPAQRVHGATFVVEAEFRAPRLDAANLLVDIAAARVELRAILDEIDYRNLDTVPEFAGQNTSTEFLCRHIHGRLCAALRGGRLRESGHMVEAVKVLLRESPLAWAAYEAPVTGGAG

SEQ ID NO: 25145 - protein, 139 aa, Roseomonas rosea
  misc_feature (1)..(139): tr|A0A1M6KWX9|A0A1M6KWX9_9PROT 6-pyruvoyl-tetrahydropte rin synthase OS=Roseomonas rosea OX=198092 GN=SAMN02745 194_03009 PE=4 SV=1
MYSLTVADHVMIAHSFRGEAFGPAQRVHGATFVVEAEFRAPRLDDANLLVDIAAARVELRRILDSFDYSNLDTLPAFTGQNTTTEFLCFHVHGLLCGALAEGKLGAGGKDVVSVKVLLRESPLAWAAYEAEVPKRTAAA

SEQ ID NO: 25146 - protein, 132 aa, Roseomonas sp.
  misc_feature (1)..(132): tr|A0A1Q2YVU4|A0A1Q2YVU4_9PROT 6-carboxy-5,6,7,8-tetrah ydropterin synthase OS=Roseomonas sp. TAS13 OX=1926319 GN=queD PE=3 SV=1
MIETLKEFTFEAAHQLPPFSGLHGHSFLVQVFLRGEPDPVYGWSHNLYEVEKVVEKVRLKVDHTYLNDIEGLEHPSLENVARWIWGQLSTELDGLDRVVVRRGPDGLAEGCTYSGHSDAGKLVTERIHNLEG

SEQ ID NO: 25147 - protein, 132 aa, Roseomonas sp.
  misc_feature (1)..(132): tr|A0A317FBX4|A0A317FBX4_9PROT Uncharacterized protein OS=Roseomonas sp. CQN31 OX=2184016 GN=DFH01_15795 PE=4 SV=1
MFSLTVVDHIMIAHSFRGEAFGPAQRLHGATFVVEAEFCAPKLDDLHLLIDIGLAKDVLRAVLAPIDYRNLDAEPVFAGKNTTTEYLCLHIQQELASACRDGRLGDGGKAVTGIKVLLRESHIAWAAFEGPV

SEQ ID NO: 25148 - protein, 132 aa, Roseomonas stagni
  misc_feature (1)..(132): tr|A0A1I4CJN1|A0A1I4CJN1_9PROT 6-pyruvoyl-tetrahydropte rin synthase OS=Roseomonas stagni DSM 19981 OX=1123062 GN=SAMN02745775_107233 PE=4 SV=1
MFSLTVVDHIMIAHSFRGDAFGPAQRLHGATFIVEAEFRAPKLDDLHLLVDIGMAKDHLRAILAPMDYRNLDAEPVFAGKNTTTEYLCLHIHGLLAQACRDGVLGDGGKAVTGLKILLRESHIAWAAFEGPV

SEQ ID NO: 25149 - protein, 118 aa, Roseovarius aestuarii
  misc_feature (1)..(118): tr|A0A1X7BN10|A0A1X7BN10_9RHOB 6-carboxy-5,6,7,8-tetrah ydropterin synthase OS=Roseovarius aestuarii OX=475083 GN=queD PE=3 SV=1
MYRITKEFHFSASHQLCGLSDDHPCARLHGHNYIVEVELSSDTLDENGFVLDYRALAPLKKYIDEELDHRHLNDVFGHDMVTSERLAKDLYDWCRARWDQVSALRISETPKTWAEYRP

SEQ ID NO: 25150 - protein, 118 aa, Roseovarius albus
  misc_feature (1)..(118): tr|A0A1X6ZHB1|A0A1X6ZHB1_9RHOB 6-carboxy-5,6,7,8-tetrah ydropterin synthase OS=Roseovarius albus OX=1247867 GN= queD PE=3 SV=1
MYRITKEFAFSASHQLIGLPEDHQCGRMHGHNYIVMIELSANELNENGFVRDYQELAPLKAYIDDNFDHRHLNDVLSNDMVTAERLAKHFFDWAKARWSEVSAVRVCETPKTWAEYRP

SEQ ID NO: 25151 - protein, 131 aa, Roseovarius atlanticus
  misc_feature (1)..(131): tr|A0A0T5NU19|A0A0T5NU19_9RHOB 6-pyruvoyl tetrahydropte rin synthase OS=Roseovarius atlanticus OX=1641875 GN=XM 53_12360 PE=4 SV=1
MFAVEVRDHIMIAHSLPSPVFGPAQGLHGATFVVDAAFYTEDLDENGLVVDIGLATEALNAALEPLKYGNLDDKPEFEGKITTTEFLCHHIWAQLRDHTKTEGLGDGGRVKRIRVQLHESHVARGWYESDI

SEQ ID NO: 25152 - protein, 122 aa, Roseovarius atlanticus
  misc_feature (1)..(122): tr|A0A0T5NTH7|A0A0T5NTH7_9RHOB 6-carboxy-5,6,7,8-tetrah ydropterin synthase OS=Roseovarius atlanticus OX=164187 5 GN=XM53_11365 PE=3 SV=1
MYTITKEFHFSASHQLHGLPEDHQCARLHGHNYVVVIELRAEALNGHGFVRDYLDLAEFKRYIDDTLDHRHLNDVLGDDCVTAERLARHFHDWCRERWPEVTAAKVSETPKTWAEYRPVSWP

SEQ ID NO: 25153 - protein, 118 aa, Roseovarius azorensis
  misc_feature (1)..(118): tr|A0A1H7WI30|A0A1H7WI30_9RHOB 6-carboxy-5,6,7,8-tetrah ydropterin synthase OS=Roseovarius azorensis OX=1287727 GN=SAMN05443999_11577 PE=3 SV=1
MYRITKEFHFSASHQLKDLPATHQCARLHGHNYVVVVELASDALNAHGFVRDYHDLAELKRYIDEELDHRHLNDVLGDDCVTAERMARHFHDWCKTRWPEVVAARVSETPKTWAEYRP

SEQ ID NO: 25154 - protein, 118 aa, Roseovarius gaetbuli
  misc_feature (1)..(118): tr|A0A1X6YFF0|A0A1X6YFF0_9RHOB 6-carboxy-5,6,7,8-tetrah ydropterin synthase OS=Roseovarius gaetbuli OX=1356575 GN=queD PE=3 SV=1
MYRISKEFHFSASHQLKGLPEDHQCARLHGHNYIVVIELASTELNAHGFVRDYLDLAPLKCYIDDTLDHRHLNDILGDDCVTAERMAKHFYNWAHARWPEVSAAKVSETPKTWAEYRP

SEQ ID NO: 25155 - protein, 118 aa, Roseovarius halotolerans
  misc_feature (1)..(118): tr|A0A1X6YE17|A0A1X6YE17_9RHOB 6-carboxy-5,6,7,8-tetrah ydropterin synthase OS=Roseovarius halotolerans OX=5053 53 GN=queD PE=3 SV=1
MYTITKEFHFSASHQLFGLPEDHQCARLHGHNYIVVVELRSETLNQHGFVRDYHDLAGLKRYIDEELDHRHLNDVLGDDCVTAERMAKHFFQWCHAQWPEVTAVRVSETPKTWAEYRP

SEQ ID NO: 25156 - protein, 118 aa, Roseovarius indicus
  misc_feature (1)..(118): tr|A0A0T5P3G2|A0A0T5P3G2_9RHOB 6-carboxy-5,6,7,8-tetrah ydropterin synthase OS=Roseovarius indicus OX=540747 GN =SAMN04488031_12125 PE=3 SV=1
MYRITKEFAFSASHQLKDLPSDHQCARLHGHNYVVVVELASAELNAHGFVRDYHELGPLKRYIDDELDHRHLNDVLGDDMVTAERLAKHFHDWCADRWPETAAVKVSETPKTWAEYRP

SEQ ID NO: 25157 - protein, 131 aa, Roseovarius litoreus
  misc_feature (1)..(131): tr|A0A1M7C665|A0A1M7C665_9RHOB 6-pyruvoyl-tetrahydropte rin synthase OS=Roseovarius litoreus OX=1155722 GN=SAMN 05443432_10246 PE=4 SV=1
MFAVEVRDHIMIAHSLPSPVFGPAQGMHGATFTVDAAFYTADIDAHGLVVDIGLATEALTDTLAPLRYKNLDEIPEFAGKFTTTEFLCKHIFDRMAEAVRDGRLKDDGRVRKLRIQLHESHVARAWYEGDI

SEQ ID NO: 25158 - protein, 118 aa, Roseovarius litoreus
  misc_feature (1)..(118): tr|A0A1M7F597|A0A1M7F597_9RHOB 6-carboxy-5,6,7,8-tetrah ydropterin synthase OS=Roseovarius litoreus OX=1155722 GN=SAMN05443432_10440 PE=3 SV=1
MYTITKEFHFSASHQLFGLPEDHQCARLHGHNYIVVVELRAEDLNAHGFVRDYLDLAELKRYIDDKLDHRHLNDVLGDDCVTAERMARHFYEWCVGRWPEVSAVKVSETPKTWAEYRP

SEQ ID NO: 25159 - protein, 118 aa, Roseovarius lutimaris
  misc_feature (1)..(118): tr|A0A1I5FFG1|A0A1I5FFG1_9RHOB 6-carboxy-5,6,7,8-tetrah ydropterin synthase OS=Roseovarius lutimaris OX=1005928 GN=SAMN04487859_11993 PE=3 SV=1
MYRISKEFHFSASHQLKGLPEDHQCARLHGHNYIVVIELASPALNTHGFVRDYLDLAPLKHYIDDTLDHRHLNDILGDDCVTAERMAKHFYDWAHARWPEVSAAKVSETPKTWAEYRP

SEQ ID NO: 25160 - protein, 118 aa, Roseovarius marisflavi
  misc_feature (1)..(118): tr|A0A1M6VPG0|A0A1M6VPG0_9RHOB 6-carboxy-5,6,7,8-tetrah ydropterin synthase OS=Roseovarius marisflavi OX=105499 6 GN=SAMN05444414_101437 PE=3 SV=1
MYRISKEFHFSASHQLKGLPEDHQCARLHGHNYIVVIELASTELNAHGFVRDYLDLAPLKRYIDDTLDHRHLNDILGDDGVTAERMAKHFYDWAHARWPEVSAAKVSETPKTWAEFRP

SEQ ID NO: 25161 - protein, 131 aa, Roseovarius mucosus
  misc_feature (1)..(131): tr|A0A1V0RJ92|A0A1V0RJ92_9RHOB 6-pyruvoyl tetrahydropte rin synthase OS=Roseovarius mucosus OX=215743 GN=ROSMUC SMR3_00332 PE=4 SV=1
MFAVEVRDHIMIAHSLPNPVFGPAQGVHGATFVVDAAFYTEDIDAHGLVVDIGLASDALARVLAPLRYGNLDDKPEFKGKFTTTEFLCHHIWTGLRDIARSEGLGDAGRLRRIRVKLHESHMARGWYEADI

SEQ ID NO: 25162 - protein, 131 aa, Roseovarius mucosus
  misc_feature (1)..(131): tr|A0A0A0HR78|A0A0A0HR78_9RHOB 6-pyruvoyl-tetrahydropte rin synthase OS=Roseovarius mucosus DSM 17069 OX=128829 8 GN=rosmuc_01427 PE=4 SV=1
MFAVEVRDHIMIAHSLPDPVFGPAQGVHGATFVVDAAFYTEDIDAHGLVVDIGLASEALARVLAPLRYGNLDDKPEFKGKFTTTEFLCHHIWTGLRDIARAEGLGDAGRLARIRVMLHESHVARGWYEADL

SEQ ID NO: 25163 - protein, 118 aa, Roseovarius nanhaiticus
  misc_feature (1)..(118): tr|A0A1N7FP88|A0A1N7FP88_9RHOB 6-carboxy-5,6,7,8-tetrah ydropterin synthase OS=Roseovarius nanhaiticus OX=57302 4 GN=SAMN05421666_1231 PE=3 SV=1
MYRITKEFHFSASHQLFGLPEDHQCARLHGHNYIVVVELAGAELNQHGFVRDYLELAPLKRYIDDELDHRHLNDVLGDDCVTAERMAKHLYDWCAARWPETAAVKVSETPKTWAEYRP

SEQ ID NO: 25164 - protein, 131 aa, Roseovarius nanhaiticus
  misc_feature (1)..(131): tr|A0A1N7G1J2|A0A1N7G1J2_9RHOB 6-pyruvoyl-tetrahydropte rin synthase OS=Roseovarius nanhaiticus OX=573024 GN=SA MN05421666_1577 PE=4 SV=1
MFAVEVRDHIMIGHSLPSPVFGPAQGMHGATFTVDAAFYTEEIDDHGLVVDIGLATEALTDVLGPLRYKNLDEVPEFKGKFTTTEFLCKHIFDAMAGTVRKGGLKDEGRVKKLRILLHESHVARAWYEGEI

SEQ ID NO: 25165 - protein, 117 aa, Roseovarius nubinhibens
  misc_feature (1)..(117): tr|A3SN31|A3SN31_ROSNI 6-carboxy-5,6,7,8-tetrahydropter in synthase OS=Roseovarius nubinhibens (strain ATCC BAA -591 / DSM 15170 / ISM) OX=89187 GN=ISM_13435 PE=3 SV=1
MYRICKEFHFSASHQLAHLPEHHQCARLHGHNYVVAVELAAPELDANGFVRDYHDLAALKSYIDTRFDHRHLNDVLDGPSTAEALARHFFDYCAGQWPETVAVRVSETPRSWAEYRP

SEQ ID NO: 25166 - protein, 117 aa, Roseovarius nubinhibens; identical to SEQ ID NO: 25165
  misc_feature (1)..(117): tr|A0A348WIX8|A0A348WIX8_9RHOB 6-carboxy-5,6,7,8-tetrah ydropterin synthase OS=Roseovarius nubinhibens OX=31426 3 GN=DCS45_21835 PE=3 SV=1

SEQ ID NO: 25167 - protein, 118 aa, Roseovarius pacificus
  misc_feature (1)..(118): tr|A0A1M7DFD5|A0A1M7DFD5_9RHOB 6-carboxy-5,6,7,8-tetrah ydropterin synthase OS=Roseovarius pacificus OX=337701 GN=SAMN05444398_105245 PE=3 SV=1
MYTITKEFHFSASHQLFGLPDEHQCARLHGHNYIVVVELRAEELNAHGFVRDYLDLAELKRYIDEKLDHRHLNDVLGDDGVTAERMARHFYDWCAARWPEVSAIKVSETPKTWAEYRP

SEQ ID NO: 25168 - protein, 118 aa, Roseovarius sp.
  misc_feature (1)..(118): tr|A0A365TZA7|A0A365TZA7_9RHOB 6-carboxy-5,6,7,8-tetrah ydropterin synthase OS=Roseovarius sp. TE539 OX=2249812 GN=queD PE=3 SV=1
MFTITKEFHFSASHQLHGLPPEHQCARLHGHNYIVVLELRGDALNEHGFVRDYLDLAAFKSHIDDELDHRHLNDVLGDDMVTAERLAKYFFDWARVRWPEVSAVRVSETPKTWAEYRP

SEQ ID NO: 25169 - protein, 118 aa, Roseovarius sp.
  misc_feature (1)..(118): tr|A0A176FNZ1|A0A176FNZ1_9RHOB 6-carboxy-5,6,7,8-tetrah ydropterin synthase OS=Roseovarius sp. HI0049 OX=182223 5 GN=A3731_10445 PE=3 SV=1
MFRITKEFAFSASHQLKDLPPEHQCARLHGHNYVVVVELAGAALDAHGFVRDYHELAPLKRYIDEELDHRHLNDVLGDDMVTAERLAKHLYDWCAARWAETAAVRVSETPKTWAEYRP

SEQ ID NO: 25170 - protein, 131 aa, Roseovarius tolerans
  misc_feature (1)..(131): tr|A0A0L6CR72|A0A0L6CR72_9RHOB 6-pyruvoyl tetrahydropte rin synthase OS=Roseovarius tolerans OX=74031 GN=ROTO_3 1980 PE=4 SV=1
MFAVEVRDHIMIAHSLPAPVFGPAQGVHGATFVVDAAFYTEDLDAHGLVVDIGLATEALARALEPLRYGNLDEKPEFEGKFTTTEFLCHHIWSALRETAKSEGLGDAGRLRRIRVMLHESHVARGWYEADI

SEQ ID NO: 25171 - protein, 118 aa, Roseovarius tolerans
  misc_feature (1)..(118): tr|A0A0L6CUR6|A0A0L6CUR6_9RHOB 6-carboxy-5,6,7,8-tetrah ydropterin synthase OS=Roseovarius tolerans OX=74031 GN =queD PE=3 SV=1
MYRITKEFHFSASHQLHGLPPEHQCARLHGHNYIVVVELTAADLNPHGFVRDYLDLAELKRYIDDELDHRHLNDVLGDDCVTAERMAKHFYDWCRARWPEVTAVKVSETPKTWAEYRP

SEQ ID NO: 25172 - protein, 119 aa, Rouxiella badensis
  misc_feature (1)..(119): tr|A0A1X0WKJ3|A0A1X0WKJ3_9GAMM 6-carboxy-5,6,7,8-tetrah ydropterin synthase OS=Rouxiella badensis OX=1646377 GN =BS640_02285 PE=3 SV=1
MTTTLFKDFMFEAAHHLPHVPAGHKCGRLHGHSFAVRLEITGEVDPHTGWVMDFAELKAAFKPTLDSLDHYYLNDIPGLENPTSEVLAEWIWNKMKPQLPLLSAVRIKETCTAGCVYRG

SEQ ID NO: 25173 - protein, 119 aa, Rouxiella silvae
  misc_feature (1)..(119): tr|A0A1X0W5D6|A0A1X0W5D6_9GAMM 6-carboxy-5,6,7,8-tetrah ydropterin synthase OS=Rouxiella silvae OX=1646373 GN=B S639_06760 PE=3 SV=1
MTTTLFKDFMFEAAHHLPHVPAGHKCGRLHGHSFAVRLEITGEVDPHTGWVMDFAELKVAFGPILDSLDHYYLNDIPGLENPTSEVLAEWIWNKMKPLLPLLSAVRIKETCTAGCVYRG

SEQ ID NO: 25174 - protein, 118 aa, Rubellimicrobium roseum
  misc_feature (1)..(118): tr|A0A5C4N8B3|A0A5C4N8B3_9RHOB 6-carboxy-5,6,7,8-tetrah ydropterin synthase OS=Rubellimicrobium roseum OX=68752 5 GN=queD PE=3 SV=1
MFRITKEFHFSASHQLSRLPSDHQCARLHGHNYVVVVELAAKELNAFGFVRDYHELAPLKHYIDDHLDHRHLNDVLGHDAVTAEYLAKHLYDWCKERLPETVAVRVSETPKTWAEYRP

SEQ ID NO: 25175 - protein, 290 aa, Rubidibacter lacunae
  misc_feature (1)..(290): tr|U5D6Z1|U5D6Z1_9CHRO 6-pyruvoyl-tetrahydropterin synt hase OS=Rubidibacter lacunae KORDI 51-2 OX=582515 GN=KR 51_00029580 PE=4 SV=1
MKCIINRRAQFFASHRYWLPELSDDENRAKFGTGSRFPGHGHNYVLYVSLAGDIDGCGMVMNLSAVKAAIAEHVTRQLDNTYLNTVWPEFQAALPTTENIAYAIWQRLVPHLPLTAVRLYEHPELWVDYRGNDMQVSLTHKTHFSAAHRLARSDFSEAENYATYGKCARPNGHGHNYHLAVTVTGDMDPRTGMSVDLGALIQAIDDRVTEPLDHTFLNLDIPYFSEVVPTAENIALYIARLLMAPARDLGVTLETIELIESPNNSCTIHCRQLAPELALSEAPEPRFAVH

SEQ ID NO: 25176 - protein, 163 aa, Rubinisphaera brasiliensis
  misc_feature (1)..(163): tr|F0SFP4|F0SFP4_RUBBR Uncharacterized protein OS=Rubin isphaera brasiliensis (strain ATCC 49424 / DSM 5305 / J CM 21570 / NBRC 103401 / IFAM 1448) OX=756272 GN=Plabr_ 2905 PE=4 SV=1
MLIEKEYKFYAAHRNEELQDKCSNIHGHRYGLKCSFEVERNGSISTLFGEFDDKVEPLIKQKYDHGMLLNIHDPLLQSLNDHMERTGENLKLKLMNGPTSVENLAFMLFTEITELGFRLVRLDVRETDSSVVTYTIADWNHDRETVFRDQSPCSIEPIPSQLS

SEQ ID NO: 25177 - protein, 167 aa, Rubinisphaera brasiliensis
  misc_feature (1)..(167): tr|F0SRV2|F0SRV2_RUBBR Uncharacterized protein OS=Rubin isphaera brasiliensis (strain ATCC 49424 / DSM 5305 / J CM 21570 / NBRC 103401 / IFAM 1448) OX=756272 GN=Plabr_ 2668 PE=4 SV=1
MANSPQYHVRVTKDHLVFSAAHFITFNGNICERLHGHNWRLAVEVAGPLDENRYVFDFIALRDAAQKVVDELDHRVLLPTHHETISVVDHGHEVEARYEDRRWIFPREDCILLPVINTTAEEIANWIAGRLLEQWDESARRSITRLQTEVEENFGQWAICRHDGPFA

SEQ ID NO: 25178 - protein, 163 aa, Rubinisphaera sp.
  misc_feature (1)..(163): tr|A0A2E9VJ23|A0A2E9VJ23_9PLAN 6-pyruvoyl tetrahydrobio pterin synthase OS=Rubinisphaera sp. OX=2024857 GN=CMN2 1_00685 PE=4 SV=1
MSLTIMKRIRFCAGHRLFGHEGKCAFFHGHNYIADIYVTGEETDEVGRLVDFAHLKKAFKGWIDENWDHAFLLNVSDENGIDAIKRVEPSKYFILPYNPTAENIAKYLLENVAVELMENQPHSVSKVVIWETEDSFAEASVEQSSEFMESYPEVSAFVKSYHG

SEQ ID NO: 25179 - protein, 166 aa, Rubinisphaera sp.
  misc_feature (1)..(166): tr|A0A2E9VL19|A0A2E9VL19_9PLAN 6-pyruvoyl tetrahydrobio pterin synthase OS=Rubinisphaera sp. OX=2024857 GN=CMN2 1_04240 PE=4 SV=1
MSEASYRVRVTKDHLVFSAAHFITFNGNICERLHGHNWRVAVEVTGGLDENRYVFDFIALRDATQAIVNELDHRMLLPTGHPTISVTVDEDNEEVEAKFESRRWVFPKEDCIILPVPNTTAEEIAHWIATRLVDDVIKKHRHELKSIRVDVEENFGQWAQCELSLD

SEQ ID NO: 25180 - protein, 140 aa, Rubneribacter badeniensis; identical to SEQ ID NO: 20863
  misc_feature (1)..(140): tr|A0A2K2U5T8|A0A2K2U5T8_9ACTN 6-carboxy-5,6,7,8-tetrah ydropterin synthase OS=Rubneribacter badeniensis OX=207 0688 GN=C2L80_05805 PE=3 SV=1

SEQ ID NO: 25181 - protein, 139 aa, Rubneribacter badeniensis
  misc_feature (1)..(139): tr|A0A2K2U5S4|A0A2K2U5S4_9ACTN 6-carboxy-5,6,7,8-tetrah ydropterin synthase OS=Rubneribacter badeniensis OX=207 0688 GN=C2L80_05475 PE=3 SV=1
MYGLKTEASFDSAHFLTDYYGKCENLHGHRWRMVVHLESPDLQADGTMKDMVMDFGVFKRAVRALAEELDHTFLVEEGSLSDATLAALEAEGFSLTILPFRTTAENLARYACERLTEQGLPVSQVDMYETPNNCAVYRA

SEQ ID NO: 25182 - protein, 138 aa, Rubricoccus marinus
  misc_feature (1)..(138): tr|A0A259TWT7|A0A259TWT7_9BACT 6-carboxy-5,6,7,8-tetrah ydropterin synthase OS=Rubricoccus marinus OX=716817 GN =BSZ36_03265 PE=3 SV=1
MPTVYVTRKAHFNAAHRLHNPEKSDDWNRETFGKCNSSNWHGHNYELDVTVAGEPDPETGFVVDLADLKQVIRDRVEEPLDHKNLNLDVPFLKGRMTSTETLAIAIWEQLQDAIPGSGRLYELVLRETPNNSVVYRGE

SEQ ID NO: 25183 - protein, 137 aa, Rubrimonas cliftonensis
  misc_feature (1)..(137): tr|A0A1H4BAL4|A0A1H4BAL4_9RHOB 6-pyruvoyl-tetrahydropte rin synthase OS=Rubrimonas cliftonensis OX=89524 GN=SAM N05444370_10594 PE=4 SV=1
MSAAGMYAVEVRDHMLIAHSLPGEVFGPAQGMHGATYVVDVCFMRETLTEDRIVVDIGRAHDALKAALKPLNYQNLDAAPETKGELTTTEWLCRFIFERIAEAKRAGGLGPGGDGVQRIRVTLNESHVARAWFEGPV

SEQ ID NO: 25184 - protein, 166 aa, Rubripirellula obstinata
  misc_feature (1)..(166): tr|A0A5B1CEQ9|A0A5B1CEQ9_9PLAN 6-carboxy-5,6,7,8-tetrah ydropterin synthase OS=Rubripirellula obstinata OX=4065 47 GN=queD_1 PE=4 SV=1
MTQATFRVDVTKEQFIFSAAHFITFAGDICERIHGHNYAVRASVEGPLDENRYVVDFIALRDAVLAETQQLDHHVVLPADHAEIKITSDDKETTATFRDRRWVFPNEDCVILPVVNTTAEEMARVIAERVVERTKETFGNKLTWIEVAVDENQGQWGVCRLPWPQS

SEQ ID NO: 25185 - protein, 154 aa, Rubripirellula obstinata
  misc_feature (1)..(154): tr|A0A5B1CQ47|A0A5B1CQ47_9PLAN 6-carboxy-5,6,7,8-tetrah ydropterin synthase OS=Rubripirellula obstinata OX=4065 47 GN=queD_2 PE=4 SV=1
MRRIKFCAGHRLFEHGGKCEHFHGHNYVADFFVTGDEQDDVGRVIDFSELKKRVKGWIDEHWDHSFLISHRDENARQALEVVIPSRFFVMPYNPTAENMAKYLLEEMCPKALAGTGARATRVRIWETEEAFAEASIDSGSGEVESYSAVGSADA

SEQ ID NO: 25186 - protein, 151 aa, Rubritalea profundi
  misc_feature (1)..(151): tr|A0A2S7U3Z2|A0A2S7U3Z2_9BACT 6-pyruvoyl tetrahydropte rin synthase OS=Rubritalea profundi OX=1658618 GN=BSZ32 _12050 PE=4 SV=1
MSYRICKMIEVENGHLLSKHPDKCRFPHGHTRKVELIFEADSLDDHEMVFDFKLVKRMVDEFLETYDHALCMNTEDPKFEFFKDAYGERIIGFEGLDPTTEVMAKTIFDHTAGELKHHIDNPDPEYPVRAEVRLKTIRVWETTSSWAEYGE

SEQ ID NO: 25187 - protein, 151 aa, Rubritalea squalenifaciens
  misc_feature (1)..(151): tr|A0A1M6D3U0|A0A1M6D3U0_9BACT 6-pyruvoyltetrahydropter in/6-carboxytetrahydropterin synthase OS=Rubritalea squ alenifaciens DSM 18772 OX=1123071 GN=SAMN02745181_0633 PE=4 SV=1
MPYRICKMIEVENGHLLSKHPDKCRFPHGHTRKVELIFEADSLDDREMVFDFKLVKRMVDDFLETYDHALCMNTSDPKFEFFKEAYGDRIIGFENLDPTTEVMAKTIFDHTSGQLQHHVDNPDPEYPVRAEVKLKTVRVWETTSSWAEYGL

SEQ ID NO: 25188 - protein, 135 aa, Rubrivirga marina
  misc_feature (1)..(135): tr|A0A271IX25|A0A271IX25_9BACT 6-carboxy-5,6,7,8-tetrah ydropterin synthase OS=Rubrivirga marina OX=1196024 GN= BSZ37_04765 PE=3 SV=1
MPTVYVTRKAHFNAAHRLHNPDQSDEWNRATFGKCNSPNWHGHNYELDVTVAGEPDPDTGFVVDLADLKRVLEERVVEPLDHKNLNLDVPFLEGKKTSTETLAVAIWEQLAPHVPGLHEIVLRETPNNSVVYRGE

SEQ ID NO: 25189 - protein, 135 aa, Rubrivirga sp.; identical to SEQ ID NO: 24992
  misc_feature (1)..(135): tr|A0A271J841|A0A271J841_9BACT 6-carboxy-5,6,7,8-tetrah ydropterin synthase OS=Rubrivirga sp. SAORIC476 OX=1961 794 GN=B1759_12195 PE=3 SV=1

SEQ ID NO: 25190 - protein, 121 aa, Rubrivivax sp.
  misc_feature (1)..(121): tr|A0A519ZJ37|A0A519ZJ37_9BURK 6-carboxy-5,6,7,8-tetrah ydropterin synthase OS=Rubrivivax sp. OX=50259 GN=EOP40 _12770 PE=3 SV=1
MFELSQTFSFDAAHTLKRHVDEAEALGSRRIHGHTYTAEVMVKGERQPASGMVVDLNVLRGVIQGVRDQLDHHFLDEVAGLGAPTLENLCVFIYAQVSQQLPQVSAVAVSRAAGDRCVYRP

SEQ ID NO: 25191 - protein, 121 aa, Rubrivivax sp.
  misc_feature (1)..(121): tr|A0A519GAJ8|A0A519GAJ8_9BURK 6-carboxy-5,6,7,8-tetrah ydropterin synthase OS=Rubrivivax sp. OX=50259 GN=EOP38 _06805 PE=3 SV=1
MFELSQTFTFDAAHTLKRAVSPEEAAGSRRIHGHTYTAEVAVLGPRQPDTGMVVDLSVLRAALAEVRSQLDHHFLDEVAGLGTPTLENLCVFIFDQVKARIPQVSAVSVWRASGDRCIYRP

SEQ ID NO: 25192 - protein, 126 aa, Rubrobacter radiotolerans
  misc_feature (1)..(126): tr|A0A023X4X8|A0A023X4X8_9ACTN 6-pyruvoyl-tetrahydropte rin synthase OS=Rubrobacter radiotolerans OX=42256 GN=R radSPS_2120 PE=4 SV=1
MYEVLVAESFEAAHRLVGDFGPATRVHGHTYRVEVAVRGERLGDDGTLYDLGKLGENVKGLAAELHYRNLDEVEGLAGKNTTAEAVADFVWERLAKTLAGSGLSSLTVRVWENPNACAAREDRLPG

SEQ ID NO: 25193 - protein, 124 aa, Rubrobacter taiwanensis
  misc_feature (1)..(124): tr|A0A4R1BR78|A0A4R1BR78_9ACTN 6-carboxy-5,6,7,8-tetrah ydropterin synthase OS=Rubrobacter taiwanensis OX=18513 9 GN=E0L93_01755 PE=3 SV=1
MYEIYVAARFEAAHRLVGDFGPATRLHGHTYRLEVLVRGERLDGSGVLFDIGELRGAVDELAAGLHYRNLDDVPGLEGRNTTAEVVADHAWEKLAPGLRGRGLDSLLVRVWESPDVYAAREDAL

SEQ ID NO: 25194 - protein, 125 aa, Rubrobacter xylanophilus
  misc_feature (1)..(125): tr|Q1ASY5|Q1ASY5_RUBXD Uncharacterized protein OS=Rubro bacter xylanophilus (strain DSM 9941 / NBRC 16129) OX=2 66117 GN=Rxyl_2576 PE=4 SV=1
MYEIRVAARFEAAHRLAGDFGPASRLHGHTYRLEAIVRGERLREDGTLYDIGALREAVDALASSLHYRNLDEVPGLAGKNTTAEAVASHCWESLAPGLRGRGLSSLAVRVWENPEVYAAREGPLG

SEQ ID NO: 25195 - protein, 125 aa, Rubrobacter xylanophilus
  misc_feature (1)..(125): tr|A0A510HIV8|A0A510HIV8_9ACTN 6-carboxy-5,6,7,8-tetrah ydropterin synthase OS=Rubrobacter xylanophilus OX=4931 9 GN=RxyAA322_17630 PE=4 SV=1
MYEVCVATSFEAAHRLVGDFGPASRLHGHTYRLEVVVRGERLREDGTLYDIGALQEAVDGIAASLHYRNLDEVPGLSGANTTAEVVASHCWESLAPGLRGRGLSSLTVRIWENPDVYAACEGALE

SEQ ID NO: 25196 - protein, 135 aa, Ruegeria atlantica
  misc_feature (1)..(135): tr|A0A0P1EBG5|A0A0P1EBG5_9RHOB 6-carboxy-5,6,7,8-tetrah ydropterin synthase OS=Ruegeria atlantica OX=81569 GN=q ueD PE=3 SV=1
MYRINKEFHFSASHQLTHLPEDHQCARMHGHNYVVVVELAQRELNADGFVRDYHELKPLKTYIDDEFDHRHLNNVLNVVSTAENLARHFFDWCAARWPETAAVKVSETPKTWAEYRPRPLEYPKYLAPRYRAKAR

SEQ ID NO: 25197 - protein, 117 aa, Ruegeria atlantica
  misc_feature (1)..(117): tr|A0A0P1EIZ0|A0A0P1EIZ0_9RHOB 6-carboxy-5,6,7,8-tetrah ydropterin synthase OS=Ruegeria atlantica OX=81569 GN=q ueD PE=3 SV=1
MYRITKEFHFSASHQLTHLPEDHQCARMHGHNYVVVVELARRELNADGFVRDYHELKPLKTYIDDEFDHRHLNNVLNVVSTAENLARHFFDWCAARWPETASVKVSETHKTWAEYRP

SEQ ID NO: 25198 - protein, 117 aa, Ruegeria denitrificans
  misc_feature (1)..(117): tr|A0A0N7MAX4|A0A0N7MAX4_9RHOB 6-carboxy-5,6,7,8-tetrah ydropterin synthase OS=Ruegeria denitrificans OX=171569 2 GN=queD PE=3 SV=1
MYRITKEFHFSASHQLTHLPDDHQCARMHGHNYIVEIELAAVDLNTDGFVRDYGELKPLKTYIDETFDHRHLNDVMNILTTAENMARHFYDWCAARRPETAAVRVSETPKTWAEYRP

SEQ ID NO: 25199 - protein, 118 aa, Ruegeria intermedia
  misc_feature (1)..(118): tr|A0A1M5AWQ1|A0A1M5AWQ1_9RHOB 6-carboxy-5,6,7,8-tetrah ydropterin synthase OS=Ruegeria intermedia OX=996115 GN =SAMN05444279_12911 PE=3 SV=1
MFRITKEFHFSASHQLCHLPDDHPCARLHGHNYIVEVELAAEELDANGFVVDYRDLKPLKTYIDEELDHRHLNDVFWHDMVTSERLAKEIYDFCKARWAQTSAVRVSETPKTWAEYRP

SEQ ID NO: 25200 - protein, 117 aa, Ruegeria litorea
  misc_feature (1)..(117): tr|A0A1Y5TNH7|A0A1Y5TNH7_9RHOB 6-carboxy-5,6,7,8-tetrah ydropterin synthase OS=Ruegeria litorea R37 OX=1200284 GN=queD PE=3 SV=1
MYRITKEFHFSASHQLIHLPAEHQCHRMHGHNYIVVVELAGAELNADGFVRDYHELGPLKSYIDDTFDHRHLNDVLDVPTTAENMARHFYDWCKARWPETAAVKVSETPKTWAEYRP

SEQ ID NO: 25201 - protein, 118 aa, Ruegeria marina
  misc_feature (1)..(118): tr|A0A1G7BYJ9|A0A1G7BYJ9_9RHOB 6-carboxy-5,6,7,8-tetrah ydropterin synthase OS=Ruegeria marina OX=639004 GN=SAM N04488239_11740 PE=3 SV=1
MYRITKEFHFSASHQLCHLPDDHPCARLHGHNYIVEVELASAELDANGFVRDYRALKPLKTWIDDALDHRHLNEVFGHDMVTSERLAKEVYDFCKARWPETSAVRVSETPKTWAEYRP

SEQ ID NO: 25202 - protein, 118 aa, Ruegeria marisrubri
  misc_feature (1)..(118): tr|A0A0X3TQZ7|A0A0X3TQZ7_9RHOB 6-carboxy-5,6,7,8-tetrah ydropterin synthase OS=Ruegeria marisrubri OX=1685379 G N=AVO45_09250 PE=3 SV=1
MFRITKEFHFSASHQLCHLPEDHPCARLHGHNYIVEVELAAEDLDANGFVVDYRDLKPLKTYIDEELDHRHLNDVFGHDMVTSERLAKEIYDFCKARWAQTSAVRVSETPKTWAEYRP

SEQ ID NO: 25203 - protein, 118 aa, Ruegeria mediterranea
  misc_feature (1)..(118): tr|A0A2R8C6J5|A0A2R8C6J5_9RHOB 6-carboxy-5,6,7,8-tetrah ydropterin synthase OS=Ruegeria mediterranea M17 OX=120 0281 GN=queD PE=3 SV=1
MMFRITKEFHFSASHQLTHLPADHQCHRMHGHNYIVVVELAAADLNADGFVRDYHELGPLKSYIDDTFDHRHLNDVLDVPTTAENMARHFYEWCKARWPETAAVKVSETPKTWAEYRP

SEQ ID NO: 25204 - protein, 118 aa, Ruegeria pomeroyi
  misc_feature (1)..(118): tr|Q5LM12|Q5LM12_RUEPO 6-carboxy-5,6,7,8-tetrahydropter in synthase OS=Ruegeria pomeroyi (strain ATCC 700808 / DSM 15171 / DSS-3) OX=246200 GN=SPO3903 PE=3 SV=1
MYRITKEFHFSASHQLCHLPDDHPCARLHGHNYIVEVELAAAELDANGFVRDYRELKPLKTWIDDALDHRHLNEVFGHDMVTSERLAKEVYEFCKARWAETSAVRVSETPKTWAEYRP

SEQ ID NO: 25205 - protein, 117 aa, Ruegeria sp.
  misc_feature (1)..(117): tr|A0A366XBF1|A0A366XBF1_9RHOB 6-carboxy-5,6,7,8-tetrah ydropterin synthase OS=Ruegeria sp. A3M17 OX=2267229 GN =queD PE=3 SV=1
MYRITKEFHFSASHQLTHLPEDHQCARMHGHNYVVVVELARRELNADGFVRDYHELKPLKTYIDDEFDHRHLNNVLNVVSTAENLARHFFDWCAARWPETAAVKVSETPKTWAEFRP

SEQ ID NO: 25206 - protein, 117 aa, Ruegeria sp.
  misc_feature (1)..(117): tr|B7QQA0|B7QQA0_9RHOB 6-carboxy-5,6,7,8-tetrahydropter in synthase OS=Ruegeria sp. R11 OX=439497 GN=queD PE=3 SV=1
MFRITKEFHFSASHQLTHLPADHQCARLHGHNYIVVVELAGAELNSDGFVRDYHELAPLKNYIDGSFDHRHLNDVMEGPSTAENMARYFYDWCVSRWPETAAVRVSETPKTWAEYRP

SEQ ID NO: 25207 - protein, 135 aa, Rufibacter immobilis
  misc_feature (1)..(135): tr|A0A3M9N582|A0A3M9N582_9BACT 6-carboxy-5,6,7,8-tetrah ydropterin synthase OS=Rufibacter immobilis OX=1348778 GN=EFA69_00640 PE=3 SV=1
MNVTVCRKENFNAAHRLHNPHWTEEENQRVFGLCNNPHYHGHNYDLVVKLTGPVDEETGYVYDMKKLSLLIKAEILDKFDHKNLNLDTEEFQQLNPTAENIAVVIWQRLRPHLPEDFALSVTLFETERNFVEYHG

SEQ ID NO: 25208 - protein, 149 aa, Rufibacter immobilis
  misc_feature (1)..(149): tr|A0A3M9MZM0|A0A3M9MZM0_9BACT 6-carboxy-5,6,7,8-tetrah ydropterin synthase OS=Rufibacter immobilis OX=1348778 GN=EFA69_07830 PE=3 SV=1
MNRIRLTRRFTFEAAHALTHYDGACRHIHGHSYKLEVTIIGTPLNEEQHPKDGMVLDFGDLKTTVNTHVLQPLDHALVLRENSSPALLNVLQEEGHKVLLTAFQPTCENLLLYIKDQLQPHLPAHVQLHSLKLWETENAFGEWYVSDNE

SEQ ID NO: 25209 - protein, 135 aa, Rufibacter sp.
  misc_feature (1)..(135): tr|A0A0H4W2G8|A0A0H4W2G8_9BACT 6-pyruvoyl tetrahydrobio pterin synthase OS=Rufibacter sp. DG31D OX=1379910 GN=T H63_01710 PE=4 SV=1
MNVTICRKENFNAAHRLHNPAWSDEQNQKVFGLCNNPNYHGHNYNLIVKLTGPVDPDTGYVYDMKKLSLLIKAEILDKFDHRNLNLDTEEFKNLNPTAENIAVVTWQRLRPHLPESFALSVTLFETERNFVEYHG

SEQ ID NO: 25210 - protein, 135 aa, Rufibacter sp.
  misc_feature (1)..(135): tr|A0A127B232|A0A127B232_9BACT 6-carboxy-5,6,7,8-tetrah ydropterin synthase OS=Rufibacter sp. DG15C OX=1379909 GN=TH61_10225 PE=3 SV=1
MNVTVCRKENFNAAHRLHNPAWTDEQNTRVFGLCNNPNYHGHNYELVVRLTGPVDPDTGYVYDMKKLSLLIKAEILDKFDHRNLNLDTDEFKHLNPTAENIAMVIWQRLRPHLSENLALSVTLFETERNFVEYHG

SEQ ID NO: 25211 - protein, 135 aa, Rufibacter tibetensis
  misc_feature (1)..(135): tr|A0A0P0CW67|A0A0P0CW67_9BACT 6-carboxy-5,6,7,8-tetrah ydropterin synthase OS=Rufibacter tibetensis OX=512763 GN=DC20_12120 PE=3 SV=1
MNVTVCRKENFNAAHRLHNPNWTNEQNQSVFGKCNNPNYHGHNYNLIVKLTGPINEDTGYVFDMKKLSLLIKAEILDKFDHKNLNLDTEEFQHLNPTAENIAVVIWQRLRPHLPENLALSLTLFETERNFVEYHG

SEQ ID NO: 25212 - protein, 138 aa, Rufibacter tibetensis
  misc_feature (1)..(138): tr|A0A0P0C0C4|A0A0P0C0C4_9BACT 6-pyruvoyl tetrahydrobio pterin synthase OS=Rufibacter tibetensis OX=512763 GN=D C20_01770 PE=4 SV=1
MVYVSRLEHFNAAHKLHNPNWSLAKNKEVFGPCANTNWHGHNYELIVTVKGKPDPDTGFVIDLKKLSTLIREHIIKKVDHKNLNMDVAFMEGKLASTENLVMEFWNILNPLIPRISGAQLHSLKLYETPRNFVEYFGE

SEQ ID NO: 25213 - protein, 148 aa, Rugamonas rubra
  misc_feature (1)..(148): tr|A0A1I4R3N8|A0A1I4R3N8_9GAMM 6-carboxy-5,6,7,8-tetrah ydropterin synthase OS=Rugamonas rubra OX=758825 GN=SAM N02982985_04150 PE=3 SV=1
MLTITRKLEFDAGHRIPDHKSQCRNLHGHRYTLEITLTGEVISVEGNSDNGMIMDFSDIKALAKEHLVDVWDHAFLVYEKDAVVRDFLATLPGHKTVTIDRIPTVENLARIAFDILKAAYKDRFGTGLHLHKLVLHETPNCWAEITDA

SEQ ID NO: 25214 - protein, 152 aa, Rugosibacter aromaticivorans
  misc_feature (1)..(152): tr|A0A0C5JC84|A0A0C5JC84_9RHOO 6-carboxy-5,6,7,8-tetrah ydropterin synthase OS=Rugosibacter aromaticivorans OX= 1565605 GN=PG1C_03655 PE=4 SV=1
MQITRRLEFDAGHRIPDHKSQCRHLHGHRYAIEITLTGQVIDVPGRSDNGMVMDFSEVKTLAKTHVVDAWDHAFLVWREDHAVATFLATLPNHKTVITDTVPTAENLARTAFAILDQIYHSTFGNQIRLERVRLFETPNCWADALREENIEC

SEQ ID NO: 25215 - protein, 152 aa, Rugosibacter sp.
  misc_feature (1)..(152): tr|A0A521KCL8|A0A521KCL8_9RHOO 6-carboxytetrahydropteri n synthase QueD OS=Rugosibacter sp. OX=1914450 GN=queD PE=4 SV=1
MQITRRLEFDAGHRIPDHKSQCRHLHGHRYAIEITLAGQVINVPGRSDNGMVMDFSDVKTLAKVHVVDAWDHAFLVWREDHAVAAFLATLPNHKTVVMDAVPTAENLARTAFAILDPIYRSMFGNHIRLERIRLFETPNCWADALREEGIES

SEQ ID NO: 25216 - protein, 152 aa, Rugosibacter sp.; identical to SEQ ID NO: 25214
  misc_feature (1)..(152): tr|A0A522YDB0|A0A522YDB0_9RHOO 6-carboxytetrahydropteri n synthase QueD OS=Rugosibacter sp. OX=1914450 GN=queD PE=4 SV=1

SEQ ID NO: 25217 - protein, 187 aa, Ruminiclostridium hungatei
  misc_feature (1)..(187): tr|A0A1V4SFT8|A0A1V4SFT8_RUMHU 6-pyruvoyl tetrahydropte rin synthase OS=Ruminiclostridium hungatei OX=48256 GN= CLHUN_34230 PE=4 SV=1
MRSFTTLDLQYAHRFLGFKGEAQYLHGHTGILTLEVEDTVNTGVNMVFPCNEIKKTAWEVLQNFDHALVLREDDPLLPAILGVYEAQGIKDGAQTNKQKGPAFKTELATAYPECRLVVTKETMTVEGMIKIVYDLLKDKLNIVKITFTSGVNGATEEYEPQKDIDRCPLCGIALNENGVCPKCGYKK

SEQ ID NO: 25218 - protein, 154 aa, Ruminiclostridium papyrosolvens
  misc_feature (1)..(154): tr|U4R2X0|U4R2X0_9FIRM Precorrin-3B C17-methyltransfera se OS=Ruminiclostridium papyrosolvens C7 OX=1330534 GN= L323_07700 PE=4 SV=1
MGKISITKEFSWDMAHMLSDHRGLCSNLHGHTYRMQVQISRKNEGLLEDTLHSDGMVMDFSDLKAIVQRKIIEPLDHAFMFWCDTNDSVERQIAELLRSSGKKVATVKYRPTAEEMAASFFDDLTQELVDSDIVVDKIKIWETTTSFAEVIREV

SEQ ID NO: 25219 - protein, 154 aa, Ruminiclostridium papyrosolvens
  misc_feature (1)..(154): tr|F1TE87|F1TE87_9FIRM Uncharacterized protein OS=Rumin iclostridium papyrosolvens DSM 2782 OX=588581 GN=Cpap_1 445 PE=4 SV=1
MGKISITKEFSWDMAHMLSNHRGLCSNLHGHTYRMQVQISRKDKGVLEDTLHSDGMVMDFSDLKAIVQRKIIEPLDHAFMFWCDTNDSVERQIAELLKSSGKKVASVKYRPTAEEMAASFFDVLTQELADSDIVVDKIKIWETTTSFAEVIREV

SEQ ID NO: 25220 - protein, 127 aa, Ruminiclostridium sp.; identical to SEQ ID NO: 21150
  misc_feature (1)..(127): tr|A0A3B8KRY8|A0A3B8KRY8_9FIRM 6-carboxy-5,6,7,8-tetrah ydropterin synthase OS=Ruminiclostridium sp. OX=2053608 GN=queD PE=3 SV=1

SEQ ID NO: 25221 - protein, 178 aa, Ruminiclostridium sp.
  misc_feature (1)..(178): tr|A0A4U7J753|A0A4U7J753_9FIRM 6-pyruvoyl tetrahydrobio pterin synthase OS=Ruminiclostridium sp. MA18 OX=248881 0 GN=EHE19_17585 PE=4 SV=1
MFSEMLGINIFMTEKRHQQYKFKFYLNASHSIYINGEPGSRHPHTWEISIHLLKMRNEFIKFSSIETHIESLLDEYQDKYLNDVEPFNTINPTLENICTYFKNRIRELVNCEGWILLLIEISETPARSYVINLLSEESNTNMDNIDSQRMQYQHYMNQCKLTADDVAESIIKSFLDDK

SEQ ID NO: 25222 - protein, 132 aa, Ruminiclostridium sufflavum
  misc_feature (1)..(132): tr|A0A318XJK5|A0A318XJK5_9FIRM 6-pyruvoyl tetrahydropte rin synthase-like protein OS=Ruminiclostridium sufflavu m DSM 19573 OX=1121337 GN=LY28_03379 PE=4 SV=1
MFEGYKLKYRLNAKHSLLSDTENIHPHTFEISLFIEQGSKYKQVSFNALDKIVKPFLFRYQNSYLNNIPPFNMLEPTIENMGETFYEELKTILNSKKFNLIQLEISETPLRVYLISDRLMFSSITRAINSAI

SEQ ID NO: 25223 - protein, 167 aa, Ruminiclostridium sufflavum
  misc_feature (1)..(167): tr|A0A318XKI5|A0A318XKI5_9FIRM 6-pyruvoyltetrahydropter in/6-carboxytetrahydropterin synthase OS=Ruminiclostrid ium sufflavum DSM 19573 OX=1121337 GN=LY28_03386 PE=4 S V=1
MSIKRHRQYKFKFYLNASHAIFINGALGSRHTHTWEISIHLLKILDEFIKFTSFESHIEALLEEYQDKFINEVEPFNIINPTLENICTYFKDRIRELVNCEGWILLLIEISETPTRSYVINLLTEESDTSLDNIDSQKMQYENYMRHCKLTANDIADNIIDNLLSDK

SEQ ID NO: 25224 - protein, 189 aa, Ruminococcaceae bacterium
  misc_feature (1)..(189): tr|A0A3D0Z507|A0A3D0Z507_9FIRM Rubredoxin OS=Ruminococc aceae bacterium OX=1898205 GN=DEQ02_06780 PE=4 SV=1
MRSFTTLDIQYAHRFYGFKGEAQYLHGHTGILTVEVEDTINTGVNMVFPCNEINKTVWDVVQNFDHALILREDDPLLPAILDVYETQGIKNGAPTNKQKGPSFKTELATAYPECRLVVTKETMTVEGMIKIVYDLLKDKLNIAKITFTSGVNGAVQEYGKENQKEKDRCQLCGIFLNENGVCPKCGYRK

SEQ ID NO: 25225 - protein, 139 aa, Ruminococcaceae bacterium
  misc_feature (1)..(139): tr|A0A1G4W495|A0A1G4W495_9FIRM 6-carboxy-5,6,7,8-tetrah ydropterin synthase OS=Ruminococcaceae bacterium P7 OX= 1200751 GN=SAMN02910436_01171 PE=3 SV=1
MYSLKTSAAFDSAHFLAGYKGKCANIHGHRWVIEAVVSQEELIDSGEKRGMILDFSDLKKAVRAIAESFDHVLIIEAGSLKPTTVAALEDEGFRLREVRFRPTAENFARYFYALLKSDHLPVRSVTVYETPDNCAEYEE

SEQ ID NO: 25226 - protein, 140 aa, Ruminococcus albus
  misc_feature (1)..(140): tr|A0A011VUM8|A0A011VUM8_RUMAL 6-carboxy-5,6,7,8-tetrah ydropterin synthase OS=Ruminococcus albus SY3 OX=134115 6 GN=RASY3_11630 PE=3 SV=1
MYHLKTEAHFDSAHFLAGYNGKCANIHGHSWKIEAEILGSELQQAGEKRGMLIDFGDFKKAVRRLADSFDHTLIYEKGSLKAATLAALKDEGFSLTEVDFRPTAENLSRHFYDMLTAQGLPVSRITVYETPENCAYYEGE

SEQ ID NO: 25227 - protein, 140 aa, Ruminococcus albus
  misc_feature (1)..(140): tr|A0A1H7GLV4|A0A1H7GLV4_RUMAL 6-carboxy-5,6,7,8-tetrah ydropterin synthase OS=Ruminococcus albus OX=1264 GN=SA MN05216469_102165 PE=3 SV=1
MYHLKTEAHFDSAHFLAGYNGKCANIHGHSWKIEAEIYGSELQQAGEKRGMLIDFGDLKNAVRGLADSFDHTLIYEKGSLKAATLVALAEEGFSLIEVDFRPTAENLAKHFYDMLAAQGFAVSRITVYETPENCAYYEGE

SEQ ID NO: 25228 - protein, 156 aa, Ruminococcus callidus
  misc_feature (1)..(156): tr|U2K953|U2K953_9FIRM Queuosine biosynthesis protein Q ueD OS=Ruminococcus callidus ATCC 27760 OX=411473 GN=RU MCAL_03061 PE=4 SV=1
MQSYVQCGCIFYWEENRMFELKTSASFDSAHFLSGYQGKCSNLHGHRWKIEVTVGQETLQEEGNYRGMVIDFGDVKHAVKALADSYDHAMIYEEGTLQRATVEALLAEGFRLIAVPFRPTAEQFAKCFYEKLTADGLPVRRVAVYETPENCAVYEV

SEQ ID NO: 25229 - protein, 141 aa, Ruminococcus flavefaciens
  misc_feature (1)..(141): tr|A0A1H7LPP5|A0A1H7LPP5_RUMFL 6-carboxy-5,6,7,8-tetrah ydropterin synthase OS=Ruminococcus flavefaciens OX=126 5 GN=SAMN02910353_01705 PE=3 SV=1
MYKLKTSAAFDSAHFLAGYNGKCANIHGHRWTMEVTAESSELIAEGEKRGMVIDFGDLKKAVRALADKHDHALIFEEGTLRTVTLTALDEEGFRLIAVPFRPTAENFARHFYEVLKAEGLPVSSVTVYETPENCAIYEEEK

SEQ ID NO: 25230 - protein, 141 aa, Ruminococcus flavefaciens
  misc_feature (1)..(141): tr|W7UB52|W7UB52_RUMFL 6-carboxy-5,6,7,8-tetrahydropter in synthase OS=Ruminococcus flavefaciens 007c OX=134115 7 GN=RF007C_13175 PE=3 SV=1
MYRLKTSAAFDSAHFLAGYEGKCANIHGHRWIIEAEFSGSELIREGTERGMLTDFGDIKNAVRQLADSFDHSLIYEENSLKAATITALEDEKFRLIPVPFRPTAENFAEYFYRRLRAAELPVSSVAVYETPENCAVYEEDI

SEQ ID NO: 25231 - protein, 122 aa, Ruminococcus gnavus
  misc_feature (1)..(122): tr|A0A415S9D6|A0A415S9D6_RUMGN 6-carboxy-5,6,7,8-tetrah ydropterin synthase OS=Ruminococcus gnavus OX=33038 GN= queD PE=3 SV=1
MKIHIGRKFEFEACHFLPGKDIYGECSNLHGHRYELEVIVAGEINENGWLFNFKDLKRLVEDTVISKYDHQNLNEYFEVPTAENMGAYIFQNLSEELKKHNMTLKRIKLNETSKCYVEITEN

SEQ ID NO: 25232 - protein, 187 aa, Ruminococcus gnavus
  misc_feature (1)..(187): tr|A0A415S188|A0A415S188_RUMGN Rubredoxin OS=Ruminococc us gnavus OX=33038 GN=DWZ50_18710 PE=4 SV=1
MRSITQLDLQYAHRFYGFQGEAQYLHGHTGVLTIEVEGSVNAGVNMVFPCNEIQKTTWEVLKNFDHALVLREDDPLLPAILEVYGKQGIKGGSPNNTMKGPAFKTELARAYPDCRLVVTKETMTAEGMIKIVYDLLKDKFNIVKLSFTSGVNQASEEYETCLEVERCPLCGIALNEHGVCPKCGYKR

SEQ ID NO: 25233 - protein, 139 aa, Ruminococcus lactaris
  misc_feature (1)..(139): tr|B5CRQ7|B5CRQ7_9FIRM 6-carboxy-5,6,7,8-tetrahydropter in synthase OS=Ruminococcus lactaris ATCC 29176 OX=4718 75 GN=queD PE=3 SV=1
MYYLKTESSFDSAHFLKGYNGKCRNLHGHRWRVVVEIAADQLKDEGQTRGMLVDFSDLKNALEDICDDFDHSLIYEKGSLKGATIAALQAEEFRMIEVGFRPTAEHFSKYFYELMSEKGFPIHRVEVYETPNNLAAYEE

SEQ ID NO: 25234 - protein, 139 aa, Ruminococcus lactaris
  misc_feature (1)..(139): tr|A0A3E4LH70|A0A3E4LH70_9FIRM 6-carboxy-5,6,7,8-tetrah ydropterin synthase OS=Ruminococcus lactaris OX=46228 G N=queD PE=3 SV=1
MYYLKTESNFDSAHFLKGYDGKCRNLHGHRWRVVVEIAADQLKDEGQTRGMLVDFSDLKNALEDICDDFDHSLIYEKGSLKGATIAALQAEEFRMIEVGFRPTAEHFSKYFYELMSEKGFPIHRVEVYETPNNLAAYEE

SEQ ID NO: 25235 - protein, 140 aa, Ruminococcus sp.
  misc_feature (1)..(140): tr|A0A373SNP4|A0A373SNP4_9FIRM 6-carboxy-5,6,7,8-tetrah ydropterin synthase OS=Ruminococcus sp. AF25-17 OX=2293 164 GN=queD PE=3 SV=1
MYYLQTKASFDAAHFLWKYEGKCRNIHGHRWNVVAKIKSQELEQEGQTRGMVVDFGNLKKDLKKLCDSFDHSLIYEVGSLKAETVAALQNEDFHLEKVSFRPTAENFAYYFYKELTELGYEVHCVEVYETPNNCAVYEEE

SEQ ID NO: 25236 - protein, 139 aa, Ruminococcus sp.
  misc_feature (1)..(139): tr|A0A1K1NC68|A0A1K1NC68_9FIRM 6-carboxy-5,6,7,8-tetrah ydropterin synthase OS=Ruminococcus sp. YE71 OX=244362 GN=SAMN02910447_01756 PE=3 SV=1
MYILKTQASFDSAHFLSGYNGKCANIHGHHWIVEVEVSQEKLIEGGEKRGMVIDFGDLKKAVRRLCDSYDHALIHEVGTLRPETIAAFDSEGFRRIEISCRPTAENFAKLFYEELTRQGLPVSRVTVYETPDNCACYEV

SEQ ID NO: 25237 - protein, 140 aa, [Ruminococcus] torques; identical to SEQ ID NO: 25235
  misc_feature (1)..(140): tr|D4LZK6|D4LZK6_9FIRM 6-carboxy-5,6,7,8-tetrahydropter in synthase OS=[Ruminococcus] torques L2-14 OX=657313 G N=RTO_27650 PE=3 SV=1

SEQ ID NO: 25238 - protein, 140 aa, [Ruminococcus] torques
  misc_feature (1)..(140): tr|A0A174YBA1|A0A174YBA1_9FIRM 6-carboxy-5,6,7,8-tetrah ydropterin synthase OS=[Ruminococcus] torques OX=33039 GN=ERS852502_00634 PE=3 SV=1
MYYLQTKASFDAAHFLWKYEGKCRNIHGHRWNIVAKIKSQKLEQEGQTRGMVVDFGNLKKDLKKLCDSFDHSLIYEVGSLKAETVAALQNEDFHLEKVSFRPTAENFAYYFYKKLTELGYGVHCVEVYETPNNCAVYEEE

SEQ ID NO: 25239 - protein, 142 aa, Rummeliibacillus sp.
  misc_feature (1)..(142): tr|A0A3N6BSU9|A0A3N6BSU9_9BACL 6-carboxy-5,6,7,8-tetrah ydropterin synthase OS=Rummeliibacillus sp. TYF005 OX=2 058214 GN=queD PE=3 SV=1
MLQQFYPQPPSHPYPFELNKDMHFAAAHFIPDERAGKCAFTHGHTYFVNLTIAGEQLDEMGMLVNFSDLKKIVHDKYDHQLLNDFPEYKKRAPSTEEVSRQIYQLIKNHLVTLPNKPKCLQVIVRETPTSYCIYRPKREEKA

SEQ ID NO: 25240 - protein, 138 aa, Runella sp.
  misc_feature (1)..(138): tr|A0A3C0UYH2|A0A3C0UYH2_9BACT 6-pyruvoyl tetrahydrobio pterin synthase OS=Runella sp. OX=1960881 GN=DCM71_2505 5 PE=4 SV=1
MNNPRVAVFRKAHFNAAHRLNNPTWSDEENARVFGKCNYPNYHGHNYELIVQVTGEVNPETGYVVDLKWLNDLIEQTVLIKFDHKNLNLDTEEFKNMNPSAENISIVIYNLLREHLAESLDLKIRLYETERNFVEYPA

SEQ ID NO: 25241 - protein, 139 aa, Runella sp.
  misc_feature (1)..(139): tr|A0A344TGK3|A0A344TGK3_9BACT 6-carboxytetrahydropteri n synthase OS=Runella sp. HYN0085 OX=2259595 GN=DR864_0 8505 PE=4 SV=1
MVYVTRKEHFNAAHRVYNPSWSDEKNTEVFGICANPNFHGHNFELIVTVKGKINPDTGFVVDMKLLGNLMKTAVIDKVDHRNLNLDVDFMQGIIPSCENFIVEIWNILEKGLIELAPNTKLHYLKLIETPKNFVEYYGE

SEQ ID NO: 25242 - protein, 188 aa, Ruthenibacterium lactatiformans
  misc_feature (1)..(188): tr|A0A0D8J293|A0A0D8J293_9FIRM Rubredoxin OS=Ruthenibac terium lactatiformans OX=1550024 GN=ASJ35_12265 PE=4 SV =1
MRSITTLDLQYAHRFYGFKGEAQYLHGHTGVLTIEVEDSVNAGVNMVFPCNEIQKTAWDVLKNFDHALILREDDPLLPAILDVYEKQGIKNGHPNNVMKGEAFKTELATAYPDCRLVVTKETMTVEGMIKIVYDLLKDKLNIAKLTFTSGVNAASAEFDTKNEIDRCPLCGIALNENGVCPKCGYKKQ

SEQ ID NO: 25243 - protein, 107 aa, Ruthenibacterium lactatiformans
  misc_feature (1)..(107): tr|A0A3B9WLU0|A0A3B9WLU0_9FIRM Rubredoxin (Fragment) OS =Ruthenibacterium lactatiformans OX=1550024 GN=DCL51_12 335 PE=4 SV=1
FPCNEIQKTAWDVLKNFDHALILREDDPLLPAILDVYEKQGIKNGHPNNVMKGEAFKTELATAYPDCRLVVTKETMTVEGMIKIVYDLLKDKLNIAKLTFTSGVNAA

SEQ ID NO: 25244 - protein, 125 aa, Ruthia magnifica
  misc_feature (1)..(125): tr|A1AVX4|A1AVX4_RUTMC 6-carboxy-5,6,7,8-tetrahydropter in synthase OS=Ruthia magnifica subsp. Calyptogena magn ifica OX=413404 GN=Rmag_0303 PE=3 SV=1
MFVLKIVTDFASAHLLRDYPGDCSRLHGHNWKVEMMVVARKLNSNGITIDFREIKKQTKVVVKLLDHQYLNEIAPFDKLNPTAENIAKYFFYEVGQLINTNDVKVKEVTIWETSRASVTYYQGDL

SEQ ID NO: 25245 - protein, 167 aa, Saccharibacillus sp.
  misc_feature (1)..(167): tr|A0A4Y6UYR1|A0A4Y6UYR1_9BACL 6-carboxytetrahydropteri n synthase QueD OS=Saccharibacillus sp. ATSA2 OX=258337 7 GN=queD PE=4 SV=1
MSEREQQRRSPGPYQIVERLQVFGEDISGEQLRYHRKRVLVSKSFTFDAAHHLHDYEGKCKNLHGHTYEVVFGLSAIPSANGIAVDFGEIKQIWKEEIETYLDHRYLNETLPLMNTTAENMVVWIYEQMEDALASERYAHLEARTEFVRLFETPTSYAEARREWMER

SEQ ID NO: 25246 - protein, 166 aa, Saccharibacillus sp.
  misc_feature (1)..(166): tr|A0A254NSG9|A0A254NSG9_9BACL 6-carboxytetrahydropteri n synthase QueD OS=Saccharibacillus sp. O23 OX=2009338 GN=queD PE=4 SV=1
MSDSAFQRQPGPFHIVQKLQVFGEDISGEQLRYHRKRVMVSKSFTFDAAHHLHDYEGKCKNLHGHTYEVVFGISAVPSANGIAVDFGEIKRIWKERIETYLDHRYLNETLPLMNTTAENMVVWIYEQMENALKSDEHAALGARTEFVRLFETPTSYAEARREWMEE

SEQ ID NO: 25247 - protein, 86 aa, Saccharibacter sp.
  misc_feature (1)..(86): tr|A0A060QAQ1|A0A060QAQ1_9PROT Queuosine biosynthesis Q ueD, PTPS-I OS=Saccharibacter sp. AM169 OX=1343158 GN=S ACS_1731 PE=4 SV=1
MNPQRLDRLVVTPGDPTTELLAALLMSKLQAFLTAQGGLLSPASLEIKETPTNTVRLHGDPSLYLPLVDRPADRCWWHRADDTTRD

SEQ ID NO: 25248 - protein, 150 aa, Saccharicrinis carchari
  misc_feature (1)..(150): tr|A0A521CK14|A0A521CK14_9BACT 6-pyruvoyltetrahydropter in/6-carboxytetrahydropterin synthase OS=Saccharicrinis carchari OX=1168039 GN=SAMN06265379_103168 PE=4 SV=1
MGKKIRLTKEFRFEMAHALWNYDGLCKHFHGHSYILRVTVIGEPNANRESPKCGMVMDFGVLKEIVNQEVVDRLDHALVLNKNAEHKDLLALPQMGERLILTDYQPTCENMLIEMAERISGRLPQNVKLHNLRLHETANSYAEWFAEDNG

SEQ ID NO: 25249 - protein, 200 aa, Saccharicrinis carchari
  misc_feature (1)..(200): tr|A0A521BZW0|A0A521BZW0_9BACT 6-pyruvoyltetrahydropter in/6-carboxytetrahydropterin synthase OS=Saccharicrinis carchari OX=1168039 GN=SAMN06265379_102262 PE=4 SV=1
MIIRKKFKFEGAHIVRDCSSDRCKKSLHGHSYVVEVFLSSNKLDFGHMIYDFGLTKGTIKDIIDSFDHAYAMWDKESDEFKTFIRNNSERYIEMPVSPSAECFALTLLFLIDKTLQATEFKNGEGKVSVSSVRVHETDTGYAEAFRKDLDWFTFELADVTFSQAVKDEWKDAEMYDKLLMYHKGELDAKPFVNPQVERIF

SEQ ID NO: 25250 - protein, 201 aa, Saccharicrinis fermentans
  misc_feature (1)..(201): tr|W7YKG1|W7YKG1_9BACT Queuosine biosynthesis protein Q ueD OS=Saccharicrinis fermentans DSM 9555 = JCM 21142 O X=869213 GN=JCM21142_41489 PE=4 SV=1
MIIRKKFKFEGAHIVRDCSSNRCKKSLHGHSYIVEVFLTSNKLDYGQMIYDFGLTKGTIKDIIDSFDHAYAMWSKESDDFKSFIKANSDRYIIMPVSPSAECFSLTLLFLIDKILQATEFKNGEGDVRVRSVRVHETETGYAEAFREDLEWFNFSLKDIIFSSEIKNEWTDKEMYDKLIAYYDKQLGTKPFSNPVVSRHFE

SEQ ID NO: 25251 - protein, 150 aa, Saccharicrinis fermentans
  misc_feature (1)..(150): tr|W7Y2J2|W7Y2J2_9BACT 6-carboxy-5,6,7,8-tetrahydropter in synthase OS=Saccharicrinis fermentans DSM 9555 = JCM 21142 OX=869213 GN=JCM21142_379 PE=4 SV=1
MGRKIRLTKEFRFEMAHALWKYDGLCKHFHGHSYILRVTVMGEPIEDKKSPKYGMVMDFGLLKQIVHEEVVDRMDHALVLNNDSEHQALLSLPEMGERVILTQYQPTCENMLLEMAERIKPRLPKGVLLHSLRLNETANSFAEWYAEDNK

SEQ ID NO: 25252 - protein, 187 aa, Saccharomonospora marina
  misc_feature (1)..(187): tr|H5WZ63|H5WZ63_9PSEU 6-pyruvoyl-tetrahydropterin synt hase OS=Saccharomonospora marina XMU15 OX=882083 GN=Sac maDRAFT_0149 PE=4 SV=1
MLGTETTDHAAAHRAALVTEDSAPTAHQITIEHTFETAHRLPHLGDKCTSLHGHSWRVAVPVIAPTLSNDVTVVEFGALKAGIREWIDTYLDHGTMLGVHDPLAVHLYVAKCKVFRFGADSCQTTVDAELLATDLVWPTVEAVAVLLRRVSQAALAALPCAPDARVGRVFVRETHLNTATYGPVDAP

SEQ ID NO: 25253 - protein, 118 aa, Saccharomonospora sp.
  misc_feature (1)..(118): tr|A0A4P7CEV8|A0A4P7CEV8_9PSEU 6-carboxy-5,6,7,8-tetrah ydropterin synthase OS=Saccharomonospora sp. 31sw OX=25 28243 GN=queD PE=3 SV=1
MEIFREFTFEAAHRLPEVPDGHKCARLHGHSYRVTVHVEGPVDRRAGWIMDFGDVKAAFKPLEEQLDHRYLNEVEGLENPTSENLAMWIWDRLVLRLPELSAVTVQETCTSGCTYRGR

SEQ ID NO: 25254 - protein, 126 aa, Saccharomonospora sp.
  misc_feature (1)..(126): tr|A0A1Q9UVF8|A0A1Q9UVF8_9PSEU 6-carboxy-5,6,7,8-tetrah ydropterin synthase OS=Saccharomonospora sp. CUA-673 OX =1904969 GN=BJF85_04635 PE=3 SV=1
MSYRIGKSFTFDAAHYLPSLPPEHKCSRLHGHTYTVEVVLSAASLAPPGFVTDFGELGPLRHYLDATLDHQHLNRALDVEPTSENLARHIADWFQENVEPTIPARLETVRVRESPTSWAEYQVPQP

SEQ ID NO: 25255 - protein, 278 aa, Saccharophagus degradans
  misc_feature (1)..(278): tr|Q21LH1|Q21LH1_SACD2 Uncharacterized protein OS=Sacch arophagus degradans (strain 2-40 / ATCC 43961 / DSM 170 24) OX=203122 GN=Sde_1196 PE=4 SV=1
MQLFVDNLTNLDFSYLHPTRGVVGETWLASVVLDGALDEQGMVCDFGIVKKMLRKWLDNEIDHRLLVPTQASTLTINPPADRASLSWPISSKGTLSTDCPEQAIARVTAESITPESVAQWAITQLQPLFPQSVNKLSLTFTPEVITTPFYHYSHGLKKHGGNCQRIAHGHRSKIEIWRNGELSLPDMSAWADLWADIYIGTEEDVVSTQGEHTAFVYTAQQGEFSLKLPSACVYMIDTDTTVEFIAQHIANTLKQQNPADSFTVKAYEGLAKGAIASS

SEQ ID NO: 25256 - protein, 132 aa, Saccharopolyspora dendranthemae
  misc_feature (1)..(132): tr|A0A561V8L2|A0A561V8L2_9PSEU 6-pyruvoyl-tetrahydropte rin synthase OS=Saccharopolyspora dendranthemae OX=1181 886 GN=FHU35_11570 PE=4 SV=1
MFTVTVRDHVMVAHSFRGEVFGPAQRLHGATFVVDATFTREELDDDNIVVDIGRATEQLGDVLGGLNYRNLDDEPEFAGVNTSTEFLAKVIADRIAERVHAGALGEGGRGLQGLRVTLHESHVAWAGYERAL

SEQ ID NO: 25257 - protein, 122 aa, Saccharopolyspora flava
  misc_feature (1)..(122): tr|A0A1I6S9D6|A0A1I6S9D6_9PSEU 6-pyruvoyl tetrahydropte rin synthase OS=Saccharopolyspora flava OX=95161 GN=SAM N05660874_03010 PE=4 SV=1
MIAHSFRGETFGPAQRLHGATYVVDATFQREQLDADNVVVDIGRATEQLGEVLAELNYRNLDEVEEFAGINTSTEFLAKVVADRLADRIGSGKLGASARGLSGLKVVLHESHVAWAGYEREL

SEQ ID NO: 25258 - protein, 132 aa, Saccharopolyspora sp.
  misc_feature (1)..(132): tr|A0A4R5BZF3|A0A4R5BZF3_9PSEU 6-carboxytetrahydropteri n synthase OS=Saccharopolyspora sp. 5K548 OX=2530386 GN =E1202_06980 PE=4 SV=1
MFTVTVRDHVMIAHSFRGEVFGPAQRLHGATFVVDATFTREELDADNIVVDIGRATDQLGEVLAGLNYRNLDEEPEFAGVNTSTEFLAKVIADRIADRVHEGALGASARGLNGLRVALHESHVAWAGYERAL

SEQ ID NO: 25259 - protein, 132 aa, Saccharopolyspora sp.
  misc_feature (1)..(132): tr|A0A4R4VSA5|A0A4R4VSA5_9PSEU 6-carboxytetrahydropteri n synthase OS=Saccharopolyspora sp. 16K309 OX=2530384 G N=E1181_05200 PE=4 SV=1
MFTVTVRDHVMIAHSFRGEVFGPAQRLHGATFVVDATFTREELDADNIVVDIGRATEQLGEVLAGLNYRNLDEEPEFAGVNTSTEFLAKVIADRLADRVHEGSLGESARGLSGLRVALHESHVAWAGYERAL

SEQ ID NO: 25260 - protein, 285 aa, Saccharospirillum sp.
  misc_feature (1)..(285): tr|A0A2T6E4N7|A0A2T6E4N7_9GAMM Uncharacterized protein OS=Saccharospirillum sp. MSK14-1 OX=1897632 GN=BGP77_03 330 PE=4 SV=1
MSRLFVDNLTVLDFSYLHPSRGVVGESWIVDVELEGELNEEGMVFDFGHVKKLLKQALDSGMDHTLVVPLALPGLTLVEEQDGERLNLEYRDTNGQLKFRYQAPREAVFQLDSASVNIDAALPALEAHLNTLVPANVRKVHLHLHTEQIDGAFYHYAHGLKKHQGDCQRLCHGHRSRVEIWRDGQRDAETERDWAQRFADIYLVTAEDTLDSREDHLTHVGYDAEQGRFDVWLERQQCYAMNTDTTVELIASHLANELGREHPDSHWRVKAFEGVRKGAIAEYRP

SEQ ID NO: 25261 - protein, 126 aa, Saccharospirillum sp.
  misc_feature (1)..(126): tr|A0A2T6EA49|A0A2T6EA49_9GAMM 6-pyruvoyl tetrahydropte rin synthase OS=Saccharospirillum sp. MSK14-1 OX=189763 2 GN=BGP77_17545 PE=4 SV=1
MYTVAVTQDFIANHYLIGGDWGSENNPHAHHYVLEVQIESDTLNEHGYLVDIVEIEAALNKVVDYYRDSMLNDKPEFAGLNPSIEHFSRILSEQLLAGITPPGTGALTVKLWENDTCWAAYRHSFG

SEQ ID NO: 25262 - protein, 123 aa, Saccharothrix australiensis
  misc_feature (1)..(123): tr|A0A495W1T7|A0A495W1T7_9PSEU 6-carboxy-5,6,7,8-tetrah ydropterin synthase OS=Saccharothrix australiensis OX=2 072 GN=C8E97_2410 PE=3 SV=1
MLSIRKEFSFSASHILEHLPEGHPCGRMHGHNYVVVVELRAPESDLDKAGFVRDYRELDGFKRWLDDTVDHRHLNDVMAGLNPSAEHLALWIFRRWRDEFPELSAVSISETPKTWAEYRPLAG

SEQ ID NO: 25263 - protein, 122 aa, Saccharothrix carnea
  misc_feature (1)..(122): tr|A0A2P8IEQ4|A0A2P8IEQ4_9PSEU 6-pyruvoyl tetrahydropte rin synthase-like protein OS=Saccharothrix carnea OX=12 80637 GN=B0I31_103711 PE=4 SV=1
MVAHSFRGEVFGPAQRLHGATFVVDARFKRDELDADNIVVDIGLATERLRAVLADLNYRNLDDVPAFAGVNTSTEFLAKHIADQLADAVHAGSLGEGARGLTGIEVTLHESHVAWASYERPL

SEQ ID NO: 25264 - protein, 144 aa, Saccharothrix espanaensis
  misc_feature (1)..(144): tr|K0K4D0|K0K4D0_SACES Uncharacterized protein OS=Sacch arothrix espanaensis (strain ATCC 51144 / DSM 44229 / J CM 9112 / NBRC 15066 / NRRL 15764) OX=1179773 GN=BN6_41 260 PE=4 SV=1
MHRRIAHPVEVTLFSITVRDHVMVAHSFSGEVFGPAQRLHGATFVVDARFKRVELDQDNIVVDIGLATQELRAVLADLNYRNLDEVPEFAGINTSTEFLAKHIADRLADRVRAGALGVGAHGLSGIEVSLHESHVAWASYERDL

SEQ ID NO: 25265 - protein, 118 aa, Saccharothrix espanaensis
  misc_feature (1)..(118): tr|K0JQ41|K0JQ41_SACES 6-carboxy-5,6,7,8-tetrahydropter in synthase OS=Saccharothrix espanaensis (strain ATCC 5 1144 / DSM 44229 / JCM 9112 / NBRC 15066 / NRRL 15764) OX=1179773 GN=BN6_20850 PE=3 SV=1
MELFKEFTFEAAHRMPEVPEGHKCGRLHGHSYRVTVRLEGAVEPKAGWVVDFGEVKAAFKPLEERLDHHYLNEVDGLSNPTSENLAVWIWDRLSAALPTLSAVTVRETCTSGCTYRGT

SEQ ID NO: 25266 - protein, 128 aa, Saccharothrix sp.
  misc_feature (1)..(128): tr|A0A0F0HNA8|A0A0F0HNA8_9PSEU 6-carboxy-5,6,7,8-tetrah ydropterin synthase OS=Saccharothrix sp. ST-888 OX=1427 391 GN=UK12_26170 PE=3 SV=1
MQGRHRIAKRYRFEAAHFLTGLPEGHQCSQMHGHSYEVEFVLTADHLTAPGFVTDFGELAPVKRMIDETLDHTVLNEVLPVVPTSENLAAHLAGWFVEHVEPSLPGRLAAVRVSETASSWAEFELAER

SEQ ID NO: 25267 - protein, 118 aa, Saccharothrix sp.
  misc_feature (1)..(118): tr|A0A1V2Q5E5|A0A1V2Q5E5_9PSEU 6-carboxy-5,6,7,8-tetrah ydropterin synthase OS=Saccharothrix sp. ALI-22-I OX=19 33778 GN=ALI22I_33375 PE=3 SV=1
MEIFREFTFEAAHRLPEVPEGHKCARLHGHSYRVTVHVEGPVDERAGWVMDFGDLKTAFKPLEEQLDHHYLNEVEGLENPTSENLAVWIWDCLSPELPTLSAVTVRETCTSGCTYRGR

SEQ ID NO: 25268 - protein, 122 aa, Saccharothrix texasensis
  misc_feature (1)..(122): tr|A0A3N1H6Q2|A0A3N1H6Q2_9PSEU 6-pyruvoyl tetrahydropte rin synthase-like protein OS=Saccharothrix texasensis O X=103734 GN=EDD40_3499 PE=4 SV=1
MVAHSFRGEVFGPAQRLHGATFVVDAKFKRAELDADNIVVDIGLATERLRAVLGELNYRNLDDVPEFAGVNTSTEFLAKHIADELAEAVHAGSLGEGARGLSGIEVSLHESHVAWASYERPL

SEQ ID NO: 25269 - protein, 136 aa, Saccharothrix variisporea
  misc_feature (1)..(136): tr|A0A495X4S8|A0A495X4S8_9PSEU 6-pyruvoyl-tetrahydropte rin synthase OS=Saccharothrix variisporea OX=543527 GN= DFJ66_1295 PE=4 SV=1
MEVTLFSITVRDHVMVAHSFRGEVFGPAQRLHGATFVVDAKFTRLDLDSDNIVVDIGLATRELGAVLAELNYRNLDDVPEFAGVNTSTEFLAKHIADRLADRVHDGALGPGALGLSGIEVTLHESHVAWASYERSL

SEQ ID NO: 25270 - protein, 229 aa, Saccharothrix variisporea
  misc_feature (1)..(229): tr|A0A495XD48|A0A495XD48_9PSEU 6-pyruvoyl-tetrahydropte rin synthase OS=Saccharothrix variisporea OX=543527 GN= DFJ66_2688 PE=4 SV=1
MKAAEGKRAADGRITISQSFDFSASHELRLLPIGHKCSRNHGHNYTVAVSALVHDDTHGDLSALGEYLDATFDHRLLNEQVTFHPTSELLVVHLVEWFRDNVQSSTSIRLVAMVVSETATTSARCDGVTDEVTISKTFKTSHGDVTLVLGADGLDEFGFITDFGDLKPFGAYLQAPAADAGLRTAGPALVAHLAGWFVDNIEPEIRGRLVSVRVDSGTTTGLWERGDAS

SEQ ID NO: 25271 - protein, 136 aa, Salegentibacter agarivorans
  misc_feature (1)..(136): tr|A0A1I2L9C4|A0A1I2L9C4_9FLAO 6-carboxy-5,6,7,8-tetrah ydropterin synthase OS=Salegentibacter agarivorans OX=3 45907 GN=SAMN04488033_1074 PE=3 SV=1
MRLSVHRKAHFNAAHRLYRKDWSDEKNLQVFGKCSNPHYHGHNYDLIVKVTGEIDPETGFVMDLKRLKDLIYEEVEVPFDHKNLNEEVPPFNNLNPTAENIAVVIWNKIREKLKPALDLEITLYETPRNYVTYKGE

SEQ ID NO: 25272 - protein, 149 aa, Salegentibacter agarivorans
  misc_feature (1)..(149): tr|A0A1I2MH26|A0A1I2MH26_9FLAO 6-carboxy-5,6,7,8-tetrah ydropterin synthase OS=Salegentibacter agarivorans OX=3 45907 GN=SAMN04488033_113100 PE=3 SV=1
MSKIRITKQFSFETGHALYGYDGKCRNVHGHSYKLSVCVIGEPITDKDNVKFGMVIDFGDLKKIVKSEIVDKFDHATVFNKNTPHVELAEELKNRGHHVILVEYQPTSENMVVNFAEKIQKHLPEHIKLHSLKLQETESSFAEWFANDQ

SEQ ID NO: 25273 - protein, 136 aa, Salegentibacter echinorum
  misc_feature (1)..(136): tr|A0A1M5GRU6|A0A1M5GRU6_9FLAO 6-carboxy-5,6,7,8-tetrah ydropterin synthase OS=Salegentibacter echinorum OX=107 3325 GN=SAMN05444483_104280 PE=3 SV=1
MRLSVNRKAHFNAAHRLYRKDWSDEKNREIFGKCSNPHYHGHNYELIVKVTGKIDPETGFVMDLKRLKKLIYEEVEVPFDHKNLNKEVKPFDELNPTAENIVVVIWKKLRNKLRSNLDLEVTLYETPRNFVTYKGE

SEQ ID NO: 25274 - protein, 158 aa, Salegentibacter echinorum
  misc_feature (1)..(158): tr|A0A1M5IMN3|A0A1M5IMN3_9FLAO 6-pyruvoyltetrahydropter in/6-carboxytetrahydropterin synthase OS=Salegentibacte r echinorum OX=1073325 GN=SAMN05444483_10842 PE=4 SV=1
MSKIRITKKFSFETGHALYGYDGKCRNVHGHSYKLSVCVIGEPINDMDHVKNGMVIDFGDLKKIVKSEIVDQFDHATVFNQNTPHIELARELKEREHHVILVDYQPTSENMVVDFAKKIQKHLPDHIKLHSLKLQETESSFAEWYASDQSAPQTPKGE

SEQ ID NO: 25275 - protein, 152 aa, Salegentibacter flavus
  misc_feature (1)..(152): tr|A0A1I5AZQ2|A0A1I5AZQ2_9FLAO 6-pyruvoyltetrahydropter in/6-carboxytetrahydropterin synthase OS=Salegentibacte r flavus OX=287099 GN=SAMN05660413_02128 PE=4 SV=1
MSKIRITKQFNFETGHALYGYDGKCRNVHGHSYKLNVTVIGEPISDKNDVKFGMVIDFGDLKKIVKSEIVDKFDHATVFNKNTPHIELAQELMNRDHHVILVEYQPTSENMVIDFAEKIKKHLPGHIQLHSLKLQETESSFAEWYASDQDSH

SEQ ID NO: 25276 - protein, 136 aa, Salegentibacter flavus
  misc_feature (1)..(136): tr|A0A1I4Y7V7|A0A1I4Y7V7_9FLAO 6-carboxy-5,6,7,8-tetrah ydropterin synthase OS=Salegentibacter flavus OX=287099 GN=SAMN05660413_00601 PE=3 SV=1
MRLTVHRKAHFNAAHRLYRKDWDQAKNEAVFGKCSNPHYHGHNYELVVSVKGEIDEETGFVMDLKLLKELIYEEVEVPFDHKNLNEELPEFKNLNPTAENIAVVIWNKLRSKLKPELKLEVTLYETPRNFVTYNGE

SEQ ID NO: 25277 - protein, 149 aa, Salegentibacter holothuriorum
  misc_feature (1)..(149): tr|A0A1T5BTI0|A0A1T5BTI0_9FLAO 6-carboxy-5,6,7,8-tetrah ydropterin synthase OS=Salegentibacter holothuriorum OX =241145 GN=SAMN05660776_1486 PE=3 SV=1
MSKIRITKQFSFETGHALYGYDGKCRNVHGHSYKLSVCVIGEPITDSDNVKFGMVIDFGDLKKIVKSEIVDQFDHATVFNKNTPHVELAKELKNRGHHVILVEYQPTSENMVVDFAEKIKKYLPEHIKLHSLRLQETESSFAEWFASDQ

SEQ ID NO: 25278 - protein, 136 aa, Salegentibacter holothuriorum
  misc_feature (1)..(136): tr|A0A1T5CNJ4|A0A1T5CNJ4_9FLAO 6-carboxy-5,6,7,8-tetrah ydropterin synthase OS=Salegentibacter holothuriorum OX =241145 GN=SAMN05660776_2093 PE=3 SV=1
MRLSVHRKAHFNAAHRLYRKDWSDEKNLEVFGKCSNPHYHGHNYDLIVTVTGEIDPETGFVMDLKRLKDLIYEEVEVPFDHKNLNEEVAPFDELNPTAENITVVIWNKIRAKLRPELDLEITLYETPRNYVTYKGE

SEQ ID NO: 25279 - protein, 157 aa, Salegentibacter mishustinae
  misc_feature (1)..(157): tr|A0A0Q9ZA84|A0A0Q9ZA84_9FLAO 6-pyruvoyl tetrahydropte rin synthase OS=Salegentibacter mishustinae OX=270918 G N=APR42_14275 PE=4 SV=1
MSKIRITKQFSFETGHALYGYDGKCRNVHGHSYKLSVCVIGEPITDKDNVKFGMVIDFGDLKKIVKSEIVDKFDHATVFNKNTPHVELAEELKNRGHHVILVEYQPTSENMVVDFAEKIQKHLPDHIKLHSLKLQETESSFAEWFASDQAPQPPKGE

SEQ ID NO: 25280 - protein, 136 aa, Salegentibacter mishustinae
  misc_feature (1)..(136): tr|A0A0Q9ZDU8|A0A0Q9ZDU8_9FLAO 6-carboxy-5,6,7,8-tetrah ydropterin synthase OS=Salegentibacter mishustinae OX=2 70918 GN=APR42_06170 PE=3 SV=1
MRLSVHRKAHFNAAHRLYRKDWSDEKNLKVFGKCSNPHYHGHNYDLIVKVTGEIDPETGFVMDLKRLKDLIYEEVEVPFDHKNLNEEVAPFDELNPTAENITVVIWNKIRAKLKPELDLEITLYETPRNYVTYKGE

SEQ ID NO: 25281 - protein, 149 aa, Salegentibacter salarius
  misc_feature (1)..(149): tr|A0A2N0TVG1|A0A2N0TVG1_9FLAO 6-carboxy-5,6,7,8-tetrah ydropterin synthase OS=Salegentibacter salarius OX=4359 06 GN=APR40_12945 PE=3 SV=1
MSKIRITKQFSFETGHALYGYDGKCRNVHGHSYKLSVCVIGEPITDKDNVKFGMVIDFGDLKKIVKSEIVDKFDHATVFNKNTPHVELAEELKNRGHHVILVEYQPTSENMVVDFAEKIQKHLPEHIKLHSLKLQETESSFAEWFASDQ

SEQ ID NO: 25282 - protein, 136 aa, Salegentibacter salarius
  misc_feature (1)..(136): tr|A0A2N0TQ59|A0A2N0TQ59_9FLAO 6-carboxy-5,6,7,8-tetrah ydropterin synthase OS=Salegentibacter salarius OX=4359 06 GN=APR40_04335 PE=3 SV=1
MRLSVHRKAHFNAAHRLYRKDWSDEKNLKVFGKCSNPHYHGHNYDLIVKVTGEIDPETGFVMDLKRLKDLIYEEVEVPFDHKNLNEEVAPFDELNPTAENITVVIWNKMRAKLKPELDLEITLYETPRNYVTYKGE

SEQ ID NO: 25283 - protein, 150 aa, Salegentibacter salegens
  misc_feature (1)..(150): tr|A0A1M7M9F7|A0A1M7M9F7_9FLAO 6-pyruvoyltetrahydropter in/6-carboxytetrahydropterin synthase OS=Salegentibacte r salegens OX=143223 GN=SAMN05878281_2336 PE=4 SV=1
MSKIRITKKFSFETGHALYGYDGKCRNVHGHSYKLDVCVIGEPITDSDNVKLGMVIDFGDLKKIVKSEIVDQFDHATVFNKNTPHVELAKELKNRGHHVILVEYQPTSENMVVDFAEKIQKHLPEHIKLHSLKLQETESSFAEWFASDQN

SEQ ID NO: 25284 - protein, 136 aa, Salegentibacter salegens
  misc_feature (1)..(136): tr|A0A1M7NGT3|A0A1M7NGT3_9FLAO 6-carboxy-5,6,7,8-tetrah ydropterin synthase OS=Salegentibacter salegens OX=1432 23 GN=SAMN05878281_3144 PE=3 SV=1
MRLSVHRKAHFNAAHRLYRKDWSDEKNLRVFGKCSNPHYHGHNYDLIVKVTGEIDPETGFVMDLKRLKDLIYEEVEVPFDHKNLNEEVPPFNELNPTAENIAVVIWNKIREKLKAELDLEITLYETPRNYVTYKGE

SEQ ID NO: 25285 - protein, 136 aa, Salegentibacter salinarum
  misc_feature (1)..(136): tr|A0A2N0TX22|A0A2N0TX22_9FLAO 6-carboxy-5,6,7,8-tetrah ydropterin synthase OS=Salegentibacter salinarum OX=447 422 GN=APR41_16165 PE=3 SV=1
MRLSVHRKAHFNAAHRLYRKDWSDEKNLQVFGKCSNPHYHGHNYDLIVKVTGEIDPETGFVMDLKRLKDLIYEEVEVPFDHKNLNEEVPPFNELNPTAENIAVVIWNKIREKLKPELDLEITLYETPRNYVTYKGE

SEQ ID NO: 25286 - protein, 149 aa, Salegentibacter salinarum
  misc_feature (1)..(149): tr|A0A2N0U3J1|A0A2N0U3J1_9FLAO 6-carboxy-5,6,7,8-tetrah ydropterin synthase OS=Salegentibacter salinarum OX=447 422 GN=APR41_00810 PE=3 SV=1
MSKIRITKKFSFETGHALYGYDGKCRNVHGHSYKLSVCVIGEPITDKDNVKFGMVIDFGDLKKIVKAEIVDQFDHATVFNKNTPHVELAEELKNRGHHVILVGYQPTSENMVVDFAKKIQKHLPDHIKLHSLKLQETESSFAEWYASDQ

SEQ ID NO: 25287 - protein, 151 aa, Salegentibacter sp.
  misc_feature (1)..(151): tr|A0A4R6G1B5|A0A4R6G1B5_9FLAO 6-pyruvoyltetrahydropter in/6-carboxytetrahydropterin synthase OS=Salegentibacte r sp. 24 OX=2183986 GN=DET49_109102 PE=4 SV=1
MSKIRITKKFSFETGHALYGYDGKCRNVHGHSYKLSVCVIGEPITDKNNVKFGMVIDFGDLKKIVKTEIVDRFDHATVFNRNTPHLELAEELKNRGHHVILVEYQPTSENMVVDFAEKIQRHLPDHIKLHSLKLQETESSFAQWCASDQVQ

SEQ ID NO: 25288 - protein, 149 aa, Salegentibacter sp.; identical to SEQ ID NO: 25272
  misc_feature (1)..(149): tr|A0A1L6R0K9|A0A1L6R0K9_9FLAO 6-carboxy-5,6,7,8-tetrah ydropterin synthase OS=Salegentibacter sp. T436 OX=1729 720 GN=AO058_03890 PE=3 SV=1

SEQ ID NO: 25289 - protein, 149 aa, Salibacterium halotolerans
  misc_feature (1)..(149): tr|A0A1I5T485|A0A1I5T485_9BACI 6-carboxy-5,6,7,8-tetrah ydropterin synthase OS=Salibacterium halotolerans OX=18 84432 GN=SAMN05518683_1106 PE=3 SV=1
MIHQFYPQVPHTYRYELNKDMQLAAAHFIPAAAAGKCANVHGHTYVINVTIAGDELDDTGFLVDFKMIKELVHDRFDHSLLNDDEAFADTPDSDSETFPTTEVVARTIWQSIQKELDTRFNQPRCLQVIVRETPTSYVVYRAKEGDFTS

SEQ ID NO: 25290 - protein, 149 aa, Salibacterium qingdaonense
  misc_feature (1)..(149): tr|A0A1I4IEV3|A0A1I4IEV3_9BACI 6-carboxy-5,6,7,8-tetrah ydropterin synthase OS=Salibacterium qingdaonense OX=26 6892 GN=SAMN04488054_10210 PE=3 SV=1
MIHQFYPQVPHTYRYELNKDMQLAAAHFIPAAAAGKCANIHGHTYVINVTIAGDELDDTGFLVDFKMIKELVHDRFDHSLFNDDDAFADTPDSDSETFPTTEVVARTIWQSIQKELDTRFNQPRCLQVIVRETPTSYVVYRAKEGDFTS

SEQ ID NO: 25291 - protein, 141 aa, Salilacibacter sp.
  misc_feature (1)..(141): tr|A0A514LLB0|A0A514LLB0_9ACTN 6-carboxy-5,6,7,8-tetrah ydropterin synthase OS=Salilacibacter sp. NKC3-5 OX=250 2791 GN=queD PE=3 SV=1
MLQQFYPQVFHDFRYELNKDMQIAAAHFINHKDAGQCRETHGHTYFINITIAGDTLDDSGFLVNFKTLKDEVHGVFDHSLLNDHPSFADGLPTTEMVARVFWEKIDERLAAQENRPYCLQVLVRETPTSYAIYRPKRDEHR

SEQ ID NO: 25292 - protein, 155 aa, Salimicrobium flavidum
  misc_feature (1)..(155): tr|A0A1N7IR62|A0A1N7IR62_9BACI 6-pyruvoyltetrahydropter in/6-carboxytetrahydropterin synthase OS=Salimicrobium flavidum OX=570947 GN=SAMN05421687_1027 PE=4 SV=1
MYGFTIVENLQKIDEHIKRHELNYHSKRVMVSKEFTFDAAHHLHCYDGKCKNLHGHTYTAVFGISGYTDDIGLVIDFGDIKTIWKEQIEVHLDHRYLNDTLPDMNTTAENMVVWCYEKMDEALAGYPNSCRLEFVRLYETPTSYAEARREWMTHG

SEQ ID NO: 25293 - protein, 155 aa, Salimicrobium halophilum
  misc_feature (1)..(155): tr|A0A1G8T6A9|A0A1G8T6A9_9BACI 6-pyruvoyltetrahydropter in/6-carboxytetrahydropterin synthase OS=Salimicrobium halophilum OX=86666 GN=SAMN04490247_1734 PE=4 SV=1
MYGFTIVENLQKIDEHIKRHELNYHSKRVMVSKEFTFDAAHHLHCYDGKCKNLHGHTYTAVFGISGHTDDIGLVIDFGDIKTIWKEQIEVHLDHRYLNDTLPNMNTTAENMVVWCYEKMDAALADYPNGCRVEFVRLYETPTSYAEARREWMRNG

SEQ ID NO: 25294 - protein, 134 aa, Salinarimonadaceae bacterium
  misc_feature (1)..(134): tr|A0A0N8KET3|A0A0N8KET3_9RHIZ 6-pyruvoyl-tetrahydropte rin synthase OS=Salinarimonadaceae bacterium HL-109 OX= 1653334 GN=HLUCCO17_03370 PE=4 SV=1
MFAVEVRDHVMIAHSFKGDLFGPAQKLHGATFVIDVAFFRKELGPEGVVVDIGRAHEALKATLGPLNYQNLDELPQFAGQNTTTEFLCKHIFDAMAQAATSGALGPGSEKIAKIRVLIGESHVARAWYEAELAG

SEQ ID NO: 25295 - protein, 135 aa, Salinarimonas sp.
  misc_feature (1)..(135): tr|A0A5B2VW06|A0A5B2VW06_9RHIZ 6-carboxytetrahydropteri n synthase OS=Salinarimonas sp. BN140002 OX=1638099 GN= F0L46_03485 PE=4 SV=1
MYAVEVRDHIMIAHSFKGALFGPAQGLHGATFVVDVAFFRPELTADAVVVDIGRAHEALKATLGPLNYRNLDEVPAFAGQNTTTEFLCRHIFDAMAAAAREGRLGPGSEGVSRIRVSLHESHVARAWYEAELARG

SEQ ID NO: 25296 - protein, 123 aa, Salinibacter ruber
  misc_feature (1)..(123): tr|D5H9C4|D5H9C4_SALRM Putative 6-pyruvoyl tetrahydrobi opterin synthase OS=Salinibacter ruber (strain M8) OX=7 61659 GN=ygcM PE=4 SV=1
MYELMVRRDFVAQHYLTVPDCGPENEWHSHHFDVEVALEGDELNEHGYLVDIVEVEGALEALVDRYEDATLNDLPEFEGLNPSIEHFSRIFCTALTEQLNTARLETVTVKIWEDDTAWASYTA

SEQ ID NO: 25297 - protein, 123 aa, Salinibacter ruber
  misc_feature (1)..(123): tr|Q2S2F0|Q2S2F0_SALRD Uncharacterized protein OS=Salin ibacter ruber (strain DSM 13855 / M31) OX=309807 GN=SRU _1508 PE=4 SV=1
MYELMVRRDFVAQHYLTVPDCGPENEWHSHHFDVEVALKGDELNEHGYLVDIVEVEGALEALVDRYEDATLNDLPEFEGLNPSIEHFSRIFCTALTEQLNTAQLETVTVKIWEDDTAWASYTA

SEQ ID NO: 25298 - protein, 129 aa, Salinibacter sp.
  misc_feature (1)..(129): tr|A0A2P6BX73|A0A2P6BX73_9BACT 6-pyruvoyl tetrahydropte rin synthase OS=Salinibacter sp. 10B OX=1923971 GN=BSZ3 5_01700 PE=4 SV=1
MYTLRVHRDFVAQHYLTVPDCGPENEWHSHHFGVEVLLKGKELNDHGYLVDIVDVEEALDQIVARYRDSTLNDLPEFEGRNPSIEHFSRIVCISLQDRLSLDATTGITVRIWEDEEAWASYSTEGVHSD

SEQ ID NO: 25299 - protein, 137 aa, Salinibacter sp.
  misc_feature (1)..(137): tr|A0A2P6C5X1|A0A2P6C5X1_9BACT 6-carboxy-5,6,7,8-tetrah ydropterin synthase OS=Salinibacter sp. 10B OX=1923971 GN=BSZ35_14315 PE=3 SV=1
MSTVYVTRKVHFNAAHRLHNPEKSDEWNEETFGKCSNPNWHGHNFELEVTVAGTPDPETGYVVDLGALKDILHERVVDKVDHKNLNLEVDFMDGVIPSTENFAIAIWNQLEDALPSGRLHAIRLYETPRNFVEYRGE

SEQ ID NO: 25300 - protein, 138 aa, Salinicoccus alkaliphilus
  misc_feature (1)..(138): tr|A0A1M7F022|A0A1M7F022_9STAP 6-carboxy-5,6,7,8-tetrah ydropterin synthase OS=Salinicoccus alkaliphilus DSM 16 010 OX=1123231 GN=SAMN02745189_01282 PE=3 SV=1
MMIYPIPSHDYEYELNKDLNFSAAHHIPDARAGKCERVHGHTYHVNITIAGDALDDLGFLVNFSALKKLIMDEFDHRLLNDHEAFRDIPPTSETLAKVIHDMVQSYIKTEQPNEVKCLQIILKETPTSYVVYRPKEKR

SEQ ID NO: 25301 - protein, 137 aa, Salinicoccus halodurans
  misc_feature (1)..(137): tr|A0A0F7HJA4|A0A0F7HJA4_9STAP 6-carboxy-5,6,7,8-tetrah ydropterin synthase OS=Salinicoccus halodurans OX=40703 5 GN=AAT16_02230 PE=3 SV=1
MMYQTPSHDFEYELNKDLNFSAAHHIPDARAGKCAKIHGHTYFVNMTIAGDTLDDLGFLVNFSDIKKLIDEAFDHTLLNDHTRFSDIPPTSETMAKTIYDMVEEYLDRLDNRPVCLQVVLRETPTSYVVYRPKEYRK

SEQ ID NO: 25302 - protein, 137 aa, Salinicoccus kekensis
  misc_feature (1)..(137): tr|A0A285URU7|A0A285URU7_9STAP 6-carboxy-5,6,7,8-tetrah ydropterin synthase OS=Salinicoccus kekensis OX=714307 GN=SAMN05878391_2407 PE=3 SV=1
MFYPIPDHDYEYELNKDLNFSAAHHIPDARAGKCERVHGHTYHVNITIAGDVLDDLGFLVNFSALKKLIMDAFDHRLLNDHEAFRDIPPTSETLAKVIYDMVDEYITAEQPNKLECLQIILKETPTSYVVYRPKGRK

SEQ ID NO: 25303 - protein, 138 aa, Salinicoccus qingdaonensis
  misc_feature (1)..(138): tr|A0A1G9DKH0|A0A1G9DKH0_9STAP 6-carboxy-5,6,7,8-tetrah ydropterin synthase OS=Salinicoccus qingdaonensis OX=57 6118 GN=SAMN05216216_10639 PE=3 SV=1
MMYPIPVHDYEYELNKDLNFSAAHFIPDKRAGKCERVHGHTYHVNITIVGDTLDELGFLVNFSALKNLIMEAFDHRLLNEHEAFSEIPPTSETLAKVIYEMVDKYIKEEQENELQCLQIILRETPTSYVVYRPKEKDE

SEQ ID NO: 25304 - protein, 138 aa, Salinicoccus roseus
  misc_feature (1)..(138): tr|A0A265E6P7|A0A265E6P7_9STAP 6-carboxy-5,6,7,8-tetrah ydropterin synthase OS=Salinicoccus roseus OX=45670 GN= queD PE=3 SV=1
MMSYKTPDHDYRFELNKDLNFSAAHFIPDDRAGKCSNVHGHTYFVNITIAGDELDDLGFLVNFSSLKSLISDAFDHTLLNEHERFQERPPTTETMAETIYDMVAEFVDGLDNRPVCLQVYLRETPTSYVIYRPKERRN

SEQ ID NO: 25305 - protein, 138 aa, Salinicoccus roseus
  misc_feature (1)..(138): tr|A0A0C2HDK2|A0A0C2HDK2_9STAP 6-carboxy-5,6,7,8-tetrah ydropterin synthase OS=Salinicoccus roseus OX=45670 GN= SN16_03460 PE=3 SV=1
MMSYKTPDHDYRFELNKDLNFSAAHFIPDDRAGKCSNVHGHTYFVNITIAGDELDDLGFLVNFSSLKSLISDAFDHTLLNEHERFQERPPTTETMAETIYDMVAEFVDGLDNRPVCLQVYLRETPTSYVIYRPKESRN

SEQ ID NO: 25306 - protein, 137 aa, Salinicoccus sediminis
  misc_feature (1)..(137): tr|A0A0M2SIP0|A0A0M2SIP0_9STAP 6-carboxy-5,6,7,8-tetrah ydropterin synthase OS=Salinicoccus sediminis OX=143256 2 GN=WN59_07470 PE=3 SV=1
MMYQTPVHDFEYELNKDLNFSAAHHIPNRRAGKCANIHGHTYFVNMTIAGDMLDDLGFLVNFSDVKKLIDEAFDHTLLNDHPRFLDIPPTSETLAKTIHEMVSEYLATLDNRPVCLQVFLRETPSSYVIYRPKEFRK

SEQ ID NO: 25307 - protein, 136 aa, Salinicoccus sp.
  misc_feature (1)..(136): tr|A0A558AR05|A0A558AR05_9STAP 6-carboxy-5,6,7,8-tetrah ydropterin synthase OS=Salinicoccus sp. CT19 OX=2493691 GN=queD PE=3 SV=1
MYQTPAHDYQYELNKDLNFSAAHYVPDERAGKCSRVHGHTYFVNITIAGDELDDLGFLVNFSSLKSLISDAFDHTLLNEHERFKERPPTSETLAETIYDMVETFIAGLDNRPVCLQIYLQETPTSYVIYRPKESRK

SEQ ID NO: 25308 - protein, 287 aa, Salinicola socius
  misc_feature (1)..(287): tr|A0A1Q8SPE4|A0A1Q8SPE4_9GAMM 6-pyruvoyl tetrahydropte rin synthase-related protein OS=Salinicola socius OX=40 4433 GN=BTW07_14470 PE=4 SV=1
MTLFVNNLTNIDASIWSPQRGLSGASWHVDVELDGELAEDGMLLDFGEVKPWIKARLDAGLDHTLLVPTQAAGVKIEECSEGLHMATELPFPFELRAPRQGFTLFPWGEITAERLGAHLSTELSKRPPPRVEAIRIRLREELADGAIYSYSHGLKHHKGNCQRIAHGHRSHLRIWRNGQRDSELEGFWAQRLDNGYLVDEADIVGPRRQDDIMRVRYRSAQGQFQLHLPKARCHTLPAPTTVENIAAWLARQIALSTGAHIRVQAFEGIDKGALAESRGISAGDQGI

SEQ ID NO: 25309 - protein, 132 aa, Salinicola socius
  misc_feature (1)..(132): tr|A0A1Q8SR55|A0A1Q8SR55_9GAMM Uncharacterized protein OS=Salinicola socius OX=404433 GN=BTW07_11510 PE=4 SV=1
MFSLTVRDHMMIAHSFNSETFGPAQKLHGATYVVDVTFKRPELDPDDLVVDIGLASEVLKRILGEFTLNNLDEIDEFKGRNTTTEFMARVVFDRLSHAIRDGELGDGARHLTALAVTLHESHVAWASYEGGL

SEQ ID NO: 25310 - protein, 284 aa, Salinicola sp.
  misc_feature (1)..(284): tr|A0A1Q8T3N5|A0A1Q8T3N5_9GAMM 6-pyruvoyl tetrahydropte rin synthase-related protein OS=Salinicola sp. MH3R3-1 OX=1928762 GN=BTW08_08355 PE=4 SV=1
MTLFVNNLTNIDASIWSPQRGLSGASWHVDVELDGELGEDGMLFDFGEVKPWIKSRLDGGLDHTLLVPTQAAGVKIEECSEGLHMAAELPFPFELRAPRQGFTLFPWGEVTAERLGAHLSSELSKRPPPRVEAIRIRLREELVDGAIYSYSHGLKHHKGNCQRIAHGHRSHLRIWRDGQRDSELERLWAQRLDNAYLVDEADIVNPRRNDDIMRVRYRSAQGQFQLHLPKERCHTLSAPTTVENIAAWLAHQIALSTGAHIRVQAFEGIDKGALAESRGTPAGG

SEQ ID NO: 25311 - protein, 132 aa, Salinicola sp.
  misc_feature (1)..(132): tr|A0A1S2DDK0|A0A1S2DDK0_9GAMM Uncharacterized protein OS=Salinicola sp. MIT1003 OX=1882734 GN=BC443_11160 PE= 4 SV=1
MFSLTVRDHMMIAHSFHSETFGPAQKLHGATYVVDVTFKRPELDHDDLVVDIGLASETLKRVLGEFTLNNLDEVEEFKGRNTTTEFMARVVFDRLSHAIREGALGDGGRHLTAMTVTLHESHIAWASYEGGL

SEQ ID NO: 25312 - protein, 136 aa, Salinimicrobium catena
  misc_feature (1)..(136): tr|A0A1H5NSD5|A0A1H5NSD5_9FLAO 6-carboxy-5,6,7,8-tetrah ydropterin synthase OS=Salinimicrobium catena OX=390640 GN=SAMN04488034_105125 PE=3 SV=1
MKVTVNRKAHFNAAHRLFRKEWDDEKNKRVFGKCSNPHYHGHNYELTVSVTGEICEETGFVIDLKDLKDLIYEKIEVPFDHKNLNLEVPEFKELNPTAENIAVVIWRKLRHELAAHLDLEVTLYETPRNFVTYRGQ

SEQ ID NO: 25313 - protein, 150 aa, Salinimicrobium catena
  misc_feature (1)..(150): tr|A0A1H5IX61|A0A1H5IX61_9FLAO 6-pyruvoyltetrahydropter in/6-carboxytetrahydropterin synthase OS=Salinimicrobiu m catena OX=390640 GN=SAMN04488034_101556 PE=4 SV=1
MGLIRITKQFSFETGHALYGYDGKCKNVHGHSYKLAVTVIGEPITDVDNVKLGMVIDFGDLKKIVKQEIVDVFDHATVFNKNTPHVELAKELKDRGHTVILVDYQPTSENMIQDFAAKIQKRLPEHIKLFSLRLQETETSYAEWYASDNA

SEQ ID NO: 25314 - protein, 136 aa, Salinimicrobium sediminis
  misc_feature (1)..(136): tr|A0A285X6T8|A0A285X6T8_9FLAO 6-carboxy-5,6,7,8-tetrah ydropterin synthase OS=Salinimicrobium sediminis OX=134 3891 GN=SAMN06296241_2568 PE=3 SV=1
MRVTVNRKAHFNAAHRLHRKDWDDAKNSRVFGKCSNPNYHGHNYELIVAVTGNINPETGFVMDLKDLKELIYQKIEQPFDHKNLNIEVAEFRDLNPTAENIAVVIWNKLRAELEPHLDLEVTLYETPRNFVTYRGE

SEQ ID NO: 25315 - protein, 165 aa, Salinimicrobium sediminis
  misc_feature (1)..(165): tr|A0A285X1L8|A0A285X1L8_9FLAO 6-pyruvoyltetrahydropter in/6-carboxytetrahydropterin synthase OS=Salinimicrobiu m sediminis OX=1343891 GN=SAMN06296241_0763 PE=4 SV=1
MQGVKNLYLCTKFVPMALIRITKQFSFETGHALFGYDGKCKNVHGHSYKLAVTVIGEPISDEDHVKLGMVIDFGDLKKIVKQEIVDKFDHATVFNKNTPHVELAEELQTRGHNVILVDYQPTSENMIQDFAERIKSRLPQHIELYSLRLQETETSYAEWYASDNS

SEQ ID NO: 25316 - protein, 294 aa, Salinimonas sediminis
  misc_feature (1)..(294): tr|A0A346NLW7|A0A346NLW7_9ALTE Uncharacterized protein OS=Salinimonas sediminis OX=2303538 GN=D0Y50_09195 PE=4 SV=1
MQLFVNDLTVMDFSYLCPRRGMVGESWIVDVVLDGNLNDESMIQDFGKVKKNLKRLIDEYVDHKLLVPLEYTGSTVIHRTQDEQVEVRFETNEHSVIQLFCPAEAYAFVYADEVTMDSVGNYLREVIATHLPDNVASIELKLRAEQILTPYYHYTHGLKKHDGNCQRIAHGHRSKIGIVIDGQDCLESQQYWAQRWADIYIISAQDIIEYDARQATGTVDNPDEYYCCAYESSQGYFELLIARNVCEVIETDSTVECLAQFVFAEQKKRSGDSTLQVMAYEGVGKGAMVRDEVC

SEQ ID NO: 25317 - protein, 292 aa, Salinimonas sp.
  misc_feature (1)..(292): tr|A0A5B7YE97|A0A5B7YE97_9ALTE Uncharacterized protein OS=Salinimonas sp. KX18D6 OX=2572577 GN=FBQ74_08595 PE= 4 SV=1
MQLFVNDLTVMDFSYLCPRRGMVGESWIVDVMLDGDLNDESMIQDFGKVKKDLKRLIDEYVDHKLLVPADHAGASITHLDDEQVEVRFTLDNDEIIQLFCPAEAYAFVYADTVTMASVGSYMREVIATHLPENVANIELKLRAEQILTPFYHYTHGLKKHDGNCQRIAHGHRSRIGIFIDEQACLESQQYWAQRWEDIYIITREDIIDYEGRRSSGALDNPLDYYCCAYESSQGYFELIIPRKSCEVVETDSTVECLAQFIFDEQRKRTGSGNLRVMAYEGVGKGAMVAGTV

SEQ ID NO: 25318 - protein, 293 aa, Saliniradius amylolyticus
  misc_feature (1)..(293): tr|A0A2S2E4Z9|A0A2S2E4Z9_9ALTE Isocitrate dehydrogenase (NADP(+)) OS=Saliniradius amylolyticus OX=2183582 GN=i dh1 PE=4 SV=1
MQLFVNDLTVMDFSYLCPERGMVGESWIVDVILDGALNDESMVLDFGKVKKQLKRLIDDYVDHKLLVPAEHSYTEIRHHPQTEQVTVDFHRPEGRSIHLYCPPEAYAFVYAEEVTMDSVRDYLRDIIATHLPDNVEGLTLELRTEELRTPYYHYTHGLKKHDGNCQRIAHGHRSKVDVWRDEHHAPDLQCYWAERWQDIYIGTREDLVKPGELHLSPKACQLDLDEHYGFAYEASQGLFELVIPMRETEIVETDSTVECLAQFMADEHKRLNPESTYQVMAYEGVGKGAIASA

SEQ ID NO: 25319 - protein, 284 aa, Salinisphaera halophila
  misc_feature (1)..(284): tr|A0A423PRR1|A0A423PRR1_9GAMM Uncharacterized protein OS=Salinisphaera halophila YIM 95161 OX=1051139 GN=SAHL _10565 PE=4 SV=1
MKPGDTVDLFVEQVTHIDCGVLDPDTGLDGRTWLVDARLSGTRDAHGMLFDFGPARRLLKRAIDERLDHRLLVPLRAPGLSRHGDDLRLTTTRGAHIDYAGPAEGVALLNAERIGPALLADWLTDRIAPLLPDNIDDLQLSLRAEAIDGAAYHYCHGLRSHDGNCQRMGHGHRCRLAIAVDGRDDPARARRWAEDWQGVFIGDRADLARRDADGRHHFDYVAPQGRFALTIDAGRCVLLDGPPTVENIAAHIADALAAELPDRHLEVRAYEGVGKGAIVCRGPA

SEQ ID NO: 25320 - protein, 132 aa, Salinisphaera halophila
  misc_feature (1)..(132): tr|A0A423PSQ0|A0A423PSQ0_9GAMM 6-pyruvoyl tetrahydropte rin synthase OS=Salinisphaera halophila YIM 95161 OX=10 51139 GN=SAHL_10070 PE=4 SV=1
MYSLTVRDHFMIAHSFNGEIFGPAQHTHGATYVVDVTFRREALDADDLVIDIGLAGAGLKDVLAGLNMRDLDEEPAFSGRNTTTEFLAGVVFERMREAIRAGRLGDSARGVEGMSVTLSESHIAWASFEGRV

SEQ ID NO: 25321 - protein, 132 aa, Salinisphaera hydrothermalis
  misc_feature (1)..(132): tr|A0A084IQQ3|A0A084IQQ3_SALHC Uncharacterized protein OS=Salinisphaera hydrothermalis (strain C41B8) OX=13042 75 GN=C41B8_02867 PE=4 SV=1
MFHLTVRDHVMIAHSFSSPTFGPAQALHGATYVVDVTFYREALDADDLVVDIGAASSALSAVLAEFNLCNLDDNPALAGHNTTTEYMAGIIFSRMKQAIAEGRLGENAAGLSRMGVRLSESHIAWAGYEAEL

SEQ ID NO: 25322 - protein, 290 aa, Salinisphaera hydrothermalis
  misc_feature (1)..(290): tr|A0A084IHT2|A0A084IHT2_SALHC Uncharacterized protein OS=Salinisphaera hydrothermalis (strain C41B8) OX=13042 75 GN=C41B8_15702 PE=4 SV=1
MNPGDDSLQLFVEHVTHIDCGVLDAEAGLRGATWLVDATLTGRRGDDGMLFDFGPAKKLLKAEIDALVDHRLLVPALAPGLEIDVDAGRLDFTTTSGDRYRYAGPASATTIFDATEIQPRALARWLEERVGPKLPANVDALKINLRPEAIAGPVYDYTHGLAAHDGNCQRLAHGHRCRLAIALDGVDRTDIALAWAQAWQGVFIGHRADLTTAADAERLGFGYTAPQGEFALDIAAERCVLLDGPPTVENIADHIAGELAARYPGHLVEVRAYEGVGKGAIATRSHAPRT

SEQ ID NO: 25323 - protein, 286 aa, Salinisphaera japonica
  misc_feature (1)..(286): tr|A0A423PGZ5|A0A423PGZ5_9GAMM Uncharacterized protein OS=Salinisphaera japonica YTM-1 OX=1209778 GN=SAJA_1365 0 PE=4 SV=1
MNPAQRSDSLTLFVDHVTHVDCGVLDSARGLCGATWLVDVALTGTRDDQGMLFDFGPAKKLLKAEIDALVDHRLLVPTAAEGISWHGETIKLVTGSGDRYVYTGPASALAYLDCDRITPEFLADWLGARVAAQMPDNVDHVALTLRAEAIDGPVYDYTHGLSAHDGNCQRLAHGHRCRLAVWLDDTPRPDIAHAWAERWQGIFIGSRADLTTPDDATRLGFAYDAPQGHFAIELARERCALIDGPATVENIADAIARALADEHAGQAVTVQAYEGVGKGAIVTHAL

SEQ ID NO: 25324 - protein, 132 aa, Salinisphaera japonica
  misc_feature (1)..(132): tr|A0A423Q2E8|A0A423Q2E8_9GAMM 6-pyruvoyl tetrahydropte rin synthase OS=Salinisphaera japonica YTM-1 OX=1209778 GN=SAJA_00885 PE=4 SV=1
MFHLTVRDHMMIAHSFNSPTFGPAQKLHGATYIVDVTFYRPELDADDLVVDIGAAAAALGEITQTFNLTNLDEHEAFAGHNTTTEFMARAVFDAMKAAIAADKLGPGAHGVTRLGVRLAESHIAWAGYEADL

SEQ ID NO: 25325 - protein, 132 aa, Salinisphaera orenii
  misc_feature (1)..(132): tr|A0A423PXX3|A0A423PXX3_9GAMM 6-pyruvoyl tetrahydropte rin synthase OS=Salinisphaera orenii MK-B5 OX=856730 GN =SAOR_01145 PE=4 SV=1
MYSLTVRDHFMIAHSFNGEIFGPAQHTHGATYVVDVTFRREALDADDLVIDIGLAGAGLKEVLAGLNMRDLDEEPAFSGRNTTTEFLAGVVFERMREAIRAGRLGDSARGVEAMSVTLSESHIAWASFEGRV

SEQ ID NO: 25326 - protein, 284 aa, Salinisphaera orenii
  misc_feature (1)..(284): tr|A0A423PFV8|A0A423PFV8_9GAMM Uncharacterized protein OS=Salinisphaera orenii MK-B5 OX=856730 GN=SAOR_14795 P E=4 SV=1
MKPGDTVDLFVEQVTHIDCGVLDPDTGLDGRTWLVDARLSGTRDAHGMLFDFGPARRLLKRAIDERLDHRLLVPLRAPGLSRHGDDLRLTTTRGAHIDYAGPAEGVALLDAERIGPALLADWLTDRIAPLLPDNIDDLQLSLRAEAIDGAAYHYCHGLRSHDGNCQRMGHGHRCRLAIAVDGRDDPARARRWAEGWQGVFIGDRADLARRDADGRHHFDYVAPQGRFALTIDAGRCVLLDGPPTVENVAAHIADTLAAELPDRHLEVRAYEGVGKGAIVCRGPA

SEQ ID NO: 25327 - protein, 132 aa, Salinisphaera shabanensis
  misc_feature (1)..(132): tr|U2EHT2|U2EHT2_9GAMM 6-pyruvoyl tetrahydrobiopterin s ynthase protein OS=Salinisphaera shabanensis E1L3A OX=1 033802 GN=SSPSH_003294 PE=4 SV=1
MFSLTVRDHFMIAHSFNGEIFGPAQHTHGATYVVDVSFMRAELDDDDLVIDIGLASDALKRTLGELNMRNLDDVDEFKGRNTTTEFLAKAVFDRLRAAIQAGDLGDSARSLAAMRVTLAESHIAWASYEGDV

SEQ ID NO: 25328 - protein, 175 aa, Salinisphaera shabanensis
  misc_feature (1)..(175): tr|U2EMQ8|U2EMQ8_9GAMM 6-pyruvoyl tetrahydrobiopterin s ynthase protein OS=Salinisphaera shabanensis E1L3A OX=1 033802 GN=SSPSH_001520 PE=4 SV=1
MTAAYRIRRQIGIDAGHRIRLHGSKCRHLHGHRYTIEAVCEADQLAGEGEQAGMVLDFAFLKDEMIGQIDAPCDHGFIAELADIELLAMFTPAEAGRVEFVEKLDTAVREQGFAVPDHTALGTKLYVIPVPPTAENLARHWFERLAPRVATRSEGRARLARVVVWETPNCAAEWP

SEQ ID NO: 25329 - protein, 132 aa, Salinisphaera sp.
  misc_feature (1)..(132): tr|A0A2E0IWK1|A0A2E0IWK1_9GAMM Uncharacterized protein OS=Salinisphaera sp. OX=1914330 GN=CMN26_03520 PE=4 SV= 1
MFSLTVRDHFMIAHSFTGEIFGPAQQTHGATFVVDVTFMRPELDGDDLVVDIGLASAALKQQLATLNMRNLDEASEFRGHNTTTEFLAKAVFDRLRTAIRSGDLGQSAKDLSALRVTLAESHIAWATFEGDL

SEQ ID NO: 25330 - protein, 132 aa, Salinisphaera sp.
  misc_feature (1)..(132): tr|A0A2Z3JE40|A0A2Z3JE40_9GAMM PTPS-like type 4 OS=Sali nisphaera sp. LB1 OX=2183911 GN=SALB1_3104 PE=4 SV=1
MYHLTVRDHIMIAHSFSSPTFGPAQALHGATYVVDVTFYRQTLDDDDLVVDIGAASTALSAALAEFNLRNLDDNPAMAGRNTTTEFMAGEIFNRLQQAIADGRLGAGAAGLCRMGVQLSESHIAWAGYEAEL

SEQ ID NO: 25331 - protein, 144 aa, Salinisphaeraceae bacterium
  misc_feature (1)..(144): tr|A0A2D4S8R5|A0A2D4S8R5_9GAMM 6-pyruvoyl tetrahydrobio pterin synthase OS=Salinisphaeraceae bacterium OX=20267 89 GN=CMN28_02250 PE=4 SV=1
MSDPKTRPIVSLVRRESFSAAHRLWSDALSEAENHRLYGPCARPHGHGHNFDLEVALKGPIDPVTGVIVNLADLRDVIRRRIIDLVDQRHLNYDCALTADINPTVENLVVRFWDTLAEVYGDLLHEIRLRETASNWTVYRGERG

SEQ ID NO: 25332 - protein, 147 aa, Salinispira pacifica
  misc_feature (1)..(147): tr|V5WMB5|V5WMB5_9SPIO Uncharacterized protein OS=Salin ispira pacifica OX=1307761 GN=L21SP2_3437 PE=4 SV=1
MKDHTHGMHEETRRYRVGVRGNFTAIHALVGDVPEHEKTPHEHEYLLEWTFTLQSLDERGFSLDIALLERLRDALIHEIRGVNLNGLPYFSGVNSSLENLCGFFFQRLSQMLREELGDPDLKRIGEMEIRIWENDQAWAGLAGSVTP

SEQ ID NO: 25333 - protein, 132 aa, Salinispora arenicola
  misc_feature (1)..(132): tr|A8M5L7|A8M5L7_SALAI Uncharacterized protein OS=Salin ispora arenicola (strain CNS-205) OX=391037 GN=Sare_275 0 PE=4 SV=1
MFSVTVRDHMMIAHSFQGEVFGPAQRLHGATFVVDATFRRPDLDLDGIVVDIGRATEQLREVLGELTYRNLDDEPEFAGVNTTTEVLARTVADRLVARIHAGELGPGARGLTGVSVTLHESHVAWASYERSL

SEQ ID NO: 25334 - protein, 241 aa, Salinispora arenicola
  misc_feature (1)..(241): tr|A0A542XM42|A0A542XM42_9ACTN 6-pyruvoyltetrahydropter in/6-carboxytetrahydropterin synthase OS=Salinispora ar enicola OX=168697 GN=FB564_2048 PE=4 SV=1
MYRIGKQFTFDAAHAVPAAVDERHCPPGLHGHTYTIGVVLAAEQVEPPGFVIDFAALNPFARHLNEVLDHRLLNDVLDQPPTHQAINGYLRRWLETFLVAPTGRVTLDAVSIQAPTLPGQGPLAEYEVTFEAAHRLPGLPIGHKCARIHGHSYRAAFRFDGTSRLPDACLAALNGYISTAFNGCYLNDSVPHAGPPTSENLARHLYEWACKELSLPDGTTITAARVSETASTWAEYQETTW

SEQ ID NO: 25335 - protein, 132 aa, Salinispora tropica
  misc_feature (1)..(132): tr|A4X807|A4X807_SALTO Uncharacterized protein OS=Salin ispora tropica (strain ATCC BAA-916 / DSM 44818 / CNB-4 40) OX=369723 GN=Strop_2563 PE=4 SV=1
MFSVTVRDHMMIAHSFQGEVFGPAQRLHGATFVVDATFRRSDLDADGIVVDIGRATAQLRAVLGELTYRNLDDEPEFAGVNTTTEVLARTVADRLAARVNAGELGAGAGGLTGISVTLHESHVAWASYERSL

SEQ ID NO: 25336 - protein, 120 aa, Salinivibrio kushneri
  misc_feature (1)..(120): tr|A0A1V3GHV0|A0A1V3GHV0_9GAMM 6-carboxy-5,6,7,8-tetrah ydropterin synthase OS=Salinivibrio kushneri OX=1908198 GN=BZG09_11855 PE=3 SV=1
MTTELFKEFTFEAAHHLPNVPEGHKCGRLHGHSFIVRLYVEGEVDPHTGWVIDFAEIKAAFKPIYNRLDHYYLNEIEGLENPTSEVLAQWIWQQVKPELPLLSKVMVKETCTAGCTYYGD

SEQ ID NO: 25337 - protein, 120 aa, Salinivibrio kushneri
  misc_feature (1)..(120): tr|A0A4P8H2L8|A0A4P8H2L8_9GAMM 6-carboxy-5,6,7,8-tetrah ydropterin synthase OS=Salinivibrio kushneri OX=1908198 GN=queD PE=3 SV=1
MTTELFKEFTFEAAHHLPNVPEGHKCGRLHGHSFIVRLYVEGEVDPHTGWVIDFAEIKAAFKPIYNRLDHYYLNEIEGLENPTSEVLAQWIWQQVKPDLPLLSKVMVKETCTAGCTYYGD

SEQ ID NO: 25338 - protein, 120 aa, Salinivibrio sharmensis
  misc_feature (1)..(120): tr|A0A1V3H251|A0A1V3H251_9GAMM 6-carboxy-5,6,7,8-tetrah ydropterin synthase OS=Salinivibrio sharmensis OX=39088 3 GN=BZG74_07470 PE=3 SV=1
MTTELFKEFTFEAAHHLPNVPEGHKCGRLHGHSFIVRLYVEGEVDPHTGWVIDFAEIKAAFKPIYNRLDHYYLNEIEGLENPTSEVLAQWIWQQVKPNLPLLSKVMVKETCTAGCTYYGD

SEQ ID NO: 25339 - protein, 120 aa, Salinivibrio sp.
  misc_feature (1)..(120): tr|A0A1V3I3N1|A0A1V3I3N1_9GAMM 6-carboxy-5,6,7,8-tetrah ydropterin synthase OS=Salinivibrio sp. IB872 OX=176612 3 GN=BZJ18_05690 PE=3 SV=1
MTTELFKEFTFEAAHHLPNVPEGHKCGRLHGHSFMVRLYVEGEVDPHTGWVIDFADIKAAFKPIYDRLDHYYLNEIEGLENPTSEVLARWIWQQVKPNLPLLSKVMVKETCTAGCTYRGE

SEQ ID NO: 25340 - protein, 170 aa, Salinivibrio sp.
  misc_feature (1)..(170): tr|A0A0F5APE4|A0A0F5APE4_9GAMM Queuosine biosynthesis p rotein QueD OS=Salinivibrio sp. KP-1 OX=1406902 GN=WN56 _12670 PE=4 SV=1
MTIHTIDKAQLISDVQFGDNLNHAVVQGRRSDFALMMALLSGDANESTPLTPIDTPVSNDQVLRQRFQLPDPQPLAASNEEDYQRASAQADAFHRGGIASANLRFQLAPAAMHYPPQGTHGFDEAVYHNLSGHERRHLTDTEPKRPAYNPATLYEKLTTSHCFDKMRVSA

SEQ ID NO: 25341 - protein, 149 aa, Salinivirga cyanobacteriivorans
  misc_feature (1)..(149): tr|A0A0S2I090|A0A0S2I090_9BACT 6-carboxy-5,6,7,8-tetrah ydropterin synthase OS=Salinivirga cyanobacteriivorans OX=1307839 GN=queD_1 PE=3 SV=1
MSKIRITKEFSFEMAHALRNYDGPCRNIHGHSYKLFVTIIGEPKQDDADPKNGMLMDFGALKKLVNTEIVDKYDHSVVVYKNDERLPEMQKLFENIIIEAKQPTCENLVSDFASTINTRLPDNLSVFSIKLYETATSYAEWYASDNPTE

SEQ ID NO: 25342 - protein, 137 aa, Salinivirga cyanobacteriivorans
  misc_feature (1)..(137): tr|A0A0S2I2U4|A0A0S2I2U4_9BACT 6-carboxy-5,6,7,8-tetrah ydropterin synthase OS=Salinivirga cyanobacteriivorans OX=1307839 GN=queD_2 PE=4 SV=1
MVYVTRRERFNAAHRLFKAEWSEEKNYEIFGKCSNPNWHGHNYELFVTVKGKVNPETGFVVNLKELSNLIKEHIISKVDHKNLNTEVDFLQGRMMSTEVIAKAFWQQLEHHVKLLGAQLHCVKITETENNYVEYYGD

SEQ ID NO: 25343 - protein, 147 aa, Salinivirgaceae bacterium
  misc_feature (1)..(147): tr|A0A2N5ZZY3|A0A2N5ZZY3_9BACT 6-carboxytetrahydropteri n synthase QueD OS=Salinivirgaceae bacterium OX=2053305 GN=C0599_02900 PE=4 SV=1
MAKIRITKEFSFEMAHALRNYDGPCRNIHGHSYKLFVTVIGSPISDDENAKNGMLMDFGQLKKIVNKNIVDVYDHAVVVYKNDDRLSEMQKVFENIIAADYQPTCENMVSDFAAVVNKELPEGLTVFSIRLYETATSYAEWYAMDNE

SEQ ID NO: 25344 - protein, 137 aa, Salinivirgaceae bacterium
  misc_feature (1)..(137): tr|A0A2N5ZGY2|A0A2N5ZGY2_9BACT 6-pyruvoyl tetrahydrobio pterin synthase OS=Salinivirgaceae bacterium OX=2053305 GN=C0599_13005 PE=4 SV=1
MVYVTRRERFNAAHRLFRNDWSDETNNEIFGKCSNPNWHGHNYELHVTVRGKVSTETGFVVNLKDLSRILKTKIVDKVDHKNLNLEVEFLKGMIISSENLAKAFWREIEHDIKLLGAELHCVKVTETENNYVEYFGE

SEQ ID NO: 25345 - protein, 160 aa, Salipaludibacillus aurantiacus
  misc_feature (1)..(160): tr|A0A1H9S7S2|A0A1H9S7S2_9BACI 6-pyruvoyltetrahydropter in/6-carboxytetrahydropterin synthase OS=Salipaludibaci llus aurantiacus OX=1601833 GN=SAMN05518684_10475 PE=4 SV=1
MYGFRIVDKLERIDEDIQKEELKYHTKRVMVSKEFTFDAAHHLHCYEGKCKNLHGHTYKVIFGISGYVNGTGLMIDFGEIKEIWKNDIEIHLDHRYLNETLPNMNTTAENMVVWIYEKMAEAIQANDELSRDQGARVEFVRLFETPTSYAEARREWMESE

SEQ ID NO: 25346 - protein, 160 aa, Salipaludibacillus keqinensis
  misc_feature (1)..(160): tr|A0A323TJC1|A0A323TJC1_9BACI 6-carboxytetrahydropteri n synthase QueD OS=Salipaludibacillus keqinensis OX=204 5207 GN=queD PE=4 SV=1
MYGFKIVENLEKINEDIHKDQLKYHSKRVLVSKEFTFDAAHHLHCYEGKCKNLHGHTYKVIFGISGYVDSVGLMIDFGDIKQIWKDEIEIHLDHRYINETLPPMNTTAENMVVWIYEKMADAIFSNESLRKDQGARVEFVRLFETPTSYAEARREWMEGE

SEQ ID NO: 25347 - protein, 160 aa, Salipaludibacillus neizhouensis
  misc_feature (1)..(160): tr|A0A3A9KS06|A0A3A9KS06_9BACI 6-carboxytetrahydropteri n synthase QueD OS=Salipaludibacillus neizhouensis OX=8 85475 GN=queD PE=4 SV=1
MYGFKIVDKLEKIDEDIRRDQLKYHSKRVLVSKEFTFDAAHHLHCYEGKCKNLHGHTYTAIFGISGFVDETGLMMDFGDIKDIWKKEIEIHLDHRYLNETLPAMNTTAENMVVWIYEKMAESLLKPENKKKYEGGRLEFVRLFETPTSYAEARREWMENE

SEQ ID NO: 25348 - protein, 117 aa, Salipiger thiooxidans
  misc_feature (1)..(117): tr|A0A1G7FIA0|A0A1G7FIA0_9RHOB 6-carboxy-5,6,7,8-tetrah ydropterin synthase OS=Salipiger thiooxidans OX=282683 GN=SAMN04488105_10794 PE=3 SV=1
MFRIRKEFHFSASHRLEHLPPDHQCARLHGHNYVVVVELSAETLNTDGFVRDYHDLADLKTYIDGQFDHRHLNDVLEVPSTAEHMARHFFDWCRARWPETSAVLVSETPKTWAEYRP

SEQ ID NO: 25349 - protein, 157 aa, Salisediminibacterium haloalkalitolerans
  misc_feature (1)..(157): tr|A0A1H9T983|A0A1H9T983_9BACI 6-pyruvoyltetrahydropter in/6-carboxytetrahydropterin synthase OS=Salisediminiba cterium haloalkalitolerans OX=1464123 GN=SAMN05444126_1 0931 PE=4 SV=1
MYGFEIVDKLEKIDEDIQRDELKYHSKRVLISKEFTFDAAHHLHCYEGKCKNLHGHTYTVVFGISGYTEATGLMMDFGDIKEIWKEEIEIHLDHRYLNDTLPKMNTTAENMVVWIYEKMADALKRRDTGQQERVEFVRLFETPTSYAEARREWMELE

SEQ ID NO: 25350 - protein, 120 aa, Salmonella abony
  misc_feature (1)..(120): tr|A0A5I1FPK6|A0A5I1FPK6_SALAB 6-carboxytetrahydropteri n synthase QueD OS=Salmonella abony OX=29482 GN=queD PE =4 SV=1
MSTTLYKDFTFEAAHRLPHVPEGHKCGRLHGHSFMVRLEITGEVDPHTGWIMDFADLKAAFKPTYDRLDHYYLNDIPGLSNPTSEVLAKWIWDQVKPVVPLLSAVMVKETCTAGCVYRGE

SEQ ID NO: 25351 - protein, 120 aa, Salmonella agona; identical to SEQ ID NO: 25350
  misc_feature (1)..(120): tr|B5F432|B5F432_SALA4 6-carboxy-5,6,7,8-tetrahydropter in synthase OS=Salmonella agona (strain SL483) OX=45416 6 GN=queD PE=3 SV=1

SEQ ID NO: 25352 - protein, 120 aa, Salmonella anatum
  misc_feature (1)..(120): tr|A0A3Y5SEL0|A0A3Y5SEL0_SALAN 6-carboxy-5,6,7,8-tetrah ydropterin synthase OS=Salmonella anatum OX=58712 GN=qu eD PE=3 SV=1
MSTTLYKDFTFEAAHRLPHVPEGHKCGRLHGHSFMVRLEITGEVDPHTGWIMDFADLKAAFKPTYDRLDHYYLNDIPGLSNPTSEVLAKWIWDQVKPVVPLLSAVMVKETCTAGCIYRGE

SEQ ID NO: 25353 - protein, 120 aa, Salmonella anatum; identical to SEQ ID NO: 25350
  misc_feature (1)..(120): tr|A0A2T8MKU4|A0A2T8MKU4_SALAN 6-carboxy-5,6,7,8-tetrah ydropterin synthase OS=Salmonella anatum OX=58712 GN=qu eD PE=3 SV=1

SEQ ID NO: 25354 - protein, 120 aa, Salmonella arizonae; identical to SEQ ID NO: 25350
  misc_feature (1)..(120): tr|A9MF15|A9MF15_SALAR 6-carboxy-5,6,7,8-tetrahydropter in synthase OS=Salmonella arizonae (strain ATCC BAA-731 / CDC346-86 / RSK2980) OX=41514 GN=SARI_00013 PE=3 SV= 1

SEQ ID NO: 25355 - protein, 120 aa, Salmonella berta; identical to SEQ ID NO: 25350
  misc_feature (1)..(120): tr|A0A3V6R0Y0|A0A3V6R0Y0_SALBE 6-carboxy-5,6,7,8-tetrah ydropterin synthase OS=Salmonella berta OX=28142 GN=que D PE=3 SV=1

SEQ ID NO: 25356 - protein, 120 aa, Salmonella blockley; identical to SEQ ID NO: 25350
  misc_feature (1)..(120): tr|A0A5H8HAP3|A0A5H8HAP3_SALBL 6-carboxytetrahydropteri n synthase QueD OS=Salmonella blockley OX=57741 GN=queD PE=4 SV=1

SEQ ID NO: 25357 - protein, 120 aa, Salmonella bongori
  misc_feature (1)..(120): tr|A0A248K686|A0A248K686_SALBN 6-carboxy-5,6,7,8-tetrah ydropterin synthase OS=Salmonella bongori serovar 66:z4 1:- str. SA19983605 OX=1243617 GN=queD PE=3 SV=1
MPTTLYKDFTFEAAHRLPHVPEGHKCGRLHGHSFMVRLEITGEVDPHTGWIMDFADLKAAFKPTYDRLDHYYLNDIPGLENPTSEVLAKWIWDQVKPVVPLLSAVQVKETCTAGCVYRGA

SEQ ID NO: 25358 - protein, 120 aa, Salmonella bongori; identical to SEQ ID NO: 25357
  misc_feature (1)..(120): tr|A0A0K0HDZ9|A0A0K0HDZ9_SALBC 6-carboxy-5,6,7,8-tetrah ydropterin synthase OS=Salmonella bongori (strain ATCC 43975 / DSM 13772 / NCTC 12419) OX=218493 GN=SBG_2564 P E=3 SV=1

SEQ ID NO: 25359 - protein, 120 aa, Salmonella choleraesuis; identical to SEQ ID NO: 25350
  misc_feature (1)..(120): tr|Q57KH6|Q57KH6_SALCH 6-carboxy-5,6,7,8-tetrahydropter in synthase OS=Salmonella choleraesuis (strain SC-B67) OX=321314 GN=ptpS PE=3 SV=1

SEQ ID NO: 25360 - protein, 120 aa, Salmonella derby; identical to SEQ ID NO: 25350
  misc_feature (1)..(120): tr|A0A3Y7QZG5|A0A3Y7QZG5_SALDE 6-carboxy-5,6,7,8-tetrah ydropterin synthase OS=Salmonella derby OX=28144 GN=que D PE=3 SV=1

SEQ ID NO: 25361 - protein, 120 aa, Salmonella diarizonae
  misc_feature (1)..(120): tr|A0A2I5HCY1|A0A2I5HCY1_SALDZ 6-carboxy-5,6,7,8-tetrah ydropterin synthase OS=Salmonella diarizonae OX=59204 G N=queD PE=3 SV=1
MSTTLYKDFTFEAAHRLPHVPEGHKCGRLHGHSFTVRLEITGEVDPHTGWIIDFADLKAAFKPTYDRLDHYYLNDIPGLSNPTSEVLAKWIWDQVKPVVPLLSAVMVKETCTAGCVYRGE

SEQ ID NO: 25362 - protein, 120 aa, Salmonella dublin; identical to SEQ ID NO: 25350
  misc_feature (1)..(120): tr|A0A3T3IFN6|A0A3T3IFN6_SALDU 6-carboxy-5,6,7,8-tetrah ydropterin synthase OS=Salmonella dublin OX=98360 GN=qu eD PE=3 SV=1

SEQ ID NO: 25363 - protein, 120 aa, Salmonella enterica; identical to SEQ ID NO: 25350
  misc_feature (1)..(120): tr|A0A0F7JCU9|A0A0F7JCU9_SALER 6-carboxy-5,6,7,8-tetrah ydropterin synthase OS=Salmonella enterica OX=28901 GN= ptpS PE=3 SV=1

SEQ ID NO: 25364 - protein, 120 aa, Salmonella enterica; identical to SEQ ID NO: 25350
  misc_feature (1)..(120): tr|A0A3R0AGM0|A0A3R0AGM0_SALET 6-carboxy-5,6,7,8-tetrah ydropterin synthase OS=Salmonella enterica subsp. enter ica serovar Braenderup str. CFSAN001740 OX=1299119 GN=q ueD PE=3 SV=1

SEQ ID NO: 25365 - protein, 120 aa, Salmonella enteritidis; identical to SEQ ID NO: 25350
  misc_feature (1)..(120): tr|A0A2R4HMM9|A0A2R4HMM9_SALEN 6-carboxy-5,6,7,8-tetrah ydropterin synthase OS=Salmonella enteritidis OX=149539 GN=queD PE=3 SV=1

SEQ ID NO: 25366 - protein, 120 aa, Salmonella enteritidis
  misc_feature (1)..(120): tr|A0A3Z2NSH2|A0A3Z2NSH2_SALEN 6-carboxy-5,6,7,8-tetrah ydropterin synthase OS=Salmonella enteritidis OX=149539 GN=queD PE=3 SV=1
MSTTLYKDFTFEAAHRLPHVPEGHKCGRLHGHSFMVRLEITSEVDPHTGWIMDFADLKAAFKPTYDRLDHYYLNDIPGLSNPTSEVLAKWIWDQVKPVVPLLSAVMVKETCTAGCVYRGE

SEQ ID NO: 25367 - protein, 120 aa, Salmonella gallinarum; identical to SEQ ID NO: 25350
  misc_feature (1)..(120): tr|B5RDS2|B5RDS2_SALG2 6-carboxy-5,6,7,8-tetrahydropter in synthase OS=Salmonella gallinarum (strain 287/91 / N CTC 13346) OX=550538 GN=ptpS PE=3 SV=1

SEQ ID NO: 25368 - protein, 120 aa, Salmonella gallinarum; identical to SEQ ID NO: 25350
  misc_feature (1)..(120): tr|A0A3V9NUM0|A0A3V9NUM0_SALGL 6-carboxy-5,6,7,8-tetrah ydropterin synthase OS=Salmonella gallinarum OX=594 GN= queD PE=3 SV=1

SEQ ID NO: 25369 - protein, 120 aa, Salmonella hadar; identical to SEQ ID NO: 25350
  misc_feature (1)..(120): tr|A0A3V2W3U5|A0A3V2W3U5_SALHA 6-carboxy-5,6,7,8-tetrah ydropterin synthase OS=Salmonella hadar OX=149385 GN=qu eD PE=3 SV=1

SEQ ID NO: 25370 - protein, 121 aa, Salmonella houtenae
  misc_feature (1)..(121): tr|A0A2K0JEK5|A0A2K0JEK5_SALHO 6-carboxy-5,6,7,8-tetrah ydropterin synthase OS=Salmonella houtenae OX=59205 GN= queD PE=3 SV=1
MMSTTLFKDFTFEAAHRLPHVPEGHKCGRLHGHSFMVRLEITGEVDPHTGWIMDFADLKAAFKPTYDRLDHYYLNDIPGLENPTSEVLAKWIWDQVKPVVPLLSAVMVKETCTAGCVYRGQ

SEQ ID NO: 25371 - protein, 120 aa, Salmonella infantis; identical to SEQ ID NO: 25350
  misc_feature (1)..(120): tr|A0A3V0IAH4|A0A3V0IAH4_SALIN 6-carboxy-5,6,7,8-tetrah ydropterin synthase OS=Salmonella infantis OX=595 GN=qu eD PE=3 SV=1

SEQ ID NO: 25372 - protein, 120 aa, Salmonella montevideo; identical to SEQ ID NO: 25350
  misc_feature (1)..(120): tr|A0A3U8JHT7|A0A3U8JHT7_SALMO 6-carboxy-5,6,7,8-tetrah ydropterin synthase OS=Salmonella montevideo OX=115981 GN=queD PE=3 SV=1

SEQ ID NO: 25373 - protein, 120 aa, Salmonella montevideo; identical to SEQ ID NO: 25352
  misc_feature (1)..(120): tr|A0A3V6QII7|A0A3V6QII7_SALMO 6-carboxy-5,6,7,8-tetrah ydropterin synthase OS=Salmonella montevideo OX=115981 GN=queD PE=3 SV=1

SEQ ID NO: 25374 - protein, 120 aa, Salmonella moscow
  misc_feature (1)..(120): tr|A0A5H7LJN6|A0A5H7LJN6_SALMC 6-carboxytetrahydropteri n synthase QueD OS=Salmonella moscow OX=28146 GN=queD P E=4 SV=1
MSTTLYKDFTFEAAHRLPHVPEGHKCGRLHGHSFMVRLEITGEVDPHTGWIMDFADLKAAFKPTYDRLDRYYLNDIPGLSNPTSEVLAKWIWDQVKPVVPLLSAVMVKETCTAGCVYRGE

SEQ ID NO: 25375 - protein, 120 aa, Salmonella muenchen; identical to SEQ ID NO: 25350
  misc_feature (1)..(120): tr|A0A3T3ESX9|A0A3T3ESX9_SALMU 6-carboxy-5,6,7,8-tetrah ydropterin synthase OS=Salmonella muenchen OX=596 GN=qu eD PE=3 SV=1

SEQ ID NO: 25376 - protein, 120 aa, Salmonella muenster; identical to SEQ ID NO: 25350
  misc_feature (1)..(120): tr|A0A5J1AUH9|A0A5J1AUH9_SALMS 6-carboxytetrahydropteri n synthase QueD OS=Salmonella muenster OX=82689 GN=queD PE=4 SV=1

SEQ ID NO: 25377 - protein, 120 aa, Salmonella muenster; identical to SEQ ID NO: 25352
  misc_feature (1)..(120): tr|A0A5J1R3N1|A0A5J1R3N1_SALMS 6-carboxytetrahydropteri n synthase QueD OS=Salmonella muenster OX=82689 GN=queD PE=4 SV=1

SEQ ID NO: 25378 - protein, 120 aa, Salmonella newport; identical to SEQ ID NO: 25350
  misc_feature (1)..(120): tr|A0A0H3BW42|A0A0H3BW42_SALNS 6-carboxy-5,6,7,8-tetrah ydropterin synthase OS=Salmonella newport (strain SL254 ) OX=423368 GN=SNSL254_A3160 PE=3 SV=1

SEQ ID NO: 25379 - protein, 120 aa, Salmonella newport; identical to SEQ ID NO: 25350
  misc_feature (1)..(120): tr|A0A0R9MH25|A0A0R9MH25_SALNE 6-carboxy-5,6,7,8-tetrah ydropterin synthase OS=Salmonella newport OX=108619 GN= queD PE=3 SV=1

SEQ ID NO: 25380 - protein, 105 aa, Salmonella oranienberg
  misc_feature (1)..(105): tr|A0A5J0J6Z2|A0A5J0J6Z2_SALON 6-carboxytetrahydropteri n synthase QueD (Fragment) OS=Salmonella oranienberg OX =28147 GN=queD PE=4 SV=1
MKTTLYKDFTFEAAHRLPNVPDGHKCGRLHGHSFVVRLEITGEMDKHAGWIIDFAELKAIFKPTLDRLDHYYLNDIPGLENPTSEVLAQWIWNQVKPQLPILSAV

SEQ ID NO: 25381 - protein, 120 aa, Salmonella oranienberg
  misc_feature (1)..(120): tr|A0A5I0ZZ13|A0A5I0ZZ13_SALON 6-carboxytetrahydropteri n synthase QueD OS=Salmonella oranienberg OX=28147 GN=q ueD PE=4 SV=1
MKTTLYKDFTFEAAHRLPNVPDGHKCGRLHGHSFVVRLEITGEMDKHAGWIIDFAELKAIFKPTLDRLDHYYLNDIPGLENPTSEVLAQWIWNQVKPQLPILSAVIVKETCSAGCIYRGE

SEQ ID NO: 25382 - protein, 120 aa, Salmonella paratyphi; identical to SEQ ID NO: 25350
  misc_feature (1)..(120): tr|C0PXC7|C0PXC7_SALPC 6-carboxy-5,6,7,8-tetrahydropter in synthase OS=Salmonella paratyphi C (strain RKS4594) OX=476213 GN=ptpS PE=3 SV=1

SEQ ID NO: 25383 - protein, 120 aa, Salmonella paratyphi; identical to SEQ ID NO: 25350
  misc_feature (1)..(120): tr|A0A5J2RQX6|A0A5J2RQX6_SALPT 6-carboxytetrahydropteri n synthase QueD OS=Salmonella paratyphi A OX=54388 GN=q ueD PE=4 SV=1

SEQ ID NO: 25384 - protein, 120 aa, Salmonella potsdam; identical to SEQ ID NO: 25350
  misc_feature (1)..(120): tr|A0A5I6RXT9|A0A5I6RXT9_SALPO 6-carboxytetrahydropteri n synthase QueD OS=Salmonella potsdam OX=597 GN=queD PE =4 SV=1

SEQ ID NO: 25385 - protein, 109 aa, Salmonella rubislaw
  misc_feature (1)..(109): tr|A0A5J2B3Y4|A0A5J2B3Y4_SALRU 6-carboxytetrahydropteri n synthase QueD (Fragment) OS=Salmonella rubislaw OX=59 8 GN=queD PE=4 SV=1
EAAHRLPHVPEGHKCGRLHGHSFMVRLEITGEVDPHTGWIMDFADLKAAFKPTYDRLDHYYLNDIPGLSNPTSEVLAKWIWDQVKPVVPLLSAVMVKETCTAGCVYRGE

SEQ ID NO: 25386 - protein, 120 aa, Salmonella rubislaw; identical to SEQ ID NO: 25350
  misc_feature (1)..(120): tr|A0A3V7ILN3|A0A3V7ILN3_SALRU 6-carboxy-5,6,7,8-tetrah ydropterin synthase OS=Salmonella rubislaw OX=598 GN=qu eD PE=3 SV=1

SEQ ID NO: 25387 - protein, 120 aa, Salmonella schwarzengrund; identical to SEQ ID NO: 25350
  misc_feature (1)..(120): tr|A0A0N1R155|A0A0N1R155_SALSV 6-carboxy-5,6,7,8-tetrah ydropterin synthase OS=Salmonella schwarzengrund (strai n CVM19633) OX=439843 GN=queD PE=3 SV=1

SEQ ID NO: 25388 - protein, 120 aa, Salmonella senftenberg; identical to SEQ ID NO: 25350
  misc_feature (1)..(120): tr|A0A401AT47|A0A401AT47_SALSE 6-carboxy-5,6,7,8-tetrah ydropterin synthase OS=Salmonella senftenberg OX=28150 GN=queD PE=3 SV=1

SEQ ID NO: 25389 - protein, 120 aa, Salmonella sp.; identical to SEQ ID NO: 25350
  misc_feature (1)..(120): tr|A0A509BI17|A0A509BI17_9ENTR 6-carboxy-5,6,7,8-tetrah ydropterin synthase OS=Salmonella sp. NCTC 6947 OX=2583 581 GN=queD PE=3 SV=1

SEQ ID NO: 25390 - protein, 120 aa, Salmonella sp.; identical to SEQ ID NO: 25350
  misc_feature (1)..(120): tr|A0A509B083|A0A509B083_9ENTR 6-carboxy-5,6,7,8-tetrah ydropterin synthase OS=Salmonella sp. NCTC 3046 OX=2583 580 GN=queD PE=3 SV=1

SEQ ID NO: 25391 - protein, 120 aa, Salmonella thompson; identical to SEQ ID NO: 25350
  misc_feature (1)..(120): tr|A0A403SMJ0|A0A403SMJ0_SALTH 6-carboxy-5,6,7,8-tetrah ydropterin synthase OS=Salmonella thompson OX=600 GN=qu eD PE=3 SV=1

SEQ ID NO: 25392 - protein, 120 aa, Salmonella typhi; identical to SEQ ID NO: 25350
  misc_feature (1)..(120): tr|Q8XGC8|Q8XGC8_SALTI 6-carboxy-5,6,7,8-tetrahydropter in synthase OS=Salmonella typhi OX=90370 GN=queD PE=3 S V=1

SEQ ID NO: 25393 - protein, 120 aa, Salmonella typhimurium; identical to SEQ ID NO: 25350
  misc_feature (1)..(120): tr|Q7CPW5|Q7CPW5_SALTY 6-carboxy-5,6,7,8-tetrahydropter in synthase OS=Salmonella typhimurium (strain LT2 / SGS C1412 / ATCC 700720) OX=99287 GN=ptpS PE=3 SV=1

SEQ ID NO: 25394 - protein, 120 aa, Salmonella typhimurium; identical to SEQ ID NO: 25350
  misc_feature (1)..(120): tr|A0A3Z6NZS3|A0A3Z6NZS3_SALTU 6-carboxy-5,6,7,8-tetrah ydropterin synthase OS=Salmonella typhimurium (strain A TCC 68169 / UK-1) OX=990282 GN=queD PE=3 SV=1

SEQ ID NO: 25395 - protein, 120 aa, Salmonella virchow; identical to SEQ ID NO: 25350
  misc_feature (1)..(120): tr|A0A3V4BHM9|A0A3V4BHM9_SALVI 6-carboxy-5,6,7,8-tetrah ydropterin synthase OS=Salmonella virchow OX=48409 GN=q ueD PE=3 SV=1

SEQ ID NO: 25396 - protein, 145 aa, Salsuginibacillus halophilus
  misc_feature (1)..(145): tr|A0A2P8HLC0|A0A2P8HLC0_9BACI 6-carboxy-5,6,7,8-tetrah ydropterin synthase OS=Salsuginibacillus halophilus OX= 517424 GN=B0H94_105170 PE=3 SV=1
MLQQFYPQVFHDYRYELNKDMNLAAAHFIPDAEAGVCQQMHGHTYFINVTIVGDELDRTGFLVNFKTLKEEIHKRYDHSLLNDHEAFAGDQPDTIPTTEVVAAQIWQQVDALLAERPNRPYCLQVLVRETPTSYVTYRPKKEDHR

SEQ ID NO: 25397 - protein, 120 aa, Samsonia erythrinae
  misc_feature (1)..(120): tr|A0A4R3VGR2|A0A4R3VGR2_9GAMM 6-carboxy-5,6,7,8-tetrah ydropterin synthase OS=Samsonia erythrinae OX=160434 GN =EDC54_11056 PE=3 SV=1
MVTTIFKDFQFEAAHHLPHVPEGHKCGRLHGHSFMVRLEITGELDPHTGWVMDFADLKAAFKPTWERLDHHYLNEIPGLENPTSEVLAQWIWHQLKPTLPQLSAVTVKETCTAGCVYKGE

SEQ ID NO: 25398 - protein, 211 aa, Sandaracinaceae bacterium
  misc_feature (1)..(211): tr|A0A520QIH6|A0A520QIH6_9DELT Uncharacterized protein OS=Sandaracinaceae bacterium OX=2510337 GN=EVA89_21180 PE=4 SV=1
MGSGSTPSNRRHGHRHGSSLLPVRDARARYGPAMYRITKGIHAHFAHHVRGHRGACISLHGHTWKLEVTVAAETLDDESFVVDFSVMKREVLQPAHLLLDHSLAIGEATWAETKDSLATLGNILVDSRQHTMGSRGELQPHLQGELAGARNELPGDIKIAVFPFAPTSETLARWLYELAEERLADDRVSIVNARIYEALHPVETWAEYAPR

SEQ ID NO: 25399 - protein, 118 aa, Sandaracinus amylolyticus
  misc_feature (1)..(118): tr|A0A0F6W4S9|A0A0F6W4S9_9DELT 6-carboxy-5,6,7,8-tetrah ydropterin synthase OS=Sandaracinus amylolyticus OX=927 083 GN=DB32_004636 PE=3 SV=1
MEIWKEFSFEAAHRLPNVPPEHKCARLHGHSYRVRLTVRGELDPQLGWVVDFDTIREAFEPVRAQLDHYYLNEIEGLSNPTSELLARWIWARTKPRLPQLARVEVMETCTSGARYEGA

SEQ ID NO: 25400 - protein, 157 aa, Sandaracinus sp.
  misc_feature (1)..(157): tr|A0A2E0TGM2|A0A2E0TGM2_9DELT 6-pyruvoyl tetrahydropte rin synthase OS=Sandaracinus sp. OX=2024858 GN=CMN29_13 980 PE=4 SV=1
MAHRLASGASAKCATPHGHNEQVSVELEPKAPATLDGAKNMVAEFAAAKRRWHRWIDERVDHALQLGAEDPFLAVVRERFPEWNVMVTPGDPTTELLAVLFMAKCQAFLDAEGLPLRCRRVTLQETPTNAVVFEGDPREALPTGLDGWWWRADESIA

SEQ ID NO: 25401 - protein, 168 aa, Sandaracinus sp.
  misc_feature (1)..(168): tr|A0A2D9T1F7|A0A2D9T1F7_9DELT 6-pyruvoyl tetrahydropte rin synthase OS=Sandaracinus sp. OX=2024858 GN=CMN30_07 045 PE=4 SV=1
MSVALRFRRRFSMAHRLASGSSLKCATPHGHDEYVVVELEPQDHGRLDGEANMVVEFARAKGRWHRFVDERLDHGFQLGERDPLLALAREHFPDWRLVVTPGDPTTELMAACLAAKCQAILDDEGVVLRVRRLTLEETPTNAVVVEGDFRALLPRADGWWSRPDESTE

SEQ ID NO: 25402 - protein, 178 aa, Sanguibacteroides justesenii
  misc_feature (1)..(178): tr|A0A0C3R6E5|A0A0C3R6E5_9PORP 6-carboxy-5,6,7,8-tetrah ydropterin synthase OS=Sanguibacteroides justesenii OX= 1547597 GN=BA92_03380 PE=4 SV=1
MLIRKLFKFEGAHIVRNCSSQRCRENIHGHSYIVEVFIASDKLDKGYMVMDFVLLDKVKELIDSFDHSYSLWQKEEEDLKQFVYRYNRRVAEIPVSPSAEGYALLFLFLIDKILQRTEHKNGEGNVRLNSVRVHETATGYAEAFREDLSLVDFSLKDIRFSEAIQEEWKDNVWWKTLK

SEQ ID NO: 25403 - protein, 152 aa, Sapientia aquatica
  misc_feature (1)..(152): tr|A0A4R5W7U7|A0A4R5W7U7_9BURK 6-carboxytetrahydropteri n synthase QueD OS=Sapientia aquatica OX=1549640 GN=que D PE=4 SV=1
MLTITRKMEFDSGHRIPDHNSQCRNLHGHRYTLLITLVGEVVKQDGVSDNGMIMDFSDIKALANEHLVNVWDHAFIVYEKDAVVKDFLKSLPGHKTVVIDRVPTVENLAQIAFDILKGVYHNRYGRSLALQKVTLYETPNCWAEINDASIHD

SEQ ID NO: 25404 - protein, 138 aa, Saprospira grandis
  misc_feature (1)..(138): tr|H6L298|H6L298_SAPGL 6-carboxy-5,6,7,8-tetrahydropter in synthase OS=Saprospira grandis (strain Lewin) OX=984 262 GN=ptpS PE=3 SV=1
MRQMSVYRRAHFNAAHRLHNPAWTSEQNEEVFGLCNNEYYHGHNYELEVKVTGPVDPETGYVIDLKILNDIIKHKIEAKFDHKNLNLQVEEFKTLNPTAENICWLIWKILKEHLDPKFKIGVRLYETPRNYVEYEEQA

SEQ ID NO: 25405 - protein, 138 aa, Saprospira grandis; identical to SEQ ID NO: 25404
  misc_feature (1)..(138): tr|J0P6Y6|J0P6Y6_9BACT 6-carboxy-5,6,7,8-tetrahydropter in synthase OS=Saprospira grandis DSM 2844 OX=694433 GN =SapgrDRAFT_1551 PE=3 SV=1

SEQ ID NO: 25406 - protein, 153 aa, Saprospiraceae bacterium
  misc_feature (1)..(153): tr|A0A521UQ30|A0A521UQ30_9BACT 6-carboxytetrahydropteri n synthase OS=Saprospiraceae bacterium OX=2202734 GN=EP O28_16735 PE=4 SV=1
MKSPTKIRLTKSFSFEMAHALPGYDGACKNIHGHSYRLKVTIAGSPMRQSGHPKDGMVMDFKVLKNIVKVQIEDVFDHALVLPESSSGELVSMLQERFENVVLTPFQPTCENLLLHFIGKIRPELSPEVELKVVRLYETAASYAEWNAEDNEQ

SEQ ID NO: 25407 - protein, 136 aa, Saprospiraceae bacterium
  misc_feature (1)..(136): tr|A0A521UJL7|A0A521UJL7_9BACT 6-carboxytetrahydropteri n synthase OS=Saprospiraceae bacterium OX=2202734 GN=EP O28_17940 PE=4 SV=1
MVYLTRRERFNAAHKLWVESWSEEENLATFGKCANRNWHGHNYELFVTVKGIPNPVTGFVMDVKLLSRIINRTIIDKVDHSNLNLDVDFIPKNVQPTTEMLAMFFWQQLEPHIEDCVLHCIRLCETENIFAEYFGE

SEQ ID NO: 25408 - protein, 158 aa, Saprospirales bacterium
  misc_feature (1)..(158): tr|A0A1Z9N6Z9|A0A1Z9N6Z9_9BACT Uncharacterized protein OS=Saprospirales bacterium TMED214 OX=1986670 GN=CBD74_ 14330 PE=4 SV=1
MAYYSTKTYNHSIGLSAVFRQPHADHSHCKYLHGYSLAFKFTFGASTLDNKNWAVDFGGLKPLKKWLEDTFDHKTLIDSNDPHLQDFKDLEDKGLCQLTILDGVGAEKFAEHAWRFADTLVREATDNRCWCESAECSEHGSNSAIYTPFQVQKLKFDE

SEQ ID NO: 25409 - protein, 145 aa, Saprospirales bacterium
  misc_feature (1)..(145): tr|A0A2E0VRS8|A0A2E0VRS8_9BACT 6-carboxy-5,6,7,8-tetrah ydropterin synthase OS=Saprospirales bacterium OX=20267 90 GN=CMN32_06775 PE=3 SV=1
MKIRLTKIFTFDMAHGLPGYDGACRNIHGHTYQLEVTVIGEPLNQPGHPKNGMVMDFKVLKAIVKEKILEVFDHALVLPEASSEALLSALRNDGQKLVTVPFQPTCENLLIYMVEAIRPELPAGVELHSVKLYETPTSYAEWERN

SEQ ID NO: 25410 - protein, 118 aa, Unknown
  misc_feature (1)..(118): tr|A0A2E0K0R2|A0A2E0K0R2_9PROT 6-carboxy-5,6,7,8-tetrah ydropterin synthase OS=SAR116 cluster bacterium OX=2024 888 GN=queD PE=3 SV=1
MELYTDFRFEAAHRLPMVPAGHPCERLHGHSYFVRLTIDGEVNPDTGWVMDFDDINTAFAPILAKLDHYYLNEVEGLENPTSENLARWIWTRLKPALPSLVAVEIRETCTVGCIYRGE

SEQ ID NO: 25411 - protein, 139 aa, Unknown
  misc_feature (1)..(139): tr|A0A2A4SD88|A0A2A4SD88_9CHLR 6-pyruvoyl tetrahydrobio pterin synthase OS=SAR202 cluster bacterium OX=2030829 GN=COB68_05045 PE=4 SV=1
  misc_feature (130)..(130): Xaa can be any naturally occurring amino acid
MYLVRIETTFDSGHRLLDYDGKCAFPHGHTYRAEVFLQSDTLDSQGLVFDFTELKHRVKAWIDDNWDHSFLVNSRDIELIEGLTPASKGRIYQFHEENPSCEVLSRELYNKVVELCGVSPVKVRLWESLXQYAEFSGGQ

SEQ ID NO: 25412 - protein, 139 aa, Unknown
  misc_feature (1)..(139): tr|A0A2N0LIE5|A0A2N0LIE5_9CHLR Uncharacterized protein OS=SAR202 cluster bacterium Io17-Chloro-G5 OX=1926614 G N=BZY77_02950 PE=4 SV=1
MYQIRIEFTFDSGHRLLDYNGKCAYPHGHTYRAEVFLESHSLDRLGLVYDFTDLKDRIKTWVDENWDHAFLLNSMDSELIDGLGSASLVRLYKFQEENPSCEVMSRALYEKTAELCGIAPAKVRLWESVNQFAEYHGEG

SEQ ID NO: 25413 - protein, 152 aa, Unknown
  misc_feature (1)..(152): tr|A0A2D6YM02|A0A2D6YM02_9DELT 6-pyruvoyl tetrahydropte rin synthase OS=SAR324 cluster bacterium OX=2024889 GN= CMN54_12255 PE=4 SV=1
  misc_feature (148)..(148): Xaa can be any naturally occurring amino acid
  misc_feature (150)..(150): Xaa can be any naturally occurring amino acid
MGQYIYTCTKQYFNLPCAHRQHAHQGHCSHIHGYSRSFKFYFACKELDTNHFVFDFGELKELKEHLEYMCDHTLLINKQDPYLETFEDMHEKGLCKLRVVENCGAEGMARYFLEFADELARRKSDSRAWCYKVIQWENDKNSGIAEYXPXQR

SEQ ID NO: 25414 - protein, 155 aa, Unknown
  misc_feature (1)..(155): tr|A0A2A4TCA7|A0A2A4TCA7_9DELT Uncharacterized protein OS=SAR324 cluster bacterium OX=2024889 GN=COB67_01260 P E=4 SV=1
MIIRKSFRAEAAHRLKYSYTKRCHGLHGHSYVFDIYLQGQTQDKAQMLMDFSLLSDKFRGFLDSFDHSILVWKEDKDLMELAPKLNPRYIFLPYNTTAEQLSRHIYYQGKKIGLPIHKVRVSETVTACAEYMGDDSITIDLDDVTFSQAVMDSWK

SEQ ID NO: 25415 - protein, 118 aa, Unknown
  misc_feature (1)..(118): tr|A0A0R2P861|A0A0R2P861_9GAMM 6-carboxy-5,6,7,8-tetrah ydropterin synthase OS=SAR86 cluster bacterium BACL1 MA G-120507-bin14 OX=1655567 GN=ABR59_06925 PE=3 SV=1
MKVIIYKDFTFEAAHKLPLVPETHKCSKLHGHSFKVRISVEDELNDLGWVIDYADIKSACEPVIEVLDHSYLNEVPGLDNPTSENIAVWLWNEIQPKLAILSEIEVKETCNTGCIYRG

SEQ ID NO: 25416 - protein, 128 aa, Unknown
  misc_feature (1)..(128): tr|A0A2A5CIY2|A0A2A5CIY2_9GAMM 6-pyruvoyl tetrahydropte rin synthase OS=SAR86 cluster bacterium OX=2030880 GN=C OA71_02245 PE=4 SV=1
MYSIAVMKDFIAQHFLIGGDWGEENHPHSHHYVIELIIEHDELDQHGYLVDIVDIEAALEQTAAYFKDKMLNELPEFEGLNPSLEHFSRIIWQQIINQINPPGNGKLEIKLWENENCWAAYKKDYLSS

SEQ ID NO: 25417 - protein, 118 aa, Unknown
  misc_feature (1)..(118): tr|A0A0R2W2R8|A0A0R2W2R8_9GAMM 6-carboxy-5,6,7,8-tetrah ydropterin synthase OS=SAR92 bacterium BACL16 MAG-12061 9-bin48 OX=1655625 GN=ABS23_08770 PE=3 SV=1
MQIYKEFSIEAAHRLPNVPEGHKCARLHGHSFMVSIHVEGAVGDDSGWVMDFGDIKTAFAPIYAQLDHHYLNDIDGLENPTSENLALWIWRKLKPDLPLLSAITIKETCTSGCVYRGD

SEQ ID NO: 25418 - protein, 119 aa, Unknown
  misc_feature (1)..(119): tr|A0A520MF94|A0A520MF94_9GAMM 6-carboxy-5,6,7,8-tetrah ydropterin synthase OS=SAR92 clade bacterium OX=2315479 GN=queD PE=3 SV=1
MQIYKEFSIEAAHRLPNVPEGHKCARLHGHSFQVTIYVEGPVGAETGWIMDFGDIKAAFAPVFDRLDHHYLNDIEGLENPTSENLAAWIWAQLKPNLPLLSCIQIKETCTSGCIYRGES

SEQ ID NO: 25419 - protein, 123 aa, Schlegelella thermodepolymerans
  misc_feature (1)..(123): tr|A0A2S5T505|A0A2S5T505_9BURK 6-carboxy-5,6,7,8-tetrah ydropterin synthase OS=Schlegelella thermodepolymerans OX=215580 GN=C1702_08880 PE=3 SV=1
MQYELTQRFYFEAAHTLERTVDAEPSRRIHGHTYHCEVALRGAPDERGMVMDLGHLRRALEPLRDALDHRLLDEVPGLERPTLEGLCAYVAQRLAPRLPQLAWVRVWREASGDGCTLTLAPRG

SEQ ID NO: 25420 - protein, 149 aa, Schleiferia sp.
  misc_feature (1)..(149): tr|A0A401XK35|A0A401XK35_9FLAO 6-carboxy-5,6,7,8-tetrah ydropterin synthase OS=Schleiferia sp. LA OX=2173829 GN =JCM31826_08610 PE=3 SV=1
MNSSFVLHRRFYFEAAHFLPDYLGDCRNIHGHSYVLEIGVSGKIQISGSERGMIIDLKRLKALVQTSVLDVLDHALIVEKAEFSNGNSIPADMKLVVLRETPTVENLLKWIITRLTEDLPEGIRLEFSKLHETRDSWVEWRAGSAVFSR

SEQ ID NO: 25421 - protein, 139 aa, Schleiferia sp.
  misc_feature (1)..(139): tr|A0A401XNL2|A0A401XNL2_9FLAO 6-carboxy-5,6,7,8-tetrah ydropterin synthase OS=Schleiferia sp. LA OX=2173829 GN =ygcM PE=4 SV=1
MKLVTVSRHAHFNAAHRLHNPSWNAEQNEKVFGLCNNEYFHGHNYELIVSVTGPVDPDTGYVMDMKELSDLIKKHVEARLDHKNLNLQVEEFKHLIPSAENIAIVIYDWLRPHISPSLKLKITLYETPRNYVEYSGEEA

SEQ ID NO: 25422 - protein, 137 aa, Schleiferia thermophila
  misc_feature (1)..(137): tr|A0A369AAI6|A0A369AAI6_9FLAO 6-carboxy-5,6,7,8-tetrah ydropterin synthase OS=Schleiferia thermophila OX=88410 7 GN=DES35_101377 PE=3 SV=1
MIYIQRKERFSAAHQLYNPSWSEEKNDEVFGKCANRNFHGHNFTLTVTVKGGINPDTGFVMNLTELKHIIREHVTDKLDHKNLNLDVDFLRGKMCSTEVIAMEIWKILEPLIAERGAKLHCVRLDETENNAVEYYGE

SEQ ID NO: 25423 - protein, 137 aa, Schleiferia thermophila
  misc_feature (1)..(137): tr|A0A085L014|A0A085L014_9FLAO 6-carboxy-5,6,7,8-tetrah ydropterin synthase OS=Schleiferia thermophila str. Yel lowstone OX=1453500 GN=AT05_10610 PE=3 SV=1
MVYIQRKERFSAAHQLYNPSWSEEKNDEVFGKCANRNFHGHNFTLTVTVKGEINPDTGFVMNLTELKHIIREHVTDKLDHKNLNLDVDFLRGKMCSTEVIAMEIWKILEPLIAERGAKLHCVRLDETENNAVEYYGE

SEQ ID NO: 25424 - protein, 125 aa, Schwartzia succinivorans
  misc_feature (1)..(125): tr|A0A1M4WCB3|A0A1M4WCB3_9FIRM 6-carboxy-5,6,7,8-tetrah ydropterin synthase OS=Schwartzia succinivorans DSM 105 02 OX=1123243 GN=SAMN02745190_01180 PE=3 SV=1
MYELEVFDTFDAAHRVVGYPGKCDRLHGHTWKVAVHVAGTELDSIGMLVDFKKLKEILKGITEEFDHTFLNEHEAFKGKNPTAENIARYIYQVYAEKLRAENPSVRLSDIRVWESPGSSVTYRED

SEQ ID NO: 25425 - protein, 158 aa, Scopulibacillus darangshiensis
  misc_feature (1)..(158): tr|A0A4R2P6J1|A0A4R2P6J1_9BACL PreQ(0) biosynthesis pro tein QueD OS=Scopulibacillus darangshiensis OX=442528 G N=EV207_108142 PE=4 SV=1
MFQIPKDVQKLDIDIKRDQLKYHQKRVAVTKHFTFDAAHHLHCYEGKCKSLHGHTYKLAVTISGFVNEIGIAVDFSDIKALFKKVIEEKLDHRYLNEVLPPMNTTAENMIVWMWESLDERMADIGLKSQGNRLEELTLFETPTSSATLKREWMMIDED

SEQ ID NO: 25426 - protein, 289 aa, Scytonema hofmannii
  misc_feature (1)..(289): tr|A0A139WX04|A0A139WX04_9CYAN 6-pyruvoyl tetrahydropte rin synthase OS=Scytonema hofmannii PCC 7110 OX=128403 GN=WA1_45845 PE=4 SV=1
MKCIVNRRAQFSASHRYWLPELSDAENLEKFGACSKFPGHGHNYVLFVSLAGELDKYGMVLNLSDVKHVIKREVTSQLDFSYLNDVWSEFQQTLPTTENIARVIWHKLAPYLPVVRVQLFEHPELWADYLGNAMEAYLTLSTHFSAAHRLAHPDISNEANFEIYGKCARPNGHGHNYHLEVTVVGEINPRTGMIADLVALNQAIEDYVVEPFDHTFLNKDIPYFAEVVPTAENIALHISHLLRSPIQELGAKLYKVKLIESPNNSCEIYCTEYELSTNIVHNESVLVRV

SEQ ID NO: 25427 - protein, 132 aa, Scytonema hofmannii
  misc_feature (1)..(132): tr|A0A139X7F1|A0A139X7F1_9CYAN 6-carboxy-5,6,7,8-tetrah ydropterin synthase OS=Scytonema hofmannii PCC 7110 OX= 128403 GN=WA1_25925 PE=3 SV=1
MPKWKLVTEFTFDSAHYIRDYNGPCGRLHGHTYKVKIEATSSKLHSSQYCPHEVMVADFRTLRWAKQDVKKGGLDHGVLNEVMPPEYETTAEMIAKYIYDETKKRVPPGVQLKVAVSETPNSWAEYEDECEN

SEQ ID NO: 25428 - protein, 288 aa, Scytonema millei
  misc_feature (1)..(288): tr|A0A4R4IYB7|A0A4R4IYB7_9CYAN 6-pyruvoyl tetrahydropte rin synthase OS=Scytonema millei VB511283 OX=1245923 GN =DYY89_01665 PE=4 SV=1
MQCIVNRRAQFSASHRYWLPELSETENQQQFGLCSRFPGHGHNYVLFVSLLGELDEYGMVLNLSDVKHVIKREVTSQLDFSYLNDVWQEFQQTLPTTENIARVIWQKLASHLPIVKIQLFEHPQLWAEYQGNGMEAYLTISTHFSAAHRLAHPDLNQQENTEIYGKCARPNGHGHNYHLEVTVKGEIHPRTGMIVDLSALNQAIEDLVIEPLDHTFLNKDIAYFAKVVPTAENIAVYISNVLQQPVRELGAELHKVKLIESPNNSCEVYCTSDDSIKSATREPALAEV

SEQ ID NO: 25429 - protein, 290 aa, Scytonema sp.
  misc_feature (1)..(290): tr|A0A1Z4J2D3|A0A1Z4J2D3_9CYAN Putative 6-pyruvoyl tetr ahydropterin synthase OS=Scytonema sp. HK-05 OX=1137095 GN=SAMD00079811_60860 PE=4 SV=1
MQCIVNRRAQFSASHRYWLPELSEAENIEKFDACSKFPGHGHNYVLFVSLIGELDEYGMVLNLSDVKHVIKREVTSQLDFSYLNDVWSEFQQTLPTTESIARVIWQRLAPHLPLVRIQLFEHPQLWADYLGNGMEAYLTVSTHFSAAHRLAHPRLSSEENFEIYGKCARPNGHGHNYHLEVTVKGEIDPRTGMIVDLGALNKVIEDYVVEPFDHTFLNKDIPHFAEVVPTAENIALHISHLLRSPIQELGAKLYKVKLIESPNNSCEIYCTESDPNSVNAAQNEPVLVRV

SEQ ID NO: 25430 - protein, 290 aa, Scytonema sp.
  misc_feature (1)..(290): tr|A0A1Z4PWZ3|A0A1Z4PWZ3_9CYAN 6-pyruvoyl-tetrahydropte rin synthase homolog OS=Scytonema sp. NIES-4073 OX=2005 464 GN=NIES4073_33710 PE=4 SV=1
MQCIVNRRAQFSASHRYWLPELSEAENIEKFDACSRFPGHGHNYVLFVSLIGELDEYGMVLNLSDVKHVIKREVTSQLDFSYLNDVWSEFQQTLPTTESIARVIWQRLAPHLPLVRIQLFEHPQLWADYLGNGMEAYLTVSTHFSAAHRLAHPRLSSEENFEIYGKCARPNGHGHNYHLEVTVKGEIDPRTGMIIDLGALNKAIEDYVVEPFDHTFLNKDIPYFAEVVPTAENIALHISHLLRSPIQELGAKLYKVKLIESPNNSCEIYCTESDPNSVNAAQNEPVLVRV

SEQ ID NO: 25431 - protein, 290 aa, Scytonema tolypothrichoides
  misc_feature (1)..(290): tr|A0A0C2QYI8|A0A0C2QYI8_9CYAN 6-pyruvoyl tetrahydropte rin synthase OS=Scytonema tolypothrichoides VB-61278 OX =1233231 GN=SD80_01240 PE=4 SV=1
MQCIISRRTQFSATHRYWLPELSEAENIEKFGACSRFPGYGHNYVLFVSLVGELDEYGMILNLSNVKHVINRKVISQLDFSYLNDVWSEFQQTLPTTENIARVIWQRLAPDLPLARVQLFEHPELWADYLGNGMEAYLTVSTYFSAAHQLAHPRLSSEENFKIYGKCANPNGHGHNYHLEVTVKGEIDPRTGMIVDLGALNQAIKEYVIELFDHSFLNKDVPYFAEVVPTAENIALCISQLLTSPIQELGATLYKVKLMETPNNSCEIYCTESDFNSVNAAQNKPVLVRV

SEQ ID NO: 25432 - protein, 120 aa, Unknown
  misc_feature (1)..(120): tr|J3TWY3|J3TWY3_9ENTR 6-carboxy-5,6,7,8-tetrahydropter in synthase OS=secondary endosymbiont of Ctenarytaina e ucalypti OX=1199245 GN=A359_01520 PE=3 SV=1
MIATLYKDFIFESAHRLPHAPPGHKCSQLHGHSFLIRLEVTGEVDPNTGWIMDFADLKAAFNPVLNQLDHHYLNDIPGLKNPTSEVLAQWVWGQLKPNLPILSAVTIKETCTAGCIYRGQ

SEQ ID NO: 25433 - protein, 120 aa, Unknown
  misc_feature (1)..(120): tr|J3VUA9|J3VUA9_9ENTR 6-carboxy-5,6,7,8-tetrahydropter in synthase OS=secondary endosymbiont of Heteropsylla c ubana OX=134287 GN=A35E_00417 PE=3 SV=1
MVTTLYKDFTFESAHHLPYVPLGHKCARLHGHSFRVRLEVTGPIDPHKGWIIDFSDLKIAFQPILNRLDHYYLNDIPGLENPTSEVLARWIWEQLKPQFSLLKSVSLKETCTSGCIYQGS

SEQ ID NO: 25434 - protein, 143 aa, Sedimentibacter sp.
  misc_feature (1)..(143): tr|A0A252CIY5|A0A252CIY5_9FIRM 6-carboxy-5,6,7,8-tetrah ydropterin synthase OS=Sedimentibacter sp. SX930 OX=195 5060 GN=B0533_10765 PE=3 SV=1
MYILKTEHSFDSAHFLAGYAGKCANIHGHRWRVEIEVQAEELVSSGQLDGMVVDFGDLKKDLKAAVDHLDHALIIEQGTMREQTLQCIKEDGFAVIEFPFRPTAENFAAHFYRTMADLGYDVKRATVYETPTNSAAYEESGVS

SEQ ID NO: 25435 - protein, 283 aa, Sedimenticola selenatireducens
  misc_feature (1)..(283): tr|A0A557SLS7|A0A557SLS7_9GAMM Uncharacterized protein OS=Sedimenticola selenatireducens OX=191960 GN=FHP88_01 530 PE=4 SV=1
MTTLFVNRLTVIDFSYLDPVHGLLGESWLVDIELDGSLDHQGMVLDFSEVKKQVKQTIDREYDHCLLIPTQYPQCQIQQLEHRCDIQFQLASGEIIRHSSPYSAIALIAAPAITEAILIRVISEKLQSVLPDNVQALRIRLYPEMASDAWYQYSHGLKHHAGNCQRIAHGHRSRIVIYRNNDRDQSLEADWATRWKAIYIGTQSDLLETFQENGIECHRFGYTANQGLFKLEIPSDRCYLIETDSTVENLAQHIAATLKSEHPEDDFRIEAYEGVDKGAIGLA

SEQ ID NO: 25436 - protein, 283 aa, Sedimenticola selenatireducens
  misc_feature (1)..(283): tr|A0A2N6CSP2|A0A2N6CSP2_9GAMM Uncharacterized protein OS=Sedimenticola selenatireducens OX=191960 GN=C0630_17 090 PE=4 SV=1
MTTLFVNRLTAIDFSYLDPAAGMLGESWLVDIELDGSLDHQGMVLDFSEVKKQVKRCIDQEFDHRLLVPARYAHCRVQQQEHRCDIRFQLTSGETLVHSGPNSAVTLIQAENITEESLIKAIIDRLQPLLPDNIQGLRLRLYAESITGAWYRYSHGLKHHAGNCQRIAHGHRSRIIIYRNGVRDQQLEANWANRWRDIYIGTSSDLHDSVQQDDQVFYHFGYTANQGLFKLEIPSHRCYLVDSDTTVENLAQHIADTLKREHPDDAFRVEAFEGVDKGAVGHS

SEQ ID NO: 25437 - protein, 283 aa, Sedimenticola sp.
  misc_feature (1)..(283): tr|A0A2N6GIP8|A0A2N6GIP8_9GAMM Uncharacterized protein OS=Sedimenticola sp. OX=1940285 GN=C0631_07125 PE=4 SV= 1
MTTLFVNALTVIDASYLHPVRGLLGASWLVDIELDGTLDHQGMVLDFSSVKKQVKRIIDESFDHKLLLPGQYPGLNLEQQEHRCDLSFTTESGETFRHSSPLSAVTLIDSGEITGEALSAAIIREVKPALPDNVQAIRLTLRDEQIEGSHYQYSHGLKHHDGNCQRIAHGHRSRIEVYRDGVRNPQLETNWAERWRDIYIGTRTDLLDSFEQAGILYHRFGYTANQGLFQLELQAARVYLIDTDSTVENLAQHIADTLKTEQPTASFRVRAYEGVDKGAIGTA

SEQ ID NO: 25438 - protein, 283 aa, Sedimenticola thiotaurini
  misc_feature (1)..(283): tr|A0A558D714|A0A558D714_9GAMM Uncharacterized protein OS=Sedimenticola thiotaurini OX=1543721 GN=FHK82_06865 PE=4 SV=1
MTTLFVNRLTVIDFSYLDPIAGLLGESWQVDIELDGSLDHQGMVLDFGDVKKQVKQIIDSEFDHCLLVPAQHPHCQIQQLEHRCDIQFQLDSGDIIRHSGPYSAICLINADRINEAALISAISEKLLALLPDNVQALRIRLYPEQITGAWYRYSHGLKHHAGNCQRIAHGHRSRIVIYRNGTRDPNLETDWAKRWADIYIGTLSDQQETFQELGKAYFRFGYTAKQGLFKLEIPSDRCYLIDTDSTVENLAQHIADTLKQENPADTFRVEAYEGVDKGAVGLA

SEQ ID NO: 25439 - protein, 408 aa, Sedimenticola thiotaurini
  misc_feature (1)..(408): tr|A0A558D8T1|A0A558D8T1_9GAMM 6-carboxytetrahydropteri n synthase OS=Sedimenticola thiotaurini OX=1543721 GN=F HK82_06195 PE=4 SV=1
MQCLECGETIYQLDNGHLLNCSSLTLQEYAIRHHLPLDMILHSDQINLPDHVDNYSRPVARPTEAARQTLLGLRWSGLLQERDAFVEVPGEVRRLDLLLWALDYLSDYGFQFHQDYEYRADSHRVVAKNRLRVPLRNLVNEWATPEPPPAFLGALAVYMAHVAEWHAGYLFMAFSRPIYAESVREQLARDFNIQCQQLKLSDSSDELLLRTQTLADGIKLLDLLKSRLIAIPTAWERFKAETPQASVTKELVFDSAHFITDHPAKCSNLHGGRYVLQVEVTGRIDPVTGCVVDYGYLKQVVNQLIIERFDHHHLNYAAEELAWRSSTEMLCVYIWEQLIDYLPGLSGIRLYETTNSWCDYQGRTLAEQQAAGSDPVLHPFKNLPAQAANRKRLLNKFGQSTVAACQVN

SEQ ID NO: 25440 - protein, 267 aa, Sedimentisphaera cyanobacteriorum
  misc_feature (1)..(267): tr|A0A1Q2HNG2|A0A1Q2HNG2_9BACT 6-pyruvoyl tetrahydropte rin synthase/QueD family protein OS=Sedimentisphaera cy anobacteriorum OX=1940790 GN=L21SP3_00664 PE=4 SV=1
MHRLTRQIRFSVDPFGNEGDAEGFNSYCSKPAGHGLGFFICLNVELQGSVQADTGFLINLAEIDAKARTEAVNIYKKRIQQMISAGKNVTLEKNAEILMECWEGLRRSFNPQKLSSLEQLVNPYKKITISGDSNMLLYSEKFEFAATHKLWNENFSEHKNFEQFGKCANPQGHGHNYVVEITAEPENWKDFDRFDFQKKVKKLFIDKLDHKNLSKDLEYYKQHNPTVENITVHCWQTLSGKLKGARLESVRIWENDRAYCTYRGEQE

SEQ ID NO: 25441 - protein, 119 aa, Sedimentisphaera cyanobacteriorum
  misc_feature (1)..(119): tr|A0A1Q2HPF8|A0A1Q2HPF8_9BACT Queuosine biosynthesis p rotein QueD OS=Sedimentisphaera cyanobacteriorum OX=194 0790 GN=L21SP3_01153 PE=4 SV=1
MYKVTVEDTFYAEHAVKMPGGEIEPSHGHDWRVRVCAAARELDEYGFAFEFKDFRKALNIVISNIGQNLNELELNGQHPTTELVCKHFYDKMQQELSSVELDYVEIEEEKGCLVRYSRD

SEQ ID NO: 25442 - protein, 119 aa, Sedimentisphaera salicampi
  misc_feature (1)..(119): tr|A0A1W6LM47|A0A1W6LM47_9BACT Queuosine biosynthesis p rotein QueD OS=Sedimentisphaera salicampi OX=1941349 GN =STSP1_01206 PE=4 SV=1
MYKVTVEDTFYAEHAVKMPGGEIEPSHGHDWRVRVCAAAKELDEYGFAFEFKDFRKALNIVISNIGQNLNELELNGQHPTTELVCKHFYDKMQVLLNSAELEYVEIEEEKGCLVRYSKD

SEQ ID NO: 25443 - protein, 266 aa, Sedimentisphaera salicampi
  misc_feature (1)..(266): tr|A0A1W6LJJ5|A0A1W6LJJ5_9BACT 6-pyruvoyl tetrahydropte rin synthase/QueD family protein OS=Sedimentisphaera sa licampi OX=1941349 GN=STSP1_00292 PE=4 SV=1
MHRLTRQIRFSVDPFPNGGDAEGFNSYCSKPAGHGFGFFICLNVEVEGSVQPDTGFLINLAEIDAKARRVAVNIYKKRIRQLIAEGKNVNLQRTCEILRECWGGLRSSFTPQKLSSLEQLVNPYKKITISGDNMLLYSEKFEFAATHKLWNDNFSEEQNFDHFGKCANPEGHGHNYVVEITAEPENWKDFDRFDFQKKVNELFIDKLDHKNLSRDLDYYKKLNPTVENITVHCWNTLSDKLKGAKLKSVRIWENDRAYCTYKGEQG

SEQ ID NO: 25444 - protein, 118 aa, Sedimentitalea sp.
  misc_feature (1)..(118): tr|A0A3T0N1Z7|A0A3T0N1Z7_9RHOB 6-carboxy-5,6,7,8-tetrah ydropterin synthase OS=Sedimentitalea sp. W43 OX=248303 3 GN=EBB79_09170 PE=3 SV=1
MYRITKEFHFSASHQLCALPSDHPCSRMHGHNYIAEVELAANELDQNGFVLDYRELTPLKSWIDDELDHRHLNEAFDHDMVTSEFLAKKIYEFCQARWPQTSAVRISETPKTWAEYRP

SEQ ID NO: 25445 - protein, 158 aa, Sediminibacillus albus
  misc_feature (1)..(158): tr|A0A1G8X0Z3|A0A1G8X0Z3_9BACI 6-pyruvoyltetrahydropter in/6-carboxytetrahydropterin synthase OS=Sediminibacill us albus OX=407036 GN=SAMN05216243_1090 PE=4 SV=1
MEGYGFTIVEKLEKLGEDIQKEQLKYHTKRVLVSKEFTFDSAHHLHCYEGKCKNLHGHTYRVVFGISGYTDEIGMVIDFGDIKVLWKEEIEVYLDHRYLNETLPAMNTTAENIVVWIYEKMAAALRERIDSNLRLEYIKLYETPGSFAEVRREWMEDE

SEQ ID NO: 25446 - protein, 159 aa, Sediminibacillus halophilus
  misc_feature (1)..(159): tr|A0A1G9P3E9|A0A1G9P3E9_9BACI 6-pyruvoyltetrahydropter in/6-carboxytetrahydropterin synthase OS=Sediminibacill us halophilus OX=482461 GN=SAMN05216244_1269 PE=4 SV=1
MMEGFGFTIVEKLEKLGDDIQKEELKYHQKRVLISKEFTFDAAHHLHAYEGKCKNLHGHTYRVVFGISGFTDDIGLVLDFGDIKKLWKEKIEVKLDHRYLNEMLPAMNTTAENIVVWVYQQMDFALKDLDNRSLRVEYVKLYETPSSFAEARREWMEDV

SEQ ID NO: 25447 - protein, 135 aa, Sediminibacterium ginsengisoli
  misc_feature (1)..(135): tr|A0A1T4MYS0|A0A1T4MYS0_9BACT 6-pyruvoyltetrahydropter in/6-carboxytetrahydropterin synthase OS=Sediminibacter ium ginsengisoli OX=413434 GN=SAMN04488132_10417 PE=4 S V=1
MVYLTRQEHFNAAHKLFNPKWSKEQNDAVFGVCANENWHGHNYDLFVTIKGTPDPDTGFLYDVKKLSVLIKEKVIDKLDHKNLNLDVDFMKDQLCSTENLAVGIWKQLEPHLPAQVQLHCIKLYETARIYVEYFG

SEQ ID NO: 25448 - protein, 138 aa, Sediminibacterium ginsengisoli
  misc_feature (1)..(138): tr|A0A1T4MYQ2|A0A1T4MYQ2_9BACT 6-pyruvoyltetrahydropter in/6-carboxytetrahydropterin synthase OS=Sediminibacter ium ginsengisoli OX=413434 GN=SAMN04488132_10416 PE=4 S V=1
MNDRKVAVFRKEHFNSAHRLHNPAWDEERNNAVFGLCNNPNYHGHNYELVVKVTGVPDPQTGYVMDLKLLSDLVKEEVLDRFDHRNLNLDTKEFATLNPTAENIAVVIYDLLRKRIDASLDLSIRLYETERNFVEYPA

SEQ ID NO: 25449 - protein, 135 aa, Sediminibacterium goheungense
  misc_feature (1)..(135): tr|A0A4R6IWR5|A0A4R6IWR5_9BACT 6-pyruvoyltetrahydropter in/6-carboxytetrahydropterin synthase OS=Sediminibacter ium goheungense OX=1086393 GN=BC659_2479 PE=4 SV=1
MVYLTRQEHFNAAHKLYNPRWSKEQNEAVFGVCANENWHGHNYDLFVTIKGNPDPDTGFLYDVKKLSKLIKEHVIDKLDHKNLNLDVDFMKDQLCSTENLAIAIWQQLQPHLPQQVELHCIKLYETPRIYVEYFG

SEQ ID NO: 25450 - protein, 136 aa, Sediminibacterium goheungense
  misc_feature (1)..(136): tr|A0A4R6IXM6|A0A4R6IXM6_9BACT 6-pyruvoyltetrahydropter in/6-carboxytetrahydropterin synthase OS=Sediminibacter ium goheungense OX=1086393 GN=BC659_2480 PE=4 SV=1
MEKVAVFRKEHFNAAHRLHNPDWSDEMNKKVFGLCNNPNYHGHNYELIVQLTGVPDAQTGYVYDMKLLSDIIQEEIIKRFDHKNLNLDTVEFATLNPTAENIAIVIYRLLRARLDKALDLKIRLYETERNFVEYPA

SEQ ID NO: 25451 - protein, 144 aa, Sediminibacterium sp.
  misc_feature (1)..(144): tr|A0A2M8JZF7|A0A2M8JZF7_9BACT 6-carboxy-5,6,7,8-tetrah ydropterin synthase OS=Sediminibacterium sp. FEMGT703S OX=2080766 GN=CUR34_01495 PE=3 SV=1
MIQVTKIFRFETAHAIHGYNGHCRNIHGHSYVLHVTVGSDADDMAYLPKPGFVIDFKDLKKIVNRIIVDELDHRLILSQDFLAEHPHAAASENLIIWEMEPTAENILLYIRNVLLAELPTEIRLRKLKIYETSDSYAEWESTAR

SEQ ID NO: 25452 - protein, 136 aa, Sediminibacterium sp.
  misc_feature (1)..(136): tr|A0A2M8JYV7|A0A2M8JYV7_9BACT 6-pyruvoyl tetrahydrobio pterin synthase OS=Sediminibacterium sp. FEMGT703S OX=2 080766 GN=CUR34_00300 PE=4 SV=1
MVYLTRQEHFNAAHKLFNPAWSKERNEQVFGVCANENWHGHNYDLYITIKGTPDPDTGFLFDVKALSKLIKTQVIDHLDHKNLNMDVPFMAGKMCSTENLALAIWNQLAPHLPSPVKLHCVKLYETPRIYVEYFGD

SEQ ID NO: 25453 - protein, 135 aa, Sediminicola luteus
  misc_feature (1)..(135): tr|A0A2A4G6C0|A0A2A4G6C0_9FLAO 6-carboxy-5,6,7,8-tetrah ydropterin synthase OS=Sediminicola luteus OX=319238 GN =B7P33_15130 PE=3 SV=1
MKVKVSRKAHFNAAHRLHRPDWDDAKNKAVFGKCSNPNYHGHNYDLVVSVRGEIDETTGFVMDMKVLKELIYTHIEQAFDHKNLNLEVPEFKNLNPTAEHIAVVIWNKLRPFIATDKELEVVLYETPRNFVTYSG

SEQ ID NO: 25454 - protein, 136 aa, Sediminicola luteus
  misc_feature (1)..(136): tr|A0A2A4GA06|A0A2A4GA06_9FLAO 6-pyruvoyl tetrahydrobio pterin synthase OS=Sediminicola luteus OX=319238 GN=B7P 33_06455 PE=4 SV=1
MEKVAIVRCEHFNAAHRLHNKHWSEEKNKSIFGKCNNPNYHGHNYDLEVKVIGTVDPHTGYVIDTKILSDLIKERVLDRFDHKNLNLDTEEFRELNPTAENMAMVIYKLLRSELQERLELKVKLFETPRNYVEYPY

SEQ ID NO: 25455 - protein, 135 aa, Sediminicola sp.
  misc_feature (1)..(135): tr|A0A0S1S7Z0|A0A0S1S7Z0_9FLAO 6-carboxy-5,6,7,8-tetrah ydropterin synthase OS=Sediminicola sp. YIK13 OX=145335 2 GN=SB49_01050 PE=3 SV=1
MKVKVSRKAHFNAAHRLYRKDWSFEKNDSIFGKCNNPNFHGHNYELIVSVTGEIDPETGFVIDVKILKDLIKAEVEDSFDHKNLNVEVPEFKELNPTAENIAVVIWQKLRPHIDAANALEVVLYETPRNFVTFSG

SEQ ID NO: 25456 - protein, 150 aa, Sediminicola sp.
  misc_feature (1)..(150): tr|A0A0S1SDN4|A0A0S1SDN4_9FLAO 6-pyruvoyl tetrahydropte rin synthase OS=Sediminicola sp. YIK13 OX=1453352 GN=SB 49_12595 PE=4 SV=1
MGNIRITKQFSFETGHALFGYDGKCRNVHGHSYKLSVTVIGKPITDTSHVKLGMVIDFTDLKNIVKEEIVDQFDHATVFNKNTPHLELAKELMERGHNVILAEYQPTSENMVLDFADKIKLRLPENILLHSLKLQETDSSFAEWYASDNL

SEQ ID NO: 25457 - protein, 138 aa, Sediminitomix flava
  misc_feature (1)..(138): tr|A0A315ZB31|A0A315ZB31_9BACT 6-pyruvoyltetrahydropter in/6-carboxytetrahydropterin synthase OS=Sediminitomix flava OX=379075 GN=BC781_103278 PE=4 SV=1
MVQICRKEHFNAAHKLYNPKWTKEENEAFFGPCANENWHGHNFEMTVIVEGEPDPDTGYVMNMKHLGKLVKEHIINKVDHKNLNMDVDFLEGKMTSCETLVMEFWKILAPKIEEIAPNAHLHCIELWETNKNFVRYFG

SEQ ID NO: 25458 - protein, 126 aa, Sediminitomix flava
  misc_feature (1)..(126): tr|A0A315ZB63|A0A315ZB63_9BACT 6-carboxy-5,6,7,8-tetrah ydropterin synthase OS=Sediminitomix flava OX=379075 GN =BC781_102372 PE=3 SV=1
MGLDLYLAMEIFKEFTFEAAHHLPNMPEGHPCGRLHGHSWKAVIYLKDEIKQPYGWVMDFGDIAKKFEPIREQLDHNYLNNIEGLENPTSEVIAKWVWDKLKPELEALSRVTIYETVDCAATYTGE

SEQ ID NO: 25459 - protein, 136 aa, Segetibacter aerophilus
  misc_feature (1)..(136): tr|A0A512BBF1|A0A512BBF1_9BACT 6-carboxy-5,6,7,8-tetrah ydropterin synthase OS=Segetibacter aerophilus OX=67029 3 GN=SAE01_17940 PE=4 SV=1
MVYLTRLEHFNAAHKLYNPAWSKEKNEELFGVCANENWHGHNFDLYVTIKGHINPETGFLFDVKKLSKLIQEHVIKKLDHKNLNLDVDFLQDKMCSTEILAMEIWKQLQRHLPMHVKLHCIKLYETPRIYVEYFGD

SEQ ID NO: 25460 - protein, 158 aa, Segetibacter aerophilus
  misc_feature (1)..(158): tr|A0A512BBS9|A0A512BBS9_9BACT 6-carboxy-5,6,7,8-tetrah ydropterin synthase OS=Segetibacter aerophilus OX=67029 3 GN=ygcM PE=4 SV=1
MSSILVISNGKIESNNFSKFYMSNKVAVYRKEHFNAAHRLNNPSWDGDKNASVFGKCNNPNYHGHNYELIVKVVGEPAADTGFVIDLGGLSQLIEENVLNRFDHKNLNMDCKEFEHLNPTAENITIVIYRILREKLDPKLDLQVRLYETERNFVEYPA

SEQ ID NO: 25461 - protein, 147 aa, Segniliparus rugosus
  misc_feature (1)..(147): tr|E5XN45|E5XN45_9ACTN 6-carboxy-5,6,7,8-tetrahydropter in synthase OS=Segniliparus rugosus ATCC BAA-974 OX=679 197 GN=HMPREF9336_00915 PE=3 SV=2
MTSITVRHNFETAHRLPLVGGKCVNLHGHSWWADVTVAGELDERGIVLDFGALKAELRAWIDERLDHGAMLGRADSLVPALLEEGVKLFRFGLDEPSAGLEWPTVENVAELLARVAQACLAGLGATGAAVARVRVSETHVNAAEVVW

SEQ ID NO: 25462 - protein, 128 aa, Seinonella peptonophila
  misc_feature (1)..(128): tr|A0A1M4XIZ8|A0A1M4XIZ8_9BACL 6-carboxy-5,6,7,8-tetrah ydropterin synthase OS=Seinonella peptonophila OX=11224 8 GN=SAMN05444392_10529 PE=3 SV=1
MSKQYQLVKTFSISCAHYIPGADKCGQLHGHNYQVTFCIEGKELDQSDMLIDFREIKHALVKRYDHQLLNHFPEFDREQGGVFPTAERIAEVCFQRIAQLCSQKENQPRLRWVEIRETAEAYARYGEI

SEQ ID NO: 25463 - protein, 130 aa, Selenihalanaerobacter shriftii
  misc_feature (1)..(130): tr|A0A1T4K6A9|A0A1T4K6A9_9FIRM 6-carboxy-5,6,7,8-tetrah ydropterin synthase OS=Selenihalanaerobacter shriftii O X=142842 GN=SAMN02745118_00638 PE=3 SV=1
MKRPIVITREFEFDAAHNLKNYDGDCSNLHGHRYKLEVSVLGYVGEEKYLAIDFKDLKSLGKELILDKLDHQYLNEVLDFNTSCEKLAYWIWERLEGKFIEYDCELYEIKLWETPKSYVTLNRNIMNEGL

SEQ ID NO: 25464 - protein, 120 aa, Seleniivibrio woodruffii
  misc_feature (1)..(120): tr|A0A4R1K9T1|A0A4R1K9T1_9BACT 6-carboxy-5,6,7,8-tetrah ydropterin synthase OS=Seleniivibrio woodruffii OX=1078 050 GN=C8D98_1669 PE=3 SV=1
MFRVRVIQQFNGAHNLRNYNGKCENLHGHNWRVEAYLQGDKLNGTEMLVDFTVLKKRLKDILEELDHKYLNEQVEFFVTHNPTSENIARFIYGRLKETFGTLTERVVVWETDVQAAEYFE

SEQ ID NO: 25465 - protein, 126 aa, Selenomonas artemidis
  misc_feature (1)..(126): tr|E7N2W2|E7N2W2_9FIRM 6-carboxy-5,6,7,8-tetrahydropter in synthase OS=Selenomonas artemidis F0399 OX=749551 GN =queD PE=3 SV=1
MYTLRVEGAFEAAHRVVDYPGKCDRLHGHNWVVEAAFRGTQLDDLGMLIDFKVAKKALAAVLDDYDHYYLNDIPPFSEGVNPTAENLARIIYERLAAREELAGTGAELAALTVWESPKSSVTYTKD

SEQ ID NO: 25466 - protein, 126 aa, Selenomonas flueggei
  misc_feature (1)..(126): tr|C4V0R8|C4V0R8_9FIRM 6-carboxy-5,6,7,8-tetrahydropter in synthase OS=Selenomonas flueggei ATCC 43531 OX=63830 2 GN=queD PE=3 SV=1
MYTLRVEGAFEAAHRVVGYPGKCDRLHGHNWVVEAVFRGTELDGLGMLIDFKTAKAALMAVLDAFDHRYINELPPFDGEVNPTAENLACIIYERLAARTEVMESSAHLAALTVWESPKSSVTYERN

SEQ ID NO: 25467 - protein, 126 aa, Selenomonas infelix
  misc_feature (1)..(126): tr|G5GS60|G5GS60_9FIRM 6-carboxy-5,6,7,8-tetrahydropter in synthase OS=Selenomonas infelix ATCC 43532 OX=679201 GN=HMPREF9334_02092 PE=3 SV=1
MYTLRVEGAFEAAHRVVNYPGKCDRLHGHNWVLEATFQGTQLDELGMLIDFKIAKKALAEILDEFDHYYLNDLPPFHDGVNPTAENLARIIFERLAACEAVVASPAELTALTVWESPKSSVTYTKD

SEQ ID NO: 25468 - protein, 126 aa, Selenomonas noxia
  misc_feature (1)..(126): tr|D4S496|D4S496_9FIRM 6-carboxy-5,6,7,8-tetrahydropter in synthase OS=Selenomonas noxia ATCC 43541 OX=585503 G N=queD PE=3 SV=1
MYTLRIEGAFEAAHRVVNYPGKCDRLHGHNWAVEATFQGTELDELGMLIDFKIAKKALAAVLDDFDHYYLNDFPPFSEGINPTAENLARIIFERLAARAEVQTSPAELTALTVWESPKSSVTYTKD

SEQ ID NO: 25469 - protein, 126 aa, Selenomonas noxia
  misc_feature (1)..(126): tr|G5H498|G5H498_9FIRM 6-carboxy-5,6,7,8-tetrahydropter in synthase OS=Selenomonas noxia F0398 OX=702437 GN=HMP REF9432_01745 PE=3 SV=1
MYTLRIEGAFEAAHRVVNYPGKCDRLHGHNWGVEATFQGTKLDELGMLIDFKIAKKALAAVLDDFDHYYLNDFPPFSEGINPTAENLARIIFERLAARAEVQTSPAELTALTVWESPKSSVTYTKD

SEQ ID NO: 25470 - protein, 125 aa, Selenomonas ruminantium
  misc_feature (1)..(125): tr|A0A1H3YVK4|A0A1H3YVK4_SELRU 6-carboxy-5,6,7,8-tetrah ydropterin synthase OS=Selenomonas ruminantium OX=971 G N=SAMN05660648_02145 PE=3 SV=1
MYTLKVEGAFEAAHHVNGYPGKCARLHGHNWVVEAVVKGKELDELGMLVDFKIIKQTLKDTLERFDHRYLNELEPFKNGVNPTAENLARIIFEELSGHEIFQRDSKLAAITVFESPKSSVTYTED

SEQ ID NO: 25471 - protein, 125 aa, Selenomonas ruminantium
  misc_feature (1)..(125): tr|A0A1G7WUG0|A0A1G7WUG0_SELRU 6-carboxy-5,6,7,8-tetrah ydropterin synthase OS=Selenomonas ruminantium OX=971 G N=SAMN05216584_11137 PE=3 SV=1
MYTLKIEGAFEAAHHVAGYPGKCARLHGHNWVVEAVVKGKELDELGMLIDFKVMKKELADVLERFDHRYLNELKPFADGLNPTAENLARIIFEELACRKVFERDSVLYAITVFESPKSSVTYTKD

SEQ ID NO: 25472 - protein, 126 aa, Selenomonas sp.
  misc_feature (1)..(126): tr|J4TYH3|J4TYH3_9FIRM 6-carboxy-5,6,7,8-tetrahydropter in synthase OS=Selenomonas sp. FOBRC9 OX=936573 GN=queD PE=3 SV=1
MYTLRVEGAFEAAHRVVDYPGKCDRLHGHNWVVEAAFRGTQLDDLGMLIDFKIAKKALAAVLDDYDHYYLNDIPPFSEGLNPTAENLARIIYERLAAREELAGTGAELAALTVWESPKSSVTYTKD

SEQ ID NO: 25473 - protein, 125 aa, Selenomonas sp.
  misc_feature (1)..(125): tr|A0A5D6WDV1|A0A5D6WDV1_9FIRM 6-carboxy-5,6,7,8-tetrah ydropterin synthase OS=Selenomonas sp. mPRGC5 OX=259341 1 GN=queD PE=3 SV=1
MYTLKIEGAFEAAHHVEGYPGKCARLHGHNWVVEAVVKGKELDELGMLIDFKVMKKELAAVLERFDHRYLNELEPFVQGVNPTAENLARIIFEELAGRDVFKRDSVLHAITVFESPKSSVTYTKD

SEQ ID NO: 25474 - protein, 125 aa, Selenomonas sputigena
  misc_feature (1)..(125): tr|C9LTT9|C9LTT9_SELS3 6-carboxy-5,6,7,8-tetrahydropter in synthase OS=Selenomonas sputigena (strain ATCC 35185 / DSM 20758 / VPI D19B-28) OX=546271 GN=queD PE=3 SV=1
MFEIKVEEEFEAAHRIVNYPGKCDRLHGHNWKVELKISGSRLDELGMLIDFKAAKAMLQEVVNSLDHRFLNELEPFSEINPTAENIARYIYQELKQREIFCNDSVHLAAVCVWESPRACATYTED

SEQ ID NO: 25475 - protein, 139 aa, Senegalimassilia anaerobia
  misc_feature (1)..(139): tr|A0A369LAL7|A0A369LAL7_9ACTN 6-carboxy-5,6,7,8-tetrah ydropterin synthase OS=Senegalimassilia anaerobia OX=14 73216 GN=C1880_02595 PE=3 SV=1
MYGLKTESSFDAAHFLTDYHGKCENLHGHRWRVVAYLEQADLQTEGTHKDMVIDFADFKHALRDLTEELDHSFVVEEGSLMPKTLDCLREEGFTLSMMPFRTTAENLARYFFGKLAEQGFPVSQVDVYETPNNCAIYRA

SEQ ID NO: 25476 - protein, 139 aa, Senegalimassilia sp.
  misc_feature (1)..(139): tr|A0A4Q2JWZ6|A0A4Q2JWZ6_9ACTN 6-carboxy-5,6,7,8-tetrah ydropterin synthase OS=Senegalimassilia sp. KGMB04484 O X=2509433 GN=ET524_02935 PE=3 SV=1
MYGLKTESSFDAAHFLTDYHGKCENLHGHRWRVVAYLEQAELQTEGTHKDMVIDFAEFKRALRDLTEELDHSFVVEEGSLMPETLECLHKEGFTLSMMPFRTTAENLARYFFDKLAAKGFPVSQVDVYETPNNCAIYRA

SEQ ID NO: 25477 - protein, 151 aa, Seonamhaeicola algicola
  misc_feature (1)..(151): tr|A0A5C7AXU2|A0A5C7AXU2_9FLAO 6-carboxytetrahydropteri n synthase OS=Seonamhaeicola algicola OX=1719036 GN=FUA 26_03625 PE=4 SV=1
MKHNIRITKRFSFETGHALYGYDGKCKNIHGHSYHLDVTVIGSPITDTANPKHGMVIDFGDLKKIVKEEIEDVFDHATVFNKNTPHVNLAKDLMNLGHKVLLVNYQPTSEMMVIDFADKIQKRLPENIKLHALKLQETATSFAEWFAADQQ

SEQ ID NO: 25478 - protein, 136 aa, Seonamhaeicola algicola
  misc_feature (1)..(136): tr|A0A5C7B0A6|A0A5C7B0A6_9FLAO 6-carboxy-5,6,7,8-tetrah ydropterin synthase OS=Seonamhaeicola algicola OX=17190 36 GN=FUA26_08465 PE=3 SV=1
MKVTVSRKAHFNAAHRLYRKDWSDEKNNQVFDKCSNQYFHGHNYELIVSVTGEINKETGYVVDMKVLKDIIKAEVEEAFDHKNLNLQVPEFKNLNPTAENIAVVIYNKIKPKIEPNLELEITLYETPRNFVTYAGN

SEQ ID NO: 25479 - protein, 151 aa, Seonamhaeicola aphaedonensis
  misc_feature (1)..(151): tr|A0A3D9HM86|A0A3D9HM86_9FLAO 6-pyruvoyltetrahydropter in/6-carboxytetrahydropterin synthase OS=Seonamhaeicola aphaedonensis OX=1461338 GN=DFQ02_101643 PE=4 SV=1
MGNNIRITKQFSFETGHALYGYDGKCKNVHGHSYRLDVTVIGRPISDKNNVKYGMVIDFGDLKKIVEEEIVDVFDHATVFNKNTPHIELAKELDARGHNILLVDYQPTSEMMVIDFAQKIKPRLPANIKLHSLKLQETATSFAEWFAYDNN

SEQ ID NO: 25480 - protein, 136 aa, Seonamhaeicola aphaedonensis
  misc_feature (1)..(136): tr|A0A3D9HFK7|A0A3D9HFK7_9FLAO 6-carboxy-5,6,7,8-tetrah ydropterin synthase OS=Seonamhaeicola aphaedonensis OX= 1461338 GN=DFQ02_104100 PE=3 SV=1
MRVTVSRKAHFNAAHRLYRKDWSNEKNELVFDKCNNPNFHGHNYELIVSVTGEIDKETGYVIDMKVLKSLIKEEVEDAFDHKNLNIEVPEFKNLNPTAENISVVIYNKMRPKIDGNLDLEITLYETPRNFVTYSGK

SEQ ID NO: 25481 - protein, 151 aa, Seonamhaeicola marinus
  misc_feature (1)..(151): tr|A0A5D0HXU2|A0A5D0HXU2_9FLAO 6-carboxytetrahydropteri n synthase OS=Seonamhaeicola marinus OX=1912246 GN=FUA2 4_13145 PE=4 SV=1
MGNKIRITKQFSFEAGHALYGYDGKCKNLHGHSYHLNVTVIGEPISDNSNVKYGMVLDFGDLKKIVNEEIVDVFDHSMVFNKNTPHLDLAEDLKERGHYVIMVDYQPTTEMMILDFAEKIKNRLPKHIKLHSLRLQETATSFAEWFASDQG

SEQ ID NO: 25482 - protein, 136 aa, Seonamhaeicola marinus
  misc_feature (1)..(136): tr|A0A5D0HJ83|A0A5D0HJ83_9FLAO 6-carboxy-5,6,7,8-tetrah ydropterin synthase OS=Seonamhaeicola marinus OX=191224 6 GN=FUA24_17340 PE=3 SV=1
MRVTVSRKAHFNAAHRLYRKDWSDEKNELIFDKCSNPYFHGHNYELIVSVTGEIDPETGYVVDMKLLKEIIKEEVEDAFDHKNLNLEVPEFKDLNPTAENIVVVIYNKVRPKIESNLDLEITLYETPRNFVSYSGK

SEQ ID NO: 25483 - protein, 136 aa, Seonamhaeicola sp.
  misc_feature (1)..(136): tr|A0A562YGT1|A0A562YGT1_9FLAO 6-carboxy-5,6,7,8-tetrah ydropterin synthase OS=Seonamhaeicola sp. W255 OX=25282 06 GN=E1J38_000010 PE=3 SV=1
MRVTVSRKAHFNAAHRLYRKEWSNEKNELIFDKCNNPNFHGHNYELIVSVTGEIDKETGYVIDMKVLKSIIKDEVEDAFDHKNLNIEVPEFENLNPTAENISVVIYNKMRPKIDANLDLEITLYETPRNFVTYSGK

SEQ ID NO: 25484 - protein, 136 aa, Seonamhaeicola sp.
  misc_feature (1)..(136): tr|A0A1U7DNH8|A0A1U7DNH8_9FLAO 6-carboxy-5,6,7,8-tetrah ydropterin synthase OS=Seonamhaeicola sp. S2-3 OX=19360 81 GN=BWZ22_01815 PE=3 SV=1
MKVTVSRKGHFNAAHRLYRKDWSDEKNHEVFDKCSNPNFHGHNYEIIVSVTGEVDKETGYVIDIKTLKDIIKEEVEDAFDHKNLNLEVKEFKNLNPTAENISIVIYNKIKPRIKSGLDLEITLYETPRNFVSYSGK

SEQ ID NO: 25485 - protein, 126 aa, Serinicoccus chungangensis
  misc_feature (1)..(126): tr|A0A0W8IBC1|A0A0W8IBC1_9MICO 6-pyruvoyl tetrahydrobio pterin synthase OS=Serinicoccus chungangensis OX=767452 GN=AVL62_15540 PE=4 SV=1
MFGLTVTDHVMIAHSLPDPFFGPAQGLHGATLVVEATWRRRELDEHGVVVDIGEAGGHLAAVLDPLRYQNLDEHPDFAGRLSTTEAVAAHVAHALAARAEPAIDGIGVVVREHPQAWVTYDLDLRS

SEQ ID NO: 25486 - protein, 130 aa, Serinicoccus sp.
  misc_feature (1)..(130): tr|A0A1B1N8Y2|A0A1B1N8Y2_9MICO PTPS-like type 4 OS=Seri nicoccus sp. JLT9 OX=1758689 GN=SGUI_0501 PE=4 SV=1
MFGLTVTDHVMVAHSLPDPFFGPAQGLHGATLVVEATWRRRELDAHGVVVDIGAASQALSEVLDPLRYANLDEHPDFAGRLSTTEAVAAHVAHALAERVRADPDADLDGLGVVVREHPGAWVTYDLDLRA

SEQ ID NO: 25487 - protein, 130 aa, Serinicoccus sp.; identical to SEQ ID NO: 25486
  misc_feature (1)..(130): tr|A0A1Q9T495|A0A1Q9T495_9MICO 6-pyruvoyl tetrahydrobio pterin synthase OS=Serinicoccus sp. CUA-874 OX=1517939 GN=BJF80_16475 PE=4 SV=1

SEQ ID NO: 25488 - protein, 143 aa, Serpentinicella alkaliphila
  misc_feature (1)..(143): tr|A0A4R2UAA5|A0A4R2UAA5_9CLOT 6-carboxy-5,6,7,8-tetrah ydropterin synthase OS=Serpentinicella alkaliphila OX=1 734049 GN=EDD79_100626 PE=3 SV=1
MFILKTEHHFDSAHFLHNYEGKCSNIHGHRWNVVIEVQSEALVAGGQLDGMVVDFGDLKRDVKEMVDYFDHALIIQSGTMREETLLCLKEDGFTIIEVDFRPTAENFSLFFYNSMKDKGYNVKRSTVYETPTNSATYEESRGN

SEQ ID NO: 25489 - protein, 359 aa, Serpentinomonas mccroryi
  misc_feature (1)..(359): tr|A0A060NRI4|A0A060NRI4_9BURK 6-pyruvoyl-tetrahydropte rin synthase OS=Serpentinomonas mccroryi OX=1458426 GN= SMCB_2109 PE=4 SV=1
MLNIHHCAQAGFEAARQLLGRPAPHPQARLHGHSFVSRLRAHAAPGWALCPGTEVEQLQQHLEAVTAALDHRLLNDCLPEPDDAALARWLQQRLHHDGLQGAQVGLQSTPRSGCTLDAGGGAHIWRRYRFEAAHQLPRVPAGHKCGRMHGHGFEALLHVRADGGEAATGVADAIERAWAPLQQRLHRQCLNDIPGLENPTSEVLSAWLWQQLVPALPALSRVTVYETASCGARYDGQRYRIWKDLTLDSARRLRQAPAEHPLAALYGHTYTLRLHLGGELDAVQGWTLDFGDVKRLFDPIFKALDHQPLHELAERAALPDCDCASLAGWILQQGRRELAALERVDLYQTPGCGAQVRLP

SEQ ID NO: 25490 - protein, 366 aa, Serpentinomonas raichei
  misc_feature (1)..(366): tr|A0A060NSR9|A0A060NSR9_9BURK 6-pyruvoyl-tetrahydropte rin synthase OS=Serpentinomonas raichei OX=1458425 GN=S RAA_2085 PE=4 SV=1
MLSLYHCAQAGFEAARQLQRRAPQHPQARLHGHSFEARLRARVEPGWAAVAGTEVEQLQQHLADVTAALDHRLLNDCLPEPDDTALARWLQQRLPSAGLQLVQIGVQSTPRSGCELDATGHAHTWRRYRFEAAHQLPRVPAGHKCGRMHGHGFEVLLHARPDGLFDELGAADRLDHAWAPLQQRLHRHCLNDIAGLENPTSEVLSAWLWQQLVAALPGLSRVTVFETASCGASFDGQRYRIWKDLTLDSARRLRHAPPDHPLAALYGHTYTLRLGLGGALDAVQGWVLDFGDVKRLFDPLFKALDHQPLHELAATAGLPDCDCASLAGWILQQGRRELAALERVDLYQTPGCGALVMAADPGLSPI

SEQ ID NO: 25491 - protein, 119 aa, Serratia ficaria
  misc_feature (1)..(119): tr|A0A240AZS1|A0A240AZS1_SERFI 6-carboxy-5,6,7,8-tetrah ydropterin synthase OS=Serratia ficaria OX=61651 GN=que D PE=3 SV=1
MATTLFKDFQFEAAHRLPHVPEGHKCGRLHGHSFMVRLEVTGEVDAHTGWVMDFAELKAVFSPIWERLDHHYLNDIPGLENPTSEVLAAWIWQQLKPQLPELTAVMVKETCTAGCVYKG

SEQ ID NO: 25492 - protein, 119 aa, Serratia fonticola
  misc_feature (1)..(119): tr|A0A0F7HCM6|A0A0F7HCM6_SERFO 6-carboxy-5,6,7,8-tetrah ydropterin synthase OS=Serratia fonticola OX=47917 GN=q ueD PE=3 SV=1
MATTLFKDFQFEAAHHLPNVPEGHKCGRLHGHSFMVRIEVTGEVDAHTGWVMDFAELKAAFKPIWQRLDHYNLNDIPGLENPTSEVLAAWIWQQLKPQLPELSAVMVKETCTAGCVYKG

SEQ ID NO: 25493 - protein, 68 aa, Serratia fonticola
  misc_feature (1)..(68): tr|A0A4U9WG04|A0A4U9WG04_SERFO 6-carboxy-5,6,7,8-tetrah ydropterin synthase OS=Serratia fonticola OX=47917 GN=q ueD PE=4 SV=1
MATTLFKDFQFEAAHHLPNVPEGHKCGRLHGHSFMVRIEVTGEVDAHTGWVMDFAELKARLQADLAAP

SEQ ID NO: 25494 - protein, 119 aa, Serratia liquefaciens; identical to SEQ ID NO: 25491
  misc_feature (1)..(119): tr|A0A515D048|A0A515D048_SERLI 6-carboxy-5,6,7,8-tetrah ydropterin synthase OS=Serratia liquefaciens OX=614 GN= queD PE=3 SV=1

SEQ ID NO: 25495 - protein, 121 aa, Serratia liquefaciens; identical to SEQ ID NO: 21434
  misc_feature (1)..(121): tr|A0A484XWQ4|A0A484XWQ4_SERLI 6-carboxy-5,6,7,8-tetrah ydropterin synthase OS=Serratia liquefaciens OX=614 GN= queD PE=3 SV=1

SEQ ID NO: 25496 - protein, 119 aa, Serratia marcescens
  misc_feature (1)..(119): tr|A0A3E2EE53|A0A3E2EE53_SERMA 6-carboxy-5,6,7,8-tetrah ydropterin synthase OS=Serratia marcescens subsp. sakue nsis OX=211760 GN=queD PE=3 SV=1
MATTLFKDFQFEAAHRLPHVPEGHKCGRLHGHSFMVRLEVTGEVDPHTGWVMDFAELKAVFSPIWERLDHHYLNDIPGLENPTSEVLAAWIWQQLKPQLPELTAVMVKETCTAGCVYKG

SEQ ID NO: 25497 - protein, 119 aa, Serratia marcescens
  misc_feature (1)..(119): tr|A0A542C5A1|A0A542C5A1_SERMA 6-carboxy-5,6,7,8-tetrah ydropterin synthase OS=Serratia marcescens OX=615 GN=FH U12_3613 PE=3 SV=1
MATTLFKDFQFEAAHRLPHVPEGHKCGRLHGHSFMVRLEVTGEVNPHTGWVMDFAELKAVFSPIWERLDHHYLNDIPGLENPTSEVLAAWIWQQLKPQLPELTAVMVKETCTAGCVYKG

SEQ ID NO: 25498 - protein, 119 aa, Serratia nematodiphila; identical to SEQ ID NO: 25496
  misc_feature (1)..(119): tr|A0A086G8B4|A0A086G8B4_9GAMM 6-carboxy-5,6,7,8-tetrah ydropterin synthase OS=Serratia nematodiphila DZ0503SBS 1 OX=1449981 GN=AK51_02390 PE=3 SV=1

SEQ ID NO: 25499 - protein, 119 aa, Serratia nematodiphila; identical to SEQ ID NO: 25496
  misc_feature (1)..(119): tr|A0A5C7D9N5|A0A5C7D9N5_9GAMM 6-carboxy-5,6,7,8-tetrah ydropterin synthase OS=Serratia nematodiphila OX=458197 GN=queD PE=3 SV=1

SEQ ID NO: 25500 - protein, 119 aa, Serratia odorifera
  misc_feature (1)..(119): tr|D4DX09|D4DX09_SEROD 6-carboxy-5,6,7,8-tetrahydropter in synthase OS=Serratia odorifera DSM 4582 OX=667129 GN =queD PE=3 SV=1
MATTLFKDFQFEAAHRLPHVPEGHKCGRLHGHSFMVRLEVTGEVDAYTGWVMDFAELKAVFTPVWERLDHHYLNDIPGLENPTSEVLAAWIWQQLKPQLPELSAVMVKETCTAGCVYKG

SEQ ID NO: 25501 - protein, 119 aa, Serratia odorifera; identical to SEQ ID NO: 25500
  misc_feature (1)..(119): tr|A0A447KLQ1|A0A447KLQ1_SEROD 6-carboxy-5,6,7,8-tetrah ydropterin synthase OS=Serratia odorifera OX=618 GN=que D PE=3 SV=1

SEQ ID NO: 25502 - protein, 119 aa, Serratia oryzae
  misc_feature (1)..(119): tr|A0A1S8CIJ4|A0A1S8CIJ4_9GAMM 6-carboxy-5,6,7,8-tetrah ydropterin synthase OS=Serratia oryzae OX=2034155 GN=BM I79_12250 PE=3 SV=1
MATTLFKDFLFEAAHRLPHVPEGHKCGRLHGHSFMVRLEVTGEVDAHTGWVMDFAELKAAFEPIWQRLDHHYLNDIPGLENPTSEVLAAWIWQQLKPQLPELTAVMVKETCTAGCVYKG

SEQ ID NO: 25503 - protein, 119 aa, Serratia plymuthica
  misc_feature (1)..(119): tr|A0A1B1KL84|A0A1B1KL84_SERPL 6-carboxy-5,6,7,8-tetrah ydropterin synthase OS=Serratia plymuthica PRI-2C OX=11 54756 GN=queD PE=3 SV=1
MATTLFKDFQFEAAHRLPHVPEGHKCGRLHGHSFMVRLEVTGEVDAHTGWVMDFAELKAVFSPIWERLDHHYLNDIPGLENPTSEVLAAWIWQQLKPQLPELSAVMVKETCSAGCVYKG

SEQ ID NO: 25504 - protein, 119 aa, Serratia plymuthica; identical to SEQ ID NO: 25503
  misc_feature (1)..(119): tr|A0A2X4TWW0|A0A2X4TWW0_SERPL 6-carboxy-5,6,7,8-tetrah ydropterin synthase OS=Serratia plymuthica OX=82996 GN= queD PE=3 SV=1

SEQ ID NO: 25505 - protein, 119 aa, Serratia proteamaculans
  misc_feature (1)..(119): tr|A0A1W5DTY5|A0A1W5DTY5_9GAMM 6-carboxy-5,6,7,8-tetrah ydropterin synthase OS=Serratia proteamaculans OX=28151 GN=ygcM PE=3 SV=1
MATTLFKDFQFEAAHRLPNVAEGHKCGRLHGHSFMVRLEVTGEVDAHTGWVMDFAELKAVFSPIWERLDHNYLNDIPGLENPTSEVLAAWIWQQLKPQLPELTAVMVKETCTAGCVYKG

SEQ ID NO: 25506 - protein, 119 aa, Serratia proteamaculans; identical to SEQ ID NO: 25505
  misc_feature (1)..(119): tr|A8G9X5|A8G9X5_SERP5 6-carboxy-5,6,7,8-tetrahydropter in synthase OS=Serratia proteamaculans (strain 568) OX= 399741 GN=Spro_0809 PE=3 SV=1

SEQ ID NO: 25507 - protein, 119 aa, Serratia quinivorans; identical to SEQ ID NO: 25505
  misc_feature (1)..(119): tr|A0A2X2G923|A0A2X2G923_9GAMM 6-carboxy-5,6,7,8-tetrah ydropterin synthase OS=Serratia quinivorans OX=137545 G N=queD PE=3 SV=1

SEQ ID NO: 25508 - protein, 119 aa, Serratia rubidaea
  misc_feature (1)..(119): tr|A0A2X5BRH2|A0A2X5BRH2_SERRU 6-carboxy-5,6,7,8-tetrah ydropterin synthase OS=Serratia rubidaea OX=61652 GN=qu eD PE=3 SV=1
MATTLFKDFQFEAAHRLPHVPEGHKCGRLHGHSFMVRLEITGEVDPHTGWVMDFAELKAAFKPVWERLDHHYLNDIPGLENPTSEVLAAWIWQQMKPLLPELSAVMVKETCTAGCVYKG

SEQ ID NO: 25509 - protein, 119 aa, Serratia rubidaea
  misc_feature (1)..(119): tr|A0A447QPH3|A0A447QPH3_SERRU 6-carboxy-5,6,7,8-tetrah ydropterin synthase OS=Serratia rubidaea OX=61652 GN=qu eD PE=3 SV=1
MATTLFKDFQFEAAHRLPHVPEGHKCGRLHGHSFMVRLEVTGEVDAHTGWVMDFAELKAVFKPVWERLDHHYLNDIPGLENPTSEVLAAWIWQQLKPQLPELSAVMVKETCTAGCVYKG

SEQ ID NO: 25510 - protein, 119 aa, Serratia sp.; identical to SEQ ID NO: 25496
  misc_feature (1)..(119): tr|A0A1B3F7R1|A0A1B3F7R1_9GAMM 6-carboxy-5,6,7,8-tetrah ydropterin synthase OS=Serratia sp. YD25 OX=1759437 GN= ATE40_000605 PE=3 SV=1

SEQ ID NO: 25511 - protein, 119 aa, Serratia sp.; identical to SEQ ID NO: 25496
  misc_feature (1)..(119): tr|A0A5C7DKC9|A0A5C7DKC9_9GAMM 6-carboxy-5,6,7,8-tetrah ydropterin synthase OS=Serratia sp. S9 OX=2596922 GN=qu eD PE=3 SV=1

SEQ ID NO: 25512 - protein, 119 aa, Serratia symbiotica
  misc_feature (1)..(119): tr|A0A455VRR5|A0A455VRR5_9GAMM 6-carboxy-5,6,7,8-tetrah ydropterin synthase OS=Serratia symbiotica OX=138074 GN =queD PE=3 SV=1
MATTLFKDFQFEAAHRLPHVPEGHKCARLHGHSFMVRLEVTGEVTPHTGWVMDFAELKAVFTPIWERLDHHYLNDIPGLENPTSEVLAAWIWQQLKPQLPELTAVRVKETCTAGCVYKG

SEQ ID NO: 25513 - protein, 120 aa, Serratia symbiotica
  misc_feature (1)..(120): tr|A0A068RC93|A0A068RC93_9GAMM 6-carboxy-5,6,7,8-tetrah ydropterin synthase OS=Serratia symbiotica SCt-VLC OX=1 347341 GN=queD PE=3 SV=1
MMATTLFKDFQFEAAHRLPHVPEGHKCARLHGHSFMVRLEVTGEVNPHTGWVMDFAELKAVFTPIWERLDHHYLNDIPGLENPTSEVLAAGIWQQLKPQLPELTAVRVKETCTAGCVYKG

SEQ ID NO: 25514 - protein, 119 aa, Serratia ureilytica; identical to SEQ ID NO: 25496
  misc_feature (1)..(119): tr|A0A5C7C6L2|A0A5C7C6L2_9GAMM 6-carboxy-5,6,7,8-tetrah ydropterin synthase OS=Serratia ureilytica OX=300181 GN =queD PE=3 SV=1

SEQ ID NO: 25515 - protein, 294 aa, Shewanella algae
  misc_feature (1)..(294): tr|A0A1S2TLM1|A0A1S2TLM1_9GAMM Uncharacterized protein OS=Shewanella algae OX=38313 GN=BFS86_15885 PE=4 SV=1
MQLFVKDLTVVDFSYLCPFRGMVGESWIVDVLLDGGLDEQNMLLDFSKVKRTIKQTIDEVADHRLLVPTACSQVRWQQQGDKVWMDFHSLRGSIHLACPAQAFALIPSEIIDFDSVNQFLHKALTDALPDNVQGISLTLRNEVLETPYYHYSHGLRKHDGNCQRIAHGHRSPVNVFADGIAAPKWDEYWAKRWKDIYLGSEEDVVGVSELELSPQTKIDDKSHIGFRYQAPQGDFQLAMPRDCCDLIPHDTTVELLAHFMADSMAGFEPGKHFKVVAFEGIGKGAIASAQHQGD

SEQ ID NO: 25516 - protein, 294 aa, Shewanella algae
  misc_feature (1)..(294): tr|A0A3G4UNZ8|A0A3G4UNZ8_9GAMM Uncharacterized protein OS=Shewanella algae OX=38313 GN=EEY24_15245 PE=4 SV=1
MQLFVKDLTVVDFSYLCPFRGMVGESWIVDVLLDGGLDEQNMLLDFSKVKRTIKQTIDEVADHRLLVPTACSQVRWQQQGDKVWMDFHSLRGSIHLACPAQAFALIPSEIIDFDSVNQFLHKALTDALPDNVKGISLTLRNEVLETPYYHYSHGLRKHDGNCQRIAHGHRSPVNVFADGIAAPKWDEYWAKRWKDIYLGSEEDVVTVSELELSPQTKIDDKSHIGFRYQAPQGDFQLAMPRDCCDLIPHDTTVELLAHFMADSMAGFEPGKHFKVVAFEGIGKGAIASAQHQGD

SEQ ID NO: 25517 - protein, 294 aa, Shewanella amazonensis
  misc_feature (1)..(294): tr|A1S5W0|A1S5W0_SHEAM Uncharacterized protein OS=Shewa nella amazonensis (strain ATCC BAA-1098 / SB2B) OX=3262 97 GN=Sama_1559 PE=4 SV=1
MQLFVKDLTVLDFSYLCAKRGMVGESWIVDVVLEGGLDSQNMVLDFAKVKRTIKDTIDRVADHRLLIPTASSNVRWQQQGDRVWMDFHSDVGNIHLACPSQAFALIPAEHVDFEAVNAFLRKALREALPDNVDGIHLTLRTESLSGPFYHYSHGLKKHDGNCQRIAHGHRSPVQIFENGESAPDWDAYWAKRWKDIYLGTEEDVVPVAELELSAQCRIDDNSHIGFRYEAPQGDFQLAMPRAICDIIPHDTTVELLADFMAKTLADKVPGSHFKVIAYEGIGKGAIAAAEIASS

SEQ ID NO: 25518 - protein, 293 aa, Shewanella atlantica
  misc_feature (1)..(293): tr|A0A431VSY5|A0A431VSY5_9GAMM Uncharacterized protein OS=Shewanella atlantica OX=271099 GN=EKG39_22015 PE=4 S V=1
MQLFVRDLTVIDFSYLCPIRGMVGESWTVDVLLDGGLDEQNMVLDFSKVKRTIKDTIDDIADHRLLIPTAYSEVRWQQQGDRVWMDFNSLQGDIHLACPQQAFALIPSEIIDFDSVNTFLQKALKEALPDNVDGIALTLRNEIHDAPYYHYSHGLRKHDGNCQRIAHGHRSPVNVFENGMAAPKWDEYWAERWKDIYLGSEEDVVSVGDLTLSPQAKVSDKTHFGFRYQAPQGDFQLAMPKGRCEIIPHDTTVELLAEFMAGTLLEKSPQSEFKVIAYEGIGKGAISVKGNQA

SEQ ID NO: 25519 - protein, 290 aa, Shewanella baltica
  misc_feature (1)..(290): tr|A3D5L2|A3D5L2_SHEB5 Isocitrate dehydrogenase (NADP(+ )) OS=Shewanella baltica (strain OS155 / ATCC BAA-1091) OX=325240 GN=Sbal_2532 PE=4 SV=1
MQLFVKDLTVIDFSYLCPKRGMVGESWIVDVLLEGGLDEQNMVLDFAKVKRTIKQTIDAVADHRLLVPTACSSVRWQQQGDRVWMDFDSQLGEIHLACPSQAFALVPTEQIDIPSVNAFLQKALREALPKNVEGITLTLRHEILDTPYYHYSHGLRKHDGNCQRIAHGHRSPIHVFENGSPAPKWDEYWAKRWHDIYLGSEEDLVSVDTLNLSSQTRITDDSHYGFHYQAPQGDFQLAMPKEGCDLIPHDTTVELLADYIATTLVAKVPGSQFKVVAFEGVGKGAIVSKG

SEQ ID NO: 25520 - protein, 162 aa, Shewanella baltica
  misc_feature (1)..(162): tr|A0A165J034|A0A165J034_9GAMM QueD-like protein OS=She wanella baltica OX=62322 GN=A1L58_04780 PE=4 SV=1
MQIDVPLVNEAQIGTRLNAAIENDRRGEFALLLSLLSVDARDMAQFQWQNELDMAQKLQRQFELPPQQSLMADLSCAEPVVDNSSIFMAQGPRAFQLQQALRPEALVIRGGESVAMAEALSNCDHVTQLRQRGQLSAPKVEIMHFADQLAIQRNLVPLLASA

SEQ ID NO: 25521 - protein, 270 aa, Shewanella benthica
  misc_feature (1)..(270): tr|A9EIA0|A9EIA0_9GAMM Uncharacterized protein OS=Shewa nella benthica KT99 OX=314608 GN=KT99_14214 PE=4 SV=1
MVGESWIVDVLLDGDLDEQNMVLDFAKVKRTIKNTIDEVADHRLLIPTACSEVRWQQQGDKVWMDFSSLQGDIHLACPSQAFALIPCEIIDFDSVNAFLQKALRAVLPDNVEGIALTLRNEIHEAPFYHYSHGLKKHDGNCQRIAHGHRSTINIFENGIAAPKWDEYWAKRWKDIYLGTEEDVVNLSELTLSPQAKVSEETHYGFCYQAPQGEFQLAMPKSRCEIIPHDTTVELLAEFIANTLVEKTPQSEFKVIAYEGVGKGAISVKHI

SEQ ID NO: 25522 - protein, 291 aa, Shewanella benthica
  misc_feature (1)..(291): tr|A0A330M256|A0A330M256_9GAMM Uncharacterized protein OS=Shewanella benthica OX=43661 GN=SHEWBE_2298 PE=4 SV= 1
MQLFVKDLTVIDFSYLCPIRGMVGESWIVDVLLDGDLDEQNMVLDFAKVKRTIKNTIDEVADHRLLIPTACSDVRWQQQGDKVWMDFSSQQGDIHLACPSQAFALIPSEIIDFDSVNAFLQKALRAVLPDNVEGIALTLRNEIHEAPFYHYSHGLKKHDGNCQRIAHGHRSTINIFENGIAAPKWDEYWAKRWKDIYLGTEEDVVNLSELTLSPQAKVSEETHYGFCYQAPQGEFQLAMPKSRCEIIPHDTTVELLAEFIANTLVEKTPQSEFKVIAYEGVGKGAISVKHI

SEQ ID NO: 25523 - protein, 162 aa, Shewanella bicestrii
  misc_feature (1)..(162): tr|A0A220UMM6|A0A220UMM6_9GAMM QueD-like protein OS=She wanella bicestrii OX=2018305 GN=CF168_09950 PE=4 SV=1
MQIDVPLINEAQIGSRLNAAIEHNRRGEFALLLSLLSADARDMAQFQWQKELDNAEKLQRQFELPPKQALVADLSTDNKVTDNSAVFAEQGARAFQLQQALRPEALVIRGGEPIAMAEALSNCDLTTRLRQRGQLPSPKMDVMHFADQLAIQRNLVPLLASA

SEQ ID NO: 25524 - protein, 291 aa, Shewanella bicestrii
  misc_feature (1)..(291): tr|A0A220ULD5|A0A220ULD5_9GAMM Uncharacterized protein OS=Shewanella bicestrii OX=2018305 GN=CF168_08885 PE=4 SV=1
MQLFVKDLTVIDFSYLCPKRGMVGESWIVDVVLEGGLDEQNMVLDFAKVKRTIKQTIDAVADHRLLVPTAYSGVRWQQQGDRVWMDFDSALGEIHLACPSQAFALVPSEQIDIPSVNAFLQKALRETLPDNVEGISLTLRHEILNSPYYHYSHGLRKHDGNCQRIAHGHRSPVQVFENGIPAPKWDEYWAKRWHDIYLGSEEDLVSVKTLNLSPQTRISDDSHYGFHYQAPQGDFQLAMPKECCDLIPHDTTVELLADYMATTLVAKVPSSQFTVIAYEGVGKGAIVSKGN

SEQ ID NO: 25525 - protein, 293 aa, Shewanella canadensis
  misc_feature (1)..(293): tr|A0A431WM00|A0A431WM00_9GAMM Uncharacterized protein OS=Shewanella canadensis OX=271096 GN=EKG38_23860 PE=4 SV=1
MQLFVRDLTVIDFSYLCPIRGMVGESWTVDVLLDGALDEQNMVLDFSKVKRTIKDTIDDIADHRLLIPTAYSDVRWQQQGDRVWMDFNSLQGDIHLACPQQAFALIPSEIIDFDSVNTFLQKALKEALPDNVDGIALTLRNEIHDAPFYHYSHGLRKHDGNCQRIAHGHRSPINVFENGMAAPKWDEYWAERWKDIYLGSEEDVVSVGELTLSPQAKVSDDTHFGFHYQAPQGDFQLAMPKARCEIIPHDTTVELLAEFMASTLVEKSPQSEFKVIAYEGIGKGAISVKGNQA

SEQ ID NO: 25526 - protein, 294 aa, Shewanella chilikensis; identical to SEQ ID NO: 25515
  misc_feature (1)..(294): tr|A0A2V4WAB7|A0A2V4WAB7_9GAMM 6-pyruvoyl tetrahydropte rin synthase-like protein OS=Shewanella chilikensis OX= 558541 GN=C8J23_101221 PE=4 SV=1

SEQ ID NO: 25527 - protein, 296 aa, Shewanella colwelliana
  misc_feature (1)..(296): tr|A0A1E5IT34|A0A1E5IT34_SHECO Uncharacterized protein OS=Shewanella colwelliana OX=23 GN=BEL05_00345 PE=4 SV= 1
MQLFVRDLTVIDFSYLCPIRGMVGESWIVDVLLDGGLDDQNMVLDFAKVKRTIKNTIDDVADHRLLIPTACSEVRWQQQGDRVWMDFKSLSGNIHLACPAQAFALIPTEIIDFDSVNAFLQKALKEVLPDNVNGIALTLRNELHETPFYHYSHGLRKHDGNCQRIAHGHRSPINVFENGVSAPQWDEYWARRWKDIYLGSVEDLVEVDELDLSVQTLVSDDTHYGFHYVSPQGDFQLAMPKKRCEIIPHDTTVELLAEFIANTLVTEVPDSEFKVIAFEGVGKGAISVKGKQTDSE

SEQ ID NO: 25528 - protein, 162 aa, Shewanella decolorationis
  misc_feature (1)..(162): tr|V1DJ46|V1DJ46_9GAMM Qued-like protein OS=Shewanella decolorationis S12 OX=1353536 GN=SHD_2225 PE=4 SV=1
MQIDVPLINEAQIGSRLNAAIEHNRRGEFALLLSLLSADARDMAQFQWQKELDNAEKFQRQFELPPKQALLADLSTDKNVIDNSAVFAEQGARAFQLQQALRPEALVIRGGEPIAMAEALSNCDLTTRLRQRGQLPSPKVDVMHFADQLAIQRNLVPLLASA

SEQ ID NO: 25529 - protein, 291 aa, Shewanella decolorationis
  misc_feature (1)..(291): tr|V1DGS0|V1DGS0_9GAMM Isocitrate dehydrogenase (Nadp(+ )) OS=Shewanella decolorationis S12 OX=1353536 GN=SHD_3 344 PE=4 SV=1
MQLFVKDLTVIDFSYLCPKRGMVGESWIVDVVLEGGLDEQNMVLDFAKVKRTIKQTIDAVADHRLLVPTAYSGVRWQQQGDRVWMDFDSALGEIHLACPSQAFALVPSEQIDIPSVNAFLQKALRETLPDNVEGISLTLRHEILNSPYYHYSHGLRKHDGNCQRIAHGHRSPVQVFENGTPAPKWDEYWAKRWHDIYLGSEEDLVSVKTLNLSPQTRISDDSHYGFHYQAPQGDFQLAMPKECCDLIPHDTTVELLADYMATTLVAKVPSSQFTVIAYEGVGKGAIVSKGN

SEQ ID NO: 25530 - protein, 295 aa, Shewanella denitrificans
  misc_feature (1)..(295): tr|Q12LL7|Q12LL7_SHEDO Uncharacterized protein OS=Shewa nella denitrificans (strain OS217 / ATCC BAA-1090 / DSM 15013) OX=318161 GN=Sden_2379 PE=4 SV=1
MQLFVKDLTVIDFSYLCPIRGMVGESWIVDVMLEGGLDDQNMVLDFAKVKRTIKNTIDDVADHRLLIPTACSEVRWQQQGDRVWMDFSCQKGDIHLACPSQAFALIPTEVIDFDSVNSFLQKALREALPDNVQGINLTLRNEVLDTPYYHYSHGLRKHDGNCQRIAHGHRSPITVFENGVAEPKWDEYWAERWHDIYLGTEEDLVDVTDLELSQQSHANDETHYGFHYIAPQGDFQLAMPKGLCEIIPHDTTVELLAEFMANTLANKVPDSHFKVIAYEGIGKGAIAQKGVQRDA

SEQ ID NO: 25531 - protein, 293 aa, Shewanella fodinae
  misc_feature (1)..(293): tr|A0A4R2FE65|A0A4R2FE65_9GAMM 6-pyruvoyl tetrahydropte rin synthase-like protein OS=Shewanella fodinae OX=5523 57 GN=EDC91_1107 PE=4 SV=1
MQLFVKDLTVIDFSYLCPFRGMVGESWIVDVLLDGGLDQQNMVLDFGKVKRTIKRVIDDVADHRLLVPTACGDLRWQQQSDTVWIDFASRKGSIHLGCPAQAFALLPCELIDFDSVTDFLINALRDALPDNVDNISLTLRNELLDGPFYHYSHGLKKHDGNCQRIAHGHRSPVNVFENGVAAPEWDRYWAERWQDVYLGSEADRVPVDQLTMSPQCRISDDSHYGFRYTAPQGEFQLAMPKGCCDLLPDDTTIELLAQFMADTLAAKVPGRHYRVMAFEGIGKGAIAVAGQLL

SEQ ID NO: 25532 - protein, 165 aa, Shewanella frigidimarina
  misc_feature (1)..(165): tr|A0A106BZ40|A0A106BZ40_SHEFR QueD-like protein OS=She wanella frigidimarina OX=56812 GN=AWJ07_18725 PE=4 SV=1
MQIESTLVNELQIGSRLNVAIENNRRGEFGLLLAMLSIDARDMAQFQLDNDVESTQKLRQRFSVPQPQLLVDDISVHPDTIDNAMIFQQQGARQFQLQQALTPEALVIRGSQPDSMVEVLSNCDYLTKNKAINVYQQHTPLEDMHFLEQLSTQRKISNTLSLQLA

SEQ ID NO: 25533 - protein, 290 aa, Shewanella frigidimarina
  misc_feature (1)..(290): tr|Q083Z0|Q083Z0_SHEFN Uncharacterized protein OS=Shewa nella frigidimarina (strain NCIMB 400) OX=318167 GN=Sfr i_1574 PE=4 SV=1
MQLFVKDLTVIDFSYLCPVRGMVGESWIVDVLLDGGLDEQNMVLDFGKVKRIIKNTIDDVADHRLLIPTACSEVRWQQKGDRVWMDFSSEKGDIHLACPSQAFALIPTEVIDYQSVNDFLKKALREVLPENVQGISLTLRNEVLDTPFYHYSHGLRKHDGNCQRIAHGHRSPVTVFENGIAEPKWDQYWAERWHDIYLGTEEDLVSVKTLELSKQTKISDETHFGFHYVAPQGDFQLAMPKHCCDLIPHDTTVEMLAEYMAKTLASQAPESHFKVIAYEGIGKGAIAVRG

SEQ ID NO: 25534 - protein, 296 aa, Shewanella halifaxensis
  misc_feature (1)..(296): tr|B0TK48|B0TK48_SHEHH Uncharacterized protein OS=Shewa nella halifaxensis (strain HAW-EB4) OX=458817 GN=Shal_2 510 PE=4 SV=1
MQLFVKDLTVIDFSYLCPIRGMVGESWIVDVLLDGDLDEQNMVLDFAKVKRTIKRTIDDVADHRLLIPTACGEARWQQQGDRVWMDFSSQQGDIHLACPSQAFALIPSEIIDFESVNKFLQQALKQTLPANVEGISLTLRNEMHDAPYYHYSHGLKKHDGNCQRIAHGHRSPVTVFENGVAAPKWDEYWAKRWNDIYLATVEDQVVVGSLSLSPQTVVSDETHFGFHYQTPQGDFQLAMPKECCDILPHDTTVELLADYMAQTLSEKVPSSGFKVIAYEGVGKGAIASRTAYNTAD

SEQ ID NO: 25535 - protein, 293 aa, Shewanella hanedai
  misc_feature (1)..(293): tr|A0A553JGR1|A0A553JGR1_SHEHA Uncharacterized protein OS=Shewanella hanedai OX=25 GN=FN961_23455 PE=4 SV=1
MQLFVRDLTVIDFSYLCPIRGMVGESWIVDVLLDGGLDDQNMVLDFSKVKRTIKDTIDNIADHRLLIPTACSEIRWQQQGDTVWMDFNSLKGDIHLACPAQAFALIPSELIDFESVNTFLQKALKAVLPDNVDGIALTLRNELHEAPYYHYTHGLKKHDGNCQRIAHGHRSPINVFENGIAAPKWDEYWAKRWKDIYLGTLEDVVKVDELTLSPQAKVSDDTHFGFHYQAPQGDFQLAMPKSSCEIIPHDTTVELLAEFIAHTLVEMSPGNQFKVIAYEGVGKGAISVKGHQV

SEQ ID NO: 25536 - protein, 290 aa, Shewanella livingstonensis
  misc_feature (1)..(290): tr|A0A3G8LVK6|A0A3G8LVK6_9GAMM Uncharacterized protein OS=Shewanella livingstonensis OX=150120 GN=EGC82_09250 PE=4 SV=1
MQLFVKDLTVIDFSYLCPLRGMVGESWIVDVLLDGGLDEQNMVLDFAKVKRTIKNTIDAVADHRLLIPTACSEVRWQQKGDRVWMDFSSQKGDIHLACPSQAFALIPTEVIDYESVNDFLKKALREVLPENVQGISLTLRSEVLDTPFYHYSHGLRKHDGNCQRIAHGHRSPVTIFENGIAEPKWDHYWAERWHDIYLGTEEDLVSVKTLELSKQTIITDETHFGFHYVAPQGDFQLAMPKHCCDLIPHDTTVELLAEYMAKTLASKEPKSHFKVIAYEGIGKGAIAVRG

SEQ ID NO: 25537 - protein, 165 aa, Shewanella livingstonensis
  misc_feature (1)..(165): tr|A0A3G8LV16|A0A3G8LV16_9GAMM QueD-like protein OS=She wanella livingstonensis OX=150120 GN=EGC82_12155 PE=4 S V=1
MQIESTLVNELQIGSRLNVAIEHNRRGEFGLLLAMLSVDARDMAQFQLENDVDSTQKLRNKFALPQPQLLVDDISVHPNTIDNAIVFQQCGARQFQLQQALTPEALVIRGSQSDAMVEVLSNCDYLTKNKAINAYQQHTPIEDMHFLDQLSTQRKISNTLSLQLA

SEQ ID NO: 25538 - protein, 294 aa, Shewanella loihica
  misc_feature (1)..(294): tr|A3QCZ2|A3QCZ2_SHELP Uncharacterized protein OS=Shewa nella loihica (strain ATCC BAA-1088 / PV-4) OX=323850 G N=Shew_1473 PE=4 SV=1
MQLFVRDLTVIDFSYLCPIRGMVGESWIVDVLLDGGLDDQNMVLDFAKVKRTIKNTIDDVADHRLLIPTACAEVRWQQQGDRVWMDFNSLQGDIHLACPAQAFALIPTEIIDFDSVNAFLQKALKEVLPDNVQGIALTLRNELHETPYYHYSHGLKKHDGNCQRIAHGHRSPINVFENGIAAPKWDEYWARRWKDIYLGSEDDLVEVDELDLSPQTSVSDETHYGFHYVAPQGDFQLAMPKKRCEIIPHDTTVELLADFIATTLASENPESEFKVIAYEGVGKGAIASKGERNV

SEQ ID NO: 25539 - protein, 294 aa, Shewanella mangrovi
  misc_feature (1)..(294): tr|A0A094JKG3|A0A094JKG3_9GAMM 6-pyruvoyl tetrahydropte rin synthase OS=Shewanella mangrovi OX=1515746 GN=HR45_ 03750 PE=4 SV=1
MQLFVKDLTVIDFSYLCPIRGMVGESWIVDVLLEGGLDQQNMVLDFGKVKRLIKQVIDDVADHRLLVPTACSKVRWQQQGERVWMDFDSQRGAIHLACPTEAFALVPAEIIDFETVNDFLFKALRDALPDNVDGISLTLRNEMLDGPFYHYSHGLKKHDGNCQRIAHGHRSPINVFEDGVAAPEWDRYWAERWRDIYLGSEDDLVMLESLQLSPQTKVSEASHYGFHYQAPQGDFQLAMPKACCDLIPHDTTIELLADFMAKTLADKVPGKHFRVVAFEGIGKGSIANAYVERS

SEQ ID NO: 25540 - protein, 293 aa, Shewanella marisflavi
  misc_feature (1)..(293): tr|A0A4Y6J3B1|A0A4Y6J3B1_9GAMM Uncharacterized protein OS=Shewanella marisflavi OX=260364 GN=FGA12_11810 PE=4 SV=1
MQLFVRDLTVIDFSYLCPIRGMVGESWIVDVLLDGGLDEQNMVLDFAKVKHTIKNTIDDVADHRLLIPTACAEVRWQQQGDRVWMDFNSLQGDIHLACPAQAFALIPTEIIDFESVNAFLQKALKEVLPENVQGIALTLRNELHETPYYHYSHGLKKHDGNCQRIAHGHRSPINVFENGIAAPKWDEYWARRWKDIYLGSEEDLVEVDELELSPQTTVSDETHYGFHYVAPQGDFQLAMPKKRCEIIPHDTTVELLADFIATTLATENPESDFKVIAYEGVGKGAIVSKGMKR

SEQ ID NO: 25541 - protein, 290 aa, Shewanella morhuae
  misc_feature (1)..(290): tr|A0A1N6XZE2|A0A1N6XZE2_9GAMM 6-pyruvoyl tetrahydropte rin synthase OS=Shewanella morhuae OX=365591 GN=SAMN054 21840_10892 PE=4 SV=1
MQLFVKDLTVIDFSYLCTKRGMVGESWIVDVLLEGGLDEQNMLLDFAKVKRTIKQTIDMVADHRLLVPTACSNVRWQQQGDRVWMDFDSLLGPMHLACPSQAFALVPSEQIDLSSVNAFLQKALRETLPKNVEGITLTLRHEILDTPYYHYSHGLRKHDGNCQRIAHGHRSPIHIFENGHPALKWDQYWAKRWHDIYLGSEEDLVSVDSLSLSAQTRVCDDTHYGFHYQAPQGDFQLAIPKNCCDLIPHDTTVELLADFIATTLVAKVPTSQFKVVAFEGVGKGAIVTKG

SEQ ID NO: 25542 - protein, 291 aa, Shewanella oneidensis
  misc_feature (1)..(291): tr|A0A2W5E766|A0A2W5E766_SHEOE Uncharacterized protein OS=Shewanella oneidensis OX=70863 GN=DI594_01395 PE=4 S V=1
MQLFVKDLTVIDFSYLCPKRGMVGESWIVDVVLEGGLDEQNMVLDFAKVKRAIKHTIDAVADHRLLVPTACSGVRWQQQGDRVWMDFESALGEIHLACPSQAFALVPSEQIDIPSVNAFLQKALRETLPDNVEGISLTLRHEILNAPYYHYSHGLRKHDGNCQRIAHGHRSPVQVFENGVSAPKWDEYWAKRWHDIYLGSEEDLVSVKTLNLSSQTRISDDSHYGFHYQAPQGDFQLAMPKECCDLIPHDTTVELLADYMATTLATKVPSSQFTVIAYEGVGKGAIVTKGN

SEQ ID NO: 25543 - protein, 291 aa, Shewanella oneidensis
  misc_feature (1)..(291): tr|Q8EF23|Q8EF23_SHEON Queosine biosynthesis protein Qu eD OS=Shewanella oneidensis (strain MR-1) OX=211586 GN= queD PE=4 SV=1
MQLFVKDLTVIDFSYLCPKRGMVGESWIVDVVLEGGLDEQNMVLDFAKVKRTIKHTIDAVADHRLLVPTACSGVRWQQLGDRVWLDFESLQGEIHLACPSQAFALVPSEQIDIPSVSAFLQKALRETLPNNVEGIHLTLRHEVLNSPYYHYSHGLRKHDGNCQRIAHGHRSPVQVFENGVPALKWDEYWAKRWHDIYLGSEEDLVSVKSLTLSPQTQVSDESHYGFYYQAPQGNFQLAMPKECCDLIPHDTTVELLADYMATTLATKVPSSQFTVIAYEGVGKGAIVTKGN

SEQ ID NO: 25544 - protein, 291 aa, Shewanella pealeana
  misc_feature (1)..(291): tr|A8H3F2|A8H3F2_SHEPA Uncharacterized protein OS=Shewa nella pealeana (strain ATCC 700345 / ANG-SQ1) OX=398579 GN=Spea_1766 PE=4 SV=1
MQLFVKDLTVIDFSYLCPIRGMVGESWIVDVLLDGGLDEQNMVLDFAKVKRTIKSTIDNVADHRLLIPTACSEVRWQQQGDRVWMDFNSQQGDIHLACPSEAFALIPSELIDFESVNKFLQQALKQALPANVEGISLTLRNEIHEAPYYHYSHGLKKHDGNCQRIAHGHRSPVTVFENGVAAPKWDEYWAKRWQDIYLATVEDVVSVSSLSLSPQASINDGSHYGFHYQAPQGDFQLAMPKGRCDILPHDTTVELLADYMAQTLFEKVPSSDFKVIAYEGVGKGAIASRNA

SEQ ID NO: 25545 - protein, 293 aa, Shewanella piezotolerans
  misc_feature (1)..(293): tr|B8CNQ0|B8CNQ0_SHEPW Uncharacterized protein OS=Shewa nella piezotolerans (strain WP3 / JCM 13877) OX=225849 GN=swp_2273 PE=4 SV=1
MQLFVKDLTVIDFSYLCPIRGMVGESWIVDVLLDGGLDEQNMVLDFAKVKRTIKNTIDDVADHRLLIPTACSEVRWQQQGDRVWMDFDSQQGSMHLACPSQAFALIPSEIIDFDSVNKFLQKALKEALPANVEGISLTLRNEIHDAPFYHYTHGLKKHDGNCQRIAHGHRSPVTVFENGVAAPKWDEYWAKRWHDIYLGSDEDCVSVQTLTLSPQTQVNDNTHLGFHYQAPQGDFQLAMPKGCCDVLPHDTTVELLADYMAQTLSEKVPSSDFKVIAYEGIGKGAIASRQSRS

SEQ ID NO: 25546 - protein, 293 aa, Shewanella psychrophila
  misc_feature (1)..(293): tr|A0A1S6HJF1|A0A1S6HJF1_9GAMM 6-pyruvoyl tetrahydropte rin synthase OS=Shewanella psychrophila OX=225848 GN=Sp s_00447 PE=4 SV=1
MQLFVRDLTVIDFSYLCPIRGMVGESWIVDVLLDGGLDEQNMVLDFSKVKRTIKNTIDEVADHRLLIPTACSEVRWQQQGDKVFMDFNSLQGDIHLACPAQAFALIPSEIIDFDSVNAFLQKALRAVLPDNVEGIALTLRNEMHEAPFYHYSHGLKKHDGNCQRIAHGHRSPINIFENGISAPKWDEYWAKRWKDIYLGTEEDVVNLSELTLSPQAKVSEDTHYGFCYQAPQGEFQLAMPKTRCEIIPHDTTVELLAEFIANTLVDKLPQSEFKVIAYEGIGKGAISVKGNIN

SEQ ID NO: 25547 - protein, 293 aa, Shewanella putrefaciens
  misc_feature (1)..(293): tr|A4Y7S4|A4Y7S4_SHEPC Uncharacterized protein OS=Shewa nella putrefaciens (strain CN-32 / ATCC BAA-453) OX=319 224 GN=Sputcn32_2286 PE=4 SV=1
MQLFVKELTVIDFSYLCPKRGMVGESWIVDVLLEGGLDEQNMVLDFAKVKRTIKQTIDAVADHRLLVPTACSHVRWQQQGDRVWMDFDSALGEIHLACPSQAFALVPTEQIDIQSVNTFLQKALRESLPANVEAITLTLRHEVLNSPYYHYSHGLRKHDGNCQRIAHGHRSPVNVFENGVPAPKWDEYWAKRWHDIYLGSEEDVVSVNTLNLSPQTRISNRSHYGFHYQAPQGDFQLAMPKECCDLIPHDTTVELLADYMATTLAAKVPTSQFTVVAYEGVGKGAIVTKGVST

SEQ ID NO: 25548 - protein, 291 aa, Shewanella putrefaciens; identical to SEQ ID NO: 25524
  misc_feature (1)..(291): tr|A0A252ER83|A0A252ER83_SHEPU Queuosine biosynthesis p rotein QueD OS=Shewanella putrefaciens OX=24 GN=B7D78_1 6530 PE=4 SV=1

SEQ ID NO: 25549 - protein, 293 aa, Shewanella sediminis
  misc_feature (1)..(293): tr|A8FU99|A8FU99_SHESH Uncharacterized protein OS=Shewa nella sediminis (strain HAW-EB3) OX=425104 GN=Ssed_1811 PE=4 SV=1
MQLFVRDLTVIDFSYLCPIRGMVGESWTVDVLLDGGLDEQNMVLDFSKVKRTIKDTIDDIADHRLLIPTAYSEVRWQQQGDRVWMDFNSLQGDIHLACPQQAFALIPSEIIDFDSVNTFLQKALKEALPDNVDGIALTLRNEIHDAPYYHYSHGLRKHDGNCQRIAHGHRSPVNVFENGMAAPKWDEYWAERWKDIYLGSEEDVVSVGELTLSPQAKVSDKTHFGFHYQAPQGDFQLAMPKTRCEIIPHDTTVELLAEFMASTLVEKSPQSEFKVIAYEGIGKGAISVKGNKA

SEQ ID NO: 25550 - protein, 291 aa, Shewanella sp.
  misc_feature (1)..(291): tr|A0A501XVH0|A0A501XVH0_9GAMM Uncharacterized protein OS=Shewanella sp. LC6 OX=2589790 GN=FJD32_11425 PE=4 SV =1
MQLFVKDLTVIDFSYLCPKRGMVGESWIVDVVLEGGLDEQNMVLDFAKVKRAIKHTIDAVADHRLLVPTAYSGVRWQQQGDRVWMDFDSALGEIHLACPSQAFALVPSEQIDIPSVNAFLQKALRETLPDNVEGISLTLRHEILNAPYYHYSHGLRKHDGNCQRIAHGHRSPVQVFENGVSAPKWNEYWAKRWHDIYLGSEEDLVSVKTLNLSPQTRISDDSHYGFHYQAPQGDFQLAMPKECCDLIPHDTTVELLADYMATTLATKVPSSQFTVIAYEGVGKGAIVTKGN

SEQ ID NO: 25551 - protein, 293 aa, Shewanella sp.
  misc_feature (1)..(293): tr|A0A2G1ZM30|A0A2G1ZM30_9GAMM Uncharacterized protein OS=Shewanella sp. OX=50422 GN=COB74_00280 PE=4 SV=1
MQLFVRDLTVIDFSYLCPIRGMVGESWIVDVLLDGGLDEQNMVLDFSKVKRTIKNTIDEVADHRLLIPTACSDVRWQQKGDKVWMDFSSLQGDIHLACPSQAFALIPSEIIDFDSVNAFLQKALRAVLPENVEGIALTLRNEMHEAPFYHYSHGLKKHDGNCQRIAHGHRSPINIFENGIAAPKWDEYWAKRWKDIYLGTEEDVVNLSELTLSPQAKVSEDTHYGFCYQAPQGEFQLAMPKSRCEIIPHDTTVELLAEFIANTLVEKAPQSEFKVIAYEGVGKGAISVKGNLS

SEQ ID NO: 25552 - protein, 293 aa, Shewanella violacea
  misc_feature (1)..(293): tr|D4ZJ75|D4ZJ75_SHEVD Uncharacterized protein OS=Shewa nella violacea (strain JCM 10179 / CIP 106290 / LMG 191 51 / DSS12) OX=637905 GN=SVI_1753 PE=4 SV=1
MQLFVRDLTVIDFSYLCPIRGMVGESWIVDVLLDGGLDEQNMVLDFSKVKRTIKNTIDEVADHRLLIPTACSEVRWQQQGDKVWMDFSSLQGDIHLACPAQAFALIPSEIIDFDSVNAFLQKALRAVLPDNVEGITLTLRNEMHETPFYHYSHGLKKHDGNCQRIAHGHRSPINIFENGIAAPKWDEYWAKRWKDIYLGTKEDVVNLSSLTLSPQAKVSEDTHYGFCYQAPQGEFQLAMPKSRCEIIPHDTTVELLAEFIANTLIEKTPKSEFKVIAYEGVGKGAISVKGNSI

SEQ ID NO: 25553 - protein, 293 aa, Shewanella woodyi
  misc_feature (1)..(293): tr|B1KJ40|B1KJ40_SHEWM Uncharacterized protein OS=Shewa nella woodyi (strain ATCC 51908 / MS32) OX=392500 GN=Sw oo_2784 PE=4 SV=1
MQLFVRDLTVIDFSYLCPIRGMVGESWIVDVLLDGGLDEQNMVLDFSKVKRTIKDTIDNVADHRLLIPTACSEVRWQQQGDRVWMDFNSLKGDIHLACPEQAFALIPSELIDFESVNTFLQKALKEVLPDNVDGIALTLRNELHETPFYHYSHGLKKHDGNCQRIAHGHRSPINIFENGISAPKWDEYWAERWKDIYLGTVEDVVKIDELTLSPQAKVSDDTHFGFHYQAPQGDFQLAMPKPMCEIIPHDTTVELLAEFVANTLVEKSPHSQFKVIAYEGVGKGAISVKGHQA

SEQ ID NO: 25554 - protein, 291 aa, Shewanella xiamenensis
  misc_feature (1)..(291): tr|A0A073KME7|A0A073KME7_9GAMM Uncharacterized protein OS=Shewanella xiamenensis OX=332186 GN=SXM_1877 PE=4 SV =1
MQLFVKDLTVIDFSYLCPKRGMVGESWIVDVVLEGGLDEQNMVLDFAKVKRAIKHTIDAVADHRLLVPTACSGVRWQQQGDRVWMDFESALGEIHLACPSQAFALVPSEQIDIQSVNAFLQKALRETLPDNVEGISLTLRHEILNAPYYHYSHGLRKHDGNCQRIAHGHRSPVQVFENGVSAPKWDEYWAKRWHDIYLGSEEDLVSVKTLNLSPQTRISDDSHYGFHYQAPQGDFQLAMPKECCDLIPHDTTVELLADYMATTLATKVPSSQFTVIAYEGVGKGAIVTKGN

SEQ ID NO: 25555 - protein, 162 aa, Shewanella xiamenensis
  misc_feature (1)..(162): tr|A0A073KLR9|A0A073KLR9_9GAMM QueD-like protein OS=She wanella xiamenensis OX=332186 GN=ABT47_19445 PE=4 SV=1
MQIDVPLINEAQIGSRLNAAIEHNRRGEFALLLSLLSADARDMAQFQWQKELDTAEKLQRQFELPPKQTLVADLSSDNHIIDNSAVFMQQGARAFQLQQALRPEALVIRGGEPIAIAEALSNCEFTTRLRQRGQLPSPQVEIMHFADQLAIQRNLIPRLASA

SEQ ID NO: 25556 - protein, 121 aa, Shigella boydii; identical to SEQ ID NO: 16827
  misc_feature (1)..(121): tr|A0A1Q8MTJ4|A0A1Q8MTJ4_SHIBO 6-carboxy-5,6,7,8-tetrah ydropterin synthase OS=Shigella boydii OX=621 GN=queD P E=3 SV=1

SEQ ID NO: 25557 - protein, 120 aa, Shigella boydii
  misc_feature (1)..(120): tr|E7SWX0|E7SWX0_9ENTR 6-carboxy-5,6,7,8-tetrahydropter in synthase OS=Shigella boydii ATCC 9905 OX=932676 GN=S GB_01919 PE=3 SV=1
MSTTLFKDFTFEAAHRLPHVPEGHKCGRLHGHSFMVRLEITGEVDPHTGWIIDFAELKAAFKPTYERLDHHYLNDIPGLENPTSEVLAKWIWDQVKPVVPLLSAVMVKETCTAGCIYRGE

SEQ ID NO: 25558 - protein, 121 aa, Shigella dysenteriae; identical to SEQ ID NO: 16827
  misc_feature (1)..(121): tr|A0A2S8DAB0|A0A2S8DAB0_SHIDY 6-carboxy-5,6,7,8-tetrah ydropterin synthase OS=Shigella dysenteriae OX=622 GN=q ueD PE=3 SV=1

SEQ ID NO: 25559 - protein, 149 aa, Shigella dysenteriae
  misc_feature (1)..(149): tr|A0A090NHA1|A0A090NHA1_SHIDY 6-carboxy-5,6,7,8-tetrah ydropterin synthase OS=Shigella dysenteriae WRSd3 OX=14 01327 GN=WRSd3_02219 PE=3 SV=1
MRNKVVLDNAKKQPFRYSTAVLSSCREIMMSTTLFKDFTFEAAHRLPHVPEGHKCGRLHGHSFMVRLEITGEVDPHTGWIIDFAELKAAFKPTYERLDHHYLNDIPGLENPTSEVLAKWIWDQVKPIVPLLSAVMVKETCTAGCIYRGE

SEQ ID NO: 25560 - protein, 121 aa, Shigella flexneri; identical to SEQ ID NO: 16827
  misc_feature (1)..(121): tr|A0A2Y4Y4F4|A0A2Y4Y4F4_SHIFL 6-carboxy-5,6,7,8-tetrah ydropterin synthase OS=Shigella flexneri OX=623 GN=sscR PE=3 SV=1

SEQ ID NO: 25561 - protein, 120 aa, Shigella flexneri
  misc_feature (1)..(120): tr|A0A3Z1W133|A0A3Z1W133_SHIFL 6-carboxytetrahydropteri n synthase QueD (Fragment) OS=Shigella flexneri OX=623 GN=queD PE=4 SV=1
MMSTTLFKDFTFEAAHRLPHVPEGHKCGRLHGHSFMVRLEITGEVDPHTGWIIDFAELKAAFKPTYERLDHHYLNDIPGLENPTSEVLAKWIWDQVKPVVPLLSAVMVKETCTAGCIYRG

SEQ ID NO: 25562 - protein, 121 aa, Shigella sonnei; identical to SEQ ID NO: 16827
  misc_feature (1)..(121): tr|A0A0I5FHQ6|A0A0I5FHQ6_SHISO 6-carboxy-5,6,7,8-tetrah ydropterin synthase OS=Shigella sonnei OX=624 GN=sscR P E=3 SV=1

SEQ ID NO: 25563 - protein, 121 aa, Shigella sonnei
  misc_feature (1)..(121): tr|A0A3Z4LJK8|A0A3Z4LJK8_SHISO 6-carboxy-5,6,7,8-tetrah ydropterin synthase OS=Shigella sonnei OX=624 GN=queD P E=3 SV=1
MMSTTLFKDFTFEAAHRLPHVPEGHKCGRLHGHSFMVRLEITGEVDPHTGWIIDFAELKEAFKPTYERLDHHYLNDIPGLENPTSEVLAKWIWDQVKPVVPLLSAVMVKETCTAGCIYRGE

SEQ ID NO: 25564 - protein, 120 aa, Shigella sp.; identical to SEQ ID NO: 24282
  misc_feature (1)..(120): tr|A0A1D3DKB6|A0A1D3DKB6_9ENTR 6-carboxy-5,6,7,8-tetrah ydropterin synthase OS=Shigella sp. FC1655 OX=1898038 G N=BHE86_13155 PE=3 SV=1

SEQ ID NO: 25565 - protein, 120 aa, Shigella sp.
  misc_feature (1)..(120): tr|A0A1E2VI51|A0A1E2VI51_9ENTR 6-carboxy-5,6,7,8-tetrah ydropterin synthase OS=Shigella sp. FC2928 OX=1886517 G N=BFF50_21425 PE=3 SV=1
MSTTLFKDFTFEAAHRLPHVPEGHKCGRLHGHSFMVRLEITGEVDPHTGWIIDFAELKAAFKPTYDRLDHYYLNDIPGLENPTSEVLAKWIWDQVKPVVPLLSAVMVKETCTAGCIYRGE

SEQ ID NO: 25566 - protein, 117 aa, Shimia marina
  misc_feature (1)..(117): tr|A0A0P1FFX5|A0A0P1FFX5_9RHOB 6-carboxy-5,6,7,8-tetrah ydropterin synthase OS=Shimia marina OX=321267 GN=queD PE=3 SV=1
MFRISKEFHFSASHQLAHLPDDHQCARLHGHNYIVVVELAAAELNADGFVRDYHELKPLKSYIDDHFDHRHLNDLLNVPSTAENLAKHFYDWCKSRWSEVAMVKVSETPKTWAEYRP

SEQ ID NO: 25567 - protein, 142 aa, Shimwellia blattae
  misc_feature (1)..(142): tr|I2B623|I2B623_SHIBC 6-carboxy-5,6,7,8-tetrahydropter in synthase OS=Shimwellia blattae (strain ATCC 29907 / DSM 4481 / JCM 1650 / NBRC 105725 / CDC 9005-74) OX=630 626 GN=queD PE=3 SV=1
MQKSARSCTMRRFFCMTENRKMATTLFKDFTFEAAHRLPHVPEGHKCGRLHGHSFMVRLEITGEVDPYTGWVVDFAELKAAFKPTLDRLDHYYLNEIPGLENPTSEVLAKWIWDRLQPVMPLLSAVMVKETCTAGCIYRGES

SEQ ID NO: 25568 - protein, 118 aa, Shinella sp.
  misc_feature (1)..(118): tr|A0A372NA98|A0A372NA98_9RHIZ 6-carboxy-5,6,7,8-tetrah ydropterin synthase OS=Shinella sp. WSJ-2 OX=2303749 GN =queD PE=3 SV=1
MKITQAFTFEAAHRLPNVPATHKCHRMHGHSYRVELQLDGKVNPDTGFVIDFFDLEKAFGPLLEQLDHHTLNEIEGLENPTAENIATWIWTRVRPLLPELSSVKVFETPMCWAEFDGN

SEQ ID NO: 25569 - protein, 136 aa, Siansivirga zeaxanthinifaciens
  misc_feature (1)..(136): tr|A0A0C5WDS0|A0A0C5WDS0_9FLAO 6-carboxy-5,6,7,8-tetrah ydropterin synthase OS=Siansivirga zeaxanthinifaciens C C-SAMT-1 OX=1454006 GN=AW14_06925 PE=3 SV=1
MKVTVSRKAHFNAAHRLYRPDWSFEKNDLVFGKCNNPNYHGHNYELIVSVKGEIDPETGYVIDMKVLKDIIKDEVEDAFDHKNLNLEVSDFKTLNPTAENISVVIYNKIKPKLSQHLDLEITLFETPRNFVTYSGE

SEQ ID NO: 25570 - protein, 150 aa, Siansivirga zeaxanthinifaciens
  misc_feature (1)..(150): tr|A0A0C5VV94|A0A0C5VV94_9FLAO 6-pyruvoyl tetrahydropte rin synthase OS=Siansivirga zeaxanthinifaciens CC-SAMT- 1 OX=1454006 GN=AW14_04820 PE=4 SV=1
MSFIRITKQFSFETGHALYGYDGKCKNVHGHSYKLSVTVIGKPISDTTNVKFGMVIDFSDLKKIVKEEIVDVFDHATVFNKNTPHVELAKELQERDHNVLLVDYQPTSEMMVIDFAKKIKKRLPEHIALHSLKLQETDTSFAEWYDYDNI

SEQ ID NO: 25571 - protein, 137 aa, Siccationidurans arizonensis
  misc_feature (1)..(137): tr|A0A1I6ARE0|A0A1I6ARE0_9BACT 6-pyruvoyltetrahydropter in/6-carboxytetrahydropterin synthase OS=Siccationidura ns arizonensis OX=1227077 GN=SAMN04515668_3814 PE=4 SV= 1
MIYVSRQEHFNAAHKLHNPKWSDERNREVFGPCANTNWHGHNYDLIVTVKGQPDPETGFVVDLKALSDLLRTHITEQVDHKNLNLDVPFMAGQMASTENLVLAFWQILERELPTITEAKLHCVKLYETPRNFVEYYG

SEQ ID NO: 25572 - protein, 135 aa, Siccationidurans arizonensis
  misc_feature (1)..(135): tr|A0A1I6B0G6|A0A1I6B0G6_9BACT 6-carboxy-5,6,7,8-tetrah ydropterin synthase OS=Siccationidurans arizonensis OX= 1227077 GN=SAMN04515668_4130 PE=3 SV=1
MQVTICRAEHFNAAHRLHNPAWDAEHNQRVFGKCNNPNYHGHNYNLIVRLTGQVDPETGYVYDTKRLSNLIKREVLDRYDHQNLNLDTEEFRTLNPTAENIAVVIWQRLRPHLAAELALSVTLYETDRNFVEYHG

SEQ ID NO: 25573 - protein, 120 aa, Siccibacter turicensis
  misc_feature (1)..(120): tr|A0A2P8VM54|A0A2P8VM54_9ENTR 6-carboxy-5,6,7,8-tetrah ydropterin synthase OS=Siccibacter turicensis OX=357233 GN=queD PE=3 SV=1
MPTTLFKDFTFEAAHHLPNVPEGHKCGRLHGHSFMVRLEITGEVDAHTGWVMDFAELKAAFKPVYNRLDHYYLNEIPGLENPTSEVLAAWIWNEMKPVLPLLSAVMVKETCTAGCVYRGE

SEQ ID NO: 25574 - protein, 133 aa, Siculibacillus lacustris
  misc_feature (1)..(133): tr|A0A4Q9VSW6|A0A4Q9VSW6_9RHIZ 6-carboxytetrahydropteri n synthase OS=Siculibacillus lacustris OX=1549641 GN=EY W49_07595 PE=4 SV=1
MYCVEVRDRIMIAHSLPDPFFGPAQGLHGATYVVDVAFYRETLTSKNVVVDIGAALDVLGATLKPLAYQNLDALPVFAGQLTTTEFLARHVFDALAAAARAGALGEDGRGLSKIRVTLHETDLARASYEASPT

SEQ ID NO: 25575 - protein, 146 aa, Sideroxydans lithotrophicus
  misc_feature (1)..(146): tr|D5CUR5|D5CUR5_SIDLE 6-carboxy-5,6,7,8-tetrahydropter in synthase OS=Sideroxydans lithotrophicus (strain ES-1 ) OX=580332 GN=Slit_2224 PE=3 SV=1
MQITRRLEFDAGHRIPNHNSQCKHLHGHRYAIEITLSGDIITTEGVSEQGMVMDFSDVKRIAKEQVVDKWDHAFLVYRNDKVVLDFLDTLPEHKTVVMDVIPTAENLARVAFDLLRGAYHDTYGNHLRLERVRLFETPNNWADHTR

SEQ ID NO: 25576 - protein, 117 aa, Silicibacter sp.
  misc_feature (1)..(117): tr|C9D359|C9D359_9RHOB 6-carboxy-5,6,7,8-tetrahydropter in synthase OS=Silicibacter sp. TrichCH4B OX=644076 GN= queD PE=3 SV=1
MFRIRKEFHFSASHQLSHLPDDHQCARLHGHNYIVVVELAAETLNPEGFVRDYHDLKPLKTYIDDTFDHRHLNDVLEGPSTAENMAKHFHDWCAARWPETRAVLVSETPKTWAEYRP

SEQ ID NO: 25577 - protein, 310 aa, Silvanigrella aquatica
  misc_feature (1)..(310): tr|A0A1L4CXY6|A0A1L4CXY6_9PROT Uncharacterized protein OS=Silvanigrella aquatica OX=1915309 GN=AXG55_02245 PE= 4 SV=1
MQTHSLSTTKIFIQDVTLLDCAILYPSFGPKGKSWYVDVIWEGNKDKNGVLFDFSLAKKSAKSTIDHEYDHKLLVKPSLIRFQSNSQIIVIGNYKNSDNNLLFAINTYNNSIKRISRETLIALDNDDVTLLEKEIAQSILRNSPENVTNISVKLREHEHKLKPNYYSYTHSLCYHYGNCQRFHGHSSVIEVFKKGKFDLRKSSYAAKKLDNAYIISQNYVVKDWNTKLIQELIDHCPEITDLKEHHIAAQYKGTQGEVAVIIPKDHVFTLEQESTVENLAEFIRAQFPPDEKDIEIRAYEGLSKGSICNI

SEQ ID NO: 25578 - protein, 140 aa, Silvanigrella aquatica
  misc_feature (1)..(140): tr|A0A1L4D1M1|A0A1L4D1M1_9PROT 6-carboxy-5,6,7,8-tetrah ydropterin synthase OS=Silvanigrella aquatica OX=191530 9 GN=AXG55_09360 PE=3 SV=1
MLILKGLFSFCASHRLYNPTFSDDKNKLIFGKCAGKNGHGHNFKMEVEITGNVDPETGMVFNLTTLKELVNQNIIEDVDHKHLNFDVPWLEGKIPTTEVFVEAVWERLEKLIQKIDNKNVKLHSVTIWETETHAVQKTRD

SEQ ID NO: 25579 - protein, 140 aa, Silvanigrellales bacterium
  misc_feature (1)..(140): tr|A0A4V0P2K1|A0A4V0P2K1_9PROT 6-carboxytetrahydropteri n synthase OS=Silvanigrellales bacterium RF1110005 OX=2 493639 GN=JCM31447_19510 PE=4 SV=1
MLILKHNFSFCASHRLFNPTFSDDKNKEIYGKCAGKNGHGHNYKLEVAITGQVDPETSMLFNLQDLSDIVYENIINDVDHKHLNFDVLWLEGKIPTIEIFIEEIWKRLDKSIVSKQKNKLELYSVTLWETETNFATRLRN

SEQ ID NO: 25580 - protein, 308 aa, Silvanigrellales bacterium
  misc_feature (1)..(308): tr|A0A4P2VGI4|A0A4P2VGI4_9PROT 6-pyruvoyltetrahydropter in synthase OS=Silvanigrellales bacterium RF1110005 OX= 2493639 GN=JCM31447_04150 PE=4 SV=1
MQIKNRNLTKIFIQNVTLLDCALFIPEKGPKGKSWYVDIVWEGEKDATGVLFDFSLAKKSAKSTIDHEFDHKLLVTASHIRFQSNSQIIVIGNNKSDTKESLFAINTYNNSVKKIARETLKALESDDVSELEKEIANAILRNSPSNVKNVKVTLREDEKKKKENYFNYTHSLCHHYGNCQRFHGHSNIIEIFHKGKFDLARSAKAAKKLNNSYIISRNYLAEKWDSRLITELVEHCPEISDFKSELIAAQYKGTQGEVAVIMPKINTLALDCESTVENLAEYIRNQFVDDTDIEVRAYEGLAKGSICI

SEQ ID NO: 25581 - protein, 281 aa, Simiduia agarivorans
  misc_feature (1)..(281): tr|K4KEB8|K4KEB8_SIMAS Uncharacterized protein OS=Simid uia agarivorans (strain DSM 21679 / JCM 13881 / BCRC 17 597 / SA1) OX=1117647 GN=M5M_00050 PE=4 SV=1
MLLFVDQLTNADFSYLHPERGLLGETWLASIQLEGQLDDQSMVCDFGRVKKQVRTFLDDRIDHCLLVPTRSPNLTWAEQDGQIKLEWRFGDTQLRCRSPKSAIALIDADQITPSTVAHWCEQQLRHAFGDGVARLTMAFEEEAISGAFYHYSHGLKKHDGNCQRIAHGHRSRIQIWRNGVKDSGLEQYWADLWKDIYIGTRDDIIGQPDPLIDFRYQAQQGDFFLSMPAKHCYLVDSDTTVECLAEHIASSLAEQNPGDSIRVQAYEGVNKGAIVQKKAGA

SEQ ID NO: 25582 - protein, 166 aa, Simiduia agarivorans
  misc_feature (1)..(166): tr|R9S518|R9S518_SIMAS 6-pyruvoyl tetrahydrobiopterin s ynthase OS=Simiduia agarivorans (strain DSM 21679 / JCM 13881 / BCRC 17597 / SA1) OX=1117647 GN=M5M_01823 PE=4 SV=1
MSSLITIEVNKEDMKFSAAHFTIFSATERERLHGHNFRVSMSISSPANRNGLAFSYKILKDKMRALCDELDEYTLLPAQSQYLALKHEGDAIVAHFNGETLWFAKSDCKLLPIPNTTVEAFATYLLDRFLHDDDFVSRYDIAQVEMKVSSGPGQWGSCIWREASDI

SEQ ID NO: 25583 - protein, 139 aa, Simonsiella muelleri
  misc_feature (1)..(139): tr|V9HDV6|V9HDV6_9NEIS 6-carboxy-5,6,7,8-tetrahydropter in synthase OS=Simonsiella muelleri ATCC 29453 OX=64114 7 GN=HMPREF9021_00197 PE=3 SV=1
MFKTAKEFTFDMAHMLDGHDGKCQNLHGHTYILQVEISGSLKESGAKKGMVMDFSDLKNIVKTHILDKMDHAFIYDTSSQRETQVADLLNQLNSKTYGINTRSTAEEMARHIFQILQEHIPISLVRLWETPSSYCEYSE

SEQ ID NO: 25584 - protein, 126 aa, Simplicispira metamorpha
  misc_feature (1)..(126): tr|A0A4R2NFA7|A0A4R2NFA7_9BURK 6-carboxy-5,6,7,8-tetrah ydropterin synthase OS=Simplicispira metamorpha OX=8088 1 GN=EV674_10388 PE=3 SV=1
MTVPASPVMCVSQRFFFDAAHTLQRQIEAEGSRRIHGHTYHAEVTLRGPLDPATGMVIDLGYLRLRLQSVREQLDHHLLDEVPGLAPPTLENLCLFIARALADMQPAPWRVRVWREALGDSCTLEW

SEQ ID NO: 25585 - protein, 147 aa, Simplicispira sp.
  misc_feature (1)..(147): tr|A0A398CEE9|A0A398CEE9_9BURK 6-carboxytetrahydropteri n synthase QueD OS=Simplicispira sp. NY-02 OX=2315688 G N=queD PE=4 SV=1
MLTITRKMEFDAGHRIPDHNSQCRNLHGHRYTLLITLTGDVVQKDGASDNGMVMDFGDIKALAKAHLVDLWDHAFIVHEKDTAVRAFLDSMPGHKTVVIDRVPTVENLAQAAFDILKDVYHDRFGRHLSLTKVTLYETPNCWAEVDG

SEQ ID NO: 25586 - protein, 135 aa, Singulisphaera acidiphila
  misc_feature (1)..(135): tr|L0DL64|L0DL64_SINAD 6-pyruvoyl-tetrahydropterin synt hase OS=Singulisphaera acidiphila (strain ATCC BAA-1392 / DSM 18658 / VKM B-2454 / MOB10) OX=886293 GN=Sinac_5 864 PE=4 SV=1
MYRVTREIAFCYGHRLLNYEGKCKHLHGHNGRAVIVLEAQSLDARGMLVDFVEIKQKVQRWIDENLDHNMLLCRDDPILPVLVEQGERVFVMDANPTAENIARLIFERTADEGLPVVEVILWETEKCYAAYSSPA

SEQ ID NO: 25587 - protein, 163 aa, Singulisphaera acidiphila
  misc_feature (1)..(163): tr|L0D8Q8|L0D8Q8_SINAD 6-pyruvoyl-tetrahydropterin synt hase OS=Singulisphaera acidiphila (strain ATCC BAA-1392 / DSM 18658 / VKM B-2454 / MOB10) OX=886293 GN=Sinac_1 233 PE=4 SV=1
MSDSRYKVRVSKDYLVFCSGHFITYLGDQCERIHGHNYRVAVEVEDDLDQNHYVFDFIALKDLTHAITDELDHRMLLPTESTQILLEDDGPNWRVRYQDRYWSFPRNECALLPIANTTAELLANYIAGRLREALTSRGLALPRVMRVEVEESFGQSAEVEWRK

SEQ ID NO: 25588 - protein, 163 aa, Singulisphaera sp.
  misc_feature (1)..(163): tr|A0A1N6LB03|A0A1N6LB03_9BACT 6-pyruvoyltetrahydropter in/6-carboxytetrahydropterin synthase OS=Singulisphaera sp. GP187 OX=1882752 GN=SAMN05444166_7916 PE=4 SV=1
MSDSRYKVRVSKDYLVFCSGHFITYLGDQCERIHGHNYRVAVEVEDDLDQNHYVFDFIALKDLTRAITDELDHRMLLPTESTQILLEDEGPNWRVRYQDRYWSFPRNECALLPIANTTAELLANYIAGRLRDALTARGLDLPRIMRVEVEESFGQSAEVEWQR

SEQ ID NO: 25589 - protein, 135 aa, Singulisphaera sp.
  misc_feature (1)..(135): tr|A0A1N6FB25|A0A1N6FB25_9BACT 6-carboxy-5,6,7,8-tetrah ydropterin synthase OS=Singulisphaera sp. GP187 OX=1882 752 GN=SAMN05444166_1637 PE=3 SV=1
MYRVTREIAFCYGHRLLNYEGKCKHLHGHNGRAVIVLEANALDSRGMLVDFVEIKQKVQRWIDENLDHNMLLCRDDPILPVLIEQGERVFVMDANPTAENIARLIFERTADEGLPVVEVILWETEKCYAAYSASG

SEQ ID NO: 25590 - protein, 280 aa, Sinimarinibacterium flocculans
  misc_feature (1)..(280): tr|A0A318E4T8|A0A318E4T8_9GAMM 6-pyruvoyl tetrahydropte rin synthase-like protein OS=Sinimarinibacterium floccu lans OX=985250 GN=C8D93_108142 PE=4 SV=1
MTTLFVEQLTVIDCAYLDVARGLVGESWIVDVELEGALDEQSMVLDFGEVKRRLKRAVDTHADHRLLVPGRAPEAQWIEDGDAAHLLFRSDIGAIEHRSPGAAVLRIDTDEITPEAVATDLLPRLRAVLPSSVGGVRLGLRSERIDGAYYHYVHGLKKHDGACQRIAHGHRSRIEIRVDGRRDTALEHGVASRWLDIYLGTRADIVAHGSGRVRFAYTSREGHYQLAMPETHVDLLDDDSTVECIAGHLARGLAPQHPGREIQVRAYEGVMKGAVATARA

SEQ ID NO: 25591 - protein, 140 aa, Sinimarinibacterium flocculans
  misc_feature (1)..(140): tr|A0A318E1C7|A0A318E1C7_9GAMM 6-pyruvoyltetrahydropter in/6-carboxytetrahydropterin synthase OS=Sinimarinibact erium flocculans OX=985250 GN=C8D93_11390 PE=4 SV=1
MTTEAPQICLTRRETFAAAHRLWSDALTEAENRALFGKCAYDHGHGHNYVIEVTLRGPIDARTGILVNVTELRDTIRRLILDDVDHRHLNHDSKLCRGINPTVENLTVLFFKVLRAHYGELLYEVCLHETEKNWARYRGE

SEQ ID NO: 25592 - protein, 280 aa, Sinimarinibacterium sp.
  misc_feature (1)..(280): tr|A0A4U0GDY5|A0A4U0GDY5_9GAMM Uncharacterized protein OS=Sinimarinibacterium sp. CAU 1509 OX=2562283 GN=E4T66 _18750 PE=4 SV=1
MSRLFVEQLTVIDCAFLDAARGLVGESWIVDIELDGDLDDQSMVLDFGEVKKRCKQLIDQSVDHSLLVPAQATELMVQNGDDSLHLLFRSDLGAIEHISPAASVTLIDTDEIDAEAVCAHLRPLLHAQLPESVRAVNLQLRTEVIPGAYYHYAHGLKKHAGACQRIAHGHRSKIEIRVDGERDAALEMRVASGWLDVYLGSREDLVARGNGRMRFAYTAPQGHYQLALPESHVDLFDGDTTVERIAEHLARLLAPLRPGRTVQVRAYEGVMKGAVAEQRG

SEQ ID NO: 25593 - protein, 149 aa, Sinimarinibacterium sp.
  misc_feature (1)..(149): tr|A0A4U0H051|A0A4U0H051_9GAMM 6-carboxytetrahydropteri n synthase OS=Sinimarinibacterium sp. CAU 1509 OX=25622 83 GN=E4T66_01335 PE=4 SV=1
MTTDTRPVVYLTRRETFCAAHRLWSDQLSDAENHALFGHCAREFGHGHNYVLEVTVRGAIDPKTGVVVNVTQIRDATRDLLLDDVDHRHLNHDSVLCRGLNPTVENLAVLFWTVLKEHFGELLYEIKLHETEKNWVVYRGETTTWGHDG

SEQ ID NO: 25594 - protein, 147 aa, Sinobaca qinghaiensis
  misc_feature (1)..(147): tr|A0A419V6S1|A0A419V6S1_9BACL PreQ(0) biosynthesis pro tein QueD OS=Sinobaca qinghaiensis OX=342944 GN=ATL39_1 339 PE=4 SV=1
MLHQFYPQVPHEYRYELNKDMHLAAAHFIPSEAAGKCQDIHGHTYVINITVAGDQLDSSGFLIDFKILKSLIHRPFDHTLLNDHELFSNEEDSWSFPTTEVIAGKFWKLIQSELNELAHQPKCVQLLVRETPTSYVVFRPKKEDFAI

SEQ ID NO: 25595 - protein, 141 aa, Sinobacteraceae bacterium
  misc_feature (1)..(141): tr|A0A2T5MCN8|A0A2T5MCN8_9GAMM 6-pyruvoyl tetrahydrobio pterin synthase OS=Sinobacteraceae bacterium GT1R17 OX= 2029166 GN=CJD38_15445 PE=4 SV=1
MTTKKAPLVYLTRRETFSAAHRLWADDLSEQENRDLFGPCAYDHGHGHNYVLEVTLRGPIDPKTGILINLKEIRDVVHELIVGDVDHRHLNHDAPLTRGINPTAENLVVLFWTVLHKHFNEMLYEVRLRETEKNWVTYYGE

SEQ ID NO: 25596 - protein, 281 aa, Sinobacteraceae bacterium
  misc_feature (1)..(281): tr|A0A522K1A7|A0A522K1A7_9GAMM Uncharacterized protein OS=Sinobacteraceae bacterium OX=1969813 GN=EPN60_18035 PE=4 SV=1
MTTLFVEQLTVIDASYLCPRRGLVGESWIVDLELDGTLDEQAMVLDFGSVKKQLKRAIDDGPDHTLIVPLHYPGQQTTTLADGRLQTLFMSQAGGYAHRAPACALTLLEAPEVSAEALVAHLTPQLAGIVPANVASIRLSLRHEHIDGASYHYSHGLSKHRGACQRIAHGHRSRLAIFLDGVRDAGLEAAWAERFRDIYLLTGRHVQRDDGERLCLAYTAPEGLFELELPRRRSYLLGQDTDSTVEEIAEHLAGRVAAEHPGRRVEVRAYEGVMKGALARR

SEQ ID NO: 25597 - protein, 118 aa, Sinobacterium caligoides
  misc_feature (1)..(118): tr|A0A3N2DND1|A0A3N2DND1_9GAMM 6-carboxy-5,6,7,8-tetrah ydropterin synthase OS=Sinobacterium caligoides OX=9339 26 GN=EDC56_1752 PE=3 SV=1
MEIYKDFIFEAAHLLPNVPAGHKCGRLHGHSFHVRLYISGEIGEKSGWIMDFGDIKGIFKPIYDRLDHYYLNDIPGLENPTSEVLAKWIWQQLKPELPQLSCIEIKETCTSGCIYRGE

SEQ ID NO: 25598 - protein, 152 aa, Sinomicrobium oceani
  misc_feature (1)..(152): tr|A0A1K1N4X7|A0A1K1N4X7_9FLAO 6-pyruvoyltetrahydropter in/6-carboxytetrahydropterin synthase OS=Sinomicrobium oceani OX=1150368 GN=SAMN02927921_01011 PE=4 SV=1
MSNIRLTKMFGFETGHALYGYDGKCKNVHGHSYKLAVTVIGKPITDRSNVKYGMVIDFGDLKKIVREEIVDKFDHATVFNKNTPHAELAGDLKRHGHNVLLVDYQPTSENMVIDFAAKIKPRLPENVVLHSLKLHETETSYAEWYAEDNPVS

SEQ ID NO: 25599 - protein, 136 aa, Sinomicrobium oceani
  misc_feature (1)..(136): tr|A0A1K1PN93|A0A1K1PN93_9FLAO 6-carboxy-5,6,7,8-tetrah ydropterin synthase OS=Sinomicrobium oceani OX=1150368 GN=SAMN02927921_01871 PE=3 SV=1
MRVKVSRKAHFNAAHKLHNPKWNEQKNAEVYGKCSSPNYHGHNYELIVSVTGEIDPETGFVMDIKNLKDLIAVEIEDAFDHKNLNLDVPEFRELNPTAEHIAVVIWNKLRKSVKPELDLEVVLYETPRNFVTYTGI

SEQ ID NO: 25600 - protein, 150 aa, Sinomicrobium pectinilyticum
  misc_feature (1)..(150): tr|A0A3N0F0E8|A0A3N0F0E8_9FLAO 6-carboxytetrahydropteri n synthase OS=Sinomicrobium pectinilyticum OX=1084421 G N=ED312_02090 PE=4 SV=1
MSNIRLTKLFGFETGHALYGYDGKCKNVHGHSYKLAVTVIGKPITDPSHVKCGMVIDFGDLKKIVKEEIVDKFDHATVFNKNTPHAELAEELKKHGHNVLLVDYQPTSENMVIDFSEKIKARLPEDVVLHSLKLHETETSYAEWYAEDNR

SEQ ID NO: 25601 - protein, 136 aa, Sinomicrobium pectinilyticum
  misc_feature (1)..(136): tr|A0A3N0F4I3|A0A3N0F4I3_9FLAO 6-carboxy-5,6,7,8-tetrah ydropterin synthase OS=Sinomicrobium pectinilyticum OX= 1084421 GN=ED312_00045 PE=3 SV=1
MRVKVSRKAHFNAAHKLHNPKWSNEKNEEVYGKCSSPNYHGHNYELIVSVTGEVDPETGFVMDIKDLKDLIAVEIEDVFDHKNLNLDIPDFEELNPTAEHIAVVIWNKLRKFIKPDLDLEVVLYETPRNFVTYTGT

SEQ ID NO: 25602 - protein, 149 aa, Sinomicrobium sp.
  misc_feature (1)..(149): tr|A0A329MU94|A0A329MU94_9FLAO 6-carboxy-5,6,7,8-tetrah ydropterin synthase OS=Sinomicrobium sp. N-1-3-6 OX=221 9864 GN=DN748_17915 PE=3 SV=1
MSNIRLTKLFGFETGHALYGYDGKCKNVHGHSYKLAVTVTGTPITDTSDVKYGMVIDFGDLKKIVKEEIVDRFDHATVFNKNTPHAQLAEELIRHGHHVLLVDYQPTSENMVIDFAKKIGPRLPEGVALHSLKLHETETSYAEWYASDQ

SEQ ID NO: 25603 - protein, 136 aa, Sinomicrobium sp.
  misc_feature (1)..(136): tr|A0A329N132|A0A329N132_9FLAO 6-carboxy-5,6,7,8-tetrah ydropterin synthase OS=Sinomicrobium sp. N-1-3-6 OX=221 9864 GN=DN748_05535 PE=3 SV=1
MRVKVSRKAHFNAAHKLYNRNWTSEKNEEVFGKCSSPNYHGHNYELIVSVTGEIDPETGFVMDIKILKDLIADKIEALFDHKNLNLDVPDFKGLNPTAENIAVVIWNKLRPFIKKEHDLEVTLYETARNFVTYSGT

SEQ ID NO: 25604 - protein, 132 aa, Sinomonas atrocyanea
  misc_feature (1)..(132): tr|A0A126ZUS2|A0A126ZUS2_9MICC 6-pyruvoyl tetrahydrobio pterin synthase OS=Sinomonas atrocyanea OX=37927 GN=SA2 016_0197 PE=4 SV=1
MFSLTVRDHVMIAHSLPRPAFGPAQGLHGATFVVELTVRAEALDANSTVMDIGEASELLSSILDGLRYRNLDEHPDFTGRLTTTEMLAQHIAVGAAEDLRRLGHLTAVEVTLRENPDAWASCTVDLASDRAR

SEQ ID NO: 25605 - protein, 145 aa, Sinomonas humi
  misc_feature (1)..(145): tr|A0A0B2AH65|A0A0B2AH65_9MICC 6-pyruvoyl tetrahydrobio pterin synthase OS=Sinomonas humi OX=1338436 GN=LK10_12 085 PE=4 SV=1
MYSLTVRDHVMIAHSLPRAAFGPAQGLHGATFVVELTVRARELDENATVMDIGALSGVLGEALEGLRYQNLDEHPAFEGKLSTTEAVARHLAEDVAGRLTGAGAGGAGAGAGGTAAGGTADRLVGLSVVLREHPDAWAGYSLDLP

SEQ ID NO: 25606 - protein, 134 aa, Sinomonas sp.
  misc_feature (1)..(134): tr|A0A221RBD1|A0A221RBD1_9MICC 6-pyruvoyl tetrahydrobio pterin synthase OS=Sinomonas sp. R1AF57 OX=2020377 GN=C GQ25_17540 PE=4 SV=1
MFSLTVRDHAMIAHSLPRPAFGPAQGLHGATFVVELTVRADALDANSTVMDIGEASQLLGAILDGIRYRNLDEHPDFAGRLTTTEVLAQHVAVAAAENLRHLDHLSAVEVTLRENPDAWASCTMDLARGRGTGA

SEQ ID NO: 25607 - protein, 85 aa, Sinorhizobium americanum
  misc_feature (1)..(85): tr|A0A1L3LA75|A0A1L3LA75_9RHIZ 6-carboxy-5,6,7,8-tetrah ydropterin synthase OS=Sinorhizobium americanum CCGM7 O X=1408224 GN=queD PE=4 SV=1
MEVQLSGKVDPHTGFVIDFFDVEHAFKPLLEQLDHHTLNDIDGLENPTAENIAIWIWERAKPLLMQLSSVKVFETPFCWAEYDGD

SEQ ID NO: 25608 - protein, 118 aa, Sinorhizobium americanum
  misc_feature (1)..(118): tr|A0A1L3LY19|A0A1L3LY19_9RHIZ 6-carboxy-5,6,7,8-tetrah ydropterin synthase OS=Sinorhizobium americanum OX=1949 63 GN=SAMCFNEI73_pC1243 PE=3 SV=1
MFRITKEFHFSASHQLTSLPPEHQCARLHGHNYVVEVELSAEMLNEHGFVRDYHELAPLKHYIDEAFDHRHLNDVLGHDRVTAECLAQHFYEWCKARLPETSAVRVSETAKTWAEYRP

SEQ ID NO: 25609 - protein, 118 aa, Sinorhizobium fredii
  misc_feature (1)..(118): tr|I3WZI4|I3WZI4_RHIFR 6-carboxy-5,6,7,8-tetrahydropter in synthase OS=Sinorhizobium fredii USDA 257 OX=1185652 GN=queD PE=3 SV=1
MKITQAFTFEAAHRLPHVPATHKCHRMHGHSYRVELQLDGRVNPDTGFVIDFFDVEKVFGPLLGQLDHHTLNDIAGLENPTAENIAAWIWERVKPLLGELSSVRVFETPSCWAEYDGN

SEQ ID NO: 25610 - protein, 118 aa, Sinorhizobium fredii
  misc_feature (1)..(118): tr|Q6W2G4|Q6W2G4_SINFN 6-carboxy-5,6,7,8-tetrahydropter in synthase OS=Sinorhizobium fredii (strain NBRC 101917 / NGR234) OX=394 GN=NGR_b18170 PE=3 SV=1
MFRITKEFHFSASHQLTSLPPEHQCARLHGHNYVVEVELSAETLNEHGFVRDYHELAPLKQYIDESFDHRHLNDVLGHDRVTAECLAQHFYVWCQARLPETSAVRVSETAKTWAEYRP

SEQ ID NO: 25611 - protein, 118 aa, Sinorhizobium medicae
  misc_feature (1)..(118): tr|A0A508X403|A0A508X403_9RHIZ 6-carboxy-5,6,7,8-tetrah ydropterin synthase OS=Sinorhizobium medicae OX=110321 GN=queD PE=3 SV=1
MFRITKEFHFSASHQLKSLPPEHQCARLHGHNYIVEVELSGETLNEHGFVRDYHELAPLKTYIDETFDHRHLNDVLGHDRVTAECLARHFYEWCKARLPETTAVRVSETAKTWAEYRP

SEQ ID NO: 25612 - protein, 118 aa, Sinorhizobium medicae
  misc_feature (1)..(118): tr|A6UJ90|A6UJ90_SINMW 6-carboxy-5,6,7,8-tetrahydropter in synthase OS=Sinorhizobium medicae (strain WSM419) OX =366394 GN=Smed_4938 PE=3 SV=1
MFRITKEFHFSASHQLKNLPPEHQCARLHGHNYIVEVELSGETLNEHGFVRDYHELAPLKTYIDEAFDHRHLNDVLGHDRVTAECLARHFYEWCKARLFETTAVRVSETAKTWAEYRP

SEQ ID NO: 25613 - protein, 118 aa, Sinorhizobium meliloti
  misc_feature (1)..(118): tr|H0FYF7|H0FYF7_RHIML 6-carboxy-5,6,7,8-tetrahydropter in synthase OS=Sinorhizobium meliloti CCNWSX0020 OX=110 7881 GN=SM0020_11205 PE=3 SV=1
MFRITKEFHFSASHQLKSLPAEHQCARLHGHNYIVEVELSGETLNEHGFVRDYHELAPLKQYIDECFDHRHLNDVLGHDRVTAECLAQHFYEWCQARLPETTAVRVSETAKTWAEYRP

SEQ ID NO: 25614 - protein, 118 aa, Sinorhizobium meliloti; identical to SEQ ID NO: 25613
  misc_feature (1)..(118): tr|A0A0E0UN73|A0A0E0UN73_SINMB 6-carboxy-5,6,7,8-tetrah ydropterin synthase OS=Sinorhizobium meliloti (strain B L225C) OX=698936 GN=SinmeB_3607 PE=3 SV=1

SEQ ID NO: 25615 - protein, 118 aa, Sinorhizobium saheli
  misc_feature (1)..(118): tr|A0A178YIP8|A0A178YIP8_SINSA 6-carboxy-5,6,7,8-tetrah ydropterin synthase OS=Sinorhizobium saheli OX=36856 GN =ATB98_22040 PE=3 SV=1
MFRITKEFHFSASHQLKSLPPEHQCARLHGHNYVVEVELSAETLNEHGFVRDYHELAPLKHYIDETFDHRHLNEVLGHDRVTAECLARHFYEWCKARLPETTAVRVSETAKTWAEYRP

SEQ ID NO: 25616 - protein, 118 aa, Sinorhizobium sp.
  misc_feature (1)..(118): tr|A0A249P1F5|A0A249P1F5_9RHIZ 6-carboxy-5,6,7,8-tetrah ydropterin synthase OS=Sinorhizobium sp. CCBAU 05631 OX =794846 GN=SS05631_b55630 PE=3 SV=1
MFRITKEFHFSASHQLTSLPPEHQCARLHGHNYVVEVELSAETLNEHGFVRDYHELAPLKHYIDEAFDHRHLNDVLGHDRVTAECLAQHFYEWCKARLPETTAVRVSETEKTWAEYRP

SEQ ID NO: 25617 - protein, 118 aa, Sinorhizobium sp.; identical to SEQ ID NO: 24852
  misc_feature (1)..(118): tr|A0A2A6MEM3|A0A2A6MEM3_9RHIZ 6-carboxy-5,6,7,8-tetrah ydropterin synthase OS=Sinorhizobium sp. NG07B OX=15381 74 GN=queD PE=3 SV=1

SEQ ID NO: 25618 - protein, 161 aa, Sinosporangium album
  misc_feature (1)..(161): tr|A0A1G8EJW0|A0A1G8EJW0_9ACTN 6-pyruvoyltetrahydropter in/6-carboxytetrahydropterin synthase OS=Sinosporangium album OX=504805 GN=SAMN05421505_120127 PE=4 SV=1
MYQAHLTHTFHAAHRLPHLGGKCANLHGHTWTTTVTITTPQLTEDGTIIEFGAFKTRMRTWIDNNLDHAALLGTDDPLTPSLREQGCRVAEFGRAPYGPHPWPTVEAVAELIAYHAQTWLAQAENHADEHGTWYSDTPTRCRITQVTVQETPTNTATWTES

SEQ ID NO: 25619 - protein, 140 aa, Siphonobacter aquaeclarae
  misc_feature (1)..(140): tr|A0A1G9THI0|A0A1G9THI0_9BACT 6-pyruvoyltetrahydropter in/6-carboxytetrahydropterin synthase OS=Siphonobacter aquaeclarae OX=563176 GN=SAMN04488090_3565 PE=4 SV=1
MVYISRKEHFNAAHRVYNPNWSDERNQEVFGPCANPYYHGHNFELIVTVKGKPDPETGFVVDMKQLGDLVKREIVDKVDHRNLNIEVPFLEGKIPTCEVMIMEFWTILAPQVTALTNGRSTLHSLRLIETPKNFVDYFGE

SEQ ID NO: 25620 - protein, 139 aa, Siphonobacter aquaeclarae
  misc_feature (1)..(139): tr|A0A1G9RVT2|A0A1G9RVT2_9BACT 6-pyruvoyltetrahydropter in/6-carboxytetrahydropterin synthase OS=Siphonobacter aquaeclarae OX=563176 GN=SAMN04488090_3059 PE=4 SV=1
MESKRVAVYRKEHFNAAHRLYNPRWSDEKNREVFGLCSNANYHGHNYELIAEVIGPVDPETGFVIDLKYLSDLIRKEILDRFDHRNLNLDTEEFRDLNPTAENIAIVIYEKLRQYLDPRLALKIRLYETERNFVEYPVG

SEQ ID NO: 25621 - protein, 140 aa, Siphonobacter curvatus
  misc_feature (1)..(140): tr|A0A2S7IPN4|A0A2S7IPN4_9BACT 6-carboxytetrahydropteri n synthase QueD OS=Siphonobacter curvatus OX=2094562 GN =C5O19_07800 PE=4 SV=1
MVYVSRVEHFNAAHRVYNPSWSDEQNFEVFGPCANPYYHGHNFELTVTVKGIPHSDTGFVMDMKHLGKIVKEQIVERVDHRNLNLEVDFLKDKIPTCEIFIMEIWKILAPVVAESTQGRSQLHSLKLIETPKNFVEYFGE

SEQ ID NO: 25622 - protein, 140 aa, Siphonobacter curvatus
  misc_feature (1)..(140): tr|A0A2S7IQJ9|A0A2S7IQJ9_9BACT 6-carboxy-5,6,7,8-tetrah ydropterin synthase OS=Siphonobacter curvatus OX=209456 2 GN=C5O19_09670 PE=3 SV=1
MQEKRVAVFRKEHFNAAHRLHNPNWSDEQNKAVFGLCNNPNYHGHNYELIVQVTGPIDPETGYVVDLKYLSDLIKTHVTDRFDHKNLNLDTEEFAQLNPTAEHIAIVIYEKLKAKLAPQLDLKIRLYETERNFVEYPVVG

SEQ ID NO: 25623 - protein, 140 aa, Siphonobacter sp.
  misc_feature (1)..(140): tr|A0A2N7BG97|A0A2N7BG97_9BACT 6-carboxy-5,6,7,8-tetrah ydropterin synthase OS=Siphonobacter sp. BAB-5405 OX=18 64825 GN=BWI97_01115 PE=3 SV=1
MEEKRVAVFRKEHFNAAHRLHNPNWSDEQNKAVFGLCNNPNYHGHNYELIVQVTGPIDPETGYVVDLKYLSDLIKTHVTDRFDHKNLNLDTEEFAQLNPTAEHIAIVIYEKLKANLAPQLDLKIRLYETERNFVEYPVVG

SEQ ID NO: 25624 - protein, 139 aa, Siphonobacter sp.
  misc_feature (1)..(139): tr|A0A261Q5I9|A0A261Q5I9_9BACT 6-carboxytetrahydropteri n synthase QueD OS=Siphonobacter sp. BAB-5385 OX=186482 2 GN=BWI93_11015 PE=4 SV=1
MVYVSRVEHFNAAHRVYNPSWSDEQNFEVFGPCANPYYHGHNFELIVTVKGIPHPDTGFVMDMKQLGKIVKEQIVERVDHRNLNLEVDFLKDKIPTCEVFIMEIWKILAPVVAEFTQGRSQLHSLKLIETPKNFVEYFG

SEQ ID NO: 25625 - protein, 190 aa, Skermanella aerolata
  misc_feature (1)..(190): tr|A0A512E4H9|A0A512E4H9_9PROT Uncharacterized protein OS=Skermanella aerolata OX=393310 GN=SAE02_77650 PE=4 S V=1
MFSLIFSRRYSMAHRLLSGGSPKCAVPHGHNETVTVKLKSTRPQRLDGGANMVEPFERAKKQWHSWIDNHVDHAFQVSDRDPLIEVFARIEPEILPRLMVMPGDPTTELLAACFMAKLNAFLTADGGRLTCVEVSIEETPTNTVAFDGDPVQVIPAGTGDDSWWWRADNSINDLMLGSDPVADTCASANA

SEQ ID NO: 25626 - protein, 139 aa, Skermanella aerolata
  misc_feature (1)..(139): tr|A0A0D2W2L0|A0A0D2W2L0_9PROT 6-pyruvoyl tetrahydropte rin synthase OS=Skermanella aerolata KACC 11604 OX=1385 368 GN=N826_40675 PE=4 SV=1
MYSLTVRDHIMIAHSFKGAVFGPAQKLHGATFICDLEMRRRSLDADGLIVDIGMASALLSEVLKPLNYRNLDEVPELTGSNTTTEFLCGEIHRRLSARIMDGALGEGGKELDSLKITLHESHLAWATYEAPLTPVEAGK

SEQ ID NO: 25627 - protein, 142 aa, Skermanella stibiiresistens
  misc_feature (1)..(142): tr|W9H361|W9H361_9PROT 6-pyruvoyl tetrahydropterin synt hase OS=Skermanella stibiiresistens SB22 OX=1385369 GN= N825_35720 PE=4 SV=1
MYSLTVRDHIMIAHSFKGAVFGPAQKLHGATFVCDLEMRRRHLDGDGLVVDIGMAADLLKDVLKPLNYRNLDEVEEFAGVNTTTEFLCGEIHRRISDRILHGALGEGGRGLESLKVTLGESHLAWATFEGPLSAEQSAEQGA

SEQ ID NO: 25628 - protein, 180 aa, Skermanella stibiiresistens
  misc_feature (1)..(180): tr|W9GPE1|W9GPE1_9PROT 6-pyruvoyl tetrahydropterin synt hase OS=Skermanella stibiiresistens SB22 OX=1385369 GN= N825_35835 PE=4 SV=1
MGFTITRQIGIDAGHRIASHGSKCRHLHGHRYLVEACCRTSTGKLRDQGEQAGMVLDFGFLKEEMMAHVDAPCDHGLILDLADHPVLSLFTPTGMAFEDWLERLSVEVREQGHVETSETLLDQKLYIVPFPPTAEWLAKHWFERLAPAVRRRSDGLAILDHVTVWETPNCQATYRDTGAA

SEQ ID NO: 25629 - protein, 119 aa, Smithella sp.
  misc_feature (1)..(119): tr|A0A1V5DV76|A0A1V5DV76_9DELT 6-carboxy-5,6,7,8-tetrah ydropterin synthase OS=Smithella sp. PtaU1.Bin162 OX=18 11697 GN=queD_2 PE=3 SV=1
MEIFKVFHINSAHRLPNVPPGHKCANLHGHSFRIEVHIKGPVHPRLGWVIDFADIAKAFQPLHDRLDHKYLNDIEGLANPTSENLAKWLWQNLQPALPQLSKIVVQESPESGCVYEGEQ

SEQ ID NO: 25630 - protein, 124 aa, Smithella sp.
  misc_feature (1)..(124): tr|A0A0Q0W8D8|A0A0Q0W8D8_9DELT 6-carboxy-5,6,7,8-tetrah ydropterin synthase OS=Smithella sp. SDB OX=1735324 GN= APR62_11150 PE=3 SV=1
MYEVTIIKSFSSAHLLAQIGGKCEELHGHNFKVEVTVYARELKESGLLIDFRIAKQWLVEILDQMDHKHLNELPFFSGINPSAENIAKYICESMEQKVRASGVNVARVKIWESENAAVTYIPAQ

SEQ ID NO: 25631 - protein, 142 aa, Snodgrassella alvi
  misc_feature (1)..(142): tr|A0A2N9X0X3|A0A2N9X0X3_9NEIS 6-carboxy-5,6,7,8-tetrah ydropterin synthase OS=Snodgrassella alvi OX=1196083 GN =BGI37_04645 PE=3 SV=1
MFKIAKEFQFDACHMLDGHQGKCHNLHGHTYRLIVEVSNQLHSQGSSKEMVMDFADIKTIINQHIISQLDHAYLYDQTNSNECRIATLLQQMQRKVFAFPCRTTAEGISRFIFNQLTAHLPVSKITLWETPTSYCEYQNTKP

SEQ ID NO: 25632 - protein, 142 aa, Snodgrassella alvi
  misc_feature (1)..(142): tr|A0A2N9WQV2|A0A2N9WQV2_9NEIS 6-carboxy-5,6,7,8-tetrah ydropterin synthase OS=Snodgrassella alvi OX=1196083 GN =BGI32_09670 PE=3 SV=1
MFKIAKEFQFDACHMLDGHQGKCHNLHGHTYRLIVEVSSSLHSQGSSKEMVMDFADIKTIINQHIISQLDHAYLYDETNSNECKIAALLEQMQRKVFAFPCRTTAEGMSRFIFNQLTPYLPVSKIILWETPTSYCEYQNTKP

SEQ ID NO: 25633 - protein, 142 aa, Snodgrassella sp.
  misc_feature (1)..(142): tr|A0A1C4AX68|A0A1C4AX68_9NEIS 6-carboxy-5,6,7,8-tetrah ydropterin synthase OS=Snodgrassella sp. R-53583 OX=179 8181 GN=GA0061082_105112 PE=3 SV=1
MFKIAKEFQFDACHMLDGHQGKCHNLHGHTYRLIVEVSSPLQPQGSSKEMVMDFADIKTIINQHIISQLDHAYLYDETNNNERKIAALLKQMQRKVFAFPCRTTAEGISRFIFNQLTAYLPVSKITLWETPTSYCEYQNTKP

SEQ ID NO: 25634 - protein, 291 aa, Snowella sp.
  misc_feature (1)..(291): tr|A0A2W7B5R8|A0A2W7B5R8_9CYAN 6-pyruvoyl tetrahydropte rin synthase OS=Snowella sp. OX=2164131 GN=DCF12_19805 PE=4 SV=1
MQCIINRRATFSASHRYWFSELTEQENKEKFGASSRFPGHGHNYVLFVSLIGELDRYGMVENLSTVKRVIKQEVTSQLNYFHLNDTWPEFQQILPTTEHIAKAIWDRLSPHLPLVKIRLFEHPELWADYQGNSMEATLSLKTHFSAAHRLALPELTLEQNSEIYGKCARVNGHGHNYHLEVAVTGEIDARTGMIVDLGSLQKVIDDYVVEPFDHTFLNKDIPYFAEVVPTAENIAFHIAQLLQQPIRELGVELEKVTLIESPNNSCEINCRHLDLSALLSVQQEPALVGAC

SEQ ID NO: 25635 - protein, 120 aa, Sodalis glossinidius
  misc_feature (1)..(120): tr|Q2NVN5|Q2NVN5_SODGM 6-carboxy-5,6,7,8-tetrahydropter in synthase OS=Sodalis glossinidius (strain morsitans) OX=343509 GN=queD PE=3 SV=1
MITTLYKDFTFESAHRLPHVPAGHKCGRLHGHSFLVRLEVTGEVDPHTGWIMDFAELKAAFQPILDRLDHYYINEIPGLENPTSEVLAQWIWQQLKPQLPLLSAVTLKETCTAGCVYRGQ

SEQ ID NO: 25636 - protein, 120 aa, Sodalis praecaptivus
  misc_feature (1)..(120): tr|W0HWL5|W0HWL5_9GAMM 6-carboxy-5,6,7,8-tetrahydropter in synthase OS=Sodalis praecaptivus OX=1239307 GN=queD PE=3 SV=1
MITTLYKDFTFESAHRLPHVPAGHKCGRLHGHSFLVRLEVTGEVDPHTGWIMDFADLKAAFKPILNRLDHYYLNDIPGLENPTSEVLAQWIWQQLKPQLPLLSAVTVKETCTAGCVYRGQ

SEQ ID NO: 25637 - protein, 120 aa, Sodalis sp.; identical to SEQ ID NO: 25636
  misc_feature (1)..(120): tr|A0A1J7C550|A0A1J7C550_9GAMM 6-carboxy-5,6,7,8-tetrah ydropterin synthase OS=Sodalis sp. TME1 OX=1912097 GN=B K025_14590 PE=3 SV=1

SEQ ID NO: 25638 - protein, 121 aa, Sodalis sp.
  misc_feature (1)..(121): tr|A0A4R1NPF2|A0A4R1NPF2_9GAMM 6-carboxy-5,6,7,8-tetrah ydropterin synthase OS=Sodalis sp. 159R OX=2529856 GN=E ZJ58_4863 PE=3 SV=1
MVTTLFKDFTFEAAHRLPHVPDGHKCGRLHGHSFMVRVEITGPVDPHSGWVMDFGELKTLFSPVLEQLDHYYLNDIPGLENPTSEILARWIWRQLKPRLPLLSAIMVKETCTAGCIYRGEE

SEQ ID NO: 25639 - protein, 119 aa, Unknown
  misc_feature (1)..(119): tr|A0A151UKL3|A0A151UKL3_9GAMM 6-carboxy-5,6,7,8-tetrah ydropterin synthase OS=Sodalis-like endosymbiont of Pro echinophthirus fluctus OX=1462730 GN=BG74_04940 PE=3 SV =1
MITTLYKNFTFESAHRLPYVPTGHKCSRLHGHSFLVRLEVTGEVDPHTGWIMDFANLKASFKPILNRLDHYYLNDIPGLENPTSEVLAQWIWQQLKPQLPLLSAVAVKETCTAGCIYRG

SEQ ID NO: 25640 - protein, 120 aa, Unknown
  misc_feature (1)..(120): tr|A0A261QNU5|A0A261QNU5_9GAMM 6-carboxy-5,6,7,8-tetrah ydropterin synthase OS=Sodalis-like symbiont of Philaen us spumarius OX=1189304 GN=queD PE=3 SV=1
MITTLYKDFTFESAHRLPHVPAGHKCGRLHGHSFLVRLEVTGEVDPRTGWIMDFAELKAAFQPILDRLDHYYLNEIPGLENPTSEVLAQWIWQQLKTQLPLLSAVTLKETCTAGCVYRGQ

SEQ ID NO: 25641 - protein, 126 aa, Solemya pervernicosa
  misc_feature (1)..(126): tr|A0A1T2L154|A0A1T2L154_9GAMM 6-carboxy-5,6,7,8-tetrah ydropterin synthase OS=Solemya pervernicosa gill symbio nt OX=642797 GN=BOW53_14075 PE=3 SV=1
MTPRYTLKVLTEFASAHSLRDYPGDCRRLHGHNWKVEVEVVAHALDSVGMGIDFKVIKRAAAEVGDRLDHHYLNEVEPFDRINPTAENLAAYFFQELATLINDDRVKISAVTLWETDRASVRYTED

SEQ ID NO: 25642 - protein, 279 aa, Solemya velum
  misc_feature (1)..(279): tr|A0A0B0HB04|A0A0B0HB04_SOVGS Uncharacterized protein OS=Solemya velum gill symbiont OX=2340 GN=BOV88_11985 P E=4 SV=1
MSVLFVNDLTSIDFSYLHNQRGLLGESLSLGIRLSGSLDEQGMVLDFADVKRQVKQLVDEHFDHKLIAPARSSQLSTDTWDNRIELKFRWGDNMQLKHVSPAEAVSLLDVSDVTPGTLATAIAEMLQERLPENVSEIEINLSEEVIDESSYQYSHGLKHHAGNCQRIAHGHRSRIIIYRNGTRSIELEEEWADRWDDIYIGSLEDLADASDECHHYAYSSSQGNFELTLPAVCCDLINADSTVENIAEHIAEQLKSSHPESRFEVHAYEGMDKGAIATS

SEQ ID NO: 25643 - protein, 141 aa, Solibacter usitatus
  misc_feature (1)..(141): tr|Q028J7|Q028J7_SOLUE Uncharacterized protein OS=Solib acter usitatus (strain Ellin6076) OX=234267 GN=Acid_156 4 PE=4 SV=1
MTRRYQFAASHRLHSDQLSAEENRSLYGKCNNPYGHGHNYVVEVSVRGPVDEATGRTVDIVLLDELVRREVVQPFDHRNLNAEVDAFTKAVATSENLGFEICRRLKRNWKEVFPGEWPKLEKIRIGETARNIFEVGADEIE

SEQ ID NO: 25644 - protein, 124 aa, Solibacter usitatus
  misc_feature (1)..(124): tr|Q02A87|Q02A87_SOLUE 6-carboxy-5,6,7,8-tetrahydropter in synthase OS=Solibacter usitatus (strain Ellin6076) O X=234267 GN=Acid_1041 PE=3 SV=1
MFEVTIEETFAAGHALRNYKGKCENVHGHNYRCQVTLEGEQLDSIGLLVDFVELKRVVHSVLDRMDHQWLNEFPPFDVLNPSAENMAKYIYDEVKGGLKTAEGVRIAMVRLWETDTAHATYRER

SEQ ID NO: 25645 - protein, 152 aa, Solimicrobium silvestre
  misc_feature (1)..(152): tr|A0A2S9GZI4|A0A2S9GZI4_9BURK Queuosine biosynthesis p rotein QueD OS=Solimicrobium silvestre OX=2099400 GN=S2 091_2203 PE=4 SV=1
MLTITRKIEFDAGHRIPDHNSQCRNLHGHRYTLLITLVGEVVKQDGASDNGMIMDFSDIKALAHEHLVSLWDHAFLVYEKDAVVKDFLHTLPGHKTVVVDRVPTVENLAQIAFDMLKEVYHNRYGRALALQKVTLYETPNCWAEINDSSIRD

SEQ ID NO: 25646 - protein, 138 aa, Solimonas aquatica
  misc_feature (1)..(138): tr|A0A1H9J845|A0A1H9J845_9GAMM 6-pyruvoyltetrahydropter in/6-carboxytetrahydropterin synthase OS=Solimonas aqua tica OX=489703 GN=SAMN04488038_11155 PE=4 SV=1
MSEPVVYLTRRETFAAAHRLWSAELSEAENRELFGPCARDYGHGHNYVLEVTLRGGIDAKTGVVVNITELRDVIRERILADVDHRHLNHDSQLMHGINPTVENIAVVFWRVLHERFGALLYEVCLHETEKNWVRYRGE

SEQ ID NO: 25647 - protein, 276 aa, Solimonas aquatica
  misc_feature (1)..(276): tr|A0A1H9CIF9|A0A1H9CIF9_9GAMM 6-pyruvoyl tetrahydropte rin synthase OS=Solimonas aquatica OX=489703 GN=SAMN044 88038_10361 PE=4 SV=1
MASLFVDNLSVIDCAYLDAQRGLVGESFLVDVVLDGPLDAQSMVLDFSQTKRRLKAGIDASLDHRLLVPRQLPGLRIQEDGAQLHLQLDAAPGRYEHRSPASAVCLLDAARIDTETVAAALQRQLQPLLPPAIRLHLNLRHEAIEGAYYHYAHGLKKHAGLCRHIAHGHRSRVELRVDGVRDRALEAQLAARWRDIYLGTQADLLDRGDGQLHFAYQACDGAYELRLPESRVQLLDCDSTVEEIAAWLHRELAPLRAGHRLQVRAYEGWGKGAIAG

SEQ ID NO: 25648 - protein, 142 aa, Solimonas fluminis
  misc_feature (1)..(142): tr|A0A2S5TCE4|A0A2S5TCE4_9GAMM 6-pyruvoyl tetrahydrobio pterin synthase OS=Solimonas fluminis OX=2086571 GN=C39 42_16605 PE=4 SV=1
MADSRPIVTLSRRESFCASHRLWEPTLSREENFALYGKCARDNGHGHNYVLQVTLRGGVDPATGMVVNLADLKNFLREEIIARVDHYHLNHDVEMFRGVNPTSENVALVFWKVCHARFGELLSEVRVEETPDNIVCYRGESG

SEQ ID NO: 25649 - protein, 280 aa, Solimonas fluminis
  misc_feature (1)..(280): tr|A0A2S5TBK2|A0A2S5TBK2_9GAMM Uncharacterized protein OS=Solimonas fluminis OX=2086571 GN=C3942_18905 PE=4 SV =1
MIRLFVEQLTVLDCAFLDPLRGLVGESWIVDVELAGDLDQQSMVLDFGEVKKRLKKVIDGIGDHKLLVPHRHAGLKLQHNGHGSELFFSGPADGPIEHRSPADAVCVIDAPAVTTESLTAHLQPLVAQQVPSNVAEVRLTLRHEVVDGAYYHYAHGLKKHTGHCQRIAHGHRSRIEIRLDDRREPALEQAWAGRWKDIYLGTQEDIVVDGAERVRFEYTSVDGDFALELPAQRCELLDGDTTVEKLARYIAQAVHAEHPGRQVEVRAYEGVLKGAVARAG

SEQ ID NO: 25650 - protein, 142 aa, Solimonas sp.
  misc_feature (1)..(142): tr|A0A346N1A1|A0A346N1A1_9GAMM 6-carboxytetrahydropteri n synthase OS=Solimonas sp. K1W22B-7 OX=2303331 GN=D0B5 4_11830 PE=4 SV=1
MADPRPVVTLSRRESFCASHRLWEPTLSREDNFALYGKCARDNGHGHNYVLQVTLRGGVDPATGMVVNLADLKNFLREEIIARVDHYHLNFDVEMFKGINPTSENVALVFWKVCHARFGALLSEVRVEETPDNIVCYRGETA

SEQ ID NO: 25651 - protein, 280 aa, Solimonas sp.
  misc_feature (1)..(280): tr|A0A346N2E9|A0A346N2E9_9GAMM Uncharacterized protein OS=Solimonas sp. K1W22B-7 OX=2303331 GN=D0B54_14105 PE= 4 SV=1
MIRLFVEQLTVLDCAFLDPIRGLVGESWIVDVELAGDLDQQSMVLDFGEVKKRLKKVVDGIGDHKLLVPHRHAGLRLQHNGHGSELHFSGPADGPIEHHSPADAICVIDAPAITTEALTAHLQPLVAQQVPSNVAEVRLTLRTEVVDGPYYHYAHGLKKHTGHCQRIAHGHRSRIEIRLDGQRDAAMEQAWAGRWKDIYLGTQEDIVLDGAERVRFEYTSVDGDFALELPAQRCELLDGDTTVERLAAYIARTIHAENPGRQVEVRAYEGVLKGAVARAG

SEQ ID NO: 25652 - protein, 139 aa, Solirubrum puertoriconensis
  misc_feature (1)..(139): tr|A0A0W8EE67|A0A0W8EE67_9BACT 6-pyruvoyl tetrahydrobio pterin synthase OS=Solirubrum puertoriconensis OX=17514 27 GN=ASU33_06775 PE=4 SV=1
MIYLSRQEHFNAAHKLYNPSWSEERNKEVFGPCANTNWHGHNYDLIVTVKGQPDPETGFVVDLKALSVLIREHIVRHVDHKNLNLDVPFMAGKLASTENLALAFWEILQRELPSITSTAQLHCVKIYETPRNFVEYYGE

SEQ ID NO: 25653 - protein, 135 aa, Solirubrum puertoriconensis
  misc_feature (1)..(135): tr|A0A0W8EDM0|A0A0W8EDM0_9BACT 6-pyruvoyl tetrahydrobio pterin synthase OS=Solirubrum puertoriconensis OX=17514 27 GN=ASU33_05005 PE=4 SV=1
MKVTVGRTEHFNAAHRLFNPSWSDEENDRVFGLCNNPNYHGHNYVLTVRLTGEPNPDTGYVYDLKELSDLIKREILNTFDHRNLNLDTEDFRQLNPTAENIARVCWQRLRPHLANNLALSVTLHETDRNFVEYHG

SEQ ID NO: 25654 - protein, 136 aa, Solitalea canadensis
  misc_feature (1)..(136): tr|H8KM93|H8KM93_SOLCM 6-pyruvoyl-tetrahydropterin synt hase OS=Solitalea canadensis (strain ATCC 29591 / DSM 3 403 / NBRC 15130 / NCIMB 12057 / USAM 9D) OX=929556 GN= Solca_4285 PE=4 SV=1
MIYITRRERFNAAHKLFREEWSAEKNAEVFGKCSNPNWHGHNYELFVTVKGEVNPVTGFVIDLKDLRDIINTQVISKLDHRNVNLDVDFMKGKMASTEVLAVEIFNQLKQPITEQGALLHSVKLYETENNFVEYFG

SEQ ID NO: 25655 - protein, 153 aa, Solitalea canadensis
  misc_feature (1)..(153): tr|H8KVK9|H8KVK9_SOLCM 6-pyruvoyl-tetrahydropterin synt hase OS=Solitalea canadensis (strain ATCC 29591 / DSM 3 403 / NBRC 15130 / NCIMB 12057 / USAM 9D) OX=929556 GN= Solca_1428 PE=4 SV=1
MARIRITKYFNFETAHALYGYDGKCRNVHGHSYELYVTVVGDAINDATHVKNGMVMDFGDLKKIVKTEIVDIFDHATVLNKNSPHIKLAGQLMEHMERVLLTDYQPTCENMLADFANRIMKRLPDNVKLYSLKLHETPTSFAEWFASDNGITV

SEQ ID NO: 25656 - protein, 149 aa, Solitalea koreensis
  misc_feature (1)..(149): tr|A0A521BEV9|A0A521BEV9_9SPHI 6-carboxy-5,6,7,8-tetrah ydropterin synthase OS=Solitalea koreensis OX=543615 GN =SAMN06265350_102123 PE=3 SV=1
MANIRLTKYFNFEAAHALFGYDGKCRNVHGHSYELYVTIVGPIINDPNHVKNGMVMDFGDLKEIVKSEIVDIFDHATILNQNSPHIKLAAQLREHMERVLLTDYQPTCENMLADFAQKIQRRLPDGIKLHSLKLHETPTSFAEWFAEDN

SEQ ID NO: 25657 - protein, 149 aa, Solitalea koreensis
  misc_feature (1)..(149): tr|A0A521AYP4|A0A521AYP4_9SPHI 6-carboxy-5,6,7,8-tetrah ydropterin synthase OS=Solitalea koreensis OX=543615 GN =SAMN06265350_101529 PE=3 SV=1
MDYGHQFFYDICAMIYITRKEHFNAAHKLFREEWSNDKNAEMFGKCSNPNWHGHNYDLFVTVKGEVNPETGFVIDLKDLKQIINSRVIDKLDHKNINLDVDFMKGKMASTEMLAMEIFNQLKGEIESKGAALHSIKLFETENNFVEYFG

SEQ ID NO: 25658 - protein, 137 aa, Solitalea longa
  misc_feature (1)..(137): tr|A0A2S5AAC2|A0A2S5AAC2_9SPHI 6-pyruvoyl tetrahydrobio pterin synthase OS=Solitalea longa OX=2079460 GN=C3K47_ 01620 PE=4 SV=1
MIYITRRERFNAAHKLYREEWSLDKNAEVFGKCSNPNWHGHNYELFITVKGNVNPETGFVIDLKELRDIINARVIHKLDHKNVNMDVDFMKGKMASTEVLAIEIFKQLNEPIKARGAMLHAVKLYETENNFVEYFGE

SEQ ID NO: 25659 - protein, 150 aa, Solitalea longa
  misc_feature (1)..(150): tr|A0A2S4ZY41|A0A2S4ZY41_9SPHI 6-carboxytetrahydropteri n synthase QueD OS=Solitalea longa OX=2079460 GN=C3K47_ 18030 PE=4 SV=1
MAKIRLTKYFNFETAHALYGYDGKCRNVHGHSYELYVTVVGDAIEDANHVKNGMVMDFGDLKKIVKSEIVDVFDHATVLNKNSPHIKLASQLMEHMERVLLTEYQPTCENMLADFAQRIKKRLPDNIKLHSLKLHETPTSFAEWFASDNE

SEQ ID NO: 25660 - protein, 164 aa, Soonwooa buanensis
  misc_feature (1)..(164): tr|A0A1T5ETS4|A0A1T5ETS4_9FLAO 6-pyruvoyltetrahydropter in/6-carboxytetrahydropterin synthase OS=Soonwooa buane nsis OX=619805 GN=SAMN05660477_01557 PE=4 SV=1
MQQNSNILETKNAYLCNMIRITKIFTFETAHVLYNYDGKCKNMHGHSYKLFVTVKGNPINNLDNVKNGMVVDFGDIKKIVKEEVVDVWDHAVLVNGASPHKNLGQKLEDEGHKVIFCDYQPTCENMLYDIAAKIKNKLPNTIELAYLKLHETENSYGEWLAEEN

SEQ ID NO: 25661 - protein, 184 aa, Sorangiineae bacterium
  misc_feature (1)..(184): tr|A0A1W9QHP2|A0A1W9QHP2_9DELT Uncharacterized protein OS=Sorangiineae bacterium NIC37A_2 OX=1970199 GN=B6A08_ 01345 PE=4 SV=1
MSVYRVTDGIFIHFAHHVRGHLGPCISLHGHTWLFQVTLEAKTLDHQGFVIDFDVLHDRLLTPCHRLLDHSLALGQESFDESREALANLGSILFASREKVQGTQGERQPGFGEDERGLAGARNHWPANIKVAVFPFTPTSERLAEWLAAAAAETVGDERVRVVSARVVETLHPTESAAEYFVPR

SEQ ID NO: 25662 - protein, 132 aa, Sorangium cellulosum
  misc_feature (1)..(132): tr|A0A2L0F1P9|A0A2L0F1P9_SORCE 6-pyruvoyl tetrahydropte rin synthase OS=Sorangium cellulosum OX=56 GN=SOCE26_07 0000 PE=4 SV=1
MFFLGVSDHVMIAHSFSDPFFGPATRMHGATYTVDVEIHAKALGPHHVIMDIGALRDALRRALDTLDYQNLDEHPAFPGRTSTTERVAEHVAGLLAETIAKLPVDEAPLPGASLRVLVRESPTAYAGFERAL

SEQ ID NO: 25663 - protein, 106 aa, Sorangium cellulosum
  misc_feature (1)..(106): tr|A9G7Q3|A9G7Q3_SORC5 6-pyruvoyltetrahydropterin synth ase OS=Sorangium cellulosum (strain So ce56) OX=448385 GN=ygcM1 PE=4 SV=1
MHGATYSVEIEIRAKALGPHHVVMDIGALHASLRRVLDTIDYTNLDEHPAFPGRTSTTERVAEHVAGLLAEEIARLPAAEAPLPGSTLRVLVRESPSAYAGFERDL

SEQ ID NO: 25664 - protein, 120 aa, Spartobacteria bacterium
  misc_feature (1)..(120): tr|A0A2A2XWG2|A0A2A2XWG2_9BACT 6-carboxy-5,6,7,8-tetrah ydropterin synthase OS=Spartobacteria bacterium AMD-G4 OX=1982325 GN=CAK90_03950 PE=3 SV=1
MKVRLTKDFILEAAQSLTKVPAGHKCARLHGHTFTIEISVEGEVDPDTGWLYDHALISAAMKPIIEELDHSYLNDVPGLENPTIEMMAGWLWNRLSPQLPGLAEIVIHETPFARCSYRGE

SEQ ID NO: 25665 - protein, 120 aa, Spartobacteria bacterium
  misc_feature (1)..(120): tr|A0A3C0R708|A0A3C0R708_9BACT 6-carboxy-5,6,7,8-tetrah ydropterin synthase OS=Spartobacteria bacterium OX=2052 183 GN=queD PE=3 SV=1
MRARLTKDFTFEAAQTLPRAPEGHKCRRMHGHSFKIEVSVEGDVDPMSGWVYDHAEIGAAMKPLIDMLDHSYLNEIEGLENPTIEKMAMWFWQKLQPQCRGLCEIVVHETPTARCVYRGE

SEQ ID NO: 25666 - protein, 126 aa, Sphaerisporangium sp.
  misc_feature (1)..(126): tr|A0A366LXI6|A0A366LXI6_9ACTN 6-carboxy-5,6,7,8-tetrah ydropterin synthase OS=Sphaerisporangium sp. LHW63015 O X=2248750 GN=DP939_22155 PE=3 SV=1
MGTFEIAKRFRFEAAHRIGGLPKGHPCGRVHGHSYQVEVRLAAERLTAPGFVTDFGELAPLGKYLQATFDHQLLNDVLDVEPTSENLAVHLACWFLDNLQPGLPGRLVAVRVAETATSWAEYRVEP

SEQ ID NO: 25667 - protein, 121 aa, Sphaerisporangium sp.
  misc_feature (1)..(121): tr|A0A2W2G898|A0A2W2G898_9ACTN 6-carboxy-5,6,7,8-tetrah ydropterin synthase OS=Sphaerisporangium sp. 7K107 OX=2 070365 GN=C1I98_17050 PE=3 SV=1
MYVIAKRFAFSASHRLDLLPEGHPCRRDHGHNYVVEIRLTAQELDPYGFVADFSELTPVRDHLADTYDHRCLNDVLEQPTCERLARRLYRWCSDNLPVAHLLRAVRVSETPSTWAEYREEP

SEQ ID NO: 25668 - protein, 125 aa, Sphaerobacter thermophilus
  misc_feature (1)..(125): tr|D1CA69|D1CA69_SPHTD Uncharacterized protein OS=Sphae robacter thermophilus (strain DSM 20745 / S 6022) OX=47 9434 GN=Sthe_3312 PE=4 SV=1
MFAIGVVAQFEAAHRLRGDFGPASRLHGHTYRVEVEVAGPQLNDDGTLFDLGLLKAWVDEAVGELNYQNLDVLPAFAQRNSTAEEVARFLRETLAPRLHGKGLRMLTVRVWESPQAYAACQWELL

SEQ ID NO: 25669 - protein, 159 aa, Sphaerospermopsis kisseleviana
  misc_feature (1)..(159): tr|A0A1Z4UNM0|A0A1Z4UNM0_9CYAN Queuosine biosynthesis p rotein QueD OS=Sphaerospermopsis kisseleviana NIES-73 O X=1973480 GN=NIES73_20900 PE=4 SV=1
MTNNQWLIGKEFRFEAAHKLPYHDGKCARLHGHSWRGVVYISANTLVQEGAKQGMVMDYSDLKKYLQPLLDNYLDHYYLNESTGLESPTSEAIAAWIYEKLEEAGLPGLTAVRIDETCTSICLYSKNRRSGWLNSGESLNLLLSRESDDDGDINLTTII

SEQ ID NO: 25670 - protein, 424 aa, Sphaerospermopsis kisseleviana
  misc_feature (1)..(424): tr|A0A1Z4UMM2|A0A1Z4UMM2_9CYAN Uncharacterized protein OS=Sphaerospermopsis kisseleviana NIES-73 OX=1973480 GN =NIES73_17420 PE=4 SV=1
MECIINRRAQFSATHRYWLPELSETENLEKFGPFSKFPGQGHNYVLFISMSGELDEYGMVLNLSDVKHTIKNEATGQLDFSYLNDVWPEFKQTLPTTENIAKVIWERLTPHLPIVKVQLLEHPQMWAEYQGEGKKASLTIRSHFSAAHRLAPNLSAEKYGKCTRTHGHNYHLEVTVEGEMDSRTGMIVDVHALKKVVEDHVLELFDHSCINEDIPYFAESQIVPTTENISRYISDLLQSPIQKLGVKLSQVKLFESDQLWVEYKGNGSETFFNVATDFSAAHRLAHPDLSLEKNKQIYGKCARINGHGHNYHLEVTVKGEIDPVTGMGVDLGGLNQIIKNSVIEPMDHGFLNKDVSFFAQVVPTAENIAFYISNTLRSPIQQLGAELYKIKLVESPNNSCEIYAADLDQTSVNAAVKQLELAAV

SEQ ID NO: 25671 - protein, 159 aa, Sphaerospermopsis reniformis
  misc_feature (1)..(159): tr|A0A480A709|A0A480A709_9CYAN Queuosine biosynthesis p rotein QueD OS=Sphaerospermopsis reniformis OX=531300 G N=SR1949_46190 PE=4 SV=1
MTNNQWLIGKEFRFEAAHKLPYHDGKCARLHGHSWRGVVYISANTLVQEGAKQGMVMDYSDLKKYLQPLLDNYLDHYYLNESTGLESPTSEAIAAWIYEKLEEAGLPGLTAVRIDETCTSICLYSKNRRSGWLNSGESLNLLLSRESDDDGDVNLTTII

SEQ ID NO: 25672 - protein, 424 aa, Sphaerospermopsis reniformis
  misc_feature (1)..(424): tr|A0A480A222|A0A480A222_9CYAN Uncharacterized protein OS=Sphaerospermopsis reniformis OX=531300 GN=SR1949_401 60 PE=4 SV=1
MECIINRRAQFSATHRYWLPELSETENLEKFGPFSKFPGQGHNYVLFISMSGELDEYGMVLNLSDVKHTIKNEATGQLDFSYLNDVWPEFKQTLPTTENIAKVIWERLTPHLPIVKVQLLEHPQMWAEYQGEGKKASLTIRSHFSAAHRLAPNLSAEKYGKCTRTHGHNYHLEVTVEGEMDSRTGMIVDVRALKKVVEDHVLELFDHSCINEDIPYFAESQIVPTTENISRYISDLLQSPIQKLGVKLSQVKLFESDQLWVEYKGNGSETFFNVATDFSAAHRLAHPDLSLEKNKQIYGKCARINGHGHNYHLEVTVKGEIDPVTGMGVDLGGLNQIIKNSVIEPMDHGFLNKDVSFFAQVVPTAENIAFYISNTLRSPIQQLGAELYKIKLVESPNNSCEIYAADLDQTSVNAAVKQLELAAV

SEQ ID NO: 25673 - protein, 121 aa, Sphaerotilus hippei
  misc_feature (1)..(121): tr|A0A318H6R0|A0A318H6R0_9BURK 6-carboxy-5,6,7,8-tetrah ydropterin synthase OS=Sphaerotilus hippei OX=744406 GN =C7444_101251 PE=3 SV=1
MKYALSQRFFFEAAHTLRRQVDAEPSRRIHGHTYLAEVTLSATPDPESGMVVDLGHLRREIETVRERLDHRFLDEVDGIGPATLENLCTYLWRAFEAIYGTTLAAIEVRREASGDACRLTR

SEQ ID NO: 25674 - protein, 371 aa, Sphaerotilus natans
  misc_feature (1)..(371): tr|A0A059KL79|A0A059KL79_9BURK Uncharacterized protein OS=Sphaerotilus natans subsp. natans DSM 6575 OX=128663 1 GN=X805_25050 PE=4 SV=1
MSPRSFHSASAGFEAALHVDLLPEGHRSRRLHGHSFFATVRAELPAGWAPFAGGEVAELQRRMEACCAPLDYALLNAVEGLGAPTDENIARWIRRRLEAEFGVPGIEQVGVQSTAHTGVDLDRAGHAHLWRRYRFQAAHRLPNVPAGHKCGRMHGHGFEVILHADQDIGERAYGLDYDRIDDIWAPLHFELNYQCLNEIAGLENPTSEVISAWLWRRLKPLLPELSWVTVYETGSCGANFDGQNYRIWKEMTFDSAIRLKHAPEGSPLRGIHGYTWALRLHLNAPLDAVMGWTVDFGDVKTLFDPVFKAIDHRPLFENTAIDDGDALSLARWVLAEGRAVLPQLDRIDVYETRGNGAIVLASARADELVPV

SEQ ID NO: 25675 - protein, 371 aa, Sphaerotilus natans
  misc_feature (1)..(371): tr|A0A5C1PXN1|A0A5C1PXN1_9BURK 6-pyruvoyl tetrahydropte rin synthase OS=Sphaerotilus natans subsp. sulfidivoran s OX=639200 GN=EWH46_00625 PE=4 SV=1
MSPRSFHSASAGFEAALHVDLLPEGHRSRRLHGHSFFAAVRAELPAGWAPFAGGEVAELQRRMEACCAPLDYALLNQVEGLGAPTDENIARWIRRRLEGEFGVPGIEQVGVQSTAHTGVDLDRAGHAHLWRRYRFQAAHRLPNVPAGHKCGRMHGHGFEVILHADQDIGESDYGLDYDRIDDIWAPLHFELNYQCLNEIEGLENPTSEVISAWLWHRLKPLLPELSWVTVYETGSCGANFDGQNYRIWKEMTFDSAIRLKHAPEGSPLRGIHGHTWALRLHLNAPLDAVMGWTVDFGDVKALFDPVFKAIDHRPLFENEAIDDGDSLSLARWVLAQGRAVLPQLDRIDVYETRGNGAIVLASARADELVPV

SEQ ID NO: 25676 - protein, 121 aa, Sphingobacteriaceae bacterium
  misc_feature (1)..(121): tr|A0A3D3P8A2|A0A3D3P8A2_9SPHI 6-pyruvoyl tetrahydrobio pterin synthase (Fragment) OS=Sphingobacteriaceae bacte rium OX=2021370 GN=DIT07_01765 PE=4 SV=1
YRDDWSDERNMETFGKCSNPNWHGHNYELFVTVKGEIDPETGFVMDLKELKTIIHTYVTDKLDHKNVNLDVDFMKGKMSSTEVLGTEIFKQLQAPIELHGVKLHKIRLCETENNFVEYFGE

SEQ ID NO: 25677 - protein, 136 aa, Sphingobacteriaceae bacterium; identical to SEQ ID NO: 23779
  misc_feature (1)..(136): tr|A0A1X9ZAX2|A0A1X9ZAX2_9SPHI 6-pyruvoyl tetrahydrobio pterin synthase OS=Sphingobacteriaceae bacterium GW460- 11-11-14-LB5 OX=1986952 GN=CA265_21885 PE=4 SV=1

SEQ ID NO: 25678 - protein, 136 aa, Sphingobacteriales bacterium
  misc_feature (1)..(136): tr|A0A1M3QUM6|A0A1M3QUM6_9SPHI 6-pyruvoyl tetrahydrobio pterin synthase OS=Sphingobacteriales bacterium 40-81 O X=1895835 GN=BGP13_03230 PE=4 SV=1
MVYLTRIEHFNAAHKLYNEAWSVEKNEEVFGKCANENWHGHNYDLYVTVKGNPDQDTGFIMDVKKLSLLINEFVLEKLDHLNLNEDVDFMKGQFCSTENLAVGIWNQLVNRLPAGVQLHCIKLYETPQIYVEYYGE

SEQ ID NO: 25679 - protein, 142 aa, Sphingobacteriales bacterium
  misc_feature (1)..(142): tr|A0A1M3HCP6|A0A1M3HCP6_9SPHI 6-carboxy-5,6,7,8-tetrah ydropterin synthase OS=Sphingobacteriales bacterium 50- 39 OX=1895841 GN=BGO55_25620 PE=3 SV=1
MLQVTKIFRFETAHAIHGYPGQCSNLHGHSYILHVTVSAEPVGEDYLPPPGFILDFKELKRIVKSVIEARFDHHTLLSEDYLAAHPPLAILPNIWVWQAEPTAENILLYIRNTLKNELPADVVLRKLKIYETSESYAEWEEK

SEQ ID NO: 25680 - protein, 135 aa, Sphingobacteriia bacterium
  misc_feature (1)..(135): tr|A0A259HNR8|A0A259HNR8_9BACT 6-pyruvoyl tetrahydrobio pterin synthase OS=Sphingobacteriia bacterium 39-39-8 O X=1970578 GN=B7X72_09335 PE=4 SV=1
MLYLTRLEHFNAAHKLFNPSWTREQNDAVFGVCANENWHGHNFDLFVTIKGEPDPETGFVFDVKKLSQLMKKHVIDKLDHKNLNLDVDFMKDKICSTENLTVAIWEQLAPHLPAHVQLHCVKLYETARIYVEYFG

SEQ ID NO: 25681 - protein, 138 aa, Sphingobacteriia bacterium
  misc_feature (1)..(138): tr|A0A1G3J4I9|A0A1G3J4I9_9BACT 6-pyruvoyl tetrahydrobio pterin synthase OS=Sphingobacteriia bacterium RIFOXYD2_ FULL_35_12 OX=1802167 GN=A2546_08220 PE=4 SV=1
MVYLTRQEHFNAAHKLFNPAWSKERNEQVFGVCANENWHGHNYDLYVTIKGIPDPDTGFLFDVKALSKIIKTHVIDLLDHKNLNMDVPFMAGKMCSTENLALAIWNQLAPHLPNPVKLHCVKLYETPRIYVEYFGEEV

SEQ ID NO: 25682 - protein, 146 aa, Sphingobacterium alimentarium
  misc_feature (1)..(146): tr|A0A4R3VYD7|A0A4R3VYD7_9SPHI 6-pyruvoyltetrahydropter in/6-carboxytetrahydropterin synthase OS=Sphingobacteri um alimentarium OX=797292 GN=EDC17_102130 PE=4 SV=1
MLFCGIFVVMVHITRRERFCAAHKLYREEWTPEQNEEVFGYCSNPNWHGHNYELYVTVKGDINPQTGFVMDIKIMKEIIHTYVIGKLDHKNINLDVDFMAGKMASTEVIAQEIFHQLKPHFDQRGVILHSVKLFETENNSVEYFGQ

SEQ ID NO: 25683 - protein, 139 aa, Sphingobacterium alimentarium
  misc_feature (1)..(139): tr|A0A4V2VU96|A0A4V2VU96_9SPHI 6-pyruvoyltetrahydropter in/6-carboxytetrahydropterin synthase OS=Sphingobacteri um alimentarium OX=797292 GN=EDC17_101733 PE=4 SV=1
MITAERYHDISCGHRVVGHEGKCRFLHGHNYRIHFEVAAEELDEIGRVLDFSVIKEKLCMWLEDHYDHKFLIWSNDPMLEELQKLTAESLVIVPFNPTAENIAKHLVEVVAPQQLQGTSCRLIRCKVEETQKCSATYKK

SEQ ID NO: 25684 - protein, 140 aa, Sphingobacterium alkalisoli
  misc_feature (1)..(140): tr|A0A4V5LYX7|A0A4V5LYX7_9SPHI 6-carboxytetrahydropteri n synthase OS=Sphingobacterium alkalisoli OX=1874115 GN =FAZ19_03210 PE=4 SV=1
MIIAERYHDISCGHRVVGHEGKCRFLHGHNYRIHFTITASKLDPVGRVLDFSIIKSHLCEWLEHHFDHKFLMWEQDELLEQLLEIQKESLVVVPFNPTAENIAKYLVEVVGPNQLADTTAKLISCKVEETSKCSASYSID

SEQ ID NO: 25685 - protein, 137 aa, Sphingobacterium alkalisoli
  misc_feature (1)..(137): tr|A0A4U0H885|A0A4U0H885_9SPHI 6-carboxytetrahydropteri n synthase OS=Sphingobacterium alkalisoli OX=1874115 GN =FAZ19_01465 PE=4 SV=1
MVYITRRERFSAAHKLHREEWSLEKNEETFGNCSNPNWHGHNYELFVTVKGEINPKTGFLIDLKVMKKIINLYVIEKLDHKNVNLDVDFMQGKMASTEVIAMEIFHVLKPLFEKEKVQLHCVRLHETENNAVEYYGE

SEQ ID NO: 25686 - protein, 137 aa, Sphingobacterium cellulitidis
  misc_feature (1)..(137): tr|A0A235DVI7|A0A235DVI7_9SPHI 6-pyruvoyl tetrahydrobio pterin synthase OS=Sphingobacterium cellulitidis OX=176 8011 GN=CHT99_17415 PE=4 SV=1
MIYITRRERFNAAHKLYREDWSLEENERVFGNCSNPNWHGHNYDLYVTVKGLVNPETGFLIDLKLMKDIIIREVIDKLDHKNVNLDVDFMEGKMASTEVIAMEIFHILKPFFEKEKVFLHAVRLHETENNYVEYFGE

SEQ ID NO: 25687 - protein, 137 aa, Sphingobacterium daejeonense
  misc_feature (1)..(137): tr|A0A4V6JU21|A0A4V6JU21_9SPHI 6-pyruvoyl tetrahydropte rin synthase/QueD family protein OS=Sphingobacterium da ejeonense OX=371142 GN=NCTC13534_05578 PE=4 SV=1
MIYITRRERFNAAHKLYREDWSAEENERIFGNCSNPNWHGHNYDLFVTVKGHINPETGFLIDLKVMKDIIIREVIDKLDHKNVNLDVDFMKDKMASTEVIAVEIFNILKPLFEKENVILHVVRLHETENNYVEYFGE

SEQ ID NO: 25688 - protein, 136 aa, Sphingobacterium deserti
  misc_feature (1)..(136): tr|A0A0B8T4E2|A0A0B8T4E2_9SPHI Uncharacterized protein OS=Sphingobacterium deserti OX=1229276 GN=DI53_1552 PE= 4 SV=1
MIHITRRERFCAAHKLYREDWSQEKNEAIFGKCSNPNWHGHNYELFVTVKGEVDPETGFLIDLKKMKQIILKQVIDKLDHKNINLDVDFMAGKRASTEIIAISIFEVLKPYFEEESVVLHAVKLYETENNFVEYFG

SEQ ID NO: 25689 - protein, 168 aa, Sphingobacterium deserti
  misc_feature (1)..(168): tr|A0A0B8T4K2|A0A0B8T4K2_9SPHI Uncharacterized protein OS=Sphingobacterium deserti OX=1229276 GN=DI53_1323 PE= 4 SV=1
MYANDDISYTCCFFVSPPLKIYLYLCTMIVAERYHDISCGHRVVGHEGKCRFLHGHNYRIHFTVAAEKLDEVGRVVDFSVIKSTLCAWLEEHFDHKFLIWQEDELLPQLQALTEDSLVIVPFNPTAENIARYLVEEIGPQQLQPHAVTLLSCKVEETAKCSATYTRSL

SEQ ID NO: 25690 - protein, 150 aa, Sphingobacterium detergens
  misc_feature (1)..(150): tr|A0A420AMB5|A0A420AMB5_9SPHI 6-pyruvoyltetrahydropter in/6-carboxytetrahydropterin synthase OS=Sphingobacteri um detergens OX=1145106 GN=DFQ12_4655 PE=4 SV=1
MLKLGLKPYLCIIMIFITRRERFCAAHKLYREDWSNEQNEQVFGLCSNPNWHGHNYDLFVTVKGEVNPETGFLIDLKIMKEIINRSIIDKVDHRNFNLDVDFMKGVMASTENIAIEIFKILKPLFEEQRVALHSVRLHETENNYVEYFGD

SEQ ID NO: 25691 - protein, 137 aa, Sphingobacterium faecium
  misc_feature (1)..(137): tr|A0A2T5Y4V9|A0A2T5Y4V9_9SPHI 6-pyruvoyltetrahydropter in/6-carboxytetrahydropterin synthase OS=Sphingobacteri um faecium OX=34087 GN=C8N37_104452 PE=4 SV=1
MVYITRRERFCAAHKLYREDWSIEKNENVFGNCSNVNWHGHNYDLFVTVKGDVNPTTGFLIDLKLMKTIILEHVVNKVDHKNINLDVDFMKDKMASTENIAIAIFEVLQPLFEAEHVQLHSIRLHETENNYVEYFGD

SEQ ID NO: 25692 - protein, 137 aa, Sphingobacterium gobiense
  misc_feature (1)..(137): tr|A0A2S9JKS8|A0A2S9JKS8_9SPHI 6-pyruvoyl tetrahydrobio pterin synthase OS=Sphingobacterium gobiense OX=1382456 GN=C5749_09565 PE=4 SV=1
MIYITRRERFSAAHKLYREDWSLEQNEAVFGNCSNPNWHGHNYELFVTVKGEINPETGFLIDLKKMKSIILQHVIRKLDHKNVNLDVDFMKGKKASTEVIAVAIFQVLKPFFDQENVELHAVKLYETENNFVEYFGE

SEQ ID NO: 25693 - protein, 139 aa, Sphingobacterium gobiense
  misc_feature (1)..(139): tr|A0A2S9JD17|A0A2S9JD17_9SPHI 6-pyruvoyl tetrahydrobio pterin synthase OS=Sphingobacterium gobiense OX=1382456 GN=C5749_18875 PE=4 SV=1
MILAERYHDISCGHRVVGHEGKCRFLHGHNYRIHFTVAADQLDEVGRVLDFSVIKTALCQWLEEHFDHKFLIWEKDELLPQLQEVSGESLVIVPFNPTAENIAQYLVEHIGPQQLKEYPVRLVSCKVEETAKCSAIYSL

SEQ ID NO: 25694 - protein, 137 aa, Sphingobacterium haloxyli
  misc_feature (1)..(137): tr|A0A2S9J107|A0A2S9J107_9SPHI 6-pyruvoyl tetrahydrobio pterin synthase OS=Sphingobacterium haloxyli OX=2100533 GN=C5745_14945 PE=4 SV=1
MIYITRRERFSAAHKLYREDWSLEQNEAVFGNCSNPNWHGHNYELFVTVKGEINPETGFLIDLKKMKSIILQHVISKLDHKNVNLDVDFMQGKKASTEVIAVAIFQVLKPFFDQENVQLHAVKLYETENNFVEYFGE

SEQ ID NO: 25695 - protein, 139 aa, Sphingobacterium haloxyli
  misc_feature (1)..(139): tr|A0A2S9IZS2|A0A2S9IZS2_9SPHI 6-pyruvoyl tetrahydrobio pterin synthase OS=Sphingobacterium haloxyli OX=2100533 GN=C5745_17345 PE=4 SV=1
MMLVERYHDISCGHRVVGHEGKCRLLHGHNYRIHFTVTADQLDEIGRVVDFSVIKTALCQWLEDHFDHKFLVWEKDELLPQLQEVSGESLVIVPFNPTAENIAKYLVEHIGPQQLKDYPVRLVSCKIEETAKCSATYSL

SEQ ID NO: 25696 - protein, 137 aa, Sphingobacterium lactis
  misc_feature (1)..(137): tr|A0A1H5ZST0|A0A1H5ZST0_9SPHI 6-pyruvoyltetrahydropter in/6-carboxytetrahydropterin synthase OS=Sphingobacteri um lactis OX=797291 GN=SAMN05421877_107125 PE=4 SV=1
MIYITRRERFNAAHKLYREDWSLEENEKVFGNCSNPNWHGHNYDLFVTVKGHINPETGFLIDLKVMKDIIIREVIDKLDHKNVNLDVDFMKGKMASTEVIAVEIFNILKPFFDKENVILHVVRLHETENNYVEYFGE

SEQ ID NO: 25697 - protein, 137 aa, Sphingobacterium mizutaii
  misc_feature (1)..(137): tr|A0A239Z4V0|A0A239Z4V0_9SPHI 6-pyruvoyltetrahydropter in/6-carboxytetrahydropterin synthase OS=Sphingobacteri um mizutaii OX=1010 GN=SAMN05192578_105128 PE=4 SV=1
MIYITRRERFNAAHKLYREDWSLEENERVFGNCSNPNWHGHNYDLFVTVKGLVNPETGFLIDLKLMKDIITREVIDKLDHKNVNLDVDFMQGKMASTEVIAMEIFHILKPFFAKEKVFLHAVRLHETENNYVEYFGE

SEQ ID NO: 25698 - protein, 144 aa, Sphingobacterium multivorum
  misc_feature (1)..(144): tr|A0A2X2J2Z8|A0A2X2J2Z8_SPHMU 6-pyruvoyl tetrahydropte rin synthase/QueD family protein OS=Sphingobacterium mu ltivorum OX=28454 GN=NCTC11034_00393 PE=4 SV=1
MPYLCIIMVFITRRERFCAAHKLYREDWSKEQNEQVFGLCSNPNWHGHNYDLYVTVKGKVNPETGFLIDLKIMKEIINRSIIDKVDHRNFNLDVDFMKGVMASTENIAIEIFKILKPLFDEQGVILHSVRLHETENNYVEYFGD

SEQ ID NO: 25699 - protein, 137 aa, Sphingobacterium nematocida
  misc_feature (1)..(137): tr|A0A1T5G7F7|A0A1T5G7F7_9SPHI 6-pyruvoyltetrahydropter in/6-carboxytetrahydropterin synthase OS=Sphingobacteri um nematocida OX=1513896 GN=SAMN05660841_03814 PE=4 SV= 1
MIYITRRERFCAAHKLHREDWSDEKNEATFGYCSNPNWHGHNYELYVTVKGEVNPETGFLIDLKLMKRIINTYIITPMDHKNINLDVDFMHGKMASTEVIAMEIFKVLKPHFEQEHVQLHSVKLFETENNSVEYFGD

SEQ ID NO: 25700 - protein, 140 aa, Sphingobacterium nematocida
  misc_feature (1)..(140): tr|A0A1T5EPW1|A0A1T5EPW1_9SPHI 6-pyruvoyltetrahydropter in/6-carboxytetrahydropterin synthase OS=Sphingobacteri um nematocida OX=1513896 GN=SAMN05660841_02695 PE=4 SV= 1
MITAERYHDISCGHRVVGHEGKCRYLHGHNYRIHFIVQSEELDTVGRVIDFSVIKEKLCMWLEDNFDHKFLIWNEDPLLTALMDISKESLVLVPFNPTAENIAKYLVEEIGPQQLSEYGCRLIQCKVEETRKCAASYTLV

SEQ ID NO: 25701 - protein, 141 aa, Sphingobacterium paludis
  misc_feature (1)..(141): tr|A0A4R7D4C3|A0A4R7D4C3_9SPHI 6-pyruvoyltetrahydropter in/6-carboxytetrahydropterin synthase OS=Sphingobacteri um paludis OX=1476465 GN=B0I21_1038 PE=4 SV=1
MIVAERYHDISCGHRVVGHEGKCRFLHGHNYRIHFTIAAEQLDEIGRVVDFSVIKSTLCAWLEEHFDHKFLIWEADELLPQLQAITEDSLVIVPFNPTAENIARYLVEEIGPQQLQAHAVTLLSCKVEETAKCSATFTRTS

SEQ ID NO: 25702 - protein, 136 aa, Sphingobacterium paludis
  misc_feature (1)..(136): tr|A0A4R7D3V3|A0A4R7D3V3_9SPHI 6-pyruvoyltetrahydropter in/6-carboxytetrahydropterin synthase OS=Sphingobacteri um paludis OX=1476465 GN=B0I21_103311 PE=4 SV=1
MIHITRRERFCAAHKLYREDWSPEKNEAVFGKCSNPNWHGHNYELFVTVKGEVDPETGFVIDLKKMKQLILQHVIDKLDHKNINLDVDFMAGKRASTEMIAISIFDVLKPYFEEESVILHAVKLYETENNFVEYFG

SEQ ID NO: 25703 - protein, 137 aa, Sphingobacterium paucimobilis
  misc_feature (1)..(137): tr|U2J030|U2J030_9SPHI 6-pyruvoyl tetrahydrobiopterin s ynthase OS=Sphingobacterium paucimobilis HER1398 OX=134 6330 GN=M472_06005 PE=4 SV=1
MIYITRRERFCAAHKLHREDWSEEKNEAVFGYCSNPNWHGHNYELYVTVKGTVNPETGFLIDLKLMKSIINTEVIDKMDHKNINLDVDFMQGKMASTEIIAMEIFHVLKPHFEKENVQLHSVKLYETENNSVEYFGD

SEQ ID NO: 25704 - protein, 140 aa, Sphingobacterium paucimobilis
  misc_feature (1)..(140): tr|U2H9S3|U2H9S3_9SPHI Uncharacterized protein OS=Sphin gobacterium paucimobilis HER1398 OX=1346330 GN=M472_069 25 PE=4 SV=1
MITAERYHDISCGHRVVGHEGKCRYLHGHNYRIHFIVQAEELDTVGRVVDFSVIKEKLCMWLEENFDHKFLIWNEDPLLSGLTDIAADSLVLVPFNPTAENIAKYLVEQIGPQQLAQYGCRLIKCKVEETQKCAASYTLI

SEQ ID NO: 25705 - protein, 136 aa, Sphingobacterium psychroaquaticum
  misc_feature (1)..(136): tr|A0A1X7KCE7|A0A1X7KCE7_9SPHI 6-pyruvoyltetrahydropter in/6-carboxytetrahydropterin synthase OS=Sphingobacteri um psychroaquaticum OX=561061 GN=SAMN05660862_2711 PE=4 SV=1
MIYITRRERFSAAHRLFREEWSQEQNEQVFGNCSNPNWHGHNYELFVTVKGDVNPETGFVIDLKVMKRIILEHVVDKLDHKNVNLDVDFMAGKKASTEVIAIAIFDVLKPWFAKENVVLHCVKLHETENNYVEYFG

SEQ ID NO: 25706 - protein, 139 aa, Sphingobacterium psychroaquaticum
  misc_feature (1)..(139): tr|A0A1X7L330|A0A1X7L330_9SPHI 6-pyruvoyltetrahydropter in/6-carboxytetrahydropterin synthase OS=Sphingobacteri um psychroaquaticum OX=561061 GN=SAMN05660862_3463 PE=4 SV=1
MIIAERYHDISCGHRVVGHEGKCRFLHGHNYRIHFTIASTALDEIGRVIDFSVIKSQLCMWLEDNFDHKFLIWEKDELLEQLKLVASESLVIVPFNPTAENIAQYMVEKIGPQQLEGLGVELVSCKVEETAKCSASFSR

SEQ ID NO: 25707 - protein, 137 aa, Sphingobacterium siyangense
  misc_feature (1)..(137): tr|A0A420FH96|A0A420FH96_9SPHI 6-pyruvoyl tetrahydrobio pterin synthase OS=Sphingobacterium siyangense OX=45952 9 GN=BCY89_14075 PE=4 SV=1
MVFITRRERFCAAHKLYREDWSKEQNEQVFGLCSNPNWHGHNYDLYVTVKGKVNPETGFLIDLKIMKEIINRSIIDKVDHRNFNLDVDFMKGVMASTENIAIEIFKILKPLFDEQGVILHSVRLHETENNYVEYFGD

SEQ ID NO: 25708 - protein, 137 aa, Sphingobacterium sp.; identical to SEQ ID NO: 25707
  misc_feature (1)..(137): tr|A0A354KBP7|A0A354KBP7_9SPHI 6-carboxytetrahydropteri n synthase OS=Sphingobacterium sp. OX=341027 GN=DCG88_2 2075 PE=4 SV=1

SEQ ID NO: 25709 - protein, 137 aa, Sphingobacterium sp.
  misc_feature (1)..(137): tr|A0A088EV53|A0A088EV53_9SPHI 6-pyruvoyl tetrahydrobio pterin synthase OS=Sphingobacterium sp. ML3W OX=1538644 GN=KO02_00755 PE=4 SV=1
MVYITRRERFCAAHKLYREDWSIEKNENVFGNCSNVNWHGHNYDLFVTVKGDVNPTTGFLIDLKLMKTIILEHIVNKVDHKNINLDVDFMKDKMASTENIAIAIFEVLKPLFEEEQVQLHCIRLHETENNYVEYFGD

SEQ ID NO: 25710 - protein, 137 aa, Sphingobacterium spiritivorum
  misc_feature (1)..(137): tr|D7VIY8|D7VIY8_9SPHI 6-pyruvoyl tetrahydropterin synt hase/QueD family protein OS=Sphingobacterium spiritivor um ATCC 33861 OX=525373 GN=queD PE=4 SV=1
MIFITRRERFSAAHKLYREDWSSEQNENVFGKCSNPNWHGHNYELFVTVKGEVNPETGFLIDLKKMKEIILHHIIEKLDHRNVNLDVDFMKGKLASTEYMAIEIFNVLNPLFEEHNVILHSVKLVETENNYVEYFGN

SEQ ID NO: 25711 - protein, 137 aa, Sphingobacterium spiritivorum; identical to SEQ ID NO: 25710
  misc_feature (1)..(137): tr|A0A380C9M0|A0A380C9M0_9SPHI 6-pyruvoyl tetrahydropte rin synthase/QueD family protein OS=Sphingobacterium sp iritivorum OX=258 GN=NCTC11388_02523 PE=4 SV=1

SEQ ID NO: 25712 - protein, 150 aa, Sphingobacterium thalpophilum
  misc_feature (1)..(150): tr|A0A4U9US44|A0A4U9US44_9SPHI 6-pyruvoyl tetrahydropte rin synthase/QueD family protein OS=Sphingobacterium th alpophilum OX=259 GN=NCTC11429_01602 PE=4 SV=1
MLKLSVNPYLCTIMVFITRRERFCAAHKLYREDWSDEQNEQVFGLCSNPNWHGHNYDLFVTVKGNVNPETGFLIDLKVMKEIINRSIIDKVDHRNFNLDVDFMQGVMASTENIAIEIFNILKPLFEQQCVSLHCVRLHETENNYVEYFGD

SEQ ID NO: 25713 - protein, 140 aa, Sphingobacterium wenxiniae
  misc_feature (1)..(140): tr|A0A1I6S0L1|A0A1I6S0L1_9SPHI 6-pyruvoyltetrahydropter in/6-carboxytetrahydropterin synthase OS=Sphingobacteri um wenxiniae OX=683125 GN=SAMN05660206_10454 PE=4 SV=1
MILAERYHDISCGHRVVGHEGKCRFLHGHNYRVHFTVAAEQLDSVGRVVDFSVIKSTLCQWIEENLDHKFLIWEQDPLLQALQEINTESLVVVPFNPTAENIARYLVEDIGPEQLKDYSVRLIRCKVEETAKCSATYSLV

SEQ ID NO: 25714 - protein, 137 aa, Sphingobacterium wenxiniae
  misc_feature (1)..(137): tr|A0A1I6SEC8|A0A1I6SEC8_9SPHI 6-pyruvoyltetrahydropter in/6-carboxytetrahydropterin synthase OS=Sphingobacteri um wenxiniae OX=683125 GN=SAMN05660206_104248 PE=4 SV=1
MVYITRRERFSAAHKLFREDWSQEQNEAVFGNCSNPNWHGHNYELFVTVKGKINPETGFVIDLKRMKQIMLIHVIDKLDHKNINLDVDFMQGKKASTEVIAVEIFKVLKEEFTKENVQLHAVKLYETENNYVEYFGD

SEQ ID NO: 25715 - protein, 137 aa, Sphingobacterium yanglingense
  misc_feature (1)..(137): tr|A0A4R6WDG5|A0A4R6WDG5_9SPHI 6-pyruvoyltetrahydropter in/6-carboxytetrahydropterin synthase OS=Sphingobacteri um yanglingense OX=1437280 GN=CLV99_3726 PE=4 SV=1
MIYITRRERFCAAHKLHREDWSEEKNEAIFGYCSNPNWHGHNYELYVTVKGTVNPETGFLIDLKLMKSIINTQVIDKMDHKNINLDVDFMQGKMASTEIIAMEIYHVLKPHFEQENVQLHSVKLYETENNSVEYFGD

SEQ ID NO: 25716 - protein, 140 aa, Sphingobacterium yanglingense
  misc_feature (1)..(140): tr|A0A4R6W9H8|A0A4R6W9H8_9SPHI 6-pyruvoyltetrahydropter in/6-carboxytetrahydropterin synthase OS=Sphingobacteri um yanglingense OX=1437280 GN=CLV99_3525 PE=4 SV=1
MITAERYHDISCGHRVVGHEGKCRYLHGHNYRIHFIVQADELDNVGRVVDFSVIKEKLCMWLEDNFDHKFLIWNEDPLLASLMEIAADSLVLVPFNPTAENIAKYLVEQIGPQQLAEHGCHLIKCKVEETQKCAASYTLA

SEQ ID NO: 25717 - protein, 122 aa, Sphingobium chlorophenolicum
  misc_feature (1)..(122): tr|F6EUE9|F6EUE9_SPHCR 6-carboxy-5,6,7,8-tetrahydropter in synthase OS=Sphingobium chlorophenolicum L-1 OX=6905 66 GN=Sphch_1925 PE=3 SV=1
MWELTKTFWFESAHTLHRSVETESSLRIHGHSYRAQVTVSGTPNPDTGMLIDLTLFEQSLAVARSALDHRMLDDVSGLGPPTLENLCAWIWRALSDNVPGLYRVEVFRDSQGDRCSYQEGSG

SEQ ID NO: 25718 - protein, 124 aa, Sphingobium fuliginis
  misc_feature (1)..(124): tr|A0A4V1W8M7|A0A4V1W8M7_SPHSA 6-carboxy-5,6,7,8-tetrah ydropterin synthase OS=Sphingobium fuliginis (strain AT CC 27551) OX=336203 GN=EWH10_17835 PE=3 SV=1
MFELSKQFRFDAAHTLDRVIETETSRRIHGHSYRAEVFVRGLPDPTTGMVVDLGLLQRTMEGARDALDHRFLDEINDLGPATMENLSRWIWNRLSPVIGNLHKVTVYRDSSGEACSYWGEEVVA

SEQ ID NO: 25719 - protein, 124 aa, Sphingobium lactosutens
  misc_feature (1)..(124): tr|T0HRK3|T0HRK3_9SPHN 6-carboxy-5,6,7,8-tetrahydropter in synthase OS=Sphingobium lactosutens DS20 OX=1331060 GN=RLDS_01010 PE=3 SV=1
MFELSKQFRFDAAHTLDRVIETESSRRIHGHSYRAEVFVRGLPDPTTGMVVDLGLLQRTMEGARDALDHRFLDEINDLGPATMENLSRWIWKRLSPVIGNLHKVTVYRDSSGEACSYWGEEVVA

SEQ ID NO: 25720 - protein, 156 aa, Sphingobium sp.
  misc_feature (1)..(156): tr|A0A2E9CUY2|A0A2E9CUY2_9SPHN 6-pyruvoyl tetrahydrobio pterin synthase OS=Sphingobium sp. OX=1912891 GN=CMN64_ 24715 PE=4 SV=1
MYSVTKTYDHNLGLAATFRQPKALSHCCNPHGYPLSFKLTFSAHTLDRDNWVIDFGGLKPIKQWLVDNFDHRMILAEHDPFLADFQALYEKCGFTPILVLPFVGCEGFAKFVYDRVDTWLGDAMPLECDIRGLRLVSVEVREHGANSAIYYGENNG

SEQ ID NO: 25721 - protein, 124 aa, Sphingomonadales bacterium
  misc_feature (1)..(124): tr|A0A1M3HP11|A0A1M3HP11_9SPHN 6-carboxy-5,6,7,8-tetrah ydropterin synthase OS=Sphingomonadales bacterium 63-6 OX=1895846 GN=BGO57_13620 PE=3 SV=1
MFELSKQFRFDAAHTLDRVIETESSRRIHGHSYRAEVFVRGRPDPATGMVVDLGLLQRTMEGARDALDHRFLDEINDLGPATMENLSRWIWNRLSPVIGNLHKVTVYRDSSGEACSFWGEEVAA

SEQ ID NO: 25722 - protein, 126 aa, Sphingomonadales bacterium
  misc_feature (1)..(126): tr|A0A5C7JVG9|A0A5C7JVG9_9SPHN 6-carboxy-5,6,7,8-tetrah ydropterin synthase OS=Sphingomonadales bacterium OX=19 78525 GN=E6R12_02160 PE=3 SV=1
MPFEITKSFSFDAAHQLGANVAPGHRYATVHGHSFEAELAFAGTPDPATGWIRDFDEINALVATLRATLDHSYLNDVPGLERPTLERLCQWLWERVKPQMPELVRVSVRRGSCREGCSYTGPDARA

SEQ ID NO: 25723 - protein, 184 aa, Sphingomonas ginsenosidivorax
  misc_feature (1)..(184): tr|A0A5C6UJJ4|A0A5C6UJJ4_9SPHN 6-carboxytetrahydropteri n synthase OS=Sphingomonas ginsenosidivorax OX=862135 G N=FSB78_11280 PE=4 SV=1
MPRTTNAHDATTWHLISREIGIDAGHRVMDHGSKCHNLHGHRYRIEAWCRGPLFAAGEQNGMVLDFGFLKDEMMHAIDARFDHAFMLCVDDPLCRAMFGLDDGALSHRVAAAVSEDGLFLGHGRDGMQICVLAVVPTAENLAKLWFDLLAPRVVARTSGQASLVCLKVWETPNCWASYGPVIPG

SEQ ID NO: 25724 - protein, 122 aa, Sphingomonas koreensis
  misc_feature (1)..(122): tr|A0A1L6J8I0|A0A1L6J8I0_9SPHN 6-carboxy-5,6,7,8-tetrah ydropterin synthase OS=Sphingomonas koreensis OX=93064 GN=BRX40_06540 PE=3 SV=1
MLELSKQFRFDAAHTLDREIQAESSRRIHGHSYRAEITIRGWPDPRTGMILDLGEFERALEGARDALDHRFLDEINDLGPATMENLCLWIWRRLKPDIVALARVAVHRDSSGETCTFDGVEG

SEQ ID NO: 25725 - protein, 124 aa, Sphingomonas parapaucimobilis
  misc_feature (1)..(124): tr|A0A0A1W597|A0A0A1W597_9SPHN 6-carboxy-5,6,7,8-tetrah ydropterin synthase OS=Sphingomonas parapaucimobilis NB RC 15100 OX=1219049 GN=SP5_030_00040 PE=3 SV=1
MFELSKQFRFDAAHTLERVIDTESSRRIHGHSYRAEVTVRGRPDPVTGMIVDLGILEREMEDARDALDHRFLDEINDLGPATMENLCRWIWDRLRPTISNLSRVSVHRDSSGETCSYWGEEVAA

SEQ ID NO: 25726 - protein, 124 aa, Sphingomonas sanxanigenens
  misc_feature (1)..(124): tr|W0AEA4|W0AEA4_9SPHN 6-carboxy-5,6,7,8-tetrahydropter in synthase OS=Sphingomonas sanxanigenens DSM 19645 = N X02 OX=1123269 GN=NX02_23060 PE=3 SV=1
MFELSKQFRFEAAHTLNRMIEAESSRRIHGHSYRAEVAVRGRPDPATGMIVDLGLLERAIAEAREALDHRFLDEVEDLGPATMENLSRWIWDRLRPSVASLTRVTVYRDSSGDACSYWGDAAAA

SEQ ID NO: 25727 - protein, 124 aa, Sphingomonas sp.
  misc_feature (1)..(124): tr|A0A1I3VQU5|A0A1I3VQU5_9SPHN 6-carboxy-5,6,7,8-tetrah ydropterin synthase OS=Sphingomonas sp. NFR04 OX=156628 3 GN=SAMN03159338_2811 PE=3 SV=1
MFELSKQFRFDAAHTLERSIDTESSRRIHGHSYRAEVTVRGRPDPFTGMIVDLGLLERSMEDARDALDHRFLDEINDLGPATMENLSRWIWDRLHPVVHNLHRVSVHRDSNGETCSYWGEEASA

SEQ ID NO: 25728 - protein, 79 aa, Sphingomonas sp.
  misc_feature (1)..(79): tr|A0A520HVX3|A0A520HVX3_SPHSX 6-carboxytetrahydropteri n synthase (Fragment) OS=Sphingomonas sp. OX=28214 GN=E OP67_68170 PE=4 SV=1
MDHGSKCHNLHGHRYRIEAWCRGPLFAAGEQTGMVLDFGFLKDEMMRTIDARFDHAFMLCVDRAHHLVLQEPEIEHHPG

SEQ ID NO: 25729 - protein, 124 aa, Sphingomonas spermidinifaciens
  misc_feature (1)..(124): tr|A0A2A4B6V7|A0A2A4B6V7_9SPHN 6-carboxy-5,6,7,8-tetrah ydropterin synthase OS=Sphingomonas spermidinifaciens O X=1141889 GN=COC42_02980 PE=3 SV=1
MFELSKQFRFDAAHTLERSIDTESSRRIHGHSYRAEVAVRGRPDPVTGMIVDLGLLERSMEDARDALDHRFLDEINDLGPATMENLSRWIWDRLHPVVHNLHRVSVHRDSSGETCSYWGEEASA

SEQ ID NO: 25730 - protein, 124 aa, Sphingopyxis alaskensis
  misc_feature (1)..(124): tr|Q1GPS3|Q1GPS3_SPHAL 6-carboxy-5,6,7,8-tetrahydropter in synthase OS=Sphingopyxis alaskensis (strain DSM 1359 3 / LMG 18877 / RB2256) OX=317655 GN=Sala_2644 PE=3 SV= 1
MFELSKQFRFDAAHTLERSIDTESSRRIHGHSYRAEVTVRGRPDPATGMIVDLGLLERSMEDARDALDHRFLDEINDLGPATMENLSRWIWNRLSPELDNLFKVSVYRDSSGDACTYWGEEVAA

SEQ ID NO: 25731 - protein, 124 aa, Sphingopyxis sp.
  misc_feature (1)..(124): tr|A0A0M8JFK4|A0A0M8JFK4_9SPHN 6-carboxy-5,6,7,8-tetrah ydropterin synthase OS=Sphingopyxis sp. C-1 OX=262667 G N=SC1_01431 PE=3 SV=1
MFELSKQFRFDAAHTLDRSIQTESSRRIHGHSYRAEVTVRGRPDPVTGMVVDLGVLEQMIENARDALDHRFLDEINDLGPATMENLSRWIWDRLHPAIANLHRVSVFRDSSGETCTFWGEEVAA

SEQ ID NO: 25732 - protein, 134 aa, Spiribacter aquaticus
  misc_feature (1)..(134): tr|A0A557RHF2|A0A557RHF2_9GAMM 6-carboxytetrahydropteri n synthase OS=Spiribacter aquaticus OX=1935996 GN=FPL11 _08130 PE=4 SV=1
MYSVNVRDHFMIAHSFQGETFGPAQALHGATYVTDATFFRDGLDDDNVVVDIARASTVLHDILSRYNLVNLDGLPEFEGVNTTTEFLARHIADALATAIHAGELGETARTLDRLRITLHESHIASAAYERSLQL

SEQ ID NO: 25733 - protein, 134 aa, Spiribacter curvatus
  misc_feature (1)..(134): tr|U5T4W1|U5T4W1_9GAMM Uncharacterized protein OS=Spiri bacter curvatus OX=1335757 GN=SPICUR_06785 PE=4 SV=1
MYSVNVRDHFMIAHSFQGETFGPAQALHGATYVTDATFFRDRLDADNVVVDIARATDVLHRILGRYNLTNLDTLPAFEGVNTTTEHLARHIADTLAGAIHDGELGETARTLDRIRITLHESHIASAAYERPLQP

SEQ ID NO: 25734 - protein, 134 aa, Spiribacter salinus
  misc_feature (1)..(134): tr|A0A540VW92|A0A540VW92_9GAMM 6-carboxytetrahydropteri n synthase OS=Spiribacter salinus OX=1335746 GN=FKY71_0 0190 PE=4 SV=1
MYSINVRDHFMIAHSFRGETFGPAQALHGATYVTDATFYREALDADGVVIDIALATEVLRATLGRYNLKNLDELPEFAGENTTTEFLARHIADALAQAIDRGELGESARTLDRLRITLHESHVASAAYERSLKG

SEQ ID NO: 25735 - protein, 155 aa, Spiribacter salinus
  misc_feature (1)..(155): tr|A0A540VPN2|A0A540VPN2_9GAMM 6-pyruvoyl tetrahydrobio pterin synthase OS=Spiribacter salinus OX=1335746 GN=FK Y71_15380 PE=4 SV=1
MTYRSSKTYGHDVGLSACFRQHRADSHCNLLHGYALAVHLEFEADELDVRNWVVDFGSLKSFKQTLKDTFDHKLLVAEDDPMAWALQHLEKLELAEVIIVPATGCEAFAKLIYQYGEVWLKDYGYAPRVRMHSVTVREHGANAATYTGGQNDGQV

SEQ ID NO: 25736 - protein, 132 aa, Spiribacter sp.
  misc_feature (1)..(132): tr|A0A2U2N4Z9|A0A2U2N4Z9_9GAMM Uncharacterized protein OS=Spiribacter sp. E85 OX=2182432 GN=DEM34_05205 PE=4 S V=1
MFSVNVRDHFMIAHSFRGEAFGPAQQLHGATYVVDATFQRAELDANGMVVDIARATDLLRGTLGALNLRNLDDEPAFAGHNTTTEFLARHVADRLADAVRAGQLGDGAQGLERIRVTLHESHVAWAAYERPL

SEQ ID NO: 25737 - protein, 140 aa, Spirobacillus cienkowskii
  misc_feature (1)..(140): tr|A0A369KQY7|A0A369KQY7_9PROT 6-carboxytetrahydropteri n synthase OS=Spirobacillus cienkowskii OX=495820 GN=DC C88_01920 PE=4 SV=1
MLILKRYFSFCTSHRLYNPKFSDEKNFLIYGKCAGIHGHGHNYKLEVAITGKVDQETSMVFNLDLLKELVDKNIIEDVDHKHLNFDVPWLEGKIPTAEVFVDSIWERLNTAVERCNVNDIKLYAITLWETEFDAVTKTRD

SEQ ID NO: 25738 - protein, 306 aa, Spirobacillus cienkowskii
  misc_feature (1)..(306): tr|A0A369KR83|A0A369KR83_9PROT Uncharacterized protein OS=Spirobacillus cienkowskii OX=495820 GN=DCC88_01125 P E=4 SV=1
MQTKNLNTTKIFIQDVTLLDCAILYPSAGPKGKSWYVDITWEGFKDNNGVIFDFSLAKKSAKNTIDHEFDHKLLVNGNSIRFQSNTQTIVIENYKENLFFAINTYNNSVTRISKDTLAALDNNDFSLLEKEIAQSILRNSPKNVKSVTITLREHEHNKNPNYFSYTHSLCHHYGNCQRFHGHSNIIEVFENGNLNLEKSTFAAKKLNNSYIISRNYVVDSWNTKLIQDLVDYCPELLELKETVIAAQYKGTQGEVAIILPKENVFTLEQESTVENLAEFVYQLFSPQEQQIEIRAYEGLSKGAICF

SEQ ID NO: 25739 - protein, 130 aa, Spirochaeta perfilievii
  misc_feature (1)..(130): tr|A0A5C1Q9H0|A0A5C1Q9H0_9SPIO 6-carboxy-5,6,7,8-tetrah ydropterin synthase OS=Spirochaeta perfilievii OX=25296 7 GN=EW093_05250 PE=3 SV=1
MINSASEVYMYFLKVESEFSAALYLSNCDDSYKGMHGHDFDVIVTLYSKELKDGMVYDYTQIKSSLNELAQSLDLVLLNDKPPFSELNPTVESIAKYFYDNLIEELEDLPIYEVEVIQTKGLSASFRPNV

SEQ ID NO: 25740 - protein, 143 aa, Spirochaeta sp.
  misc_feature (1)..(143): tr|A0A1W9N7V7|A0A1W9N7V7_9SPIO Uncharacterized protein OS=Spirochaeta sp. LUC14_002_19_P3 OX=1940821 GN=B0D92_ 05470 PE=4 SV=1
MYKVGVVGRFSAIHTLAGDVPEEEKHPHAHNYKLEWDIEVSQLDERGFSLDISMLEKIRDALFITVEGVNLNEHEYFKNKPVSLENLCEFVYKKLCTGLMQRLSGADLAKITAMEIRIWENSQAWAGTRREGEQIAERLQRSI

SEQ ID NO: 25741 - protein, 137 aa, Spirochaeta sp.
  misc_feature (1)..(137): tr|A0A2D7DKQ7|A0A2D7DKQ7_9SPIO 6-pyruvoyl tetrahydrobio pterin synthase OS=Spirochaeta sp. OX=28185 GN=CMN75_01 030 PE=4 SV=1
MLVLRVTRTIHFSTSLRYWLEDESEEENRKRFGREADRHGHNYRLEITVAGEPDPQTGMVINLVDLKNVAEREIMSRFDHKDLNLDTDYFVSIPPTPEHFASLIFDLLNAALPEGLLDRIRLHVAHDYFVDVIGSGA

SEQ ID NO: 25742 - protein, 142 aa, Spirochaeta thermophila
  misc_feature (1)..(142): tr|E0RP28|E0RP28_SPITD 6-carboxy-5,6,7,8-tetrahydropter in synthase OS=Spirochaeta thermophila (strain ATCC 499 72 / DSM 6192 / RI 19.B1) OX=665571 GN=STHERM_c17560 PE =3 SV=1
MAPSYQGDERADKAVYVVRAEGTFAAAHYLSSYHGKCETLHGHNYRVRAYAAGRKLDEGGMVLDFGILKKALREVLARLDHTNLNDHPFFQENPSAERIATYVYEEMVKKLPGTPIWKVEVFETDENLAIYLPYGDTFPPLP

SEQ ID NO: 25743 - protein, 142 aa, Spirochaeta thermophila
  misc_feature (1)..(142): tr|G0GCL9|G0GCL9_SPITZ 6-carboxy-5,6,7,8-tetrahydropter in synthase OS=Spirochaeta thermophila (strain ATCC 700 085 / DSM 6578 / Z-1203) OX=869211 GN=Spith_1826 PE=3 S V=1
MAPSYQGDERADKAVYVVRAEGTFAAAHYLASYHGKCETLHGHNYRVRAYAAGRKLDEGGMVLDFGILKKALREVLARLDHTNLNDHPFFQDNPSAERIATYVYEEMVKKLPGTPIWKVEVFETDENLAVYLPYGDTLPPLP

SEQ ID NO: 25744 - protein, 126 aa, Spirochaetaceae bacterium
  misc_feature (1)..(126): tr|A0A2E9Q8E5|A0A2E9Q8E5_9SPIO 6-carboxy-5,6,7,8-tetrah ydropterin synthase OS=Spirochaetaceae bacterium OX=189 8206 GN=queD PE=3 SV=1
MSQEVEIVKKYRFEAAHYLPNVPEGHKCRRMHGHSFRFELVLRGPVEPDTGWLIDFGDISKVVKPLIENHLDHYLLNEVEGLENPTSEQISIWLWNRIKPHLSALSEVVVHETCTARCIYRGPGDS

SEQ ID NO: 25745 - protein, 122 aa, Spirochaetaceae bacterium
  misc_feature (1)..(122): tr|A0A352ZDW7|A0A352ZDW7_9SPIO 6-carboxy-5,6,7,8-tetrah ydropterin synthase OS=Spirochaetaceae bacterium OX=189 8206 GN=queD PE=3 SV=1
MYHIRVEAEFAAAHRIVHYNGKCERLHGHNYKVRVWVSGATLGDGGMLIDFAVVKNALKSLIAEKLDHRDLNEIREFEDDPSAERIAKYIFEQLSKALPDVPLSAIDVFETDASMARYVPDR

SEQ ID NO: 25746 - protein, 124 aa, Spirochaetae bacterium
  misc_feature (1)..(124): tr|A0A2N1TA96|A0A2N1TA96_9SPIR 6-carboxy-5,6,7,8-tetrah ydropterin synthase OS=Spirochaetae bacterium HGW-Spiro chaetae-1 OX=2013832 GN=queD PE=3 SV=1
MYLLTIEDSFASAHQLRGYRGKCENLHGHNWKVELTVKGETLNGIGLLIDFHDLKKMLKEILSILDHKNINDVPPFDKENPSSENLAEFIAGLILEKLAEISPPIQLHSLTVWESDTSRCTYIP

SEQ ID NO: 25747 - protein, 117 aa, Spirochaetae bacterium
  misc_feature (1)..(117): tr|A0A2N1SZX3|A0A2N1SZX3_9SPIR 6-carboxy-5,6,7,8-tetrah ydropterin synthase OS=Spirochaetae bacterium HGW-Spiro chaetae-10 OX=2013833 GN=queD PE=3 SV=1
MEIIKSFRFEAAHYLPKLPETHKCRRMHGHSFKFDVHVEGPLDPELGWVMDFGDISRLVKPLVEELDHYLLNEIPGLENPTSEVIAVWIWNRLKPDLSGLSRIVVYETCTARCEYRG

SEQ ID NO: 25748 - protein, 126 aa, Spirochaetales bacterium
  misc_feature (1)..(126): tr|A0A3N5S750|A0A3N5S750_9SPIR 6-carboxytetrahydropteri n synthase QueD OS=Spirochaetales bacterium OX=2026792 GN=queD PE=4 SV=1
MYILTVEDSFASAHQLRGYSGKCENLHGHNWKVVVSVRGDTLNETGLLVDFGELKKILRIIIGDLDHRNLNEHPGFLSPNPSSENIAAYIARRFDIELAALPGPVALDSLTVWESDTSRCTYIPQR

SEQ ID NO: 25749 - protein, 126 aa, Spirochaetales bacterium
  misc_feature (1)..(126): tr|A0A524I9F7|A0A524I9F7_9SPIR 6-carboxytetrahydropteri n synthase OS=Spirochaetales bacterium OX=2026792 GN=E4 H36_14980 PE=4 SV=1
MHSLMVKKDFIASHFLIGGDWGNENKPHAHHYVLELILEGETLDHNNYLVDIVEVEAAMNELILGYKNRLLNDLEDFVGRNPSIELFSKILCTAMSGRIKDPRISALKAVLWENESAWAGYGIRRS

SEQ ID NO: 25750 - protein, 172 aa, Spirochaetes bacterium
  misc_feature (1)..(172): tr|A0A1G3Q470|A0A1G3Q470_9SPIR 6-carboxytetrahydropteri n synthase QueD OS=Spirochaetes bacterium GWF1_49_6 OX= 1802189 GN=A2014_07900 PE=4 SV=1
MPLFLSKDFKFDAAHSLVNYHGQCENLHGHTYKLRVTIQARSLPENGMILDFVDLSRIVKDEVVNKLDHHFINEIVSQSTAENIVLWIRDRLIGKLETDNYLLYEILLWETETSFATWRTDDAAGAQDGLEAGDAHGRASSAGAKDGLEAGDAHGRASSAGAKDGKEAADNG

SEQ ID NO: 25751 - protein, 129 aa, Spirochaetes bacterium
  misc_feature (1)..(129): tr|A0A1G3KS83|A0A1G3KS83_9SPIR Uncharacterized protein OS=Spirochaetes bacterium GWB1_27_13 OX=1802173 GN=A2Z9 8_10285 PE=4 SV=1
MFKTSVKRNFIAKHSLKGDFGKESKPHKHNYSVEWICVVEKLDDNDFGVDIALMEKILQGVSKKISNVFLNDMDFFKDKQTSIENMAIFFFNNLKNSLISQNYQFNRIKQMEIKIFENKNTYSSYIIDL

SEQ ID NO: 25752 - protein, 122 aa, Spirochaetia bacterium
  misc_feature (1)..(122): tr|A0A354G7M5|A0A354G7M5_9SPIR 6-carboxy-5,6,7,8-tetrah ydropterin synthase OS=Spirochaetia bacterium OX=205361 5 GN=DC057_18985 PE=3 SV=1
MDLTLYTEGFFDAAHFIKNHEGQCALLHGHTWKVSVWIRGTRDMLDSKGILWDFGNLKKIIQFFDHHNLNEILPVNPTAENLVIYIYEQLKKEYSYLLFKVRVYESVVSKQSYCDGGDSFVV

SEQ ID NO: 25753 - protein, 132 aa, Spirochaetia bacterium
  misc_feature (1)..(132): tr|A0A3D3ANZ2|A0A3D3ANZ2_9SPIR 6-carboxy-5,6,7,8-tetrah ydropterin synthase OS=Spirochaetia bacterium OX=205361 5 GN=queD PE=3 SV=1
MYFLSVENHFSSAHQLREYKGKCENLHGHNWLVKLTVMGKELGHAGMLIDFKDLKAALKTVMEYLDHGFLNEIKPFDKINPSAENIACYIFEEMKTALSKKSSIITVYKVDIWESEKSCATYINPEAGFYHV

SEQ ID NO: 25754 - protein, 138 aa, Spirosoma endophyticum
  misc_feature (1)..(138): tr|A0A1I1LA62|A0A1I1LA62_9BACT 6-pyruvoyltetrahydropter in/6-carboxytetrahydropterin synthase OS=Spirosoma endo phyticum OX=662367 GN=SAMN05216167_102168 PE=4 SV=1
MVYINRIEHFNAAHRLYNPAWSEERNKEVFGPCANANWHGHNFELIVTVKGEPDPDTGFVIDLKVLGEIIKNEVIEKVDHKNLNLDVDFMQGKMASCEIFIMEIWKILERALEPITEAHLHQLRLYETPKNFVDFFGE

SEQ ID NO: 25755 - protein, 143 aa, Spirosoma endophyticum
  misc_feature (1)..(143): tr|A0A1I2A3Q6|A0A1I2A3Q6_9BACT 6-carboxy-5,6,7,8-tetrah ydropterin synthase OS=Spirosoma endophyticum OX=662367 GN=SAMN05216167_11359 PE=3 SV=1
MENTRADAPRVAVFRKEHFNAAHRLNNPNWSDEKNTRVYGKCNNPNYHGHNYELIVQVNGPIDPETGYVMDMKQLGEIVKEHVTDRFDHKNLNLDTEEFADLNPSAENIAIVIYNILRNQLSEGLDLKIRLYETERNFVEYPI

SEQ ID NO: 25756 - protein, 143 aa, Spirosoma fluviale
  misc_feature (1)..(143): tr|A0A286F7K3|A0A286F7K3_9BACT 6-pyruvoyltetrahydropter in/6-carboxytetrahydropterin synthase OS=Spirosoma fluv iale OX=1597977 GN=SAMN06269250_0830 PE=4 SV=1
MDNFRASAPRVAVFRKEHFNAAHRLNNPNWSDEKNTRVYGKCNNPNYHGHNYELIVQVIGPVDDETGYVIDMKLLGDLIKEHVTDRFDHKNLNLDTEEFADLNPSAENIAIVIYNILRNQLNEGLDLKIRLYETERNFVEYPV

SEQ ID NO: 25757 - protein, 138 aa, Spirosoma fluviale
  misc_feature (1)..(138): tr|A0A286GDR9|A0A286GDR9_9BACT 6-pyruvoyltetrahydropter in/6-carboxytetrahydropterin synthase OS=Spirosoma fluv iale OX=1597977 GN=SAMN06269250_4567 PE=4 SV=1
MVYINRIEHFNAAHRLYNPAWSEERNKEVFGPCANINWHGHNFELIVTVKGEPDPDTGFVIDLKLLGDIVRREVIEKVDHKNLNLDVDFMQGKMASCEIFIMEIWKILERALEPVTDAHLHQLRLYETPKNFVDYFGE

SEQ ID NO: 25758 - protein, 138 aa, Spirosoma linguale
  misc_feature (1)..(138): tr|D2QPF0|D2QPF0_SPILD Uncharacterized protein OS=Spiro soma linguale (strain ATCC 33905 / DSM 74 / LMG 10896) OX=504472 GN=Slin_3450 PE=4 SV=1
MVYINRIEHFNAAHRLYNPAWSEERNKEVFGPCANINWHGHNFELIVTVKGEPDPNTGFVIDLKVLGDIIRREVIEKVDHKNLNLDVDFMQGKMASCEIFIMEIWKILERALEPVTDAHLHQLRLYETPKNFVDYFGE

SEQ ID NO: 25759 - protein, 143 aa, Spirosoma linguale
  misc_feature (1)..(143): tr|D2QJ42|D2QJ42_SPILD Uncharacterized protein OS=Spiro soma linguale (strain ATCC 33905 / DSM 74 / LMG 10896) OX=504472 GN=Slin_1005 PE=4 SV=1
MDNSRASAPRVAVFRKEHFNAAHRLNNPNWSDEKNTRVYGKCNNPNYHGHNYELIVQVIGPIDDETGYVIDMKLLSDLIKEHVTDRFDHKNLNLDTEEFADLNPSAENIAIVIYNILRNQLSEGLDLKIRLYETERNFVEYPV

SEQ ID NO: 25760 - protein, 143 aa, Spirosoma montaniterrae
  misc_feature (1)..(143): tr|A0A1P9WXI4|A0A1P9WXI4_9BACT 6-pyruvoyl tetrahydrobio pterin synthase OS=Spirosoma montaniterrae OX=1178516 G N=AWR27_12395 PE=4 SV=1
MTTSWADAPRVAVFRKEHFNAAHRLNNPNWSDEKNARVYGKCNNPNYHGHNYELIVQVTGPVDPETGYVVDMKVLSDLIKEHVTDRFDHKNLNMDTEEFADLNPSAENIAIVIYNILRNQLSEGLDLKVKLYETERNFVEYPA

SEQ ID NO: 25761 - protein, 143 aa, Spirosoma montaniterrae
  misc_feature (1)..(143): tr|A0A1P9WT45|A0A1P9WT45_9BACT 6-pyruvoyl tetrahydrobio pterin synthase OS=Spirosoma montaniterrae OX=1178516 G N=AWR27_03590 PE=4 SV=1
MVYINRIEHFNAAHRLYNPAWSDERNREVFGPCANMNWHGHNFELIVTVKGQPNPDTGFVIDLKVLGDIIRREVIEKVDHKNLNLDVDFMQGKMASCEIFVMEIWKILDRALAEVSEAHGPTVGLHQLRLYETPKNFVDYFGE

SEQ ID NO: 25762 - protein, 138 aa, Spirosoma oryzae
  misc_feature (1)..(138): tr|A0A2T0SMU0|A0A2T0SMU0_9BACT 6-pyruvoyltetrahydropter in/6-carboxytetrahydropterin synthase OS=Spirosoma oryz ae OX=1469603 GN=CLV58_116112 PE=4 SV=1
MVYINRIEHFNAAHRLYNPNWSEEKNKEVFGPCANINWHGHNFELIVTVKGEPDPDTGFVIDLKVLGDIIKREVIEKVDHKNLNLDVEFMRGKMASCEIFIMEIWKILERALRDVSEAHLHQLRLYETPKNFVDYYGE

SEQ ID NO: 25763 - protein, 167 aa, Spirosoma oryzae
  misc_feature (1)..(167): tr|A0A2T0SM37|A0A2T0SM37_9BACT 6-pyruvoyltetrahydropter in/6-carboxytetrahydropterin synthase OS=Spirosoma oryz ae OX=1469603 GN=CLV58_11791 PE=4 SV=1
MTEIDVLIMTDAPPVDNTTVDAPQAATVRAEMPRVAVFRKEHFNAAHRLHNPNWSDEKNTRVYGKCNNPNYHGHNYELIVRVVGPIDAETGYVLDMKVLGDLIKAQVTDRFDHKNLNLDTAEFADLNPSAENIAIVIYNRLRSHLPETLDLSIKLYETERNFVEYPA

SEQ ID NO: 25764 - protein, 143 aa, Spirosoma pollinicola
  misc_feature (1)..(143): tr|A0A2K8YSU8|A0A2K8YSU8_9BACT 6-carboxy-5,6,7,8-tetrah ydropterin synthase OS=Spirosoma pollinicola OX=2057025 GN=CWM47_02040 PE=3 SV=1
MDNSRASAPRVAVFRKEHFNAAHRLNNPNWSDEKNTRVYGKCNNPNYHGHNYELIVQVNGPIDPETGYVIDMKQLGSIIQEHVTDRFDHKNLNLDTEEFADLNPSAENIAIIIYNILRNKISEGLDLKIRLYETERNFVEYPI

SEQ ID NO: 25765 - protein, 138 aa, Spirosoma pollinicola
  misc_feature (1)..(138): tr|A0A2K8YW99|A0A2K8YW99_9BACT 6-carboxytetrahydropteri n synthase QueD OS=Spirosoma pollinicola OX=2057025 GN= CWM47_08555 PE=4 SV=1
MVYINRVEHFNAAHRLYNPAWSEERNKEVFGPCANVNWHGHNFELIVTVKGQPDPDTGFVIDLKLLGDIVKREVIEKVDHKNLNLDVDFMQGKMASCEIFVMEIWKILERALEPVTDAHLHQLRLIETPKNFVDYFGE

SEQ ID NO: 25766 - protein, 144 aa, Spirosoma radiotolerans
  misc_feature (1)..(144): tr|A0A0E3ZY14|A0A0E3ZY14_9BACT 6-pyruvoyl tetrahydrobio pterin synthase OS=Spirosoma radiotolerans OX=1379870 G N=SD10_18215 PE=4 SV=1
MIDSRANAPRVAVFRKEHFNAAHRLNNPNWSDEKNTRVYGKCNNPNYHGHNYELIVQVTGPIDPETGYVIDMKLLGNLIQEHVTDRFDHKNLNLDTEEFADLNPSAENIAIVIYNLLRNQLSEGLDLKIRLYETERNFVEYPVY

SEQ ID NO: 25767 - protein, 138 aa, Spirosoma radiotolerans
  misc_feature (1)..(138): tr|A0A0E3V906|A0A0E3V906_9BACT 6-pyruvoyl tetrahydrobio pterin synthase OS=Spirosoma radiotolerans OX=1379870 G N=SD10_19315 PE=4 SV=1
MVYINRIEHFNAAHRLYNPAWSEERNKEVFGPCANLNWHGHNFELIVTVKGEPDPGTGFVIDLKLLGDIVKREVIEKVDHKNLNLDVDFMQGKMASCEIFIMEIWKILERALEPVTEAHLHQLRLYETPKNFVDYFGE

SEQ ID NO: 25768 - protein, 153 aa, Spirosoma sp.
  misc_feature (1)..(153): tr|A0A327NNG8|A0A327NNG8_9BACT 6-carboxytetrahydropteri n synthase OS=Spirosoma sp. HMF3257 OX=2183553 GN=HMF32 57_07160 PE=4 SV=1
MDTSGTDVPPPITLRANSPRVAVFRKEHFNAAHRLNNPNWSDEKNTRVYGKCNNPNYHGHNYELIVQVVGPIDPETGYVIDMKHLGDLMQKHVIDRFDHKNLNLDTDEFADLNPSAENIAIVIYTILRNQLSEGLDLKIRLYETERNFVEYPV

SEQ ID NO: 25769 - protein, 138 aa, Spirosoma sp.
  misc_feature (1)..(138): tr|A0A327NMF5|A0A327NMF5_9BACT 6-carboxytetrahydropteri n synthase OS=Spirosoma sp. HMF3257 OX=2183553 GN=HMF32 57_15205 PE=4 SV=1
MVYINRIEHFNAAHRLYNPAWSEERNKEVFGPCANINWHGHNFELIVTVKGEPDPDTGFVIDLKVLGDIIKREVIEKVDHKNLNLDVDFMQGKMASCEIFIMEIWKILERALEPITDAHLHQLRLIETPKNFVDYFGE

SEQ ID NO: 25770 - protein, 165 aa, Spongiibacter sp.
  misc_feature (1)..(165): tr|A0A2E9SRE3|A0A2E9SRE3_9GAMM 6-pyruvoyl tetrahydropte rin synthase OS=Spongiibacter sp. OX=2024860 GN=CMN81_1 5735 PE=4 SV=1
  misc_feature (122)..(122): Xaa can be any naturally occurring amino acid
  misc_feature (138)..(138): Xaa can be any naturally occurring amino acid
MPIKRHTCIEISKEDLKFSAAHFTIFSASDRERLHGHNFRVSLDLTAEVGDDGMCFSYVEIKKRLRKLCATLDEYVLLPGQSPYLTIAEQGNYYCAHFNGEEMLFIKADTLVLPLRNTTVEXFARYLLERLLEDAPFXDGNEISSLVMKVSSGPGQWGSASWTRD

SEQ ID NO: 25771 - protein, 120 aa, Spongiibacter sp.
  misc_feature (1)..(120): tr|A0A2E2KDG9|A0A2E2KDG9_9GAMM 6-carboxy-5,6,7,8-tetrah ydropterin synthase OS=Spongiibacter sp. OX=2024860 GN= queD PE=3 SV=1
MEIFKEFSFEAAHRLPNVPEGHKCARLHGHSFQLRVVVGGEPDSHTGWIMDFGDIKQAIAPILDQLDHYYLNDIPGLENPTSENLSIWIWRALKPSLPALKRIEMRETCTSGCSYSGPEN

SEQ ID NO: 25772 - protein, 119 aa, Spongiibacteraceae bacterium
  misc_feature (1)..(119): tr|A0A2E7INN6|A0A2E7INN6_9GAMM 6-carboxy-5,6,7,8-tetrah ydropterin synthase OS=Spongiibacteraceae bacterium OX= 2026793 GN=queD PE=3 SV=1
MLVEVFKEFSFEAAHRLPQVPADHKCSRLHGHTFYVRLSVSGELNPDMGWLMDFADIKSAFQPIYDRLDHYYLNDIPGLENPTSENLAVWIWQELKPRLPQLSAVEIRETCTSGCIFRG

SEQ ID NO: 25773 - protein, 165 aa, Spongiibacteraceae bacterium
  misc_feature (1)..(165): tr|A0A2E7IMN5|A0A2E7IMN5_9GAMM 6-pyruvoyl tetrahydropte rin synthase OS=Spongiibacteraceae bacterium OX=2026793 GN=CMN85_08795 PE=4 SV=1
MPVDTLTTIEISKEDLKFSAAHFTIFSATERERLHGHNFKVSLDITAEVGPNGLCFSYVEIKQRLRSLVAEYDEYMILPADSPYLRIEQDKTCYRAHFNGEELQFPLADTLLLPIRNTTVEEFARLLLERLLGDAEFIDGNGVRKLIMKVSSGPGQSGSASWEQD

SEQ ID NO: 25774 - protein, 138 aa, Sporocytophaga myxococcoides
  misc_feature (1)..(138): tr|A0A098LKB7|A0A098LKB7_9BACT 6-pyruvoyl tetrahydrobio pterin synthase OS=Sporocytophaga myxococcoides OX=1537 21 GN=MYP_4645 PE=4 SV=1
MIYVSRKEHFNAAHKLYNPNWSEEKNKEVFGPCANSNWHGHNFDLTVTVKGTPDPDTGFVIDLKKLSKIIRTEVVEKLDHKNLNLDVDFMLGKMASTEILAMEIWKILDKEIKSISKARLHCITLYETPRNFVEYYGE

SEQ ID NO: 25775 - protein, 136 aa, Sporocytophaga myxococcoides
  misc_feature (1)..(136): tr|A0A098LF51|A0A098LF51_9BACT 6-carboxy-5,6,7,8-tetrah ydropterin synthase OS=Sporocytophaga myxococcoides OX= 153721 GN=MYP_2302 PE=3 SV=1
MKTAVYRKEHFNAAHRLFVPEWSEEDNDALFGKCNNPNFHGHNYEVILKVTGETNPITGYVIDMKFLSDLVQEHVIKKFDHKNLNLDTEEFKNLNPTAENIAMVIWTKLRDKIDKKYDLKVILYETERNFVEYPAD

SEQ ID NO: 25776 - protein, 149 aa, Sporolactobacillus sp.
  misc_feature (1)..(149): tr|A0A4Q4IPD8|A0A4Q4IPD8_9BACL 6-carboxy-5,6,7,8-tetrah ydropterin synthase OS=Sporolactobacillus sp. THM7-4 OX =2511170 GN=queD PE=3 SV=1
MDQEEPGSLKYHNKRVAVTKSFTFDAAHRLERYEGKCKNLHGHTYRLVVTISGYLNEIGMAMDFGDIKALFQSVIKAKLDHQYLNEVLPEMNTTAENMIVWIWQQLEMAMADRGYTAQGHRLEALRLFETPTSSAEIRREWMVDDENDR

SEQ ID NO: 25777 - protein, 163 aa, Sporolactobacillus sp.
  misc_feature (1)..(163): tr|A0A4Q4J6A7|A0A4Q4J6A7_9BACL 6-carboxytetrahydropteri n synthase QueD OS=Sporolactobacillus sp. THM7-7 OX=251 1172 GN=queD PE=4 SV=1
MDSKGGFFLKKESTAKHRGEATLAYHNKRVAVTKSFTFDAAHNLERYEGKCKNLHGHTYQLEITVSGYLNDIGMAVDFGEIKEMFRENIQAKLDHRYLNEVLPGMNTTAENVIVWIWEQLDRAMDARGLHDQGHRLESLRLYETPTSWATIHREWMIDHENDR

SEQ ID NO: 25778 - protein, 130 aa, Sporolituus thermophilus
  misc_feature (1)..(130): tr|A0A1G7NX02|A0A1G7NX02_9FIRM 6-carboxy-5,6,7,8-tetrah ydropterin synthase OS=Sporolituus thermophilus DSM 232 56 OX=1123285 GN=SAMN05660235_02755 PE=3 SV=1
MRQPTVRTTKIFTFDAAHFLPGHQGKCANMHGHTYRLEVTVERKAGGVASGGPEDGMVIDFGRLNAIIKEQIIEKLDHKILNECFPFRPTSENMALYIFDYLNTALASDDVKVVRVVLWETPTSYAEVSV

SEQ ID NO: 25779 - protein, 125 aa, Sporomusa acidovorans
  misc_feature (1)..(125): tr|A0A259UQ03|A0A259UQ03_9FIRM 6-carboxy-5,6,7,8-tetrah ydropterin synthase OS=Sporomusa acidovorans DSM 3132 O X=1123286 GN=queD PE=3 SV=1
MYELTIITEFEAAHQLPDYPGKCSRLHGHNWKVEVTVCGQELNHLGMVMDFKDLKAEVGKVVDTLDHYYLNDLPAFKSTNPTAEYIAKYIYDTLANNSVFQQGISIRCVQVWESPRSAVKYCPQE

SEQ ID NO: 25780 - protein, 125 aa, Sporomusa malonica
  misc_feature (1)..(125): tr|A0A1W2A4X1|A0A1W2A4X1_9FIRM 6-carboxy-5,6,7,8-tetrah ydropterin synthase OS=Sporomusa malonica OX=112901 GN= SAMN04488500_10530 PE=3 SV=1
MYDLTIIAEFEAAHQLPDYPGKCCRLHGHNWKVEVTVTGHELNHLGMVMDFKELKTEVGKVIDNLDHYYLNDLPAFKTIPPTAENIAKYIYDTLANEPVFQKNITVRCVQVWESPRSAVKYCPHG

SEQ ID NO: 25781 - protein, 125 aa, Sporomusa silvacetica
  misc_feature (1)..(125): tr|A0A259UY32|A0A259UY32_9FIRM 6-carboxy-5,6,7,8-tetrah ydropterin synthase OS=Sporomusa silvacetica DSM 10669 OX=1123289 GN=queD PE=3 SV=1
MYELTILAEFEAAHQLPDYPGKCCRLHGHNWKVEVTVAGHELNHLGMVMDFKDLKAEVGKVIDMLDHYFLNDLPAFKTMNPTAENIAKYIYDSLAEQSIFQQAIKIRCVQVWESPRSAVKYCPQG

SEQ ID NO: 25782 - protein, 125 aa, Sporomusa sp.
  misc_feature (1)..(125): tr|A0A0U1L4D5|A0A0U1L4D5_9FIRM 6-carboxy-5,6,7,8-tetrah ydropterin synthase OS=Sporomusa sp. An4 OX=411922 GN=S pAn4DRAFT_0992 PE=3 SV=1
MYELTILAEFEAAHQLPDYPGKCSRLHGHNWKVEVTVAGHELNHLGMVMDFKDLKAEVGKVIDKLDHYYLNDLPAFKAMNPTAENIAKYIYDSLAKQSIFQQTIKIRCVQVWESPRSAVKYYPQN

SEQ ID NO: 25783 - protein, 125 aa, Sporomusa sp.
  misc_feature (1)..(125): tr|A0A562GRH6|A0A562GRH6_9FIRM 6-carboxy-5,6,7,8-tetrah ydropterin synthase OS=Sporomusa sp. KB1 OX=943346 GN=S alpa_5323 PE=3 SV=1
MYELTILAEFEAAHQLPDYPGKCSRLHGHNWKVEVTVAGHELNHLGMVMDFKDLKAEVGKVIDKLDHYYLNDLPAFKAMNPTAENIAKYIYDSLAKQSSFQQTIKICCVQVWESPRSAVKYCPQG

SEQ ID NO: 25784 - protein, 125 aa, Sporomusa sphaeroides
  misc_feature (1)..(125): tr|A0A1U7MLZ6|A0A1U7MLZ6_9FIRM 6-carboxy-5,6,7,8-tetrah ydropterin synthase OS=Sporomusa sphaeroides DSM 2875 O X=1337886 GN=queD PE=3 SV=1
MYDLTIIAEFEAAHQLPDYPGKCRRLHGHNWKVEVTVTGHELNHLGMVMDFKDLKAEVNKVIDSLDHYYLNDLPVFKTINPTAENIAKYIYDTLAENPVFQQNVKVRCIQVWESPRSAVKYCPQG

SEQ ID NO: 25785 - protein, 125 aa, Sporomusa termitida
  misc_feature (1)..(125): tr|A0A517DTG4|A0A517DTG4_9FIRM 6-carboxy-5,6,7,8-tetrah ydropterin synthase OS=Sporomusa termitida OX=2377 GN=S PTER_19720 PE=3 SV=1
MYDLTIIAEFEAAHQLPDYPGKCCRLHGHNWKVEVTVYGHELNQLGMVMDFKELKAEVGKVIDNLDHYFLNDLPEFESVPPTAEHIAKYIYDTLAANPAFQHSIKVRSVQIWESPRSAVKYWPQG

SEQ ID NO: 25786 - protein, 131 aa, Sporomusaceae bacterium
  misc_feature (1)..(131): tr|A0A402BQC1|A0A402BQC1_9FIRM 6-carboxy-5,6,7,8-tetrah ydropterin synthase OS=Sporomusaceae bacterium OX=19175 25 GN=SPFL3102_01418 PE=3 SV=1
MYEITVVVEFEAAHRIVDYPGKCNRLHGHNWSIEVTVAGKQLNELGMLIDFRELKNEVNQVIGKLDHIYLNELEEFRVQNPTAENIACYIYSELKKKQIFGNAIIIRSVKVWESPKSAVTYSEDSIDDKCN

SEQ ID NO: 25787 - protein, 125 aa, Sporomusaceae bacterium
  misc_feature (1)..(125): tr|A0A3C0UDE3|A0A3C0UDE3_9FIRM 6-carboxy-5,6,7,8-tetrah ydropterin synthase OS=Sporomusaceae bacterium OX=19175 25 GN=queD PE=3 SV=1
MSITKIFTFDSAHSLPGHKGNCANLHGHTYRLEVTVSTQNGGLVTGGSSEGMVMDFGDLKSIVNTEIIEQADHKLLNDVYDFRTTSENLADHYYHVLEEKLSPLGVEVCRIRLWESPTSYVEVGQ

SEQ ID NO: 25788 - protein, 158 aa, Sporosarcina globispora
  misc_feature (1)..(158): tr|A0A0M0GEP8|A0A0M0GEP8_SPOGL 6-pyruvoyl tetrahydrobio pterin synthase OS=Sporosarcina globispora OX=1459 GN=A F332_17330 PE=4 SV=1
MYGFRIVEKLQKINEDIKPEELKYHHKRVLVSKEFTFDSAHHLHCYEGKCKNLHGHTYKVIFGISGFVDERGLMIDFGDIKEIWKNEIEIFLDHKYLNETLPPMNTTAENMVVWIYEKMSESLRNRKEQYIGARVEFVRLFETPTSYAEARREWMEVE

SEQ ID NO: 25789 - protein, 145 aa, Sporosarcina pasteurii
  misc_feature (1)..(145): tr|A0A380C0D2|A0A380C0D2_SPOPA 6-carboxy-5,6,7,8-tetrah ydropterin synthase OS=Sporosarcina pasteurii OX=1474 G N=queD PE=3 SV=1
MMQQIYPVVPHDYAYEINKDFHFAAAHYVPSTDAGKCQHIHGHTYFANITIVGDTLDHSGFLVNFKTIKDLVHRRFDHRVLNKDAAFSDEDPSYFPTSEVIARTIYEIVQAHLDTLDNQPKCVQVFLRETPTSYCVYRPKEASSQ

SEQ ID NO: 25790 - protein, 141 aa, Sporosarcina psychrophila
  misc_feature (1)..(141): tr|A0A127VXR1|A0A127VXR1_SPOPS 6-carboxy-5,6,7,8-tetrah ydropterin synthase OS=Sporosarcina psychrophila OX=147 6 GN=AZE41_09595 PE=3 SV=1
MMQQFYPQVQHSYRFELNKDMHFSAAHFIPSEDAGKCQVMHGHTYYLNITIGGNELDSIGFLIDFKELKNLIHDKYDHSVLNDHPEFKNNFPTTEKLAEQVCKSIQEVLLTRNNKPVCLQVIVRETPTSYVIYRPEQEVVL

SEQ ID NO: 25791 - protein, 141 aa, Sporosarcina sp.
  misc_feature (1)..(141): tr|A0A135WAH2|A0A135WAH2_9BACL 6-carboxy-5,6,7,8-tetrah ydropterin synthase OS=Sporosarcina sp. HYO08 OX=175955 7 GN=AU377_06690 PE=3 SV=1
MMQQFYPQVQHNYRFELNKDMHFSAAHFIPNENAGKCQVMHGHTYFINVTIGGNELDELGFLIDFKQLKDLIHKKYDHSVLNDHPEFQQLYPTTERLAEQIWTSIQSVLRTKDNRPDCLQVIVRETPTSYVVYRPRQEELA

SEQ ID NO: 25792 - protein, 141 aa, Sporosarcina sp.
  misc_feature (1)..(141): tr|A0A5B0DJ39|A0A5B0DJ39_9BACL 6-carboxy-5,6,7,8-tetrah ydropterin synthase OS=Sporosarcina sp. ANT_H38 OX=2597 358 GN=queD PE=3 SV=1
MMQQFYPQVQHSYRFELNKDIHFSAAHFIPSEDAGKCQVMHGHTYYLNITIGGNELDSIGFLIDFKELKNLIHDKYDHSVLNDHPEFTNNFPTTEKLAEQIGTSVQEVLQTRNNKPVCLQVIVRETPTSYVIYRPEQEVIL

SEQ ID NO: 25793 - protein, 289 aa, Stanieria cyanosphaera
  misc_feature (1)..(289): tr|K9Y0D5|K9Y0D5_STAC7 Uncharacterized protein OS=Stani eria cyanosphaera (strain ATCC 29371 / PCC 7437) OX=111 780 GN=Sta7437_3920 PE=4 SV=1
MICIINRRAKFSASHRYWLPELNPEENQRLFGACSRFPGHGHNYVLYVSLKGELDRYGMVQNLSHVKQVIKKEVTSQLDYAYLNEVWSEFQQTLPTTENIARVIWQKLAPYLPLVNIQLFEHPELWADYQGNDMEASLTVKTHFSAAHRLALPNLSFEENTEIYGKCARPNGHGHNYHLEVTVTGEIDQRTGMLVDLGALQKIIDDYVIEPFDHTFLNKDIPYFAEVVPTAENIAVYITQLLQQPIQTLGAELDKVKLIESPNNSCEIYCRRSQQNVTFLQQQEPVVAV

SEQ ID NO: 25794 - protein, 289 aa, Stanieria sp.
  misc_feature (1)..(289): tr|A0A140K6H6|A0A140K6H6_9CYAN Uncharacterized protein OS=Stanieria sp. NIES-3757 OX=1807358 GN=STA3757_23310 PE=4 SV=1
MICIINRRAKFSASHRYWLPELNKEENQRLFGACSRFPGHGHNYVLYVSLIGELDHYGMVQNLSHVKQVIKQEVTSQLDYAYLNETWSEFQQTLPTTENIARVIWQKLSPYLPLVNIQLFEHPELWADYQGNDMEASLTVKTHFSAAHRLALPSLSFEENTEIYGKCARPNGHGHNYHLEVTVTGEIDSRTGMLVDLGALQTIIDDYVVEPFDHTFLNKDIPYFAEVVPTAENIAVYIAQVLQQPIQTLGAQLDKVKLIESPNNSCEIYCRRSQQNVTSLKQQEPVVTV

SEQ ID NO: 25795 - protein, 127 aa, Stanieria sp.
  misc_feature (1)..(127): tr|A0A140K477|A0A140K477_9CYAN 6-carboxy-5,6,7,8-tetrah ydropterin synthase OS=Stanieria sp. NIES-3757 OX=18073 58 GN=STA3757_15240 PE=3 SV=1
MEEWLIYKEFYFEAAHQLPHHDGKCRRLHGHSWVGRVYVKGDRLITNGSKQGMVIDYGDIKKYLQPLLDNFLDHYYLNETLSLESPTSEMVARWIFEKLETAGLPGLYAVEIRETCTSGCTYQKSNL

SEQ ID NO: 25796 - protein, 143 aa, Staphylococcus agnetis
  misc_feature (1)..(143): tr|A0A085UEZ8|A0A085UEZ8_9STAP 6-carboxy-5,6,7,8-tetrah ydropterin synthase OS=Staphylococcus agnetis OX=985762 GN=queD PE=3 SV=1
MLHQMYPQVSHNYIYELNKDFNFSAAHAICDKRAGKCERVHGHTYFVNLTIAGDVLDDLGFLVNFSTLKQLVHDQFDHHLLNDLPLFKGKSPSTEIVAETIYGIVSSHLATLPHQPQCVQVFLRETPSSYVVYRPKKKETPHG

SEQ ID NO: 25797 - protein, 142 aa, Staphylococcus agnetis
  misc_feature (1)..(142): tr|A0A2T4MID5|A0A2T4MID5_9STAP 6-pyruvoyl tetrahydrobio pterin synthase OS=Staphylococcus agnetis OX=985762 GN= BU590_06935 PE=4 SV=1
MSKFDNVTPPKQFAQHHKTILVLRHYEFTADARIFLSETAHHDLKDNRYLIDIELWSKTDDLGMAVDFRIIDNIYKTHLKPKLDGQLLNETLPDMNITLENLIYWFWDTLSAHLPEDVSLNAITMYETPEQGVRFTRDIMAQ

SEQ ID NO: 25798 - protein, 140 aa, Staphylococcus argensis
  misc_feature (1)..(140): tr|A0A2K4FB47|A0A2K4FB47_9STAP 6-pyruvoyl tetrahydropte rin synthase OS=Staphylococcus argensis OX=1607738 GN=C D039_10505 PE=4 SV=1
MTKEMNHLNPPSQFQYRERNVILNLKYDFICDNRIYFTPTVHKDLLEHAYELAVHVQSPVNEMGLALDFNEVDAIFNQHVKPYLHQQLINETLPEMNTTAENIAMWIWDQFEAHLPDGNTLNQLELWETKDHSVILRKED

SEQ ID NO: 25799 - protein, 141 aa, Staphylococcus argensis
  misc_feature (1)..(141): tr|A0A2K4FDF6|A0A2K4FDF6_9STAP 6-carboxy-5,6,7,8-tetrah ydropterin synthase OS=Staphylococcus argensis OX=16077 38 GN=queD PE=3 SV=1
MFQQMYPSINHKYSFELNKDFNFSAAHYIPSEDAGKCMRTHGHTYFVNLTIVGDELDHNGFLVNFSELKQLVHGQFDHHLLNDLPAFEGTSPSTEIVAQTVYEMVQEHLDQRDNQPKCAQVFVRETPTSYVRYIAKEFRHG

SEQ ID NO: 25800 - protein, 139 aa, Staphylococcus argenteus
  misc_feature (1)..(139): tr|A0A348B967|A0A348B967_9STAP 6-carboxy-5,6,7,8-tetrah ydropterin synthase OS=Staphylococcus argenteus OX=9850 02 GN=queD PE=3 SV=1
MLQQIYPSTTHPYQFELNKDFNFSAAHHIPCEEAGICQNVHGHTYFVNLTIVGDKLDDTGFLVNFSHLKKMIHGKFDHQLLNNLPAFKNKIPSTEIVAETIYQIVKEKLDMLEHQPKCIQVFVRETPTSYVVYRPKEQV

SEQ ID NO: 25801 - protein, 139 aa, Staphylococcus argenteus
  misc_feature (1)..(139): tr|A0A5B8L8G3|A0A5B8L8G3_9STAP 6-carboxy-5,6,7,8-tetrah ydropterin synthase OS=Staphylococcus argenteus OX=9850 02 GN=queD PE=3 SV=1
MLQQIYPSTTHPYQFELNKDFNFSAAHHIPCEEAGICQNVHGHTYFVNLTIVGDKLDDTGFLVNFSHLKKMIHGKFDHQLLNNLPAFKNKIPSTEIVAETIYQIVKENLDLLEHQPKCIQVFVRETPTSYVVYRPKEQV

SEQ ID NO: 25802 - protein, 141 aa, Staphylococcus arlettae
  misc_feature (1)..(141): tr|A0A2T7BWH0|A0A2T7BWH0_9STAP 6-carboxy-5,6,7,8-tetrah ydropterin synthase OS=Staphylococcus arlettae OX=29378 GN=queD PE=3 SV=1
MFQQNYPNVAHDYMYELNKDFNFSAAHYIPSEDAGKCMRTHGHTYFVNLTIAGDTLDHNGFLVNFSDLKQLVHGKFDHQLLNELPEFQGKSPSTEVVAHTIYELIQNALNQRTNQPQCLQVYVRETPTSYVVFRPKEHRNG

SEQ ID NO: 25803 - protein, 138 aa, Staphylococcus arlettae
  misc_feature (1)..(138): tr|A0A2T7BSF7|A0A2T7BSF7_9STAP 6-pyruvoyl tetrahydrobio pterin synthase OS=Staphylococcus arlettae OX=29378 GN= E4T73_09915 PE=4 SV=1
MNKFNNVQPPKQFQYKNQSVRIKNYYEFKCDNRIYFSQTKHIDLAMHTYKFDIEILSPIDDYGLALDFNVVDKIYKQYLAPYLDKQLLNETLPEMNTTAENIAFWIWEQFELNLPTGNTLKKLNFYENATQGLVLTNE

SEQ ID NO: 25804 - protein, 139 aa, Staphylococcus aureus
  misc_feature (1)..(139): tr|W8USN0|W8USN0_STAAU 6-carboxy-5,6,7,8-tetrahydropter in synthase OS=Staphylococcus aureus OX=1280 GN=queD PE =3 SV=1
MLQQIYPSTTHPYQFELNKDFNFSAAHHIPCEEAGICQNVHGHTYFVNLTIVGDKLDDTGFLVNFSHLKKMIHGKFDHQLLNNLPAFKNKIPSTEIVAETIYQIVKENLASLEHQPKCIQVFVRETPTSYVVFRPKEQV

SEQ ID NO: 25805 - protein, 123 aa, Staphylococcus aureus
  misc_feature (1)..(123): tr|A0A5C8X2R9|A0A5C8X2R9_STAAU 6-carboxytetrahydropteri n synthase QueD (Fragment) OS=Staphylococcus aureus OX= 1280 GN=queD PE=4 SV=1
MLQQIYPSTTHPYQFELNKDFNFSAAHHIPCEEAGICQNVHGHTYFVNLTIVGDKLDDTGFLVNFSHLKKMIHGKFDHQLLNNLPAFKNKIPSTEIVAETIYQIVKENLASLEHQPKCIQVFV

SEQ ID NO: 25806 - protein, 141 aa, Staphylococcus auricularis
  misc_feature (1)..(141): tr|A0A2T4MEQ3|A0A2T4MEQ3_9STAP 6-carboxy-5,6,7,8-tetrah ydropterin synthase OS=Staphylococcus auricularis OX=29 379 GN=queD PE=3 SV=1
MFQQMYPSVAHPYAFELNKDFNFSAAHYIPSEDAGKCMRTHGHTYFVNLTIAGDELDHNGFLVNFAELKSLVHGQFDHQLLNELPQFKDKSPSTEIVAQTIYHMVQSSLDQRDNQPHCVQVFVRETPSSYVVYRPKEQQHG

SEQ ID NO: 25807 - protein, 141 aa, Staphylococcus auricularis
  misc_feature (1)..(141): tr|A0A2T4MD22|A0A2T4MD22_9STAP 6-pyruvoyl tetrahydropte rin synthase OS=Staphylococcus auricularis OX=29379 GN= BU607_00530 PE=4 SV=1
MDFKEIQPPKTMQYRQGHIVLKQQYNFTADNRIYFTETQHKDLHHHEYYLYVDVLSPINASGMGMDFNEIDAIYSQYVQPKLHQQLLNETLPDFNTTAENLALWLWDTFEQHLPNDNHVYRLQLYETPEHGVELNASLISD

SEQ ID NO: 25808 - protein, 139 aa, Staphylococcus capitis
  misc_feature (1)..(139): tr|A0A0S4MD60|A0A0S4MD60_STACP 6-carboxy-5,6,7,8-tetrah ydropterin synthase OS=Staphylococcus capitis OX=29388 GN=queD PE=3 SV=1
MLQQIYPSVEHPYQFELNKDFNFSAAHYIPCEDAGKCMRTHGHTYFVNITIAGDELDHNGFLVNFADLKKLIHNQFDHHLLNDLEPFKGKNPSTEIVAQTIYTMVKDYLSKRDNQPKCVQVFLRETPTSYVVYRPKDAQ

SEQ ID NO: 25809 - protein, 139 aa, Staphylococcus capitis
  misc_feature (1)..(139): tr|A0A4U9TF86|A0A4U9TF86_STACP 6-carboxy-5,6,7,8-tetrah ydropterin synthase OS=Staphylococcus capitis OX=29388 GN=queD PE=3 SV=1
MLQQIYPSVEHPYQFELNKDFNFSAAHYIPSKDAGKCMRTHGHTYFVNITIAGDKLDHNGFLVNFSDLKQLIHDQFDHYLLNDLEPFKGKSPSTEIVAQTIYTMVQDYLSNRDNQPKCVQVFLRETPTSYVVYRPKDAQ

SEQ ID NO: 25810 - protein, 139 aa, Staphylococcus caprae
  misc_feature (1)..(139): tr|C5QQ80|C5QQ80_9STAP 6-carboxy-5,6,7,8-tetrahydropter in synthase OS=Staphylococcus caprae M23864:W1 OX=52537 8 GN=queD PE=3 SV=1
MMQQIYPSVTHPYQFELNKDFNFSAAHYIPSEDAGKCMRTHGHTYFINITIAGDTLDHNGFLVNFSDLKKLIHDQFDHYLLNDLTPFKGKSPSTEIVAQTIYNMVQDYLSDRDNQPQCVQVYLRETPTSYVVYRPKEAK

SEQ ID NO: 25811 - protein, 145 aa, Staphylococcus carnosus
  misc_feature (1)..(145): tr|A0A3S0L429|A0A3S0L429_STACA 6-pyruvoyl tetrahydropte rin synthase OS=Staphylococcus carnosus subsp. carnosus OX=147448 GN=CD154_01360 PE=4 SV=1
MNKDLSHIQPPTHFKYKESQTILKQSYEFKCDNRIYFSESAHQDLFDHSYRLYVDVLSPIGKFGLGLDFNEVDAIYNQFIKPKVDHQILNETLPDMNTTAENIAMWIWDEFEQHLPENHHMYELQLFETDRHGVSLNQDTMNIKK

SEQ ID NO: 25812 - protein, 141 aa, Staphylococcus carnosus
  misc_feature (1)..(141): tr|B9DK40|B9DK40_STACT 6-carboxy-5,6,7,8-tetrahydropter in synthase OS=Staphylococcus carnosus (strain TM300) O X=396513 GN=Sca_0359 PE=3 SV=1
MLQQIYPSVSHPYAFELNKDFHFAAAHYIPCEDAGKCVRTHGHTYFVNLTIVGNELDHSGFLINFAYLKKQIHEQFDHYLLNDLPQFKDKMPSTEIVAQTIYKMTEEILEKQPNHPKCAQVYLRETPSSYVVYKGKEFRYG

SEQ ID NO: 25813 - protein, 142 aa, Staphylococcus chromogenes
  misc_feature (1)..(142): tr|A0A2T4LXW7|A0A2T4LXW7_STACR 6-pyruvoyl tetrahydrobio pterin synthase OS=Staphylococcus chromogenes OX=46126 GN=BU676_09395 PE=4 SV=1
MSKFDHVQAPKQFARHQKTILVLKHYEFTADARIFFNETAHHDLKDNRYLLDIELWSKTDELGMGVDFRVIDKIYKTHLAPHLEGQLLNDTLPDMNITLENMIHWIWEVFSTHLPDDLSLNAITMYETPEQGIRFTRDIMAQ

SEQ ID NO: 25814 - protein, 143 aa, Staphylococcus chromogenes
  misc_feature (1)..(143): tr|A0A2T4M0L1|A0A2T4M0L1_STACR 6-carboxy-5,6,7,8-tetrah ydropterin synthase OS=Staphylococcus chromogenes OX=46 126 GN=queD PE=3 SV=1
MMHQTYPQVSHDYVFELNKDFNFSAAHAIPDARAGKCQRIHGHTYFVNLTIAGDQLDDLGFLVNFSTLKQLVHDQFDHYLLNDLAHFEGKSPSTEVVAQTIYEMVEAHLATLKHNPTCVQVFLRETPSSYVVYRPRKKEHQHG

SEQ ID NO: 25815 - protein, 141 aa, Staphylococcus cohnii
  misc_feature (1)..(141): tr|A0A3N0HTV9|A0A3N0HTV9_9STAP 6-carboxy-5,6,7,8-tetrah ydropterin synthase OS=Staphylococcus cohnii OX=29382 G N=queD PE=3 SV=1
MFQQNYPSVNHNYQFELNKDFNFSAAHYIPSEDAGKCMRTHGHTYFVNLTIGGDTVDHNGFLVNFSELKQLVHGQFDHQLLNDLPQFKGKSPSTEIVAQTIYEMVQSSLNQRPNKPQCLQVYVRETPTSYVIYRPKEPNHE

SEQ ID NO: 25816 - protein, 141 aa, Staphylococcus cohnii; identical to SEQ ID NO: 18092
  misc_feature (1)..(141): tr|A0A0M2P4V8|A0A0M2P4V8_STACC 6-carboxy-5,6,7,8-tetrah ydropterin synthase OS=Staphylococcus cohnii subsp. coh nii OX=74704 GN=UF66_2136 PE=3 SV=1

SEQ ID NO: 25817 - protein, 141 aa, Staphylococcus condimenti
  misc_feature (1)..(141): tr|A0A143PB47|A0A143PB47_9STAP 6-carboxy-5,6,7,8-tetrah ydropterin synthase OS=Staphylococcus condimenti OX=702 55 GN=queD PE=3 SV=1
MLQQIYPSVSHPYAFELNKDFHFAAAHYIPCEDAGKCVRTHGHTYFVNLTIVGDDLDHSGFLINFAYLKKQIHEQFDHYLLNDLPQFKDEIPSTEIVAQTIYKMTEEILDKQPNHPKCAQVYLRETPSSYVVYKGKEFRNG

SEQ ID NO: 25818 - protein, 142 aa, Staphylococcus delphini
  misc_feature (1)..(142): tr|A0A2A4HE43|A0A2A4HE43_9STAP 6-pyruvoyl tetrahydrobio pterin synthase OS=Staphylococcus delphini OX=53344 GN= B4W69_01650 PE=4 SV=1
MSKFDHVQPPKHFARHHKTLIVTTRYQFTSDNRIYFSNTEHVDLENHTYTLEVELWSKTDEHGMAVDFKDIDKVYREHLEPLLDGQLINDTLPDMNTTVENIAHWIWLRFNEYLPEGVSLNTIALYETPEQGIKLTRNIMAQ

SEQ ID NO: 25819 - protein, 143 aa, Staphylococcus delphini
  misc_feature (1)..(143): tr|A0A2A4HDE1|A0A2A4HDE1_9STAP 6-carboxy-5,6,7,8-tetrah ydropterin synthase OS=Staphylococcus delphini OX=53344 GN=queD PE=3 SV=1
MMQQMYPQVDHDYMFELNKDFNFSAAHFIPDERAGKCTRVHGHTYFVNLTIGGDELDSMGFLINFSELKSLIHDQFDHYLLNDLVPFQGKSPSTEIVAQTIYDIVSARLAELPNAPKCLQVFLRETPTSYVVYRPKNKEQRHG

SEQ ID NO: 25820 - protein, 143 aa, Staphylococcus devriesei
  misc_feature (1)..(143): tr|A0A2K4DMC0|A0A2K4DMC0_9STAP 6-pyruvoyl tetrahydrobio pterin synthase OS=Staphylococcus devriesei OX=586733 G N=BUY42_10795 PE=4 SV=1
MTRDFSHIEAPKHFQYRSGDTILKQSYDFICDNRIYFSEEVYRDLSQHPYRLYVDILSPIGKYGLGLDFNDVDATYKQHIEPKLHHQLLNDTLPHMNTTAENIAMWIWDEFESQLPEGCQMYNLELFETERHGVSLNRSIMNN

SEQ ID NO: 25821 - protein, 139 aa, Staphylococcus devriesei
  misc_feature (1)..(139): tr|A0A2T4KB12|A0A2T4KB12_9STAP 6-carboxy-5,6,7,8-tetrah ydropterin synthase OS=Staphylococcus devriesei OX=5867 33 GN=queD PE=3 SV=1
MMQQIYPSVSHPYIFELNKDFNFSAAHYIPSEDAGKCMRTHGHTYFVNLTIAGDTLDHNGFLINFSELKKLIHDQFDHYLLNDLPHFKGKSPSTEIVAQTIYELVQSHLETYDNQPQCVQVYLRETPTSYVVYRPKEFK

SEQ ID NO: 25822 - protein, 141 aa, Staphylococcus edaphicus
  misc_feature (1)..(141): tr|A0A2C6WRK8|A0A2C6WRK8_9STAP 6-carboxy-5,6,7,8-tetrah ydropterin synthase OS=Staphylococcus edaphicus OX=1955 013 GN=queD PE=3 SV=1
MFQQNYPSVQHPYQFELNKDFNFSAAHYIPSEDAGKCMRTHGHTYFVNLTIAGDTLDHNGFLVNFSELKQLVHGQFDHYLLNDLPQFEGKSPSTEIVAQTIYEMVQTSLDQRNNRPKCLQVYVRETPTSYVVYRPKEQHHE

SEQ ID NO: 25823 - protein, 142 aa, Staphylococcus edaphicus
  misc_feature (1)..(142): tr|A0A2C6WHE8|A0A2C6WHE8_9STAP 6-pyruvoyl tetrahydrobio pterin synthase OS=Staphylococcus edaphicus OX=1955013 GN=BTJ66_13075 PE=4 SV=1
MSKLDHIQPPQRFRYRESEVLIKNYYEFTCDNRIYFTQTVHKDLENQKYKFNIEILSSINKYGLALDFNEVDKLYKKEIAPYIEGQIVNETLPDINTTAENIAIWIWDQFNQHLPENNTLQKLEFFETETQGLVLTADLMNR

SEQ ID NO: 25824 - protein, 139 aa, Staphylococcus epidermidis
  misc_feature (1)..(139): tr|D4FNE1|D4FNE1_STAEP 6-carboxy-5,6,7,8-tetrahydropter in synthase OS=Staphylococcus epidermidis M23864:W2(gre y) OX=525375 GN=queD PE=3 SV=1
MQQIYPSVTHPYQFELNKDFNFSAAHYIPFEEAGKCIRTHGHTYYVNLTIAGNTLDKCGFLVNFRDLKKLVHEQFDHYLLNDLPAFKDKSPSTEIVAQTIYHIIQKELNQRENQPKCVQVYLRETPSSYVVYRPKEDQV

SEQ ID NO: 25825 - protein, 139 aa, Staphylococcus epidermidis
  misc_feature (1)..(139): tr|A0A3S4K4K7|A0A3S4K4K7_STAEP 6-carboxy-5,6,7,8-tetrah ydropterin synthase OS=Staphylococcus epidermidis OX=12 82 GN=queD PE=3 SV=1
MIQQIYPTVNHPYQFELNKDFNFSAAHYIPSEDAGKCMRTHGHTYFVNITIAGDELDHNGFLVNFSDLKKLIHDQFDHYLLNDLVQFKGKSPSTEIVAQTIYQMVQSYLKDQKNQPKCVQVYLRETPTSYVVYRPKGDQ

SEQ ID NO: 25826 - protein, 142 aa, Staphylococcus equorum
  misc_feature (1)..(142): tr|A0A1E5THK7|A0A1E5THK7_9STAP 6-pyruvoyl tetrahydrobio pterin synthase OS=Staphylococcus equorum OX=246432 GN= ASS94_10040 PE=4 SV=1
MTNFDNVQPPQQFKYRDNDVCIKNYYEFTCNNRIYFTEKFHKDLENHLYKFNIEILSAIDDYGLAMDFNEVDKLYKKEIAPYLDGKLVNETLPDMNTTAENIAFWIWEQFDRLLPENNKLQKLEFFETETQGLVITSELMEK

SEQ ID NO: 25827 - protein, 141 aa, Staphylococcus equorum
  misc_feature (1)..(141): tr|A0A1B1G4R4|A0A1B1G4R4_9STAP 6-carboxy-5,6,7,8-tetrah ydropterin synthase OS=Staphylococcus equorum OX=246432 GN=ASS94_08545 PE=3 SV=1
MFQQNYPNVQHPYSFELNKDFNFSAAHYIPSEDAGKCMRTHGHTYFVNLTIGGDTLDHNGFLVNFSDLKKLVHDQFDHHLLNDLPQFKGKSPSTEIVAQTIYEMVQTSLNERDNQPKCLQVYVRETPTSYVVYRPKESKYE

SEQ ID NO: 25828 - protein, 142 aa, Staphylococcus felis
  misc_feature (1)..(142): tr|A0A3E0INQ3|A0A3E0INQ3_9STAP 6-pyruvoyl tetrahydrobio pterin synthase OS=Staphylococcus felis OX=46127 GN=DOS 83_08220 PE=4 SV=1
MAKFDHVRPPQHFARHHKTLLVIKHFTFICDNRIYFSETSYTDLENHKYRLEMEIWSKTDEHGLAVDFNMIDDIYNQHLRPLLDHQLLNDTLPDMNTTVENIAHWIWLRFNEQLPDNISLNSISLYETKNQGIKLTRNIMAQ

SEQ ID NO: 25829 - protein, 143 aa, Staphylococcus felis
  misc_feature (1)..(143): tr|A0A2K3Z2P4|A0A2K3Z2P4_9STAP 6-carboxy-5,6,7,8-tetrah ydropterin synthase OS=Staphylococcus felis OX=46127 GN =queD PE=3 SV=1
MMQQIYPSVDHDYMFELNKDFNFSAAHFIPDERAGKCQRVHGHTYFVNLTIAGDQLDELGFLINFSTLKSMIHDQFDHYLLNDLTAFKGKSPSTEVVAQTIYHIIEAHLSKLPNAPKCLQVFLRETPTSYVVYRPKHKEHPNG

SEQ ID NO: 25830 - protein, 143 aa, Staphylococcus fleurettii
  misc_feature (1)..(143): tr|A0A380FTD5|A0A380FTD5_9STAP 6-carboxy-5,6,7,8-tetrah ydropterin synthase OS=Staphylococcus fleurettii OX=150 056 GN=queD PE=3 SV=1
MLQQIYPSVQHPYAFELNKDFNFSSAHYIPYEEAGKCENIHGHTYFVNLTIAGNELDKMGFLVNFSELKTLIHKRYDHRLLNDFEEFKDNSPSTEQVAQTIYNIVQESLDKRVNKPKCVQVFVRETPTSYVVYRPLKNGDNNA

SEQ ID NO: 25831 - protein, 81 aa, Staphylococcus fleurettii
  misc_feature (1)..(81): tr|A0A3A0HPF2|A0A3A0HPF2_9STAP 6-pyruvoyl tetrahydropte rin synthase family protein (Fragment) OS=Staphylococcu s fleurettii OX=150056 GN=BUY93_15785 PE=4 SV=1
MFQLNYHNVQHPYSFELNKDFNFSAAHYISSEDAGKCMRTHGHTYFVNLTIGGDTLDHNGFLVNFSDLKKLVHDQFDHHLL

SEQ ID NO: 25832 - protein, 141 aa, Staphylococcus gallinarum
  misc_feature (1)..(141): tr|A0A3A0HBN4|A0A3A0HBN4_STAGA 6-pyruvoyl tetrahydrobio pterin synthase OS=Staphylococcus gallinarum OX=1293 GN =BUY97_01710 PE=4 SV=1
MNKFDHVQPPKTYQYRTNNVLIRNSFQFQCDNRIYFSETLHKDLKNQLYRFNVEILSPIDDYGLALDFNVVDKLYDEHIAPFLADQLLNDTLPAMNTTAENIAFWIWEQFEQYLPKGNTLYKLEFYENDRQGLVLTEAFMQ

SEQ ID NO: 25833 - protein, 141 aa, Staphylococcus gallinarum
  misc_feature (1)..(141): tr|A0A3A0VNZ3|A0A3A0VNZ3_STAGA 6-pyruvoyl tetrahydrobio pterin synthase OS=Staphylococcus gallinarum OX=1293 GN =BUZ14_01045 PE=4 SV=1
MSEFNHIQPPKTYQYRNNRVLIKNHFQFECDNRIYFSETFHKDLKNQQYRFNVEILSPIDDFGLALDFNIVDKLYDAHIAPFVAGQLLNDTLPTMNTTAENIAFWIWEQFEHSLPEDNKLYRMEFYENDRQGLVLTADLMQ

SEQ ID NO: 25834 - protein, 143 aa, Staphylococcus haemolyticus
  misc_feature (1)..(143): tr|A0A2S6DZ02|A0A2S6DZ02_STAHA 6-pyruvoyl tetrahydropte rin synthase OS=Staphylococcus haemolyticus OX=1283 GN= CV015_04250 PE=4 SV=1
MSNRFNHIQPPNQFKYREGRTVLKQQYDFKCDNRIYFSEDIFRDLHNHSYRLYVDVLSPIGDYGLGLDFNEVDAIYNKVIEPKLNHQLINETLPDMNTTAENIAMWIWDEFEQHLPGEHCMYALQLFETDRHGVSLNRSIMKL

SEQ ID NO: 25835 - protein, 139 aa, Staphylococcus haemolyticus
  misc_feature (1)..(139): tr|A0A2A1K458|A0A2A1K458_STAHA 6-carboxy-5,6,7,8-tetrah ydropterin synthase OS=Staphylococcus haemolyticus OX=1 283 GN=queD PE=3 SV=1
MIQQLYPSVAHPYSFELNKDFNFSAAHYIPSEDAGKCMRTHGHTYFVNLTIAGDKLDHNGFLINFSDLKKLIHDQFDHYLLNDLPQFKDKSPSTEVVAQTIYKMVQTHLQNCDNQPECVQVYLRETPTSYVVYRPKEYK

SEQ ID NO: 25836 - protein, 139 aa, Staphylococcus hominis
  misc_feature (1)..(139): tr|A0A533IWI7|A0A533IWI7_STAHO 6-carboxytetrahydropteri n synthase QueD OS=Staphylococcus hominis OX=1290 GN=qu eD PE=4 SV=1
MIQQVYPTVNHPYTFELNKDFNFSAAHFIPSEDAGKCMRTHGHTYFVNLTIVGDALDHNGFLINFSELKRLVHDQFDHYLLNELPQFKDKSPSTEIVAQTIFEIVQAHLNEYDNKPKCVQVYLRETPSSYVVYRPKEIK

SEQ ID NO: 25837 - protein, 139 aa, Staphylococcus hominis
  misc_feature (1)..(139): tr|A0A1L8Y4R7|A0A1L8Y4R7_STAHO 6-carboxy-5,6,7,8-tetrah ydropterin synthase OS=Staphylococcus hominis OX=1290 G N=queD PE=3 SV=1
MIQQVYPTVNHPYTFELNKDFNFSAAHFIPSEDAGKCMRTHGHTYFVNLTIVGDTLDHNGFLINFSELKRLVHDQFDHYLLNDLPQFKDKSPSTEIVAQTIFEIVQAHLNEYDNKPKCVQVYLRETPSSYVVYRPKENK

SEQ ID NO: 25838 - protein, 142 aa, Staphylococcus hyicus
  misc_feature (1)..(142): tr|A0A0A8HMF4|A0A0A8HMF4_STAHY 6-pyruvoyl tetrahydrobio pterin synthase OS=Staphylococcus hyicus OX=1284 GN=BUZ 57_00080 PE=4 SV=1
MAKFDNVKPPKKFARHHKTILVLRHYEFTADARIFLSETTFHDLKDNRYLIDIELWSKTDDLGMAVDFRIIDNIYKTHLQPKLDGQLLNETLPDMNITLENLIHWMWETLSVHLPEDVSLNAIAMYETPEQGVRFTRDIMAQ

SEQ ID NO: 25839 - protein, 139 aa, Staphylococcus hyicus
  misc_feature (1)..(139): tr|A0A4U9ZLQ4|A0A4U9ZLQ4_STAHY 6-carboxy-5,6,7,8-tetrah ydropterin synthase OS=Staphylococcus hyicus OX=1284 GN =queD PE=3 SV=1
MLQQIYPNTTHPYQFELNKDFNFSAAHHIPCEEAGICQNVHGHTYFVNLTIVGDKLDDTGFLVNFSHLKKMIHGKFDHQLLNNLPAFKNKIPSTEIVAETIYQIVKENLASLEHQPKCIQVFVRETPTSYVVFRPKEQV

SEQ ID NO: 25840 - protein, 139 aa, Staphylococcus intermedius
  misc_feature (1)..(139): tr|A0A380G8H3|A0A380G8H3_STAIN 6-carboxy-5,6,7,8-tetrah ydropterin synthase OS=Staphylococcus intermedius NCTC 11048 OX=1141106 GN=queD_1 PE=3 SV=1
MLQQFYPVAPHNFKYELNKDMQFAAAHFIDHVSAGKCQNVHGHTYFVNVTIVGNELMENGFLVNFQLLKQAVHGRYDHTLMNNHDEFRFNQEEPSTENVAKAIYKTLQEELKNYNNNPQVLQVIVRETPTSYVTYKEGY

SEQ ID NO: 25841 - protein, 143 aa, Staphylococcus intermedius
  misc_feature (1)..(143): tr|A0A380GAI6|A0A380GAI6_STAIN 6-carboxy-5,6,7,8-tetrah ydropterin synthase OS=Staphylococcus intermedius NCTC 11048 OX=1141106 GN=queD_2 PE=3 SV=1
MMQQMYPQVDHDYMFELNKDFNFSAAHFIPDERAGKCTRVHGHTYFVNLTIAGDELDSMGFLINFSELKSLIHDQFDHYLLNDLAPFQGKSPSTEFVAQTIYDIVSTRLAELPNAPKCLQVFLRETPTSYVVYRPKNKEQRHG

SEQ ID NO: 25842 - protein, 141 aa, Staphylococcus kloosii
  misc_feature (1)..(141): tr|A0A151A6Z1|A0A151A6Z1_9STAP 6-carboxy-5,6,7,8-tetrah ydropterin synthase OS=Staphylococcus kloosii OX=29384 GN=A0131_10175 PE=3 SV=1
MFQQNYPQVNHNYVFELNKDFNFSAAHYIPSEDAGKCMRTHGHTYFVNLTIAGNELDHNGFLVNFSDLKKLVHGSFDHQLLNELPMFKGKSPSTEVVAQTIYEIIQNNLDARSNKPHCLQVYVRETPTSYVVYRPKEHQNG

SEQ ID NO: 25843 - protein, 141 aa, Staphylococcus kloosii
  misc_feature (1)..(141): tr|A0A512QED3|A0A512QED3_9STAP Uncharacterized protein OS=Staphylococcus kloosii OX=29384 GN=SKL01_09830 PE=4 SV=1
MSDIKNVHPPEQFKYKNSAVRIKNYFQFTCDNRIYFSKVKYIDLTNHLYKFDVEILSPIDELGLALDFNEVNKIYNEHIAPYLDKQLVNETLPTMNTTAENIALWIWDQFARALPKGNKLEKLTFFENETQGLVLTADDME

SEQ ID NO: 25844 - protein, 143 aa, Staphylococcus lentus
  misc_feature (1)..(143): tr|A0A178PF42|A0A178PF42_STALE 6-carboxy-5,6,7,8-tetrah ydropterin synthase OS=Staphylococcus lentus OX=42858 G N=queD PE=3 SV=1
MLQQIYPSVQHPYAFELNKDFNFSSAHYIPYEEAGKCHNVHGHTYFINLTIAGDELDKMGFLVNFSELKSLIHKRYDHRLLNDFEEFKDNSPSTEQVAQTIYNIVQESLDNRDNKPKCVQVFVRETPTSYVVYRPVKQGENNA

SEQ ID NO: 25845 - protein, 139 aa, Staphylococcus lugdunensis
  misc_feature (1)..(139): tr|A0A133Q1E0|A0A133Q1E0_STALU 6-carboxy-5,6,7,8-tetrah ydropterin synthase OS=Staphylococcus lugdunensis OX=28 035 GN=queD PE=3 SV=1
MLQQIYPSVSHPYQFELNKDFNFSAAHFIPCKDAGKCVRTHGHTYFVNLTIAGDTLDHNGFLINFQELKALIHDQFDHYLLNDLPHFKDQSPSTEIVAQTIYNMIENHLMQYTNRPHCVQVYLRETPTSYVVYRPKVQH

SEQ ID NO: 25846 - protein, 146 aa, Staphylococcus lugdunensis
  misc_feature (1)..(146): tr|A0A133Q4X8|A0A133Q4X8_STALU Uncharacterized protein OS=Staphylococcus lugdunensis OX=28035 GN=HMPREF3225_01 424 PE=4 SV=1
MYNDISEVQLPQQFKYGSQQDIVVRSYYQFTADNRIYFDAHHYRDLIDHEYRLTIDIQSPVNAYGLAIDFFDIDEIYYQYIHPKLDGQLINNTLILMNTTAENIANWLWEQFKHHLPSGHHICRLELAETAQHSVILDSRLNYKRV

SEQ ID NO: 25847 - protein, 143 aa, Staphylococcus lutrae
  misc_feature (1)..(143): tr|A0A1W6BN97|A0A1W6BN97_9STAP 6-carboxy-5,6,7,8-tetrah ydropterin synthase OS=Staphylococcus lutrae OX=155085 GN=queD PE=3 SV=1
MMQQIYPQVAHDYIYELNKDFNFSAAHFIPDERAGKCMRVHGHTYFVNLTIGGDKLNSMGFLINFSTLKSLIHDRFDHYLLNDLVDFQGKSPSTEVVAHTIYEIVAAHLEQLPNAPQCLQVFLRETPTSYVVYRPKRQEHHHG

SEQ ID NO: 25848 - protein, 137 aa, Staphylococcus massiliensis
  misc_feature (1)..(137): tr|K9B8D2|K9B8D2_9STAP 6-pyruvoyl tetrahydrobiopterin s ynthase OS=Staphylococcus massiliensis S46 OX=1229783 G N=C273_01988 PE=4 SV=1
MSRLDGIKAPSQFEIHAEPVTVEQHFTFHADNRIFFSDTAYKDLFHHEYTFVLSLKALTSKLGIAVDFHEIDRIYRDYLEPKLNDVCLNTTLPEMNTTVENIGYWIREQFKQYLPDGVGIEQLTIYETPKHAVILKG

SEQ ID NO: 25849 - protein, 141 aa, Staphylococcus massiliensis
  misc_feature (1)..(141): tr|K9B156|K9B156_9STAP 6-carboxy-5,6,7,8-tetrahydropter in synthase OS=Staphylococcus massiliensis S46 OX=12297 83 GN=C273_05080 PE=3 SV=1
MFQQMYPSTNHPYQFELNKDFNFSSAHYIPSEDAGKCMRTHGHTYFVNLTIAGDELDDTGFLVNFSALKALVHDQFDHQLLNDLDIFHGKSPSTEMVAKTIYDMVAEYLRKRPNQPKCVQVFVRETPTSYVIYRPKDVEHG

SEQ ID NO: 25850 - protein, 142 aa, Staphylococcus microti
  misc_feature (1)..(142): tr|A0A0D6XSA1|A0A0D6XSA1_9STAP 6-carboxy-5,6,7,8-tetrah ydropterin synthase OS=Staphylococcus microti OX=569857 GN=queD PE=3 SV=1
MMQQIYPSVDHPYTFELNKDFNFSAAHYIPAPEAGKCMRTHGHTYFVNLTIGGDALDETGFLINFSHLKALIHDQFDHYLLNDLPLFEGKSPSTEVVAQTIYEIVADHLKDLPHAPKCLQVFLRETPSSYVVYRPKHKKEQL

SEQ ID NO: 25851 - protein, 141 aa, Staphylococcus muscae
  misc_feature (1)..(141): tr|A0A240CB73|A0A240CB73_9STAP 6-pyruvoyl tetrahydrobio pterin synthase OS=Staphylococcus muscae OX=1294 GN=SAM EA4412661_01938 PE=4 SV=1
MSQFDHLQAPRTFAYRQSSVHVIKHYQFTCDNRIYFTETAHVDLSNHTYHLELSLQATTNAQGIAVDFHHIDKLYHTHLSPYLDGQLLNETLPEMSTTAENIAYWIWEQLTGVLPHDVSLHTLVLYEKPEQGVKLTHDMLS

SEQ ID NO: 25852 - protein, 142 aa, Staphylococcus muscae
  misc_feature (1)..(142): tr|A0A240BX07|A0A240BX07_9STAP 6-carboxy-5,6,7,8-tetrah ydropterin synthase OS=Staphylococcus muscae OX=1294 GN =queD PE=3 SV=1
MMQQIYPSIDHPYTFELNKDFNFSAAHYIPAPEAGKCMRTHGHTYFVNLTIGGDALDDTGFLINFSHLKALIHDQFDHYLLNDLPLFEGKSPSTEVVAQTIYEIVENHLAELPHNPKCLQVFLRETPSSYVVYRPKRVKEHK

SEQ ID NO: 25853 - protein, 143 aa, Staphylococcus nepalensis
  misc_feature (1)..(143): tr|A0A291JNY2|A0A291JNY2_9STAP 6-pyruvoyl tetrahydrobio pterin synthase OS=Staphylococcus nepalensis OX=214473 GN=BJD96_01900 PE=4 SV=1
MTNFENVQPPKQFKYRSNAVLIKNYYEFTCDNRIYFTQTVHKDLANQRSQFNIEILSQIDDYGLALDFNEVDKIYKSKIATYLDGQLINEALPPMNTTAENIAFWIWEQFEQFLPENNTLQKLEFFENETQGLVLTRERMEAN

SEQ ID NO: 25854 - protein, 141 aa, Staphylococcus nepalensis; identical to SEQ ID NO: 19382
  misc_feature (1)..(141): tr|A0A291JN84|A0A291JN84_9STAP 6-carboxy-5,6,7,8-tetrah ydropterin synthase OS=Staphylococcus nepalensis OX=214 473 GN=queD PE=3 SV=1

SEQ ID NO: 25855 - protein, 139 aa, Staphylococcus pasteuri
  misc_feature (1)..(139): tr|A0A0M2NNW7|A0A0M2NNW7_9STAP 6-carboxy-5,6,7,8-tetrah ydropterin synthase OS=Staphylococcus pasteuri OX=45972 GN=UF70_0400 PE=3 SV=1
MLQQIYPSVSHPYQFELNKDFNFSAAHYIPSEDAGKCMRTHGHTYFVDITIVGDELDHNGFLVNFSDLKQLIHGQFDHYLLNDLVEFKGKSPSTEIVAQTIYQMVQSYLNEQDNNPKCVQVYLRETPTSYVVFRPKDEQ

SEQ ID NO: 25856 - protein, 139 aa, Staphylococcus pasteuri; identical to SEQ ID NO: 25825
  misc_feature (1)..(139): tr|A0A269XJI3|A0A269XJI3_9STAP 6-carboxy-5,6,7,8-tetrah ydropterin synthase OS=Staphylococcus pasteuri OX=45972 GN=B8W95_05075 PE=3 SV=1

SEQ ID NO: 25857 - protein, 139 aa, Staphylococcus petrasii
  misc_feature (1)..(139): tr|A0A5F1B318|A0A5F1B318_9STAP 6-carboxy-5,6,7,8-tetrah ydropterin synthase OS=Staphylococcus petrasii subsp. p etrasii OX=1276937 GN=queD PE=3 SV=1
MFQQIYPQVNHPYSFELNKDFNFSAAHFIPSEDAGKCMRTHGHTYFVNLTIAGDTLDHNGFLINFSDLKKLIHDQFDHYLLNDLPQFKGKSPSTEIVAQTIYDIVESHLQTYDNQPHCVQVYLRETPSSYVVYRPKEFK

SEQ ID NO: 25858 - protein, 139 aa, Staphylococcus petrasii; identical to SEQ ID NO: 25857
  misc_feature (1)..(139): tr|A0A380G2C1|A0A380G2C1_9STAP 6-carboxy-5,6,7,8-tetrah ydropterin synthase OS=Staphylococcus petrasii subsp. j ettensis OX=1077965 GN=queD PE=3 SV=1

SEQ ID NO: 25859 - protein, 141 aa, Staphylococcus pettenkoferi
  misc_feature (1)..(141): tr|A0A2N6QLN2|A0A2N6QLN2_9STAP 6-carboxy-5,6,7,8-tetrah ydropterin synthase OS=Staphylococcus pettenkoferi OX=1 70573 GN=queD PE=3 SV=1
MFQQMYPSINHKYSFELNKDFNFSAAHYIPSEDAGKCMRTHGHTYFVNLTIVGDELDHNGFLVNFSELKQLVHGQFDHHLLNDLPAFEGQSPSTEIVAQTVYDMVQEHLDQRDNQPKCAQVFVRETPTSYVRYIAKEFRHG

SEQ ID NO: 25860 - protein, 141 aa, Staphylococcus piscifermentans
  misc_feature (1)..(141): tr|A0A239UFW7|A0A239UFW7_9STAP 6-carboxy-5,6,7,8-tetrah ydropterin synthase OS=Staphylococcus piscifermentans O X=70258 GN=queD PE=3 SV=1
MLQQIYPSVSHPYAFELNKDFHFAAAHYIPCEDAGKCVRTHGHTYFVNLTIVGDELDHSGFLINFAYLKKQIHEQFDHYLLNDLPQFKDKMPSTEVVAQTICKMAEEILEQQPNHPKCAQVYLRETPSSYVVYRPKEFRNG

SEQ ID NO: 25861 - protein, 142 aa, Staphylococcus piscifermentans
  misc_feature (1)..(142): tr|A0A431YY25|A0A431YY25_9STAP 6-pyruvoyl tetrahydrobio pterin synthase OS=Staphylococcus piscifermentans OX=70 258 GN=CD125_09585 PE=4 SV=1
MTNFDNVQPPQQFKYRDNDVCIKNYYEFTCNNRIYFTEKFHKDLENHLYKFNIEILSAIDDYGLAMDFNEVDKLYKKEIEPYLDGKLVNETLPDMNTTAENIAFWIWEQFDRLLPENNKLQKLEFFETETQGLVITSELMEK

SEQ ID NO: 25862 - protein, 38 aa, Staphylococcus pseudintermedius
  misc_feature (1)..(38): tr|A0A317YP85|A0A317YP85_STAPS 6-carboxytetrahydropteri n synthase QueD (Fragment) OS=Staphylococcus pseudinter medius OX=283734 GN=DD902_14525 PE=4 SV=1
YQIVKENLASLEHQPKCIQVFVRETPTSYVVFRPKEQV

SEQ ID NO: 25863 - protein, 143 aa, Staphylococcus pseudintermedius
  misc_feature (1)..(143): tr|A0A1B1P3D3|A0A1B1P3D3_STAPS 6-carboxy-5,6,7,8-tetrah ydropterin synthase OS=Staphylococcus pseudintermedius OX=283734 GN=queD PE=3 SV=1
MMQQMYPQVDHDYMFELNKDFNFSAAHFIPDERAGKCTRVHGHTYFVNLTIGGDELDSMGFLINFSELKSLIHDQFDHYLLNDLVPFQGKSPSTEIVAQTIYDIVSARLAELPNAPKCLQVFLRETPTSYVIYRPKKKEQRHG

SEQ ID NO: 25864 - protein, 142 aa, Staphylococcus rostri
  misc_feature (1)..(142): tr|A0A2K3YS27|A0A2K3YS27_9STAP 6-carboxy-5,6,7,8-tetrah ydropterin synthase OS=Staphylococcus rostri OX=522262 GN=queD PE=3 SV=1
MMQQIYPSVEHPYTFELNKDFNFSAAHYIPAPEAGKCMRTHGHTYFVNLTIGGDALDDTGFLINFSHLKALIHDQFDHYLLNDLPMFEGKSPSTEVVAQTIYDIVADHLKDLPHAPKCLQVFLRETPSSYVVYRPKRTKEHM

SEQ ID NO: 25865 - protein, 139 aa, Staphylococcus saccharolyticus
  misc_feature (1)..(139): tr|A0A431YT17|A0A431YT17_9STAP 6-carboxy-5,6,7,8-tetrah ydropterin synthase OS=Staphylococcus saccharolyticus O X=33028 GN=queD PE=3 SV=1
MIQQIYPSVSHPYQFELNKDFNFSAAHYIPSEDAGKCMRTHGHTYFVNITIVGDELDHNGFLVNFSDLKQLIHGQFDHYLLNDLVEFKGKSPSTEIVAQTIYQMVQSYLNEQDNNPKCVQVYLRETPTSYVVFRPKDEQ

SEQ ID NO: 25866 - protein, 139 aa, Staphylococcus saccharolyticus
  misc_feature (1)..(139): tr|A0A380H9N7|A0A380H9N7_9STAP 6-carboxy-5,6,7,8-tetrah ydropterin synthase OS=Staphylococcus saccharolyticus O X=33028 GN=queD PE=3 SV=1
MMQQIYPSVTHPYQFELNKDFNFSAAHYIPCEDAGICIRTHGHTYFVNLTIAGDSLDHNGFLVNFSDLKKLVHDQFDHYLLNDLALFKDKRPSTEVVAQTIYQIVQNNLNNKANQPQCVQVYLRETPTSYVVFRPKDKQ

SEQ ID NO: 25867 - protein, 142 aa, Staphylococcus saprophyticus
  misc_feature (1)..(142): tr|Q4A0G7|Q4A0G7_STAS1 Putative 6-pyruvoyl tetrahydrobi opterin synthase OS=Staphylococcus saprophyticus subsp. saprophyticus (strain ATCC 15305 / DSM 20229 / NCIMB 8 711 / NCTC 7292 / S-41) OX=342451 GN=SSP0291 PE=
MSKFDHIQPPDHFRYKEGEVLIKNYYEFTCDNRIYFTQTVHKDLENQTYKFNIEILSSIDAYGLAMDFNEVDKLYEREIAPYIDGQLVNETLPEMNTTAENIAIWIWHQFNKHLPENNSLQKLEFFETDTQGLVLTTELMDK

SEQ ID NO: 25868 - protein, 142 aa, Staphylococcus saprophyticus
  misc_feature (1)..(142): tr|A0A4Y9KRS1|A0A4Y9KRS1_STASA 6-pyruvoyl tetrahydrobio pterin synthase OS=Staphylococcus saprophyticus OX=2938 5 GN=E4T75_02125 PE=4 SV=1
MTKFDHIQPPGQFKYRNGQVLIKNCYKFTCDNRIYFTNTVHKDLEDQQYQFNIEILSDIDKYGLALDFNEVDKLYQTEIEPYLDGQLVNDTLPEMNTTAENIAIWIWEQFEKSLPKETQLQKLEFFETASQGLVLTTNLMKH

SEQ ID NO: 25869 - protein, 143 aa, Staphylococcus schleiferi
  misc_feature (1)..(143): tr|A0A0K1A8F0|A0A0K1A8F0_9STAP 6-carboxy-5,6,7,8-tetrah ydropterin synthase OS=Staphylococcus schleiferi OX=129 5 GN=queD PE=3 SV=1
MMQQIYPSVNHDYTYELNKDFNFSAAHFIPDERAGKCMRVHGHTYFVNITIAGDALDELGFLINFSELKSLIHDKFDHYLLNDLTHFQGKSPSTEIVAQTIYEIVAEHLKDLPHAPKCLQIFLRETPTSYVVYRPKKQEPNHG

SEQ ID NO: 25870 - protein, 142 aa, Staphylococcus schleiferi
  misc_feature (1)..(142): tr|A0A0K0ZS83|A0A0K0ZS83_9STAP 6-pyruvoyl tetrahydrobio pterin synthase OS=Staphylococcus schleiferi OX=1295 GN =SSCHL_0464 PE=4 SV=1
MTKFDHVRPPQHFARHHKTLIVIKRYAFTCDNRVYFSDTRYVDLEQHTYQLEVELWSKTDDQGMAVDFKEIDAVYNHYLAPKLEGQLINDTLPEMNTTVENIAHWIWQQFHAHLPEGVSLNTITLFETPDQGTKLTRNIMAQ

SEQ ID NO: 25871 - protein, 139 aa, Staphylococcus schweitzeri
  misc_feature (1)..(139): tr|A0A2K4AJU8|A0A2K4AJU8_9STAP 6-carboxy-5,6,7,8-tetrah ydropterin synthase OS=Staphylococcus schweitzeri OX=16 54388 GN=queD PE=3 SV=1
MLQQIYPSTTHPFQFELNKDFNFSAAHHIPCEEAGICQNVHGHTYFVNLTIVGDKLDDTGFLINFSHLKKMIHGKFDHQLLNNLPAFKNKIPSTEIVAETIYQIVKENLDILEHQPKCIQVFVRETPTSYVVYRPKEQV

SEQ ID NO: 25872 - protein, 143 aa, Staphylococcus sciuri
  misc_feature (1)..(143): tr|A0A3S0SMD4|A0A3S0SMD4_STASR 6-carboxy-5,6,7,8-tetrah ydropterin synthase OS=Staphylococcus sciuri subsp. rod entium OX=147469 GN=queD PE=3 SV=1
MLHQMYPQVSHHYIYELNKDFNFSAAHAICDKRAGKCERVHGHTYFVNLTIVGDTLDDLGFLVNFSTLKQLVHDQFDHHLLNNLPLFKGKSPSTEVVAETIYGIVASHLETLPHQPQCVQVFLRETPSSYVVYRPKKKETPHG

SEQ ID NO: 25873 - protein, 143 aa, Staphylococcus sciuri
  misc_feature (1)..(143): tr|A0A5F0UVK9|A0A5F0UVK9_STASC 6-carboxy-5,6,7,8-tetrah ydropterin synthase OS=Staphylococcus sciuri OX=1296 GN =queD PE=3 SV=1
MLQQIYPSVQHPYAFELNKDFNFSSAHYIPHEEAGKCMNVHGHTYFVNLTIAGDELDKMGFLVNFSELKSLIHKRYDHQLLNNFEEFKDYSPSTEQVAQTIYNIVQASLDKRDNKPKCIQVFVRETPTSYVVYRPTKKGDDNA

SEQ ID NO: 25874 - protein, 143 aa, Staphylococcus simiae
  misc_feature (1)..(143): tr|G5JG85|G5JG85_9STAP 6-carboxy-5,6,7,8-tetrahydropter in synthase OS=Staphylococcus simiae CCM 7213 = CCUG 51 256 OX=911238 GN=SS7213T_02283 PE=3 SV=1
MLQQIYPSTDHPFQFELNKDFNFSAAHFIPSEDAGKCMRTHGHTYFVNLTIAGDELDHNGFLVNFSYLKKLIHDQFDHDLLNQLPAFEGQSPSTEVVAHKIYSIVQEELNTRDNHPQCVQVYLRETPTSYVVFRPKECQQHNG

SEQ ID NO: 25875 - protein, 142 aa, Staphylococcus simiae
  misc_feature (1)..(142): tr|G5JH24|G5JH24_9STAP Uncharacterized protein OS=Staph ylococcus simiae CCM 7213 = CCUG 51256 OX=911238 GN=SS7 213T_03765 PE=4 SV=1
MTQFDHLTAPQHFQYKGGEVVLKQRYKFICDNRIYFSTTQFKDLQQHLYELEVDVLSPINDFGMAMDFNDMDHIYETFIKPKVHHQRLNDTLPSFNTTAENIAQWLWNEFNKHLPQGNQMYQLQLFETPQHGIYLNQTMMTE

SEQ ID NO: 25876 - protein, 141 aa, Staphylococcus simulans
  misc_feature (1)..(141): tr|A0A133QNG2|A0A133QNG2_STASI 6-carboxy-5,6,7,8-tetrah ydropterin synthase OS=Staphylococcus simulans OX=1286 GN=queD PE=3 SV=1
MLQQIYPTVAHPYAFELNKDFHFAAAHYIPCEDAGKCVRTHGHTYFVNLTIVGDELDHSGFLINFAALKKQIHEQFDHYLLNDLPQFKDKMPSTEVVAQTICQLTEEILEKQPNRPKCAQVYLRETPSSYVVYRPKEFRHG

SEQ ID NO: 25877 - protein, 141 aa, Staphylococcus simulans
  misc_feature (1)..(141): tr|A0A2T4R137|A0A2T4R137_STASI 6-carboxy-5,6,7,8-tetrah ydropterin synthase OS=Staphylococcus simulans OX=1286 GN=queD PE=3 SV=1
MLQQIYPTVVHPYAFELNKDFHFAAAHYIPCEDAGKCVRTHGHTYFVNLTIVGDELDHSGFLINFAALKKQIHEQFDHYLLNDLPQFKDKMPSTEVVAQTICQLTEEILEKQPNRPKCAQVYLRETPSSYVVYRPKEFRHG

SEQ ID NO: 25878 - protein, 139 aa, Staphylococcus sp.
  misc_feature (1)..(139): tr|A0A1J4H6Q5|A0A1J4H6Q5_9STAP 6-carboxy-5,6,7,8-tetrah ydropterin synthase OS=Staphylococcus sp. HMSC34G04 OX= 1608860 GN=HMPREF3241_10490 PE=3 SV=1
MQQIYPSVTHPYQFELNKDFNFSAAHYIPFEEAGKCIRTHGHTYYVNLTIAGNTLDKCGFLVNFRDLKKLVHEQFDHYLLNDLPAFKDKSPSTEIVAQTIYHIVQKELNQRENQPKCVQVYLRETPSSYVVYRPKEDQV

SEQ ID NO: 25879 - protein, 139 aa, Staphylococcus sp.
  misc_feature (1)..(139): tr|A0A2J6P2T8|A0A2J6P2T8_9STAP 6-carboxy-5,6,7,8-tetrah ydropterin synthase OS=Staphylococcus sp. UMB0328 OX=20 29110 GN=queD PE=3 SV=1
MIQQIYPSVNHPYQFELNKDFNFSAAHYIPSEDAGKCMRTHGHTYFVNITIAGDELDHNGFLVNFSDLKKLIHDQFDHYLLNDLVQFKGKSPSTEIVAQTIYQMVQSYLKDQKNQPKCVQVYLRETPTSYVVYRPKGDQ

SEQ ID NO: 25880 - protein, 143 aa, Staphylococcus stepanovicii
  misc_feature (1)..(143): tr|A0A240A0J2|A0A240A0J2_9STAP 6-carboxy-5,6,7,8-tetrah ydropterin synthase OS=Staphylococcus stepanovicii OX=6 43214 GN=queD PE=3 SV=1
MLQQIYPSVQHPYSFELNKDFNFSSAHYIPFEEAGKCHNVHGHTYFINLTIAGNELDEMGFLVNFSELKSLIHGRYDHRLLNDFQEFQDNSPSTEQVAQTIYNIVQESLDKRLNKPKCVQVFVRETPTSYVVYRPANHGVDHA

SEQ ID NO: 25881 - protein, 103 aa, Staphylococcus succinus
  misc_feature (1)..(103): tr|A0A2T4Q495|A0A2T4Q495_9STAP 6-pyruvoyl tetrahydrobio pterin synthase OS=Staphylococcus succinus OX=61015 GN= BU064_14185 PE=4 SV=1
MHKDLENQQYKFNVEILSEIDHYGLAMDFNEVDKLYKAHIAPYLEYQLVNETLPEMNTTAENIAFWIWEQFEIFLPQNNKLQKLEFFENDTQGLVLTAKLMDN

SEQ ID NO: 25882 - protein, 141 aa, Staphylococcus succinus
  misc_feature (1)..(141): tr|A0A2T4Q9N2|A0A2T4Q9N2_9STAP 6-carboxy-5,6,7,8-tetrah ydropterin synthase OS=Staphylococcus succinus OX=61015 GN=queD PE=3 SV=1
MFQQNYPSVQHPYCFELNKDFNFSAAHYIPNEDAGKCMRTHGHTYFVNLTIAGDTLDHNGFLVNFSDLKKLIHGQFDHYLLNDLPQFKGKSPSTEIVAQTIYEMVQKSLDERDNQPKCLQVYVRETPTSYVVYRPKGSSHE

SEQ ID NO: 25883 - protein, 143 aa, Staphylococcus vitulinus
  misc_feature (1)..(143): tr|A0A2T4PVU4|A0A2T4PVU4_9STAP 6-carboxy-5,6,7,8-tetrah ydropterin synthase OS=Staphylococcus vitulinus OX=7123 7 GN=queD PE=3 SV=1
MLQQIYPSVQHPYAFELNKDFNFSSAHYISYEEAGKCKNIHGHTYFINLTIAGNELDKMGFLVNFSELKSLIHKRYDHKLLNDFDEFKDNSPSTEQVAQTIYNIVQEALDRRANKPKCVQVFVRETPTSYVVYRPIKQGDNNA

SEQ ID NO: 25884 - protein, 167 aa, Staphylococcus warneri
  misc_feature (1)..(167): tr|A0A2V3ZH22|A0A2V3ZH22_STAWA 6-carboxytetrahydropteri n synthase QueD OS=Staphylococcus warneri OX=1292 GN=qu eD PE=4 SV=1
MLQQFYPVKSHNYKYELNKDMNFAAAHFIDHSSAGKCQNMHGHTYFVNVTIVGNELQDNGFLVNFQQLKSLVHGKYDHTVMNDSDDFKTEEPSTEVVAKAIYKNIEEALMEYNNNPKVLQVIVRETPTSYVTYSEPLEYIHDIDTEHTYTDNDVFVSKTKDTDWSEW

SEQ ID NO: 25885 - protein, 139 aa, Staphylococcus warneri; identical to SEQ ID NO: 25825
  misc_feature (1)..(139): tr|A0A5F0U233|A0A5F0U233_STAWA 6-carboxy-5,6,7,8-tetrah ydropterin synthase OS=Staphylococcus warneri OX=1292 G N=queD PE=3 SV=1

SEQ ID NO: 25886 - protein, 142 aa, Staphylococcus xylosus
  misc_feature (1)..(142): tr|A0A2T4QJ45|A0A2T4QJ45_STAXY 6-carboxy-5,6,7,8-tetrah ydropterin synthase OS=Staphylococcus xylosus OX=1288 G N=queD PE=3 SV=1
MFQQNYPSVQHPYTFELNKDFNFSAAHYIPSDDAGKCMRTHGHTYFVNLTIVGDSLDHNGFLVNFSELKQLVHGQFDHHLLNDLPQFEGKSPSTEIVAQTIYEMVQTSLNQRNNQPKCVQVYVRETPTSYVVYRPKEQRNHE

SEQ ID NO: 25887 - protein, 141 aa, Staphylococcus xylosus
  misc_feature (1)..(141): tr|A0A418IFR8|A0A418IFR8_STAXY 6-pyruvoyl tetrahydrobio pterin synthase OS=Staphylococcus xylosus OX=1288 GN=BU 112_06600 PE=4 SV=1
MTKFDHIEPPTQFQYRKGQVLIKNFFEFTCDNRIYFTNTVHKDLADQQYKFNIEILSDIDKYGLALDFNEVDKLYQKEIEPYLDGQLVNDTLPEMNTTAENIAIWIWEQFTKHLPNEYQLQKLEFFETSSQGLVLTANLMK

SEQ ID NO: 25888 - protein, 132 aa, Stappia indica
  misc_feature (1)..(132): tr|A0A285TBT1|A0A285TBT1_9RHOB 6-pyruvoyl-tetrahydropte rin synthase OS=Stappia indica OX=538381 GN=SAMN0542151 2_11064 PE=4 SV=1
MHAVEVRDHIMIAHSFKGDVFGPAQQLHGATFVVDAAFFSQELDENGIVIDIGRAHEVLKETLTPLNYRNLDDVPEFKGKNTTTEFLSRHIFDALAKAARENRLGRPGNELASIRVTLHESHAARAWYEGKI

SEQ ID NO: 25889 - protein, 132 aa, Stappia sp.
  misc_feature (1)..(132): tr|A0A419YX91|A0A419YX91_9RHOB 6-pyruvoyl-tetrahydropte rin synthase OS=Stappia sp. ARW1T OX=2135615 GN=C7968_3 749 PE=4 SV=1
MHAVEVRDHIMIAHSFKGDVFGPAQQLHGATFVVDAAFFSQELDENGIVIDIGRAHEVLKETLTPLNYRNLDDVPEFKGKNTTTEFLSRHIFDALAKAARENRLGRPGSELASIRVTLHESHAARAWYEGKI

SEQ ID NO: 25890 - protein, 132 aa, Stappia sp.
  misc_feature (1)..(132): tr|A0A1Y1SN14|A0A1Y1SN14_9RHOB Uncharacterized protein OS=Stappia sp. 22II-S9-Z10 OX=1317123 GN=ATO13_18625 PE =4 SV=1
MYALEVRDHIMIAHSLPGEAFGPAQKMHGATFVVDAAFFAERLGPNDIVIDIGLATDTLKAILSTLNYANLDELPDFASQRSTTEVLCRWIFDKLAAAARDGTLGEDGQAVAKIRVTLNESHIARAWYEAAL

SEQ ID NO: 25891 - protein, 133 aa, Starkeya novella
  misc_feature (1)..(133): tr|D7AAY7|D7AAY7_STAND Uncharacterized protein OS=Stark eya novella (strain ATCC 8093 / DSM 506 / CCM 1077 / IA M 12100 / NBRC 12443 / NCIB 9113) OX=639283 GN=Snov_373 4 PE=4 SV=1
MYCVEVRDRIMIAHSLPDPFFGPAQGLHGATFVVDVAFFRESLTTKNVVVDIGAALDVLKQTLKPLAYQNLDTLPEFAGKLTTTEFLAKHIFDAMAAAARSGALGEDADGLAKIRVTLHETDLARASYEGGLR

SEQ ID NO: 25892 - protein, 139 aa, Starkeya novella
  misc_feature (1)..(139): tr|A0A2W5KDU0|A0A2W5KDU0_STANO Uncharacterized protein OS=Starkeya novella OX=921 GN=DI565_13730 PE=4 SV=1
MYAVEVRDRIMIAHSLKGDVFGPAQKLHGATFVVDVAFFRRELDPDSIVVDIGRATEALSEALKPLNYANLDEVEELKGRLTTTEFLSRLIFDRMAGALAEGRLGPHAGGVETIRVTLQESDVARAWFEGPVGKGAAHG

SEQ ID NO: 25893 - protein, 193 aa, Stella humosa
  misc_feature (1)..(193): tr|A0A3N1LJH6|A0A3N1LJH6_9PROT 6-pyruvoyltetrahydropter in/6-carboxytetrahydropterin synthase OS=Stella humosa OX=94 GN=EDC65_2417 PE=4 SV=1
MDFAITRRIEIDAGHRIASHGSKCRHLHGHRYVVEATCRAASGELVREGEQSGMVLDFGFLKDEMVRIVDGPCDHGLIVAIDDNALLGLFAPAAADGEAWVADATREVAAVGYAERTGAALGQKLYLVPFPPTAECLARHWFERLSPAIAARSTGRAELVGVTVWETPNCRADFGLANMIQPPRLASEQERSY

SEQ ID NO: 25894 - protein, 137 aa, Stella humosa
  misc_feature (1)..(137): tr|A0A3N1KYC5|A0A3N1KYC5_9PROT 6-pyruvoyl-tetrahydropte rin synthase OS=Stella humosa OX=94 GN=EDC65_4458 PE=4 SV=1
MYAVTVCDHFMIAHSFKGELFGPAQALHGATYAVEAEFRRAELDANGVVCDIGRAMTALREVLAAFDYRNLDAEPDLAGINTTTEFLSAEIHRRLAARAAAGDLGPDTAGRLESIKVILRESPRAWASFEGPVAAPR

SEQ ID NO: 25895 - protein, 118 aa, Stenotrophomonas acidaminiphila
  misc_feature (1)..(118): tr|A0A2W5L7I5|A0A2W5L7I5_9GAMM 6-carboxy-5,6,7,8-tetrah ydropterin synthase OS=Stenotrophomonas acidaminiphila OX=128780 GN=queD PE=3 SV=1
MDIFKVFTVEAAHRLPHVPEGHKCARLHGHSFRIELHLSGPVDPQAGWVMDFADVKAAFKPIYDRLDHHYLNEIPGLENPTSEQLATWIWDQTKPLLPLLSAIVVHETCTSGCRYTGQ

SEQ ID NO: 25896 - protein, 118 aa, Stenotrophomonas acidaminiphila
  misc_feature (1)..(118): tr|A0A0R0DY25|A0A0R0DY25_9GAMM 6-carboxy-5,6,7,8-tetrah ydropterin synthase OS=Stenotrophomonas acidaminiphila OX=128780 GN=ptps PE=3 SV=1
MDIFKDFTLEAAHRLPNVPAGHKCARLHGHSFRVRLEVSGEPGAESGWVMDFGDIKAAFQPLYEQLDHHYLNDIPGLENPTSERLAIWIWDRLQPVLPQLSAVTVHETCTSGCRYRGI

SEQ ID NO: 25897 - protein, 121 aa, Stenotrophomonas chelatiphaga
  misc_feature (1)..(121): tr|A0A0R0D073|A0A0R0D073_9GAMM 6-carboxy-5,6,7,8-tetrah ydropterin synthase OS=Stenotrophomonas chelatiphaga OX =517011 GN=ABB28_06820 PE=3 SV=1
MEIFKVFMIEAAHRLPNVPPGHKCSRLHGHSFRVELKVEGEPGAETGWIMDFGDVKAAFQPIYDRLDHHYLNDIPGLENPTSENLATWIWQQLKPVLPELSEITVHETCTSGCRYRGPTGR

SEQ ID NO: 25898 - protein, 118 aa, Stenotrophomonas daejeonensis
  misc_feature (1)..(118): tr|A0A0R0E0I1|A0A0R0E0I1_9GAMM 6-carboxy-5,6,7,8-tetrah ydropterin synthase OS=Stenotrophomonas daejeonensis OX =659018 GN=ABB34_10530 PE=3 SV=1
MDIFKDFTLEAAHRLPNVPPGHKCARLHGHSFRVRLEVSGEPGAETGWVMDFGDIKAAFLPLYEQLDHHYLNDIPGLENPTSERLSMWIWERLKPALPQLSAVTVHETCTSGCRYRGD

SEQ ID NO: 25899 - protein, 120 aa, Stenotrophomonas ginsengisoli
  misc_feature (1)..(120): tr|A0A0R0DAT4|A0A0R0DAT4_9GAMM 6-carboxy-5,6,7,8-tetrah ydropterin synthase OS=Stenotrophomonas ginsengisoli OX =336566 GN=ABB30_00815 PE=3 SV=1
MEIFKEFVAESAHRLPHVPAGHKCGNLHGHSFRIRIAVRGEPDPATGWIMDFGDIKAAFAPIYAKLDHNYLNDLPGLDNPTSENLAIWIWQQLKPALPLLSSVEIFETCTSGCRYTGPTA

SEQ ID NO: 25900 - protein, 118 aa, Stenotrophomonas humi
  misc_feature (1)..(118): tr|A0A0R0CJF3|A0A0R0CJF3_9GAMM 6-carboxy-5,6,7,8-tetrah ydropterin synthase OS=Stenotrophomonas humi OX=405444 GN=ABB26_00930 PE=3 SV=1
MDIFKVFTLEAAHRLPNVPPGHKCARLHGHSFRIELKVSGEPGEDTGWIMDFSDLKAAFRPLYDQLDHNYLNDIPGLENPTSERLAMWIWDRLKPALPLLSEVVVHETCTSGCSYRGP

SEQ ID NO: 25901 - protein, 121 aa, Stenotrophomonas koreensis
  misc_feature (1)..(121): tr|A0A0R0BT05|A0A0R0BT05_9GAMM 6-carboxy-5,6,7,8-tetrah ydropterin synthase OS=Stenotrophomonas koreensis OX=26 6128 GN=ABB25_10875 PE=3 SV=1
MEIFKEFIAESAHRLPHVPAGHKCGRLHGHSFRIRIAVRGEPAAETGWIIDFGDIKAAFAPIYAQLDHNYLNDIPGLENPTSENLAIWIWQQLQPSLPQLSAVEIFETCTSGCRYLGPGAA

SEQ ID NO: 25902 - protein, 120 aa, Stenotrophomonas lactitubi
  misc_feature (1)..(120): tr|A0A2M9QQC9|A0A2M9QQC9_9GAMM 6-carboxy-5,6,7,8-tetrah ydropterin synthase OS=Stenotrophomonas lactitubi OX=20 45214 GN=queD PE=3 SV=1
MEIFKVFMLEAAHRLPNVPPGHKCARLHGHSFRVELKVEGEPGAQTGWIMDFGDVKAAFQPIYDRLDHHYLNDIPGLENPTSENLAVWIWNELKPVLPALSEITVHETCTSGCRYRGPAA

SEQ ID NO: 25903 - protein, 120 aa, Stenotrophomonas maltophilia; identical to SEQ ID NO: 24802
  misc_feature (1)..(120): tr|A0A0M1DA22|A0A0M1DA22_STEMA 6-carboxy-5,6,7,8-tetrah ydropterin synthase OS=Stenotrophomonas maltophilia OX= 40324 GN=ygcM PE=3 SV=1

SEQ ID NO: 25904 - protein, 120 aa, Stenotrophomonas maltophilia
  misc_feature (1)..(120): tr|A0A0M0NQ57|A0A0M0NQ57_STEMA 6-carboxy-5,6,7,8-tetrah ydropterin synthase OS=Stenotrophomonas maltophilia OX= 40324 GN=ABW45_20975 PE=3 SV=1
MEIFKVFMLEAAHRLPNVPPGHKCARLHGHSFRVELKVEGEPGAQTGWIMDFGDVKAAFQPIYDRLDHHYLNDIPGLENPTSENLAVWIWNELKPSLPALSEITVHETCTSGCRYRGPTR

SEQ ID NO: 25905 - protein, 118 aa, Stenotrophomonas panacihumi
  misc_feature (1)..(118): tr|A0A0R0AFJ4|A0A0R0AFJ4_9GAMM 6-carboxy-5,6,7,8-tetrah ydropterin synthase OS=Stenotrophomonas panacihumi OX=6 76599 GN=ARC20_09335 PE=3 SV=1
MEIFKVFMVEAAHRLPNVPPGHKCARLHGHSFRIELHVGGEPGADTGWIMDFGDVKAAFQPIYDRLDHHYLNDIEGLENPTSERLAMWIWEQLKPTLPALREVVIHETCTSGCRYRGQ

SEQ ID NO: 25906 - protein, 120 aa, Stenotrophomonas pavanii
  misc_feature (1)..(120): tr|A0A246KY29|A0A246KY29_9GAMM 6-carboxy-5,6,7,8-tetrah ydropterin synthase OS=Stenotrophomonas pavanii OX=4876 98 GN=queD PE=3 SV=1
MEIFKVFMLEAAHRLPNVPPGHKCARLHGHSFRVELKVEGEPGAQTGWIMDFGDVKAAFQPIYDRLDHHYLNDIPGLENPTSENLAVWIWNELKPSLPALSEITVHETCTSGCRYRGPNR

SEQ ID NO: 25907 - protein, 118 aa, Stenotrophomonas pictorum
  misc_feature (1)..(118): tr|A0A0R0A524|A0A0R0A524_9GAMM 6-carboxy-5,6,7,8-tetrah ydropterin synthase OS=Stenotrophomonas pictorum JCM 99 42 OX=1236960 GN=ARC78_13140 PE=3 SV=1
MDIFKVFTLEAAHRLPNVPTGHKCSRLHGHSFRVELKVSGEPGEDTGWIMDFSDLKAAFQPLYDQLDHHYLNDIPGLENPTSERLAMWIWDRLKPALPLLSEVTVHETCTSGCSYRGP

SEQ ID NO: 25908 - protein, 117 aa, Stenotrophomonas rhizophila
  misc_feature (1)..(117): tr|A0A023Y779|A0A023Y779_9GAMM 6-carboxy-5,6,7,8-tetrah ydropterin synthase OS=Stenotrophomonas rhizophila OX=2 16778 GN=queD PE=3 SV=1
MEIFKVFTLEAAHRLPNVPPGHKCARLHGHSFRVELKVEGEPGEQTGWIMDFGDVKAAFQPIYDRLDHHYLNDIPGLENPTSERLAIWIWNELKPALPQLSEVTVHETCTSGCRYRG

SEQ ID NO: 25909 - protein, 117 aa, Stenotrophomonas rhizophila
  misc_feature (1)..(117): tr|A0A498C7X3|A0A498C7X3_9GAMM 6-carboxy-5,6,7,8-tetrah ydropterin synthase OS=Stenotrophomonas rhizophila OX=2 16778 GN=BCL79_3025 PE=3 SV=1
MEIFKVFTLEAAHHLPNVPPGHKCARLHGHSFRVELKVEGEPGEQTGWIMDFGDVKAAFQPIYDRLDHHYLNDIPGLENPTSERLAMWIWDELKPALPALSEVTVHETCTSGCRYRG

SEQ ID NO: 25910 - protein, 118 aa, Stenotrophomonas sp.
  misc_feature (1)..(118): tr|A0A1Q4EUZ3|A0A1Q4EUZ3_9GAMM 6-carboxy-5,6,7,8-tetrah ydropterin synthase OS=Stenotrophomonas sp. 69-14 OX=18 95856 GN=BGP18_10650 PE=3 SV=1
MDIFKDFTLEAAHRLPNVPAGHKCARLHGHSFRVRLEVSGEPGVESGWVMDFGDIKAAFQPLYEQLDHHYLNDIPGLENPTSERLAIWIWDRLQPALPQLNAVTVHETCTSGCRYRGI

SEQ ID NO: 25911 - protein, 120 aa, Stenotrophomonas sp.; identical to SEQ ID NO: 24802
  misc_feature (1)..(120): tr|A0A356JFD8|A0A356JFD8_9GAMM 6-carboxy-5,6,7,8-tetrah ydropterin synthase OS=Stenotrophomonas sp. OX=69392 GN =queD PE=3 SV=1

SEQ ID NO: 25912 - protein, 121 aa, Stenotrophomonas terrae
  misc_feature (1)..(121): tr|A0A0R0CGB7|A0A0R0CGB7_9GAMM 6-carboxy-5,6,7,8-tetrah ydropterin synthase OS=Stenotrophomonas terrae OX=40544 6 GN=ABB27_07575 PE=3 SV=1
MDIFKVFTLEAAHRLPNVPVGHKCSRLHGHSFRVELRVSGEPGPETGWIMDFSELKAAFQPLYDQLDHNYLNDIPGLENPTSERLAMWIWEKLKPALPLLSEVVVHETCTSGCSYKGDKAA

SEQ ID NO: 25913 - protein, 119 aa, Steroidobacter denitrificans
  misc_feature (1)..(119): tr|A0A127F919|A0A127F919_STEDE 6-carboxy-5,6,7,8-tetrah ydropterin synthase OS=Steroidobacter denitrificans OX= 465721 GN=ACG33_02880 PE=3 SV=1
MNLFRVFTIEAAHRLPNVPAGHKCARLHGHSFRIELHLRGTVDAHTGWVMDFADVRAAFQPVYDQLDHHYLNDIPGLENPTSENLARWVWAQTHPRLPLLHKVIIHETCTSGCEYQGPR

SEQ ID NO: 25914 - protein, 127 aa, Stigmatella aurantiaca
  misc_feature (1)..(127): tr|A0A1H8BDP2|A0A1H8BDP2_STIAU 6-carboxy-5,6,7,8-tetrah ydropterin synthase OS=Stigmatella aurantiaca OX=41 GN= SAMN05444354_12397 PE=3 SV=1
MSKPVLITEISKEFTFEAAHRLPNVPPGHKCSRVHGHSYRVEFTLRGPVHPTFGWVVDFADLTAAWQPLHAQLDHRLLNEVPGLENPTSELLAAWLFERMNVPGTQVSKVRVAETCTSSCTVFAAGS

SEQ ID NO: 25915 - protein, 775 aa, Stigmatella aurantiaca
  misc_feature (1)..(775): tr|Q08RM3|Q08RM3_STIAD 6-pyruvoyl tetrahydropterin synt hase family OS=Stigmatella aurantiaca (strain DW4/3-1) OX=378806 GN=STIAU_0688 PE=4 SV=1
MDSGRRRPQQSIRPRPSGAVRLACSPIRRLSTKRQPQCHPGVPCGGVRARREVLGIHVREGRRLLYRVSIQPRRILPLPQIQVFGLAAEDGLAPGSEVEVAVHDHPAAIVSGAQGDATTGQDIVAQIQRLRGARGAVAKHQAGAWHVPHGVVLHLHVRGRVHPDAKPIVAIGAVPIEHQVAAHDDAGGGSPHPDAPHDDASPIGAQHIVLHGDVARGQVDDHPFPRRGGGAAMAPEGVVAQGDVGARLDVHAIFPVLVQFVVLHEQVVEGGARDGRAALRAETLHPIARVVVDVVAANHHVARGRLDHDAVAVLPTLLEVVDLVALDEDVAGGLGDADARAFSPVLQGAAAKNAVVGPLAAPEHRERLVTGHVHGEPLDAPIRAAHVDHRGAASRAALEEGRGTGRGLHREDLVRAPAPLLQLQPLRVRARPEKDRLTGPHQGERLGHGAEGLRLRTFGGVSPLRGDPENAGELRRRRGLLGLGRRGWHLWDRSRRRLLGRRGRGGKGGGVHGQRGRSTCSRRRDLHRRPRPIGTGAVLLLGHLRLATGGEPRTGDSTAEGHEGRSETHPDSLCGSAAMGAPRGWARTRPKEPSFLSFLSPPPARLLGRAAAHRDSGRLREAWRRGLQAPRRDASCVGWCKRGGTRMALGSPGVFLEIFKEFTFEAAHRLPNVPPGHKCFRLHGHSFRVEVHVRGPVSEPSGWIMDFADLKEAFTPLHAQLDHNYLNEIEGLKNPTSENLARWIWQRLRPGLPQLSRIVVRETCTSGCVYQGEDS

SEQ ID NO: 25916 - protein, 127 aa, Stigmatella erecta
  misc_feature (1)..(127): tr|A0A1I0H5E3|A0A1I0H5E3_9DELT 6-carboxy-5,6,7,8-tetrah ydropterin synthase OS=Stigmatella erecta OX=83460 GN=S AMN05443639_104332 PE=3 SV=1
MSKPVLITEISKEFTFEAAHRLPNVPPGHKCSRVHGHSYRVEFTLRGPVHPTFGWVVDFAELTAAWQPLHAQLDHRLLNEVPGLENPTSELLAAWLFERMSVPGTQVSKVRVAETCTSSCTVFAAGS

SEQ ID NO: 25917 - protein, 165 aa, Stigmatella erecta
  misc_feature (1)..(165): tr|A0A1I0H813|A0A1I0H813_9DELT 6-pyruvoyltetrahydropter in/6-carboxytetrahydropterin synthase OS=Stigmatella er ecta OX=83460 GN=SAMN05443639_104334 PE=4 SV=1
MARTTTIELHKEEMKFSAGHFTIFSATHRENLHGHNFTVYVALTGEVLEDGILSDYRPLKTAIIDRCRAWNETFLLPANSRHLRVERDARGNVLAHFNGEELRFLARDVTVLPVENITLEELARLFGEELVGDGSLMARLHIQRLVVKCASGPGQWSSWEWGRHV

SEQ ID NO: 25918 - protein, 146 aa, Streptacidiphilus sp.
  misc_feature (1)..(146): tr|A0A345T2D0|A0A345T2D0_9ACTN 6-carboxytetrahydropteri n synthase OS=Streptacidiphilus sp. DSM 106435 OX=21263 46 GN=C7M71_024790 PE=4 SV=1
MRFSARALPCCHRSWAHDGRCVYLHGYERSFELEFACAELDPATGFVIDFSALKGVRARLAEQFDHTTLVAEDDPELPLFRTLAERGIVDLRVMRHTGMEGAAVWVLAEASRLVEEATGGRVWVSRVEARESRKNAVVLTASPGGR

SEQ ID NO: 25919 - protein, 230 aa, Streptoalloteichus hindustanus
  misc_feature (1)..(230): tr|A0A1M5DB46|A0A1M5DB46_STRHI 6-pyruvoyl-tetrahydropte rin synthase OS=Streptoalloteichus hindustanus OX=2017 GN=SAMN05444320_104376 PE=4 SV=1
MKAADEKCVANGQITISQSFAFSASHELRLLPASHKCRRNHGHNYVVTASALVRDDAAPGDLSPLGDYLATTFDHRLLNEQVIFHPTSELLAAYLAEWFRDNVASSTPITLVTMEVSETTTTSARCDGVTGEVTISKTFKTSHGDVTLVLGADGLNEVGFITDFGDLKPFGTYLQAPDADAGLRAAGPALVAHLAGWFVDNVEPETRGRLVSVRVDSGTTTGLWERGDAS

SEQ ID NO: 25920 - protein, 185 aa, Streptoalloteichus hindustanus
  misc_feature (1)..(185): tr|A0A1M5D089|A0A1M5D089_STRHI 6-pyruvoyltetrahydropter in/6-carboxytetrahydropterin synthase OS=Streptoallotei chus hindustanus OX=2017 GN=SAMN05444320_104246 PE=4 SV =1
MFRRTAPAEQADRLPLTVHNEHPVQHSIAIEHAFDTAHRLPELGGKCASLHGHSWRVRVVVSAISLSSDFTVVEFGAVKAGVRQWIDTHLDHGTMLGHRDPLTAPLAAAGCKVFRFGSDQPSTGPESLAGDLAWPTVEAVAVLLRRVSHNVLRDLPGAPPHVRIGQVVVRETRTNSAAYGPEEPA

SEQ ID NO: 25921 - protein, 147 aa, Streptococcus australis
  misc_feature (1)..(147): tr|A0A4V0BXA8|A0A4V0BXA8_9STRE 6-carboxy-5,6,7,8-tetrah ydropterin synthase OS=Streptococcus australis OX=11310 7 GN=queD PE=3 SV=1
MFFAPKEIKQETGESLVYNPHRTLVSKEFTFDAAHHLFHYEGKCKSLHGHTYHLQITVSGFLDERGMTYDFGDIKAIYKDYLEPHLDHRYLNETLPYMNTTAENMVYWIFQTMSQELPDERGLRLEYVRLYETPTAFAEFRREWLDD

SEQ ID NO: 25922 - protein, 148 aa, Streptococcus criceti
  misc_feature (1)..(148): tr|G5JPD7|G5JPD7_STRCG 6-carboxy-5,6,7,8-tetrahydropter in synthase OS=Streptococcus criceti HS-6 OX=873449 GN= STRCR_1589 PE=3 SV=1
MFFTPKEIKKEVPNKSLIYAPKRVLVSKEFTFDAAHHLFQYEGKCKFLHGHTYRLQIAVSGMLDERGMVYDFGDLKSIYKEHLEPQLDHRYLNESLPYMNTTAENMVYWIYKTVEAHLPDQHDLRMEYVRLYETPSSYAEFRRGWDLT

SEQ ID NO: 25923 - protein, 148 aa, Streptococcus downei
  misc_feature (1)..(148): tr|A0A380JED1|A0A380JED1_STRDO 6-carboxy-5,6,7,8-tetrah ydropterin synthase OS=Streptococcus downei MFe28 OX=76 4290 GN=queD PE=3 SV=1
MFLAPKEIKEEIPNKSLVYTPKRVLVSKEFTFDAAHHLFHYAGKCKSLHGHTYRLQIAISGMLDERGMVFDFADLKIIYKEHLEPHLDHRYLNESLPYMNTTAENMVYWIYKTFEANLSQIRGLRMESVRLYETPSSYAEFRREWDLE

SEQ ID NO: 25924 - protein, 139 aa, Streptococcus dysgalactiae; identical to SEQ ID NO: 25804
  misc_feature (1)..(139): tr|A0A4V0BU08|A0A4V0BU08_STREQ 6-carboxy-5,6,7,8-tetrah ydropterin synthase OS=Streptococcus dysgalactiae subsp . equisimilis OX=119602 GN=queD PE=3 SV=1

SEQ ID NO: 25925 - protein, 118 aa, Streptococcus dysgalactiae; identical to SEQ ID NO: 24425
  misc_feature (1)..(118): tr|A0A4V0B1Q5|A0A4V0B1Q5_STREQ 6-carboxy-5,6,7,8-tetrah ydropterin synthase OS=Streptococcus dysgalactiae subsp . equisimilis OX=119602 GN=queD PE=3 SV=1

SEQ ID NO: 25926 - protein, 148 aa, Streptococcus equinus
  misc_feature (1)..(148): tr|E8JNT1|E8JNT1_STREI 6-carboxy-5,6,7,8-tetrahydropter in synthase OS=Streptococcus equinus ATCC 9812 OX=52537 9 GN=queD PE=3 SV=1
MFEIPKEIKKPTGESLVYCPHRVMVSKEFTFDAAHHLYDYDGKCKALHGHTYHLQLAVSGMLDNRAMAVDFGDIKQIYKDHLEPYLDHRYLNESLPYMNTTAENMVYWIFKQLEQYLPKERDTRVEYVRLYETPTSYAEFRREWELDA

SEQ ID NO: 25927 - protein, 148 aa, Streptococcus equinus
  misc_feature (1)..(148): tr|A0A091BQN5|A0A091BQN5_STREI 6-carboxy-5,6,7,8-tetrah ydropterin synthase OS=Streptococcus equinus JB1 OX=129 4274 GN=H702_05530 PE=3 SV=1
MFLAPKEIKEPTGESLVYCPRRVLVSKEFTFDAAHHLFNYDGKCKALHGHTYCLQIAVSGLLDDRGMSVDFGDIKQIYKEHLEPHLDHRYLNESLPYMNTTAENMVYWIFEQVAKHLPKEREIRVEYVRLYETPSSFAEFRREWLLDD

SEQ ID NO: 25928 - protein, 148 aa, Streptococcus gallolyticus
  misc_feature (1)..(148): tr|F5X1J2|F5X1J2_STRG1 6-carboxy-5,6,7,8-tetrahydropter in synthase OS=Streptococcus gallolyticus (strain ATCC 43143 / F-1867) OX=981539 GN=queD PE=3 SV=1
MFEIPKELKVPTGESLVYCPRRVMVSKEFTFDAAHHLFNYDGKCKALHGHTYCLQIAVSGLLDDRGMAVDFGDLKQIYKKHLEPSLDHHYLNESLPYMNTTAENMVYWIFKQVAQYLPKEREIRVEYIRLYETPTSFAEFRREWEIDD

SEQ ID NO: 25929 - protein, 148 aa, Streptococcus gallolyticus
  misc_feature (1)..(148): tr|A0A1H9LVA7|A0A1H9LVA7_9STRE 6-carboxy-5,6,7,8-tetrah ydropterin synthase OS=Streptococcus gallolyticus OX=31 5405 GN=SAMN04487840_101206 PE=3 SV=1
MFEIPKELKVPTGESLVYCPRRVMVSKEFTFDAAHHLFNYDGKCKALHGHTYRLQIAVSGLLDDRGMAVDFGDLKQIYKKHLEPSLDHHYLNESLPYMNTTAENMVYWIFKQVAQHLPKEREIRVEYIRLYETPTSFAEFRREWEIDD

SEQ ID NO: 25930 - protein, 147 aa, Streptococcus halitosis
  misc_feature (1)..(147): tr|A0A3R8NWM3|A0A3R8NWM3_9STRE 6-carboxy-5,6,7,8-tetrah ydropterin synthase OS=Streptococcus halitosis OX=21725 45 GN=queD PE=3 SV=1
MFFAPKEIRQETGESLVYNPHRTLVSKEFTFDAAHHLFHYEGKCKSLHGHTYHLQIAVSGFLDERGMTYDFGDIKAIYKDFLEPHLDHRYLNETLPYMNTTAENMVYWIFQTMSQELPDERSLRLEYVRLYETPTAFAEFRREWLDD

SEQ ID NO: 25931 - protein, 149 aa, Streptococcus henryi
  misc_feature (1)..(149): tr|A0A1G6A9Q9|A0A1G6A9Q9_9STRE 6-carboxy-5,6,7,8-tetrah ydropterin synthase OS=Streptococcus henryi OX=439219 G N=SAMN02910293_00263 PE=3 SV=1
MFLAPKEIKEPTGQCLVYCPRRVQVSKEFTFDAAHHLFNYEGKCKSLHGHTYRLQIAVSGFLDDRGMAIDFGDLKTIYKEHLEPRLDHRYLNETLPYMNTTAENMVYWIYQEVAFHLPKERGLQVESVRLYETPFSYAEFRKEWDQDGI

SEQ ID NO: 25932 - protein, 147 aa, Streptococcus infantis
  misc_feature (1)..(147): tr|E8K2R3|E8K2R3_9STRE 6-carboxy-5,6,7,8-tetrahydropter in synthase OS=Streptococcus infantis ATCC 700779 OX=88 9204 GN=queD PE=3 SV=1
MFFAPKEIKQETGESLVYNPHRTLVSKEFTFDAAHHLFHYEGKCKSLHGHTYHLQIAVSGFLDDRGMTYDFGDIKAIYKDYLEPHLDHRYLNETLPYMNTTAENMVYWIFQTMSQELPGERGLRLEYVRLYETPTAFAEFRREWLDD

SEQ ID NO: 25933 - protein, 147 aa, Streptococcus infantis
  misc_feature (1)..(147): tr|A0A0F3HK56|A0A0F3HK56_9STRE 6-carboxy-5,6,7,8-tetrah ydropterin synthase OS=Streptococcus infantis OX=68892 GN=queD PE=3 SV=1
MFFAPKEIKQETGESLVYNPHRTLVSKEFTFDAAHHLFHYEGKCKSLHGHTYHLQIAVSGFLDERGMTYDFGDIKQIYKDYLEPHLDHRYLNETLPYMNTTAENMVYWIFQTMSQELPDERGLRLEYIRLYETPTAFAEFRREWLDD

SEQ ID NO: 25934 - protein, 148 aa, Streptococcus lutetiensis
  misc_feature (1)..(148): tr|S5RLF6|S5RLF6_9STRE 6-carboxy-5,6,7,8-tetrahydropter in synthase OS=Streptococcus lutetiensis 033 OX=1076934 GN=KE3_1184 PE=3 SV=1
MFLAPKEIKEPAGESLAYCPRRVMVSKEFTFDSAHHLFNYDGKCKAVHGHIYRLKIAVSGWFDERGISVDFGDIKQIYKEHLEPHLDHRYLNESLPYMNTKAENMVYWIFEQVAKHLPKEREIRVEYVHLCETPSSYAVFRREWLLDD

SEQ ID NO: 25935 - protein, 148 aa, Streptococcus lutetiensis
  misc_feature (1)..(148): tr|A0A4V0E5T8|A0A4V0E5T8_9STRE 6-carboxy-5,6,7,8-tetrah ydropterin synthase OS=Streptococcus lutetiensis OX=150 055 GN=queD PE=3 SV=1
MFLAPKEIKEPTGESLAYCPRRVMVSKEFTFDSAHHLFNYDGKCKAVHGHTYRLKIAVSGWFDERGISVDFGDIKQIYKEHLEPHWDHRYLNESLPYMNTTAENMVYWIFEQVAKHLPKEREIRVEYVHLCETPSSYAEFRREWLLDD

SEQ ID NO: 25936 - protein, 148 aa, Streptococcus macedonicus
  misc_feature (1)..(148): tr|H2A6Z3|H2A6Z3_STRMD 6-carboxy-5,6,7,8-tetrahydropter in synthase OS=Streptococcus macedonicus (strain ACA-DC 198) OX=1116231 GN=queD PE=3 SV=1
MFEIPKELKVPTGESLVYCPRRVMVSKEFTFDAAHHLFNYDGKCKALHGHTYRLQIAVSGLLDDRGMAVDFGDLKQIYKKHLEPSLDHHYLNESLPYMNTTAENMVYWIFKQVAQYLPKEREIRVEYIRLYETPTSFAEFRREWEIDD

SEQ ID NO: 25937 - protein, 51 aa, Streptococcus macedonicus
  misc_feature (1)..(51): tr|A0A1C3SPL6|A0A1C3SPL6_STRMC 6-carboxytetrahydropteri n synthase @ Queuosine biosynthesis QueD, PTPS-I OS=Str eptococcus macedonicus OX=59310 GN=SMA679_1203 PE=4 SV= 1
MNTTAENMVYWIFKQVAQYLPKEREIRVEYIRLYETPTSFAEFRREWEIDD

SEQ ID NO: 25938 - protein, 147 aa, Streptococcus mitis
  misc_feature (1)..(147): tr|A0A081Q1B8|A0A081Q1B8_STRMT 6-carboxy-5,6,7,8-tetrah ydropterin synthase OS=Streptococcus mitis OX=28037 GN= queD PE=3 SV=1
MFFAPKEIKQETGESLVYNPHRTLVSKEFTFDAAHHLFHYEGKCKSLHGHTYHLQIAVSGFLDERGMTYDFGDIKAIYKNYLEPHLDHRYLNETLPYMNTTAENMVYWIFQTMSQELPDERGLRLEYVRLYETPTAFAEFRREWLDD

SEQ ID NO: 25939 - protein, 147 aa, Streptococcus mitis
  misc_feature (1)..(147): tr|A0A4V6L4S0|A0A4V6L4S0_STRMT 6-carboxy-5,6,7,8-tetrah ydropterin synthase OS=Streptococcus mitis OX=28037 GN= queD PE=3 SV=1
MFFAPKEIKQETGESLVYNPHRTLVSKEFTFDAAHHLFHYEGKCKSLHGHTYHLQIAVSGFLDERGMTYDFGDIKAIYKNYLEPHLDHRYLNETLPYMNTTAENMVYWIFQIMNQELPDERGLRLEYVRLYETPTAFAEFRREWLDD

SEQ ID NO: 25940 - protein, 148 aa, Streptococcus mutans
  misc_feature (1)..(148): tr|A0A448RX91|A0A448RX91_STRMG 6-carboxy-5,6,7,8-tetrah ydropterin synthase OS=Streptococcus mutans OX=1309 GN= queD PE=3 SV=1
MFFAPKEIKKETGESLIYCPRRVLVSKEFTFDAAHHLFSYEGKCKALHGHTYHLQIAVSGFLDDKGMVYDFGDLKTIYQNLLEPHLDHAYLNESLPYMNTTAENMVYWIYKTVEKALPDEHGLQMESVRLYETPSAYAEFRKEWDLQA

SEQ ID NO: 25941 - protein, 148 aa, Streptococcus mutans
  misc_feature (1)..(148): tr|A0A2J9QEP1|A0A2J9QEP1_STRMG 6-carboxy-5,6,7,8-tetrah ydropterin synthase OS=Streptococcus mutans OX=1309 GN= queD PE=3 SV=1
MFLAPKEIKNETGESLLYCPKRVLVSKEFTFDAAHHLFNYEGKCKALHGHTYHLQIAVSAFLDERGMTYDFRDLKRIYQEYLEPKLDHRYLNESLPYMNTTAENMVYWIYKTVEKALTDERGLQMEHVRLYETPSAYAEFRREWDLQA

SEQ ID NO: 25942 - protein, 147 aa, Streptococcus oralis
  misc_feature (1)..(147): tr|I0STV0|I0STV0_STROR 6-carboxy-5,6,7,8-tetrahydropter in synthase OS=Streptococcus oralis SK1074 OX=1095738 G N=queD PE=3 SV=1
MFFAPKEIKQETGESLIYNPHRTLVSKEFTFDAAHHLFHYEGKCKSLHGHTYHLQIAVSGFLDERGMTYDFGDIKAIYKNYLEPHLDHRYLNETLPYMNTTAENMVYWIFQTMSQELPDERGLRLEYVRLYETPTAFAEFRREWLDD

SEQ ID NO: 25943 - protein, 147 aa, Streptococcus oralis; identical to SEQ ID NO: 25938
  misc_feature (1)..(147): tr|A0A0F2DJL0|A0A0F2DJL0_STROR 6-carboxy-5,6,7,8-tetrah ydropterin synthase OS=Streptococcus oralis subsp. oral is OX=1891914 GN=queD PE=3 SV=1

SEQ ID NO: 25944 - protein, 148 aa, Streptococcus pasteurianus
  misc_feature (1)..(148): tr|F5X767|F5X767_STRPX 6-carboxy-5,6,7,8-tetrahydropter in synthase OS=Streptococcus pasteurianus (strain ATCC 43144 / JCM 5346 / CDC 1723-81) OX=981540 GN=queD PE=3 SV=1
MFEIPKELKVPTGESLVYCPRRVMVSKEFTFDAAHHLFNYDGKCKALHGHTYRLQIAVSGLLDDRGMAVDFGDLKQIYKKHLEPSLDHHYLNESLPYMNTTAENMVYWIFKQVAQHLPKEREIRVEYIRLYETPTSFAEFRREWELDD

SEQ ID NO: 25945 - protein, 148 aa, Streptococcus pasteurianus; identical to SEQ ID NO: 25944
  misc_feature (1)..(148): tr|A0A135YMY9|A0A135YMY9_9STRE 6-carboxy-5,6,7,8-tetrah ydropterin synthase OS=Streptococcus pasteurianus OX=19 7614 GN=HMPREF3205_02096 PE=3 SV=1

SEQ ID NO: 25946 - protein, 147 aa, Streptococcus peroris
  misc_feature (1)..(147): tr|E8KDG8|E8KDG8_9STRE 6-carboxy-5,6,7,8-tetrahydropter in synthase OS=Streptococcus peroris ATCC 700780 OX=888 746 GN=queD PE=3 SV=1
MFFVPKEIKHETGESLVYNPYRTMVSKEFTFDAAHHLFHYEGKCKSLHGHTYHLQIAVSGFLDDRGMTYDFGDIKQIYKNHLEPHLDHRYLNETLPYMNTTAENMVYWIFNTIQQELPDQRGLRLEYVRLYETPSSFAEFRREWLHD

SEQ ID NO: 25947 - protein, 147 aa, Streptococcus pneumoniae
  misc_feature (1)..(147): tr|A0A0U0KE29|A0A0U0KE29_STREE 6-carboxy-5,6,7,8-tetrah ydropterin synthase OS=Streptococcus pneumoniae OX=1313 GN=queD PE=3 SV=1
MFFAPKEIKQETGESLVYNPHRTLVSKEFTFDAAHHLFHYEGKCKSLHGHTYHLQIAVSGFLDERGMTYDFGDIKAIYKNYLEPHLDHRYLNETLPYMNTTAENMVYWIFQTMNQELPDERGLRLEYVRLYETPTAFAEFRREWLDD

SEQ ID NO: 25948 - protein, 147 aa, Streptococcus pneumoniae
  misc_feature (1)..(147): tr|A0A559GFE2|A0A559GFE2_STREE 6-carboxy-5,6,7,8-tetrah ydropterin synthase OS=Streptococcus pneumoniae OX=1313 GN=queD PE=3 SV=1
MFFAPKEIKQETGESLVYNPHRTLVSKEFTFDAAHHLFHYEGKCKSLHGHTYHLQIAVSGFLDERGMTYDFGDIKAIYKNYLEPHLDHRYLNETLPYMNTTAENIVYWIFRTMSQELPDERSLRLEYVRLYETPTAFAEFRREWLDD

SEQ ID NO: 25949 - protein, 147 aa, Streptococcus pseudopneumoniae
  misc_feature (1)..(147): tr|G0I718|G0I718_STRES 6-carboxy-5,6,7,8-tetrahydropter in synthase OS=Streptococcus pseudopneumoniae (strain I S7493) OX=1054460 GN=SPPN_09465 PE=3 SV=1
MFFAPKEIKQETGESLIYNPHRTLVSKEFTFDAAHHLFHYEGKCKSLHGHTYHLQIAVSGFLDERGMTYDFGDIKAIYKNYLEPHLDHRYLNETLPYMNTTAENMVYWIFQTMNQELPDERGLRLEYVRLYETPTAFAEFRREWLDD

SEQ ID NO: 25950 - protein, 147 aa, Streptococcus pseudopneumoniae; identical to SEQ ID NO: 25938
  misc_feature (1)..(147): tr|A0A3A4MR91|A0A3A4MR91_9STRE 6-carboxy-5,6,7,8-tetrah ydropterin synthase OS=Streptococcus pseudopneumoniae O X=257758 GN=queD PE=3 SV=1

SEQ ID NO: 25951 - protein, 148 aa, Streptococcus ratti; identical to SEQ ID NO: 25940
  misc_feature (1)..(148): tr|J3A115|J3A115_STRRT 6-carboxy-5,6,7,8-tetrahydropter in synthase OS=Streptococcus ratti FA-1 = DSM 20564 OX= 699248 GN=D822_03384 PE=3 SV=1

SEQ ID NO: 25952 - protein, 148 aa, Streptococcus ratti; identical to SEQ ID NO: 25940
  misc_feature (1)..(148): tr|A0A5J6NQP3|A0A5J6NQP3_STRRT 6-carboxytetrahydropteri n synthase QueD OS=Streptococcus ratti OX=1341 GN=queD PE=4 SV=1

SEQ ID NO: 25953 - protein, 147 aa, Streptococcus salivarius
  misc_feature (1)..(147): tr|A0A3S5E1F9|A0A3S5E1F9_STRSL 6-carboxy-5,6,7,8-tetrah ydropterin synthase OS=Streptococcus salivarius OX=1304 GN=ptpS PE=3 SV=1
MFFAPKEIKKETGESLVYNPHRTMVSKEFTFDAAHHLFNYEGKCKSLHGHTYHLQIAVSGYLDERGMTYDFGDLKRIYKDHLEPQLDHRYLNETLPYMNTTAENMVFWIFQTTSQHLPEERGLRLEYVRLYETPTAFAEFRREWLDD

SEQ ID NO: 25954 - protein, 147 aa, Streptococcus salivarius
  misc_feature (1)..(147): tr|A0A0F3H2E8|A0A0F3H2E8_STRSL 6-carboxy-5,6,7,8-tetrah ydropterin synthase OS=Streptococcus salivarius OX=1304 GN=queD PE=3 SV=1
MFFAPKEIKKETGESLVYNPHRTMVSKEFTFDAAHHLFNYEGKCKSLHGHTYHLQIAVSGYLDERGMTFDFGDLKSIYKDHLEPQLDHRYLNETLPYMNTTAENMVFWIFQTTSQHLPEERGLRLEYVRLYETPTAFAEFRREWLDD

SEQ ID NO: 25955 - protein, 148 aa, Streptococcus sobrinus
  misc_feature (1)..(148): tr|U2J2Q1|U2J2Q1_9STRE 6-carboxy-5,6,7,8-tetrahydropter in synthase OS=Streptococcus sobrinus W1703 OX=1227275 GN=HMPREF1557_01728 PE=3 SV=1
MFFAPNEIKEEITGQSLIYTPKRVLVSKEFTFDAAHHLFRYEGKCKSLHGHTYRLQIAVSGLLDERGMVYDFGDLKAIYKQHLEPQLDHRYLNESLPYMNTTAENMVYWIYKTVEAHLPAKDGLRMERVRLYETPSSYAEFRREWDLE

SEQ ID NO: 25956 - protein, 147 aa, Streptococcus sp.
  misc_feature (1)..(147): tr|E0PZQ8|E0PZQ8_9STRE 6-carboxy-5,6,7,8-tetrahydropter in synthase OS=Streptococcus sp. oral taxon 071 str. 73 H25AP OX=864570 GN=queD PE=3 SV=1
MFFAPKEIKQETGESLVYNPHRTLVSKEFTFDAAHHLFHYEGKCKSLHGHTYHLQIAVSGFLDERGMTYDFGDIKAIYKNYLEPHLDHRYLNETLPYMNTTAENMVYWIFQTMSQELPDERSLRLEYVRLYETPTAFAEFRREWLDD

SEQ ID NO: 25957 - protein, 147 aa, Streptococcus sp.
  misc_feature (1)..(147): tr|D2EP97|D2EP97_9STRE 6-carboxy-5,6,7,8-tetrahydropter in synthase OS=Streptococcus sp. M143 OX=563037 GN=queD PE=3 SV=1
MFFAPKEIKQETGESLVYNPHRTLVSKEFTFDAAHHLFHYEGKCKSLHGHTYHLQIAVSGFLDERGMTYDFGDIKAIYKNFLEPHLDHRYLNETLPYMNTTAENMVYWIFQTMSQELPDERGLRLEYVRLYETPTAFAEFRREWLDD

SEQ ID NO: 25958 - protein, 147 aa, Streptococcus thermophilus
  misc_feature (1)..(147): tr|A0A2U2M104|A0A2U2M104_STRTR 6-carboxy-5,6,7,8-tetrah ydropterin synthase OS=Streptococcus thermophilus OX=13 08 GN=queD PE=3 SV=1
MFFAPKEIKTETGESLVYNLHRTMVSKEFTFDAAHHLFNYEGKCKSLHGHTYHLQIAVSGYLDERGMTYDFGDLKNIYKNHLEPYLDHRYLNESLPYMNTTAENMVFWIFQTTSEYLSEERELRLEYVRLYETPTAFAEFRREWLDD

SEQ ID NO: 25959 - protein, 147 aa, Streptococcus thermophilus; identical to SEQ ID NO: 25958
  misc_feature (1)..(147): tr|A0A0E2Q389|A0A0E2Q389_STRTR 6-carboxy-5,6,7,8-tetrah ydropterin synthase OS=Streptococcus thermophilus M17PT ZA496 OX=1433289 GN=X841_05095 PE=3 SV=1

SEQ ID NO: 25960 - protein, 148 aa, Streptococcus troglodytae
  misc_feature (1)..(148): tr|A0A1L7LJS3|A0A1L7LJS3_9STRE 6-carboxy-5,6,7,8-tetrah ydropterin synthase OS=Streptococcus troglodytae OX=111 1760 GN=SRT_11820 PE=3 SV=1
MFLAPKEIKKETGESLVYCPKRVLVSKEFTFDAAHHLFNYEGKCKALHGHTYHLQIAVSAFLDERGMAYDFRDLKRIYQEYLEPKLDHRYLNESLPYMNTTAENMVYWIYKTIEKALTDERGLQMERVRLYETPSAYAEFRREWDLKS

SEQ ID NO: 25961 - protein, 147 aa, Streptococcus vestibularis
  misc_feature (1)..(147): tr|E3CQ03|E3CQ03_STRVE 6-carboxy-5,6,7,8-tetrahydropter in synthase OS=Streptococcus vestibularis F0396 OX=9043 06 GN=queD PE=3 SV=1
MFFAPKEIKKETGESLVYNLHRTMVSKEFTFDAAHHLFHYEGKCKSLHGHTYHLQIAVSGYLDERGMTYDFGDLKSIYKDHLEPHLDHRYLNETLPYMNTTAENMVFWIFQTTSEYLPEERGLRLEYVRLYETPTAFAEFRREWLDD

SEQ ID NO: 25962 - protein, 147 aa, Streptococcus vestibularis
  misc_feature (1)..(147): tr|E8KVK7|E8KVK7_STRVE 6-carboxy-5,6,7,8-tetrahydropter in synthase OS=Streptococcus vestibularis ATCC 49124 OX =889206 GN=queD PE=3 SV=1
MFFAPKEIKKETGESLVYNSHRTMVSKEFTFDAAHHLFHYEGKCKSLHGHTYHLQIAVSGYLDERGMTYDFGDLKSIYKDHLEPHLDHRYLNETLPYMNTTAENMVFWIFQTASEYLPEERGLRLEYVRLYETPTAFAEFRREWLDD

SEQ ID NO: 25963 - protein, 132 aa, Streptomonospora alba
  misc_feature (1)..(132): tr|A0A0C2J538|A0A0C2J538_9ACTN 6-pyruvoyl tetrahydropte rin synthase OS=Streptomonospora alba OX=183763 GN=LP52 _24500 PE=4 SV=1
MFRVTVRDHFMVAHSFHGEMFGPAQGLHGATFTVDASFHRAELDADNVVVDIGLAAGELGAVLSELNYRNLDDEHAFAGVNTTTEFLAKVVADRLAERVAGGGLGEGARGLERISVTLHESHVAWASYERAL

SEQ ID NO: 25964 - protein, 132 aa, Streptomonospora sp.
  misc_feature (1)..(132): tr|A0A4P6Q737|A0A4P6Q737_9ACTN 6-pyruvoyl tetrahydropte rin synthase OS=Streptomonospora sp. M2 OX=2498135 GN=E KD16_24050 PE=4 SV=1
MFSVTVRDHIMVAHSFRGAVFGPAQRLHGATFTVDAAFYRAELDADNIVVDIALATRELGDVLGGLNHRNLDAEPAFAGANTTTEFLAGFVADRLADRVAAGGLGEGARGLERLAVTLHESHVAWATYERAL

SEQ ID NO: 25965 - protein, 132 aa, Streptomyces abyssalis
  misc_feature (1)..(132): tr|A0A1E7JSV8|A0A1E7JSV8_9ACTN 6-pyruvoyl tetrahydropte rin synthase OS=Streptomyces abyssalis OX=933944 GN=AN2 15_05830 PE=4 SV=1
MYSITVRDHMMIAHSFRGDVFGPAQRLHGATFVVDATFRRGELDADGIVVDIGAATQELSGVLGDLNYRNLDDEPAFAGINTSTEMLARVVADRLAERVHAGALGEGARGLEAISVTLHESHVAWASYERRL

SEQ ID NO: 25966 - protein, 120 aa, Streptomyces acidiscabies
  misc_feature (1)..(120): tr|A0A0L0JIN9|A0A0L0JIN9_9ACTN 6-carboxy-5,6,7,8-tetrah ydropterin synthase OS=Streptomyces acidiscabies OX=422 34 GN=queD PE=3 SV=1
MGFRISKEFHFSASHRLDGLPEGHQCGRMHGHNYLVRVELFAGPDDLDTVGFVRDYGELGKVKRWLDDELDHRHLNDVMDRNPTAEHLAQWIFERWSGHFPELTAVQVSETPRTWAEYRP

SEQ ID NO: 25967 - protein, 132 aa, Streptomyces acidiscabies
  misc_feature (1)..(132): tr|A0A0L0JGG5|A0A0L0JGG5_9ACTN 6-pyruvoyl tetrahydropte rin synthase OS=Streptomyces acidiscabies OX=42234 GN=I Q63_42180 PE=4 SV=1
MFSVTVRDHIMIAHSFSGEVFGPAQRLHGATFLVDATFRREQLDDDNIVVDMGLASQELGAVVAELNYRNLDNEPDFAGVNTSTEYLAKVIADRLAERIGKGALGEGARGISALSVTLHESHIAWASYERAL

SEQ ID NO: 25968 - protein, 132 aa, Streptomyces actuosus
  misc_feature (1)..(132): tr|A0A2U9P9F7|A0A2U9P9F7_STRAS Uncharacterized protein OS=Streptomyces actuosus OX=1885 GN=DMT42_31870 PE=4 SV =1
MFSVTVRDHIMVAHSFRGEVFGPAQRLHGATFLVDATFRRAQLDDDNIVVDIGLATRELGAVVGELNYRNLDNEPDFAGVNTSTEFLAKVIADRLAERIHKGALGEGAKGIAQISVTLHESHVAWASYERAV

SEQ ID NO: 25969 - protein, 132 aa, Streptomyces afghaniensis
  misc_feature (1)..(132): tr|S4MPH7|S4MPH7_9ACTN Uncharacterized protein OS=Strep tomyces afghaniensis 772 OX=1283301 GN=STAFG_5468 PE=4 SV=1
MFSITVRDHIMIAHSFRGEVFGPAQRLHGATFLVDATFRREQLDDDNIVVDIGLATQELGAVVSELNYRNLDNEPDFAGVNTSTEFIAKVIADRLAERIHKGALGEGAKGIAGLTVTLHESHIAWASYERAL

SEQ ID NO: 25970 - protein, 120 aa, Streptomyces ahygroscopicus
  misc_feature (1)..(120): tr|K7S1M0|K7S1M0_9ACTN 6-carboxy-5,6,7,8-tetrahydropter in synthase OS=Streptomyces ahygroscopicus subsp. wuzho uensis OX=387850 GN=tymB PE=3 SV=1
MAFRITKEFHFSASHRLAELPEGHPCGRMHGHNYVVELELAAPADGLDKAGFVRDYGDLKQFSRWLDAEVDHRHLNDVLDRNPSAEHLAQWLYERWLPHYPQLSAVRVSETAKTWAEYRP

SEQ ID NO: 25971 - protein, 118 aa, Streptomyces albidoflavus
  misc_feature (1)..(118): tr|A0A2A2UN85|A0A2A2UN85_9ACTN 6-carboxy-5,6,7,8-tetrah ydropterin synthase OS=Streptomyces albidoflavus OX=188 6 GN=queD PE=3 SV=1
MEIFREFTFEAAHRLPRVPEGHKCARLHGHSYKVVVHVEAPVDAELGWVMDFGDIKRAFKPIDAQLDHYYLNDIEGLDNPTSENLARWIWDRLIGELPALSEITVRETCTSGCTYRGV

SEQ ID NO: 25972 - protein, 71 aa, Streptomyces alboflavus
  misc_feature (1)..(71): tr|A0A1Z1WS73|A0A1Z1WS73_9ACTN Uncharacterized protein OS=Streptomyces alboflavus OX=67267 GN=SMD44_08780 PE=4 SV=1
MARRDAGHRHLNDAIGGDRNPSAENIALWIYQTWTGDYPELTAVRVSETPKTWATYRPATAVAARMGHADD

SEQ ID NO: 25973 - protein, 139 aa, Streptomyces alboflavus
  misc_feature (1)..(139): tr|A0A291W3Y0|A0A291W3Y0_9ACTN 6-carboxy-5,6,7,8-tetrah ydropterin synthase OS=Streptomyces alboflavus OX=67267 GN=queD PE=3 SV=1
MSDNVPTVGLPPGSFTIGKSFSFEAGHQLPGLPIGHKCARGHGHSYRVEVILTCGTLAPPGFVTDFGDLSPFKDFIDEHLDHRNLHEVLPVEPTAELIAQYLAGWFLQHLEPALPGRLMAVCVYETATSWARFDVVRNA

SEQ ID NO: 25974 - protein, 132 aa, Streptomyces albulus
  misc_feature (1)..(132): tr|A0A059VRK7|A0A059VRK7_STRA9 Uncharacterized protein OS=Streptomyces albulus OX=68570 GN=DC74_1533 PE=4 SV=1
MFSITVRDHLMVAHSFRGAVFGPAQRLHGATFIVDATFRRPELDDDNIVVDIGLATQELGGVIAELNYRNLDDEPAFAGTNTSTEALAKVIADRLADRVHAGNLGAGARDLSGITVTLHESHVAWASYERTL

SEQ ID NO: 25975 - protein, 120 aa, Streptomyces albulus
  misc_feature (1)..(120): tr|A0A401RAX3|A0A401RAX3_STRA9 6-carboxy-5,6,7,8-tetrah ydropterin synthase OS=Streptomyces albulus OX=68570 GN =queD PE=3 SV=1
MAFRITKEFHFSASHRLAELPEGHPCGRMHGHNYVVELELAAPADGLDKAGFVRDYGDLKQFSRWLDAEVDHRHLNDVLDRNPSAEHLAQWLYEWWLPHYPQLSAVRVSETAKTWAEYRP

SEQ ID NO: 25976 - protein, 121 aa, Streptomyces albus
  misc_feature (1)..(121): tr|A0A0X7JBN8|A0A0X7JBN8_9ACTN 6-carboxy-5,6,7,8-tetrah ydropterin synthase OS=Streptomyces albus subsp. albus OX=67257 GN=ADL21_33455 PE=3 SV=1
MYAITKEFHFSASHQLGALPAGHQCARTHGHNYLVVLELRCDDAELTEPGFVRDYGELDEFKHWLDATFDHRHLNDAVPGMNPSAENLAWWVYHQWVERLPELSCVRVSETPRTWATYRGK

SEQ ID NO: 25977 - protein, 124 aa, Streptomyces albus
  misc_feature (1)..(124): tr|A0A0B5EZI8|A0A0B5EZI8_STRA4 6-carboxy-5,6,7,8-tetrah ydropterin synthase OS=Streptomyces albus (strain ATCC 21838 / DSM 41398 / FERM P-419 / JCM 4703 / NBRC 107858 ) OX=1081613 GN=SLNWT_6863 PE=3 SV=1
MLRITKEFHFSASHVLDRLPSWHPCARMHGHNYVVVLELSARREELTEAGFVRDYRELDAFKKWMDGTLDHRHLNEAMGGGISPSAENLAAWIFDLWIEQFPELTSVRVSETPKTWAEYRPGEP

SEQ ID NO: 25978 - protein, 132 aa, Streptomyces ambofaciens
  misc_feature (1)..(132): tr|A0A0K2B244|A0A0K2B244_STRA7 6-pyruvoyl tetrahydropte rin synthase OS=Streptomyces ambofaciens (strain ATCC 2 3877 / 3486 / DSM 40053 / JCM 4204 / NBRC 12836 / NRRL B-2516) OX=278992 GN=SAM23877_6304 PE=4 SV=1
MFSITVRDHIMIAHSFRGEVFGPAQRLHGATFLVDATFRREQLDDDNIVVDIGLATQELGAVVSELNYRNLDNEPDFAGVNTSTEFLAKVIADRLAERVHKGALGQGAEGLAGLTVTLHESHVAWASYERAL

SEQ ID NO: 25979 - protein, 132 aa, Streptomyces antibioticus
  misc_feature (1)..(132): tr|A0A0L8NBL1|A0A0L8NBL1_STRAT 6-pyruvoyl tetrahydropte rin synthase OS=Streptomyces antibioticus OX=1890 GN=AD K77_38220 PE=4 SV=1
MFSITVRDHIMIAHSFRGEVFGPAQRLHGATFLVDATFRREQLDEDNIVVDIGLATQELRTITAELNYRNLDDEPEFAGVNTSTEFLAKVIADRLAERIGKGALGEGAKGLSGITVTLHESHIAWASYERGL

SEQ ID NO: 25980 - protein, 132 aa, Streptomyces antibioticus
  misc_feature (1)..(132): tr|A0A101PVC1|A0A101PVC1_STRAT 6-pyruvoyl tetrahydropte rin synthase OS=Streptomyces antibioticus OX=1890 GN=AQ J23_39890 PE=4 SV=1
MFSITVRDHMMIAHSFRGEVFGPAQRLHGATFVVDATFRRPELDDDNIVVDIGLATAELGKVIAELNYRNLDDEERFQQINTSTEYLAKVIADHLVEAIHAGALGEGARRIHEVAVTLHESHIAWASYERAV

SEQ ID NO: 25981 - protein, 132 aa, Streptomyces antimycoticus
  misc_feature (1)..(132): tr|A0A4D4JY34|A0A4D4JY34_9ACTN Uncharacterized protein OS=Streptomyces antimycoticus OX=68175 GN=SANT12839_024 670 PE=4 SV=1
MFSITVRDHIMIAHSFRGDVFGPAQRLHGATFLVDATFRRAELDDDNIVVDIGLATRELGEVCGALSYRNLDDEPDFEGINTSTEFLAKVIADRLAERVASGALGEGARGLSGIVVTLHESHVAWASYERGL

SEQ ID NO: 25982 - protein, 162 aa, Streptomyces antimycoticus
  misc_feature (1)..(162): tr|A0A4D4JZN4|A0A4D4JZN4_9ACTN Uncharacterized protein OS=Streptomyces antimycoticus OX=68175 GN=ptpS PE=4 SV= 1
MDPGIPQGIASITRAPGMLRAGPSPHLEDPLFSITVRDHMMVAHSFRGEVFGPAQRLHGATFVVDATFRRPELDDDNIVVDIGLATTELGKVIGEFNYRNLDDEEQFHQVNTSTEYLAKVIADRLAEAIHAGTLGEGARGIREVVVTLHESHIAWAGYERSV

SEQ ID NO: 25983 - protein, 132 aa, Streptomyces antioxidans
  misc_feature (1)..(132): tr|A0A1V4CXX0|A0A1V4CXX0_9ACTN Uncharacterized protein OS=Streptomyces antioxidans OX=1507734 GN=VT50_0228955 PE=4 SV=1
MFSITVRDHIMVAHSFRGEVFGPAQRLHGATFLVDATFRRAELDDDNIVVDIGLATRELGEVCGALSYRNLDDEPDFEGVNTSTEFLAKVIADRLAARVRSGALGEGARGLAGIAVTLHESHIAWASYERDL

SEQ ID NO: 25984 - protein, 132 aa, Streptomyces asterosporus
  misc_feature (1)..(132): tr|A0A514JM21|A0A514JM21_9ACTN Uncharacterized protein OS=Streptomyces asterosporus OX=285570 GN=CD934_03890 P E=4 SV=1
MFSITVRDHIMIAHSFHGEVFGPAQRLHGATFLVDATFRREQLDEDNIVVDIGLATQELGAVVGALNYRNLDNEPDFAGVNTSTEYLAKVIADRLAERIHKGALGEGAKGIAGITVTLHESHIAWASYERAL

SEQ ID NO: 25985 - protein, 132 aa, Streptomyces auratus
  misc_feature (1)..(132): tr|J1ZRJ2|J1ZRJ2_9ACTN 6-pyruvoyl-tetrahydropterin synt hase OS=Streptomyces auratus AGR0001 OX=1160718 GN=SU9_ 25044 PE=4 SV=1
MFSITVRDHLMVAHSFRGAVFGPAQRLHGATFLVDATFRRPELDDDNIVVDIGLATRELGAVVGELNYRNLDDEPAFAGINTSTEALAKVIADRLADRIQAGNLGEGARELTGISVTLHESHIAWATYERTL

SEQ ID NO: 25986 - protein, 132 aa, Streptomyces autolyticus
  misc_feature (1)..(132): tr|A0A1P8XSP0|A0A1P8XSP0_9ACTN Uncharacterized protein OS=Streptomyces autolyticus OX=75293 GN=BV401_11340 PE= 4 SV=1
MFSITVRDHIMIAHSFRGEVFGPAQRLHGATFLVDATFRRADLDGDNIVVDIGLATRELGEVCGALSYRNLDDEPDFKGVNTSTEFLAKVIADRLAERVRSGALGEGARGLSGIAVTLHESHVAWASYERDL

SEQ ID NO: 25987 - protein, 132 aa, Streptomyces avermitilis
  misc_feature (1)..(132): tr|Q82M64|Q82M64_STRAW Uncharacterized protein OS=Strep tomyces avermitilis (strain ATCC 31267 / DSM 46492 / JC M 5070 / NBRC 14893 / NCIMB 12804 / NRRL 8165 / MA-4680 ) OX=227882 GN=SAVERM_1796 PE=4 SV=1
MFSITVRDHIMIAHSFRGEVFGPAQRLHGATFLVDATFRRAELDDDNIVVDIGLATQELGGVVSELNYRNLDNEPDFAHTNTSTEFLAKVIADRLAERVHKGALGEGARGLAGISVTLHESHIAWASYERAL

SEQ ID NO: 25988 - protein, 132 aa, Streptomyces avermitilis; identical to SEQ ID NO: 25987
  misc_feature (1)..(132): tr|A0A4D4LJL3|A0A4D4LJL3_STRAX Uncharacterized protein OS=Streptomyces avermitilis OX=33903 GN=SAV14893_009250 PE=4 SV=1

SEQ ID NO: 25989 - protein, 136 aa, Streptomyces avidinii
  misc_feature (1)..(136): tr|A0A329BTK2|A0A329BTK2_STRAV 6-carboxy-5,6,7,8-tetrah ydropterin synthase OS=Streptomyces avidinii OX=1895 GN =BCL80_11339 PE=3 SV=1
MDFSAVPLPSGDFTIGKMFSFEAGHRLPGLPGEHKCSRQHGHSYEVEVILTAPSLEEPGFVTDFGALAPFKEFLNTELDHHNLHEILPFEPTSERLAQFLAGWFVQNLQPAIPGRLVAVLVRETQSSWARFDVERQ

SEQ ID NO: 25990 - protein, 132 aa, Streptomyces azureus
  misc_feature (1)..(132): tr|A0A0K8PT80|A0A0K8PT80_STRAJ Queuosine biosynthesis p rotein QueD OS=Streptomyces azureus OX=146537 GN=SAZU_5 957 PE=4 SV=1
MFSITVRDHIMIAHSFRGEVFGPAQRLHGATFLVDATFRREQLDEDNIVVDIGLATQELGAVVSELNYRNLDNEPDFAGVNTSTEFLAKVIADRLAERIHKGALGEGAKGIAGLTVTLHESHIAWASYERAL

SEQ ID NO: 25991 - protein, 96 aa, Streptomyces bingchenggensis
  misc_feature (1)..(96): tr|D7BPU7|D7BPU7_STRBB Putative 6-pyruvoyl tetrahydropt erin synthase OS=Streptomyces bingchenggensis (strain B CW-1) OX=749414 GN=SBI_01833 PE=4 SV=1
MVVLELSAAPEDLTLPGFVRDYGDLSAFQKWVDGTLDHRHLNDVLDGVNPSAENIAMWLHERWVKEFPELTAVRVSETPKTWATYRPSLGGAHTPE

SEQ ID NO: 25992 - protein, 132 aa, Streptomyces bingchenggensis
  misc_feature (1)..(132): tr|D7CFL6|D7CFL6_STRBB 6-pyruvoyl tetrahydropterin synt hase OS=Streptomyces bingchenggensis (strain BCW-1) OX= 749414 GN=SBI_01631 PE=4 SV=1
MFSITVRDHLMIAHSFHGEVFGPAQRLHGATFLVDATFRRTELDADNIVVDIGLATQQLNAVVGELNYRNLDEDPAFAGINTSTEFLAKVIADRLADRVAAGELGEGARGLSALTVTLHESHIAWASYERDL

SEQ ID NO: 25993 - protein, 132 aa, Streptomyces bottropensis
  misc_feature (1)..(132): tr|M3FHF7|M3FHF7_9ACTN Uncharacterized protein OS=Strep tomyces bottropensis ATCC 25435 OX=1054862 GN=SBD_6876 PE=4 SV=1
MFSITVRDHIMIAHSFRGEVFGPAQRLHGATFLVDATFRRAELDDDNIVVDIGLATQELGAVVSELNYRNLDNEPAFAHTNTSTEFLAKVIADRLAERIHKGALGENAKGIAGITVTLHESHIAWASYERAL

SEQ ID NO: 25994 - protein, 132 aa, Streptomyces bungoensis
  misc_feature (1)..(132): tr|A0A101TCD0|A0A101TCD0_9ACTN 6-pyruvoyl tetrahydropte rin synthase OS=Streptomyces bungoensis OX=285568 GN=AQ J66_04220 PE=4 SV=1
MFSITVRDHIMIAHSFHGEVFGPAQRLHGATFLVDATFRREQLDEDNIVVDIGLATQELGAITGELNYRNLDNEPEFAGINTSTEFLAKVIADRLAERIHKGALGEGAKGIAGLTVTLHESHVAWASYERAL

SEQ ID NO: 25995 - protein, 136 aa, Streptomyces bungoensis
  misc_feature (1)..(136): tr|A0A117RGX1|A0A117RGX1_9ACTN 6-carboxy-5,6,7,8-tetrah ydropterin synthase OS=Streptomyces bungoensis OX=28556 8 GN=AQJ66_03255 PE=3 SV=1
MGFTAVPLPPGNFTIGKKFGFEAGHRLPRLPHEHKCSRQHGHSYEVEVILTASALEDPGFVTDFGALAPFKSFLDTELDHHNLHEILPFEPTSERLAQFLAGWFVQNLQSEIPGRLVAVLVRETASSWARFDVVGQ

SEQ ID NO: 25996 - protein, 132 aa, Streptomyces caelestis
  misc_feature (1)..(132): tr|A0A0M8QSV8|A0A0M8QSV8_9ACTN 6-pyruvoyl tetrahydropte rin synthase OS=Streptomyces caelestis OX=36816 GN=ADK4 1_13360 PE=4 SV=1
MFSITVRDHIMIAHSFHGEVFGPAQRLHGATFLVDATFRREQLDEDNIVVDIGLATQELGSVVGELNYRNLDDEPDFAGVNTSTEYLAKVVADRLAERIHKGALGEGAKGIAKIAVTLHESHIAWASYERAL

SEQ ID NO: 25997 - protein, 140 aa, Streptomyces caelestis
  misc_feature (1)..(140): tr|A0A0M8QN68|A0A0M8QN68_9ACTN 6-carboxy-5,6,7,8-tetrah ydropterin synthase OS=Streptomyces caelestis OX=36816 GN=ADK41_00700 PE=3 SV=1
MTTTTEQAPDGTFTISKRFTFDAAHQLTSLGPDHMCARLHGHGYRVEAVLSCAEDELVPPGFVVDFKDLEPLARYIKDTLDHRNLNEVLGFEPTSELLARHLAHWFLTHFTPAVADRLIQIRVSETEKTWATYTLNRRTA

SEQ ID NO: 25998 - protein, 230 aa, Streptomyces caeruleatus
  misc_feature (1)..(230): tr|A0A101U5U2|A0A101U5U2_9ACTN Uncharacterized protein OS=Streptomyces caeruleatus OX=661399 GN=AQJ67_09895 PE =4 SV=1
MSGKWRIGKLFRFEATRELSGRRDGHSFTAEIVLASEALTGPGFVADFGELAPVKKHIDAVLDHRMLNDVVPDPSDEGIAEHLRGWARDHLPAAVSSVLQDVRIRTGRTMSPPAGTAVDFGATHWLEGLPPGHQCGHHHGHTYRVFLPASGPEWPAPVNLPPSFADYLTSGLDGQVLNDVFAFNPTCEHLAEHFAKWLAERDIAGIDEEVLTVRVSETESTWGEHEGRPA

SEQ ID NO: 25999 - protein, 132 aa, Streptomyces caeruleatus
  misc_feature (1)..(132): tr|A0A101U856|A0A101U856_9ACTN 6-pyruvoyl tetrahydropte rin synthase OS=Streptomyces caeruleatus OX=661399 GN=A QJ67_03120 PE=4 SV=1
MFSITVRDHIMIAHSFRGDVFGPAQRLHGATFLVDATFRREQLDDDNIVVDIGLATRELGAVVGELNYRNLDNEPDFAGINTSTEFLAKVIADRLAERIEKGALGEGARGLAGLTVTLHESHVAWASYERAL

SEQ ID NO: 26000 - protein, 132 aa, Streptomyces canus
  misc_feature (1)..(132): tr|A0A101P997|A0A101P997_9ACTN 6-pyruvoyl tetrahydropte rin synthase OS=Streptomyces canus OX=58343 GN=AQI96_30 160 PE=4 SV=1
MFSITVRDHIMIAHSFRGEVFGPAQRLHGATFLVDATFRREQLDDDNIVVDIGLATQELGAVVSELNYRNLDNEPDFAGINTSTEFLAKVIADRLAERIAKGALGEGARGLAGLTVSLHESHVAWASYERAL

SEQ ID NO: 26001 - protein, 132 aa, Streptomyces canus
  misc_feature (1)..(132): tr|A0A101RTL7|A0A101RTL7_9ACTN 6-pyruvoyl tetrahydropte rin synthase OS=Streptomyces canus OX=58343 GN=AQJ46_34 280 PE=4 SV=1
MFSITVRDHIMIAHSFRGEVFGPAQRLHGATFLVDATFRREQLDDDNIVVDIGLATQELGAVVSELNYRNLDNEPDFAGINTSTEFLAKVIADRLAERIEKGALGEGAKGLAGLTVSLHESHVAWASYERAL

SEQ ID NO: 26002 - protein, 136 aa, Streptomyces capillispiralis
  misc_feature (1)..(136): tr|A0A561TQC6|A0A561TQC6_9ACTN 6-carboxy-5,6,7,8-tetrah ydropterin synthase OS=Streptomyces capillispiralis OX= 68182 GN=FHX78_116358 PE=3 SV=1
MGFTAVPLPPGNFTIGKKFAFEAGHRLPRLPHEHKCSRQHGHSYEVEVILTASALEDPGFVTDFGALAPFKSFLDTELDHHNLHEILPFEPTSERLAQFLAGWFVQNLQSEIPGRLVAVLVRETASSWARFDVVGQ

SEQ ID NO: 26003 - protein, 132 aa, Streptomyces capillispiralis
  misc_feature (1)..(132): tr|A0A561TA13|A0A561TA13_9ACTN 6-pyruvoyl-tetrahydropte rin synthase OS=Streptomyces capillispiralis OX=68182 G N=FHX78_11862 PE=4 SV=1
MFSITVRDHIMIAHSFRGEVFGPAQRLHGATFLVDATFRREQLDEDNIVVDIGLATQELGAVVGELNYRNLDNEPDFAGVNTSTEYLAKVIADRLAERIHKGALGEGAKGIAGLSVTLHESHIAWASYERAL

SEQ ID NO: 26004 - protein, 142 aa, Streptomyces cattleya
  misc_feature (1)..(142): tr|F8JT14|F8JT14_STREN 6-pyruvoyl-tetrahydropterin synt hase OS=Streptomyces cattleya (strain ATCC 35852 / DSM 46488 / JCM 4925 / NBRC 14057 / NRRL 8057) OX=1003195 G N=SCATT_05780 PE=4 SV=1
MTHSVTVRHNFETAHRLPHLPGKCTSLHGHSWWTEVTVEAPKLAAGLVVEFGPFKRALRQWIDTHLDHGVMLGPNDPLLPVLRSFDCKAYEVTGWPTVENVAALLADMAAGVLRDLVRAPGARVTRVHLAETHVNAATWIAS

SEQ ID NO: 26005 - protein, 132 aa, Streptomyces cellostaticus
  misc_feature (1)..(132): tr|A0A101NSI7|A0A101NSI7_9ACTN 6-pyruvoyl tetrahydropte rin synthase OS=Streptomyces cellostaticus OX=67285 GN= AQI88_02380 PE=4 SV=1
MFSITVRDHIMIAHSFRGEVFGPAQRLHGATFLVDATFRREQLDEDNIVVDIGLATQELGAVTGELNYRNLDDEPEFAGINTSTEFLAKVIADRLAERVHKGALGEGAKGLASLTVTLHESHIAWASYERAL

SEQ ID NO: 26006 - protein, 118 aa, Streptomyces chartreusis
  misc_feature (1)..(118): tr|A0A2N9B6V5|A0A2N9B6V5_STRCX 6-carboxy-5,6,7,8-tetrah ydropterin synthase OS=Streptomyces chartreusis NRRL 38 82 OX=1079985 GN=queD PE=3 SV=1
MEIFREFTFEAAHRLPRVPEGHKCARLHGHSYKVTVHVEAPVEPEAGWVMDFGDIKQAFKPIDAQLDHYYLNDIEGLDNPTSENLARWIWDRMVTELPGLSAITVRETCTSGCTYRGE

SEQ ID NO: 26007 - protein, 132 aa, Streptomyces chartreusis; identical to SEQ ID NO: 25990
  misc_feature (1)..(132): tr|A0A2N9B369|A0A2N9B369_STRCX Queuosine biosynthesis p rotein QueD OS=Streptomyces chartreusis NRRL 3882 OX=10 79985 GN=SCNRRL3882_1246 PE=4 SV=1

SEQ ID NO: 26008 - protein, 132 aa, Streptomyces chattanoogensis
  misc_feature (1)..(132): tr|A0A0N0GX99|A0A0N0GX99_9ACTN 6-pyruvoyl tetrahydropte rin synthase OS=Streptomyces chattanoogensis OX=66876 G N=ADL29_27265 PE=4 SV=1
MFSITVRDHLMVAHSFRGAVFGPAQRLHGATFVVDATFRRAELDADNIVVDIGLATQELGGVVGELNYRNLDDEPAFAGINTSTEALAKVIADRLADRIHAGNLGESARELAGISVTLHESHIAWATYERTL

SEQ ID NO: 26009 - protein, 132 aa, Streptomyces coelicoflavus
  misc_feature (1)..(132): tr|H1QAA5|H1QAA5_9ACTN Uncharacterized protein OS=Strep tomyces coelicoflavus ZG0656 OX=1120227 GN=SMCF_1812 PE =4 SV=1
MFSITVRDHIMVAHSFRGDVFGPAQRLHGATFLVDATFRREQLDEDNIVVDIGLATRELGAVVAELNYRNLDNEPDFAGVNTSTEFLAKVVADRLAERVHKGALGEGARGLAGLTVTLHESHVAWASYERAL

SEQ ID NO: 26010 - protein, 132 aa, Streptomyces coelicolor
  misc_feature (1)..(132): tr|A0A4R8N8F6|A0A4R8N8F6_STRCH 6-pyruvoyl-tetrahydropte rin synthase OS=Streptomyces coelicolor OX=1902 GN=C798 6_10510 PE=4 SV=1
MFSITVRDHIMIAHSFRGDVFGPAQRLHGATFLVDATFRREQLDEDNIVVDIGLATQELGAVVGALNYRNLDNEPDFAGVNTSTEFLAKVIADRLAERVHKGALGEGARGLAGLTVTLHESHVAWASYERAL

SEQ ID NO: 26011 - protein, 132 aa, Streptomyces coelicolor; identical to SEQ ID NO: 26010
  misc_feature (1)..(132): tr|O86696|O86696_STRCO 6-pyruvoyl-tetrahydropterin synt hase OS=Streptomyces coelicolor (strain ATCC BAA-471 / A3(2) / M145) OX=100226 GN=SCO6650 PE=1 SV=1

SEQ ID NO: 26012 - protein, 132 aa, Streptomyces collinus
  misc_feature (1)..(132): tr|S5V597|S5V597_STRC3 Uncharacterized protein OS=Strep tomyces collinus (strain DSM 40733 / Tu 365) OX=1214242 GN=B446_30310 PE=4 SV=1
MFSITVRDHIMIAHSFRGEVFGPAQRLHGATFLVDATFRREQLDEDNIVVDIGLATRELGAVTGELNYRNLDDEPEFAGINTSTEFLAKVIADRLAERVHKGALGEGAKGLKSLSVTLHESHIAWASYERGL

SEQ ID NO: 26013 - protein, 132 aa, Streptomyces corchorusii
  misc_feature (1)..(132): tr|A0A101PQY5|A0A101PQY5_STRCK 6-pyruvoyl tetrahydropte rin synthase OS=Streptomyces corchorusii OX=1903 GN=AQJ 11_41535 PE=4 SV=1
MFSITVRDHMMVAHSFRGEVFGPAQRLHGATFIVDATFRRPDLDDDNIVVDIGLATAELGKVVGALNYRNLDDEEQFQQINTSTEYLAKVIADRLVERIHAGALGEGARGIHEVAVTLHESHIAWASYERRV

SEQ ID NO: 26014 - protein, 132 aa, Streptomyces corchorusii
  misc_feature (1)..(132): tr|A0A101QKS7|A0A101QKS7_STRCK 6-pyruvoyl tetrahydropte rin synthase OS=Streptomyces corchorusii OX=1903 GN=AQJ 11_06180 PE=4 SV=1
MFSITVRDHIMIAHSFHGEVFGPAQRLHGATFLVDATFRREQLDEDNIVVDIGLATRELRTITAELNYRNLDDEPEFAGVNTSTEFLAKVVADRLAERIAKGALGEGAKGLAGITVTLHESHIAWASYERGL

SEQ ID NO: 26015 - protein, 132 aa, Streptomyces curacoi
  misc_feature (1)..(132): tr|A0A124H4E5|A0A124H4E5_9ACTN 6-pyruvoyl tetrahydropte rin synthase OS=Streptomyces curacoi OX=146536 GN=AQI70 _12035 PE=4 SV=1
MFSITVRDHIMIAHSFRGEVFGPAQRLHGATFLVDATFRREQLDDDNIVVDIGLATRELGAVVGELNYRNLDNEPDFAGINTSTEFLAKVIADRLAERIQKGALGEGAKGLAGITVTLHESHVAWASYERAL

SEQ ID NO: 26016 - protein, 132 aa, Streptomyces davaonensis
  misc_feature (1)..(132): tr|K4QTD5|K4QTD5_STRDJ Queuosine biosynthesis protein Q ueD OS=Streptomyces davaonensis (strain DSM 101723 / JC M 4913 / KCC S-0913 / 768) OX=1214101 GN=BN159_1832 PE= 4 SV=1
MFSITVRDHIMIAHSFRGEVFGPAQRLHGATFLVDATFRREQLDEDNIVVDIGLATQELGAVVAELNYRNLDNEPDFAGINTSTEFLAKVIADRLAERVHKGGLGEGARGLAQISVTLHESHVAWASYERAL

SEQ ID NO: 26017 - protein, 132 aa, Streptomyces decoyicus
  misc_feature (1)..(132): tr|A0A0L8M999|A0A0L8M999_9ACTN 6-pyruvoyl tetrahydropte rin synthase OS=Streptomyces decoyicus OX=249567 GN=ADK 74_11730 PE=4 SV=1
MFSITVRDHLMVAHSFRGAVFGPAQRLHGATFIVDATFRRAELDADNIVVDIGLATQELGAVVGELNYRNLDDEPAFAGINTSTEALAKVIADRLAERIEAGNFGAGARELAGISVTLHESHIAWATYERTL

SEQ ID NO: 26018 - protein, 132 aa, Streptomyces dengpaensis
  misc_feature (1)..(132): tr|A0A2L2MFL6|A0A2L2MFL6_9ACTN 6-carboxytetrahydropteri n synthase OS=Streptomyces dengpaensis OX=2049881 GN=C4 B68_05545 PE=4 SV=1
MFSITVRDHLMIAHSFRGEVFGPAQRLHGATFLVDATFRRAELDDDNIVVDIGLATQELGAVVSALNYRNLDDEPDFKNTNTSTEFLAKVIADRLADRVHAGALGEGARGLSGITVTLHESHIAWASYERAL

SEQ ID NO: 26019 - protein, 132 aa, Streptomyces diastatochromogenes
  misc_feature (1)..(132): tr|A0A233S3Q6|A0A233S3Q6_9ACTN Uncharacterized protein OS=Streptomyces diastatochromogenes OX=42236 GN=BEK98_3 5135 PE=4 SV=1
MFSITVRDHIMIAHSFRGEVFGPAQRLHGATFLVDATFRREQLDEDNIVVDIGLATQELGAITAELNYRNLDDEPEFAGINTSTEFLAKVIADRLAERVHKGALGEGAKGLKSVSVTLHESHIAWASYERGV

SEQ ID NO: 26020 - protein, 132 aa, Streptomyces diastatochromogenes
  misc_feature (1)..(132): tr|V5N6V9|V5N6V9_9ACTN 6-pyruvoyl tetrahydropterin synt hase OS=Streptomyces diastatochromogenes OX=42236 PE=4 SV=1
MFSITVRDHLMVAHSFRGAVFGPAQRLHGATFIVDATFRRPELDDDNIVVDIGLATQELGGVIAELNYRNLDDEPAFAGTNTSTEALAKVIADRLADRVHAGNLGAGARDLSGITVTLHESHVAWASYERAL

SEQ ID NO: 26021 - protein, 121 aa, Streptomyces filamentosus
  misc_feature (1)..(121): tr|D6AIR4|D6AIR4_STRFL 6-carboxy-5,6,7,8-tetrahydropter in synthase OS=Streptomyces filamentosus NRRL 15998 OX= 457431 GN=SSGG_00406 PE=3 SV=1
MMLHITKEFHFSASHRLEHLPSDHQCARLHGHNYIIELKLSAAPDQLTEPGFVRDYGDLADFKKWLDHTLDHRHLNDIIEDRNPSAENMAMWIYDQWTERYPELSAVRVSETDKTWAEYRP

SEQ ID NO: 26022 - protein, 131 aa, Streptomyces filamentosus
  misc_feature (1)..(131): tr|W9FLS6|W9FLS6_STRFL 6-carboxy-5,6,7,8-tetrahydropter in synthase OS=Streptomyces filamentosus NRRL 11379 OX= 457430 GN=SSIG_07345 PE=3 SV=1
MTPRFTSRSRLMLHITKEFHFSASHRLEHLPSDHQCARLHGHNYIIELKLSAAPDQLTEPGFVRDYGDLADFKKWLDHTLDHRHLNDIIEDRNPSAENMAMWIYDQWTERYPELSAVRVSETDKTWAEYRP

SEQ ID NO: 26023 - protein, 132 aa, Streptomyces fungicidicus
  misc_feature (1)..(132): tr|A0A494V8K7|A0A494V8K7_9ACTN 6-carboxytetrahydropteri n synthase OS=Streptomyces fungicidicus OX=68203 GN=CNQ 36_30485 PE=4 SV=1
MFSITVRDHIMIAHSFRGEVFGPAQRLHGATFLVDATFRREQLDDDNIVVDIGLATQELGAVVGELNYRNLDNEPDFAGVNTSTEYLAKVIADRLAERVHKGALGEGAKGIAKIAVTLHESHIAWASYERAL

SEQ ID NO: 26024 - protein, 132 aa, Streptomyces galbus
  misc_feature (1)..(132): tr|A0A4U5X9N7|A0A4U5X9N7_STRGB 6-carboxytetrahydropteri n synthase OS=Streptomyces galbus OX=33898 GN=E4U92_045 55 PE=4 SV=1
MFSVTVRDHIMIAHSFRGEVFGPAQRLHGATFLVDATFRREQLDADNIVVDIGLATQELGAVVSELNYRNLDNEPDFAGINTSTEFLAKVVADRLAERIHQGALGEGARGIAGLSVTLHESHVAWASYERAL

SEQ ID NO: 26025 - protein, 132 aa, Streptomyces gancidicus
  misc_feature (1)..(132): tr|M3E8R6|M3E8R6_9ACTN Uncharacterized protein OS=Strep tomyces gancidicus BKS 13-15 OX=1284664 GN=H114_05839 P E=4 SV=1
MFSITVRDHIMIAHSFRGEVFGPAQRLHGATFLVDATFRREQLDEDNIVVDIGLATQELGAVVGELNYRNLDNEPDFAGVNTSTEYLARVIADRLAERIHKGALGEGAKGIARISVTLHESHIAWASYERAL

SEQ ID NO: 26026 - protein, 132 aa, Streptomyces gilvosporeus
  misc_feature (1)..(132): tr|A0A1V0TM62|A0A1V0TM62_9ACTN Uncharacterized protein OS=Streptomyces gilvosporeus OX=553510 GN=B1H19_07390 P E=4 SV=1
MFSITVRDHLMVAHSFRGAVFGPAQRLHGATFVVDATFRRAELDADNIVVDIGLATQELGGVIGELNYRNLDDEPAFAGINTSTEALAKVIADRLADRVRAGNLGESARELSGISVTLHESHIAWATYERTL

SEQ ID NO: 26027 - protein, 132 aa, Streptomyces glaucescens
  misc_feature (1)..(132): tr|A0A089XJY9|A0A089XJY9_STRGA Uncharacterized protein OS=Streptomyces glaucescens OX=1907 GN=SGLAU_27865 PE=4 SV=1
MFSVTVRDHIMIAHSFRGDVFGPAQRLHGATFLVDATFRRPELDDDNIVVDIGLATRELGAVVGELNYRNLDNEPDFAGVNTSTEFLAKVIADRLAERVHKGALGEGARGIAGITVTLHESHVAWASYERDL

SEQ ID NO: 26028 - protein, 132 aa, Streptomyces glauciniger
  misc_feature (1)..(132): tr|A0A239N335|A0A239N335_9ACTN 6-pyruvoyl-tetrahydropte rin synthase OS=Streptomyces glauciniger OX=235986 GN=S AMN05216252_13018 PE=4 SV=1
MFSITVRDHVMVAHSFRGEVFGPAQRLHGATFLVDATFRRPELDADNIVVDIGLATQELGAVLAALNYRNLDDDPDFSGINTSTEFLAKTIADRLADRVAAGKLGEGAHGLTGITVTLHESHVAWASYERSL

SEQ ID NO: 26029 - protein, 132 aa, Streptomyces griseoaurantiacus
  misc_feature (1)..(132): tr|F3NG67|F3NG67_9ACTN 6-pyruvoyl tetrahydropterin synt hase OS=Streptomyces griseoaurantiacus M045 OX=996637 G N=SGM_2131 PE=4 SV=1
MFSITVRDHLMIAHSFRGEVFGPAQRLHGATFLVDATFRRPELDEDNIVVDIGLATQELGAVVAELNYRNLDNEPDFADTNTSTEFLAKVVADRLARRIEDGRLGEGARGLTGLTVTLHESHIAWASYERAL

SEQ ID NO: 26030 - protein, 136 aa, Streptomyces griseoaurantiacus
  misc_feature (1)..(136): tr|F3NQA0|F3NQA0_9ACTN 6-carboxy-5,6,7,8-tetrahydropter in synthase OS=Streptomyces griseoaurantiacus M045 OX=9 96637 GN=SGM_5175 PE=3 SV=1
MGFTAVPLPPGNFTIGKKFGFEAGHRLPRLPHEHKCSRQHGHSYEVEVILTASALEDPGFVTDFGALAPFKSFLDTELDHHNLHEILPFEPTSERLAQFLAGWFVQNLQSEIAGRLVAVLVRETASSWARFDVVGQ

SEQ ID NO: 26031 - protein, 144 aa, Streptomyces griseocarneus
  misc_feature (1)..(144): tr|A0A3L8IHQ9|A0A3L8IHQ9_9ACTN 6-pyruvoyl tetrahydrobio pterin synthase OS=Streptomyces griseocarneus OX=51201 GN=CTZ27_33285 PE=4 SV=1
MSRSQGVTVRHNFETAHRLPHLPGKCVSLHGHSWWVQVTVSAPEPRAGMVVEFGPFKQALRAWIDEHLDHGVMLGPDDPLVEVLRAHDCKVYEVPGWPTVEHVAALLAGVADQVLAALPRAPGARVTGVEVHETHVNAASWTAA

SEQ ID NO: 26032 - protein, 121 aa, Streptomyces griseochromogenes
  misc_feature (1)..(121): tr|A0A1B1B2S5|A0A1B1B2S5_9ACTN 6-carboxy-5,6,7,8-tetrah ydropterin synthase OS=Streptomyces griseochromogenes O X=68214 GN=AVL59_29115 PE=3 SV=1
MLRITKDFQFSASHRLDHLPDDHQCARLHGHNYTVQLELSVQSRDDLTRAGFVRDYGDLADFKKWLDSELDHRHLNDVISGRNPSAENLAMWIYELWSERFSEISAVRVSETPKTWAEYRP

SEQ ID NO: 26033 - protein, 132 aa, Streptomyces griseochromogenes
  misc_feature (1)..(132): tr|A0A1B1AVQ7|A0A1B1AVQ7_9ACTN Uncharacterized protein OS=Streptomyces griseochromogenes OX=68214 GN=AVL59_144 55 PE=4 SV=1
MFSITVRDHIMIAHSFRGDVFGPAQRLHGATFLVDATFRREQLDEDNIVVDIGLATQELGAVTGELNYRNLDDEPEFAGINTSTEFLAKVIADRLAERVHKGALGEGAKGLKSLTVTLHESHIAWASYERAL

SEQ ID NO: 26034 - protein, 137 aa, Streptomyces griseoflavus
  misc_feature (1)..(137): tr|D9Y0X4|D9Y0X4_9ACTN 6-pyruvoyl tetrahydropterin synt hase OS=Streptomyces griseoflavus Tu4000 OX=467200 GN=S SRG_00715 PE=4 SV=1
MEGRPLFSITVRDHIMIAHSFRGEVFGPAQRLHGATFLVDATFRREQLDDDNIVVDIGLATQELGAVVGELNYRNLDNEPDFAGVNTSTEYLAKVIADRLAERVHKGALGEGAKGIAKIAVTLHESHIAWASYERAL

SEQ ID NO: 26035 - protein, 121 aa, Streptomyces griseoflavus; identical to SEQ ID NO: 25976
  misc_feature (1)..(121): tr|A0A0L8NMW9|A0A0L8NMW9_9ACTN 6-carboxy-5,6,7,8-tetrah ydropterin synthase OS=Streptomyces griseoflavus OX=356 19 GN=ADK76_10880 PE=3 SV=1

SEQ ID NO: 26036 - protein, 132 aa, Streptomyces griseoluteus
  misc_feature (1)..(132): tr|A0A4Z1D5C1|A0A4Z1D5C1_STRGP 6-carboxytetrahydropteri n synthase OS=Streptomyces griseoluteus OX=29306 GN=E50 82_26740 PE=4 SV=1
MFSITVRDHIMIAHSFRGDVFGPAQRLHGATFLVDATFRREQLDEDNIVVDIGLATRELGSITAELNYRNLDDDPEFAGVNTSTEFLAKVVADRLAERIAKGALGEGAKGLSALSVTLHESHIAWASYERGL

SEQ ID NO: 26037 - protein, 118 aa, Streptomyces griseoruber
  misc_feature (1)..(118): tr|A0A117R9I9|A0A117R9I9_9ACTN 6-carboxy-5,6,7,8-tetrah ydropterin synthase OS=Streptomyces griseoruber OX=1943 GN=AQJ64_31635 PE=3 SV=1
MEIFREFAFEAAHRLPRVPEGHKCARLHGHSYKVTVHVEAPVDVEAGWVMDFGDIKRAFTPIDAQLDHYYLNDIEGLDNPTSENLARWIWGRLITELPSLSAITVRETCTSGCTYRGE

SEQ ID NO: 26038 - protein, 132 aa, Streptomyces griseoruber
  misc_feature (1)..(132): tr|A0A117RFQ6|A0A117RFQ6_9ACTN 6-pyruvoyl tetrahydropte rin synthase OS=Streptomyces griseoruber OX=1943 GN=AQJ 64_03310 PE=4 SV=1
MFSVTVRDHIMIAHSFRGEVFGPAQRLHGATFLVDATFRREQLDDDNIVVDIGLATQELGAVVSELNYRNLDNEPDFAGINTSTEFLAKVVADRLAERIHKGALGEGARGIASLSVTLHESHIAWASYERAL

SEQ ID NO: 26039 - protein, 132 aa, Streptomyces griseorubiginosus
  misc_feature (1)..(132): tr|A0A3N1N4K6|A0A3N1N4K6_9ACTN 6-pyruvoyl-tetrahydropte rin synthase OS=Streptomyces griseorubiginosus OX=67304 GN=EDC83_7235 PE=4 SV=1
MFSITVRDHIMIAHSFRGEVFGPAQRLHGATFLVDATFRREQLDDDNIVVDIGLATQELGAVVSELNYRNLDNEPDFAGINTSTEFLAKVIADRLAERIEKGALGEGAKGLAGLTVTLHESHVAWASYERAL

SEQ ID NO: 26040 - protein, 132 aa, Streptomyces griseorubiginosus
  misc_feature (1)..(132): tr|A0A117NZC3|A0A117NZC3_9ACTN 6-pyruvoyl tetrahydropte rin synthase OS=Streptomyces griseorubiginosus OX=67304 GN=AQJ54_14950 PE=4 SV=1
MFSITVRDHIMIAHSFRGEVFGPAQRLHGATFLVDATFRREQLDDDNIVVDIGLATQELGAVVSELNYRNLDNEPDFAGVNTSTEFLAKVIADRLAERIEKGALGEGAKGLAGLTVTLHESHVAWASYERAL

SEQ ID NO: 26041 - protein, 132 aa, Streptomyces griseoviridis
  misc_feature (1)..(132): tr|A0A3S9Z883|A0A3S9Z883_STRGD 6-carboxytetrahydropteri n synthase OS=Streptomyces griseoviridis OX=45398 GN=EL Q87_05970 PE=4 SV=1
MFSVTVRDHIMIAHSFRGEVFGPAQRLHGATFLVDATFRREQLDDDGIVVDIGLATQELGAVTSELNYRNLDNEPEFAGVNTSTEFLAKVIADRLAERVHKGALGEGARGIAGIAVTLHESHIAWASYERAL

SEQ ID NO: 26042 - protein, 233 aa, Streptomyces griseus
  misc_feature (1)..(233): tr|A0A2X2M9D4|A0A2X2M9D4_STRGR Queuosine biosynthesis Q ueD, PTPS-I OS=Streptomyces griseus OX=1911 GN=queD PE= 4 SV=1
MSSTQCLFRIGKGFRFEATRRLDDGRYDGHSFTAEAVLSSAVLSPEGFVADFGDLAPLKRYIDGALDHQILNDCVKDVSNEGIAQHLLGWARGHLASDVVSVLEGVQVRTGRTQPLPSAAFAPFEASHQLRGLPEGHLCGRLHGHSYVLSVPVSAVPRVGDIPVLLREHLRSAVHGRVLNEVIPGLNPTSENLARHFSQWLADRAMAGAGWNAACLRVSETETSWAEYTGGTA

SEQ ID NO: 26043 - protein, 118 aa, Streptomyces hainanensis
  misc_feature (1)..(118): tr|A0A4R4TVE3|A0A4R4TVE3_9ACTN 6-carboxy-5,6,7,8-tetrah ydropterin synthase OS=Streptomyces hainanensis OX=4026 48 GN=queD PE=3 SV=1
MEIFREFTFEAAHRLPNVPEGHKCARLHGHSYKVIVHVVAPVDPEAGWVMDFGDLKRTFKPIEAQLDHYYLNDIEGLENPTSEVLARWIWERLKPALPDLSALTVRETCTSGCTYRGE

SEQ ID NO: 26044 - protein, 122 aa, Streptomyces harbinensis
  misc_feature (1)..(122): tr|A0A1I6RYI3|A0A1I6RYI3_9ACTN 6-carboxy-5,6,7,8-tetrah ydropterin synthase OS=Streptomyces harbinensis OX=1176 198 GN=SAMN05444716_103596 PE=3 SV=1
MFMISKEFHFSASHVLDRLPSWHQCARMHGHNYVVVLELSARAEDLTEAGFVRDYRDLDPFKKWLDDTLDDRHLNEALGETISPSAENLAKWIFDAWVEQIPELAAVRVSETPKTWAVYRPD

SEQ ID NO: 26045 - protein, 140 aa, Streptomyces himastatinicus
  misc_feature (1)..(140): tr|D9WF39|D9WF39_9ACTN Putative 6-pyruvoyl tetrahydropt erin synthase OS=Streptomyces himastatinicus ATCC 53653 OX=457427 GN=SSOG_07063 PE=4 SV=1
MPPYREGPLFSITVRDHLMVAHSFSGEVFGPAQRLHGATFLVDATFRRSALDDDNIVVDIGLATQELGAVVGDLNYRNLDDEPAFKGINTSTEFLAKVIADRLAERVHAGALGEGARGLAGIQVTLHESHVAWASYERDL

SEQ ID NO: 26046 - protein, 157 aa, Streptomyces himastatinicus
  misc_feature (1)..(157): tr|D9WJ60|D9WJ60_9ACTN 6-pyruvoyl-tetrahydropterin synt hase OS=Streptomyces himastatinicus ATCC 53653 OX=45742 7 GN=SSOG_08871 PE=4 SV=1
MHHPPARFSVTKLFDDLPCTHRSWAHGGKCSFLHGYERSFEIEFGCGELEPKTGFVIDFGDLKEVRALLQAQFDHTTLIAADDPHRELFEDLGRSGVIDLRIMDHTGMEGAAEWVHDRVAQLVGERTVGRVRVLRVVARESRKNAVVFRAPDPRDPR

SEQ ID NO: 26047 - protein, 132 aa, Streptomyces hygroscopicus; identical to SEQ ID NO: 26013
  misc_feature (1)..(132): tr|A0A0S2PFN1|A0A0S2PFN1_STRHL Uncharacterized protein OS=Streptomyces hygroscopicus subsp. limoneus OX=264445 GN=SHL15_8115 PE=4 SV=1

SEQ ID NO: 26048 - protein, 132 aa, Streptomyces hygroscopicus
  misc_feature (1)..(132): tr|A0A1S6RFN2|A0A1S6RFN2_STRHY 6-pyruvoyl tetrahydropte rin synthase OS=Streptomyces hygroscopicus OX=1912 GN=S HXM_03167 PE=4 SV=1
MFSITVRDHIMIAHSFRGDVFGPAQRLHGATFLVDATFRRAELDDDNIVVDIGLATRELGEVCGALSYRNLDDEPDFEGINTSTEFLAKVIADRLAERVHSGALGEGARGLSAIAVTLHESHVAWASYERGL

SEQ ID NO: 26049 - protein, 132 aa, Streptomyces incarnatus
  misc_feature (1)..(132): tr|A0A0G3A6M7|A0A0G3A6M7_9ACTN 6-pyruvoyl tetrahydropte rin synthase OS=Streptomyces incarnatus OX=665007 GN=AB B07_05505 PE=4 SV=1
MFSITVRDHIMIAHSFRGEVFGPAQRLHGATFLVDATFRREQLDEDNIVVDIGLATQELRLITAELNYRNLDDEPEFAGVNTSTEFLAKVIADRLAERIHKGALGEGAKGLAGLTVTLHESHIAWASYERGL

SEQ ID NO: 26050 - protein, 132 aa, Streptomyces ipomoeae
  misc_feature (1)..(132): tr|A0A540Q019|A0A540Q019_9ACTN 6-carboxytetrahydropteri n synthase OS=Streptomyces ipomoeae OX=103232 GN=Sipo78 51_30260 PE=4 SV=1
MFSITVRDHIMIAHSFRGEVFGPAQRLHGATFLVDATFRRAELDDDNIVVDIGLATQELGAVVSELNYRNLDNEPDFANTNTSTEFLAKVIADRLAERIHKGALGENAKGIAGITVTLHESHIAWASYERAL

SEQ ID NO: 26051 - protein, 132 aa, Streptomyces ipomoeae; identical to SEQ ID NO: 26050
  misc_feature (1)..(132): tr|L1KV02|L1KV02_9ACTN Putative 6-pyruvoyl tetrahydropt erin synthase OS=Streptomyces ipomoeae 91-03 OX=698759 GN=STRIP9103_08363 PE=4 SV=1

SEQ ID NO: 26052 - protein, 120 aa, Streptomyces iranensis
  misc_feature (1)..(120): tr|A0A060ZZV9|A0A060ZZV9_9ACTN 6-carboxy-5,6,7,8-tetrah ydropterin synthase OS=Streptomyces iranensis OX=576784 GN=SIRAN7878 PE=3 SV=1
MYFCISKDFHFSASHRLDGLDASHPCARLHGHNYVVALELAAGSNGLDGVGFVRDYGDLAEFSQWLDSELDHRHLNDVVDTHPSAENISRWIFERGISRYPELHAVRVSETPKTWAEYRK

SEQ ID NO: 26053 - protein, 92 aa, Streptomyces iranensis
  misc_feature (1)..(92): tr|A0A061A065|A0A061A065_9ACTN Uncharacterized protein OS=Streptomyces iranensis OX=576784 GN=SIRAN7998 PE=4 S V=1
MHGHNYVIELELAADDADLLPVGFVRDYGDLSAFKVWLDNHLDHRHLNDVMDENPTAENMAAWVYKTWSMEFPELTCVRVSETPKTWAEYRP

SEQ ID NO: 26054 - protein, 110 aa, Streptomyces jeddahensis
  misc_feature (1)..(110): tr|A0A177I054|A0A177I054_9ACTN 6-carboxy-5,6,7,8-tetrah ydropterin synthase OS=Streptomyces jeddahensis OX=1716 141 GN=queD PE=4 SV=1
MLTIAKEFHFSASHVLDRLPSWHPCARMHGHNYLVVLELSARREDLTEAGFVRDYRELDDFKTWMDDTLDHRHLNKAMGGGYLPVRGESRRMDLRPLDRAISGVDSGQGL

SEQ ID NO: 26055 - protein, 136 aa, Streptomyces jietaisiensis; identical to SEQ ID NO: 26002
  misc_feature (1)..(136): tr|A0A1G7J4G4|A0A1G7J4G4_9ACTN 6-carboxy-5,6,7,8-tetrah ydropterin synthase OS=Streptomyces jietaisiensis OX=23 5987 GN=SAMN05216260_106285 PE=3 SV=1

SEQ ID NO: 26056 - protein, 132 aa, Streptomyces jietaisiensis; identical to SEQ ID NO: 26029
  misc_feature (1)..(132): tr|A0A1G7INC9|A0A1G7INC9_9ACTN 6-pyruvoyl-tetrahydropte rin synthase OS=Streptomyces jietaisiensis OX=235987 GN =SAMN05216260_106104 PE=4 SV=1

SEQ ID NO: 26057 - protein, 136 aa, Streptomyces kanasensis
  misc_feature (1)..(136): tr|A0A124EC52|A0A124EC52_9ACTN 6-carboxy-5,6,7,8-tetrah ydropterin synthase OS=Streptomyces kanasensis OX=93675 6 GN=ATE80_23100 PE=3 SV=1
METAPVPLPSGRFTIGKTFDFEAGHRLASLPPEHKCSRQHGHSYEVEVVLSASSLQGPGFVTDFGDLSPFKQYLDSELDHHNLYEVLDFEPTSELLAQYLAGWFITNMPSRIARQLTAVRVRETQRSWAQFDVAAT

SEQ ID NO: 26058 - protein, 132 aa, Streptomyces kasugaensis
  misc_feature (1)..(132): tr|A0A4Q9I0X6|A0A4Q9I0X6_STRKA 6-carboxytetrahydropteri n synthase OS=Streptomyces kasugaensis OX=1946 GN=EYS09 _02145 PE=4 SV=1
MFSITVRDHFMAAHSFRGEVFGPAQRLHGATFTVDATFRRTTLDADNIVVDIGLATQELGAVLGEFNYRNLDDHPAFEGINTSTEFLAKVIADRLAGQVHSGALGEGARQLSGISVTLHESPVAWATYERAL

SEQ ID NO: 26059 - protein, 125 aa, Streptomyces katrae
  misc_feature (1)..(125): tr|A0A0F4J9P1|A0A0F4J9P1_9ACTN 6-carboxy-5,6,7,8-tetrah ydropterin synthase OS=Streptomyces katrae OX=68223 GN= VR44_18905 PE=3 SV=1
MLTITKEFHFSASHVLDRLPSWHPCARMHGHNYAVVIELSGRREDLTEAGFVRDYRDLDAFKQWMDETFDHRHLNEALGGGISPSAENLAVWIFDQWTERIPELTAVRISETPKTWAEYRPVREA

SEQ ID NO: 26060 - protein, 136 aa, Streptomyces klenkii
  misc_feature (1)..(136): tr|A0A3B0A5R2|A0A3B0A5R2_9ACTN 6-carboxy-5,6,7,8-tetrah ydropterin synthase OS=Streptomyces klenkii OX=1420899 GN=D7231_34820 PE=3 SV=1
MPTTIGKAFRFEAAHRLASLGPEHKCSRPHGHSYRVEIALTRAELVPPGFVTDFGDLAPFGRYLSEELDHRDLTETLPFEPTCELLARHLAQWFIANLEPDIPGRLRSVRVSETASTWAQYDVEERDGGRAPADRR

SEQ ID NO: 26061 - protein, 132 aa, Streptomyces lasaliensis
  misc_feature (1)..(132): tr|A0A4V6AWH5|A0A4V6AWH5_STRLS 6-carboxytetrahydropteri n synthase OS=Streptomyces lasaliensis OX=324833 GN=E4U 91_30150 PE=4 SV=1
MFSVTVRDHIMIAHSFRGEVFGPAQRLHGATFLVDATFRREQLDADNIVVDIGLATQELGAVVSELNYRNLDDEPDFAGINTSTEFLAKVIADRLAERIHQGALGEGARGVAGLSVTLHESHVAWASYERAL

SEQ ID NO: 26062 - protein, 122 aa, Streptomyces laurentii
  misc_feature (1)..(122): tr|A0A160NUG6|A0A160NUG6_STRLU 6-carboxy-5,6,7,8-tetrah ydropterin synthase OS=Streptomyces laurentii OX=39478 GN=SLA_0226 PE=3 SV=1
MLSITKEFHFSASHRLAHLAADHPCGRLHGHNYVLMVELSARESELTPAGFVRDYGDLDALKKWIDEFLDHRHLNDVMKDRNPSAENIARWVYENWRRDLPELTAVRVSETPKTWATYRPAP

SEQ ID NO: 26063 - protein, 132 aa, Streptomyces lincolnensis
  misc_feature (1)..(132): tr|A0A1B1ML14|A0A1B1ML14_STRLN Uncharacterized protein OS=Streptomyces lincolnensis OX=1915 GN=SLCG_7028 PE=4 SV=1
MFSITVRDHIMIAHSFRGEVFGPAQRLHGATFLVDATFRREQLDDDNIVVDIGLATQELGAVVSELNYRNLDNEPDFAGVNTSTEFLAKVIADRLAQRIEKGALGEGAKGLAGLTVTLHESHVAWASYERAL

SEQ ID NO: 26064 - protein, 132 aa, Streptomyces lividans; identical to SEQ ID NO: 26010
  misc_feature (1)..(132): tr|A0A076M2Z5|A0A076M2Z5_STRLI Uncharacterized protein OS=Streptomyces lividans TK24 OX=457428 GN=SLIV_05260 P E=4 SV=1

SEQ ID NO: 26065 - protein, 132 aa, Streptomyces longwoodensis
  misc_feature (1)..(132): tr|A0A101R1K6|A0A101R1K6_9ACTN 6-pyruvoyl tetrahydropte rin synthase OS=Streptomyces longwoodensis OX=68231 GN= AQJ30_08620 PE=4 SV=1
MFSVTVRDHIMIAHSFRGEVFGPAQRLHGATFLVDATFRREQLDADNIVVDIGLATQELGAVVSDLNYRNLDNEPDFAGVNTSTEFLAKVIADRLAERIHRGALGEGARGIAGLSVTLHESHVAWASYERAL

SEQ ID NO: 26066 - protein, 132 aa, Streptomyces lunaelactis
  misc_feature (1)..(132): tr|A0A2R4TB68|A0A2R4TB68_9ACTN Uncharacterized protein OS=Streptomyces lunaelactis OX=1535768 GN=SLUN_33125 PE =4 SV=1
MFSITVRDHLMIAHSFRGEVFGPAQRLHGATFLVDATFRRPELDDDNIVVDIGLATQELNAVVAALNYRNLDDEPDFAGINTSTEFVAKVIADRLADRVHAGALGEGARGLTGITVTLHESHIAWASYERGL

SEQ ID NO: 26067 - protein, 231 aa, Streptomyces lydicus
  misc_feature (1)..(231): tr|A0A0D4DFN6|A0A0D4DFN6_9ACTN 6-pyruvoyl tetrahydropte rin synthase OS=Streptomyces lydicus OX=47763 GN=T261_0 739 PE=4 SV=1
MSAPAGTYRIGKRFRFEATRRLEGGRWDGHSFTAEVVLSAHTLGAEGFVIDFGELAPLKRYIDATFDHRTLNDVTEDVSNDGLSQHLADRASANLPLEAATALEAIYVSTGRPVPAAVSASSGFEASHQLHGLYDGHPCGRLHGHSYQVSMPTSALLRPADVPVLLRQHIRSAFDGRLLNEVLPGVNPTSENLARYFVEWLEDRCLGSGTATRVRVSETESSWAEYTGRPA

SEQ ID NO: 26068 - protein, 132 aa, Streptomyces lydicus
  misc_feature (1)..(132): tr|A0A1D7VL92|A0A1D7VL92_9ACTN Uncharacterized protein OS=Streptomyces lydicus OX=47763 GN=SL103_14250 PE=4 SV =1
MFSITVRDHLMVAHSFRGAVFGPAQRLHGATFIVDATFRRPELDADNIVVDIGLATQELGGVVGELNYRNLDDEPAFAGVNTSTEALAKVIADRLAERVHAGNLGESARELTGISVTLHESHIAWATYERTL

SEQ ID NO: 26069 - protein, 132 aa, Streptomyces malaysiensis
  misc_feature (1)..(132): tr|A0A291SLU7|A0A291SLU7_9ACTN 6-carboxytetrahydropteri n synthase OS=Streptomyces malaysiensis OX=92644 GN=DNK 48_35550 PE=4 SV=1
MFSITVRDHIMIAHSFRGEVFGPAQRLHGATFLVDATFRRAELDGDNIVVDIGLATRELGEVCGALSYRNLDDEPDFKGVNTSTEFLAKVIADRLAERVRSGALGEGARGLSGIAVTLHESHVAWASYERDL

SEQ ID NO: 26070 - protein, 118 aa, Streptomyces mangrovisoli
  misc_feature (1)..(118): tr|A0A1J4NL35|A0A1J4NL35_9ACTN 6-carboxy-5,6,7,8-tetrah ydropterin synthase OS=Streptomyces mangrovisoli OX=142 8628 GN=WN71_037155 PE=3 SV=1
MEIFREFAFEAAHRLPRVPEGHKCARLHGHSYKVSVHVEAPVDAEQGWVMDFGDIKQAFQPIDAQLDHYYLNDIDGLDNPTSENLARWIWDRMIGDLPALSQITVRETCTSGCTYRGA

SEQ ID NO: 26071 - protein, 132 aa, Streptomyces mangrovisoli
  misc_feature (1)..(132): tr|A0A1J4NUF2|A0A1J4NUF2_9ACTN Uncharacterized protein OS=Streptomyces mangrovisoli OX=1428628 GN=WN71_027100 PE=4 SV=1
MFSVTVRDHIMIAHSFRGEVFGPAQRLHGATFLVDATFRREQLDDDNIVVDIGLATQELGSVAAELNYQNLDDVPEFAGINTSTEFLAKVIADRLAEAIHKGALGEGAKGIAGISVTLHESHVAWASYERAL

SEQ ID NO: 26072 - protein, 137 aa, Streptomyces melanosporofaciens
  misc_feature (1)..(137): tr|A0A1H4KRY5|A0A1H4KRY5_STRMJ 6-carboxy-5,6,7,8-tetrah ydropterin synthase OS=Streptomyces melanosporofaciens OX=67327 GN=SAMN04490356_0925 PE=3 SV=1
MNSPSDSSFPLGTLTIGKTFDFEAGHRLPSLPPEHKCSHQHGHSYQVEVILTAPTLEAPGFVTDFGALAPFKKFLDTELDHQNLHEVLPFEPTSEHVAQFLAGWIIQNLEPDIPGRLVAVRVCETERSWARFDVEQR

SEQ ID NO: 26073 - protein, 132 aa, Streptomyces melanosporofaciens
  misc_feature (1)..(132): tr|A0A1H4KXD7|A0A1H4KXD7_STRMJ 6-pyruvoyl-tetrahydropte rin synthase OS=Streptomyces melanosporofaciens OX=6732 7 GN=SAMN04490356_1027 PE=4 SV=1
MFSITVRDHIMIAHSFRGDVFGPAQRLHGATFLVDATFRRAELDDDNIVVDIGLATRELGEVCGALSYRNLDDERDFEGINTSTEFLAKVIADRLAERVASGALGEGARGLSGIVVTLHESHVAWASYERGL

SEQ ID NO: 26074 - protein, 136 aa, Streptomyces microflavus; identical to SEQ ID NO: 25989
  misc_feature (1)..(136): tr|A0A285DLC3|A0A285DLC3_STRMI 6-carboxy-5,6,7,8-tetrah ydropterin synthase OS=Streptomyces microflavus OX=1919 GN=SAMN05421860_11239 PE=3 SV=1

SEQ ID NO: 26075 - protein, 132 aa, Streptomyces mirabilis
  misc_feature (1)..(132): tr|A0A1I2A3I6|A0A1I2A3I6_9ACTN 6-pyruvoyl-tetrahydropte rin synthase OS=Streptomyces mirabilis OX=68239 GN=SAMN 02787118_101542 PE=4 SV=1
MFSITVRDHLMIAHSFRGEVFGPAQRLHGATFLVDATFRRAELDDDNIVVDIGLATQELGAVVSALNYRNLDNEPDFKNTNTSTEFLAKVIADRLAERVHAGALGEGAQGLAGITVTLHESHIAWASYERAL

SEQ ID NO: 26076 - protein, 132 aa, Streptomyces murayamaensis
  misc_feature (1)..(132): tr|Q84CK8|Q84CK8_9ACTN Uncharacterized protein OS=Strep tomyces murayamaensis OX=224537 PE=4 SV=1
MFSVTVRDHLMIAHSFSGEVFGPAQRLHGATYLVDATFQRPELDDDNIVIDMGLAGREVRGIVAALSYRNLDEDPDFAGTNTTTEFLAKVIADRLAARIHDGALGPGAQGLTGLTVRLHESHIAWADYHRTL

SEQ ID NO: 26077 - protein, 132 aa, Streptomyces nanshensis
  misc_feature (1)..(132): tr|A0A1E7L195|A0A1E7L195_9ACTN 6-pyruvoyl tetrahydropte rin synthase OS=Streptomyces nanshensis OX=518642 GN=AN 218_19710 PE=4 SV=1
MYSITVRDHMMIAHSFRGEVFGPAQRLHGATFVVDASFRRRELDADGLVVDIGAATQELNGVLADLNYRNLDDEPAFAGINTSTEMLARYVADQLAEKIEAGALGEGARGLDGLSVTLHESHVAWASYEREL

SEQ ID NO: 26078 - protein, 132 aa, Streptomyces natalensis
  misc_feature (1)..(132): tr|A0A0D7CLJ1|A0A0D7CLJ1_9ACTN 6-pyruvoyl tetrahydropte rin synthase OS=Streptomyces natalensis ATCC 27448 OX=1 240678 GN=SNA_24330 PE=4 SV=1
MFSITVRDHLMVAHSFRGAVFGPAQRLHGATFVVDATFRRAELDADNIVVDIGLATQELGGVIAELNYRNLDDEPAFAGINTSTEALAKVIADRLADRVHAGNLGESARELSGISVTLHESHIAWATYERTL

SEQ ID NO: 26079 - protein, 132 aa, Streptomyces nigra
  misc_feature (1)..(132): tr|A0A2S1IL52|A0A2S1IL52_9ACTN 6-carboxytetrahydropteri n synthase OS=Streptomyces nigra OX=1827580 GN=DC008_29 040 PE=4 SV=1
MFSITVRDHIMIAHSFHGEVFGPAQRLHGATFLVDATFRREQLDDDNIVVDIGLATQELGAVVAELNYRNLDNEPDFAGINTSTEFLAKVIADRLAERVEKGALGEGARGLAGITVTLHESHVAWASYERAL

SEQ ID NO: 26080 - protein, 146 aa, Streptomyces niveus
  misc_feature (1)..(146): tr|V6KCP2|V6KCP2_STRNV 6-carboxy-5,6,7,8-tetrahydropter in synthase OS=Streptomyces niveus NCIMB 11891 OX=13529 41 GN=M877_11200 PE=3 SV=1
MHDHDGTPAGQLKLGVAGLLTISKQFHFSASHVLDKLPSWHKCARMHGHNYVVVMELSAHPDDLTEAGFVRDYGDLDRFKTWVDETLDHRHLNEVMGISTSAENMALWIFSQWVERYPELTAVWVSETPRTWAVYRVEPRRTPAGG

SEQ ID NO: 26081 - protein, 132 aa, Streptomyces nodosus
  misc_feature (1)..(132): tr|A0A0B5DIC0|A0A0B5DIC0_9ACTN 6-pyruvoyl tetrahydropte rin synthase OS=Streptomyces nodosus OX=40318 GN=SNOD_2 8190 PE=4 SV=1
MFSITVRDHLMIAHSFRGEVFGPAQRLHGATFLVDATFRRAELDDDNIVVDIGLATQELGAVVGGLNYRNLDDEPDFEGTNTSTEFLAKVIADRLAERIHQGALGENARGISALAVTLHESHIAWASYERAL

SEQ ID NO: 26082 - protein, 132 aa, Streptomyces noursei
  misc_feature (1)..(132): tr|A0A1B2H230|A0A1B2H230_STRNR 6-pyruvoyl-tetrahydropte rin synthase OS=Streptomyces noursei ATCC 11455 OX=3162 84 GN=SNOUR_35065 PE=4 SV=1
MFSITVRDHLMVAHSFRGAVFGPAQRLHGATFIVDATFRRPELDADNIVVDIGLATQELGAVVAELNYRNLDDEPAFAGTNTSTEALAKVIADRLADRVHAGNLGAGARELAGITVTLHESHIAWASYERAL

SEQ ID NO: 26083 - protein, 132 aa, Streptomyces noursei
  misc_feature (1)..(132): tr|A0A2N8PJ65|A0A2N8PJ65_STRNR 6-pyruvoyl tetrahydropte rin synthase OS=Streptomyces noursei OX=1971 GN=AOB60_1 0035 PE=4 SV=1
MFSITVRDHLMVAHSFRGAVFGPAQRLHGATFIVDATFRRPELDDDNIVVDIGLATQELGAVVAELNYRNLDDEPAFAGTNTSTEALAKVIADRLAERVHAGNLGAGARELAGITVTLHESHIAWASYERAL

SEQ ID NO: 26084 - protein, 118 aa, Streptomyces oceani
  misc_feature (1)..(118): tr|A0A1E7JW74|A0A1E7JW74_9ACTN 6-carboxy-5,6,7,8-tetrah ydropterin synthase OS=Streptomyces oceani OX=1075402 G N=AN216_23110 PE=3 SV=1
MEIFREFNFEAAHRLPNVPEGHKCSRLHGHSYKVIVHVEAPVDPEAGWVMDFGDLKRTFKPIESQLDHYYLNDIEGLENPTSEVLARWIWERLQPNLSGLSALTVRETCTSGCTYRGE

SEQ ID NO: 26085 - protein, 132 aa, Streptomyces olivochromogenes; identical to SEQ ID NO: 26075
  misc_feature (1)..(132): tr|A0A250V4I2|A0A250V4I2_STROL Uncharacterized protein OS=Streptomyces olivochromogenes OX=1963 GN=SO3561_0036 2 PE=4 SV=1

SEQ ID NO: 26086 - protein, 120 aa, Streptomyces olivochromogenes
  misc_feature (1)..(120): tr|A0A250VLI3|A0A250VLI3_STROL 6-carboxy-5,6,7,8-tetrah ydropterin synthase OS=Streptomyces olivochromogenes OX =1963 GN=SO3561_06393 PE=3 SV=1
MTFRISKKFEFSASHQLTGLAPEHQCARMHGHNYVIELELGADDKDLSPVGFVRDYGELSAFKVWLDNHLDHRHLNDVMDENPTAENMAAWVYKTWSMEFPELTCVRISETPKTWAEYRP

SEQ ID NO: 26087 - protein, 132 aa, Streptomyces ossamyceticus
  misc_feature (1)..(132): tr|A0A3N1LHA2|A0A3N1LHA2_9ACTN 6-pyruvoyl-tetrahydropte rin synthase OS=Streptomyces ossamyceticus OX=249581 GN =EDD87_1203 PE=4 SV=1
MFSITVRDHIMIAHSFRGEVFGPAQRLHGATFLVDATFRRAELDDDNIVVDIGLATQELGAVVSELNYRNLDNEPDFANTNTSTEFLAKVIADRLAERIHKGAMGENAKGIAGITVTLHESHIAWASYERAL

SEQ ID NO: 26088 - protein, 132 aa, Streptomyces pactum
  misc_feature (1)..(132): tr|A0A1S6J444|A0A1S6J444_9ACTN Uncharacterized protein OS=Streptomyces pactum OX=68249 GN=B1H29_06035 PE=4 SV= 1
MFSITVRDHIMIAHSFRGDVFGPAQRLHGATFLVDATFRREQLDEDNIVVDIGLATRELGAVVSELNYRNLDNEPDFAGVNTSTEFLARVIADRLAERVHKGGLGEGARGLAGLTVTLHESHVAWASYERAL

SEQ ID NO: 26089 - protein, 121 aa, Streptomyces palmae
  misc_feature (1)..(121): tr|A0A4Z0H2C0|A0A4Z0H2C0_9ACTN 6-carboxy-5,6,7,8-tetrah ydropterin synthase OS=Streptomyces palmae OX=1701085 G N=E4099_20160 PE=3 SV=1
MTLRITKQFAFSASHQLDGLPEGHQCGRLHGHNYVVEVELSARREELVEPGFVRDYGELSGLKGWIDEWLDHRHLNDVVKERTPTAEHLAIWIYEQWRSVYPELSAVRVSETPKTWAEYRP

SEQ ID NO: 26090 - protein, 132 aa, Streptomyces parvulus
  misc_feature (1)..(132): tr|A0A369V159|A0A369V159_9ACTN 6-carboxytetrahydropteri n synthase OS=Streptomyces parvulus OX=146923 GN=DVZ84_ 23060 PE=4 SV=1
MFSITVRDHIMIAHSFRGDVFGPAQRLHGATFLVDATFRREQLDEDNIVVDIGLATRELGAVVSELNYRNLDNEPDFAGVNTSTEFLAKVVADRLAERVHQGALGEGARGLAGLTVTLHESHVAWASYERAL

SEQ ID NO: 26091 - protein, 132 aa, Streptomyces parvulus
  misc_feature (1)..(132): tr|A0A191V5X4|A0A191V5X4_9ACTN 6-pyruvoyl tetrahydropte rin synthase OS=Streptomyces parvulus OX=146923 GN=Spa2 297_27625 PE=4 SV=1
MFSITVRDHIMIAHSFRGDVFGPAQRLHGATFLVDATFRREQLDEDNIVVDIGLATRELGAVVGELNYRNLDNEPDFAGVNTSTEFLAKVVADRLAERVHKGALGEGARGLAGLTVTLHESHVAWASYERAL

SEQ ID NO: 26092 - protein, 132 aa, Streptomyces parvus
  misc_feature (1)..(132): tr|A0A5D4JNU8|A0A5D4JNU8_9ACTN 6-carboxytetrahydropteri n synthase OS=Streptomyces parvus OX=66428 GN=FY004_034 40 PE=4 SV=1
MFTVTVRDHLMIAHSLRGEVFGPAQRLHGATYLVDATFERPELDEDNIVVDMDLAAREVRGIVGALSFQNLDDHPDFAGVNTTTEFLAKVMADRLAARIHDGSLGANAQGLTGLTVRLHESHIAWADYHRAL

SEQ ID NO: 26093 - protein, 132 aa, Streptomyces peucetius
  misc_feature (1)..(132): tr|A0A2D3UC05|A0A2D3UC05_STRC0 Uncharacterized protein OS=Streptomyces peucetius subsp. caesius ATCC 27952 OX= 316280 GN=CGZ69_18955 PE=4 SV=1
MFSVTVREHLMIAHSFRGEVFGPAQRLHGATFLVDATFRRPELDADNIVVDIGLAAKELGEVVGEFNYRNLDDESEFAGVNTSTEFLAKVIADRLADRVHAGALGEGARGLAGLTVTLHESHIAWASYERVL

SEQ ID NO: 26094 - protein, 132 aa, Streptomyces phaeoluteigriseus
  misc_feature (1)..(132): tr|A0A1V6MUV8|A0A1V6MUV8_9ACTN Uncharacterized protein OS=Streptomyces phaeoluteigriseus OX=114686 GN=BM536_00 7990 PE=4 SV=1
MFSVTVRDHIMIAHSFRGEVFGPAQRLHGATFLVDATFRREQLDEDNIVVDIGLATQELGAVVSELNYRNLDNEPDFAGVNTSTEFLAKVIADRLAERIHKGALGEGARGIAALSVSLHESHVAWASYERAL

SEQ ID NO: 26095 - protein, 132 aa, Streptomyces pharetrae
  misc_feature (1)..(132): tr|A0A1Y2PY30|A0A1Y2PY30_9ACTN Uncharacterized protein OS=Streptomyces pharetrae CZA14 OX=1144883 GN=OQI_08175 PE=4 SV=1
MFSVTVRDHIMIAHSFRGDVFGPAQRLHGATFLVDATFRRAELDDDNIVVDIGLATRELGAVVGELNYRNLDNEPDFAGVNTSTEFLAKVIADRLAERVHKGALGEGARGIAGITVTLHESHVAWASYERAL

SEQ ID NO: 26096 - protein, 118 aa, Streptomyces pini
  misc_feature (1)..(118): tr|A0A1I4J2K4|A0A1I4J2K4_9ACTN 6-carboxy-5,6,7,8-tetrah ydropterin synthase OS=Streptomyces pini OX=1520580 GN= SAMN05192584_12278 PE=3 SV=1
MEIFREFTFEAAHRLPRVPEGHKCARLHGHSYKITVHVEAPVDAEAGWVMDFGDIKRAFKPIEAELDHYYLNDIEGLENPTSENLACWIWDRLIAELPDLSAITVRETCTSGCTYRGE

SEQ ID NO: 26097 - protein, 132 aa, Streptomyces platensis
  misc_feature (1)..(132): tr|A0A1Y2NHN1|A0A1Y2NHN1_STRPT 6-pyruvoyl tetrahydropte rin synthase OS=Streptomyces platensis OX=58346 GN=BG65 3_01441 PE=4 SV=1
MFSITVRDHLMVAHSFRGAVFGPAQRLHGATFIVDATFRRPELDADNIVVDIGLATQELGGVIAELNYRNLDDEPAFAGINTSTEALAKVIADRLADRIEAGNLGEGARELAGISVTLHESHIAWATYERTL

SEQ ID NO: 26098 - protein, 132 aa, Streptomyces pluripotens
  misc_feature (1)..(132): tr|A0A221P629|A0A221P629_9ACTN 6-carboxytetrahydropteri n synthase OS=Streptomyces pluripotens OX=1355015 GN=LK 07_29345 PE=4 SV=1
MFSITVRDHIMIAHSFRGEVFGPARRLHGATFLVDATFRREQLDENNIVVDIGLATRELGAVAAELNYRNLDDEPEFAGTNTSTEFLAKVIADRLAARIHKGALGEGAKGLTGITVTLHESHIAWASYERGL

SEQ ID NO: 26099 - protein, 120 aa, Streptomyces pluripotens
  misc_feature (1)..(120): tr|A0A221P757|A0A221P757_9ACTN 6-carboxy-5,6,7,8-tetrah ydropterin synthase OS=Streptomyces pluripotens OX=1355 015 GN=LK07_33115 PE=3 SV=1
MTLRITKKFEFSASHQLSGLAEGHQCGRLHGHNYVIELELSADRTELTRTGFVRDYGELASFKAWLDRTLDHRHLNDLVDDNPTAENLAVWLYERWSKEFPELTSVRISETPKTWAEYRP

SEQ ID NO: 26100 - protein, 132 aa, Streptomyces populi
  misc_feature (1)..(132): tr|A0A2I0SI32|A0A2I0SI32_9ACTN 6-carboxytetrahydropteri n synthase OS=Streptomyces populi OX=2058924 GN=CW362_2 8955 PE=4 SV=1
MFSITVRDHLMIAHSFRGEVFGPAQRLHGATFLVDATFRRPELDDDNIVVDIGLATQELGAVVSELNYRNLDSEPDFKDTNTSTEFLAKVIADRLADRVHAGALGAGAHGLAGITVTLHESHIAWASYERDL

SEQ ID NO: 26101 - protein, 132 aa, Streptomyces prasinopilosus
  misc_feature (1)..(132): tr|A0A1G6MK58|A0A1G6MK58_9ACTN 6-pyruvoyl-tetrahydropte rin synthase OS=Streptomyces prasinopilosus OX=67344 GN =SAMN05216505_102585 PE=4 SV=1
MFSITVRDHIMIAHSFHGEVFGPAQRLHGATFLVDATFRREQLDEDNIVIDIGLATQELGAVVGGLNYRNLDNEPDFAGINTSTEYLAKVIADRLAERIHKGALGEGAKGIAGLTVTLHESHIAWASYERAL

SEQ ID NO: 26102 - protein, 132 aa, Streptomyces pseudovenezuelae; identical to SEQ ID NO: 26040
  misc_feature (1)..(132): tr|A0A117PRG5|A0A117PRG5_9ACTN 6-pyruvoyl tetrahydropte rin synthase OS=Streptomyces pseudovenezuelae OX=67350 GN=AQI94_16250 PE=4 SV=1

SEQ ID NO: 26103 - protein, 132 aa, Streptomyces puniciscabiei; identical to SEQ ID NO: 26049
  misc_feature (1)..(132): tr|A0A542T0K8|A0A542T0K8_9ACTN 6-pyruvoyl-tetrahydropte rin synthase OS=Streptomyces puniciscabiei OX=164348 GN =FB563_7539 PE=4 SV=1

SEQ ID NO: 26104 - protein, 120 aa, Streptomyces puniciscabiei
  misc_feature (1)..(120): tr|A0A1D7YJL8|A0A1D7YJL8_9ACTN 6-carboxy-5,6,7,8-tetrah ydropterin synthase OS=Streptomyces puniciscabiei OX=16 4348 GN=BFF78_35760 PE=3 SV=1
MPFRITKKFEFSASHRLAGLAPDHQCARMHGHNYIVELELGADEADLSPVGFVRDYGDLSAFKNWLDNYLDHRHLNDVMDDNPTAENMAAWIYRTWSKEFFELTCVRVSETPKTWAEYRP

SEQ ID NO: 26105 - protein, 132 aa, Streptomyces qaidamensis
  misc_feature (1)..(132): tr|A0A143C9K4|A0A143C9K4_9ACTN 6-pyruvoyl tetrahydropte rin synthase OS=Streptomyces qaidamensis OX=1783515 GN= A4E84_34010 PE=4 SV=1
MFSITVRDHIMIAHSFRGDVFGPAQRLHGATFLVDATFRREQLDDDNIVVDIGLATQELGAVVSELNYRNLDNEPDFAGVNTSTEFLAKVIADRLAERIHKGALGEGAKGIAGLTVTLHESHIAWASYERAL

SEQ ID NO: 26106 - protein, 118 aa, Streptomyces qinglanensis
  misc_feature (1)..(118): tr|A0A0U1V670|A0A0U1V670_9ACTN 6-carboxy-5,6,7,8-tetrah ydropterin synthase OS=Streptomyces qinglanensis OX=943 816 GN=queD PE=3 SV=1
MEIFREFNFEAAHRLPNVPEGHKCSRLHGHSYKVIVHVEAPVDHEAGWVMDFGDLKRTFKPIESQLDHYYLNDIEGLENPTSEVLARWIWERLQPNLSGLSALTVRETCTSGCTYRGE

SEQ ID NO: 26107 - protein, 120 aa, Streptomyces rapamycinicus
  misc_feature (1)..(120): tr|A0A3L8REB2|A0A3L8REB2_STRRN 6-carboxy-5,6,7,8-tetrah ydropterin synthase OS=Streptomyces rapamycinicus (stra in ATCC 29253 / DSM 41530 / NRRL 5491 / AYB-994) OX=134 3740 GN=D3C57_103095 PE=3 SV=1
MTFRITKKFEFSASHRLTGLAPEHQCARMHGHNYVIELELAADDADLLPVGFVRDYGDLSAFKVWLDNHLDHRHLNDVMDENPTAENMAAWVYKTWSMEFPELTCVRVSETPKTWAEYRP

SEQ ID NO: 26108 - protein, 132 aa, Streptomyces rapamycinicus
  misc_feature (1)..(132): tr|A0A0A0NPE1|A0A0A0NPE1_STRRN 6-pyruvoyl tetrahydropte rin synthase OS=Streptomyces rapamycinicus (strain ATCC 29253 / DSM 41530 / NRRL 5491 / AYB-994) OX=1343740 GN =D3C57_105345 PE=4 SV=1
MFSITVRDHIMIAHSFRGEVFGPAQRLHGATFLVDATFRRAELDDDNIVVDIGLATRELGEVCGALSYRNLDDEPDFKGINTSTEFLAKVIADRLAERVGSGALGEGARGLSGIAVTLHESHVAWASYERGL

SEQ ID NO: 26109 - protein, 129 aa, Streptomyces regalis
  misc_feature (1)..(129): tr|A0A117MQJ8|A0A117MQJ8_9ACTN 6-carboxy-5,6,7,8-tetrah ydropterin synthase OS=Streptomyces regalis OX=68262 GN =ADL12_27235 PE=3 SV=1
MFTISKEFHFSASHVLDTLPSWHPCARLHGHNYVIVLELSAEDHDLAPPGFVRDYRDLDGFKKWVDATLDHRHLNEAMGGGIPPTAENLAKWIYDTWHDDLSELSAVKVSETPKTWAVYRPEGLTRGKQ

SEQ ID NO: 26110 - protein, 132 aa, Streptomyces regalis
  misc_feature (1)..(132): tr|A0A101J971|A0A101J971_9ACTN 6-pyruvoyl tetrahydropte rin synthase OS=Streptomyces regalis OX=68262 GN=ADL12_ 41965 PE=4 SV=1
MFSITVRDHIMIAHSFRGEVFGPAQRLHGATFLVDATFRREQLDDDNIVVDIGLATRELGAVVGELNYRNLDNEPDFAGINTSTEFLAKVIADRLAERIEKGALGEGAKGLAGLTVTLHESHVAWASYERAL

SEQ ID NO: 26111 - protein, 132 aa, Streptomyces resistomycificus
  misc_feature (1)..(132): tr|A0A0L8LXR8|A0A0L8LXR8_9ACTN 6-pyruvoyl tetrahydropte rin synthase OS=Streptomyces resistomycificus OX=67356 GN=ADK37_02720 PE=4 SV=1
MFSITVRDHIMIAHSFRGEVFGPAQRLHGATFLVDATFRREQLDDDNIVVDIGLATQELGAVVSELNYRNLDNEPDFAQINTSTEFLAKVVADRLAERIHKGSLGEGARGLAGLTVTLHESHVAWASYERAL

SEQ ID NO: 26112 - protein, 121 aa, Streptomyces rimosus
  misc_feature (1)..(121): tr|A0A0M9XC37|A0A0M9XC37_STRRM 6-carboxy-5,6,7,8-tetrah ydropterin synthase OS=Streptomyces rimosus subsp. rimo sus OX=132474 GN=ADK43_35840 PE=3 SV=1
MYAITKEFHFSASHQLGALPAGHQCARTHGHNYLVVLELRCDDTELTEPGFVRDYGELDEFKHWLDATFDHRHLNDAVPGMNPSAENLARWVYHQWVERLPELSCVRVSETPRTWATYRGK

SEQ ID NO: 26113 - protein, 121 aa, Streptomyces rimosus; identical to SEQ ID NO: 21427
  misc_feature (1)..(121): tr|L8EZA8|L8EZA8_STRR1 6-carboxy-5,6,7,8-tetrahydropter in synthase OS=Streptomyces rimosus subsp. rimosus (str ain ATCC 10970 / DSM 40260 / JCM 4667 / NRRL 2234) OX=1 265868 GN=SRIM_10041 PE=3 SV=1

SEQ ID NO: 26114 - protein, 132 aa, Streptomyces roseochromogenus; identical to SEQ ID NO: 26049
  misc_feature (1)..(132): tr|V6KUN4|V6KUN4_STRRC 6-pyruvoyl tetrahydropterin synt hase OS=Streptomyces roseochromogenus subsp. oscitans D S 12.976 OX=1352936 GN=M878_07135 PE=4 SV=1

SEQ ID NO: 26115 - protein, 147 aa, Streptomyces scabiei
  misc_feature (1)..(147): tr|C9ZBP0|C9ZBP0_STRSW Uncharacterized protein OS=Strep tomyces scabiei (strain 87.22) OX=680198 GN=SCAB_15941 PE=4 SV=1
MPRPGGRRTALEGRPLFSITVRDHIMIAHSFRGEVFGPAQRLHGATFLVDATFRRAELDDDNIVVDIGLATQELGAVVSELNYRNLDNEPAFAHTNTSTEFLAKVIADRLAERIHKGALGENAKGIAGIQVTLHESHIAWASYERAL

SEQ ID NO: 26116 - protein, 132 aa, Streptomyces scabiei; identical to SEQ ID NO: 25993
  misc_feature (1)..(132): tr|A0A086GK66|A0A086GK66_STRSC 6-pyruvoyl tetrahydropte rin synthase OS=Streptomyces scabiei OX=1930 GN=IQ62_40 215 PE=4 SV=1

SEQ ID NO: 26117 - protein, 136 aa, Streptomyces sedi
  misc_feature (1)..(136): tr|A0A5C4UM84|A0A5C4UM84_9ACTN 6-carboxy-5,6,7,8-tetrah ydropterin synthase OS=Streptomyces sedi OX=555059 GN=F H715_27375 PE=3 SV=1
MDLRSILLPPGTFTIGKKFDFEAGHRLAGLAPGHKCARQHGHSYEVEVILTAPTLENPGFVTDFGLLGPFKAFLDTELDHRDLHEILPFEPTSERLAQFLAGWFIQHLQPKVHGRLVAVIVRETRSSWARFHMEER

SEQ ID NO: 26118 - protein, 132 aa, Streptomyces seoulensis
  misc_feature (1)..(132): tr|A0A4P6U230|A0A4P6U230_STRSO 6-carboxytetrahydropteri n synthase OS=Streptomyces seoulensis OX=73044 GN=D0Z67 _24325 PE=4 SV=1
MFSITVRDHIMIAHSFRGDVFGPAQRLHGATFLVDATFRREQLDEDNIVVDIGLATRELGAITAELNYRNLDENPEFAGVNTSTEFLAKVVADRLAERIAKGALGEGAKGLSALSVTLHESHIAWASYERDL

SEQ ID NO: 26119 - protein, 132 aa, Streptomyces shenzhenensis
  misc_feature (1)..(132): tr|A0A3M0HQS0|A0A3M0HQS0_9ACTN Uncharacterized protein OS=Streptomyces shenzhenensis OX=943815 GN=CTZ28_43570 PE=4 SV=1
MFSITVRDHIMIAHSFRGEVFGPAQRLHGATFLVDATFRRQQLDDDNIVVDIGLATQELGAVVSELNYRNLDNEPDFAGVNTSTEFLAKVIADRLVECIHKGALGEGAKGLAGVTVTLHESHVAWASYERDL

SEQ ID NO: 26120 - protein, 132 aa, Streptomyces sioyaensis
  misc_feature (1)..(132): tr|A0A4V1NQG3|A0A4V1NQG3_9ACTN 6-carboxytetrahydropteri n synthase OS=Streptomyces sioyaensis OX=67364 GN=EST54 _09560 PE=4 SV=1
MFSITVRDHLMIAHSFRGEVFGPAQRLHGATFLVDATFRRPELDDDNIVVDIGLATRELGAVVGELNYRNLDEEPAFTGINTSTEALAKVIADRLADRIQAGNLGEGARELTGISVTLHESHIAWATYERTL

SEQ ID NO: 26121 - protein, 132 aa, Streptomyces sp.; identical to SEQ ID NO: 26092
  misc_feature (1)..(132): tr|A0A2T7M2K7|A0A2T7M2K7_9ACTN Uncharacterized protein OS=Streptomyces sp. CS014 OX=2162707 GN=DBP12_09230 PE= 4 SV=1

SEQ ID NO: 26122 - protein, 132 aa, Streptomyces sp.; identical to SEQ ID NO: 26010
  misc_feature (1)..(132): tr|A0A397QA82|A0A397QA82_9ACTN 6-pyruvoyl-tetrahydropte rin synthase OS=Streptomyces sp. 19 OX=492785 GN=CLW02_ 1142 PE=4 SV=1

SEQ ID NO: 26123 - protein, 129 aa, Streptomyces sparsogenes
  misc_feature (1)..(129): tr|A0A1R1S997|A0A1R1S997_9ACTN 6-carboxy-5,6,7,8-tetrah ydropterin synthase OS=Streptomyces sparsogenes DSM 403 56 OX=1331668 GN=SPAR_33956 PE=3 SV=1
MLSITKEFRFSASHQLDHLRSGHPCGRLHGHNYVVVLELSAAPEDLSLPGFVRDYGDLSAFQKWVDETLDHRHLNDVLDGVNPSAENIAMWLHERWVKEFPELTAVRVSETPKTWATYRPSPALGDASF

SEQ ID NO: 26124 - protein, 132 aa, Streptomyces sparsogenes
  misc_feature (1)..(132): tr|A0A1R1S9Y8|A0A1R1S9Y8_9ACTN 6-pyruvoyl-tetrahydropte rin synthase OS=Streptomyces sparsogenes DSM 40356 OX=1 331668 GN=SPAR_33131 PE=4 SV=1
MFSITVRDHLMIAHSFRGEVFGPAQRLHGATFLVDATFRRAELDADNIVVDIGLATRELNAVVGELNYRNLDEEPAFADTNTSTEFLAKVIADRLAERVHAGALGEGARGLSGLTVTLHESHIAWASYERGL

SEQ ID NO: 26125 - protein, 132 aa, Streptomyces spinoverrucosus
  misc_feature (1)..(132): tr|A0A4Y3VDW3|A0A4Y3VDW3_9ACTN Uncharacterized protein OS=Streptomyces spinoverrucosus OX=284043 GN=SSP24_0841 0 PE=4 SV=1
MFSVTVRDHIMIAHSFRGEVFGPAQRLHGATFLVDATFRREQLDDDNIVVDIGLATRELGAVVSELNYRNLDSEPDFAGINTSTEFLAKVIADRLAERVHKGALGEGAKGLAGISVTLHESHVAWASYERGL

SEQ ID NO: 26126 - protein, 132 aa, Streptomyces spongiicola
  misc_feature (1)..(132): tr|A0A2S1Z1N0|A0A2S1Z1N0_9ACTN Uncharacterized protein OS=Streptomyces spongiicola OX=1690221 GN=DDQ41_16855 P E=4 SV=1
MFSVTVREHLMIAHSFQGEVFGPAQRLHGATYLVDASFRRTELDADNLVIDIGLATAELGGVVAEFNYRNLDELPEFAGTNTSTEYLAKVIADRLADRVHAGALGEGARGLSGVSVTLHESHIAWASYERDL

SEQ ID NO: 26127 - protein, 118 aa, Streptomyces stelliscabiei
  misc_feature (1)..(118): tr|A0A0L0JST2|A0A0L0JST2_9ACTN 6-carboxy-5,6,7,8-tetrah ydropterin synthase OS=Streptomyces stelliscabiei OX=14 6820 GN=IQ64_43405 PE=3 SV=1
MEIFREFTFESAHRLPNVPEGHKCARLHGHSYKVIVHVEGPVGAESGWVMDFGDVKRAFKPIEARLDHYYLNEIEGLENPTSEVLARWIWDRLRPTLPGLSALTVRETCTSGCTYRGE

SEQ ID NO: 26128 - protein, 132 aa, Streptomyces stelliscabiei; identical to SEQ ID NO: 25993
  misc_feature (1)..(132): tr|A0A0L0KT98|A0A0L0KT98_9ACTN 6-pyruvoyl tetrahydropte rin synthase OS=Streptomyces stelliscabiei OX=146820 GN =IQ64_28855 PE=4 SV=1

SEQ ID NO: 26129 - protein, 137 aa, Streptomyces sviceus
  misc_feature (1)..(137): tr|B5I7V3|B5I7V3_9ACTN Queuosine biosynthesis protein Q ueD OS=Streptomyces sviceus ATCC 29083 OX=463191 GN=SSE G_10266 PE=4 SV=2
MEGRPLFSITVRDHIMIAHSFRGEVFGPAQRLHGATFLVDATFRREQLDDDNIVVDIGLATQELGAVVSELNYRNLDNEPDFAGVNTSTEFLAKVIADRLAERIEKGALGEGAKGLAGLTVTLHESHVAWASYERAL

SEQ ID NO: 26130 - protein, 132 aa, Streptomyces swartbergensis; identical to SEQ ID NO: 25990
  misc_feature (1)..(132): tr|A0A243RFF4|A0A243RFF4_9ACTN Uncharacterized protein OS=Streptomyces swartbergensis OX=487165 GN=CA983_36390 PE=4 SV=1

SEQ ID NO: 26131 - protein, 131 aa, Streptomyces thermoautotrophicus
  misc_feature (1)..(131): tr|A0A132ML74|A0A132ML74_9ACTN 6-carboxy-5,6,7,8-tetrah ydropterin synthase OS=Streptomyces thermoautotrophicus OX=1469144 GN=LI90_203 PE=3 SV=1
MTAVQGQHTIAKCFTFEASHRLPDLPEGHKCARLHGHSWTVEVILTADELTGPGFVTDFGDLKPLKHYIDEHLDHRHLNDVLDVPPTSENVAAHLAAWCVAYLEPVIPGRVVAVRVSETRTTWAEYRVVDR

SEQ ID NO: 26132 - protein, 132 aa, Streptomyces tirandamycinicus
  misc_feature (1)..(132): tr|A0A2S1SPE8|A0A2S1SPE8_9ACTN 6-carboxytetrahydropteri n synthase OS=Streptomyces tirandamycinicus OX=2174846 GN=DDW44_05215 PE=4 SV=1
MFSVTVREHLMIAHSFQGEVFGPAQRLHGATYLVDASFRRAELDADNLVVDIGLATAELGGVVGEFNYRNLDELPEFAGTNTSTEFLAKVIADRLADRVHAGALGEGARGLSGISVTLHESHIAWASYERDL

SEQ ID NO: 26133 - protein, 132 aa, Streptomyces toyocaensis
  misc_feature (1)..(132): tr|A0A081XZC6|A0A081XZC6_STRTO 6-pyruvoyl tetrahydropte rin synthase OS=Streptomyces toyocaensis OX=55952 GN=BU 52_02290 PE=4 SV=1
MFSITVRDHIMIAHSFRGEVFGPAQRLHGATFLVDATFRREQLDEDNIVVDIGLATQELGAVVGELNYRNLDDEPDFAGVNTSTEYLAKVIADRLAERVHKGALGEGAKGIAKIAVTLHESHIAWASYERAL

SEQ ID NO: 26134 - protein, 125 aa, Streptomyces tubercidicus
  misc_feature (1)..(125): tr|A0A384YVS4|A0A384YVS4_9ACTN 6-carboxy-5,6,7,8-tetrah ydropterin synthase OS=Streptomyces tubercidicus OX=477 59 GN=tubA PE=3 SV=1
MYSITKEFHFSASHQLDGLPPDHQCGRLHGHNYIVLLELSAAQDELTEPGFVRDYGELGVVKKWLDDTVDHRHLNDLMPGVNPTAEHLAQWVYRTWSSDFPELTAVRVSETPKTWATYRPAGPTA

SEQ ID NO: 26135 - protein, 132 aa, Streptomyces turgidiscabies
  misc_feature (1)..(132): tr|L7FJ05|L7FJ05_9ACTN Putative 6-pyruvoyl tetrahydropt erin synthase OS=Streptomyces turgidiscabies Car8 OX=69 8760 GN=STRTUCAR8_08976 PE=4 SV=1
MFSITVRDHIMIAHSFSGEVFGPAQRLHGATFLVDATFRREQLDDDNIVVDIGLATQELGAVVSELNYRNLDNEPDFAGINTSTEFLAKIIADRLAARIEKGALGEGARGLAGLTVTLHESHVAWASYERAL

SEQ ID NO: 26136 - protein, 132 aa, Streptomyces uncialis
  misc_feature (1)..(132): tr|A0A1Q4VBX7|A0A1Q4VBX7_9ACTN 6-pyruvoyl tetrahydropte rin synthase OS=Streptomyces uncialis OX=1048205 GN=AB8 52_00025 PE=4 SV=1
MFSITVRDHLMVAHSFRGEVFGPAQRLHGATFLVDATFRRAELDADNIVVDIGLATRELGTVVAALTYRNLDDEPDFTGVNTSTEFLAKVIADRLADRAASGALGEGARGLAGITVTLHESHIAWASYERAL

SEQ ID NO: 26137 - protein, 132 aa, Streptomyces variegatus
  misc_feature (1)..(132): tr|A0A0M2GTC8|A0A0M2GTC8_9ACTN 6-pyruvoyl tetrahydropte rin synthase OS=Streptomyces variegatus OX=284040 GN=UK 15_14800 PE=4 SV=1
MFSITVRDHIMIAHSFRGDVFGPAQRLHGATFLVDATFRREQLDEDNIVVDIGLATQELGAVVSELNYRNLDNEPDFAGVNTSTEFLAKVIADRLAERIHKGALGEGAKGIAGLTVTLHESHIAWASYERAL

SEQ ID NO: 26138 - protein, 119 aa, Streptomyces varsoviensis
  misc_feature (1)..(119): tr|A0A0L8QM83|A0A0L8QM83_9ACTN 6-carboxy-5,6,7,8-tetrah ydropterin synthase OS=Streptomyces varsoviensis OX=673 73 GN=ADK38_21275 PE=3 SV=1
MELSKEFRFESAHQLPYVPEGHKCGRLHGHSYRLTVHIDGDIDSSAGWVADFGDIKAAMKPLIEQLDHNFLNEVPGLENPTSEVLAYWVWDRLQPSLPLLSAITVHETCTSACVLRKPA

SEQ ID NO: 26139 - protein, 118 aa, Streptomyces varsoviensis
  misc_feature (1)..(118): tr|A0A0L8QXP1|A0A0L8QXP1_9ACTN 6-carboxy-5,6,7,8-tetrah ydropterin synthase OS=Streptomyces varsoviensis OX=673 73 GN=ADK38_01375 PE=3 SV=1
MEIFREFTFEAAHRLPNVPVGHKCGRLHGHSYRIQVHVESPVDEKTGWVMDFGDIKRAMVPLIETLDHHYLNEIKGLDNPTSEVLVRWVWDRLRDELPILSALTVRETCTSGCTYRGD

SEQ ID NO: 26140 - protein, 234 aa, Streptomyces venezuelae
  misc_feature (1)..(234): tr|F2R9E9|F2R9E9_STRVP Queuosine biosynthesis QueD, PTP S-I OS=Streptomyces venezuelae (strain ATCC 10712 / CBS 650.69 / DSM 40230 / JCM 4526 / NBRC 13096 / PD 04745) OX=953739 GN=SVEN_5706 PE=4 SV=1
MSSTQQPLFRIGKSFRFEATRRLDGGTYDGHSFTAEAVLTSMRLTPEGFVADFGDLAPLKRYIDGTLDHQVLNDYVEDVSNEGLARHLLGWAKSHLPADVVSVLEDVRVRTGRPQALPSAAFASFEASHQLHGLRDGHPCGRLHGHSYMLSVPVSAVPRLGDVPVLLRNHLRSAIHGKVLNQVIPGLNPTSENLAQYFSQWLTDRAMGGPGWDGTCVRISETETSWAEYMGGPA

SEQ ID NO: 26141 - protein, 148 aa, Streptomyces violaceoruber
  misc_feature (1)..(148): tr|A0A1V0UN04|A0A1V0UN04_STRVN 6-carboxy-5,6,7,8-tetrah ydropterin synthase OS=Streptomyces violaceoruber OX=19 35 GN=B1H20_22615 PE=3 SV=1
MMNLVKVRHNFESAHRLPQLGGKCTNLHGHSWWAEITVAGRLDERGVVVDFGLLKKSLREWIDTHLDHGSMLGEADPLVPALKADGTKLFLFGSAEPSKGLEWPTVENVAELLARVTSDRIAEAGWTDVAVSRVQVTETHVNAAEVIR

SEQ ID NO: 26142 - protein, 132 aa, Streptomyces violaceusniger; identical to SEQ ID NO: 25981
  misc_feature (1)..(132): tr|A0A0X3VUD2|A0A0X3VUD2_STRVO 6-pyruvoyl tetrahydropte rin synthase OS=Streptomyces violaceusniger OX=68280 GN =ADL28_30580 PE=4 SV=1

SEQ ID NO: 26143 - protein, 132 aa, Streptomyces violaceusniger
  misc_feature (1)..(132): tr|G2P892|G2P892_STRVO Uncharacterized protein OS=Strep tomyces violaceusniger Tu 4113 OX=653045 GN=Strvi_6707 PE=4 SV=1
MFSITVRDHIMIAHSFRGDVFGPAQRLHGATFLVDATFRRAELDDDNIVVDIGLATRELGEVCGALSYRNLDDEPDFEGINTSTEFLAKVIADRLAERVHSGALGEGARGLSGIAVTLHESHVAWASYERGL

SEQ ID NO: 26144 - protein, 137 aa, Streptomyces viridochromogenes
  misc_feature (1)..(137): tr|D9X5V2|D9X5V2_STRVT Queuosine biosynthesis protein Q ueD OS=Streptomyces viridochromogenes (strain DSM 40736 / JCM 4977 / BCRC 1201 / Tue 494) OX=591159 GN=SSQG_06 601 PE=4 SV=1
MEGRPLFSITVRDHIMIAHSFRGEVFGPAQRLHGATFLVDATFRREQLDEDNIVVDIGLATQELGAVVSELNYRNLDNEPDFAGVNTSTEFLAKVIADRLAERIHKGALGEGAKGLAGLTVSLHESHIAWASYERAL

SEQ ID NO: 26145 - protein, 120 aa, Streptomyces viridochromogenes
  misc_feature (1)..(120): tr|A0A0J7Z870|A0A0J7Z870_STRVR 6-carboxy-5,6,7,8-tetrah ydropterin synthase OS=Streptomyces viridochromogenes O X=1938 GN=ACM01_27810 PE=3 SV=1
MFTITKDFQFSASHRLGHLPEDHQCARLHGHNYTVQLELRCGDDQLTEPGFVRDYGELGDFKKWIDAELDHRHLNEVIPDRNPSAENMAHWIHQIWSERIPELSAVRVSETPKTWAEFRP

SEQ ID NO: 26146 - protein, 132 aa, Streptomyces viridosporus
  misc_feature (1)..(132): tr|D6A5T6|D6A5T6_STRV1 Uncharacterized protein OS=Strep tomyces viridosporus (strain ATCC 14672 / DSM 40746 / J CM 4963 / KCTC 9882 / NRRL B-12104 / FH 1290) OX=566461 GN=SSFG_01140 PE=4 SV=1
MFSITVRDHIMIAHSFHGEVFGPAQRLHGATFLVDATFRREQLDEDNIVVDIGLATQELGAVVGELNYRNLDDEPDFSGINTSTEYLAKVVADRLAERIHKGALGENAKGIAAITVTLHESHIAWASYERAL

SEQ ID NO: 26147 - protein, 128 aa, Streptomyces vitaminophilus
  misc_feature (1)..(128): tr|A0A0T6LS53|A0A0T6LS53_9ACTN 6-carboxy-5,6,7,8-tetrah ydropterin synthase OS=Streptomyces vitaminophilus OX=7 6728 GN=AQ490_23730 PE=3 SV=1
MLTITKEFHFSSSHVLDRLPEGHPCARMHGHNYVVVLELSAPRAELNHAGFVRDYRELDVFKKWLDDTLDHRHLNEVMDGVSPSAENLAVWIHDLWREQLPELTAVRVSETPKTWVVYRPAPLRGPAG

SEQ ID NO: 26148 - protein, 132 aa, Streptomyces wuyuanensis
  misc_feature (1)..(132): tr|A0A1G9S346|A0A1G9S346_9ACTN 6-pyruvoyl-tetrahydropte rin synthase OS=Streptomyces wuyuanensis OX=1196353 GN= SAMN05444921_106143 PE=4 SV=1
MFSVTVREHLMIAHSFHGEVFGPAQRLHGATYLVDATFRRAELDDDSLVVDIGLATAELGKVVGEFNYRNLDEVPEFAGINTSTEFLAKVIADRLADRVHSGALGEGARGLSGVSVTLHESHIAWASYERDL

SEQ ID NO: 26149 - protein, 147 aa, Streptomyces wuyuanensis
  misc_feature (1)..(147): tr|A0A1H0DK92|A0A1H0DK92_9ACTN 6-carboxy-5,6,7,8-tetrah ydropterin synthase OS=Streptomyces wuyuanensis OX=1196 353 GN=SAMN05444921_13438 PE=3 SV=1
MDPLTGHHRIAKRFTFEAAHRLSGLPDGHKCARLHGHSYTAEIVLTADDLVPPGFVTDFVDLAVFGVYLNEHLNHRILNDVLPVSPTSENLAHHLAEWFIENVEPRVPGRLAAVRVSETASSWAEYVAPSRRSREAALDLPNPTGRQ

SEQ ID NO: 26150 - protein, 132 aa, Streptomyces xinghaiensis
  misc_feature (1)..(132): tr|A0A420V9C9|A0A420V9C9_9ACTN 6-carboxytetrahydropteri n synthase OS=Streptomyces xinghaiensis OX=1038928 GN=D C095_002665 PE=4 SV=1
MFSVTVREHLMVAHSFRGEVFGPAQRLHGATFLVDATFRRTDLDADNIVVDIGLATSELGAVVGEFNYRNLDEVPEFAGVNTSTEYLAKVIADRLADKVHAGALGEGARGLSGISVTLHESHIAWASYERTL

SEQ ID NO: 26151 - protein, 132 aa, Streptomyces yokosukanensis
  misc_feature (1)..(132): tr|A0A101P1S1|A0A101P1S1_9ACTN 6-pyruvoyl tetrahydropte rin synthase OS=Streptomyces yokosukanensis OX=67386 GN =AQI95_22715 PE=4 SV=1
MFSITVRDHIMIAHSFRGEVFGPAQRLHGATFLVDATFRREQLDEDNIVVDIGLATQELGGITAELNYRNLDDEPEFAGINTSTEFLAKVIADRLAERVHKGALGEGARGLAGIAVTLHESHIAWASYERGL

SEQ ID NO: 26152 - protein, 132 aa, Streptomyces yunnanensis; identical to SEQ ID NO: 26083
  misc_feature (1)..(132): tr|A0A1M7P7C1|A0A1M7P7C1_9ACTN 6-pyruvoyl-tetrahydropte rin synthase OS=Streptomyces yunnanensis OX=156453 GN=S AMN05216268_12049 PE=4 SV=1

SEQ ID NO: 26153 - protein, 118 aa, Streptomyces zhaozhouensis
  misc_feature (1)..(118): tr|A0A286DY23|A0A286DY23_9ACTN 6-carboxy-5,6,7,8-tetrah ydropterin synthase OS=Streptomyces zhaozhouensis OX=13 00267 GN=SAMN06297387_111120 PE=3 SV=1
MEIFREFTFEAAHRLPNVPEGHKCARLHGHSYKVIVHVEAPVDPESGWVMDFGDLKKGFKPLEAQLDHYYLNDIEGLENPTSEVLARWIWERLKPTLPDLSAITVRETCTSGCTYRGE

SEQ ID NO: 26154 - protein, 132 aa, Streptomyces zinciresistens
  misc_feature (1)..(132): tr|G2GLL1|G2GLL1_9ACTN Uncharacterized protein OS=Strep tomyces zinciresistens K42 OX=700597 GN=SZN_32046 PE=4 SV=1
MFSITVRDHIMIAHSFRGDVFGPAQRLHGATFLVDATFRREQLDDDNIVVDIGLATRELGAVVGELNYRNLDNEPDFAGVNTSTEFLAKVIADRLAERIAKGALGEGARGLAGLTVTLHESHVAWASYERGL

SEQ ID NO: 26155 - protein, 136 aa, Streptomyces zinciresistens
  misc_feature (1)..(136): tr|G2G3Z2|G2G3Z2_9ACTN 6-carboxy-5,6,7,8-tetrahydropter in synthase OS=Streptomyces zinciresistens K42 OX=70059 7 GN=SZN_00965 PE=3 SV=1
MKQAPDGTFTISKRFAFDAAHQLTSLGPDHVCARLHGHGYRVEAVLSCTEDELVPPGFVVDFKDLEPLARYIKDTLDHRNLNEVLDFEPTSELLARHLAHWFLTHFTPAVAERLIQMRVSETEKTWATYTPNRRTA

SEQ ID NO: 26156 - protein, 188 aa, Subdoligranulum sp.
  misc_feature (1)..(188): tr|A0A3A6K3S1|A0A3A6K3S1_9FIRM Rubredoxin OS=Subdoligra nulum sp. OF01-18 OX=2302962 GN=DXA32_12755 PE=4 SV=1
MRSITTLDLQYAHRFYGFKGEAQYLHGHTGVLTIEVEDSVNAGVNMVFPCNEIQKTAWDVLKNFDHALILREDDPLLPAILDVYEKQGIKNGHPNNVMKGEAFKTELATAYPDCRLVVTKETMTVEGMIKIVYDLLKDKLNIAKLTFTSGVNAASAEFETKNEIDRCPLCGIALNENGVCPKCGYKKQ

SEQ ID NO: 26157 - protein, 188 aa, Subdoligranulum sp.; identical to SEQ ID NO: 26156
  misc_feature (1)..(188): tr|A0A372V2Y2|A0A372V2Y2_9FIRM Rubredoxin OS=Subdoligra nulum sp. AM16-9 OX=2302960 GN=DW194_12005 PE=4 SV=1

SEQ ID NO: 26158 - protein, 184 aa, Subdoligranulum variabile
  misc_feature (1)..(184): tr|D1PMA5|D1PMA5_9FIRM Uncharacterized protein OS=Subdo ligranulum variabile DSM 15176 OX=411471 GN=SUBVAR_0546 4 PE=4 SV=1
MRSITKLDLQYAHRFYGFRGEAQYLHGHTGVLTIEVEDTINPGVNMAFPCNEIQKTAWNVLKNFDHALILREDDPLLPAVLAVYEKQGIKDGDPNNIMKGPAFHTDLATAYPDCRLVVTKETLTVEGMIKIVYDLLKDQLNIVKLTFTSGVNAASQEYESRLHLDRCPLCGIALDENGVCPKCG

SEQ ID NO: 26159 - protein, 149 aa, Subsaximicrobium wynnwilliamsii
  misc_feature (1)..(149): tr|A0A5C6ZBT4|A0A5C6ZBT4_9FLAO 6-carboxy-5,6,7,8-tetrah ydropterin synthase OS=Subsaximicrobium wynnwilliamsii OX=291179 GN=ESY86_20100 PE=3 SV=1
MSNIRITKQFSFETGHALYGYDGKCKNVHGHSYNLAVTVIGQPIADSDHVKFGMVIDFGDLKKIVKEEIVDVFDHATVFNKNTPHVELAKELADRDHNVLLVDYQPTSEMMVIDFAEKIKQRLPENVQLHSLKLQETATSFAQWFASDN

SEQ ID NO: 26160 - protein, 136 aa, Subsaximicrobium wynnwilliamsii
  misc_feature (1)..(136): tr|A0A5C6ZGR2|A0A5C6ZGR2_9FLAO 6-carboxy-5,6,7,8-tetrah ydropterin synthase OS=Subsaximicrobium wynnwilliamsii OX=291179 GN=ESY86_12990 PE=3 SV=1
MKVTVSRKAHFNAAHRLYREDWSFEKNDAVFGKCNNPNFHGHNYELVVHVTGEIDPETGFVMDMKVLKDLIKAEIEDAFDHKNLNVEVPEFKELNPTAENIAVVIYQKLKPKLEASVDLEITLYETPRNFVSYSGN

SEQ ID NO: 26161 - protein, 188 aa, Succinatimonas hippei
  misc_feature (1)..(188): tr|E8LN23|E8LN23_SUCHY Uncharacterized protein OS=Succi natimonas hippei (strain DSM 22608 / JCM 16073 / KCTC 1 5190 / YIT 12066) OX=762983 GN=HMPREF9444_02176 PE=4 SV =1
MRSITKIDLQYAHRFYGFQGEAQYLHGHTGVLTIEVEDTIEPGVNMVFPCNEIQKTAWAVLKNFDHALILREDDPLLPAILDVYEKQGIKNGAPSNKMKGDAFKTELATAYPDCRLVVTKETMTVEGMIKIVYDLLKDKLNIVKLTFTSGVNAACAEFPAQESRARCPLCGVALNENGVCPKCGWRKA

SEQ ID NO: 26162 - protein, 180 aa, Succinatimonas sp.
  misc_feature (1)..(180): tr|R5EV13|R5EV13_9GAMM Uncharacterized protein OS=Succi natimonas sp. CAG:777 OX=1262974 GN=BN779_00949 PE=4 SV =1
MYTIDKQFEFEYGHRVWTQTLDERFSLDNRCICRHLHGHHAIVKLHLAAKELTDGMVTDFKHLNCFKQFLDDVLDHRFIIDEKDPLFLLDSAIINDYIDHGFYRTVDLSTLSIPETLPDEIKLSVVEKYDSFVIVDFIPTSENICKWLYDIANEMLDALNVYVSKVEFQETPKSHCSYEE

SEQ ID NO: 26163 - protein, 125 aa, Succiniclasticum ruminis
  misc_feature (1)..(125): tr|A0A1G6MQE4|A0A1G6MQE4_9FIRM 6-carboxy-5,6,7,8-tetrah ydropterin synthase OS=Succiniclasticum ruminis OX=4084 1 GN=SAMN04487864_11085 PE=3 SV=1
MIVLKEFEFDAAHYLPSYNGKCEHLHGHTYKLVVKVDGRPDMEGMVLDFSLLKKIVQTKVLRKLDHKLLNDVLPNPSAENIAIWVWDQLAKPLYAENRRLYEVEVWETRTSGCIYRGEFYEGELC

SEQ ID NO: 26164 - protein, 125 aa, Succiniclasticum ruminis; identical to SEQ ID NO: 26163
  misc_feature (1)..(125): tr|A0A1I1ZQ67|A0A1I1ZQ67_9FIRM 6-carboxy-5,6,7,8-tetrah ydropterin synthase OS=Succiniclasticum ruminis DSM 923 6 OX=1123323 GN=SAMN05216245_10471 PE=3 SV=1

SEQ ID NO: 26165 - protein, 180 aa, Succinivibrio sp.
  misc_feature (1)..(180): tr|A0A316SGZ6|A0A316SGZ6_9GAMM 6-carboxytetrahydropteri n synthase OS=Succinivibrio sp. OX=2053619 GN=DBY31_061 00 PE=4 SV=1
MYTIDKQFEFEYGHRVWTQTLDERFSLDNRCICRHLHGHHAIVKLHLAAKELTDGMVTDFKHLNCFKQFLDDVLDHRFIIDENDPLFLLDSAIINDYIDHGFYRTVDLSTLSIPETLPDEIKLSVVEKYDSFVIVDFIPTSENICKWLYDIANKMLDALNVYVSKVEFKETPKSHCSYEE

SEQ ID NO: 26166 - protein, 117 aa, Sulfitobacter brevis
  misc_feature (1)..(117): tr|A0A1I1ULG4|A0A1I1ULG4_9RHOB 6-carboxy-5,6,7,8-tetrah ydropterin synthase OS=Sulfitobacter brevis OX=74348 GN =SAMN04488523_102166 PE=3 SV=1
MYRITKEFHFSASHQLEHLPDGHQCARLHGHNYVVVVELASPELNADGFVRDYGELKPLKTYIDGTFDHRHLNDVLAVPSTGENMAKHFYDWCAARWPETTAVKVSETPKTWAEYRP

SEQ ID NO: 26167 - protein, 139 aa, Sulfitobacter donghicola; identical to SEQ ID NO: 25879
  misc_feature (1)..(139): tr|A0A410XX67|A0A410XX67_9RHOB 6-carboxy-5,6,7,8-tetrah ydropterin synthase OS=Sulfitobacter donghicola OX=4210 00 GN=queD PE=3 SV=1

SEQ ID NO: 26168 - protein, 117 aa, Sulfitobacter guttiformis
  misc_feature (1)..(117): tr|A0A420DJK1|A0A420DJK1_9RHOB 6-carboxy-5,6,7,8-tetrah ydropterin synthase OS=Sulfitobacter guttiformis OX=743 49 GN=C8N30_3516 PE=3 SV=1
MYRITKEFHFSASHQLSHLPEGHQCARLHGHNYIVIVELASATLNSDGFVRDYGELKPLKAYIDDTFDHRHLNDVMDVPSTGENMARHFYDWCAAVWPEVTAVKVSETPKTWAEYRP

SEQ ID NO: 26169 - protein, 131 aa, Sulfitobacter guttiformis
  misc_feature (1)..(131): tr|A0A420DTG7|A0A420DTG7_9RHOB 6-pyruvoyl-tetrahydropte rin synthase OS=Sulfitobacter guttiformis OX=74349 GN=C 8N30_2187 PE=4 SV=1
MYAVEVRDHVMIAHSLPSPVFGPAQGMHGATFVVDAAFYTEDLDENGLVVDMGLATEALAAALAPLKYCNLDEVPEFKGKITTTEFLCGHIWKQLREVAKTTGLGDGGRVRSIRVMMHESHVARGWYQADI

SEQ ID NO: 26170 - protein, 117 aa, Sulfitobacter indolifex
  misc_feature (1)..(117): tr|A9E8J6|A9E8J6_9RHOB 6-carboxy-5,6,7,8-tetrahydropter in synthase OS=Sulfitobacter indolifex HEL-45 OX=391624 GN=OIHEL45_16009 PE=3 SV=1
MFRIRKEFHFSASHQLTHLPDDHQCARLHGHNYIVVVELAAEALNADGFVRDYHDLKALKTYIDDHFDHRHLNDVMDGPSTAENMAKHFYDWCAARWSETSAVLVSETPKTWAEYRP

SEQ ID NO: 26171 - protein, 117 aa, Sulfitobacter litoralis
  misc_feature (1)..(117): tr|A0A1H0LHM0|A0A1H0LHM0_9RHOB 6-carboxy-5,6,7,8-tetrah ydropterin synthase OS=Sulfitobacter litoralis OX=33597 5 GN=SAMN04488512_104221 PE=3 SV=1
MFTITKEFHFSASHQLSHLPEDHQCARLHGHNYVVVVELRAEELNVDGFVRDYGELKPFKTYIDETFDHRHLNDVLDFASTGENMARHLYEWCAGRWPETTAVKVSETPKTWAEYRP

SEQ ID NO: 26172 - protein, 117 aa, Sulfitobacter pontiacus
  misc_feature (1)..(117): tr|A0A1H2T6X0|A0A1H2T6X0_9RHOB 6-carboxy-5,6,7,8-tetrah ydropterin synthase OS=Sulfitobacter pontiacus OX=60137 GN=SAMN04488041_10277 PE=3 SV=1
MYTITKEFHFSASHQLSHLPDGHQCARLHGHNYVVVVELRAKELNADGFVRDYGELKPLKTYIDETFDHRHLNDVLDFVSTGENMARHLYEWCAQHWPETTAVKVSETPKTWAEYRP

SEQ ID NO: 26173 - protein, 117 aa, Sulfitobacter pseudonitzschiae
  misc_feature (1)..(117): tr|A0A073J2I4|A0A073J2I4_9RHOB 6-carboxy-5,6,7,8-tetrah ydropterin synthase OS=Sulfitobacter pseudonitzschiae O X=1402135 GN=SUH3_18145 PE=3 SV=1
MYRITKEFHFSASHQLAHLPDGHQCARLHGHNYVVVVELAAEALNADGFVRDYGELKPLKDYIDAAFDHRHLNDVMGVPSTGENMARHFYDWCAARWPETTAVRVSETPKTWAEYRP

SEQ ID NO: 26174 - protein, 117 aa, Sulfitobacter sp.; identical to SEQ ID NO: 26172
  misc_feature (1)..(117): tr|A3SWE2|A3SWE2_SULSN 6-carboxy-5,6,7,8-tetrahydropter in synthase OS=Sulfitobacter sp. (strain NAS-14.1) OX=3 14267 GN=NAS141_05878 PE=3 SV=1

SEQ ID NO: 26175 - protein, 117 aa, Sulfitobacter sp.
  misc_feature (1)..(117): tr|A0A2G2BYM9|A0A2G2BYM9_9RHOB 6-carboxy-5,6,7,8-tetrah ydropterin synthase OS=Sulfitobacter sp. OX=1903071 GN= queD PE=3 SV=1
MYRITKEFHFSASHQLGHLPIDHQCARLHGHNYIVVVELASDQLNSDGFVRDYGELKAFKTYIDENFDHRHLNDVMTNMTTGENLARHFYDWCAALWPETAAVKVSETPKTWAEYRP

SEQ ID NO: 26176 - protein, 163 aa, Sulfobacillus benefaciens
  misc_feature (1)..(163): tr|A0A2T2WS99|A0A2T2WS99_9FIRM Uncharacterized protein OS=Sulfobacillus benefaciens OX=453960 GN=C7B43_17600 P E=4 SV=1
MKLNLAGKDAGLTFESVHLVPGRGGCSRLHPHFHTVSVSLDGEPSDRGMLMHIYRLKEVVIRLCQEFDHMVLVANYPPEVMTVDEEETGYKINVNGKTYLLPYSDVLRLPIGTLNVEDLCQYMAENLLDRLDPILDARRIVSMTVEVDEGNGQSASVTVSTRR

SEQ ID NO: 26177 - protein, 119 aa, Sulfuricaulis limicola
  misc_feature (1)..(119): tr|A0A1B4XF02|A0A1B4XF02_9GAMM 6-carboxy-5,6,7,8-tetrah ydropterin synthase OS=Sulfuricaulis limicola OX=162021 5 GN=SCL_1063 PE=3 SV=1
MEIFKIFTIEAAHLLPNVPEAHKCRRLHGHSFRIEIRVAGPVEEKSGWIMDFADLSRAFQPIYEQLDHHYLNEIEGLQNPTSEHLARWIWRRLKPALPALSEVIVRETCTAGCAYRGED

SEQ ID NO: 26178 - protein, 124 aa, Sulfuricella denitrificans
  misc_feature (1)..(124): tr|S6B2J5|S6B2J5_SULDS Queuosine biosynthesis protein Q ueD OS=Sulfuricella denitrificans (strain DSM 22764 / N BRC 105220 / skB26) OX=1163617 GN=SCD_n01059 PE=4 SV=1
MHGHRYAIEISLSGNIISMPSSSEEGMVMDFSDVKAIAQKHVVEPWDHAFLVYAGDTVVLDFLKSIEGHKTVMLDCVPTAENLASKAFQILDLAYRDTYGNNLRLERVRIYETPNNWADATRGE

SEQ ID NO: 26179 - protein, 125 aa, Sulfuricella sp.
  misc_feature (1)..(125): tr|A0A0E9MG13|A0A0E9MG13_9PROT Uncharacterized protein OS=Sulfuricella sp. T08 OX=1632857 GN=SCT_1418 PE=4 SV= 1
MHGHRYAIEITLSGSIINTPGSSEEGMVMDFSDIKAIAQKHVVEPWDHAFLVYVGDTVVADFLRTIEGHKTVVLDCVPTAENLAAKAFQILELAYRDTYGNNLRLERVRIYETPNNWADATRGGI

SEQ ID NO: 26180 - protein, 193 aa, Sulfuricurvum kujiense
  misc_feature (1)..(193): tr|A0A2D3WQ05|A0A2D3WQ05_9HELI 6-carboxytetrahydropteri n synthase QueD OS=Sulfuricurvum kujiense OX=148813 GN= CFH83_01195 PE=4 SV=1
MIIRKLFKFENAHVVRGCSTQRCRASIHGHSYKVEVLFESAYLDHGQMVYDFGLMKQGIKELIDSFDHAVAIWDGDDAEYIEAMKAHSNRWAVLPVSPSCEQFSRVMFVMIDKLVWFTKMVNGEKMVRLNSIIVHETETGYAQCFREDAYSELMGLIKLEDIHFSDEVRQGWSDPQLWEKVLAGETFVNPVSV

SEQ ID NO: 26181 - protein, 193 aa, Sulfuricurvum kujiense
  misc_feature (1)..(193): tr|E4TXA2|E4TXA2_SULKY 6-pyruvoyl-tetrahydropterin synt hase OS=Sulfuricurvum kujiense (strain ATCC BAA-921 / D SM 16994 / JCM 11577 / YK-1) OX=709032 GN=Sulku_2308 PE =4 SV=1
MLIRKLFKFENAHVVRGCSTQRCRASIHGHSYKVEVLFESKYLDEGQMVYDFGLMKRGMKELIDSFDHGVAIWDGDDAEYIASMKAHSNRWVLLPVSPSCEQFSRVLFLMIDRLLASTQMVNGERGVKLHSIIVHETETGYAQAFEEDAYSELMGTIPLEMIAFSDEVREGWNDPQLWEKILTGQPFVNPKTV

SEQ ID NO: 26182 - protein, 193 aa, Sulfuricurvum sp.
  misc_feature (1)..(193): tr|A0A258ZEL6|A0A258ZEL6_9HELI 6-carboxytetrahydropteri n synthase QueD OS=Sulfuricurvum sp. 24-42-5 OX=1970440 GN=B7Y17_04065 PE=4 SV=1
MIIRKLFKFENAHVVRGCSSERCRASVHGHSYKIEVLFESDYLDNGQMVYDFGLMKQGMKALIDSFDHSIALWDGDDVQYLADMKRHSNRWVQLPVSPSAEQFSRIIFVMIDRLLGCTQSINGEREVKLHSIIVHETDTGYAQGFREDAYSHKMGLIELDKIIFSEGVRAEWGDPQLWDKIMAGEVFINPDTV

SEQ ID NO: 26183 - protein, 193 aa, Sulfuricurvum sp.
  misc_feature (1)..(193): tr|A0A4R4G1A1|A0A4R4G1A1_9HELI 6-carboxytetrahydropteri n synthase OS=Sulfuricurvum sp. IAE1 OX=2546102 GN=E076 5_11915 PE=4 SV=1
MIIRKLFKFENAHIVRGCSTQRCRASIHGHSYKVEVLFESKYLDRGQMVYDFGLMKQGMKELIDSFDHAVAIWDADHTEYIDAMKEYSARWVLLPVSPSCEQFARVIFLMIDRLLCSTHMINGERGVRLHSVIVHETDTGYAQAFEEDAYSEWMGTIALDAIRFSKEVREGWSDPQLWEKVLNGDIFVNPDTV

SEQ ID NO: 26184 - protein, 148 aa, Sulfuriferula multivorans
  misc_feature (1)..(148): tr|A0A401JZW0|A0A401JZW0_9PROT 6-carboxy-5,6,7,8-tetrah ydropterin synthase OS=Sulfuriferula multivorans OX=155 9896 GN=SFMTTN_2943 PE=3 SV=1
MLITRRLEFDAGHRIPNHTSQCKHLHGHRYAIEITLSGDIITAEGQSAQGMVMDFSDVKRIAKEQLVDAWDHAFLAYRGDKVVCDFLASLPNHKTVILEVVPTVENLAQIAFDILNPAYRDTYGNHLRLKQVRIYETPNNWADCMPGE

SEQ ID NO: 26185 - protein, 148 aa, Sulfuriferula plumbiphila
  misc_feature (1)..(148): tr|A0A512L777|A0A512L777_9PROT 6-carboxytetrahydropteri n synthase QueD OS=Sulfuriferula plumbiphila OX=171865 GN=TPL01_14730 PE=4 SV=1
MLITRRLEFDAGHRIPNHASQCKHLHGHRYAIEITLSGDIITAEGQSEQGMVMDFSDVKRIAREQLVDAWDHAFLAYRGDKPVCDFLATLTDHKTIILELVPTVENLAHIAFDILDPAYRDTYGNQLRLKQVRIYETPNNWADCRQPE

SEQ ID NO: 26186 - protein, 122 aa, Sulfurifustis variabilis
  misc_feature (1)..(122): tr|A0A1B4V577|A0A1B4V577_9GAMM 6-carboxy-5,6,7,8-tetrah ydropterin synthase OS=Sulfurifustis variabilis OX=1675 686 GN=SVA_2136 PE=3 SV=1
MEIYKLFTLEAAHRLPHVPENHKCRRLHGHSFRVEVRVRGPVDPAAGWVQDFADIGRAFQPIYEQLDHHYLNEIPGLENPTSENLARWIWDRLQPALPLLAEITVRETCTAGCVYRGEREGS

SEQ ID NO: 26187 - protein, 115 aa, Sulfurihydrogenibium azorense
  misc_feature (1)..(115): tr|C1DVU3|C1DVU3_SULAA 6-carboxy-5,6,7,8-tetrahydropter in synthase OS=Sulfurihydrogenibium azorense (strain Az -Fu1 / DSM 15241 / OCM 825) OX=204536 GN=SULAZ_1259 PE= 3 SV=1
MPYIVRVKQKFNAAHFLTDYHGKPEPLHGHTWMVELYIKADKLDNGGMGYDFLEIKDLLKEILPDYKCMNDIYDFSPSAENVAKYIYDQVKKKYPTLVKVVVWETEEGGAEYYEE

SEQ ID NO: 26188 - protein, 161 aa, Sulfurihydrogenibium azorense
  misc_feature (1)..(161): tr|C1DT79|C1DT79_SULAA Putative 6-pyruvoyl tetrahydrobi opterin synthase (Ptps)(Ptp synthase) OS=Sulfurihydroge nibium azorense (strain Az-Fu1 / DSM 15241 / OCM 825) O X=204536 GN=SULAZ_0322 PE=4 SV=1
MKYEITKIFRFEAGHRVWKQDLRSGKTAKLSEGVVIENKCVNLHGHSYVLEVTVGSDTLNEQDVVVDFYHIKSALKDLVDNVFDHSFIIDVNDPIYPKFKELFGCYKITEVDFCPTAEALAKYFYDFLVQKLKEAGLEEDIKVVSVTLWETATGKATYRGE

SEQ ID NO: 26189 - protein, 115 aa, Sulfurihydrogenibium sp.
  misc_feature (1)..(115): tr|B2V641|B2V641_SULSY 6-carboxy-5,6,7,8-tetrahydropter in synthase OS=Sulfurihydrogenibium sp. (strain YO3AOP1 ) OX=436114 GN=SYO3AOP1_0015 PE=3 SV=1
MPYIVRVRQKFNAAHFLTDYHGQPEPLHGHTWMVELFIRADKLDNGGMGYDFIEIKEFLKEILPDYKCMNDIYDFSPSAENVAKYLYDKIKERYPTLQKVVVWETEEGGAEYYEE

SEQ ID NO: 26190 - protein, 161 aa, Sulfurihydrogenibium sp.
  misc_feature (1)..(161): tr|A0A2J6X1M1|A0A2J6X1M1_9AQUI 6-carboxy-5,6,7,8-tetrah ydropterin synthase OS=Sulfurihydrogenibium sp. OX=2053 621 GN=C0178_01550 PE=4 SV=1
MKYEITKVFRFEAGHRVWKQDLRAGKTAKLSEGIPIENKCTNLHGHSYVLEVTVGSDTLNEQDVVVDFYHIKSALKDLIDNVFDHSFIIDVNDPIYPKFKELFGCYKITEVDFCPTAEALAKYFYDFLVQKIKEANLEEDIKVVSVTLWETATGKATYRGE

SEQ ID NO: 26191 - protein, 161 aa, Sulfurihydrogenibium yellowstonense
  misc_feature (1)..(161): tr|C4FKI0|C4FKI0_9AQUI Putative 6-pyruvoyl tetrahydrobi opterin synthase OS=Sulfurihydrogenibium yellowstonense SS-5 OX=432331 GN=SULYE_1080 PE=4 SV=1
MKYEITKIFRFEAGHRVWKQNLAEGKTAVLSGYACTDNKCRNLHGHSYILEVTVGSDTLNEQDVVVDFYHIKNALKDLVDNVFDHSFIIDINDPLYPVFKEYFKDLKITEVDFCPTAEALAKYFYDYLVQKLKEANLEEDIKVVQITLWETATGKATYKGE

SEQ ID NO: 26192 - protein, 193 aa, Sulfurimonas autotrophica
  misc_feature (1)..(193): tr|E0UR08|E0UR08_SULAO 6-pyruvoyl tetrahydrobiopterin s ynthase OS=Sulfurimonas autotrophica (strain ATCC BAA-6 71 / DSM 16294 / JCM 11897 / OK10) OX=563040 GN=Saut_19 21 PE=4 SV=1
MIIRKLFKFENAHIVRGCSTVKCRSSIHGHSYKVELLFASNFLDNGQMVYDFGLMKQNMKDLVESFDHAIALWRDDNPEFVHDMKKHSARWVELPVSPSAEQFSRVIFVMIDKLLSLTSTINGEKEVKMHSVIVHETDTGYAQCFSADAYSKNMGKIKLEEIIFSRQVLNDFTDKELFEKIKRGEKFLNPESV

SEQ ID NO: 26193 - protein, 193 aa, Sulfurimonas denitrificans
  misc_feature (1)..(193): tr|Q30P94|Q30P94_SULDN 6-pyruvoyl tetrahydrobiopterin s ynthase-like protein OS=Sulfurimonas denitrificans (str ain ATCC 33889 / DSM 1251) OX=326298 GN=Suden_1913 PE=4 SV=1
MIIRKLFKFENAHVVRGCSTLRCRSSIHGHSYKVELLFESNFLDNAQMVYDFGLMKQNMKAIIDSFDHSITLWDKDEAEYIASMQKHSQRWVLLPLSPSAEQFSRLFFVLIDKLLSLTTSVNGEKEVKLYSVIVHETDTGYAQAFKEDAYSKNMGIVNIDEIIFSDTIKDDWADRDFWDKMKKDKRFLNPTTV

SEQ ID NO: 26194 - protein, 193 aa, Sulfurimonas gotlandica
  misc_feature (1)..(193): tr|B6BHS6|B6BHS6_SULGG 6-pyruvoyl tetrahydrobiopterin s ynthase OS=Sulfurimonas gotlandica (strain DSM 19862 / JCM 16533 / GD1) OX=929558 GN=ptpS PE=4 SV=1
MIIRKLFKFENAHIVRGCSTVKCRSSLHGHSYKVELLFESNFLDNGQMVYDFGLMKQNMKALVESFDHGVTVWSGDSWEYLDSMKKHSDRWVELPVSPSCEQFSRVIFVMIDRLLQLTNSVNGEREVKLNSVIVHETDTGYAQAFSYDAYSKDMGYIELDSIIFSDEVKNSWPDCELWERAKRGDSFINPTSV

SEQ ID NO: 26195 - protein, 193 aa, Sulfurimonas hongkongensis
  misc_feature (1)..(193): tr|T0KRB1|T0KRB1_9HELI 6-carboxy-5,6,7,8-tetrahydropter in synthase OS=Sulfurimonas hongkongensis OX=1172190 GN =M947_06140 PE=4 SV=1
MIIRKMFKFENAHIVRGCSTQKCRSSLHGHSYKVELLFESNFLDNAQMVYDFGLMKQNMKELIDAFDHGVSIWSSDKVEYIKDMKKHSQRWIELPVSPSCEQFSRVFFVMIDRLLQLTNTVNGEREVKLHSVIVHETATGYAQAFSYDAYSKDMGVIELDSIVFSQAVLDDFSDRELWERVKRGESFTNPTTV

SEQ ID NO: 26196 - protein, 193 aa, Sulfurimonas sp.
  misc_feature (1)..(193): tr|A0A2D3VUQ2|A0A2D3VUQ2_9HELI 6-carboxytetrahydropteri n synthase QueD OS=Sulfurimonas sp. UBA12504 OX=2015903 GN=CFH84_07810 PE=4 SV=1
MIIRKMFKFENAHIVRGCSSVKCRSSLHGHSYKVELLFESNFLDNGQMVYDFGLMKQNMKALVESFDHAVALWNHDSKEYINDMKKHSHRWVELPVSPSAEQFSRVIFVMIDKLLRLTSSVNGEKEVKLSSVIVHETDTGYAQCFEADAYSLNMGIIKFEEIIFSQEVRNDWADKELWEKIKRSERFINPSCV

SEQ ID NO: 26197 - protein, 193 aa, Sulfurimonas sp.
  misc_feature (1)..(193): tr|A0A2G2PHV4|A0A2G2PHV4_9HELI 6-carboxytetrahydropteri n synthase QueD OS=Sulfurimonas sp. OX=2022749 GN=COB17 _00695 PE=4 SV=1
MIIRKLFKFENAHIVRGCSSIKCRSSVHGHSYKIEILFSSNFLDNGQMVYDFGLMKQNIKALVESFDHAITIWSEDNKGYISDMKKHSSRWVELPVSPSAEQFSRVIFLMIDKLLELTSGVNGEKEVSLNSVIVHETDTGYAQAFKEDAYSKNMGEINLKEIIFSDEIQDTWKDSSLWKKILNNEKFINSRNV

SEQ ID NO: 26198 - protein, 149 aa, Sulfurirhabdus autotrophica
  misc_feature (1)..(149): tr|A0A4R3XT84|A0A4R3XT84_9PROT 6-carboxy-5,6,7,8-tetrah ydropterin synthase OS=Sulfurirhabdus autotrophica OX=1 706046 GN=EDC63_12417 PE=3 SV=1
MQITRRLEFDAGHRIPHHKSQCRHMHGHRYAIEITLSGAIIEIEGISEQGMVMDFTDVKNIAYTYIAGVWDHAFLVYTGDTQVIEFLKTLPEHKTVALPFIPTAENLAAEAFRILDKAYQDTYGNNLRLEQVRLYETPNNWADAVRNKI

SEQ ID NO: 26199 - protein, 149 aa, Sulfurisoma sediminicola
  misc_feature (1)..(149): tr|A0A497XCE8|A0A497XCE8_9PROT 6-carboxy-5,6,7,8-tetrah ydropterin synthase OS=Sulfurisoma sediminicola OX=1381 557 GN=DFR35_1222 PE=3 SV=1
MLITRRLEFDAGHRIPDHRSQCRHLHGHRYAIEITLAGEVIEAAGRPDTGMVMDFSEVKEIARRCVVDAWDHAFLAYRGDTALVAFLATLPGHKTVLLDAVPTAENLARIAFGLLDPAYQDTFGNHLRLERVRLYETPNCWADATRARA

SEQ ID NO: 26200 - protein, 150 aa, Sulfuritalea hydrogenivorans
  misc_feature (1)..(150): tr|W0SGK0|W0SGK0_9PROT 6-pyruvoyltetrahydropterin synth ase OS=Sulfuritalea hydrogenivorans sk43H OX=1223802 GN =SUTH_02378 PE=4 SV=1
MRITRRLEFDAGHRIPNHQSQCRHLHGHRYALEITLGGGVIDAAGRPDDGMVMDFSEVKAIAKQHVVDLWDHAFLVWRGDESVMNYLASVPGHKTVVLDAVPTAENLARIAFSILDPLYRDSYGNHLHLERIRLYETPNCWADATRDDLA

SEQ ID NO: 26201 - protein, 126 aa, Sulfurivirga caldicuralii
  misc_feature (1)..(126): tr|A0A1N6F6H9|A0A1N6F6H9_9GAMM 6-carboxy-5,6,7,8-tetrah ydropterin synthase OS=Sulfurivirga caldicuralii OX=364 032 GN=SAMN05443662_0943 PE=3 SV=1
MKKRFTLKTLLDFAAAHRLHGYDGDCAKLHGHNWKVEVMVTGEQLDDVGMVIDFKEIKRHAKAVVAELDHTYLNDHPAFQNQNPTAENIAAYLFERLAERIDTPQRQVSAITVWENDRNCVTFSVE

SEQ ID NO: 26202 - protein, 180 aa, Sulfurospirillum barnesii
  misc_feature (1)..(180): tr|I3XZ87|I3XZ87_SULBS 6-pyruvoyl-tetrahydropterin synt hase OS=Sulfurospirillum barnesii (strain ATCC 700032 / DSM 10660 / SES-3) OX=760154 GN=Sulba_1982 PE=4 SV=1
MLWQISKEFDFCYGHRVWSQQLDSEFSLTGCLACRHLHGHQGKIVVYLQSNELKNGMVTDFHHLNWFKQFLDATLDHKFIIDIHDPLFETLLPHFSDKQNLLSHEAGYQTPDLSKVVQEATHLIEMYEGYIIVDFVPTSENISTWLLGIIQKKMSRLGVKVSHVEFLETPKSRSIVYNQQ

SEQ ID NO: 26203 - protein, 180 aa, Sulfurospirillum cavolei
  misc_feature (1)..(180): tr|A0A2D3WD85|A0A2D3WD85_9PROT 6-carboxytetrahydropteri n synthase OS=Sulfurospirillum cavolei OX=366522 GN=CFH 80_08780 PE=4 SV=1
MLWQISKEFDFCYGHRVWSQQLDSEFALTGCLACRHLHGHQGKIVVYLQSTKLQDGMVTDFHHLNWFKRFLDDTLDHKFIIDIHDPLFETLLPHFADKQHLIEHEAGYKIPDLTRVKDEPSFIVELYDGYIIVDFVPTSENISTWLLGIVSQKMSRLGVEVSHIEFLETPKSRSIVYNQA

SEQ ID NO: 26204 - protein, 180 aa, Sulfurospirillum deleyianum
  misc_feature (1)..(180): tr|D1B474|D1B474_SULD5 Uncharacterized protein OS=Sulfu rospirillum deleyianum (strain ATCC 51133 / DSM 6946 / 5175) OX=525898 GN=Sdel_1879 PE=4 SV=1
MLWQISKEFDFCYGHRVWSQQLDSEFSLTGCLACRHLHGHQGKIVVYLQSNELKNGMVTDFHHLNWFKQFLDATLDHKFIIDIHDPLFETLLPHFADKQNLLSHEAGYQTPDLSKVAHEAMHLIEMYEGYIIVDFVPTSENISTWLLEIIQKKMSRLGVKVSHVEFLETPKSRSIVYNQK

SEQ ID NO: 26205 - protein, 180 aa, Sulfurospirillum halorespirans
  misc_feature (1)..(180): tr|A0A1D7TM80|A0A1D7TM80_9PROT 6-carboxy-5,6,7,8-tetrah ydropterin synthase OS=Sulfurospirillum halorespirans D SM 13726 OX=1193502 GN=SHALO_2346 PE=4 SV=1
MIWQISKEFDFCYGHRVWSQQLDSEFSLTGCLACRHLHGHQGKVIVYLQSAQLKDGMVTDFHHLNWFKQFLDTTLDHKFIIDIHDPLFETLLPHFADKAHLIENEAGYKIPDLNRVKDEPSHILEMYDGYIIVDFVPTSENISTWLLEIIAKKMSRLGVEVSHVEFLETPKSRSIVYNKQ

SEQ ID NO: 26206 - protein, 180 aa, Sulfurospirillum multivorans
  misc_feature (1)..(180): tr|A0A5B9TUF7|A0A5B9TUF7_SULMU 6-carboxy-5,6,7,8-tetrah ydropterin synthase OS=Sulfurospirillum multivorans OX= 66821 GN=SMN_2585 PE=4 SV=1
MIWQISKEFDFCYGHRVWSQQLDSEFSLTGCLACRHLHGHQGKVIVYLQSSQLKDGMVTDFHHLNWFKQFLDTTLDHKFIIDIHDPLFETLLPHFADKAHLIENEAGYKIPDLNRVKDEPSHILEMYDGYIIVDFVPTSENISTWLLEIIAKKMSRLGVEVSHVEFLETPKSRSIVYNKQ

SEQ ID NO: 26207 - protein, 193 aa, Sulfurospirillum sp.
  misc_feature (1)..(193): tr|A0A432STG9|A0A432STG9_9PROT 6-carboxytetrahydropteri n synthase QueD OS=Sulfurospirillum sp. OX=2053622 GN=D SZ05_00780 PE=4 SV=1
MIIRKLFKFENAHVVRGCTSERCKYSIHGHSYKIEVLFESNYLDQGQMVYDFGLTKTTIKELIDSFDHATALWNRDDPEYIAAIKKFSKRWVSLPVSPSAEQFSRVLFLMIDRLLSQTQMQNGEKEVKLHSVIVHETDTGYAQGFREDAYSKLMGEIDLNEIVFSDQVKAEWHDPQMWDKLLTGKIFVNPKPL

SEQ ID NO: 26208 - protein, 181 aa, Sulfurospirillum sp.
  misc_feature (1)..(181): tr|A0A2D3W1U1|A0A2D3W1U1_9PROT 6-pyruvoyl tetrahydrobio pterin synthase OS=Sulfurospirillum sp. UBA12182 OX=201 5905 GN=CFH82_00540 PE=4 SV=1
MKWEIAKQFDFCYGHRVWSQTLNVEYSMDSCLACRHLHGHQGSLIVYLSSDKLERGMVTDFHHLNWFKIFLDKTLDHKFIIDINDPLFETLLPDFADKKNLIECNGGFKRPDTSILQGKNEALYELYEGYIIVDFVPTSENISTWLLGIVQEKMSKIGVHVSHIEFFETPKSRSVVYNEQN

SEQ ID NO: 26209 - protein, 193 aa, Sulfurovum riftiae
  misc_feature (1)..(193): tr|A0A151CH00|A0A151CH00_9PROT 6-carboxy-5,6,7,8-tetrah ydropterin synthase OS=Sulfurovum riftiae OX=1630136 GN =AS592_08250 PE=4 SV=1
MLIRKLFKFENAHIVRDCSTRRCSENIHGHSYKVEVLLKSNYLDDGQMVYDFGLTKLYIKELIDAFDHGITLWSSDDASYLEAMKKHSSRWVELPVSPSAEQFSRVIYLMVERVLACTKMRNGEKEVQLHSIIVHETETGYAQGFKEDAHSELMGKIALEEIIFSEQVKSEWSDPQLWEKLLQKETLLNPERV

SEQ ID NO: 26210 - protein, 193 aa, Sulfurovum sp.
  misc_feature (1)..(193): tr|A0A0C2V4S6|A0A0C2V4S6_9PROT 6-carboxy-5,6,7,8-tetrah ydropterin synthase OS=Sulfurovum sp. PC08-66 OX=153906 3 GN=KU28_02315 PE=4 SV=1
MIIRKLFKFENAHIVRHCTTQRCSQNLHGHSYKVEVLLESSYLDEAQMVYDFGLMKLRIKELIDAFDHSITLWNKDDKAYLEAMQKHSKRWVVLPISPSAEQFSRVIFLMVEKIIDTTLMVNGERGVEVHSIIVHETDTGYAQSFAQDAHSERMGTIDVAQIEFSPQIQSEWSSPTLWHDILEGKPIQNPKEI

SEQ ID NO: 26211 - protein, 193 aa, Sulfurovum sp.
  misc_feature (1)..(193): tr|A0A0C2ZLQ0|A0A0C2ZLQ0_9PROT 6-carboxy-5,6,7,8-tetrah ydropterin synthase OS=Sulfurovum sp. FS06-10 OX=153906 4 GN=KU29_06620 PE=4 SV=1
MIIRKLFKFENAHIVRGCSTQKCSQNIHGHSYKIEVLLESNYLDHGQMVYDFGLTKRYIKELIDAFDHSITLWSGDNLSYVEDMKKHSARWVELPVSPSAEQFSRIIYLMVERVLECTGMVNGEREVTLHSIIVHETETGYAQGFKEDAYNKLMGTISLTDIIFSKQIQIEWSNSNLWNELLAKKLMVNPKKV

SEQ ID NO: 26212 - protein, 149 aa, Sunxiuqinia dokdonensis
  misc_feature (1)..(149): tr|A0A0L8VEW1|A0A0L8VEW1_9BACT 6-carboxy-5,6,7,8-tetrah ydropterin synthase OS=Sunxiuqinia dokdonensis OX=14097 88 GN=NC99_01820 PE=3 SV=1
MTKIRVTKQFGFEMSHALTNYDGLCSNIHGHSYKLQITLIGEPLLKKGDPKDGMVIDFSELKKLVKKEIVQAFDHSLVINNLSAHNKLLDLGQLYERHHLVNFQPTTENMVIFIADKLKTLLPEHLELFCVRLYETSSSYAEWFASDNN

SEQ ID NO: 26213 - protein, 149 aa, Sunxiuqinia elliptica
  misc_feature (1)..(149): tr|A0A4R6H061|A0A4R6H061_9BACT 6-carboxy-5,6,7,8-tetrah ydropterin synthase OS=Sunxiuqinia elliptica OX=655355 GN=DET52_105211 PE=3 SV=1
MTKIRVTKQFGFEMSHALTNYDGLCSNIHGHSYKLQITLLGEPLESAGNPKDGMVMDFSVLKKLVKKHIVEPFDHSLMINDIAAHEKLTELGDLYRRQHLVNFQPTTENMVIFIADKLKKLLPEHLELFSVRLYETNNSFAEWFASDNP

SEQ ID NO: 26214 - protein, 149 aa, Sunxiuqinia elliptica
  misc_feature (1)..(149): tr|A0A1I2B0E9|A0A1I2B0E9_9BACT 6-carboxy-5,6,7,8-tetrah ydropterin synthase OS=Sunxiuqinia elliptica OX=655355 GN=SAMN05216283_101276 PE=3 SV=1
MTKIRVTKQFGFEMSHALTNYDGLCSNIHGHSYKLQITLLGEPLESAGDPKDGMVMDFSVLKKLVKKYIVEPFDHSLMINDIAAHEKLTELGELYRRQHLVNFQPTTENMVIFIADKLKKLLPEHLELFSVRLYETNNSFAEWFASDNP

SEQ ID NO: 26215 - protein, 120 aa, Superficieibacter electus
  misc_feature (1)..(120): tr|A0A2P5GTH5|A0A2P5GTH5_9ENTR 6-carboxy-5,6,7,8-tetrah ydropterin synthase OS=Superficieibacter electus OX=202 2662 GN=queD PE=3 SV=1
MSTTLFKDFTFEAAHHLPHVPEGHKCGRLHGHSFMVRLEITGEVDPHTGWIMDFAELKAAFKPTYDRLDHYYLNDIPGLENPTSEVLSRWIWEQVKPVVPLLSAVMIKETCTAGCVYRGE

SEQ ID NO: 26216 - protein, 148 aa, Sutterella megalosphaeroides
  misc_feature (1)..(148): tr|A0A2Z6IA84|A0A2Z6IA84_9BURK 6-pyruvoyl tetrahydrobio pterin synthase OS=Sutterella megalosphaeroides OX=2494 234 GN=SUTMEG_11650 PE=4 SV=1
MITATRYHDISCGHRVCGHESKCAHLHGHNYRVTFECAGETESLDELGRVLDFSVIKEKLCMWLENEWDHHFLVWKEDPLAPHLKALDPTVVELDFNPTAENIAHHLATVVAPKCLDGTGVRVIRCTVEETRKCSAEWRLFNGFAPLR

SEQ ID NO: 26217 - protein, 141 aa, Sutterella parvirubra
  misc_feature (1)..(141): tr|H3KD58|H3KD58_9BURK 6-pyruvoyl tetrahydropterin synt hase/QueD family protein OS=Sutterella parvirubra YIT 1 1816 OX=762967 GN=HMPREF9440_00664 PE=4 SV=1
MITASRYHDISCGHRVCGHETKCRHLHGHNYRITFECAGDLDHVGRVIDFSVIKEKLCMWLENEWDHHFLLWEEDPMASALTEIDPTVVLLPFNPTAENMATYLAETLAPKQLEGTGVRVVRCTVEETRKCQAEWKLFPVG

SEQ ID NO: 26218 - protein, 137 aa, Sutterella sp.
  misc_feature (1)..(137): tr|R7IJ14|R7IJ14_9BURK 6-pyruvoyl tetrahydropterin synt hase/QueD family protein OS=Sutterella sp. CAG:351 OX=1 262975 GN=BN620_01745 PE=4 SV=1
MFTVTRYHDISCGHRVCGHESKCSHLHGHNYRITFCCAGELDSLGRVIDFSVIKEKLCVWLEEHFDHRFLIWTEDPLADALLSLDPKVVQVPFNPTAENIAEYLVTVVGPEQLRGTGVKLIRCDVEETRKCTATYTL

SEQ ID NO: 26219 - protein, 137 aa, Sutterella sp.; identical to SEQ ID NO: 22461
  misc_feature (1)..(137): tr|A0A414VVD0|A0A414VVD0_9BURK 6-carboxytetrahydropteri n synthase OS=Sutterella sp. AM18-8-1 OX=2292076 GN=DW2 29_02845 PE=4 SV=1

SEQ ID NO: 26220 - protein, 187 aa, Sutterellaceae bacterium; identical to SEQ ID NO: 24276
  misc_feature (1)..(187): tr|A0A3D3SEN2|A0A3D3SEN2_9BURK Rubredoxin OS=Sutterella ceae bacterium OX=2026794 GN=DIT20_04210 PE=4 SV=1

SEQ ID NO: 26221 - protein, 116 aa, Sutterellaceae bacterium
  misc_feature (1)..(116): tr|A0A2E2R6R0|A0A2E2R6R0_9BURK 6-carboxy-5,6,7,8-tetrah ydropterin synthase OS=Sutterellaceae bacterium OX=2026 794 GN=CMN90_13675 PE=3 SV=1
MKVFKQFTFDVAHQLPDWPGLHGHSYTAEVWFEGPATDGYVVPESLLTQHVGAVHKRLDHSYLNEFIELPTSENIARWIWDQLRPVGPLIKVKVFRGSIGFGVEFDLEDAKAEGRA

SEQ ID NO: 26222 - protein, 184 aa, Swaminathania salitolerans
  misc_feature (1)..(184): tr|A0A511BRQ2|A0A511BRQ2_9PROT Uncharacterized protein OS=Swaminathania salitolerans OX=182838 GN=SSA02_16760 PE=4 SV=1
MLELSFTRRFSMGHRLISGSSERCAIPHGHNEFVTVTLQATRPSRLDGAGNVIVPFADAKRRWHDFVDTRLDHAFQISSQDPLLDWFRTREPERMTRLVITPGDPTTELMAALLYAKLAAFLRDDGDILRCTCLSLEETPTNTVTLSGGPEPYLPVTTEAATGADRSVWWHRADMTISDLGTEL

SEQ ID NO: 26223 - protein, 182 aa, Swingsia samuiensis
  misc_feature (1)..(182): tr|A0A4Y6UG68|A0A4Y6UG68_9PROT 6-carboxytetrahydropteri n synthase OS=Swingsia samuiensis OX=1293412 GN=E3D00_0 2465 PE=4 SV=1
MTVELVFTRRFSMGHRLIAGTSEKCAIPHGHNEYVKVTLRPQEPKRLDGHQNMVLPFADAKTRWHNFIDNSLDHALQLSEADPLLAWFQEHEPERTSRIVVTPGDPTTEIMAALLFAKLSAILAAQGGLLRVYEIELQETPTNTVKLGGDPTHYLPYTNRPPHLCWWNRPDMSISDLPVLRS

SEQ ID NO: 26224 - protein, 213 aa, Swingsia sp.
  misc_feature (1)..(213): tr|A0A4Y6UAH5|A0A4Y6UAH5_9PROT 6-carboxytetrahydropteri n synthase OS=Swingsia sp. F3b2 OX=2558361 GN=E3E12_032 60 PE=4 SV=1
MNAAPGAPSFGTTALNQGRSAPAAPQAELLFTRRFSMGHRLIAGTSDRCAIPHGHNEHVTVSLAAGLGHPSWDGAGGSGRLDGHANMLLPFAEAKGRWHRFIDERMDHSFQIGRDDPLLDWFRTHEPSRLGRLVVTPGDPTTELLAALLMAKMNAFLHAQGDVLRLTALEIRETPTNAVRLVGGDPSAYLPVCPAVEGEGPLPWWHRADDSTA

SEQ ID NO: 26225 - protein, 93 aa, Synechococcales bacterium
  misc_feature (1)..(93): tr|A0A3D5HZR0|A0A3D5HZR0_9CYAN 6-pyruvoyl tetrahydropte rin synthase (Fragment) OS=Synechococcales bacterium UB A12195 OX=2055798 GN=DGR08_02900 PE=4 SV=1
MYTCSKSFEGFPCCHRQPNHEGHCRFVHGYSRSFTCWFGASELDENGFVVDFSSLKELRKQLNDQFDHTFLANSDDPLLSEWERLHELGALDL

SEQ ID NO: 26226 - protein, 291 aa, Synechococcales bacterium
  misc_feature (1)..(291): tr|A0A358BZ66|A0A358BZ66_9CYAN 6-pyruvoyl tetrahydropte rin synthase OS=Synechococcales bacterium UBA8138 OX=20 55796 GN=DEB19_06205 PE=4 SV=1
MADLAPHGQGRACVITRRACFSASHHYWLPELDGAENKRRFGPCSQAPGHGHNYELIVFMEGVLDADGMVLNLSEVKHAIRAEVTDPLDFHCLNNTWPEFAVEQRAEAALPTTEWLLHAIWQRLQPLLPLKALRLYEQPTLWADYLGNAMEAFLTIRTHFSAAHRLARPELSQQENEQIYGKCARPHGHGHNYFLEVTVRGQIDARTGMVCDLAALQQLVQDLVVEPFDHTFLNKDVPFFVDCVPTAENIALHISDRLNQPIAAIGAALHRIHLQESPNNAAVIYAEAALV

SEQ ID NO: 26227 - protein, 300 aa, Synechococcus elongatus
  misc_feature (1)..(300): tr|Q8KPQ0|Q8KPQ0_SYNE7 6-pyruvoyl-tetrahydropterin synt hase-like protein OS=Synechococcus elongatus (strain PC C 7942) OX=1140 GN=SEF0045 PE=4 SV=1
MRDSQSRDRDRHAMECIINRRALFSASHRYWLPELSDAENQKLFGACARFPGHGHNYVLYVSMLGELDEYGMVLNLSDVKRVIKSEVTSQLDYAYLNDVWPEFQQGLPTTENLARVIWQRLAPHLPIVRIQLFESPSLWADYLGQAMEAYLTIQTHFSAAHRLAKESLSFEENCEIYGKCARPHGHGHNYHLEVTVAGEIDPRTGMLADLAALQQVVQDKVVEPFDHSFLNKDIPYFAEVVPTAENIAVHIRDLLAEPIRELGARLYKVKLIESPNNSAEVYCLQPSGLTNAAAAVPVLL

SEQ ID NO: 26228 - protein, 288 aa, Synechococcus elongatus
  misc_feature (1)..(288): tr|A0A3G6X1L0|A0A3G6X1L0_SYNEL 6-pyruvoyl tetrahydropte rin synthase OS=Synechococcus elongatus PCC 11801 OX=22 19813 GN=DOP62_10350 PE=4 SV=1
MECIINRRALFSASHRYWLPELSEAENQKLFGACARFPGHGHNYVLYVSMRGELDEYGMVLNLSDVKRVIKDEVTSQLDYAYLNDVWPEFQASLPTTENLARVIWQRLAPHLPIVRIQLFESPSLWADYLGQAMEAYLTIQTHFSAAHRLAKESLSFEENCEIYGKCARPHGHGHNYHLEVTVAGEIDPRTGMLADLAALQRVVQDTVVEPFDHSFLNKDIPYFAEVVPTAENIAVHIRDLLAGPIRELGARLYKVKLIESPNNSAEVYCPQPSRLSSDVEAAVPVLL

SEQ ID NO: 26229 - protein, 308 aa, Synechococcus lacustris
  misc_feature (1)..(308): tr|A0A2P7EDA3|A0A2P7EDA3_9SYNE 6-pyruvoyl tetrahydropte rin synthase OS=Synechococcus lacustris OX=2116544 GN=C 7K08_09180 PE=4 SV=1
  misc_feature (18)..(18): Xaa can be any naturally occurring amino acid
  misc_feature (235)..(235): Xaa can be any naturally occurring amino acid
  misc_feature (258)..(258): Xaa can be any naturally occurring amino acid
  misc_feature (288)..(288): Xaa can be any naturally occurring amino acid
MGFRALTVAAQVNGHAAXADLAPHGQGRACVITRRACFSASHHYWLPELDGAENKRRFGPCSQAPGHGHNYELIVFMEGVLDADGMVLNLSEVKHAIRAEVTDPLDFHCLNNTWPEFAVEQRAEAALPTTEWLLHAIWQRLQPLLPLKALRLYEQPTLWADYLGNAMEAFLTIRTHFSAAHRLARPELSQQENEQIYGKCARPHGHGHNYFLEVTVRGQIDARTGMVCDLAALQXLVQDLVVEPFDHTFLNKDVPFFXDCVPTAENIALHISDRLNQPIAAIGAALHXIHLQESPNNAAVIYAEAALV

SEQ ID NO: 26230 - protein, 151 aa, Synechococcus lacustris
  misc_feature (1)..(151): tr|A0A2P7EDZ1|A0A2P7EDZ1_9SYNE 6-pyruvoyl tetrahydropte rin synthase OS=Synechococcus lacustris OX=2116544 GN=C 7K08_07895 PE=4 SV=1
MYTCSKQFEGFPCCHRQPNHPGHCHFVHGYSRSFTCWFGSKELNQHGFVVDFSSLKALRQVLDQQFDHTFLANADDPLLPEWQRLHELGALDLRVMANVGMEGSAHWVWEQTNALLYARDAGRSWCWQVEARENSKNAAYWQLPPPWANQQ

SEQ ID NO: 26231 - protein, 290 aa, Synechococcus lividus
  misc_feature (1)..(290): tr|A0A2D2Q116|A0A2D2Q116_SYNLI 6-pyruvoyl tetrahydropte rin synthase OS=Synechococcus lividus PCC 6715 OX=19171 66 GN=BRW62_04765 PE=4 SV=1
MVCIINRRAEFAASHRYWLPEWSEAQNLSYFGACSRFPGHGHNYELVVSMQGDVDAFGMVLNLSEVKQVIRQQVIEPLNFSYLNEVWPEFQTTLPTTEHLARTIWDRLAPHLPLVRIRLFEHPRLWADYTGDPMDAYLSVGTHFSAAHRLALEELSYEENCRIYGKCARPHGHGHNYHVEITVKGEIHPRTGMIVDLVKLEAVLKEWVIEPLDHTFLNKDIPYFATVVPTAENIAIYIADVLRQPIRDLGATLHKVKLIESPNNSCEILCEESAQGTSPRETVLPVLERV

SEQ ID NO: 26232 - protein, 301 aa, Synechococcus sp.
  misc_feature (1)..(301): tr|A0A1Z9JE49|A0A1Z9JE49_9SYNE 6-pyruvoyl tetrahydropte rin synthase OS=Synechococcus sp. TMED169 OX=1986593 GN =CBD29_02205 PE=4 SV=1
  misc_feature (19)..(19): Xaa can be any naturally occurring amino acid
  misc_feature (28)..(28): Xaa can be any naturally occurring amino acid
  misc_feature (32)..(32): Xaa can be any naturally occurring amino acid
  misc_feature (64)..(64): Xaa can be any naturally occurring amino acid
  misc_feature (82)..(82): Xaa can be any naturally occurring amino acid
  misc_feature (116)..(116): Xaa can be any naturally occurring amino acid
  misc_feature (182)..(182): Xaa can be any naturally occurring amino acid
  misc_feature (184)..(184): Xaa can be any naturally occurring amino acid
  misc_feature (186)..(186): Xaa can be any naturally occurring amino acid
  misc_feature (188)..(188): Xaa can be any naturally occurring amino acid
  misc_feature (201)..(201): Xaa can be any naturally occurring amino acid
  misc_feature (203)..(203): Xaa can be any naturally occurring amino acid
  misc_feature (223)..(223): Xaa can be any naturally occurring amino acid
MTVVVAQVIGHAATAPHGXGRSCVITRXATFXSSHLYCLPELSSAENQLRFGACSQAPGHGHNXELIVSMEGGLDANGMVLXLSDVKHAIRSQVTEQLDFRCLNTAWPEFDVEGSXQAALPTTEWLLHAIWQRLATHLPLRSLRLYEQSTLWADYLGNSMEAFLTIRGHFAAAHRLAREELXAXEXEXIYGKCARPHGHGXNXLLDVTVRGQIDPRSGMLCDXAALQKLLDEEVLEPFDHTFLNKDVPFFATCVPTAENIALHIADRLKAPIADLGASLHKIRLQESPNNAAEIYAEPAQV

SEQ ID NO: 26233 - protein, 161 aa, Synechococcus sp.
  misc_feature (1)..(161): tr|A0A1J0PCT8|A0A1J0PCT8_9SYNE 6-pyruvoyl tetrahydropte rin synthase OS=Synechococcus sp. SynAce01 OX=1916956 G N=BM449_13275 PE=4 SV=1
MTAAPAAAYSCSKQFSGYPCCHRQWRHSGHCRFVHGYSRSFTFWFRAHQRDANGFVVDFSGLQALEAQLAKQFDHTFLVNADDPLLEQWRELEAQGGLDLRVMANVGMEASAELVWGWANALLQNQESGRACCWKAEARENEKNAACFEAIPAWFQLRADS

SEQ ID NO: 26234 - protein, 129 aa, Synechocystis sp.
  misc_feature (1)..(129): sp|Q55798|QUED_SYNY3 6-carboxy-5,6,7,8-tetrahydropterin synthase OS=Synechocystis sp. (strain PCC 6803 / Kazus a) OX=1111708 GN=queD PE=3 SV=1
MWIIYKEFSFEAAHQLPHHEGKCRRLHGHSFRGRVYVASDRLKTTGSETGMVMDFSVLKAHLDPLVKNHLDHYYLNDSLGLESPTSEAIAAWIFAKLEEAGVPGLHSVEVLETCTSAARYFSPRLSPLL

SEQ ID NO: 26235 - protein, 129 aa, Synechocystis sp.
  misc_feature (1)..(129): tr|A0A068MYR2|A0A068MYR2_SYNY4 6-carboxy-5,6,7,8-tetrah ydropterin synthase OS=Synechocystis sp. (strain PCC 67 14) OX=1147 GN=D082_26000 PE=3 SV=1
MWIIYKEFSFEAAHQLPHHEGKCRRLHGHSFRGRVYVASDHLKTSGSETGMVMDFSVLKAHLDPLIKNYLDHYYLNDSLGLESPTSEAIAAWIFAKLAEAGVPGLHSVEVLETCTSAARYFSPRLSSLL

SEQ ID NO: 26236 - protein, 121 aa, Synergistaceae bacterium
  misc_feature (1)..(121): tr|A0A3D4HN00|A0A3D4HN00_9BACT 6-carboxy-5,6,7,8-tetrah ydropterin synthase OS=Synergistaceae bacterium OX=2053 624 GN=queD PE=3 SV=1
MFLKKDFSFDAAHRLEEYHGKCEALHGHTYRFQVTLKGTPDGESMVMDFVQLKGLVNELVVSRLDHSLLNDTIPQPTAENIALWIWRQIESAVRKENCALYSVQVWETSTSSVLIHREDLG

SEQ ID NO: 26237 - protein, 120 aa, Synergistaceae bacterium
  misc_feature (1)..(120): tr|A0A3C0QFT9|A0A3C0QFT9_9BACT 6-carboxy-5,6,7,8-tetrah ydropterin synthase OS=Synergistaceae bacterium OX=2053 624 GN=queD PE=3 SV=1
MFLCREFKFDAAHNLVNYHGKCENLHGHTYRLAVVLKGQPDDEGMVFDFVELKKHVTELVLTKLDHAYINDILPQPTAEYIAMWIFKTLDKPLKRDNCELYEVRVWETENSSVICRREDV

SEQ ID NO: 26238 - protein, 121 aa, Synergistales bacterium
  misc_feature (1)..(121): tr|A0A101I4M0|A0A101I4M0_9BACT 6-carboxy-5,6,7,8-tetrah ydropterin synthase OS=Synergistales bacterium 58_81 OX =1635274 GN=XE01_0405 PE=3 SV=1
MFLKKDFSFDAAHRLEEYHGKCEALHGHTYRFRVTLKGTPDGESMVMDFVQLKGLVNELVVSRLDHSLLNDTIPQPTAENIALWIWRQIESAVRKENCALYSVQVWETSTSSVLIHREDLG

SEQ ID NO: 26239 - protein, 126 aa, Synergistales bacterium
  misc_feature (1)..(126): tr|A0A101IWJ9|A0A101IWJ9_9BACT 6-carboxy-5,6,7,8-tetrah ydropterin synthase OS=Synergistales bacterium 54_9 OX= 1641385 GN=XE12_0699 PE=3 SV=1
MLLYKEFTFDAAHRLEQYHGKCETLHGHTYRLRVTVKGKPDEEGMVMDFLELKKLVNENILSQLDHAYLNDVIPQPTAERIALWIWKELDKRLLRPNCSLYAVQVWETATSSVIIQREDLDLLSNI

SEQ ID NO: 26240 - protein, 123 aa, Synergistes jonesii
  misc_feature (1)..(123): tr|A0A073ISZ4|A0A073ISZ4_9BACT 6-carboxy-5,6,7,8-tetrah ydropterin synthase OS=Synergistes jonesii OX=2754 GN=E H55_02695 PE=3 SV=1
MLLCRDFKFDAAHNLIHYHGKCERLHGHTYHLRVTLEGAPDAEGMICDFAELKKIVGELVLSKLDHSYINDILPQPTAEYISMWIFRALDGALVRENCRLSEVCLWETEGSFVVCRREDVKDA

SEQ ID NO: 26241 - protein, 188 aa, Synergistes sp.
  misc_feature (1)..(188): tr|G9PYQ4|G9PYQ4_9BACT Uncharacterized protein OS=Syner gistes sp. 3_1_syn1 OX=457415 GN=HMPREF1006_00766 PE=4 SV=1
MKSITKLDLQYAHRFYGFKGEAQYLHGHTGILTIEVEDSVNPGVNMVFPCNEIQKTAWDVLKNFDHALILREDDPLLPAVLDVYEKQGIRNGAPSNTMKGPAFKTELATAYPECRLVVTKETMTVEGMIKIVYDLLKDKLNIVKLTFTSGVNAASEEYVPKRSMDRCPLCGIAMDENGVCPKCGYRKA

SEQ ID NO: 26242 - protein, 123 aa, Synergistes sp.
  misc_feature (1)..(123): tr|G9PZK1|G9PZK1_9BACT 6-carboxy-5,6,7,8-tetrahydropter in synthase OS=Synergistes sp. 3_1_syn1 OX=457415 GN=HM PREF1006_01063 PE=3 SV=1
MLLCRDFKFDAAHNLIHYHGKCERLHGHTYHLRVTLEGAPDAEGMIFDFVDLKKTVNELVLSKLDHAYINDILPQPTAEYIAIWIFRELDGPLARGNCRLSEIRLWETESSSVICRREDVKDA

SEQ ID NO: 26243 - protein, 121 aa, Synergistetes bacterium
  misc_feature (1)..(121): tr|A0A1V6A2A2|A0A1V6A2A2_9BACT 6-carboxy-5,6,7,8-tetrah ydropterin synthase OS=Synergistetes bacterium ADurb.Bi n155 OX=1852914 GN=queD PE=3 SV=1
MYLKKDFSFDAAHRLEHYHGKCESLHGHTYRFQVTLKGEPDHESMVMDFVRLKELVERLVVDRLDHSLLNDTIPQPTAENIALWIWRQIEEGVRGDNCGLYSVQVWETATSSILIHGEDLR

SEQ ID NO: 26244 - protein, 120 aa, Synergistetes bacterium
  misc_feature (1)..(120): tr|A0A2N1QTL3|A0A2N1QTL3_9BACT 6-carboxy-5,6,7,8-tetrah ydropterin synthase OS=Synergistetes bacterium HGW-Syne rgistetes-1 OX=2013842 GN=queD PE=3 SV=1
MFLCREFKFDAAHNLVNYHGKCENLHGHTYRLAVMLKGQPDDEGMVFDFVELKKHVTELVLSKLDHAYINDILPQPTAEYIAMWIFKILDKPLKRDNCELYEVKVWETESSSVICRREDV

SEQ ID NO: 26245 - protein, 124 aa, Syntrophaceae bacterium
  misc_feature (1)..(124): tr|A0A355H0V9|A0A355H0V9_9DELT 6-carboxy-5,6,7,8-tetrah ydropterin synthase OS=Syntrophaceae bacterium OX=20521 84 GN=queD PE=3 SV=1
MYEVTIIKSFSAAHLLTEIGGKCEELHGHNFKVEVTVGADTLTEEGILIDFRLVKKWLKEILDEMDHQHLNDLPFFAGKNPSSENIAYHVYSAMQARAKTSGVAVIRVKVWESESAAVSYSDER

SEQ ID NO: 26246 - protein, 122 aa, Syntrophaceae bacterium
  misc_feature (1)..(122): tr|A0A1J5I4N9|A0A1J5I4N9_9DELT 6-carboxy-5,6,7,8-tetrah ydropterin synthase OS=Syntrophaceae bacterium CG2_30_5 8_14 OX=1805378 GN=AUK26_06540 PE=3 SV=1
MYEVTIRKSFAAAHLLREIGGKCEGLHGHNFIVEISAAAAELNEEGLLIDFRLLKRWTDEVLEELDHKYLNELPFFKDMNPSSEQIARFLYERIGEKAKPAKTPLSRVTVWETENARVSYSL

SEQ ID NO: 26247 - protein, 126 aa, Syntrophobacter fumaroxidans
  misc_feature (1)..(126): tr|A0LJR7|A0LJR7_SYNFM 6-carboxy-5,6,7,8-tetrahydropter in synthase OS=Syntrophobacter fumaroxidans (strain DSM 10017 / MPOB) OX=335543 GN=Sfum_1986 PE=3 SV=1
MPGVYEVFFRSGFSAAHLLRDYPGDCARLHGHNWTVEVYVECRELDEIGIGIDFYDIDKALKQIMVEMDHCNLNDLAAFKDRNPTSENLARYVYRELSGKLDAPAIKVVKVKVCETPDAGVTYREE

SEQ ID NO: 26248 - protein, 127 aa, Syntrophobacter fumaroxidans
  misc_feature (1)..(127): tr|A0LE55|A0LE55_SYNFM 6-carboxy-5,6,7,8-tetrahydropter in synthase OS=Syntrophobacter fumaroxidans (strain DSM 10017 / MPOB) OX=335543 GN=Sfum_0003 PE=3 SV=1
MKNTFYEIKIITDFSAAHHLRDFRGKCENLHGHNWKIEIVLRGTELNEIGVLVDFGEVKQATRALLSEVDHHYLNEIPFFADRNPSSENIARYLFERLAEKFDNDKLRLYRVSAWESDDACATFMRE

SEQ ID NO: 26249 - protein, 126 aa, Syntrophobacter sp.
  misc_feature (1)..(126): tr|A0A2U3K589|A0A2U3K589_9DELT 6-carboxy-5,6,7,8-tetrah ydropterin synthase OS=Syntrophobacter sp. SbD1 OX=2043 167 GN=queD PE=3 SV=1
MAEVFEIFVKSRFAAAHSLGGYPGNCARVHGHNWEVEVFVRCSELDELGMGVDFCAIEPVVKEILTGLDHGNLNDLPAFANQNPTAENIARFLYKELARKLDTHAIHISRVKVSETPEAGAFYWEE

SEQ ID NO: 26250 - protein, 127 aa, Syntrophobacter sp.
  misc_feature (1)..(127): tr|A0A2U3LAX5|A0A2U3LAX5_9DELT 6-carboxy-5,6,7,8-tetrah ydropterin synthase OS=Syntrophobacter sp. SbD1 OX=2043 167 GN=SBDP1_780012 PE=3 SV=1
MDQRLFEIKIISGFAAAHNLKNFRGKCENLHGHNWKIEVVLRGRSLEENGILVDFGEVKAETRAALEELDHKYLNELPFFLQNNPSSENIARFLFERLSEKLNTLKIRIHSVSAWESADACATYMEY

SEQ ID NO: 26251 - protein, 136 aa, Syntrophobacteraceae bacterium
  misc_feature (1)..(136): tr|A0A352PWJ3|A0A352PWJ3_9DELT 6-carboxy-5,6,7,8-tetrah ydropterin synthase OS=Syntrophobacteraceae bacterium O X=2052185 GN=queD PE=3 SV=1
MKGEHALPRTQYQVKIITDFAAAHNLRNFRGKCENLHGHNWKVEVVLRGDRLDESGVLMDFGELKEATREILTALDHQYLNDLAYFKERNPSSEYIAQYLFERLSERLNRDYCRIFQVSAWESANSCATYFGENLG

SEQ ID NO: 26252 - protein, 125 aa, Syntrophobacteraceae bacterium
  misc_feature (1)..(125): tr|A0A1J5INY3|A0A1J5INY3_9DELT 6-carboxy-5,6,7,8-tetrah ydropterin synthase OS=Syntrophobacteraceae bacterium C G2_30_61_12 OX=1805379 GN=AUK55_08825 PE=3 SV=1
MFEIKIISDFAAAHNLRNFRGRCENLHGHNWKVEVVLRGRGLNQTDMVIDFGEVKQATRDLLARLDHTYLNELPYFQIRNPSSENIALYLYENLSAQFDNEDRWVVRISAWESKDACATYLADRQ

SEQ ID NO: 26253 - protein, 126 aa, Syntrophobacterales bacterium
  misc_feature (1)..(126): tr|A0A1G3UNK9|A0A1G3UNK9_9DELT 6-carboxy-5,6,7,8-tetrah ydropterin synthase OS=Syntrophobacterales bacterium GW C2_56_13 OX=1802287 GN=A2X96_12360 PE=3 SV=1
MPGVFEVYVETHFSAAHALRGYPGDCARLHGHNWIVRVSVRCGELDDTGIAIDFRVIKGHVKDVLQGLDHCNMNETEPFTEVNPSSENIARHLYREISRRINSEAVRVSKVRVSETPGAGASYWEE

SEQ ID NO: 26254 - protein, 123 aa, Syntrophobacterales bacterium
  misc_feature (1)..(123): tr|A0A2M8GBH0|A0A2M8GBH0_9DELT 6-carboxy-5,6,7,8-tetrah ydropterin synthase OS=Syntrophobacterales bacterium CG _4_8_14_3_um_filter_49_14 OX=1974097 GN=queD PE=3 SV=1
MYEVTIRRSFSAAHTLKEIGGKCEELHGHNFVVEVSVTVPDLNREGLAIDFRVLKRWTEEILETLDHKYLNDIPYFNALNPSAENIARFVYERIAQKAHLQKIRVSRVTVWESEDARASYEGK

SEQ ID NO: 26255 - protein, 128 aa, Syntrophobotulus glycolicus
  misc_feature (1)..(128): tr|F0T105|F0T105_SYNGF 6-carboxy-5,6,7,8-tetrahydropter in synthase OS=Syntrophobotulus glycolicus (strain DSM 8271 / FlGlyR) OX=645991 GN=Sgly_3109 PE=3 SV=1
MAKATIVKEFTFDAAHRLEGYQGLCQNLHGHTYKLQVGIYGPVKNEAGAADDGMVWDFVKLKQAIKEKIIDKLDHQYINELVSFRPTSENIALWMMKTLLAANIPVKFIRLYETPTSYVEIHEGDIGE

SEQ ID NO: 26256 - protein, 123 aa, Syntrophomonas sp.
  misc_feature (1)..(123): tr|A0A3B8HSQ6|A0A3B8HSQ6_9FIRM 6-carboxy-5,6,7,8-tetrah ydropterin synthase OS=Syntrophomonas sp. OX=2053627 GN =queD PE=3 SV=1
MPYHLSVSQSFDAAHFLNGYPGNCANIHGHTWKVEVTIIGSKLDSLGMVVDFREVREKLAKVLEQFDHVLINEIAPFDRINPTSENLAYFIFQQMKKQLEGFQLKLVKVWESENTWVAYEEGE

SEQ ID NO: 26257 - protein, 1166 aa, Syntrophomonas wolfei
  misc_feature (1)..(1166): tr|Q0AV03|Q0AV03_SYNWW 6-pyruvoyl-tetrahydropterin synt hase related domain conserved membrane protein OS=Syntr ophomonas wolfei subsp. wolfei (strain DSM 2245B / Goet tingen) OX=335541 GN=Swol_2160 PE=4 SV=1
MDKMDRERTLAESLKLQIDKLLQKKQEVDLGIENLEQEIARKAMRQESLDRSLEESQRIAAGMEEKAHLSAAKILAEAEAIAAVKREKMSAIEQEIALLQAELKEKATGEPIPQKEDDNNHPSTAQNSPNGIFARQHLNTNSYPEFSQVAASRATGDDNIYSMKLVGFVNARHFVIFGGTTGPVHAHSWQVETEVDVPREIGDTIEFSRVSQAVSAALGPYENTILNQVHPFDLIQPTTENIAMYFFNRVDEYLAKLGLKLYQLSLWETPTRGIQVNNHNLSLDEQIASELKAREENIAYREAAAIADPDFADLDQRDKEAADNKKSLSKPPPIFAGSLRASYSVRQYLLAAVLILFLSLLAYQHILWPSVEQRFPWGSDSWGHLFKAEMLYEQMQQGNYYPQFTEYWYNGVQPFRYWAPLPYYALAALRGLCGDIFTAGNLYIYLCALLGALSWLLLSRRMGLWPAVMAAVVWLLWQDNVRVAFSEGNLPRVLATALLPLLFALFLHIITQRKSYGAIIAVILTVQLVLLSHAMIAAVYCLSLALFAFFLWVFQGCSVKDLARGFLVLAAGVLSSSWWLLPSLSGGITGIDAQAVKQVVQFVPAHISLSPLYRFKNVETFYWGISLVLLLLASLVTWKSKPAWARSLTVCGIILFLITLPLFRAIYITLPLSHLLWPLRFSSFAALAILASGFTLELEEKRQGWLQSSTITACLLVVLLAFLLVDCLFSFRLLAHTGTKPFTVIQSGEFIKRDPGWRVATIDLSRLGSAPSFTFSEMAGLEQVFGWAWQGAVTSRNIMLLNTGLEQQYYPFLFRSCVDMGATDLVVKEDVITDLEAFREAAKRAGYQQRNKFADISVWRSIDQPYLVQKNPRCLVIGKYGGTIALQFPEVEMALSSRIDDCSLEELEQYSMLILSGANWHSKKQAEKLISDYAVSGGQVFIEMAGMPPNVLAKQPEFLGVYGEAVSIRQEIEVRGEDTRVILPPLWQQEGEWKAYVPMGLDKVELEFSYYGNQAPILGYKLLKGKKIWFLGANLSYHAYQSGQSESARLLKKIFDLKTEYAGDTIIPLQDYEASEKGYRMSYRLEQDAEVIVPISLLDGLVVKLDGRRIEAGNYENLLKLHLPAGTHRLEISIEKTAIFSWGKYLSLFTILLVIAALVRKVRSEG

SEQ ID NO: 26258 - protein, 830 aa, Syntrophomonas wolfei
  misc_feature (1)..(830): tr|A0A354YUF1|A0A354YUF1_9FIRM PTPS_related domain-cont aining protein (Fragment) OS=Syntrophomonas wolfei OX=8 63 GN=DDZ44_00085 PE=4 SV=1
MDKTDRERALIESLKLQMDSLLQKKQAVDLGIEGLKQEIARQVMRQESLERSLEESRRIAAGIEEKAHLSAAKILAEAEALVAVKREKLSAIEQEIALLRAELEEKASGEPVPQKDDDNLHSTAQNSPDGISSPQHHNTDSYPNFSRVAASRASGDDNIYSMKLVGFVNARHFVVFGGATGPVHAHSWQVETEVDVPRGIGDTIEFSRVSQAVSAALGPYENTILNQVHPFDLILPTTENIAMYFFNRLDEYLAKLGLKLYQLSLWETPTRGIQVNNHNLALDKQIAAELKARDGNAAYREAAAILDPDFAKLDQREKELANNKKLLSKPPPVSAGSRRGPYSTRQYLLAAVLILFLSLLAYQHILWTPVEQRFPWGSDSWGHLFKAEMLYEQIQQGNYYPQFTEYWYNGVQPFRYWAPLPYYALAGLRGLSGDIFTAGHLYIYLCALLGALSWLLLSRRMGLWPAVMAALVWLLWQDNVRVAFSEGNLPRVLATALLPLLFALFLHIITRRKSYGAIIAVILTVQLTLLCHAMIAAVYCLSLALFVFFLWVFQGCSVKDLARGLMVLAAGVLTSSWWLLPSLSGGITGIDAQAVKQVVQFVPAHISLSPLCRFKNVEIIYWGISLIMLLLSSLATWKSKPAWARSLVVCGIILLLITFPLFRAIYITLPLSHLLWPLRFSSFAALAVLASGFTLELEEKRQRWLQSSTVAACLLVVLLVFLLVDCLFSFRLLAHTGTRPFTIIQSGEFIKQEPGWRVATIDLSQLGSAPSFTFSEMAGLEQVFGWAWQGAVTSRNIMLLNTGLEQQYYPFLFRSCVDLGATDLVVKEDV

SEQ ID NO: 26259 - protein, 119 aa, Syntrophomonas zehnderi
  misc_feature (1)..(119): tr|A0A0E4GDI6|A0A0E4GDI6_9FIRM 6-carboxy-5,6,7,8-tetrah ydropterin synthase OS=Syntrophomonas zehnderi OL-4 OX= 690567 GN=2738 PE=3 SV=1
MRQVSITKIFTFDSAHKLIDYNGPCAQIHGHTYRLEVTVCGPLAPDMIIDFYDIKKIVENIVLSKVDHQFLNDVVPFNPTVENMVVWMADLLEPAFAEPVKLEKIRLWENQSSYAEVTW

SEQ ID NO: 26260 - protein, 124 aa, Syntrophorhabdaceae bacterium
  misc_feature (1)..(124): tr|A0A1V5C2F6|A0A1V5C2F6_9DELT 6-carboxy-5,6,7,8-tetrah ydropterin synthase OS=Syntrophorhabdaceae bacterium Pt aU1.Bin034 OX=1811715 GN=queD PE=3 SV=1
MFTLFVRETFAAAHKLDLYEGKCEELHGHNFRVEALFKGDKVGREGMLLDFTVLKAYLREIVSDLDHKYLNDIPFFKERASSSEYLALYIHDRLKDMVKKDGVTVSEVRVWESDNAYAAYGEPR

SEQ ID NO: 26261 - protein, 125 aa, Syntrophorhabdaceae bacterium
  misc_feature (1)..(125): tr|A0A1V5C914|A0A1V5C914_9DELT 6-pyruvoyl tetrahydropte rin synthase OS=Syntrophorhabdaceae bacterium PtaU1.Bin 034 OX=1811715 GN=A4E57_02690 PE=4 SV=1
MYTVAVERDFIARHFLFGGDWGDENNPHSHHYRIEVQLKGRSLDEHGYLVDIGEIEKVLDQILNHYRDRMLNSMSDFSGLNPSIEQFARIFCEDFANRVSHGILSSIRVKIWENDIAWASYTREL

SEQ ID NO: 26262 - protein, 124 aa, Syntrophorhabdus aromaticivorans
  misc_feature (1)..(124): tr|A0A351U138|A0A351U138_9DELT 6-carboxy-5,6,7,8-tetrah ydropterin synthase OS=Syntrophorhabdus aromaticivorans OX=328301 GN=DCZ04_04215 PE=3 SV=1
MSVFTLCVKDSFSAAHRLTDYHGKCEALHGHNFQVEAFVKGWQPENGGMVIDFTVLKGRLRQVLDVLDHKFINEISFFRERAGSSEYIAMYVFHELRKLMTETTVSLAEVRVWESDTAWVAYGE

SEQ ID NO: 26263 - protein, 122 aa, Syntrophorhabdus aromaticivorans
  misc_feature (1)..(122): tr|A0A351U6T9|A0A351U6T9_9DELT 6-carboxy-5,6,7,8-tetrah ydropterin synthase OS=Syntrophorhabdus aromaticivorans OX=328301 GN=queD PE=3 SV=1
MYEICVETHFSAAHHLRGYQGKCEFPHGHNWIVEVSVQCKALDEVGIGVDFSDVKRATNEILEYLDHRDLNQLPQFSLENPTSENIARYIYRALSERLNDGTLQVSKVKVCETPGSGVSYWE

SEQ ID NO: 26264 - protein, 124 aa, Syntrophorhabdus sp.
  misc_feature (1)..(124): tr|A0A1V5CRN4|A0A1V5CRN4_9DELT 6-carboxy-5,6,7,8-tetrah ydropterin synthase OS=Syntrophorhabdus sp. PtaU1.Bin00 2 OX=1811702 GN=queD_1 PE=3 SV=1
MSVFTLCVKDSFSAAHRLTGYHGKCEELHGHNFQVEVFVKGQQPEDGGMVIDFAVLKRRLRKVLDALDHKFINEIPFFRERASSSEYVAVYVFRELKKLMTETTVFLTEVRIWESDTAWVAYGE

SEQ ID NO: 26265 - protein, 122 aa, Syntrophorhabdus sp.
  misc_feature (1)..(122): tr|A0A1V4WZZ4|A0A1V4WZZ4_9DELT 6-carboxy-5,6,7,8-tetrah ydropterin synthase OS=Syntrophorhabdus sp. PtaB.Bin184 OX=1811701 GN=queD PE=3 SV=1
MFTLCVKDSFAAAHRLVGYKGKCEELHGHNFAVEVFMSGESLGDDGILVDFQTIKANLQKVLDVLDHKYINDIPFFAERVASAEYIAMYIFTEMENLMSGGRVSVSRVTVWESEKACASYER

SEQ ID NO: 26266 - protein, 125 aa, Syntrophothermus lipocalidus
  misc_feature (1)..(125): tr|D7CMQ3|D7CMQ3_SYNLT 6-carboxy-5,6,7,8-tetrahydropter in synthase OS=Syntrophothermus lipocalidus (strain DSM 12680 / TGB-C1) OX=643648 GN=Slip_1215 PE=3 SV=1
MYQVTVQVEIAAAHQLRDYEGECARVHGHTWQIEVTVRGNDLDPQGMLIDFRKLKQLVNLVVAGYDHSLLNDVPPFDRVTPTAENLAKKIFEDIEARLEAPGVILEKVTVRESPRAWATFRRDGQ

SEQ ID NO: 26267 - protein, 159 aa, Syntrophus aciditrophicus
  misc_feature (1)..(159): tr|Q2LVK6|Q2LVK6_SYNAS Queuosine biosynthesis protein O S=Syntrophus aciditrophicus (strain SB) OX=56780 GN=SYN _01559 PE=4 SV=1
MSLRFPMRGLKISADFSGKRTAPSAESKRSLSFMPGVFEISIEEQFSAAHALRNYPGNCEHLHGHNWAVEVTVECEELNEIGIGIDFREVKQSVREALHRLDHVNLNELPQFCDINPSSENIARHLYNELSRKLNTEKIRVSRVRVSETPTSKASYREI

SEQ ID NO: 26268 - protein, 126 aa, Syntrophus gentianae
  misc_feature (1)..(126): tr|A0A1H7W9W0|A0A1H7W9W0_9DELT 6-carboxy-5,6,7,8-tetrah ydropterin synthase OS=Syntrophus gentianae OX=43775 GN =SAMN04489760_10629 PE=3 SV=1
MPGIFEISVEEHFSSAHALRDYPGNCEHLHGHNWAVRVTVECKELNEIGIGIDFREVKESVREALHRLDHINLNELPPFQDINPSSENIARYLYSELSRKLNTETVRVSRVRVSETPTSSATYREI

SEQ ID NO: 26269 - protein, 151 aa, Syntrophus sp.
  misc_feature (1)..(151): tr|A0A351Z781|A0A351Z781_9DELT 6-pyruvoyl tetrahydropte rin synthase OS=Syntrophus sp. (in: Bacteria) OX=48412 GN=DCZ97_08710 PE=4 SV=1
MPYRICKTIEIESGHMLSKHHDNCKYPHGHSRRVELILESDELDANDMVCDFSVLKVALKRLLDSLDHAMCINTKDPMYKAFKETYGDRVIGFDATDPTTEVIAKTIFDRVKESLDRYGNKKGQPYRLGKGVRLIRARVWETSTSWAEYGR

SEQ ID NO: 26270 - protein, 122 aa, Syntrophus sp.
  misc_feature (1)..(122): tr|A0A1G3VR67|A0A1G3VR67_9DELT 6-carboxy-5,6,7,8-tetrah ydropterin synthase OS=Syntrophus sp. RIFOXYC2_FULL_54_ 9 OX=1802292 GN=A3J94_06735 PE=3 SV=1
MYEVTIKKSFSAAHLLKEIGGKCEELHGHNFLVEISVAAESLNEEGLLIDFRVVKRWTDEALEALDHKYLNELDYFKNRNPSSEAIARFLHERIGEKARQAKVALSRVTVWESDNSRVTYSL

SEQ ID NO: 26271 - protein, 131 aa, Tabrizicola sp.
  misc_feature (1)..(131): tr|A0A2N4YL61|A0A2N4YL61_9RHOB Uncharacterized protein OS=Tabrizicola sp. TH137 OX=2067452 GN=C0V75_02035 PE=4 SV=1
MYAVEVRDHIMIAHSLPSPVFGPAQGMHGATFTVDAAFFAADIDDHGLVVDIGLAVEALAAVLQPLRYRNLDEVPEFKGKFTTTEFLCGVIHKGMAARLRAGELKDGGRVTRLRITLHESHMARAWCEGDI

SEQ ID NO: 26272 - protein, 124 aa, Tahibacter aquaticus
  misc_feature (1)..(124): tr|A0A4R6YV27|A0A4R6YV27_9GAMM 6-carboxy-5,6,7,8-tetrah ydropterin synthase OS=Tahibacter aquaticus OX=520092 G N=DFR29_10878 PE=3 SV=1
MDLFKIFQIEAAHRLPQVPVGHKCSRLHGHSFRIEVHVSGPVDPQWGWVMDFAEIKQAFAPIFDALDHHYLNEVPGLENPTSENLAAWIWRALKPGLPLLSRIVIHETCTSGCSYSGPSNDGSR

SEQ ID NO: 26273 - protein, 136 aa, Taibaiella chishuiensis
  misc_feature (1)..(136): tr|A0A2P8D4N3|A0A2P8D4N3_9BACT 6-pyruvoyltetrahydropter in/6-carboxytetrahydropterin synthase OS=Taibaiella chi shuiensis OX=1434707 GN=B0I18_104279 PE=4 SV=1
MVYLTRVEHFNAAHKLYNPEWSDAENAEVFGKCSNANWHGHNYELHVTVKGDPHPETGFIFNAKTLGVLIKDAVIEKIDHRNLNMDVEFMKGKFTSAENLAIGIWNELKPHIEKEGAILHGIRLYETPKIYVEYFG

SEQ ID NO: 26274 - protein, 117 aa, Taibaiella soli
  misc_feature (1)..(117): tr|A0A2W2B1Q7|A0A2W2B1Q7_9BACT 6-carboxy-5,6,7,8-tetrah ydropterin synthase OS=Taibaiella soli OX=1649169 GN=qu eD PE=3 SV=1
MLIYREITFDSAHFLPNVPEGHKCRHMHGHTYRLKVFIEGPLTKEGWVIDFKDMKEAMMPIIDVVDHKVLNDIPGLENPTCELLAVWLWDQLKPVLPGLKKVELNETPTSGAIYEGV

SEQ ID NO: 26275 - protein, 136 aa, Taibaiella soli
  misc_feature (1)..(136): tr|A0A2W2A9X2|A0A2W2A9X2_9BACT 6-carboxytetrahydropteri n synthase OS=Taibaiella soli OX=1649169 GN=DN068_14780 PE=4 SV=1
MVYLTRVEHFNAAHRLYNESWSDAQNLEVFGKCSNANWHGHNYELHVTIKGEPHPETGFVFNAKTLGDLIKDIIVERVDHRNLNMDVDFMKGKFTSAENFAIGIWNELQPHVAEKGAQLHCIKLYETPRIYVEYFG

SEQ ID NO: 26276 - protein, 136 aa, Taibaiella sp.
  misc_feature (1)..(136): tr|A0A3N7CD11|A0A3N7CD11_9BACT 6-pyruvoyl tetrahydrobio pterin synthase OS=Taibaiella sp. KBW10 OX=2153357 GN=D BR32_14325 PE=4 SV=1
MIYLTRVEHFNAAHKLSNPNWTDEQNFEVFNKCSNPNWHGHNYELHVTVKGDPNPETGFVYNAKVLGQIIKDTVIEKIDHKNLNLDVDFMQGKFTSAENLAIGIWDQLKPHIEADGAVLHCVKLLETKNIYVEYYG

SEQ ID NO: 26277 - protein, 178 aa, Taibaiella sp.
  misc_feature (1)..(178): tr|A0A3N6ZM53|A0A3N6ZM53_9BACT 6-carboxytetrahydropteri n synthase QueD OS=Taibaiella sp. KBW10 OX=2153357 GN=D BR32_15370 PE=4 SV=1
MSSFIGSIIFCLAIFKSKIFCLIKKISEICGFISKYMLQLTKIFPFETAHAVFGYEGPCRNIHGHSYELHVTVAATEKTEDYIAPPGFLIDFKDIKRIVKAEIVDYFDHKLVLSKGYLAAHPEISAHENLIVWDHEPSAENILIYTRKRLQIILPEGIVIKSMRLYETRTSYAEWIED

SEQ ID NO: 26278 - protein, 286 aa, Tamilnaduibacter salinus
  misc_feature (1)..(286): tr|A0A2U1CVA3|A0A2U1CVA3_9ALTE 6-pyruvoyl tetrahydropte rin synthase-like protein OS=Tamilnaduibacter salinus O X=1484056 GN=C8D92_107153 PE=4 SV=1
MLTMNHLFVDNLTVIDFAYLDPRRGLVGESWIADVVLAGDLDDQGMVFDFGDVKPTIKRVIDECVDHRLAVPADHPSANLHINGDRIAVGWRLEDGRGIRHESPREAVAVIPGKQILPSSVSAMLERELRNVLPGNVTDIEVHLREEVIDGPYYHYVHGLKKHKGNCQRIAHGHRSRLQIHRDGHRDHSLEDAWARRWRDIYVGTQEDVVEQFVENETPYTRFAYDANQGEFALTLPSNTVYLIDSDSTVELIAAHLADESKANHPDSEIRVKAYEGVGKGALAIR

SEQ ID NO: 26279 - protein, 283 aa, Tamilnaduibacter salinus
  misc_feature (1)..(283): tr|A0A2A2I863|A0A2A2I863_9ALTE 6-pyruvoyl tetrahydropte rin reductase OS=Tamilnaduibacter salinus OX=1484056 GN =CF392_00655 PE=4 SV=1
MNHLFVDNLTVIDFAYLDPRRGLVGESWIADVVLAGDLDDQGMVFDFGDVKPTIKRVIDECVDHRLAVPADHPSANLHINGDRIAVGWRLEDGRGIRHESPREAVAVIPGKQILPSSVSAMLERELRNVLPGNVTDIEVHLREEVIDGPYYHYVHGLKKHKGNCQRIAHGHRSRLQIHRDGHRDHSLEDAWARRWRDIYVGTQEDVVEQFVENETPYTRFAYDANQGEFALTLPSNTVYLIDSDSTVELIAAHLADESKANHPDSEIRVKAYEGVGKGALAIR

SEQ ID NO: 26280 - protein, 151 aa, Tamlana nanhaiensis
  misc_feature (1)..(151): tr|A0A0D7W858|A0A0D7W858_9FLAO 6-pyruvoyl tetrahydropte rin synthase OS=Tamlana nanhaiensis OX=1382798 GN=PK35_ 04485 PE=4 SV=1
MSNHIRITKQFSFETGHALYGYDGKCKNVHGHSYKLSVTVIGTPISDVNNVKYGMVIDFGDLKKIVKEEIVDVFDHATVFNKNTPHVELAKELKDRGHNVLLVDYQPTSEMMVIDFAKKIKKRLPKHINLHSLKLQETDTSYAEWFAYDNI

SEQ ID NO: 26281 - protein, 136 aa, Tamlana nanhaiensis
  misc_feature (1)..(136): tr|A0A0D7W369|A0A0D7W369_9FLAO 6-carboxy-5,6,7,8-tetrah ydropterin synthase OS=Tamlana nanhaiensis OX=1382798 G N=PK35_06405 PE=3 SV=1
MRATVSRKAHFNAAHRLYRKDWSDEKNQAVFGKCNNPNFHGHNYELIVSVTGEINPETGFVVDMKILKDLIFEEIEQSFDHKNLNLEVEAFKNLNPTAENIAVVIYNILKPKLNSELNLKITLYETPRNFVTYSGE

SEQ ID NO: 26282 - protein, 136 aa, Tamlana sedimentorum
  misc_feature (1)..(136): tr|A0A0D7WAZ5|A0A0D7WAZ5_9FLAO 6-carboxy-5,6,7,8-tetrah ydropterin synthase OS=Tamlana sedimentorum OX=1435349 GN=PW52_08965 PE=3 SV=1
MKATVSRKAHFNAAHRLYRATWSDDKNKAVFGKCSNPNFHGHNYELIVSVTGEIDKETGFVIDMKVLKDLIYEEIEQTFDHKNLNLEVEVFKTLNPTAENIAVVIYNILKPKLSKHLDLQITLYETPRNFVTYSGK

SEQ ID NO: 26283 - protein, 151 aa, Tamlana sedimentorum
  misc_feature (1)..(151): tr|A0A0D7WBV5|A0A0D7WBV5_9FLAO 6-pyruvoyl tetrahydropte rin synthase OS=Tamlana sedimentorum OX=1435349 GN=PW52 _02845 PE=4 SV=1
MSNHIRITKQFSFETGHALYGYDGKCKNVHGHSYKLSVTVIGTPISDPNNVKFGMVIDFGDLKKIVKEEIVDVFDHATVFNQNTPHVELAKELKDRGHNVLLVDYQPTSEMMVIDFAKKIKKRLPNHINLHSLKLQETDTSYAEWFAYDNI

SEQ ID NO: 26284 - protein, 151 aa, Tamlana sp.
  misc_feature (1)..(151): tr|A0A5C4SSQ1|A0A5C4SSQ1_9FLAO 6-carboxytetrahydropteri n synthase OS=Tamlana sp. CW2-9 OX=2583814 GN=FGF67_011 45 PE=4 SV=1
MGNNIRITKKFAFETGHALYGYDGKCKNVHGHSYKLSVTVIGKPISDNTNVKYGMVIDFGDLKKIVKEEIVSVFDHATVFNKNTPHIELAKELESRGHNVLLVDYQPTSEMMVLDFAKKISHRLPSHISLHSLKLQETDSSFAQWFAYDNI

SEQ ID NO: 26285 - protein, 136 aa, Tamlana sp.
  misc_feature (1)..(136): tr|A0A2I7SJ18|A0A2I7SJ18_9FLAO 6-carboxy-5,6,7,8-tetrah ydropterin synthase OS=Tamlana sp. UJ94 OX=2069432 GN=C 1A40_10750 PE=3 SV=1
MKATVSRKAHFNAAHRLHNKNWSLEKNSAVFGKCNNPNYHGHNYELIVSVTGEINKETGFVIDVAILKQLIEVEIEAAFDHKNLNLEVPEFETLNPTVENIAVVIYNKLKPKLQSTLELEITLYETPRNFVRYSGK

SEQ ID NO: 26286 - protein, 149 aa, Tangfeifania diversioriginum
  misc_feature (1)..(149): tr|A0A1M6IFK0|A0A1M6IFK0_9BACT 6-carboxy-5,6,7,8-tetrah ydropterin synthase OS=Tangfeifania diversioriginum OX= 1168035 GN=SAMN05444280_11688 PE=3 SV=1
MAKIRVTKRFHFEMAHTLHEYDGLCRNIHGHSYNLEVTLAGEPRNQPGHPKDGMVMDFADLKHLVKSEIVNRFDHSLMVNKLVPEEQTELLRKTSERIILVDFQPTTENIVSYIAEILQEKLPPDVSLFSIRLFETVTAFAEWFAEDNQ

SEQ ID NO: 26287 - protein, 110 aa, Tannerella sp.
  misc_feature (1)..(110): tr|R7DJ54|R7DJ54_9BACT 6-carboxy-5,6,7,8-tetrahydropter in synthase OS=Tannerella sp. CAG:51 OX=1262979 GN=BN68 6_00643 PE=3 SV=1
MYIVKKTLEISASHHLNLSYESKCSSLHGHNWIISIFCRAETLNQDGMVTDFSLIKKLIHEKLDHKNLNEILPFNPTAENIARWVCDQTPFCFRVEVQESEGNIAIYEKD

SEQ ID NO: 26288 - protein, 110 aa, Tannerella sp.; identical to SEQ ID NO: 26287
  misc_feature (1)..(110): tr|A0A396MWE5|A0A396MWE5_9BACT 6-carboxy-5,6,7,8-tetrah ydropterin synthase OS=Tannerella sp. AF04-6 OX=2293248 GN=DWV37_12610 PE=3 SV=1

SEQ ID NO: 26289 - protein, 177 aa, Tanticharoenia sakaeratensis
  misc_feature (1)..(177): tr|A0A0D6MJ34|A0A0D6MJ34_9PROT Uncharacterized protein OS=Tanticharoenia sakaeratensis NBRC 103193 OX=1231623 GN=Tasa_010_048 PE=4 SV=1
MLDLVFTRRFSMGHRLIAGASERCALPHGHNELVTVTLRSTAPAGLDGDRNMTVPFAEAKAHWHRFVDERLDHALQLSETDPLLSWFRTHEPERAARIVVTPGDPTTELMAALLMAKLDAFLLQDGDRLRCIGIEIQETPTNTVRLTGPARDWLPTPRPEGACWWHRPDFSIADPAA

SEQ ID NO: 26290 - protein, 121 aa, Tardiphaga robiniae
  misc_feature (1)..(121): tr|A0A165RT25|A0A165RT25_9BRAD 6-carboxy-5,6,7,8-tetrah ydropterin synthase OS=Tardiphaga robiniae OX=943830 GN =A4A58_06630 PE=3 SV=1
MWELTKSFRFEAAHALSHTTLGEVSQEIHGHSFRAEITIRGVPDPVTGMVMDLGLLDRSLDELRKTLDHKFLNKIEAIGIPTLENLSRFIWDRVADKAPVVRVGVFRDSCNESCVYFGPKG

SEQ ID NO: 26291 - protein, 119 aa, Tardiphaga sp.
  misc_feature (1)..(119): tr|A0A420AUB0|A0A420AUB0_9BRAD 6-carboxy-5,6,7,8-tetrah ydropterin synthase OS=Tardiphaga sp. YR296 OX=2135488 GN=C7504_2346 PE=3 SV=1
MWELTKSFRFEAAHALSHTTLGEVSQEIHGHSFRAEVTIRGVPDPVTGMVMDLGLLDRSLDELRKTLDHKFLNKIEAIGIPTLENLSRFIWDRVADKAPVVRVGVFRDSCNESCVYFGP

SEQ ID NO: 26292 - protein, 121 aa, Tardiphaga sp.
  misc_feature (1)..(121): tr|A0A5A7WDT7|A0A5A7WDT7_9BRAD 6-carboxy-5,6,7,8-tetrah ydropterin synthase OS=Tardiphaga sp. P9-11 OX=2024614 GN=CIW50_05665 PE=3 SV=1
MWELTKSFRFEAAHALSHTTLGEVSQEIHGHSFRAEVTIRGVPDPVTGMVMDLGLLDRSLDELRKTLDHKFLNKIEAIGIPTLENLSRFIWDRVADKAPVVRVGVFRDSCNESCVYFGPAS

SEQ ID NO: 26293 - protein, 164 aa, Tatlockia micdadei
  misc_feature (1)..(164): tr|A0A1V1FC60|A0A1V1FC60_TATMI 6-pyruvoyl tetrahydrobio pterin synthase OS=Tatlockia micdadei OX=451 GN=B6N58_0 0695 PE=4 SV=1
MKKYLTTVELQKESMKFSAGHTTIFSATEREPLHGHMYAVYLALTTWVEENGMTFDYRYYKERIHNLCRSLNQTFLMPQFSPFLEFAEDGEYYYFTFNHKKIPFLKEDVTLMPLTNITVEELSRWFVNELIKNKTELDRHRIEKVVVKVFSAPGQSASHEWQRS

SEQ ID NO: 26294 - protein, 165 aa, Tatlockia micdadei
  misc_feature (1)..(165): tr|A0A098GDK0|A0A098GDK0_TATMI 6-pyruvoyl tetrahydrobio pterin synthase OS=Tatlockia micdadei OX=451 GN=LMI_014 9 PE=4 SV=1
MMKKYLTTVELQKESMKFSAGHTTIFSATEREPLHGHMYAVYLALTTWVEENGMTFDYRYYKERIHNLCRSLNQTFLMPQFSPFLEFAEDGEYYYFTFNHKKIPFLKEDVTLMPLTNITVEELSRWFVNELIKNKTELDRHRIEKVVVKVFSAPGQSASHEWQRS

SEQ ID NO: 26295 - protein, 120 aa, Tatumella citrea
  misc_feature (1)..(120): tr|A0A1Y0LHG4|A0A1Y0LHG4_TATCI 6-carboxy-5,6,7,8-tetrah ydropterin synthase OS=Tatumella citrea OX=53336 GN=A7K 98_04765 PE=3 SV=1
MSVTTLFKEFQFEAAHYLPHVPDGHKCGRLHGHSFLVRLEITGEVDPHTGWVMDFAELKARFKPLYEQLDHHYLNEIDGLENPTSEVLAIWIWQKMKPVLPLLSAVMIKETCTAGCTYRG

SEQ ID NO: 26296 - protein, 120 aa, Tatumella morbirosei
  misc_feature (1)..(120): tr|A0A095TDT7|A0A095TDT7_9GAMM 6-carboxy-5,6,7,8-tetrah ydropterin synthase OS=Tatumella morbirosei OX=642227 G N=HA49_07295 PE=3 SV=1
MSVTTLFKEFQFEAAHYLPHVPDGHKCGRLHGHSFLVRLEITGEVDPHTGWVMDFAELKARFKPLYEQLDHHYLNEIEGLENPTSEVLAIWIWQKMKPLLPLLSAVMIKETCTAGCTYRG

SEQ ID NO: 26297 - protein, 288 aa, Tatumella morbirosei
  misc_feature (1)..(288): tr|A0A095T5F1|A0A095T5F1_9GAMM Isocitrate dehydrogenase OS=Tatumella morbirosei OX=642227 GN=HA49_15320 PE=4 S V=1
MKIFINDLTVLDFSFIDTEAGVIGNSLIVDMILEGDMNAESMVMDFSHAKKSIKNEIDKLADHVLIVPETNSHVMVSHAGTTTEVATLDNDGKVRCFISGPQESFFLVRSDKISDRYLESIIEKHLLACLPQGVKGITITLRPETIHGESYHYSHGLKKHRGNCQRIAHGHRSTIRILIDGERSHRWEQQWAKRWNNAYLLSREDIVSVSELSPRAVAYWHKGMICSSYRSFQGYFEIMLGCEAVDILPYDTTVESLALFIRQSIEQQLPAAKVEVHAFEGVGKGAIA

SEQ ID NO: 26298 - protein, 122 aa, Tatumella ptyseos
  misc_feature (1)..(122): tr|A0A2X5NI41|A0A2X5NI41_9GAMM 6-carboxy-5,6,7,8-tetrah ydropterin synthase OS=Tatumella ptyseos OX=82987 GN=qu eD PE=3 SV=1
MSVTTLFKEFQFEAAHYLPHVPDGHKCGRLHGHSFLVRLEITGEVDPHTGWVMDFAELKARFKPLYEQLDHHYLNEIDGLENPTSEVLAAWIWQKMKPELPLLSAVMIKETCTAGCVYRGQA

SEQ ID NO: 26299 - protein, 122 aa, Tatumella ptyseos; identical to SEQ ID NO: 26298
  misc_feature (1)..(122): tr|A0A085JAL3|A0A085JAL3_9GAMM 6-carboxy-5,6,7,8-tetrah ydropterin synthase OS=Tatumella ptyseos ATCC 33301 OX= 1005995 GN=queD PE=3 SV=1

SEQ ID NO: 26300 - protein, 121 aa, Tatumella sp.; identical to SEQ ID NO: 25127
  misc_feature (1)..(121): tr|A0A2G8BSK5|A0A2G8BSK5_9GAMM 6-carboxy-5,6,7,8-tetrah ydropterin synthase OS=Tatumella sp. OPLPL6 OX=1928657 GN=BOM24_16470 PE=3 SV=1

SEQ ID NO: 26301 - protein, 143 aa, Taylorella asinigenitalis
  misc_feature (1)..(143): tr|G4QDN1|G4QDN1_TAYAM 6-carboxy-5,6,7,8-tetrahydropter in synthase OS=Taylorella asinigenitalis (strain MCE3) OX=1008459 GN=TASI_0259 PE=3 SV=1
MKVVKTFNFDIAHLLDGHDGKCKNLHGHTYRLEVEVTGPVITEGPKMGMVIDFADLKSIVEELVIEPMDHAFLYDSTNDRESEIAKLLDGWKMKTYAFAHRTTAENISSHILTKLRSRIEGVSRVRLWETPSSYSECIFNEDY

SEQ ID NO: 26302 - protein, 143 aa, Taylorella asinigenitalis
  misc_feature (1)..(143): tr|I7JNR2|I7JNR2_9BURK 6-carboxy-5,6,7,8-tetrahydropter in synthase OS=Taylorella asinigenitalis 14/45 OX=10914 95 GN=KUM_1401 PE=3 SV=1
MKVVKTFNFDIAHLLDGHDGKCKNLHGHTYRLEVEVTGPVITEGPKMGMVIDFADLKSIVEELVIEPMDHAFLYDSTNDRESEIAKLLDGWKMKTYAFAHRTTAENISSHILNKLRSRIEGVSRVRLWETPSSYSECIFNEDH

SEQ ID NO: 26303 - protein, 143 aa, Taylorella equigenitalis
  misc_feature (1)..(143): tr|I7IBC0|I7IBC0_9BURK 6-carboxy-5,6,7,8-tetrahydropter in synthase OS=Taylorella equigenitalis 14/56 OX=109149 7 GN=KUK_1234 PE=3 SV=1
MKVVKTFNFDIAHLLDGHDGKCKNLHGHTYRLEVEVAGPVIEDGPKKGMVIDFADLKSVVDDLIIARMDHAFLYDSTNERETAIAQLLEGWNMKTYPFKHRTTAENISRHIFDLLRERLEGVNRVRLWETPSSYSECTFDDEI

SEQ ID NO: 26304 - protein, 176 aa, Telmatospirillum siberiense
  misc_feature (1)..(176): tr|A0A2N3PTK2|A0A2N3PTK2_9PROT 6-carboxytetrahydropteri n synthase OS=Telmatospirillum siberiense OX=382514 GN= CWS72_14600 PE=4 SV=1
MTSFTVSRQISIDAGHRVMTHGSKCRHLHGHRYTIEATCLADHLQDVGEQSDMVFDFGFLKEAMAAEIDAPCDHGFLAHVEDFELLDMFCPETADAIEWIRAIRQAVRQDGHHLTTETRMETKLYVLDVNPTAEQLSRHWFNRLKPVVTARSGGVAKLQEIIVWEPPHCRAAYREP

SEQ ID NO: 26305 - protein, 137 aa, Tenacibaculum caenipelagi
  misc_feature (1)..(137): tr|A0A4R6TG69|A0A4R6TG69_9FLAO 6-pyruvoyltetrahydropter in/6-carboxytetrahydropterin synthase OS=Tenacibaculum caenipelagi OX=1325435 GN=DFQ07_1577 PE=4 SV=1
MPKVTVHRKAHFNAAHRLFNSNWSDEKNFEVFGKCSNPNYHGHNYELIVSLTGEVNEETGYVYDLGKLKDLIQLKVENVLDHKNLNIEVEEFKNLNPTVENISVVIYNKLRASIPENLDLEVTLYETPRNYVTYRGA

SEQ ID NO: 26306 - protein, 150 aa, Tenacibaculum caenipelagi
  misc_feature (1)..(150): tr|A0A4R6THP1|A0A4R6THP1_9FLAO 6-pyruvoyltetrahydropter in/6-carboxytetrahydropterin synthase OS=Tenacibaculum caenipelagi OX=1325435 GN=DFQ07_1118 PE=4 SV=1
MSKIRITKQFNFETGHALYGYDGKCKNVHGHSYKLSVTVIGSPITDTSNVKYGMVIDFGDLKKIVKEEIVDVFDHATVFNKNTPHVELAKELKDRDHHVILVDYQPTSEMMVIDFAKKIQSRLPGNIKLHAIKLQETETSFAEWYAADNE

SEQ ID NO: 26307 - protein, 150 aa, Tenacibaculum dicentrarchi
  misc_feature (1)..(150): tr|A0A2I2M175|A0A2I2M175_9FLAO 6-pyruvoyl tetrahydropte rin synthase OS=Tenacibaculum dicentrarchi OX=669041 GN =TDCHD05_10091 PE=4 SV=1
MNNIRITKQFTFETGHALYGYDGKCKNVHGHSYKLFVTVTGQPIMDTTNVKFGMVIDFGDLKKIVKEEIVDIFDHATVFNQNTPHVELAKELKDRGHHVILVDYQPTSEMMAIDFAKKIKDRLPENIKLHGIKLQETDTSFAEWIASDNE

SEQ ID NO: 26308 - protein, 137 aa, Tenacibaculum dicentrarchi
  misc_feature (1)..(137): tr|A0A2I2M2F5|A0A2I2M2F5_9FLAO 6-carboxy-5,6,7,8-tetrah ydropterin synthase OS=Tenacibaculum dicentrarchi OX=66 9041 GN=TDCHD05_20279 PE=3 SV=1
MPKVTVHRKAHFNAAHRLFNPDWSDEKNQQIFGKCSNPNYHGHNYDLIVSLTGEIDKETGYVYDLGILKTLIKDEVEDVFDHKNLNLDVADFENLNPTAENISVVIFNKLRGHIPVNLALEITLYETQRNYVTYNGA

SEQ ID NO: 26309 - protein, 149 aa, Tenacibaculum discolor
  misc_feature (1)..(149): tr|A0A497Z5Y0|A0A497Z5Y0_9FLAO 6-carboxy-5,6,7,8-tetrah ydropterin synthase OS=Tenacibaculum discolor OX=361581 GN=C8N27_0890 PE=3 SV=1
MSKIRITKQFTFETGHALYGYDGKCKNVHGHSYKLSVTVIGSPITDTSNVKYGMVIDFGDLKKIVKEDIVDVFDHATVFNKNTPHVELAQELKNRGHHVILVDYQPTSEMMVIDFAKKIQRRLPENIKLHAIKLQETDTSFAEWYASDN

SEQ ID NO: 26310 - protein, 137 aa, Tenacibaculum discolor
  misc_feature (1)..(137): tr|A0A497YW59|A0A497YW59_9FLAO 6-pyruvoyltetrahydropter in/6-carboxytetrahydropterin synthase OS=Tenacibaculum discolor OX=361581 GN=C8N27_1986 PE=4 SV=1
MPKVTVHRKAHFNAAHRLFNPKWSDEKNHEVFGKCSNPNYHGHNYELIVSLTGEIDQETGYVYDLGKLKDLIKLKVEDVLDHKNLNIEVEEFKSINPTVENISVVIYNKLRVSIPEKLDLEVTLYETPRNYVTYRGA

SEQ ID NO: 26311 - protein, 150 aa, Tenacibaculum finnmarkense
  misc_feature (1)..(150): tr|A0A2H1XLU4|A0A2H1XLU4_9FLAO 6-pyruvoyl tetrahydropte rin synthase OS=Tenacibaculum finnmarkense OX=1680763 G N=TNO006_120008 PE=4 SV=1
MNNIRITKQFTFETGHALYGYDGKCKNVHGHSYKLYVTVTGQPISDSTNVKFGMVIDFGDLKKIVKEEIVDIFDHATVFNQNTPHIELAKELKDRGHHVILVDYQPTSEMMAIDFAKKIKDRLPENIKLHAIKLQETDSSFAEWFASDNQ

SEQ ID NO: 26312 - protein, 137 aa, Tenacibaculum finnmarkense
  misc_feature (1)..(137): tr|A0A2H1XZD6|A0A2H1XZD6_9FLAO 6-pyruvoyl tetrahydrobio pterin synthase OS=Tenacibaculum finnmarkense OX=168076 3 GN=TFHFJT_230012 PE=4 SV=1
MPKVTVHRKAHFNAAHRLFNPDWSDEKNQQIFGKCNNPNYHGHNYDLIVSLTGEINAETGYVYDLGILKGLIKTQVEDVFDHKNLNLDVADFENLNPTAENISVVIFNKLRGHIPVNLALEITLYETQRNYVTYNGS

SEQ ID NO: 26313 - protein, 137 aa, Tenacibaculum gallaicum
  misc_feature (1)..(137): tr|A0A3E0I1H4|A0A3E0I1H4_9FLAO 6-pyruvoyltetrahydropter in/6-carboxytetrahydropterin synthase OS=Tenacibaculum gallaicum OX=561505 GN=C7448_10398 PE=4 SV=1
MPKVTVHRKAHFNAAHRLFNPKWSDEKNYEVFGKCSNPNYHGHNYELIISLTGEVDQETGYVYDLGKLKDLIKLKVEDVLDHKNLNIEVEEFKDVNPTVENISVVIYNKLRVSIPEKLDLEVTLYETPRNYVTYRGA

SEQ ID NO: 26314 - protein, 149 aa, Tenacibaculum gallaicum
  misc_feature (1)..(149): tr|A0A3E0ICT0|A0A3E0ICT0_9FLAO 6-carboxy-5,6,7,8-tetrah ydropterin synthase OS=Tenacibaculum gallaicum OX=56150 5 GN=C7448_101421 PE=3 SV=1
MSNIRITKQFTFETGHALYGYDGKCKNVHGHSYKLSVTVIGSPITDTSNVKYGMVIDFGDLKKIVKEEIVDVFDHATVFNKNTPHVELAKELKDRGHHVILVDYQPTSEMMVIDFAKKIQSRLPKRIKLHAIKLQETDTSFAEWYASDN

SEQ ID NO: 26315 - protein, 137 aa, Tenacibaculum holothuriorum
  misc_feature (1)..(137): tr|A0A1Y2PD02|A0A1Y2PD02_9FLAO 6-pyruvoyl tetrahydrobio pterin synthase OS=Tenacibaculum holothuriorum OX=16351 73 GN=WH52_06225 PE=4 SV=1
MPRVTVHRKAHFNAAHRLFNPKWSDEKNVAVFGKCSNPNYHGHNYELIVSLTGEIDKETGYVYDLGILKDLIKEEVEEAFDHKNLNIEVEEFKALNPSVENIAVVIYDKLRVKIEKEYELKITLYETPRNYVTYSGE

SEQ ID NO: 26316 - protein, 150 aa, Tenacibaculum holothuriorum
  misc_feature (1)..(150): tr|A0A1Y2PBH7|A0A1Y2PBH7_9FLAO 6-pyruvoyl tetrahydropte rin synthase OS=Tenacibaculum holothuriorum OX=1635173 GN=WH52_13370 PE=4 SV=1
MSKIRITKQFSFETGHALYGYDGKCKNVHGHSYKLSVTVIGTPISDTSNVKYGMVIDFGDLKKIVKEEIVDVFDHATVFNKNTPHVELAKELKDRGHHVILVGYQPTSEMMVIDFAEKIKSRLPENLLLHSIKLQETDTSFAEWYASDNN

SEQ ID NO: 26317 - protein, 150 aa, Tenacibaculum jejuense
  misc_feature (1)..(150): tr|A0A238UF03|A0A238UF03_9FLAO Queuosine biosynthesis Q ueD, PTPS-I OS=Tenacibaculum jejuense OX=584609 GN=TJEJ U_4143 PE=4 SV=1
MSKIRITKKFTFETAHALYGYDGKCKNIHGHSYKLFVTVIGEPISDTNNPKYGMVIDFGDLKKIVNKEIVDEFDHSTLFNKNTPHLELAEYLKELGHHILLVDYQPSSEMMVIDFAKKISGNLPEGIRLHSLKLQETESCYAEWFASDNI

SEQ ID NO: 26318 - protein, 137 aa, Tenacibaculum jejuense
  misc_feature (1)..(137): tr|A0A238U896|A0A238U896_9FLAO 6-carboxy-5,6,7,8-tetrah ydropterin synthase OS=Tenacibaculum jejuense OX=584609 GN=TJEJU_1535 PE=4 SV=1
MPRVTVHRKAHFNAAHRLYRKDWSDEKNFEVFNKCSNTYFHGHNYELIVSLTGEIDKETGYVYDLGKLKQIIKEEIEEAFDHKNLNIEVEEFKDLNPTAENISVVIYNKLRTHISEDLDMEITLYETPRNFVTYSGS

SEQ ID NO: 26319 - protein, 137 aa, Tenacibaculum litoreum
  misc_feature (1)..(137): tr|A0A3R9DM40|A0A3R9DM40_9FLAO 6-carboxytetrahydropteri n synthase OS=Tenacibaculum litoreum OX=321269 GN=EI424 _07225 PE=4 SV=1
MPKVTVHRKAHFNAAHRLFNPKWSDEKNYEVFGKCSNPNYHGHNYELIVSLTGEIDQETGYVYDLGKLKDLIKLKVEDTLDHKNLNIEVEEFKNVNPTVENISVVIYNKLRVSIPEKLDLEVTLYETPRNYVTYRGA

SEQ ID NO: 26320 - protein, 149 aa, Tenacibaculum litoreum
  misc_feature (1)..(149): tr|A0A3R9EBI2|A0A3R9EBI2_9FLAO 6-carboxy-5,6,7,8-tetrah ydropterin synthase OS=Tenacibaculum litoreum OX=321269 GN=EI424_04555 PE=3 SV=1
MSKIRITKQFTFETGHALYGYDGKCKNVHGHSYKLSVTVIGSPITDTSNVKYGMVIDFGDLKKIVKEEIVDVFDHATVFNKNTPHVELAQELKDRGHHVILVDYQPTSEMMVIDFAKKIQDRLPENIKLHAIKLQETDTSFAEWYASDN

SEQ ID NO: 26321 - protein, 137 aa, Tenacibaculum lutimaris
  misc_feature (1)..(137): tr|A0A420DZ98|A0A420DZ98_9FLAO 6-pyruvoyltetrahydropter in/6-carboxytetrahydropterin synthase OS=Tenacibaculum lutimaris OX=285258 GN=C8N26_2154 PE=4 SV=1
MPKVTVHRKAHFNAAHRLFNPKWSDEKNHEVFGKCSNPNYHGHNYELIVSLTGEIDQETGYVYDLGKLKDLIKLKVEDVLDHKNLNIEVEEFKNVNPTVENISVVIYNKLRVSIPEHLDLEVTLYETPRNYVTYRGA

SEQ ID NO: 26322 - protein, 149 aa, Tenacibaculum lutimaris
  misc_feature (1)..(149): tr|A0A420E5Q0|A0A420E5Q0_9FLAO 6-carboxy-5,6,7,8-tetrah ydropterin synthase OS=Tenacibaculum lutimaris OX=28525 8 GN=C8N26_0588 PE=3 SV=1
MSKIRITKQFNFETGHALYGYDGKCKNVHGHSYKLSVTVIGSPITDTSNVKYGMVIDFGDLKKIVKEEIVDVFDHATVFNKNTPHIELAKELKDRGHHVILVNYQPTSEMMVIDFAEKIQSRLPENIKLHAIKLQETETSFAEWYASDN

SEQ ID NO: 26323 - protein, 149 aa, Tenacibaculum maritimum
  misc_feature (1)..(149): tr|A0A2H1E5F6|A0A2H1E5F6_9FLAO 6-carboxy-5,6,7,8-tetrah ydropterin synthase OS=Tenacibaculum maritimum NCIMB 21 54 OX=1349785 GN=MARIT_0069 PE=3 SV=1
MANIRITKQFNFETGHALYGYDGKCKNVHGHSYKLSVTVIGQPITDASNVKYGMVIDFGDLKRIVKEDIVDVFDHATVFNKNTPHIELAKELQDRDHHVILVDYQPTSEMMVIDFAEKIKKRLPENIQLYALKLQETATSFAEWYASDN

SEQ ID NO: 26324 - protein, 137 aa, Tenacibaculum maritimum
  misc_feature (1)..(137): tr|A0A2H1E8T6|A0A2H1E8T6_9FLAO 6-carboxy-5,6,7,8-tetrah ydropterin synthase OS=Tenacibaculum maritimum NCIMB 21 54 OX=1349785 GN=MARIT_1223 PE=3 SV=1
MPRVTVHRKAHFNAAHRLHREDWSEEKNNLFFGKCSNPNYHGHNYELIVSLTGEVDKETGFVYDLGKLKKLIEEEIEEAFDHKNLNIEVTEFKDLNPTAENIAIVIYNKLRVKILKKLDLKITLYETPRNYVSYSGE

SEQ ID NO: 26325 - protein, 137 aa, Tenacibaculum mesophilum
  misc_feature (1)..(137): tr|A0A1M5G2N1|A0A1M5G2N1_9FLAO 6-pyruvoyltetrahydropter in/6-carboxytetrahydropterin synthase OS=Tenacibaculum mesophilum OX=104268 GN=SAMN05444344_2283 PE=4 SV=1
MPKVTVHRKAHFNAAHRLFNPKWSDEKNYEVFGKCSNPNYHGHNYELIVSLTGEIDQETGYVYDLGKLKDLIKSKVEDLLDHKNLNIEVKEFKNVNPTVENISVVIYNKLRVSIPEKLDLAITLYETPRNYVTYRGT

SEQ ID NO: 26326 - protein, 149 aa, Tenacibaculum mesophilum
  misc_feature (1)..(149): tr|A0A1M5DLJ4|A0A1M5DLJ4_9FLAO 6-carboxy-5,6,7,8-tetrah ydropterin synthase OS=Tenacibaculum mesophilum OX=1042 68 GN=SAMN05444344_1142 PE=3 SV=1
MSKIRITKQFTFETGHALYGYDGKCKNVHGHSYKLSVTVIGSPITDTSNVKYGMVIDFGDLKKIVKEEIVDVFDHATVFNKNTPHVELAKELKDRGHHVILVDYQPTSEMMVIDFAKKIQKRLPENIKLHGIKLQETDTSFAEWYASDN

SEQ ID NO: 26327 - protein, 137 aa, Tenacibaculum skagerrakense
  misc_feature (1)..(137): tr|A0A4R2NM16|A0A4R2NM16_9FLAO 6-pyruvoyltetrahydropter in/6-carboxytetrahydropterin synthase OS=Tenacibaculum skagerrakense OX=186571 GN=EV195_11119 PE=4 SV=1
MPRVTVHRKAHFNSAHRLYRKDWSDEKNFEVFNKCSNPNFHGHNYELIVSLTGEIDEETGYVYDLGKLKQIIKEEVEEPFDHKNLNLEVEEFKNLNPTAENISVVIYNKLRTIIPNTLDIKITLYETPRNFVTYSGK

SEQ ID NO: 26328 - protein, 150 aa, Tenacibaculum skagerrakense
  misc_feature (1)..(150): tr|A0A4R2P224|A0A4R2P224_9FLAO 6-pyruvoyltetrahydropter in/6-carboxytetrahydropterin synthase OS=Tenacibaculum skagerrakense OX=186571 GN=EV195_10180 PE=4 SV=1
MSTIRITKQFNFETGHALYGYDGKCKNVHGHSYKLSVTVVGSPISDTSNVKFGMVIDFGDLKKIVKEEIVDVFDHATVFNKNTPHIELAKELKDRGHDVILVDYQPTSEMMVIDFAKKIKNRLPDNIKLHSIKLQETDTSYAEWYASDNM

SEQ ID NO: 26329 - protein, 149 aa, Tenacibaculum soleae
  misc_feature (1)..(149): tr|A0A1B9Y1A6|A0A1B9Y1A6_9FLAO 6-carboxytetrahydropteri n synthase QueD OS=Tenacibaculum soleae OX=447689 GN=BA 195_02530 PE=4 SV=1
MANIRITKQFSFETGHALYGYDGKCKNVHGHSYKLSVTVIGQPITDVSNVKYGMVIDFGDLKKIVIEEIVDVFDHATVFNQNTPHVELAKELKARDHHVILVDYQPTSEMMVIDFADKIQKRLPDNIKLFSLKLQETETSFAEWFASDN

SEQ ID NO: 26330 - protein, 136 aa, Tenacibaculum soleae
  misc_feature (1)..(136): tr|A0A1B9Y2A7|A0A1B9Y2A7_9FLAO 6-pyruvoyl tetrahydrobio pterin synthase OS=Tenacibaculum soleae OX=447689 GN=BA 195_04425 PE=4 SV=1
MKKIAITRREHFNSAHRLHNSNWSIEKNKEVFGKCNNENYHGHNYDLEVSIIGAINPETGYVIDTKILSNHIKREILEPFDHRNLNLDTKEFEYLNPTVENIAVVIYNKLRKVISNHLEIKIKLYETPRNFVEYPC

SEQ ID NO: 26331 - protein, 150 aa, Tenacibaculum sp.
  misc_feature (1)..(150): tr|A0A2H1YJV7|A0A2H1YJV7_9FLAO 6-pyruvoyl tetrahydropte rin synthase OS=Tenacibaculum sp. TNO020 OX=1458515 GN= TNO020_70102 PE=4 SV=1
MNNIRITKQFTFETGHALYGYDGKCKNVHGHSYKLFVTVTGQPISDSSNVKFGMVIDFGDLKKIVKEEIVDIFDHATVFNQNTPHIELAKELKDRGHHVILVDYQPTSEMMAIDFAKKIKDRLPENIKLHAIKLQETDSSFAEWFASDNQ

SEQ ID NO: 26332 - protein, 149 aa, Tenacibaculum sp.
  misc_feature (1)..(149): tr|A0A1H5F707|A0A1H5F707_9FLAO 6-carboxy-5,6,7,8-tetrah ydropterin synthase OS=Tenacibaculum sp. MAR_2010_89 OX =1250198 GN=SAMN04487765_1035 PE=3 SV=1
MANIRITKQFSFETGHALYGYDGKCKNVHGHSYKLSVTVIGEPISDTSNVKYGMVIDFGDLKKIVKEDIVDVFDHATVFNKNTPHVELAKELQDRGHHVILVDYQPTSEMMIIDFASKIKKRLPGNIKLHSLKLQETDTSFAEWHASDN

SEQ ID NO: 26333 - protein, 150 aa, Tenacibaculum todarodis
  misc_feature (1)..(150): tr|A0A1L3JKK5|A0A1L3JKK5_9FLAO 6-carboxytetrahydropteri n synthase QueD OS=Tenacibaculum todarodis OX=1850252 G N=LPB136_09925 PE=4 SV=1
MSTIRITKQFNFETGHALYGYDGKCKNVHGHSYKLSVTVIGQPITDSSNVKFGMVIDFSDLKKVVKEEIVDVFDHATVFNKNTPHVELAKELQDRGHHVILVDYQPTSEMMVIDFAEKIKNRLPENINLHSLRLQETETSFAEWFASDNL

SEQ ID NO: 26334 - protein, 137 aa, Tenacibaculum todarodis
  misc_feature (1)..(137): tr|A0A1L3JGI1|A0A1L3JGI1_9FLAO 6-carboxy-5,6,7,8-tetrah ydropterin synthase OS=Tenacibaculum todarodis OX=18502 52 GN=LPB136_02115 PE=3 SV=1
MPKVTVHRKAHFNAAHRLYRKDWSDAKNTAVFGKCSNPNFHGHNYELIVSLTGEIEEETGFVYDLGKLRELIKSEVEEALDHKNLNVEVPEFKDLNPTAENISVVIYNKLKKHLPTNLTIEITLYETARNFVSYKGE

SEQ ID NO: 26335 - protein, 128 aa, Tenericutes bacterium
  misc_feature (1)..(128): tr|A0A420Z0Z5|A0A420Z0Z5_9BACT 6-carboxy-5,6,7,8-tetrah ydropterin synthase OS=Tenericutes bacterium OX=2231116 GN=queD PE=3 SV=1
MEVKMIRICKTFVFDAAHKLPEHKGKCKNLHGHRYKLEIEVRNEVNPNTGMVMDFGDLKQIINDTFIKNWDHSYLNESFENPTAEIMVEHMINWLKNIFNKEGVYAELTKVRLYETPNSYAEWRKEDQ

SEQ ID NO: 26336 - protein, 186 aa, Tenericutes bacterium
  misc_feature (1)..(186): tr|A0A1V6B9W4|A0A1V6B9W4_9BACT 6-pyruvoyl tetrahydropte rin synthase OS=Tenericutes bacterium ADurb.Bin140 OX=1 852919 GN=BWX94_01328 PE=4 SV=1
MRSFTTLDLQYAHRFYGFRGEAQYLHGHTGILTIEVEDRVNMGVNMVFPCNEIKKIAWEVLQNFDHALILREDDPLLPVILGVYEAQGIRNGHPSNKQKGPAFKTELATAYPECRLVVTKETMTVEGMIKIVYDLLKDKLNIVKLTFTSGVNGASQEYEPQKVIDCCPLCGVALNENGVCPKCGYK

SEQ ID NO: 26337 - protein, 165 aa, Tengunoibacter tsumagoiensis
  misc_feature (1)..(165): tr|A0A401ZZF9|A0A401ZZF9_9CHLR 6-pyruvoyl tetrahydrobio pterin synthase OS=Tengunoibacter tsumagoiensis OX=2014 871 GN=KTT_20980 PE=4 SV=1
MAGEQIRRKVKVEGGTLKFSSAHFITYGGKCERLHGHNYGVLVEIEGELGQDGLVFDFTLLKRYAREICQKLDHHFLLPMRNPQLELIALSDQWEIRFGEKRYLFPYTDVVELPIENSTAELLAEYIHGELLQLLAQHDISHLISLMVGVEEAPTQMAYYQKELR

SEQ ID NO: 26338 - protein, 135 aa, Tengunoibacter tsumagoiensis
  misc_feature (1)..(135): tr|A0A401ZTP3|A0A401ZTP3_9CHLR 6-carboxy-5,6,7,8-tetrah ydropterin synthase OS=Tengunoibacter tsumagoiensis OX= 2014871 GN=KTT_01470 PE=3 SV=1
MVYLTRRVTFSAAHRLWSHALSDEENQVVYDKCANPNGHGHNYILEVTVRGTPDPQTGMVMNLTDMKKIMNEQVVDWVDHKHLNYDVPWLEGVIPTAEMLAMKFWERLERDFPAGLLYEVVLHETENNRASYRGE

SEQ ID NO: 26339 - protein, 118 aa, Tepidanaerobacter acetatoxydans
  misc_feature (1)..(118): tr|F4LS35|F4LS35_TEPAE 6-carboxy-5,6,7,8-tetrahydropter in synthase OS=Tepidanaerobacter acetatoxydans (strain DSM 21804 / JCM 16047 / Re1) OX=1209989 GN=TEPIRE1_2421 PE=3 SV=1
MILTRKFKFDAAHNLVEYHGKCEKLHGHTYKLVVKLEGKPGKEDMIMDFSELKHVVESKILQQLDHSYLNDFIKQPSAENIAKWIWDRLYDELSRENCRLYEIQVWETENCGIMYRGE

SEQ ID NO: 26340 - protein, 118 aa, Tepidanaerobacter syntrophicus
  misc_feature (1)..(118): tr|A0A0U9HMP0|A0A0U9HMP0_9THEO 6-carboxy-5,6,7,8-tetrah ydropterin synthase OS=Tepidanaerobacter syntrophicus O X=224999 GN=TSYNT_8148 PE=3 SV=1
MILTRIFKFDAAHNLVEYHGKCERLHGHTYKLVVKLEGKPGKEDMIMDFSELKRIVESTILQQLDHSYLNDFIKQPSAENISRWIWDRLYNELSRENCRLYEIQVWETENCGVTYRGE

SEQ ID NO: 26341 - protein, 143 aa, Tepidibacter formicigenes
  misc_feature (1)..(143): tr|A0A1M6NVI3|A0A1M6NVI3_9FIRM 6-carboxy-5,6,7,8-tetrah ydropterin synthase OS=Tepidibacter formicigenes DSM 15 518 OX=1123349 GN=SAMN02744037_01376 PE=3 SV=1
MYILKAEHSFDSAHFLANYEGKCSNIHGHRWRVIIEVQSENLIDGGQLDGMVIDFGDLKKDVRALADSYDHAFIIQKGTMRKETLECIIEDGFKIVEVEFRPTAENFAAFFFKTMEEKGYNVKRATVYETPTNSATYEKSEVK

SEQ ID NO: 26342 - protein, 143 aa, Tepidibacter thalassicus
  misc_feature (1)..(143): tr|A0A1M5QN30|A0A1M5QN30_9FIRM 6-carboxy-5,6,7,8-tetrah ydropterin synthase OS=Tepidibacter thalassicus DSM 152 85 OX=1123350 GN=SAMN02744040_01039 PE=3 SV=1
MYILKAEHSFDSAHFLANYEGKCSNIHGHRWKVLIEVQSEELVSGGQLDGMVIDFGDLKRDVKAMADFYDHALIIQRGTMRKETLELLVEDGFKIIEVEFRPTAENFAAFFFKCMEEKGYNVKRATVYETPTNCASYERNEVR

SEQ ID NO: 26343 - protein, 121 aa, Tepidicaulis marinus
  misc_feature (1)..(121): tr|A0A081B8Y6|A0A081B8Y6_9RHIZ 6-carboxy-5,6,7,8-tetrah ydropterin synthase OS=Tepidicaulis marinus OX=1333998 GN=M2A_1003 PE=3 SV=1
MRIYKEFTFEAAHYLPSAPPGHPNSRLHGHSFRAVVWLAGTPDPETGLIREFSEFRDALEDARQALDHHCLNEIEGLAAPTLECLTMWIWRRLKNSLPQIARVEVHRDTCKEGCVYEGEAD

SEQ ID NO: 26344 - protein, 147 aa, Tepidiphilus thermophilus
  misc_feature (1)..(147): tr|A0A0K6IWB2|A0A0K6IWB2_9PROT Queuosine biosynthesis p rotein QueD OS=Tepidiphilus thermophilus OX=876478 GN=G a0061068_10755 PE=4 SV=1
MQITRRFEFDAGHRIPNHESRCRHLHGHRYALEVTLIGEPVPEAGRSDEGMVLDFSALKALVHETVVDPWDHAFLVHRDDALVRSLLERIPDHRTVVLDAVPTAENLARIAYELLSERLHLAHGDRLRLRRVRLYETPNCWADYPDD

SEQ ID NO: 26345 - protein, 286 aa, Terasakiispira papahanaumokuakeensis
  misc_feature (1)..(286): tr|A0A1E2V7D0|A0A1E2V7D0_9GAMM Uncharacterized protein OS=Terasakiispira papahanaumokuakeensis OX=197479 GN=BF W38_04420 PE=4 SV=1
MNLFVNAFTHLDASLWCPEHGLTGASWWVDLELQGPQGDDGMILDFGEVKPWTKRAIDAGPDHTLLVPEHAEGVTVQTLPDERLCITTQTPYAMTVTGPAEAFTLLPVDRVTPEVIAQYLMAELNPKLPVPGQLTLALRAEPIEGAELHYSHGLRLHQGNCQRIAHGHRSRLHIWRDGQEAPEVAARLAARWNHAYLYDQADDVSPSLMGEAPSEPLTSLAYTAAQGLFELTLPTHVCHALPVQTTVENLADALAQQLHEIEPGHHWRVCLNEGIDKGACAQRSAS

SEQ ID NO: 26346 - protein, 280 aa, Teredinibacter sp.
  misc_feature (1)..(280): tr|A0A509DZT8|A0A509DZT8_9GAMM Uncharacterized protein OS=Teredinibacter sp. ISS155 OX=2584524 GN=TDB9533_0235 9 PE=4 SV=1
MRLFVDNLTNVDFSYLDAKRGLVGETWLASIELEGSLDAQGMVVDFGIVKKKLRHWLDDILDHRLLVPARSSCLQQKQTAANDSISFEWHLGEQQIVCKSPQQALTFIDAEEINMESVAAWSQQQLAGVFPDTVQNLTLRFSNESIDTPFYHYSHGLKKHKGNCQRIAHGHRSRLNIWLNDQYSDEEVAWWAQNWRDIYIATEEDQCESPNTQNHAFAYEADQGKFYLEVPKNLCYLIDTDSTVELIAHHIAKQLKHKYPDTQVRVQAFEGMGKGAIVEL

SEQ ID NO: 26347 - protein, 278 aa, Teredinibacter turnerae
  misc_feature (1)..(278): tr|C5BR66|C5BR66_TERTT Uncharacterized protein OS=Tered inibacter turnerae (strain ATCC 39867 / T7901) OX=37762 9 GN=TERTU_1152 PE=4 SV=1
MLLFVDQLTNVDFSYLDPERGLVGETWLAGVELEGALDDQGMVCDFGTVKAKSRHWLDDTIDHCLLVPAEHPAIAIVDANGNYEITMTLTSGETLFCKAPKQAITLVKTKHINEASVGEWCVSQLLKLYPASVKSVAVSFVPEVIDGPYYHYSHGLRKHAGNCQRIAHGHRSKLEVKIDGKAAVEVTAKWAELWRDIYIGSTPDLINDSGDQYTFAYTAAQGEFRLSLPKRLCYLIDTDSTVELIASHIVQQIKSRFPENSVSVRAYEGLAKGAVCSL

SEQ ID NO: 26348 - protein, 122 aa, Terrabacter aerolatus
  misc_feature (1)..(122): tr|A0A512D609|A0A512D609_9MICO 6-carboxy-5,6,7,8-tetrah ydropterin synthase OS=Terrabacter aerolatus OX=422442 GN=TAE01_34900 PE=3 SV=1
MTHNSEIYREFTFEAAHRLPNVPEGHKCARLHGHSYLAAVHVAGPVGEETGWVQDFGEIKAAFKPLEEQLDHHFLNEVRGLENPTSEVLAKWIWDRLVVALPNLTEVRVRETCTSGCIYRGE

SEQ ID NO: 26349 - protein, 132 aa, Terrabacter aerolatus
  misc_feature (1)..(132): tr|A0A512D4W9|A0A512D4W9_9MICO Uncharacterized protein OS=Terrabacter aerolatus OX=422442 GN=TAE01_33180 PE=4 SV=1
MFSVTVRDHMMVAHSFTGEVFGPAQRLHGATFVVDVTFRGPELDDDGILVDIGLATQHVHEVVGALGYRNLDDEPAFAGVNTTTEVLARHVAVVVGERVRAGDLGGATDRVTALSVTLHESHVAWATYECDL

SEQ ID NO: 26350 - protein, 131 aa, Terrabacter lapilli
  misc_feature (1)..(131): tr|A0A543N5Z4|A0A543N5Z4_9MICO 6-pyruvoyl-tetrahydropte rin synthase OS=Terrabacter lapilli OX=436231 GN=FHW53_ 1160 PE=4 SV=1
MFSVTVRDHMMVAHSFEGERFGPAQRLHGATFVVDATFCGADLDPDGILLDIGLATEQVHEVVGALSYRNLDEVPDLERNTSTEVLARHIADRLAERVHSGALGTEPGRLSAVLVTLHESHVAWATYERTV

SEQ ID NO: 26351 - protein, 132 aa, Terrabacter sp.
  misc_feature (1)..(132): tr|A0A0Q8YDS9|A0A0Q8YDS9_9MICO 6-pyruvoyl tetrahydropte rin synthase OS=Terrabacter sp. Root85 OX=1736603 GN=AS E25_02535 PE=4 SV=1
MFSVTVRDHMMIAHSFRGEVFGPAQRLHGATFVVDVTFRGPELDDDDILVDIGLATQHVREVVGAFGYRNLDDEPDFAGVNTSTEVLARTIAERVAGRIRAGDLGGATDRVTALAVTLHESHVAWASYECEL

SEQ ID NO: 26352 - protein, 132 aa, Terrabacter sp.
  misc_feature (1)..(132): tr|A0A0Q9T7G4|A0A0Q9T7G4_9MICO 6-pyruvoyl tetrahydropte rin synthase OS=Terrabacter sp. Soil810 OX=1736418 GN=A SG96_19295 PE=4 SV=1
MFSVTVRDHMMIAHSFRGEVFGPAQRLHGATFVVDVTFRGPELDRDDILVDIGLATRHVREVVGALGYRNLDDDPDFAGVNTSTEVLARTVAERVADRVRAGDLGGATDQVTGLVVTLHESHVAWASYECDL

SEQ ID NO: 26353 - protein, 145 aa, Terribacillus aidingensis
  misc_feature (1)..(145): tr|A0A285P548|A0A285P548_9BACI 6-carboxy-5,6,7,8-tetrah ydropterin synthase OS=Terribacillus aidingensis OX=586 416 GN=SAMN05421503_3043 PE=3 SV=1
MIQQIYPQVPHDFSYELNKDLHFAAAHSIQHPDAGKCQQVHGHTYFANITIAGDELDDSGFLFNFSTIKALIHKKFDHTYLNDHTDILKENDFPTTEVMARKIYELIQNELDQLPHQPKCLQVFLRETPTSYCIYRPKRGIENGK

SEQ ID NO: 26354 - protein, 145 aa, Terribacillus goriensis
  misc_feature (1)..(145): tr|A0A075LHV9|A0A075LHV9_9BACI 6-carboxy-5,6,7,8-tetrah ydropterin synthase OS=Terribacillus goriensis OX=38649 0 GN=GZ22_01520 PE=3 SV=1
MIQQIYPQVQHDYSYELNKDLHFAAAHSIQHPDAGKCQQVHGHTYFANVTIAGDELDDSGFLFNFSTIKALIHKKFDHTLLNDHTDVFGKDDFPTTEVMARKIYELIQQELDQLPHQPKCLQVFLRETPTSYCVYRPKRGTKNGK

SEQ ID NO: 26355 - protein, 145 aa, Terribacillus halophilus
  misc_feature (1)..(145): tr|A0A1G6RSL8|A0A1G6RSL8_9BACI 6-carboxy-5,6,7,8-tetrah ydropterin synthase OS=Terribacillus halophilus OX=3612 79 GN=SAMN05421663_106174 PE=3 SV=1
MIQQIYPQVQHDYSYELNKDLHFAAAHSIQHPDAGKCQQVHGHTYFANVTIAGDELDDSGFLFNFSTIKALIHKKFDHTLLNDHTDVFEKNDFPTTEVMARKIYELIQQELDQLPHKPKCLQVFLRETPTSYCVYRPKRGTENGQ

SEQ ID NO: 26356 - protein, 145 aa, Terribacillus saccharophilus
  misc_feature (1)..(145): tr|A0A268A816|A0A268A816_9BACI 6-carboxy-5,6,7,8-tetrah ydropterin synthase OS=Terribacillus saccharophilus OX= 361277 GN=queD PE=3 SV=1
MIQQIYPQVQHDYSYELNKDLHFAAAHSIQHPDAGKCQQVHGHTYFANVTIAGDELDDSGFLFNFSTIKALIHKKFDHTLLNDHTDVFGKDDFPTTEVMARKIYELIQQELDQLPHQPKCLQVFLRETPTSYCVYRPKRGTENGK

SEQ ID NO: 26357 - protein, 145 aa, Terribacillus saccharophilus; identical to SEQ ID NO: 26354
  misc_feature (1)..(145): tr|A0A1H8IPH4|A0A1H8IPH4_9BACI 6-carboxy-5,6,7,8-tetrah ydropterin synthase OS=Terribacillus saccharophilus OX= 361277 GN=SAMN04489762_2612 PE=3 SV=1

SEQ ID NO: 26358 - protein, 145 aa, Terribacillus sp.
  misc_feature (1)..(145): tr|A0A268BMQ5|A0A268BMQ5_9BACI 6-carboxy-5,6,7,8-tetrah ydropterin synthase OS=Terribacillus sp. 7520-G OX=2025 389 GN=queD PE=3 SV=1
MIQQIYPQVQHDYCYELNKDLHFAAAHSIQHPDAGKCQQVHGHTYFANITIAGDELDDSGFLFNFSTIKALIHKKFDHTLLNDHTDVLGKDDFPTTEVMARKIYELIQQELDQLPHKPKCLQVFLRETPTSYCVYRPKRGTENGK

SEQ ID NO: 26359 - protein, 125 aa, Terriglobus albidus
  misc_feature (1)..(125): tr|A0A5B9E5U0|A0A5B9E5U0_9BACT 6-carboxy-5,6,7,8-tetrah ydropterin synthase OS=Terriglobus albidus OX=1592106 G N=queD PE=3 SV=1
MFEITVEATFSSGHYLRNYHGKCENPHGHNYRVLVTLQGKELDESGLLLDFKLLKQVMRPVVNYLDHQMINDLKPFDEVNPSAENLARYFYQETSKQMLEMTNGRVSVKDCVMYETDTSMARYFE

SEQ ID NO: 26360 - protein, 136 aa, Terriglobus albidus
  misc_feature (1)..(136): tr|A0A5B9EH68|A0A5B9EH68_9BACT 6-carboxytetrahydropteri n synthase OS=Terriglobus albidus OX=1592106 GN=FTW19_1 7870 PE=4 SV=1
MVQLTRKAEFSASHFYWVDSWSPEENQRAFGKCANRNGHGHNYTLEVTVQGRVDPVTGFVVDLKELKEILEREVVSVYDHRHLNHEVPEFRTMQPTSENIAIAIWRRLEGKIAGANLVKVRVYEMEDLYADYMGEA

SEQ ID NO: 26361 - protein, 125 aa, Terriglobus roseus
  misc_feature (1)..(125): tr|A0A1G7QGF4|A0A1G7QGF4_9BACT 6-carboxy-5,6,7,8-tetrah ydropterin synthase OS=Terriglobus roseus OX=392734 GN= SAMN05444167_3843 PE=3 SV=1
MYEVTVESHFSSGHYLRDYHGKCENPHGHNYRVLVTLAGEELEPNGLLLDFKILKDILKPVVNYLDHQMINDLEPFTTVNPSAENLAKYFFDETNTRLSDVTKGRVRVKSSTIFETNTSQATYSE

SEQ ID NO: 26362 - protein, 161 aa, Terriglobus roseus
  misc_feature (1)..(161): tr|I3ZH17|I3ZH17_TERRK 6-pyruvoyl-tetrahydropterin synt hase OS=Terriglobus roseus (strain DSM 18391 / NRRL B-4 1598 / KBS 63) OX=926566 GN=Terro_2271 PE=4 SV=1
MPIAHFTRRYRLSASHRLHAPSLNDQQNRDTYGKCNNPYGHGHNYFVEVTVAGPIDPETGFVVDMPKLDALAKRELIDRFDAQHMNADPVFNGDFVPSTENLGIEVERVFRRAVPLLDPTCQLRLHRIRIEETKNNSFDLLAPGQIDALIPHEQHALQPIA

SEQ ID NO: 26363 - protein, 125 aa, Terriglobus saanensis
  misc_feature (1)..(125): tr|E8UYW1|E8UYW1_TERSS 6-carboxy-5,6,7,8-tetrahydropter in synthase OS=Terriglobus saanensis (strain ATCC BAA-1 853 / DSM 23119 / SP1PR4) OX=401053 GN=AciPR4_3574 PE=3 SV=1
MFEVTVEATFSSGHYLRNYRGKCENPHGHNYKVLVTLVGKELDASGLLLDFKLLKQVMRPVVDYLDHQMINDLEPFTTVNPSAENLAKYFFDETSKQLFEMSEGRVSVKQSTIYETDTSMATYYE

SEQ ID NO: 26364 - protein, 148 aa, Terriglobus saanensis
  misc_feature (1)..(148): tr|E8UX09|E8UX09_TERSS Uncharacterized protein OS=Terri globus saanensis (strain ATCC BAA-1853 / DSM 23119 / SP 1PR4) OX=401053 GN=AciPR4_1065 PE=4 SV=1
MTPVVHFSRRYRFSSSHRLHVGTMSEEENYATFGKCNNPFGHGHNYVLEVTVAGSVDAATGMVVDMVALDSLVKEQIVERFDQTHLNIDPLFAGALVPSTENFVIEVEKLLLKSADALGVRLVRVRMEETSNNSFDLLPQEPRDRVVF

SEQ ID NO: 26365 - protein, 92 aa, Terrimicrobium sacchariphilum
  misc_feature (1)..(92): tr|A0A146G7H2|A0A146G7H2_TERSA 6-pyruvoyltetrahydropter in OS=Terrimicrobium sacchariphilum OX=690879 GN=TSACC_ 21229 PE=4 SV=1
MHGHSFKVEIVVEGEVDPHMGWVYDHAEISRAMEPLLDYIDHKYMNELPELENPTIEHIAAWFWRKLTPTLPGLAEIVVHETPTARCIYRGE

SEQ ID NO: 26366 - protein, 137 aa, Terrimonas sp.
  misc_feature (1)..(137): tr|A0A2T7Q581|A0A2T7Q581_9BACT 6-carboxy-5,6,7,8-tetrah ydropterin synthase OS=Terrimonas sp. NS-102 OX=2171976 GN=DC498_19725 PE=3 SV=1
MSKKVAVYRRERFNAAHRLNNPAWDDATNFKVFGKCSNPHYHGHNYELEVKVIGEPAAETGFVMDLKVLSDIIKEEVVERFDHKNLNLDTAEFKNLNPTAENIVVVIYSLLRSRIDAKNDIQVRLYETPRNFVEYPA

SEQ ID NO: 26367 - protein, 136 aa, Terrimonas sp.
  misc_feature (1)..(136): tr|A0A2T7Q576|A0A2T7Q576_9BACT 6-pyruvoyl tetrahydrobio pterin synthase OS=Terrimonas sp. NS-102 OX=2171976 GN= DC498_19715 PE=4 SV=1
MVYLTRIEHFNAAHKLYNEAWSVEKNEEVFGKCANENWHGHNYDLYVTVKGNPDQDTGFIMDVKKLSLLINEFVLEKLDHLNLNEDVDFMKGQFCSTENLAVGIWNQLANRLPAGVQLHCIKLYETPQIYVEYYGE

SEQ ID NO: 26368 - protein, 130 aa, Tersicoccus phoenicis
  misc_feature (1)..(130): tr|A0A1R1L731|A0A1R1L731_9MICC 6-pyruvoyl tetrahydrobio pterin synthase OS=Tersicoccus phoenicis OX=554083 GN=B KD30_13440 PE=4 SV=1
MYRLTVRDHVMIAHSLPDPAFGPAQGLHGATFVVEATFHRVELNEHAIVLDIGVATAALAAVLADLAYRNLDEHPDLAGQLTTTERLARFVADRLAGHLADEMPGHGVTELDVVLREHPDAWAGYTRSLA

SEQ ID NO: 26369 - protein, 130 aa, Tersicoccus sp.
  misc_feature (1)..(130): tr|A0A1R1M331|A0A1R1M331_9MICC 6-pyruvoyl tetrahydrobio pterin synthase OS=Tersicoccus sp. Bi-70 OX=1897634 GN= BGP79_03170 PE=4 SV=1
MYRLTVRDHVMIAHSLPDPAFGPAQGLHGATFVVEATFHRAELTEQAIVLDIGVATAALGAVLADLNYRNLDDHPAFAGRLTTTEHLARFVADRLAEHLARDLPGHGVTELDVVLREHPDAWAGYTRPVD

SEQ ID NO: 26370 - protein, 126 aa, Tessaracoccus sp.
  misc_feature (1)..(126): tr|A0A3M0G5Q9|A0A3M0G5Q9_9ACTN 6-carboxytetrahydropteri n synthase OS=Tessaracoccus sp. JDX10 OX=2479848 GN=EAX 62_10905 PE=4 SV=1
MYSLTVCDHIMIAHSLPDPRFGPAQGMHGATMAVEATWRRHELGPLSIVMDIGEATSMLATVLDALRYENLDEHPDFVGRLSTTETVARHISDKLRERFDESEFAGLQVLLREHPGAWATYDVNFG

SEQ ID NO: 26371 - protein, 141 aa, Testudinibacter aquarius
  misc_feature (1)..(141): tr|A0A4R3Y9Y8|A0A4R3Y9Y8_9PAST 6-carboxy-5,6,7,8-tetrah ydropterin synthase OS=Testudinibacter aquarius OX=1524 974 GN=EDC16_10272 PE=3 SV=1
MFKISKEFSFDMAHMLDGHDGKCKNLHGHTYKLQIELCAPLLTDAAKCGMVMDYSDLKNTVNELIIKPMDHAFIFDQNSAKESKVADLLQELDSKVFALPYRTTAELMAQFIFQRLQQAGLPISAVRLWETPTSFCEYTAS

SEQ ID NO: 26372 - protein, 155 aa, Tetrasphaera japonica
  misc_feature (1)..(155): tr|A0A077LVV4|A0A077LVV4_9MICO Uncharacterized protein OS=Tetrasphaera japonica T1-X7 OX=1194083 GN=BN12_24800 03 PE=4 SV=1
MPHDLLPGGRRIVARARRREEPTMFAMTVRDHMMVAHSLRGEVFGPAQQLHGATFVVDATFRREDLDPSGVVLDIGLASEALRSLLSGLTYRNLDDVAELRGANTTTEVLARHVADRLAEAIDRGDLGDGARGVASIAVTLHESHVAWASYERDV

SEQ ID NO: 26373 - protein, 159 aa, Thalassobacillus cyri
  misc_feature (1)..(159): tr|A0A1H4GWY5|A0A1H4GWY5_9BACI 6-pyruvoyltetrahydropter in/6-carboxytetrahydropterin synthase OS=Thalassobacill us cyri OX=571932 GN=SAMN05421743_11950 PE=4 SV=1
MSLSKYGFTIVENLQKIDEDIKRHQLKYHNKRVMVSKEFTFDAAHHLHCYEGKCKNLHGHTYKVIFGISGYVDDIGIVIDFGDIKKIWKEQIEIHLDHRYLNDTLPAMNTTAENMVVWIYEQMEAALQTKTAGTRVEFVKLYETPTSYAEVKREWMENA

SEQ ID NO: 26374 - protein, 132 aa, Thalassobaculum litoreum
  misc_feature (1)..(132): tr|A0A1G7N4E0|A0A1G7N4E0_9PROT 6-pyruvoyl-tetrahydropte rin synthase OS=Thalassobaculum litoreum DSM 18839 OX=1 123362 GN=SAMN05660686_02075 PE=4 SV=1
MFTVTVRDHVMIAHSFKGDLFGPAQRLHGATYVVDLRINAETLDANGVVVDIGAAHAALSDTLQPWAYRNLDELEEFAGVNTTTEFLAKTAFDRIAAVARSGGLGRPGNELASLEVVFNESHVASAGYRGTL

SEQ ID NO: 26375 - protein, 278 aa, Thalassobium sp.; identical to SEQ ID NO: 23289
  misc_feature (1)..(278): tr|A0A2G2AK91|A0A2G2AK91_9RHOB Uncharacterized protein OS=Thalassobium sp. OX=2030825 GN=COB58_00025 PE=4 SV=1

SEQ ID NO: 26376 - protein, 118 aa, Thalassobius activus
  misc_feature (1)..(118): tr|A0A0P1IRV0|A0A0P1IRV0_9RHOB 6-carboxy-5,6,7,8-tetrah ydropterin synthase OS=Thalassobius activus OX=1715691 GN=queD PE=3 SV=1
MYRIAKEFAFSASHNLTDLPEGHPCKRVHGHNYVVTLELASEELDDTGFIVDVKELNALRDWIDDTLDHRHLNEVFDHPNVTTEWLCKVIFDWCKARWCQTSAVKIQETPKIWAEYRP

SEQ ID NO: 26377 - protein, 136 aa, Thalassobius sp.
  misc_feature (1)..(136): tr|A0A2E9GC37|A0A2E9GC37_9RHOB 6-carboxy-5,6,7,8-tetrah ydropterin synthase OS=Thalassobius sp. OX=1979401 GN=C MO01_29195 PE=3 SV=1
MRLSVYRKEHFNAAHRLHNPNWSDEKNKEVFGLCNNPNFHGHNYDLIVKVTGEVDPETGYVIDLKILKKIIREEVVSKFDHKNLNLDTKEFKELNPTAENIAYVIYNKIRARLEKKFDLNITLYETERNFVEYPAS

SEQ ID NO: 26378 - protein, 139 aa, Thalassobius sp.
  misc_feature (1)..(139): tr|A0A2E9G9G4|A0A2E9G9G4_9RHOB 6-carboxytetrahydropteri n synthase QueD OS=Thalassobius sp. OX=1979401 GN=CMO01 _24590 PE=4 SV=1
MVHICRKEHFNAAHKLYNPNWSRERNEEVFGPCANENWHGHNFELIVTVKGQPDPETGFVIDLKVLGKIIKENIISKVDHKNLNLDVEFMKGKLTSCENLVLEFWKILEYQLSKVSDNAKLHCLELIETNKNSVKYYGE

SEQ ID NO: 26379 - protein, 117 aa, Thalassococcus halodurans
  misc_feature (1)..(117): tr|A0A1H5TKS9|A0A1H5TKS9_9RHOB 6-carboxy-5,6,7,8-tetrah ydropterin synthase OS=Thalassococcus halodurans OX=373 675 GN=SAMN04488045_0657 PE=3 SV=1
MFRISKEFHFSASHQLEHLPADHQCARLHGHNYIVVVELAAAELNEDGFVRDYHELKPLKTYIDDTFDHRHLNDVLDVPSTAENMAKHFFDWCRARWPETSAVKVSETPKTWAEYRP

SEQ ID NO: 26380 - protein, 131 aa, Thalassococcus sp.
  misc_feature (1)..(131): tr|A0A4V0Z9A7|A0A4V0Z9A7_9RHOB Uncharacterized protein OS=Thalassococcus sp. S3 OX=2017482 GN=CFI11_04855 PE=4 SV=1
MFAVEVRDHIMIAHTLPSEVFGPAQGMHGATFTVDAAFFTEDLDAHGLVVDIGLATETLARTLAPLRYKNLDEIPEFKGKFTTTEFLCHHIFTAMSEHVRAGALKDDSRVRRLRISLHESHIARAWYEGDV

SEQ ID NO: 26381 - protein, 278 aa, Thalassolituus oleivorans
  misc_feature (1)..(278): tr|A0A1L6KD86|A0A1L6KD86_9GAMM Uncharacterized protein OS=Thalassolituus oleivorans OX=187493 GN=CN03_08800 PE =4 SV=1
MHLFVDQLTNVDFSYLDPHRGLVGETWWASAVLEGALDEQGMVCDFGIVKKTLRNWLDLELDHRLLVPIRSPALQHCLHDDKITLTWHFGHGQHLTMTAPQQAVALVDAEVINDLTVAEWSITQLSSSFPGSIEQLSLTFENENIHGANYHYSHGLKKHDGNCQRIAHGHRSRIEIFIDGERNPSLEQQWANTWEDIYLGTVEDLSNQTEEHLHFHYHAQQGEFTLSLPKDCCYLMDTDTTVELIAAHLAQEIKRDHPSVEVCVRAFEGVNKGAMVAL

SEQ ID NO: 26382 - protein, 278 aa, Thalassolituus oleivorans; identical to SEQ ID NO: 26381
  misc_feature (1)..(278): tr|W8FX91|W8FX91_9GAMM Uncharacterized protein OS=Thala ssolituus oleivorans R6-15 OX=1208320 GN=R615_08150 PE= 4 SV=1

SEQ ID NO: 26383 - protein, 278 aa, Thalassolituus sp.
  misc_feature (1)..(278): tr|A0A558NM59|A0A558NM59_9GAMM Uncharacterized protein OS=Thalassolituus sp. C2-1 OX=2597518 GN=FOT50_08565 PE =4 SV=1
MQLFVEQLTNVDFSYLDAKRGLVGETWWASAVLDGALDEQGMVCDFGIVKKTLRNWLDDELDHRLLVPVQSPALTLKHSGDIIELSWQYDNGDLLEMRAPRQAVALVDAEHIDANSVAHWCREQLRSHFPVNVEQLTLSFVAEDIDDAFYHYSHGLKKHNGNCQRIAHGHRSRIQIWLDDERSSTLEQQWAERWADIYLGSTEDLISSDNNQLLFRYSAQQGEFELSLPASRNYMMNTDTTVEFIARHLADTIKQQHPDSQVRVRAFEGVNKGAIAEA

SEQ ID NO: 26384 - protein, 303 aa, Thalassomonas actiniarum
  misc_feature (1)..(303): tr|A0A0D8CX59|A0A0D8CX59_9GAMM 6-pyruvoyl tetrahydropte rin synthase OS=Thalassomonas actiniarum OX=485447 GN=S G35_12580 PE=4 SV=1
MQLFVNDLTVIDFSYLCKHRGIVGESWIVDVLLDGDLNEQSMVLDFAIVKKQIKAIIDDAVDHKLLLPNKESRLRVTNSVDNDQHEYVDFDSDVGSYYLQSPKCAFAKIDSEAVTIAAVTAHLQTIIKQQLPGNIQGLTLNLRPEKIDGFYYHYTHGLKKHDGNCQRIAHGHRSKIQLYKNDMRSISLEKNWCQRWQDIYLASEEDRSSFEQIQLSPQAKAALDKETSAQDEKAPGHQYFAYHAPQGRFDIAVPSGILEVVDCDSTVELLADYIARQLKKNSPQDNFKVVAFEGVAKGAIANV

SEQ ID NO: 26385 - protein, 292 aa, Thalassomonas sp.
  misc_feature (1)..(292): tr|A0A553FJV7|A0A553FJV7_9GAMM Uncharacterized protein OS=Thalassomonas sp. M1454 OX=2594477 GN=FNN08_04940 PE =4 SV=1
MQLFVNDLTVIDFSYLCSDRGVVGESWIVDVLLSGDLNAESMVLDFGIVKKQIKAIIDEAVDHKLVLPMQNPDLKVTESHRDNHLFVDFDITDNELYLHSPAQAFAQIDTDKITEESVTRYLEVVIKQQLPENVQGLTLNLRPEKIEGSYYHYTHGLKKHDGNCQRIAHGHRSTINIFENDIRSVELEQKWCKRWQDIYLASDVDSIKLEQVELSIQAKSKLQPDHQFFSYYAPQGRFDIAVRNKRLEVVDCDSTVELLADYIARQLKQENLNNTYKVVAFEGVGKGAIASV

SEQ ID NO: 26386 - protein, 306 aa, Thalassomonas viridans
  misc_feature (1)..(306): tr|A0A0D8DDE4|A0A0D8DDE4_9GAMM 6-pyruvoyl tetrahydropte rin synthase OS=Thalassomonas viridans OX=137584 GN=SG3 4_11455 PE=4 SV=1
MQLFVNDLTVIDFSYLCKQRGIVGESWIVDVLLDGDLNEQSMVLDFAIVKKQIKAIIDDAVDHKLLLPNKEGALRVTDSIDNDGHEYVDFAAVVGSYYLQSPKCAFAKIDSEAITIEAVTAHLQTIIKQQLPGNIQGLTLNLRPEKIDGFYYHYTHGLKKHDGNCQRIAHGHRSKIQLYKNDMRSISLEKNWCKRWQDIYLASEEDRSSFEQIQLSAVAKEKLAEAKATQKASGEKVSGHQYFAYHAPQGRFDIAVPENILEVVDCDSTVELLADYIARQLKKTSPGDNFKVVAYEGVAKGAIANV

SEQ ID NO: 26387 - protein, 118 aa, Thalassospira alkalitolerans
  misc_feature (1)..(118): tr|A0A1Y2L776|A0A1Y2L776_9PROT 6-carboxy-5,6,7,8-tetrah ydropterin synthase OS=Thalassospira alkalitolerans OX= 1293890 GN=TALK_18790 PE=3 SV=1
MFTITKQFAFSASHQLAGLDADHPCSRLHGHNYIVEVELRGASLDARGFVRDYRELGPLKTMIDDVFDHRHLNEVLGHDHPTAERLALFFYDWAHDRWPEVTAVRVSETPKTWAEYRP

SEQ ID NO: 26388 - protein, 118 aa, Thalassospira lohafexi
  misc_feature (1)..(118): tr|A0A2N3L6A5|A0A2N3L6A5_9PROT 6-carboxy-5,6,7,8-tetrah ydropterin synthase OS=Thalassospira lohafexi OX=744227 GN=queD PE=3 SV=1
MFTITKQFAFSASHQLAGLDADHPCSRLHGHNYIVEVELKGATLDARGFVRDYRELGPLKRMIDDEFDHRHLNEVLGHDHPTAEQLALFFYDWAHDRWPEVSAVRVSETPKTWAEYRP

SEQ ID NO: 26389 - protein, 118 aa, Thalassospira lucentensis
  misc_feature (1)..(118): tr|A0A367VUX0|A0A367VUX0_9PROT 6-carboxy-5,6,7,8-tetrah ydropterin synthase OS=Thalassospira lucentensis MCCC 1 A00383 = DSM 14000 OX=1123365 GN=TH1_05450 PE=3 SV=1
MFTITKQFAFSASHQLAGLDADHPCSRLHGHNYIVEVELKDATLDARGFVRDYRELGPLKRMIDDEFDHRHLNEVLGHDHPTAENLALFFYDWAHDRWPEVSAVRVSETPKTWAEYRP

SEQ ID NO: 26390 - protein, 118 aa, Thalassospira lucentensis
  misc_feature (1)..(118): tr|A0A154L365|A0A154L365_9PROT 6-carboxy-5,6,7,8-tetrah ydropterin synthase OS=Thalassospira lucentensis OX=168 935 GN=AUP42_04595 PE=3 SV=1
MFTITKQFAFSASHQLAGLDADHPCARLHGHNYIVEVELRGAELDARGFVRDYRELGPLKKMIDDEFDHRHLNEVLGHDHATAERLALFFYEWAHDRWPEVSAVRVSETPKTWAEYRP

SEQ ID NO: 26391 - protein, 118 aa, Thalassospira marina
  misc_feature (1)..(118): tr|A0A2N3KRK9|A0A2N3KRK9_9PROT 6-carboxy-5,6,7,8-tetrah ydropterin synthase OS=Thalassospira marina OX=2048283 GN=queD PE=3 SV=1
MFRITKQFAFSASHVLGGLSPDHPCSRLHGHNYVVEVELQAETLDSRGFVRDYRELSPLKHLIDDEFDHRHLNDVFGHDHATAENLAKFFYDWAKDRWPEVSAVRVSETPKTWAEYRP

SEQ ID NO: 26392 - protein, 118 aa, Thalassospira mesophila
  misc_feature (1)..(118): tr|A0A1Y2L5D5|A0A1Y2L5D5_9PROT 6-carboxy-5,6,7,8-tetrah ydropterin synthase OS=Thalassospira mesophila OX=12938 91 GN=TMES_07260 PE=3 SV=1
MFRITKQFAFSASHVLGGLSADHPCARLHGHNYIVEVELQAETLDSRGFVRDYRELTPLKRLIDDEFDHRHLNDVLGHDHATAENLAKFFYDWARNRWDEVSAVRVSETPKTWAEYRP

SEQ ID NO: 26393 - protein, 119 aa, Thalassospira permensis
  misc_feature (1)..(119): tr|A0A074K586|A0A074K586_9PROT 6-carboxy-5,6,7,8-tetrah ydropterin synthase OS=Thalassospira permensis NBRC 106 175 OX=1353532 GN=SMB34_19055 PE=3 SV=1
MMFTITKQFAFSASHQLAGLDADHPCSRLHGHNYIVEVELRGAELDARGFVRDYRELAPLKQMIDDEFDHRHLNEVLGHDHATAERLALFFYDWAHDRWPEVSAVRVSETPKTWAEYRP

SEQ ID NO: 26394 - protein, 118 aa, Thalassospira povalilytica
  misc_feature (1)..(118): tr|A0A2N3KEL0|A0A2N3KEL0_9PROT 6-carboxy-5,6,7,8-tetrah ydropterin synthase OS=Thalassospira povalilytica OX=73 2237 GN=queD PE=3 SV=1
MFTITKQFAFSASHQLAGLEADHPCSRLHGHNYIVEVELKGANLDARGFVRDYRELGPLKRLIDDEFDHRHLNEVLGHDHPTAEKLALFFYEWAHDRWPEVSAVRVSETPKTWAEYRP

SEQ ID NO: 26395 - protein, 118 aa, Thalassospira profundimaris
  misc_feature (1)..(118): tr|A0A367VH56|A0A367VH56_9PROT 6-carboxy-5,6,7,8-tetrah ydropterin synthase OS=Thalassospira profundimaris OX=5 02049 GN=TH8_13120 PE=3 SV=1
MFTITKQFAFSASHQLAGLEADHPCSRLHGHNYIVEVELKGANLDARGFVRDYRELGPLKRLIDDEFDHRHLNEVLGHDHPTAEKLALFFYQWAHDRWPEVSAVRVSETPKTWAEYRP

SEQ ID NO: 26396 - protein, 118 aa, Thalassospira profundimaris
  misc_feature (1)..(118): tr|K2LEE1|K2LEE1_9PROT 6-carboxy-5,6,7,8-tetrahydropter in synthase OS=Thalassospira profundimaris WP0211 OX=11 77928 GN=TH2_09914 PE=3 SV=1
MFTITKQFAFSASHQLSGLEEDHPCARLHGHNYIVEVELKGADLDERGFVRDYRELGPLKRLIDDEFDHRHLNEVLGHDHPTAERLALFFYEWAQGRWPEVSAVRVSETPKTWAEYRP

SEQ ID NO: 26397 - protein, 118 aa, Thalassospira sp.
  misc_feature (1)..(118): tr|A0A419W1Y0|A0A419W1Y0_9PROT 6-carboxy-5,6,7,8-tetrah ydropterin synthase OS=Thalassospira sp. DSM 26710 OX=2 035225 GN=CLY44_3959 PE=3 SV=1
MFTITKQFAFSASHQLSGLEEDHPCARLHGHNYIVEVELKGAALDQRGFVRDYRELGPLKRLIDDEFDHRHLNEVLGHDHPTAERLALFFYEWAHDRWPEVSAVRVSETPKTWAEYRP

SEQ ID NO: 26398 - protein, 118 aa, Thalassospira sp.
  misc_feature (1)..(118): tr|A0A3C0FN32|A0A3C0FN32_9PROT 6-carboxy-5,6,7,8-tetrah ydropterin synthase OS=Thalassospira sp. OX=1912094 GN= queD PE=3 SV=1
MFTITKQFAFSASHQLSGLEEDHPCARLHGHNYIVEVELKGATLDERGFVRDYRELGPLKRLIDDAFDHRHLNEVLGHDHPTAERLALFFYEWAHDRWPEVSAVRVSETPKTWAEYRP

SEQ ID NO: 26399 - protein, 118 aa, Thalassospira xiamenensis
  misc_feature (1)..(118): tr|A0A367WF51|A0A367WF51_9PROT 6-carboxy-5,6,7,8-tetrah ydropterin synthase OS=Thalassospira xiamenensis OX=220 697 GN=TH24_12055 PE=3 SV=1
MFTITKQFAFSASHQLAGLDADHPCARLHGHNYIVEVELRGAELDARGFVRDYRELAPLKQMIDDEFDHRHLNKVLGHDHATAERLALFFYDWAHDRWPEVSAVRVSETPKTWAEYRP

SEQ ID NO: 26400 - protein, 118 aa, Thalassospira xiamenensis
  misc_feature (1)..(118): tr|A0A0B4XRN3|A0A0B4XRN3_9PROT 6-carboxy-5,6,7,8-tetrah ydropterin synthase OS=Thalassospira xiamenensis M-5 = DSM 17429 OX=1123366 GN=TH3_04335 PE=3 SV=1
MFTITKQFAFSASHQLAGLDADHPCARLHGHNYIVEVELRGAELDARGFVRDYRELAPLKKMIDDEFDHRHLNEVLGHDHATAERLALFFYDWAHDRWPEVSAVRVSETPKTWAEYRP

SEQ ID NO: 26401 - protein, 118 aa, Thalassospira xianhensis
  misc_feature (1)..(118): tr|A0A367UCH2|A0A367UCH2_9PROT 6-carboxy-5,6,7,8-tetrah ydropterin synthase OS=Thalassospira xianhensis MCCC 1A 02616 OX=1177929 GN=TH5_10170 PE=3 SV=1
MFTITKQFAFSASHQLAGLDADHPCARLHGHNYIVEVELRGDSLDARGFVRDYSELGPLKKMIDDEFDHRHLNEVLGHDHATAERLALFFYEWAHDRWPEVSAVRVSETPKTWAEYRP

SEQ ID NO: 26402 - protein, 292 aa, Thalassotalea agarivorans
  misc_feature (1)..(292): tr|A0A1I0F387|A0A1I0F387_THASX 6-pyruvoyl tetrahydropte rin synthase OS=Thalassotalea agarivorans OX=349064 GN= SAMN05660429_02028 PE=4 SV=1
MQLFVDDLTVIDFSYLCQQRGVVGESWIVDVVLDGDLNDQSMILDFGVVKKQIKAIIDDAVDHKLLLPIHSSALKVSDSTHQVDHEYVDFMATRGSLFLQSPKQAFAKIESKSIDIDSVTSHLTQVIAEQLPNNVQGLTLTLRPEVINSDYYHYTHGLKLHDGNCQRIAHGHRSKIGIYLNGQRSIDAEHAWCERWRDIYIASEEDQVDIDQIELSSYAMDNVSDQHKYFSYRAPQGRFDIAVMKNQLEIVDCDSTVELLADFIARTLNKQYKQEVKVVAYEGVAKGAIATV

SEQ ID NO: 26403 - protein, 293 aa, Thalassotalea euphylliae
  misc_feature (1)..(293): tr|A0A3E0TYL0|A0A3E0TYL0_9GAMM Uncharacterized protein OS=Thalassotalea euphylliae OX=1655234 GN=DXX94_01725 P E=4 SV=1
MQLFVNDLTVIDFSYLCEQRGIVGESWIVDVLLDGDLNEMSMVLDFGVVKKQIKAIIDDAVDHKLLLPTGSKMLRVTDSDVREGHEFVDFTSNRASYFLQSPICAFAKLECQAITIEAVTEHLIEVIQKQLPDNVKGLSINLRPEVIPSEFYHYTHGLKKHDGNCQRIAHGHRSKINLFKNEQADTELEAYWCERWRDIYLASIEDKVIKEEIELSAFAHDNLQPDHQYFAYMAPQGRFDIAVQEHVLEVVDCDSTVELLADYIGRQLKAEHPNDTIKVVAYEGVGKGAIASV

SEQ ID NO: 26404 - protein, 293 aa, Thalassotalea euphylliae
  misc_feature (1)..(293): tr|A0A3E0TQS7|A0A3E0TQS7_9GAMM Uncharacterized protein OS=Thalassotalea euphylliae OX=1655234 GN=DXX93_10175 P E=4 SV=1
MQLFVNDLTVIDFSYLCEQRGIVGESWIVDVLLDGDLNEMSMVLDFGVVKKQIKAIIDDAVDHKLLLPIGSEKLHVTNSDSREGHEFVDFICERASYFLQSPECAFAKLDCNAITIEAVTEHLIEVIQKQLPDNVKGLSINLRPEVIPSDFYHYTHGLKKHDGNCQRIAHGHRSKINLFKNDQADTELEAYWCERWRDIYLASIEDKVSKQEIELSAFAHDNLQPEHQYFAYMAPQGRFDIAVQEHVLEVVDCDSTVELLADYIGRQLKAEHPNDTIKVVAYEGVGKGAIANV

SEQ ID NO: 26405 - protein, 292 aa, Thalassotalea sp.
  misc_feature (1)..(292): tr|A0A516HGS4|A0A516HGS4_9GAMM Uncharacterized protein OS=Thalassotalea sp. PS06 OX=2594005 GN=FNC98_08265 PE= 4 SV=1
MQLFVNDLTVIDFSYLCKDRGVVGESWIVDVILSGDLNAESMVLDFGIVKKQIKAIIDDAVDHKLLLPKDDNKLFVEQSDRDNHLYVDFYPQGMSSIHLQSPHCAFAQIPGDKVNEEGVTRYLVEVIKAQLPENVTGIELTLRPEAIDGFYYHYTHGLKKHDGNCQRIAHGHRSKINLFENDIRSLSLEKQWCNRWQDIYLATDSDAITQQQVELSKRGKQDLSDQHQCFSYYAPQGRFDIAIKDKLEVVDCDSTVELLADYIARQLKAENPENRYKVVAFEGVGKGAIGYV

SEQ ID NO: 26406 - protein, 292 aa, Thalassotalea sp.
  misc_feature (1)..(292): tr|A0A4U1B5G2|A0A4U1B5G2_9GAMM Uncharacterized protein OS=Thalassotalea sp. ZS-4 OX=2572245 GN=E8M12_10390 PE= 4 SV=1
MQLFVNDLTVIDFSYLCRDRGVVGESWIVDVILSGDLNAESMVLDFGIVKKQIKAIIDDAVDHKLLLPVADNHLIISDSERDNHVYVDFYPQQLASIHLQSPQCAFAEIPDEQITESAVTRYLQAVIKAQLPENVKGIELTLRPEAIDGFYYHYTHGLKKHDGNCQRIAHGHRSKINLYENNIRSLSLEKQWCNRWQDIYLATDSDAISQQQVELSKRGLQDLTADHQCFSYYAPQGRFDIAIKDNLEVVDCDSTVELLADYIARQLKAERPDNDYKVVAFEGVGKGAIGNV

SEQ ID NO: 26407 - protein, 147 aa, Thauera aminoaromatica
  misc_feature (1)..(147): tr|A0A5C7T472|A0A5C7T472_9RHOO 6-carboxytetrahydropteri n synthase QueD OS=Thauera aminoaromatica OX=164330 GN= queD PE=4 SV=1
MRITRRLEFDAGHRIPDHASQCRHLHGHRYALEVTLSGDIIKADGVPVNGMVMDFADVKRIANEYVVGPWDHAFLAYRGDHLVLDLLAAIPGHKTVVLDVVPTAENLAAEAFRILDPAYRDTYGNHLRLERVRLYETPNCWADALRD

SEQ ID NO: 26408 - protein, 150 aa, Thauera aminoaromatica
  misc_feature (1)..(150): tr|A0A5C7S936|A0A5C7S936_9RHOO 6-carboxytetrahydropteri n synthase QueD OS=Thauera aminoaromatica OX=164330 GN= queD PE=4 SV=1
MRITRRLEFDAGHRIPDHASQCRHLHGHRYALEITLSGETIRRDGSPVNGMVMDFGDVKAIAKQQVVDVWDHAFLAYRGDIAVVAFLQSMPGHKTVILDVVPTAENLAAEAFRILDPAYRDIYGNHLRLERVRLFETPNCWADAVRAEQA

SEQ ID NO: 26409 - protein, 147 aa, Thauera aromatica
  misc_feature (1)..(147): tr|A0A2R4BLE5|A0A2R4BLE5_THAAR 6-carboxy-5,6,7,8-tetrah ydropterin synthase OS=Thauera aromatica K172 OX=44139 GN=Tharo_1085 PE=3 SV=1
MRITRRLEFDAGHRIPDHASQCRHLHGHRYALEVTLSGEIIEADGLPVNGMVMDFADVKRIANALVVERWDHAFLVYRQDCKVLDFLASLPGHKTVVLDVVPTAENLAAEAFRILDPAYHDSYGNHLRLERVRLYETPNCWADALRS

SEQ ID NO: 26410 - protein, 147 aa, Thauera chlorobenzoica
  misc_feature (1)..(147): tr|A0A1H5VTM0|A0A1H5VTM0_9RHOO 6-carboxy-5,6,7,8-tetrah ydropterin synthase OS=Thauera chlorobenzoica OX=96773 GN=Tchl_1049 PE=3 SV=1
MRITRRLEFDAGHRIPDHASQCRHLHGHRYALEITLSGEIIDADGLPVNGMVMDFADVKRIANALVVERWDHAFLVYRQDRKVLDFLASLPGHKTVVLDVVPTAENLAAEAFRILDPAYRDSYGNHLRLERVRLYETPNCWADALHG

SEQ ID NO: 26411 - protein, 132 aa, Thauera humireducens
  misc_feature (1)..(132): tr|A0A127K418|A0A127K418_9RHOO 6-pyruvoyl tetrahydropte rin synthase OS=Thauera humireducens OX=1134435 GN=AC73 1_006930 PE=4 SV=1
MYSLTVRDHIMIAHSFRGEIFGLAQRVHGATYLIDATFQRTELDADGLVVDIGLANDTLRAVLAEFNFRNLDDEPAFAGRNTTTEFMARVVFDRLAAAIRDGRLGEGGRGLERLKVTLHESHIAWASYEGAL

SEQ ID NO: 26412 - protein, 147 aa, Thauera humireducens
  misc_feature (1)..(147): tr|A0A127K557|A0A127K557_9RHOO 6-carboxy-5,6,7,8-tetrah ydropterin synthase OS=Thauera humireducens OX=1134435 GN=AC731_009075 PE=3 SV=1
MRITRRLEFDAGHRIPDHASQCRHLHGHRYAIEVTLSGEIIKADGLPVNGMVMDFADVKRIANECVVERWDHAFLVYRGDTQIMSLLSAIPDHKTVVLDVVPTAENLAAEAFRILDPAYRDTYGNHLRLERVRLYETPNCWADAVRA

SEQ ID NO: 26413 - protein, 147 aa, Thauera linaloolentis
  misc_feature (1)..(147): tr|N6Z0R1|N6Z0R1_9RHOO 6-carboxy-5,6,7,8-tetrahydropter in synthase OS=Thauera linaloolentis 47Lol = DSM 12138 OX=1123367 GN=C666_09855 PE=3 SV=1
MRITRRLEFDAGHRIPDHASQCRHLHGHRYAIEVTLSGEIIEADGLPVNGMVMDFADVKRIANDFVVARWDHAFLVYRGDTQVMALLDAIPGHKTVVLDVVPTAENLAAEAFRILDPAYRDTYGNHLRLERVRLYETPNCWADAIRG

SEQ ID NO: 26414 - protein, 147 aa, Thauera phenylacetica
  misc_feature (1)..(147): tr|N6ZMQ4|N6ZMQ4_9RHOO Uncharacterized protein OS=Thaue ra phenylacetica B4P OX=1234382 GN=C667_18100 PE=4 SV=1
MRITRRLEFDAGHRIPDHASQCRHLHGHRYALEVTLSGDIIKADGVPVNGMVMDFADVKRIANEYVVGPWDHAFLAYRGDHLVLDMLAAIPGHKTVVLDVVPTAENLAAEAFRILDPAYRDTYGNHLRLERVRLYETPNCWADALRD

SEQ ID NO: 26415 - protein, 132 aa, Thauera phenylacetica
  misc_feature (1)..(132): tr|N6ZDB9|N6ZDB9_9RHOO Uncharacterized protein OS=Thaue ra phenylacetica B4P OX=1234382 GN=C667_22139 PE=4 SV=1
MYSLSVREHIMIAHSFRGEIFGPAQRVHGATYLVDACFQRGELDADGLVVDIGLAAETLKAVLAEFNFRNLDELEEFRGRNTTTEFMARVIFDRLAAAIRAGRLGPGARGLERLKVSLHESHVAWASYEGAL

SEQ ID NO: 26416 - protein, 132 aa, Thauera propionica
  misc_feature (1)..(132): tr|A0A235F0L1|A0A235F0L1_9RHOO Uncharacterized protein OS=Thauera propionica OX=2019431 GN=CGK74_08425 PE=4 SV =1
MYALTVRDHIMIAHSFRGEIFGPAQRVHGATYLIDATFQRTELDADGLVVDIGLASDTLRSVLAEFNFRNLDDEPAFTGRNTTTEFMARVVFDRLAAAIRDGRLGEGGRGLERLKVTLHESHIAWASYEGAL

SEQ ID NO: 26417 - protein, 147 aa, Thauera propionica
  misc_feature (1)..(147): tr|A0A235EXU5|A0A235EXU5_9RHOO 6-carboxy-5,6,7,8-tetrah ydropterin synthase OS=Thauera propionica OX=2019431 GN =queD PE=3 SV=1
MRITRRLEFDAGHRIPDHASQCRHLHGHRYAIEVTLSGEIIKADGLAVNGMVMDFADVKRIANELVVSQWDHAFLVYRDDTLVADFLAAVPGHKTVVLDVVPTAENLAAEAFRILDPAYRDTYGNHLRLERVRLYETPNCWADAVRA

SEQ ID NO: 26418 - protein, 132 aa, Thauera sp.
  misc_feature (1)..(132): tr|A0A0C3IZ35|A0A0C3IZ35_9RHOO Uncharacterized protein OS=Thauera sp. SWB20 OX=1572758 GN=PO78_2359 PE=4 SV=1
MYSLTVREHIMIAHSFRGEIFGPAQRVHGATYLVDACFQRSELDADGLVVDIGLAAATLKAVLAEFNFRNLDELEEFRGRNTTTEFMARVIFDRLAATIRAGRLGPGAQGLERLKVSLHESHVAWASYEGAL

SEQ ID NO: 26419 - protein, 147 aa, Thauera sp.
  misc_feature (1)..(147): tr|A0A290ZJM8|A0A290ZJM8_9RHOO 6-carboxy-5,6,7,8-tetrah ydropterin synthase OS=Thauera sp. K11 OX=2005884 GN=qu eD PE=3 SV=1
MRITRRLEFDAGHRIPDHASQCRHLHGHRYAIEVTLSGEIIKADGLPVNGMVMDFADVKRIANELVVSQWDHAFLVYRGDTLVADFLASVPGHKTVVLDVVPTAENLAAEAFRILDPAYRDTYGNHLRLERVRLYETPNCWADAVRG

SEQ ID NO: 26420 - protein, 132 aa, Thauera terpenica
  misc_feature (1)..(132): tr|S9ZAF6|S9ZAF6_9RHOO 6-pyruvoyl tetrahydropterin synt hase OS=Thauera terpenica 58Eu OX=1348657 GN=M622_06545 PE=4 SV=1
MYALTVRDHIMIAHSFKGEVFGPAQRLHGATYLIDACFKRSELDADALVVDIGLASEALRSVLAGLNFRNLDDEPAFAGKNTTTEFMARVIFEHMAAAIKDGRLGEGGRGLEYLQVTLHESHIAWASYEGAL

SEQ ID NO: 26421 - protein, 147 aa, Thauera terpenica
  misc_feature (1)..(147): tr|T0B230|T0B230_9RHOO 6-carboxy-5,6,7,8-tetrahydropter in synthase OS=Thauera terpenica 58Eu OX=1348657 GN=M62 2_10125 PE=3 SV=1
MRITRRLELDAGHRIPDHASQCRHLHGHRYAIEVTLSGEIIKADGLPVNGMVMDFADVKRIANEFVVERWDHAFLVYRGDTTVMSLLEAIPGHKTVVLDVVPTAENLAAEAFRILDSAYHDVYANHLRLERVRLYETPNCWADATRA

SEQ ID NO: 26422 - protein, 123 aa, Thermanaeromonas toyohensis
  misc_feature (1)..(123): tr|A0A1W1VEG9|A0A1W1VEG9_9THEO 6-carboxy-5,6,7,8-tetrah ydropterin synthase OS=Thermanaeromonas toyohensis ToBE OX=698762 GN=SAMN00808754_0510 PE=3 SV=1
MVAVTHIFTFEAAHRLEGYNGDCARLHGHTYRLEVTVKGPVKADGMVIDFSQLKALVEERIIQRIDHQYLNELFPFNPTCENLLLHFWRELEEALKILPHLTLKRLVLWESPFAYAEMEDDKG

SEQ ID NO: 26423 - protein, 125 aa, Thermanaerothrix daxensis
  misc_feature (1)..(125): tr|A0A0P6XU88|A0A0P6XU88_9CHLR 6-pyruvoyl tetrahydropte rin synthase OS=Thermanaerothrix daxensis OX=869279 GN= SE15_10830 PE=4 SV=1
MYRVAVSRSFIAQHFLIGGDWGAENLPHAHAYRVEVEVSGEQLDANFYLMDIVALEAALESQVARYRNRLLNDLPEFAGVNPSLEFFARLLCENIAHSLPAAGLSHLRVRLWEHENAWASYEMAL

SEQ ID NO: 26424 - protein, 121 aa, Thermanaerovibrio acidaminovorans
  misc_feature (1)..(121): tr|D1B660|D1B660_THEAS 6-carboxy-5,6,7,8-tetrahydropter in synthase OS=Thermanaerovibrio acidaminovorans (strai n ATCC 49978 / DSM 6589 / Su883) OX=525903 GN=Taci_1270 PE=3 SV=1
MKLKRRFSFSAAHWLPRYKGRCEALHGHTYSFVITLEGSPDPEGMIMDFTELKGLVEEMVLSRLDHSCLNDLLEQPTAEALSRWIFEALADRLEAPNRRLESVEVFESPDCSALFLREDRR

SEQ ID NO: 26425 - protein, 121 aa, Thermanaerovibrio velox
  misc_feature (1)..(121): tr|H0UQ26|H0UQ26_9BACT 6-carboxy-5,6,7,8-tetrahydropter in synthase OS=Thermanaerovibrio velox DSM 12556 OX=926 567 GN=TheveDRAFT_0494 PE=3 SV=1
MILKRSFSFDAAHHLPRYKGRCEALHGHTYRFTVALQGSPDHEGMVMDFTELKALVRELVVSRLDHTCLNDLIEQPTAENIARWIFQTLAEPLKAPGRSLAWVEVFEGPESSAVFMAEDLR

SEQ ID NO: 26426 - protein, 135 aa, Thermoactinomyces sp.
  misc_feature (1)..(135): tr|A0A151YXQ2|A0A151YXQ2_9BACL 6-pyruvoyl tetrahydrobio pterin synthase OS=Thermoactinomyces sp. AS95 OX=181138 6 GN=AYX07_10785 PE=4 SV=1
MRGKYTMVKHFWISCAHSIPGAGKCERIHGHNYKVTFCVEGFELDEKHMLIDFRQVKHAIEKKYDHHYLNDFPEFDPEQTGVAPSTEKVAEVFFRIIEGLCRQKSNQPRCKWVEVEETNEAYARFERVDEQEEKS

SEQ ID NO: 26427 - protein, 128 aa, Thermoactinomyces sp.
  misc_feature (1)..(128): tr|A0A1K1W8T9|A0A1K1W8T9_9BACL 6-carboxy-5,6,7,8-tetrah ydropterin synthase OS=Thermoactinomyces sp. DSM 45891 OX=1761907 GN=SAMN04487866_10532 PE=3 SV=1
MHGKYTLTKYFWISCAHSVPGAGKCERIHGHNYKVTFCVDGTKLDESQMLIDFRQVKHVIEKKYDHHLLNDFPEFNPEVGGAAPSTEKVAEIFFCAIEQLCEKKSNQPILRWVEVQETNEAFARFERA

SEQ ID NO: 26428 - protein, 128 aa, Thermoactinomyces vulgaris; identical to SEQ ID NO: 21572
  misc_feature (1)..(128): tr|A0A0N0Y9T9|A0A0N0Y9T9_THEVU 6-carboxy-5,6,7,8-tetrah ydropterin synthase OS=Thermoactinomyces vulgaris OX=20 26 GN=ADL26_14995 PE=3 SV=1

SEQ ID NO: 26429 - protein, 122 aa, Thermoanaerobacter brockii
  misc_feature (1)..(122): tr|E8UUL1|E8UUL1_THEBF 6-carboxy-5,6,7,8-tetrahydropter in synthase OS=Thermoanaerobacter brockii subsp. finnii (strain ATCC 43586 / DSM 3389 / AKO-1) OX=509193 GN=Th ebr_0332 PE=3 SV=1
MKVTKIFTFDSAHNLINYNGKCEELHGHTYKLEVTVEGKPDGEGMVIDFVKLKEIVNEKVVKKLDHKYLNEVLGFNTTCENILLWIWKELEPVFKGDNYHLYKLRLWETPTSFAEITEKDLV

SEQ ID NO: 26430 - protein, 122 aa, Thermoanaerobacter ethanolicus; identical to SEQ ID NO: 18601
  misc_feature (1)..(122): tr|C7ISM1|C7ISM1_THEET 6-carboxy-5,6,7,8-tetrahydropter in synthase OS=Thermoanaerobacter ethanolicus CCSD1 OX= 589861 GN=TeCCSD1DRAFT_1282 PE=3 SV=1

SEQ ID NO: 26431 - protein, 122 aa, Thermoanaerobacter italicus
  misc_feature (1)..(122): tr|D3T4X6|D3T4X6_THEIA 6-carboxy-5,6,7,8-tetrahydropter in synthase OS=Thermoanaerobacter italicus (strain DSM 9252 / Ab9) OX=580331 GN=Thit_2036 PE=3 SV=1
MKVTKIFTFDSAHNLVNYNGKCEELHGHTYKLEVTVEGKPDGEGMVIDFVKLKEIVNEKVVKKLDHKYLNEVLGFNTTCENILLWMWKELEAVLKGDNYHLYKLRLWETPTSFTEITKKDLV

SEQ ID NO: 26432 - protein, 121 aa, Thermoanaerobacter kivui
  misc_feature (1)..(121): tr|A0A097ATU7|A0A097ATU7_THEKI 6-carboxy-5,6,7,8-tetrah ydropterin synthase OS=Thermoanaerobacter kivui OX=2325 GN=TKV_c21090 PE=3 SV=1
MKVTKIFTFDSAHNLVNYNGKCEELHGHTYKLEVTVEGKPDEEGMVIDFVKLKEIVSEKVIKRLDHKYLNEVFEFNTTCENILLWMWNELKDVLTEDRYRLYKLKLWETSTSFAEITEEDL

SEQ ID NO: 26433 - protein, 122 aa, Thermoanaerobacter mathranii
  misc_feature (1)..(122): tr|D7ASB0|D7ASB0_THEM3 6-carboxy-5,6,7,8-tetrahydropter in synthase OS=Thermoanaerobacter mathranii subsp. math ranii (strain DSM 11426 / CIP 108742 / A3) OX=583358 GN =Tmath_1993 PE=3 SV=1
MKVTKIFTFDSAHNLLNYNGKCEELHGHTYKLEVTVEGKPDGEGMVIDFVKLKEIVNEKVVKKLDHKYLNEVLGFNTTCENILLWIWKELEPVFKGDNYHLYKLRLWETPTSFAEITEKDLV

SEQ ID NO: 26434 - protein, 122 aa, Thermoanaerobacter pseudethanolicus; identical to SEQ ID NO: 26429
  misc_feature (1)..(122): tr|B0KCE8|B0KCE8_THEP3 6-carboxy-5,6,7,8-tetrahydropter in synthase OS=Thermoanaerobacter pseudethanolicus (str ain ATCC 33223 / 39E) OX=340099 GN=Teth39_0322 PE=3 SV= 1

SEQ ID NO: 26435 - protein, 122 aa, Thermoanaerobacter siderophilus
  misc_feature (1)..(122): tr|I9KSC1|I9KSC1_9THEO 6-carboxy-5,6,7,8-tetrahydropter in synthase OS=Thermoanaerobacter siderophilus SR4 OX=8 80478 GN=ThesiDRAFT1_0826 PE=3 SV=1
MKVTKIFTFDSAHNLINYNGKCEELHGHTYKLEVTVEGKPDGEGMVIDFVKLKEIVNEKVVKKLDHKYLNEVLGFNTTCENILLWIWKELEPVLKGDNYHLYKLRLWETPTSFAEITEKDFV

SEQ ID NO: 26436 - protein, 122 aa, Thermoanaerobacter sp.
  misc_feature (1)..(122): tr|A0A0B3BBT7|A0A0B3BBT7_9THEO 6-carboxy-5,6,7,8-tetrah ydropterin synthase OS=Thermoanaerobacter sp. YS13 OX=1 511746 GN=THYS13_24060 PE=3 SV=1
MKVTKIFTFDSAHNLINYNGKCEELHGHTYKLEVTVEGKPDGEGMVIDFVKLKEIINEKVVKKLDHKYLNEVLEFNTTCENILLWIWKELEPVLKGDNYHLYKLRLWETPTSFAEITEKDFV

SEQ ID NO: 26437 - protein, 122 aa, Thermoanaerobacter sp.; identical to SEQ ID NO: 18601
  misc_feature (1)..(122): tr|A0A3B8MYZ2|A0A3B8MYZ2_THESB 6-carboxy-5,6,7,8-tetrah ydropterin synthase OS=Thermoanaerobacter sp. OX=1755 G N=queD PE=3 SV=1

SEQ ID NO: 26438 - protein, 122 aa, Thermoanaerobacter thermocopriae; identical to SEQ ID NO: 26429
  misc_feature (1)..(122): tr|A0A117KJS6|A0A117KJS6_9THEO 6-carboxy-5,6,7,8-tetrah ydropterin synthase OS=Thermoanaerobacter thermocopriae OX=29350 GN=XD37_1942 PE=3 SV=1

SEQ ID NO: 26439 - protein, 122 aa, Thermoanaerobacter thermohydrosulfuricus
  misc_feature (1)..(122): tr|A0A1G7KE55|A0A1G7KE55_THETY 6-carboxy-5,6,7,8-tetrah ydropterin synthase OS=Thermoanaerobacter thermohydrosu lfuricus OX=1516 GN=SAMN04244560_00617 PE=3 SV=1
MKVTKIFAFDSAHNLINYNGKCEELHGHTYKLEVTVEGKPDGEGMVIDFVKLKEIVNEKVVKKLDHKYLNEVLGFNTTCENILLWIWKELEPVLKGDNYHLYKLRLWETPTSFAEITEKDFV

SEQ ID NO: 26440 - protein, 122 aa, Thermoanaerobacter thermohydrosulfuricus; identical to SEQ ID NO: 26439
  misc_feature (1)..(122): tr|M8CX45|M8CX45_THETY 6-carboxy-5,6,7,8-tetrahydropter in synthase OS=Thermoanaerobacter thermohydrosulfuricus WC1 OX=1198630 GN=TthWC1_1490 PE=3 SV=1

SEQ ID NO: 26441 - protein, 122 aa, Thermoanaerobacter uzonensis
  misc_feature (1)..(122): tr|A0A1M4YSP6|A0A1M4YSP6_9THEO 6-carboxy-5,6,7,8-tetrah ydropterin synthase OS=Thermoanaerobacter uzonensis DSM 18761 OX=1123369 GN=SAMN02745195_01809 PE=3 SV=1
MKVTKTFTFDSAHNLINYNGKCEELHGHTYKLEVTVEGKPDGEGMIIDFVKLKEIVNEKVVKKLDHKYLNEVLEFNTTCENILLWMWKELEPVLKGDNYYLYKLRLWETPTSFAEITEKDFV

SEQ ID NO: 26442 - protein, 122 aa, Thermoanaerobacter wiegelii
  misc_feature (1)..(122): tr|G2MX31|G2MX31_9THEO 6-carboxy-5,6,7,8-tetrahydropter in synthase OS=Thermoanaerobacter wiegelii Rt8.B1 OX=69 7303 GN=Thewi_2309 PE=3 SV=1
MKVTKIFTFDSAHNLINYNGKCEELHGHTYKLEVTVEGKPDGEGMVIDFVKLKEIVNEKVVKKLDHKYLNEVLEFNTTCENILLWIWKELEPVLKGDNYHLYKLRLWETPTSFAEITEKDFV

SEQ ID NO: 26443 - protein, 123 aa, Thermoanaerobacterium aotearoense
  misc_feature (1)..(123): tr|W9EG28|W9EG28_9FIRM 6-carboxy-5,6,7,8-tetrahydropter in synthase OS=Thermoanaerobacterium aotearoense SCUT27 OX=1421016 GN=V518_1106 PE=3 SV=1
MKVTKSFTFDSAHNLTKYNGKCENLHGHTYKLEVTVEGGIDDEGMVIDFAQLKAIVDSEVVKKLDHAYLNDVLGFNTTCENIAMWMWEKLDPLLKSDRFHLFSIRLWETPTSFAEVTIQDFTK

SEQ ID NO: 26444 - protein, 123 aa, Thermoanaerobacterium saccharolyticum; identical to SEQ ID NO: 26443
  misc_feature (1)..(123): tr|I3VTY1|I3VTY1_THESW 6-carboxy-5,6,7,8-tetrahydropter in synthase OS=Thermoanaerobacterium saccharolyticum (s train DSM 8691 / JW/SL-YS485) OX=1094508 GN=Tsac_0960 P E=3 SV=1

SEQ ID NO: 26445 - protein, 123 aa, Thermoanaerobacterium sp.
  misc_feature (1)..(123): tr|A0A1X2FY28|A0A1X2FY28_9FIRM 6-carboxy-5,6,7,8-tetrah ydropterin synthase OS=Thermoanaerobacterium sp. PSU-2 OX=1930849 GN=BVF91_07035 PE=3 SV=1
MKVTKVFTFDSAHNLTSYNGKCENLHGHTYKLEVTVEGSIDDEGMVIDFAHLKAIVDSEVVKKLDHAYLNEVLGFNTTCENIAVWMWRKLDPLLKSERFHLFSIRLWETPTSFAEVTIQDFIK

SEQ ID NO: 26446 - protein, 125 aa, Thermoanaerobacterium sp.
  misc_feature (1)..(125): tr|A0A285BGJ3|A0A285BGJ3_9FIRM 6-carboxy-5,6,7,8-tetrah ydropterin synthase OS=Thermoanaerobacterium sp. RBIITD OX=1550240 GN=SAMN05660242_1971 PE=3 SV=1
MKVTKIFTFDSAHNLTKYNGKCENLHGHTYKLEVTVEGELDDEGMVIDFEILKDIVNKVIIDKLDHHYLNEVFGFNTTCENIITWMWKELKPELKSERYELYKIKLWETPTSFAEITSNDVYHKD

SEQ ID NO: 26447 - protein, 123 aa, Thermoanaerobacterium thermosaccharolyticum
  misc_feature (1)..(123): tr|D9TRD3|D9TRD3_THETC 6-carboxy-5,6,7,8-tetrahydropter in synthase OS=Thermoanaerobacterium thermosaccharolyti cum (strain ATCC 7956 / DSM 571 / NCIB 9385 / NCA 3814) OX=580327 GN=Tthe_0384 PE=3 SV=1
MKVTKVFTFDSAHNLTKYNGKCENLHGHTYKLEVTVEGSVNDEGIVIDFAELKAIVENQVVKKLDHMYLNDVLGFNTTCENIITWAWKILEPLLRTERYHLYSIKLWETPTNFAEVDIKDFEK

SEQ ID NO: 26448 - protein, 123 aa, Thermoanaerobacterium thermosaccharolyticum
  misc_feature (1)..(123): tr|A0A2G1CM35|A0A2G1CM35_THETR 6-carboxy-5,6,7,8-tetrah ydropterin synthase OS=Thermoanaerobacterium thermosacc harolyticum OX=1517 GN=BFT35_05710 PE=3 SV=1
MKVTKVFTFDSAHNLTKYNGKCENLHGHTYKLEVTVEGSVNNEGIIIDFAELKSIVEDEVVKKLDHMYLNDVLGFNTTCENIITWAWKILEPLLRTERYHLYSIKLWETPTNFAEVDIKDFEK

SEQ ID NO: 26449 - protein, 123 aa, Thermoanaerobacterium xylanolyticum
  misc_feature (1)..(123): tr|F6BGC0|F6BGC0_THEXL 6-carboxy-5,6,7,8-tetrahydropter in synthase OS=Thermoanaerobacterium xylanolyticum (str ain ATCC 49914 / DSM 7097 / LX-11) OX=858215 GN=Thexy_0 282 PE=3 SV=1
MKVTKVFTFDSAHNLTRYNGKCENLHGHTYKLEVTVEGSIDDEGMVIDFAHLKAIVDSEVVKKLDHAYLNEVLGFNTTCENIAIWMWRKLDPLLKDDRFHLFSIRLWETPTSFAEVTIQDFTK

SEQ ID NO: 26450 - protein, 153 aa, Thermoanaerobaculum aquaticum
  misc_feature (1)..(153): tr|A0A062XSK4|A0A062XSK4_9BACT Uncharacterized protein OS=Thermoanaerobaculum aquaticum OX=1312852 GN=EG19_022 25 PE=4 SV=1
MGSFRVAKQFTFDAGHRLVSHPELCRHLHGHTYRVEVVLEAPSLDPNAMVCDYKALSLLVRSVLAPLDHAMILWREDPLRGVLEQAGERVVVLDAEPSAEVLAQHLFSEIKKVLAQAAAEPQRVAPYRWRPEIRLVSVRLWETPTTWAEYSEA

SEQ ID NO: 26451 - protein, 118 aa, Thermobifida halotolerans
  misc_feature (1)..(118): tr|A0A399FYY2|A0A399FYY2_9ACTN 6-carboxy-5,6,7,8-tetrah ydropterin synthase OS=Thermobifida halotolerans OX=483 545 GN=NI17_20285 PE=3 SV=1
MEIFREFGFEAAHRLPRVPEGHKCARLHGHSYRVIVHVDAPVDPESGWVMDFGDIKRAFKPIRDRLDHYYLNELDGLENPTSENLARWIWERLRPVLPALSAVTVRETCTSGCTYQGE

SEQ ID NO: 26452 - protein, 141 aa, Thermobrachium celere
  misc_feature (1)..(141): tr|R7RTM8|R7RTM8_9CLOT 6-carboxy-5,6,7,8-tetrahydropter in synthase OS=Thermobrachium celere DSM 8682 OX=941824 GN=TCEL_00865 PE=3 SV=1
MLSVSKEFTFEAAHMLSEHEGECKNLHGHSYKLIVEATGDIQNGMIIDFKDLKNIVKETIIDKIDHSFIYYNSSKDDVEHKIAEVLKGSGKKIFEVNYRPTAENMAMHFYNILNDNLKDKGLKVVSITLYETQKSFAKVVG

SEQ ID NO: 26453 - protein, 117 aa, Thermobrachium celere
  misc_feature (1)..(117): tr|R7RSN8|R7RSN8_9CLOT 6-carboxy-5,6,7,8-tetrahydropter in synthase OS=Thermobrachium celere DSM 8682 OX=941824 GN=TCEL_00447 PE=3 SV=1
MILIKEFEFDAAHNLIHYHGKCERLHGHTYKLVVKLEGEPDHEGMVFDFVELKKIVKERIIDKFDHAYLNDIIEQPTAENIAVYVWNALYDVLKRDNCRLYEVEVWETKTSGIVYRG

SEQ ID NO: 26454 - protein, 116 aa, Thermocrinis albus
  misc_feature (1)..(116): tr|D3SPE9|D3SPE9_THEAH 6-carboxy-5,6,7,8-tetrahydropter in synthase OS=Thermocrinis albus (strain DSM 14484 / J CM 11386 / HI 11/12) OX=638303 GN=Thal_0401 PE=3 SV=1
MPWRVVVKRQFNAAHFLTDYHGAPEPLHGHTWCVEIHIRADSLDKGGMGVDFVEIDRFLKDILPDYKLLNEVFEFSPSAENVARWLFEKVKERFPTLEKVVVWETENCGAEYWEEE

SEQ ID NO: 26455 - protein, 164 aa, Thermocrinis albus
  misc_feature (1)..(164): tr|D3SNL6|D3SNL6_THEAH Uncharacterized protein OS=Therm ocrinis albus (strain DSM 14484 / JCM 11386 / HI 11/12) OX=638303 GN=Thal_0116 PE=4 SV=1
MRWQISKTFRFEAGHRVWKQNLTYGRGAQFTVTKETPINKCVNLHGHSYLLEVVLGSDYLSEQEMVMDFHHIKSALKDLIETMDHSFIIDVHDPMYPELKELAEKYGSLKIFPVDFCPTAEALAKFFYDFLTERLREAGLLGEVKVVKVTLWETATSKAEYYGE

SEQ ID NO: 26456 - protein, 114 aa, Thermocrinis minervae
  misc_feature (1)..(114): tr|A0A1M6QEW0|A0A1M6QEW0_9AQUI 6-carboxy-5,6,7,8-tetrah ydropterin synthase OS=Thermocrinis minervae OX=381751 GN=SAMN05444391_0209 PE=3 SV=1
MPWLIRVKRKFNAAHYLTNYHGKPEPLHGHTWTVEVFIRADSLDEGGMGYDFVEIDRRLKELLPDYKLLNEVFDFSPSAENVARWLYYKLKQEYPTLEKVVVWETEECGTEFWE

SEQ ID NO: 26457 - protein, 164 aa, Thermocrinis minervae
  misc_feature (1)..(164): tr|A0A1M6RT25|A0A1M6RT25_9AQUI 6-pyruvoyltetrahydropter in/6-carboxytetrahydropterin synthase OS=Thermocrinis m inervae OX=381751 GN=SAMN05444391_0759 PE=4 SV=1
MVKWVISKTFRFEAGHRVWKQNLTMGRGSVFTKEIPQNKCINLHGHSYVLEVYLGSDTLSQQEMVMDFYHLKNALKDLIEEIDHSFIIDVHDPIYPELKAVAEKYGAFKIFPVEFCPTAEALAKFFYDFLKEKLKEAGLLEEVKVVKVVLWETATSKAEYSECT

SEQ ID NO: 26458 - protein, 166 aa, Thermocrinis ruber
  misc_feature (1)..(166): tr|W0DA58|W0DA58_9AQUI 6-carboxy-5,6,7,8-tetrahydropter in synthase OS=Thermocrinis ruber OX=75906 GN=THERU_003 15 PE=4 SV=1
MKWQISKVFRFEAGHRVWKQNLTYGRGADFTIGKEIPVNKCVNLHGHSYVLEVVLGSDTLSEQDMVIDFYHVKNALKELIDTIDHSFIIDKADPMYPELKELAEKYGALKLFPVDFCPTAEALAKFFYDFLEDKLRAVGLLEEVKVIKVVLWETATSKAEYYGNVL

SEQ ID NO: 26459 - protein, 115 aa, Thermocrinis ruber
  misc_feature (1)..(115): tr|W0DG56|W0DG56_9AQUI 6-carboxy-5,6,7,8-tetrahydropter in synthase OS=Thermocrinis ruber OX=75906 GN=THERU_032 90 PE=3 SV=1
MPWLLRVKKKFNAAHFLTNYHGKPEPLHGHTWAVEVFLKVHTLDEGGMGEDFVEISKFLDEILPDYKLLNEVFDFSPSAENVAKWLYERVKERYPTVQKVVVWETEDCGAEYFEV

SEQ ID NO: 26460 - protein, 128 aa, Thermocrispum agreste
  misc_feature (1)..(128): tr|A0A2W4JGL5|A0A2W4JGL5_9PSEU 6-carboxytetrahydropteri n synthase OS=Thermocrispum agreste OX=37925 GN=DIU77_0 9775 PE=4 SV=1
MFTVTVRDHLMIAHSFRGEVFGPAQRLHGATYVVDATFSGPELTEDGILLDIGLAARELSAVVAELNYRNLDDEPAFAGRNTSTEFLAKVIADRLADRIAHLAMPNLTGLKVTLRESHVAWASYERQL

SEQ ID NO: 26461 - protein, 123 aa, Thermodesulfatator autotrophicus
  misc_feature (1)..(123): tr|A0A177E8I4|A0A177E8I4_9BACT 6-carboxy-5,6,7,8-tetrah ydropterin synthase OS=Thermodesulfatator autotrophicus OX=1795632 GN=TH606_02630 PE=3 SV=1
MFELTVRDEFAAAHYLRNYPGACERLHGHNWKVEIAVRGEKLNEIDVLVDFKNLKKHLKEVLEELDHQNLNEHPAFQDQNPSSENIARYIFEKLAPKMASYGVELVRVTVCETERSCASYLKD

SEQ ID NO: 26462 - protein, 123 aa, Thermodesulfatator indicus
  misc_feature (1)..(123): tr|F8ACX9|F8ACX9_THEID 6-carboxy-5,6,7,8-tetrahydropter in synthase OS=Thermodesulfatator indicus (strain DSM 1 5286 / JCM 11887 / CIR29812) OX=667014 GN=Thein_0896 PE =3 SV=1
MFELTVKDEFAAAHYLRDYPGACERLHGHNWKVEIAVRGEKLNEIDVLIDFKDLKKHLKEVLDELDHQNLNEHPAFQDKNPSSENIARYIFEKLAPKLKPYGVELIRVTVCETERACASFVKA

SEQ ID NO: 26463 - protein, 123 aa, Thermodesulfatator sp.
  misc_feature (1)..(123): tr|A0A432UIB3|A0A432UIB3_9BACT 6-carboxy-5,6,7,8-tetrah ydropterin synthase OS=Thermodesulfatator sp. OX=187462 9 GN=queD PE=3 SV=1
MYQVFIKTHFSSAHFLRNYPGNCEKLHGHNWDVEVAVVAHSLDEIDVAIDFRDLKKIVNSVVERLDHKNLNELPEFASRNPSSERLAQFIYKEVKKGLEAFPQVNPHSVKVCETPSSGVIYSE

SEQ ID NO: 26464 - protein, 123 aa, Thermodesulfatator sp.
  misc_feature (1)..(123): tr|A0A432UFT7|A0A432UFT7_9BACT 6-carboxy-5,6,7,8-tetrah ydropterin synthase OS=Thermodesulfatator sp. OX=187462 9 GN=queD PE=3 SV=1
MFELTVREEFSAAHQLRGYAGACEKLHGHNWRVEIRVQGEKLNHIGILLDFKELREVLREVIAELDHRFLNEHPAFRTQNPSSENLARYIYERLAEKLAGYPVRVSRVTVCETERACATYFPD

SEQ ID NO: 26465 - protein, 124 aa, Thermodesulfitimonas autotrophica
  misc_feature (1)..(124): tr|A0A3N5BJ18|A0A3N5BJ18_9THEO 6-carboxy-5,6,7,8-tetrah ydropterin synthase OS=Thermodesulfitimonas autotrophic a OX=1894989 GN=EDD75_0508 PE=3 SV=1
MFELTVETSFAAAHQLEGHPSPCGRLHGHNWVVALTVAGEELAPSGMVVDFKVLKGVLQEVVAELDHRYLNELPFFRNGTPPTAENIARYIFLRATEKLSGQPGVRVRQVRVAESPSAWVVYRP

SEQ ID NO: 26466 - protein, 124 aa, Thermodesulfobacteria bacterium
  misc_feature (1)..(124): tr|A0A496QKL2|A0A496QKL2_9BACT 6-carboxy-5,6,7,8-tetrah ydropterin synthase OS=Thermodesulfobacteria bacterium OX=2202153 GN=queD PE=3 SV=1
MFDIFIRTHFSAAHYLRNYPGNCEHLHGHNWDVEVVVRAEKLNKIDVGIDFRDLKKAVAGVLSELDHTNLNDHPRFKDKNPSSERLAEYIYSRVKEDLKPFSEIELARVSVCETSKTGVTYWED

SEQ ID NO: 26467 - protein, 148 aa, Thermodesulfobacteriales bacterium
  misc_feature (1)..(148): tr|A0A524JW48|A0A524JW48_9BACT 6-carboxytetrahydropteri n synthase OS=Thermodesulfobacteriales bacterium OX=252 8040 GN=E4H21_01435 PE=4 SV=1
MEKVKIKEYVSLTKTYRFSAGHRLFIKSLSDEENFKIFDTCSNPNGHGHDYSIEVKLTGDIDPETGMIYSLEDLDKIMKLVIEDLDHKRLDIEVPYFENDQPTGENIAKYIWNKIKPSLSDKLIHLKLSETSNSYFEYYEEGNYPYER

SEQ ID NO: 26468 - protein, 140 aa, Thermodesulfobacteriales bacterium
  misc_feature (1)..(140): tr|A0A524JUA4|A0A524JUA4_9BACT 6-carboxytetrahydropteri n synthase OS=Thermodesulfobacteriales bacterium OX=252 8040 GN=E4H21_01440 PE=4 SV=1
MGFKKLLTKKMEFSASHRYWNQEWSEEKNIEVFGKSAGPHGHGHNYNLEVTVEGEVDAETGMIINLYELKSVMTEVLVDFDHKHLNEDNPHFKSLVPTTENIARVIWELLEEKLENNPKCSLYRVRLYETQDLYADYWRK

SEQ ID NO: 26469 - protein, 124 aa, Thermodesulfobacterium commune
  misc_feature (1)..(124): tr|A0A075WSP4|A0A075WSP4_9BACT 6-carboxy-5,6,7,8-tetrah ydropterin synthase OS=Thermodesulfobacterium commune D SM 2178 OX=289377 GN=HL41_03300 PE=3 SV=1
MFRLKVQDSFSSAHFLRNYEGPCEKLHGHNWKVEVVVEGERLNELDMLIDFKELKKALKETLKSLDHRLLNDLPYFLEVNPSSERIAQYIFQDLKKKLSLYTNLKIKEVTVFETEKACATYFEP

SEQ ID NO: 26470 - protein, 124 aa, Thermodesulfobacterium commune; identical to SEQ ID NO: 26469
  misc_feature (1)..(124): tr|A0A101FIA3|A0A101FIA3_9BACT 6-carboxy-5,6,7,8-tetrah ydropterin synthase OS=Thermodesulfobacterium commune O X=1741 GN=queD PE=3 SV=1

SEQ ID NO: 26471 - protein, 123 aa, Thermodesulfobacterium geofontis
  misc_feature (1)..(123): tr|A0A2N7PME5|A0A2N7PME5_9BACT 6-carboxy-5,6,7,8-tetrah ydropterin synthase OS=Thermodesulfobacterium geofontis OX=1295609 GN=queD PE=3 SV=1
MFKLKVQDFFSSAHYLKDYHGPCENLHGHNWKVELVVEGSELNSTDILIDFSILKKILKETLAELDHKLLNEIPYFKNTNPSSERLAEYIFKKVKEKLSAYTNVKVKEVTVFETEKASATYYE

SEQ ID NO: 26472 - protein, 123 aa, Thermodesulfobacterium geofontis
  misc_feature (1)..(123): tr|F8C2N0|F8C2N0_THEGP 6-carboxy-5,6,7,8-tetrahydropter in synthase OS=Thermodesulfobacterium geofontis (strain OPF15) OX=795359 GN=TOPB45_1346 PE=3 SV=1
MFKLKVQDYFSSAHYLKDYKGPCEKIHGHNWKVELIVEGSELNSLDILIDFAILKKILKEVLFELDHKLLNEIPYFENINPSSERLAEYIFKKVKEKLSSYPNVKVKEVTVFETEKAGATYYE

SEQ ID NO: 26473 - protein, 125 aa, Thermodesulfobium acidiphilum
  misc_feature (1)..(125): tr|A0A2R4W0J2|A0A2R4W0J2_9FIRM 6-carboxy-5,6,7,8-tetrah ydropterin synthase OS=Thermodesulfobium acidiphilum OX =1794699 GN=TDSAC_0877 PE=3 SV=1
MYTLIVEDSFSSAHFLTNNGEIEFEPLHGHTFKVSVEISGNTLDDFGMLIDFRIIKKKLKEILDIFDHKLLNDVVKFSPTSENLSKYIFDEFEKFLENYKGIIVSSVTVWESQTTCAKYKKEVSR

SEQ ID NO: 26474 - protein, 119 aa, Thermodesulfobium acidiphilum
  misc_feature (1)..(119): tr|A0A2R4W245|A0A2R4W245_9FIRM 6-carboxy-5,6,7,8-tetrah ydropterin synthase OS=Thermodesulfobium acidiphilum OX =1794699 GN=TDSAC_1450 PE=3 SV=1
MRIKVYKEFNFSAAHKLVDYNGECANLHGHTYKLGVAVSGSVGENSMVIDFKVLKNIVEERVVSKLDHKYLNDIIHNPTAERVCEWILDELKDYMPESVNLEFIRLWESETSYVEISLK

SEQ ID NO: 26475 - protein, 118 aa, Thermodesulfobium narugense
  misc_feature (1)..(118): tr|M1E713|M1E713_9FIRM 6-carboxy-5,6,7,8-tetrahydropter in synthase OS=Thermodesulfobium narugense DSM 14796 OX =747365 GN=Thena_1469 PE=3 SV=1
MRIKVYKEFSFSAAHKLVDYKGDCANLHGHTYRLGVAVSGPIGENSMVIDFKILKNIVEERIISKLDHKYLNDIIYNPTAEKVCEWILNELKDSVPESVKLEFVRLWESETSYVEISV

SEQ ID NO: 26476 - protein, 125 aa, Thermodesulfobium narugense
  misc_feature (1)..(125): tr|M1E623|M1E623_9FIRM 6-carboxy-5,6,7,8-tetrahydropter in synthase OS=Thermodesulfobium narugense DSM 14796 OX =747365 GN=Thena_0977 PE=3 SV=1
MYTLIVEDSFSSAHFLTRNGEIEFEPLHGHTFKVSVEISGNSLDEFGMLIDFRIIKKKLKEILDTFDHKLLNDVVPFSPTSENLSKYIFDEFEKFLENYRGLNVNSITVWESQTTCAKYQKEVQR

SEQ ID NO: 26477 - protein, 132 aa, Thermodesulforhabdus norvegica
  misc_feature (1)..(132): tr|A0A1I4QSH7|A0A1I4QSH7_9DELT 6-carboxy-5,6,7,8-tetrah ydropterin synthase OS=Thermodesulforhabdus norvegica O X=39841 GN=SAMN05660836_00186 PE=3 SV=1
MEGLYEVKIQAGFAAAHQLRNFRGKCENLHGHNWKVEVVVRGTRLDECGILVDFGELKKATNELLEELDHKLLNDHPCFRDVNPSSEHIARFIFQRLSQKFNGKYRWVHCVSTWESDNACATYYGIRSAGDE

SEQ ID NO: 26478 - protein, 122 aa, Thermodesulfovibrio aggregans
  misc_feature (1)..(122): tr|A0A0U9HWP4|A0A0U9HWP4_9BACT 6-carboxy-5,6,7,8-tetrah ydropterin synthase OS=Thermodesulfovibrio aggregans OX =86166 GN=TAGGR_2350 PE=3 SV=1
MYKLKIITGFDAAHQLRGYKGKCENIHGHNWKVEVEVFAENLNEIGIAIDFKELRKITEDVISELDHSFINQVHPFNEINPSSENIARWIYMSLKDRLSTTPVRLHSVTVWESDYASATYFE

SEQ ID NO: 26479 - protein, 122 aa, Thermodesulfovibrio aggregans
  misc_feature (1)..(122): tr|A0A2J6WNB3|A0A2J6WNB3_9BACT 6-carboxy-5,6,7,8-tetrah ydropterin synthase OS=Thermodesulfovibrio aggregans OX =86166 GN=queD PE=3 SV=1
MYKLKIITGFDAAHQLRGYKGKCENIHGHNWKVEVEVIAENLNEIGIAIDFKELKGITEEIISRLDHSFINQISPFTEINPSSENIARWIYMSLKDKLSKVPVKLYSVTVWESDYASATYFE

SEQ ID NO: 26480 - protein, 122 aa, Thermodesulfovibrio sp.
  misc_feature (1)..(122): tr|A0A1C3FGZ1|A0A1C3FGZ1_9BACT 6-carboxy-5,6,7,8-tetrah ydropterin synthase OS=Thermodesulfovibrio sp. N1 OX=18 71110 GN=THER_0657 PE=3 SV=1
MYKLKIITDFDAAHQLRGYKGKCENIHGHNWKVEIEVIAENLNEIGIAIDFKDLKKISDEVVSELDHTFINEIPPFNQINPSSENIARWIYLNLKSKFEKGPVKLYSVTVWESDNAGATYFE

SEQ ID NO: 26481 - protein, 124 aa, Thermodesulfovibrio sp.
  misc_feature (1)..(124): tr|A0A1G3XV02|A0A1G3XV02_9BACT 6-carboxy-5,6,7,8-tetrah ydropterin synthase OS=Thermodesulfovibrio sp. RBG_19FT _COMBO_42_12 OX=1802373 GN=A2Z47_04950 PE=3 SV=1
MFELMIETDFSAAHQIRGYKGACERLHGHNWKIQVHVVAERLNEIDMVIDFHELKRLTEEVIAPLDHSFLNDIFPFTEKNPSSENIAKWIYDSLRKKINNDNIHLSAVTVWESDGASASYFESD

SEQ ID NO: 26482 - protein, 122 aa, Thermodesulfovibrio yellowstonii
  misc_feature (1)..(122): tr|B5YJJ7|B5YJJ7_THEYD 6-carboxy-5,6,7,8-tetrahydropter in synthase OS=Thermodesulfovibrio yellowstonii (strain ATCC 51303 / DSM 11347 / YP87) OX=289376 GN=THEYE_A056 9 PE=3 SV=1
MYKLKIITGFDAAHQLKGYKGKCENIHGHNWKVEVEVISEKLNEIGIALDFKELKKNVDEVVSQLDHTFINQIPPFTQLNPSSENIARWIYMSLKDKFNTTLVRLYSVTVWESDYASATYME

SEQ ID NO: 26483 - protein, 135 aa, Thermoflavifilum aggregans
  misc_feature (1)..(135): tr|A0A2M9CTC1|A0A2M9CTC1_9BACT 6-carboxy-5,6,7,8-tetrah ydropterin synthase OS=Thermoflavifilum aggregans OX=45 4188 GN=BXY57_0741 PE=3 SV=1
MMYITRRVHFNAAHKLYNPAWSKEKNEEVFGKCANENWHGHNYVLYVTVKGEIDPETGYVTDAKALHELIQRKILDQVDHRNLNLDVPFMKGKICSTENFAKAIWEQLAPEIKQGKLHCVKLYETENIYVEYFGD

SEQ ID NO: 26484 - protein, 151 aa, Thermoflavifilum aggregans
  misc_feature (1)..(151): tr|A0A2M9CU26|A0A2M9CU26_9BACT 6-pyruvoyltetrahydropter in/6-carboxytetrahydropterin synthase OS=Thermoflavifil um aggregans OX=454188 GN=BXY57_0998 PE=4 SV=1
MNRVRVTRVFHFEAAHALYGYDGKCRHIHGHGYELHVTLLGEPLQDPSHPKQGMVMDFGDIKQCIQQHIIEQFDHALLLCRHTPFFELADTLQQHTDRIVWLDYTPTCENLVIDFARRIRSVLPTQVQLHHLTLYETPSSYASWYAEDQPA

SEQ ID NO: 26485 - protein, 134 aa, Thermoflavimicrobium dichotomicum
  misc_feature (1)..(134): tr|A0A1I3RN68|A0A1I3RN68_9BACL 6-carboxy-5,6,7,8-tetrah ydropterin synthase OS=Thermoflavimicrobium dichotomicu m OX=46223 GN=SAMN05421852_110117 PE=3 SV=1
MPGKYTLVKHFWISCAHRVPGAGKCERVHGHNYKITFCVEGTKLDQMQMLIDFRQVKHALEKKYDHHFLNEFPEFDPEQGGSIPSTEKVAEVFYWAIHDLCQAKENKPTLKWVEVQETNEAYARFEWIDEQEGT

SEQ ID NO: 26486 - protein, 130 aa, Thermoflavimicrobium sp.
  misc_feature (1)..(130): tr|A0A364K142|A0A364K142_9BACL 6-carboxy-5,6,7,8-tetrah ydropterin synthase OS=Thermoflavimicrobium sp. FBKL4.0 11 OX=2137476 GN=DL897_16325 PE=3 SV=1
MPGKYTLIKHFWISCAHSVPRAGKCERVHGHNYKVTFCVEGTELDQTQMLIDFRLVKHALEKKYDHHLLNEFPEFNPEQGGSIPSTEKVAEVFYWTIHKLCQTKENKPTLKWIEVQETNEAYARYEWNEE

SEQ ID NO: 26487 - protein, 135 aa, Thermoflexibacter ruber
  misc_feature (1)..(135): tr|A0A1I2JP47|A0A1I2JP47_9BACT 6-carboxy-5,6,7,8-tetrah ydropterin synthase OS=Thermoflexibacter ruber OX=1003 GN=SAMN04488541_10603 PE=3 SV=1
MRVSVFRKEHFNAAHRLHNPQWSEEMNQRVFGKCNNANFHGHNYELVVKVTGEIHPETGYVMDMKVLSDIIKEQVLDRFDHKNLNLDVVEFQKLNPTAENIAVVIWQLLRPHLNQNLDLKITLYETERNFVEFPA

SEQ ID NO: 26488 - protein, 138 aa, Thermoflexibacter ruber
  misc_feature (1)..(138): tr|A0A1I2GHK8|A0A1I2GHK8_9BACT 6-pyruvoyltetrahydropter in/6-carboxytetrahydropterin synthase OS=Thermoflexibac ter ruber OX=1003 GN=SAMN04488541_101871 PE=4 SV=1
MVYVCRKEHFNAAHRLYNPRWSDEKNTEVFGACANKYFHGHNFELIVKVKGMPDPDTACVIDLKVLSKIIKEHIIAKVDHKNLNIEVDFLQDKMPSCETLVVEFWKILEREIAKVSQARLHSITLYETHNNFVEYFGE

SEQ ID NO: 26489 - protein, 164 aa, Thermoflexus hugenholtzii
  misc_feature (1)..(164): tr|A0A2A9HGA1|A0A2A9HGA1_9CHLR 6-pyruvoyltetrahydropter in/6-carboxytetrahydropterin synthase OS=Thermoflexus h ugenholtzii OX=1495650 GN=A9A59_1582 PE=4 SV=1
MGGMHTSRKVTVERNRLRFAAAHMATFSGDCEPLHGHNYDVFIELEGPLTEDAWVWDFSAVKRAARELTELLDHKFLLQRASRHLEIREEPDAWEVSYRGRTYRFPASDVLPLPIPNSTAECIAEWFAARLLEALQLQGATHIRRLTVGIEEMPGQAGWYTLEL

SEQ ID NO: 26490 - protein, 162 aa, Thermoflexus hugenholtzii
  misc_feature (1)..(162): tr|A0A212R5U2|A0A212R5U2_9CHLR 6-pyruvoyltetrahydropter in/6-carboxytetrahydropterin synthase OS=Thermoflexus h ugenholtzii JAD2 OX=877466 GN=SAMN02746019_00013240 PE= 4 SV=1
MDRVQVAQDNLVFCAGHFMIFPQGSEPLHGHNYRVSVALEGELRDDMVMDFVALKRLVKALVEELDHRVLLPAEHPRLRLRIEEDQVEAEVDRKRYVFPLEDVRILPIPNTSAEWLARYLAGRLRARLPEGLRLHALEVEVEESFGQRAIHREVLHAAAAAS

SEQ ID NO: 26491 - protein, 144 aa, Thermogemmatispora argillosa
  misc_feature (1)..(144): tr|A0A455T1K3|A0A455T1K3_9CHLR 6-carboxy-5,6,7,8-tetrah ydropterin synthase OS=Thermogemmatispora argillosa OX= 2045280 GN=KTA_27120 PE=3 SV=1
MATVYLTRRASFSASHRLWSEALSERENWELYGKCANPNGHGHNYTLEVTLRGEPDPRTGMLMNLSELRAIIHREIVDQVDHHHLNYDVPWLRESIPTTENLVIKFWERLEAALPPGLLYEVRLIETDNNSASYRGERHPLTRP

SEQ ID NO: 26492 - protein, 169 aa, Thermogemmatispora argillosa
  misc_feature (1)..(169): tr|A0A455SZX5|A0A455SZX5_9CHLR 6-pyruvoyl tetrahydrobio pterin synthase OS=Thermogemmatispora argillosa OX=2045 280 GN=KTA_08480 PE=4 SV=1
MASASSFKVKVEGGYLQFSAAHFITYGGKCERLHGHNYGVSVEAEGTLNEDQLVFDFTILKRLTREICQRLNHRFLLPMKNPHIELIASADEWEIRFREKRYVFPRADVVELPIDNSTAERLAEYIAQELLEALTPYNTLNVQTLTVGVSEAPTQMAYCHLDLRGHLAG

SEQ ID NO: 26493 - protein, 144 aa, Thermogemmatispora tikiterensis
  misc_feature (1)..(144): tr|A0A328VMA4|A0A328VMA4_9CHLR 6-carboxy-5,6,7,8-tetrah ydropterin synthase OS=Thermogemmatispora tikiterensis OX=1825093 GN=A4R35_12280 PE=3 SV=1
MATVYLTRRASFSASHRLWSEALSERENWELYGKCANPNGHGHNYTLEVTLRGEPDPHTGMLMNLAELREIMHREIVDQVDHRHLNYDVPWLRESIPTTENLVIKFWERLEAALPPGLLYEVRLIETDNNSASYRGERHPLTHP

SEQ ID NO: 26494 - protein, 169 aa, Thermogemmatispora tikiterensis
  misc_feature (1)..(169): tr|A0A328VPL7|A0A328VPL7_9CHLR Uncharacterized protein OS=Thermogemmatispora tikiterensis OX=1825093 GN=A4R35_ 21505 PE=4 SV=1
MASVSSFKVKVEGGYLQFSAAHFITYGGKCERLHGHNYGVTVEAEGTLSEDQLVFDFTILKRLTREICQQLNHRFLLPMKNPHIELIASADEWEIRFGEKRYVLPRAEVVELPIDNSTAERLAEYIAQELLEALTPYNTLNIHTLTVGVSEAPTQIAYCHLDLRRRLPG

SEQ ID NO: 26495 - protein, 170 aa, Thermogutta terrifontis
  misc_feature (1)..(170): tr|A0A286RJ50|A0A286RJ50_9PLAN Queuosine biosynthesis Q ueD, PTPS-I OS=Thermogutta terrifontis OX=1331910 GN=TH TE_3393 PE=4 SV=1
MGEGFEIRIGREAVQFSAAHFLVFGPDSAEAVHGHDFSVEVAVTGNLLDPGWVMDFLVLHRFVQEIVEPLDHKVLLPAKNPWLRLEMLGDELVRASLGKWSWQFPAVHCFLLPVCNVTAELLAQYIGGILKGRIEAELPGSMERLRVEVFETPHYSARWTYVRQEGESRC

SEQ ID NO: 26496 - protein, 133 aa, Thermogutta terrifontis
  misc_feature (1)..(133): tr|A0A286RLJ4|A0A286RLJ4_9PLAN 6-carboxytetrahydropteri n synthase, Queuosine biosynthesis QueD, PTPS-I OS=Ther mogutta terrifontis OX=1331910 GN=THTE_4238 PE=4 SV=1
MYQVLREIDFCYGHRLLNYSGKCRNLHGHNGLLVITFETASLDELGMVLDFTDIKRVVQGWIDENLDHRMILHRQDPVVPVLQEMGEPLFLMDENPTAENIARLIFDYVAQKGLPVVETRLWETPRCAAVYRP

SEQ ID NO: 26497 - protein, 123 aa, Thermohydrogenium kirishiense
  misc_feature (1)..(123): tr|A0A4R4ASQ5|A0A4R4ASQ5_9FIRM 6-carboxy-5,6,7,8-tetrah ydropterin synthase OS=Thermohydrogenium kirishiense OX =937254 GN=EDC21_10191 PE=3 SV=1
MKVTKVFTFDSAHNLTKYNGKCENLHGHTYKLEVTVEGNTNDEGIVVDFAELKSIVENEVVKKLDHMYLNDVLGFNTTCENIIIWMWERLETRLRTERYHLYKIKLWETPTSFAEVDIKDFEK

SEQ ID NO: 26498 - protein, 145 aa, Thermolongibacillus altinsuensis
  misc_feature (1)..(145): tr|A0A4R1QFJ5|A0A4R1QFJ5_9BACI 6-carboxy-5,6,7,8-tetrah ydropterin synthase OS=Thermolongibacillus altinsuensis OX=575256 GN=EDD69_10756 PE=3 SV=1
MIHQIYPQVAHSFQYEINKDMSLAAAHFIPHEAAGKCAHLHGHTYIINITVAGDELDETGFLVNFQQLKRLIHDRFDHTLINDHGELFNEKNSYDFPTAESIARKVCEIVQEHLDTLPNRPKCLQVFVRETPTSYAVYRPKWEKK

SEQ ID NO: 26499 - protein, 117 aa, Thermomonas haemolytica
  misc_feature (1)..(117): tr|A0A4R3N3Z3|A0A4R3N3Z3_9GAMM 6-carboxy-5,6,7,8-tetrah ydropterin synthase OS=Thermomonas haemolytica OX=14194 9 GN=EDC34_10822 PE=3 SV=1
MDIYKTFTLEAAHRLPNVPAGHKCARLHGHSFGIELHVSGEPGAETGWVMDFADLKAAFQPLYEQLDHHYLNDIEGLENPTSERLAVWIWERLKPRVPLLSAVVVRETCTSGCRYSG

SEQ ID NO: 26500 - protein, 171 aa, Thermomonas haemolytica
  misc_feature (1)..(171): tr|A0A4V6P007|A0A4V6P007_9GAMM 6-pyruvoyltetrahydropter in/6-carboxytetrahydropterin synthase OS=Thermomonas ha emolytica OX=141949 GN=EDC34_10572 PE=4 SV=1
MSAQGGTAMQERVTIRLAKQNMKFSAGHFTIFSASERERLHGHNFTVEVDIEARMLGNGMCFDYGLYKDRVVALCRELNEWTILPTRSPYLRIEEDGDHVYAHFDGQRIPFLRGDVLLLPIENATLEEFAGWFLQRLCEDREALRAHAIDAIEVRVLSGPGQSAGRRVRLG

SEQ ID NO: 26501 - protein, 117 aa, Thermomonas hydrothermalis
  misc_feature (1)..(117): tr|A0A1M4SD06|A0A1M4SD06_9GAMM 6-carboxy-5,6,7,8-tetrah ydropterin synthase OS=Thermomonas hydrothermalis OX=21 3588 GN=SAMN02745204_00145 PE=3 SV=1
MDIYKTFTIEAAHRLPNVPVGHKCARLHGHSFRIELHVSGEVGAETGWVMDFADLKAAFRPLYEQLDHHYLNEIPGLENPTSENLAIWIWQRLKPQLPLLSAVVVHETCTSGCRYSG

SEQ ID NO: 26502 - protein, 172 aa, Thermomonas hydrothermalis
  misc_feature (1)..(172): tr|A0A1M4X846|A0A1M4X846_9GAMM 6-pyruvoyltetrahydropter in/6-carboxytetrahydropterin synthase OS=Thermomonas hy drothermalis OX=213588 GN=SAMN02745204_01368 PE=4 SV=1
MSMQRQPDSGEIVMIRLAKQAMKFSAGHFTIFSASERERLHGHNFTVEVDIEARMLGNGMCFDYGLYKDRVIALCRELNEWMLLPTRSPYLRIEEAGEQVLAHFAGQVIPFLRRDVRLLPLENITLEELARWFLERLAEDPQTLREHAVVAIEVRVFSGPGQSAGRRMVMPQ

SEQ ID NO: 26503 - protein, 117 aa, Thermomonas sp.
  misc_feature (1)..(117): tr|A0A5B7ZRL1|A0A5B7ZRL1_9GAMM 6-carboxy-5,6,7,8-tetrah ydropterin synthase OS=Thermomonas sp. SY21 OX=2202149 GN=queD PE=3 SV=1
MDIFKVFTIEAAHRLPNVPAGHKCARLHGHSFRIELRVSGEPGADTGWVMDFADIKAAFKPLYEQLDHHYLNDIEGLDNPTSERLAMWIWARLKPALPLLSEVVVHETCTSGCSYRG

SEQ ID NO: 26504 - protein, 117 aa, Thermomonas sp.
  misc_feature (1)..(117): tr|A0A5C7QZL9|A0A5C7QZL9_9GAMM 6-carboxy-5,6,7,8-tetrah ydropterin synthase OS=Thermomonas sp. OX=1971895 GN=qu eD PE=3 SV=1
MDIFKVFTIEAAHRLPNVPDGHKCARLHGHSFRVELHVSGEPGAETGWVMDFGDIKAAFAPIYAQLDHHYLNEIDGLDNPTSERLAMWIWARLKPALPLLSEVVVHETCTSGCRFRG

SEQ ID NO: 26505 - protein, 132 aa, Thermomonospora curvata
  misc_feature (1)..(132): tr|D1A5Z8|D1A5Z8_THECD Uncharacterized protein OS=Therm omonospora curvata (strain ATCC 19995 / DSM 43183 / JCM 3096 / NBRC 15933 / NCIMB 10081 / Henssen B9) OX=47185 2 GN=Tcur_2746 PE=4 SV=1
MFSVTVRGHFMVAHSFRGEVFGPAQRLHGATFVVDATFRRTELDKDNVVVDIGLATRELNAVLAELNYRNLDDDPDFAGVNTTTEFLAKVIADRLAERVRAGALGEQARGLTGIAVTLHESHVAWASYERAL

SEQ ID NO: 26506 - protein, 149 aa, Thermophagus xiamenensis
  misc_feature (1)..(149): tr|A0A1I2CZJ7|A0A1I2CZJ7_9BACT 6-pyruvoyltetrahydropter in/6-carboxytetrahydropterin synthase OS=Thermophagus x iamenensis OX=385682 GN=SAMN05444380_11762 PE=4 SV=1
MSKIRLTKEFRFEMAHALWNYDGLCKHIHGHSYILQVTVIGQPNDNEKDPKCGMVMDFGDLKKIVKEEIVEKLDHAIVLNQKARNQHLFEIPQMFDKIHFVPYQPTCENLLLDFAQKIQARLPENIALHKLKLNETANSFAEWYASDNL

SEQ ID NO: 26507 - protein, 132 aa, Thermopolyspora flexuosa
  misc_feature (1)..(132): tr|A0A543IYN2|A0A543IYN2_9ACTN 6-pyruvoyl-tetrahydropte rin synthase OS=Thermopolyspora flexuosa OX=103836 GN=F HX40_2398 PE=4 SV=1
MFSVTVRDHVMVAHSFRGEVFGPAQRLHGATFVVDATFRRPELDSDNVVVDIGLASRELKAVLDRINYRNLDDEPEFEGVNTTTEFLARWIADRLAERVHAGALGEQARGLTGITVTLHESHAAWASYEREL

SEQ ID NO: 26508 - protein, 125 aa, Thermosediminibacter oceani
  misc_feature (1)..(125): tr|D9S1R6|D9S1R6_THEOJ 6-carboxy-5,6,7,8-tetrahydropter in synthase OS=Thermosediminibacter oceani (strain ATCC BAA-1034 / DSM 16646 / JW/IW-1228P) OX=555079 GN=Toce_ 0570 PE=3 SV=1
MFLIKEFKFDAAHNLVKYKGKCEKLHGHTYRLVVVLEGTPDAEGMIMDFLELKNIVEENVLKFLDHSYINDYIEQPSAENIAVWVWRRLEERVKRENCRLYEVQVWETATSGAVYRGEALEGRSE

SEQ ID NO: 26509 - protein, 130 aa, Thermosinus carboxydivorans
  misc_feature (1)..(130): tr|A1HNF1|A1HNF1_9FIRM 6-carboxy-5,6,7,8-tetrahydropter in synthase OS=Thermosinus carboxydivorans Nor1 OX=4015 26 GN=TcarDRAFT_2260 PE=3 SV=1
MRQPTVRTTKIFTFDAAHFLPGHEGKCAQMHGHTYRLEVTVERKDGGVATGGPEDGMVIDFGRLSALIKDRVVDKLDHKVLNDCFPFRPTSENMARHIFIELSAILANEDVNVVRVVLWETPTSYVEVTA

SEQ ID NO: 26510 - protein, 120 aa, Thermosipho africanus
  misc_feature (1)..(120): tr|B7IDG1|B7IDG1_THEAB 6-carboxy-5,6,7,8-tetrahydropter in synthase OS=Thermosipho africanus (strain TCF52B) OX =484019 GN=queD PE=3 SV=1
MLLVSKEFTFDAAHNLVKYHGKCEKLHGHTYKLVVTVAGEKDEEGMVIDFLELKRIVQEKVLNRLDHSYINEIIPQPSAENIAEWIWKQLETELHSERYFLYEIKVYETPTSYVTLKKNM

SEQ ID NO: 26511 - protein, 120 aa, Thermosipho africanus
  misc_feature (1)..(120): tr|K2PPB1|K2PPB1_9BACT 6-carboxy-5,6,7,8-tetrahydropter in synthase OS=Thermosipho africanus H17ap60334 OX=1161 912 GN=H17ap60334_05294 PE=3 SV=1
MLLVSKEFTFDAAHNLVKYHGKCEKLHGHTYKLVVTVAGEKDEEGMVIDFLELKRIIKEKVLSRLDHSYINEIIPQPSAENIAEWIWKQLEPELNSERYFLYEIKVYETPTSYVTLKKNM

SEQ ID NO: 26512 - protein, 123 aa, Thermosipho atlanticus
  misc_feature (1)..(123): tr|A0A1M5U6U4|A0A1M5U6U4_9BACT 6-carboxy-5,6,7,8-tetrah ydropterin synthase OS=Thermosipho atlanticus DSM 15807 OX=1123380 GN=SAMN02745199_1650 PE=3 SV=1
MFYVSKEFTFDAAHNLVKYHGKCENLHGHTYKLVVTVAGEKNEEGMVIDFLELKKIVQENVLNILDHAYINKIIKQPSAENIAEWIWEKLSKKLSSDRFFLYEIKLYETPTSYVTLRKDDKHV

SEQ ID NO: 26513 - protein, 120 aa, Thermosipho melanesiensis
  misc_feature (1)..(120): tr|A6LMF6|A6LMF6_THEM4 6-carboxy-5,6,7,8-tetrahydropter in synthase OS=Thermosipho melanesiensis (strain DSM 12 029 / CIP 104789 / BI429) OX=391009 GN=Tmel_1258 PE=3 S V=1
MIFVTKEFTFDAAHNLIKYHGKCEKLHGHTYKLLVTVAGKKDEEGMVIDFLELKKIVKENVLNILDHSYINEIIEQPSAENIAEWIWERLKEKLNTERYFLYEIKLYETPTSYVTLRGSY

SEQ ID NO: 26514 - protein, 122 aa, Thermosipho sp.
  misc_feature (1)..(122): tr|A0A1L7BGE1|A0A1L7BGE1_9BACT 6-carboxy-5,6,7,8-tetrah ydropterin synthase OS=Thermosipho sp. 1063 OX=1462747 GN=BG95_07060 PE=3 SV=1
MLLVTKEFTFDAAHNLVKYHGKCERLHGHTYKLIVTVAGEKDEEGMVIDFIELKNIVKENVLNILDHSYINDIIEQPSAENIAEWIWERLIEKLKTDRYFLYEVKLYETPTSYVTLRRNLDV

SEQ ID NO: 26515 - protein, 151 aa, Thermosporothrix hazakensis
  misc_feature (1)..(151): tr|A0A326U885|A0A326U885_9CHLR 6-pyruvoyltetrahydropter in/6-carboxytetrahydropterin synthase OS=Thermosporothr ix hazakensis OX=644383 GN=EI42_03574 PE=4 SV=1
MPRYAIVTREFTFEAMHHLPGHKGKCRRPHGHSYRLEISLRGPIQEAPGQSSDGMVMDFDDLKSIVNRTIIEELGDSVPRGPAAQPVERGGMDHNDLNALTGIRTTAENLVHWIWDALVAGGVSEDLLYRVRLWETAKGYAEITRAERGLE

SEQ ID NO: 26516 - protein, 138 aa, Thermosporothrix hazakensis
  misc_feature (1)..(138): tr|A0A326UGN9|A0A326UGN9_9CHLR 6-carboxy-5,6,7,8-tetrah ydropterin synthase OS=Thermosporothrix hazakensis OX=6 44383 GN=EI42_03808 PE=3 SV=1
MVFLTRRVTFSAAHRLWSNDLSDEENYAIYDKCANPNGHGHNYTLEVTVQGQPDPKTGMIINLTDLKRIVNEQVVDWVDHKHLNHDVPWLEGVIPTTEMLVIKFWERLESAFPAHMLYEVTLHETENNVATYRGPACE

SEQ ID NO: 26517 - protein, 138 aa, Thermosporothrix sp.; identical to SEQ ID NO: 26516
  misc_feature (1)..(138): tr|A0A455SPX0|A0A455SPX0_9CHLR 6-carboxy-5,6,7,8-tetrah ydropterin synthase OS=Thermosporothrix sp. COM3 OX=249 0863 GN=KTC_42090 PE=3 SV=1

SEQ ID NO: 26518 - protein, 190 aa, Thermosporothrix sp.
  misc_feature (1)..(190): tr|A0A455STT9|A0A455STT9_9CHLR 6-pyruvoyl tetrahydrobio pterin synthase OS=Thermosporothrix sp. COM3 OX=2490863 GN=KTC_58810 PE=4 SV=1
MNGMLKTQSNTFDEPYSKERETEIMAGERIQRKVKIEGGYLKFSSAHFITYGGKCERLHGHNYGVRVEAEGTLNQDRLVFDFTVLKRLTKDICRSLDHRFLLPLQNPHLQLKQTEENWEIVYQEKRYLFPKEDVAELPIDNSTAERLAEYICNELCKQLASFDISNLTSITVGVEEAPTQMAYYSLTLQE

SEQ ID NO: 26519 - protein, 135 aa, Thermostaphylospora chromogena
  misc_feature (1)..(135): tr|A0A1H1HSI1|A0A1H1HSI1_9ACTN 6-pyruvoyl-tetrahydropte rin synthase OS=Thermostaphylospora chromogena OX=35622 GN=SAMN04489764_4743 PE=4 SV=1
MFTVTVRDHLMIAHSFRGEVFGPAQRLHGATYVVDAAFHRPELDADGVVVDIGLAARELGAVLGELNYRNLDEEPAFAGVNTTTEFLAKVIADRLAERIRAGKLGEGARGLTGLTVTLHESHVAWASYECRLQTR

SEQ ID NO: 26520 - protein, 123 aa, Thermosulfidibacter takaii
  misc_feature (1)..(123): tr|A0A0S3QT53|A0A0S3QT53_THET7 6-carboxy-5,6,7,8-tetrah ydropterin synthase OS=Thermosulfidibacter takaii (stra in DSM 17441 / JCM 13301 / NBRC 103674 / ABI70S6) OX=12 98851 GN=queD PE=3 SV=1
MPWLLKIVDSFGAAHFLRNYRGKCENLHGHNWRVELEVFGDKLDKTGLVLDFKLLKRILKEVLDRLDHRLINEIEPFDKINPSSENIARFIFEEVAGKLPEGVKVHSVTVWESDSACAKYFQE

SEQ ID NO: 26521 - protein, 123 aa, Thermosulfurimonas dismutans
  misc_feature (1)..(123): tr|A0A179D398|A0A179D398_9BACT 6-carboxy-5,6,7,8-tetrah ydropterin synthase OS=Thermosulfurimonas dismutans OX= 999894 GN=TDIS_1497 PE=3 SV=1
MFELTVRDEFSAAHQLRGYEGACENLHGHNWKVEVAVRGSQLNEIGILIDFKELKKALKEILSELDHCHLNEHPAFRDLNPSSENLARFIFERLEEKLAGKPVEVFRVTVCETERSCASYFRG

SEQ ID NO: 26522 - protein, 290 aa, Thermosynechococcus elongatus
  misc_feature (1)..(290): tr|A0A3B7MHC8|A0A3B7MHC8_9CYAN 6-carboxytetrahydropteri n synthase OS=Thermosynechococcus elongatus PKUAC-SCTE5 42 OX=2016101 GN=D3A95_00810 PE=4 SV=1
MNCIIHRRAEFAASHRYWLPEWSEGENLARFGASSRFPGHGHNYELFVSMKGVVDDFGMVLNLSDVKHIIRREVIEPLNFSYLNEVWPEFQATLPTTEHIARVIWDRLSPHLPLVRIRLLEHPRLWADYTGDPMEAYLSVGTHFSAAHRLALDDLSYEENCRIYGKCARPHGHGHNYHVEITVKGAIHPRTGMVVDLVKLEEVLKEQVIEPLDHTFLNKDIPYFATVVPTAENIAIYIAQLLQEPIRQLGATLHKVKLIESPNNSCEILCEELPPRDGVLSGALPVLERV

SEQ ID NO: 26523 - protein, 290 aa, Thermosynechococcus elongatus
  misc_feature (1)..(290): tr|Q8DJX5|Q8DJX5_THEEB 6-pyruvoyl-tetrahydropterin synt hase OS=Thermosynechococcus elongatus (strain BP-1) OX= 197221 GN=tll1095 PE=4 SV=1
MNCIIHRRAEFAASHRYWLPEWSEAENLARFGANSRFPGHGHNYELFVSMEGVVDDFGMVLNLSDVKHIIRREVIEPLNFSYLNEVWPEFQATLPTTEHIARVIWDRLFPHLPLVRIRLFEHPRLWADYTGDPMEAYLSVGAHFSAAHRLALEDLSYEENCRIYGKCARPHGHGHNYHVEITVKGSIHPRTGMVVDLVKLEEVLKEQVIEPLDHTFLNKDIPYFATVVPTAENIAIYIAHLLQEPVRQLGATLHRVKLIESPNNSCEILCEELPPRNEVISGALPVLERV

SEQ ID NO: 26524 - protein, 290 aa, Thermosynechococcus sp.
  misc_feature (1)..(290): tr|A0A5C2M983|A0A5C2M983_9CYAN 6-pyruvoyl tetrahydropte rin synthase OS=Thermosynechococcus sp. CL-1 OX=2583530 GN=FFX45_11765 PE=4 SV=1
MNCIIHRRAEFAASHRYWLPEWSEAENLARFGANSRFPGHGHNYELFVSMGGVVDDFGMVLNLSDVKHIIRREVIEPLNFSYLNEVWPEFQATLPTTEHIARVIWDRLSPHLPLVRIQLFEHPRLWADYTGGPMEAYLSVGAHFSAAHRLALEDLSYEENCRIYGKCARPHGHGHNYHVEITVKGAIHPRTGMIVDLIKLEEVLKEQVIEPLDHTFLNKDIPYFATVVPTAENIAIYIAQLLQEPIRQLGATLHKVKLIESPNNSCEILCEELPPRDGVLSGVLPVLERV

SEQ ID NO: 26525 - protein, 290 aa, Thermosynechococcus sp.
  misc_feature (1)..(290): tr|V5V2T2|V5V2T2_9CYAN 6-pyruvoyl tetrahydrobiopterin s ynthase QueD OS=Thermosynechococcus sp. NK55a OX=139488 9 GN=queD PE=4 SV=1
MDCIIHRRAEFAASHRYWLPEWSDVENRARFGGNSYFPGHGHNYELIVSIRGTVDDFGMVLNLSEVKHVIRREVIEPLNFSYLNEVWPEFQATLPTTEHIARVIWDRLFPHLPLVRIRLFEHPRLWADYTGDPMEAYLSVGTHFSAAHRLALQDLSYEENCRIYGKCARPHGHGHNYHVEITVKGSIHPRTGMVVDLVKLEEVLREQVIEPLDHTFLNEDIPYFATVVPTAENIAIYIAQLLQEPIRQLGATLHRVKLIESPNNACEILCEELPPRNEGISAALPVLERA

SEQ ID NO: 26526 - protein, 124 aa, Thermosyntropha lipolytica
  misc_feature (1)..(124): tr|A0A1M5PDF0|A0A1M5PDF0_9FIRM 6-carboxy-5,6,7,8-tetrah ydropterin synthase OS=Thermosyntropha lipolytica DSM 1 1003 OX=1123382 GN=SAMN02745221_01439 PE=3 SV=1
MAYELGIIQEFAAAHRLNNYPGDCSNIHGHTWKVEITVKGNKLDPTGMLIDFRELKRIAASIIKEKYDHRFLNEIEPFDRINPTAENIAREIYYDMKKTLTPVVELEKVKVWESPTAYAVYKEE

SEQ ID NO: 26527 - protein, 159 aa, Thermotalea metallivorans
  misc_feature (1)..(159): tr|A0A140LAA6|A0A140LAA6_9CLOT 6-carboxy-5,6,7,8-tetrah ydropterin synthase OS=Thermotalea metallivorans OX=520 762 GN=queD PE=4 SV=1
MKIAVTKEFTFDCAHMLSNHEGLCANLHGHTYKLQITVQASDFQETNLGSSSSEGMVIDFKELNAIVHDLIISKFDHSFICWENGCEAERELASVAKKYGLRVATLMERPTAENICKHFFKLLRNYFKTKNYSIDIVSARLWETPTSFAEVMDHDVSCC

SEQ ID NO: 26528 - protein, 120 aa, Thermotoga maritima
  misc_feature (1)..(120): tr|R4NP53|R4NP53_THEMA 6-carboxy-5,6,7,8-tetrahydropter in synthase OS=Thermotoga maritima (strain ATCC 43589 / MSB8 / DSM 3109 / JCM 10099) OX=243274 GN=Tmari_0035 P E=3 SV=1
MILVKKFSFEAAHNLTRYLGKCERLHGHTYRLVVKIEGPLNEEEMVMDFAELKKIVEELVISKLDHSYLNDMFDQPTTERVAIWIWDQLSKEMEKRGVRLHEIELWETETSGVVYRGEKV

SEQ ID NO: 26529 - protein, 120 aa, Thermotoga maritima; identical to SEQ ID NO: 26528
  misc_feature (1)..(120): tr|Q9WXP5|Q9WXP5_THEMA 6-carboxy-5,6,7,8-tetrahydropter in synthase OS=Thermotoga maritima (strain ATCC 43589 / MSB8 / DSM 3109 / JCM 10099) OX=243274 GN=TM_0038 PE=3 SV=1

SEQ ID NO: 26530 - protein, 120 aa, Thermotoga naphthophila
  misc_feature (1)..(120): tr|A0A101ERC5|A0A101ERC5_9THEM 6-carboxy-5,6,7,8-tetrah ydropterin synthase OS=Thermotoga naphthophila OX=93930 GN=queD PE=3 SV=1
MILVKKFSFEAAHNLTKYHGKCEKLHGHTYRLVVKIEGPLNEEEMVMDFAELKKIVEELVISKLDHSYLNDMFDQPTTERVAIWIWDQLSKEMEKRGVRLHEIELWETETSGVVYRGEKV

SEQ ID NO: 26531 - protein, 120 aa, Thermotoga naphthophila; identical to SEQ ID NO: 26528
  misc_feature (1)..(120): tr|D2C729|D2C729_THENR 6-carboxy-5,6,7,8-tetrahydropter in synthase OS=Thermotoga naphthophila (strain ATCC BAA -489 / DSM 13996 / JCM 10882 / RKU-10) OX=590168 GN=Tna p_0669 PE=3 SV=1

SEQ ID NO: 26532 - protein, 131 aa, Thermotoga neapolitana
  misc_feature (1)..(131): tr|B9K796|B9K796_THENN 6-carboxy-5,6,7,8-tetrahydropter in synthase OS=Thermotoga neapolitana (strain ATCC 4904 9 / DSM 4359 / NS-E) OX=309803 GN=CTN_0653 PE=3 SV=1
MEIMSSSRGENMVLVKKFSFEAAHNLVKYHGKCERLHGHTYRLTVKVEGPLNEEDMVMDFAELKKMVEDRVIKKLDHSYLNELFEQPTTERVAIWIWEQLSGPLRECGVRLVEIELWETETSGVVYRGEKV

SEQ ID NO: 26533 - protein, 120 aa, Thermotoga petrophila; identical to SEQ ID NO: 26530
  misc_feature (1)..(120): tr|A5IL30|A5IL30_THEP1 6-carboxy-5,6,7,8-tetrahydropter in synthase OS=Thermotoga petrophila (strain RKU-1 / AT CC BAA-488 / DSM 13995) OX=390874 GN=Tpet_0885 PE=3 SV= 1

SEQ ID NO: 26534 - protein, 129 aa, Thermotoga sp.; identical to SEQ ID NO: 24705
  misc_feature (1)..(129): tr|A0A101EU03|A0A101EU03_9THEM 6-carboxy-5,6,7,8-tetrah ydropterin synthase OS=Thermotoga sp. 50_1627 OX=163526 0 GN=XD58_1110 PE=3 SV=1

SEQ ID NO: 26535 - protein, 120 aa, Thermotoga sp.
  misc_feature (1)..(120): tr|A0A0A6QL85|A0A0A6QL85_9THEM 6-carboxy-5,6,7,8-tetrah ydropterin synthase OS=Thermotoga sp. Mc24 OX=1231241 G N=Mc24_01973 PE=3 SV=1
MILVKKFSFEAAHNLTRYLGKCERLHGHTYRLVVKIEGPLNEEEMVMDFAELKKIVEELVVSKLDHSYLNDMFDQPTTERIAIWIWDQLSKEVEKRGVRLHEIELWETETSGVVYRGEKV

SEQ ID NO: 26536 - protein, 130 aa, Thermotogae bacterium
  misc_feature (1)..(130): tr|A0A1V6GY00|A0A1V6GY00_9BACT 6-carboxy-5,6,7,8-tetrah ydropterin synthase OS=Thermotogae bacterium ADurb.Bin0 62 OX=1852923 GN=queD PE=3 SV=1
MRVSKVFSFDSAHFLPSYHGKCETLHGHTYRLVVTVAGVPDAEGMVIDFILLKKIVQEEVLSVLDHSLLNDILPQPTAENIAKWVWQRISEKVRRDRAALFEVEVWETPTSYVRVRSEDILESTSRGTPD

SEQ ID NO: 26537 - protein, 133 aa, Thermotogales bacterium
  misc_feature (1)..(133): tr|A0A117MAF2|A0A117MAF2_9BACT 6-carboxy-5,6,7,8-tetrah ydropterin synthase OS=Thermotogales bacterium 46_20 OX =1635293 GN=XE05_1104 PE=3 SV=1
MHMLNRFLPGGDFIFLVTKEFTFDAAHRLERYHGKCEELHGHTYRLSISVKGELDDEGMVIDFLELKALIKEHVLSHLDHKYLNEVIEQPTAENIAKWVFDAVKPLIDSEKRKLHEVRVWETVTSSATYRESQ

SEQ ID NO: 26538 - protein, 122 aa, Thermovenabulum gondwanense
  misc_feature (1)..(122): tr|A0A162MKI8|A0A162MKI8_9FIRM 6-carboxy-5,6,7,8-tetrah ydropterin synthase OS=Thermovenabulum gondwanense OX=5 20767 GN=queD PE=3 SV=1
MILIREFKFDAAHNLTAYRGKCERLHGHTYKLVVKIQGTPDSEGMIIDFVELKKIVEDSVLKKFDHSYINEIIPQPTAENIAEYIFKELYDVLKRDNCFLYEVEIWETADCGVVYRGEKGCN

SEQ ID NO: 26539 - protein, 216 aa, Thermovibrio ammonificans
  misc_feature (1)..(216): tr|E8T2T8|E8T2T8_THEA1 Uncharacterized protein OS=Therm ovibrio ammonificans (strain DSM 15698 / JCM 12110 / HB -1) OX=648996 GN=Theam_1183 PE=4 SV=1
MFEISKVFEFSAAHSVHSQRLKPEWAGSSYPKCRRLPGHGHNYRLEVFLRAESLDSTQMVTDFGHLKWLKEFIDDCFDHKLLVGTDDPAFELLFGKLGYLENGEFKVPYGEATAVAVNRDFKVESFKVGSVALDLVKGSLNFLTFNGYTPKEESPLSDFYQRLTDGIALFCCSPTSENLAWFFYNFVNANIEPLGVICSKVAVYETPTSCAVYGEL

SEQ ID NO: 26540 - protein, 212 aa, Thermovibrio guaymasensis
  misc_feature (1)..(212): tr|A0A420W9P6|A0A420W9P6_9BACT 6-pyruvoyltetrahydropter in/6-carboxytetrahydropterin synthase OS=Thermovibrio g uaymasensis OX=240167 GN=C7457_0944 PE=4 SV=1
MFVISKSFEFAAAHSVHSQRLNREWAGSDYPKCRRLPGHGHNYKLTVYLTGELSQSQMVTDFGHLKWLKEFIDDCFDHKLIIGVDDPAFELFFSKLELLDGKEIKFPFETRITIVDENFRLKSFFGRSLTLRKISTCNFVTFGSSPLQSDPILDFYQRLVDGIVLFKGSPTSENLARFFYYFVKENVKPLGVDCYKVSINETPNSCASYSER

SEQ ID NO: 26541 - protein, 215 aa, Thermovibrio sp.
  misc_feature (1)..(215): tr|A0A432UDI8|A0A432UDI8_9BACT 6-carboxytetrahydropteri n synthase OS=Thermovibrio sp. OX=2231115 GN=DSZ25_0281 5 PE=4 SV=1
MFEISKTFEFSAAHSVHSQRLKPEWAGNTYPKCRRLPGHGHNYILKVFLKSKELDESQMVTDFGHLKWLKSFIDNCFDHKLIIGSDDPAFDFLFEKLGLIEGDDFLIPEGEAEFLAVNGEFKIESGRVKRLPIGKLRDFWFITFNNYKGEEESPLTDFYQRLIDGISIFKGSPTSENLAKFFFNFVSRNVEPLGVRCSRVEIYETPTSCAAYYEE

SEQ ID NO: 26542 - protein, 123 aa, Thermovirga lienii
  misc_feature (1)..(123): tr|G7V651|G7V651_THELD 6-carboxy-5,6,7,8-tetrahydropter in synthase OS=Thermovirga lienii (strain ATCC BAA-1197 / DSM 17291 / Cas60314) OX=580340 GN=Tlie_1308 PE=3 SV =1
MTVMYVKKEFTFDAAHYLGKYHGKCERLHGHTYRLAVTVKGEPDSEGMVMDFLELKAIVQEKVLSALDHSCLNDLVAQPTTENMVLWIKEKLEPEFKGKSCSLAEIELWESPGSSVILRLEKI

SEQ ID NO: 26543 - protein, 167 aa, Thioalbus denitrificans
  misc_feature (1)..(167): tr|A0A369C8I3|A0A369C8I3_9GAMM 6-pyruvoyltetrahydropter in/6-carboxytetrahydropterin synthase OS=Thioalbus deni trificans OX=547122 GN=DFQ59_10531 PE=4 SV=1
MSPNPERFAVRVDPGELHFNAAHFITFGGTCENLHGHNFHVRVEAVGRNTGDAFVLDFVELTRLAAAICRTLHDRVLLPGESREVAITPEGDALRVESHGRRFVLPADSCRVLPVSNATAEMLAWHIGGELIRALREAGSNRGLETLEVAVEEADRQWGVCRREVAP

SEQ ID NO: 26544 - protein, 410 aa, Thioalbus denitrificans
  misc_feature (1)..(410): tr|A0A369CC82|A0A369CC82_9GAMM 6-pyruvoyl tetrahydropte rin synthase/QueD family protein OS=Thioalbus denitrifi cans OX=547122 GN=DFQ59_10559 PE=4 SV=1
MQCLECHARLERLDSEHLLGCCGLTLQEYALRHHRPLELLLAPDQVGAEDDPAAWTGPVAPPREHARAVLQGLRWAGLLRTEGAFAVIPGEVRRLDLLFWDLAWLRDFGFRFRQEYHYEGHRVMARNRLKAPAANLRRPRAVQLSPVPPPGFRDSLAVYLAHAAEPQAGYLFLPFPDARDGESVAETLQRAHGVALVRLDAADHPGGVLLRTRARADGERLLGLLESRLREMPGAWERFTDATPELAVAKELVFDAAHFITDHPAKCSNLHGGRYRLHVEIHGRVDPVTGCVVDYGYLKRVVTRQVVERFDHHTLNYADGALAWRSSTELLCIHIWERLIDYLPGLRALTLYETPQSWCTYRGPDLARFQAEGEAALLGHFRDPALGRSPLRALAAEPGARLRVVGEALS

SEQ ID NO: 26545 - protein, 127 aa, Thioalkalivibrio denitrificans
  misc_feature (1)..(127): tr|A0A1V3NDH7|A0A1V3NDH7_9GAMM 6-carboxy-5,6,7,8-tetrah ydropterin synthase OS=Thioalkalivibrio denitrificans O X=108003 GN=B1C78_12320 PE=3 SV=1
MAAKYTLRVVTDFASAHTLREYPGACSRMHGHNWKVEAEVVATRLDDVGMGLDFRDIKQAAREIAGRLDHRYLNDLEPFREVNPTAENIAAWFYREMADKLNGPRVRVHAITLWETERACVRYTEED

SEQ ID NO: 26546 - protein, 127 aa, Thioalkalivibrio halophilus
  misc_feature (1)..(127): tr|A0A1V2ZW64|A0A1V2ZW64_9GAMM 6-carboxy-5,6,7,8-tetrah ydropterin synthase OS=Thioalkalivibrio halophilus OX=2 52474 GN=B1A74_11455 PE=3 SV=1
MSARYTLRVLTDFASAHTLRDYPGQCANMHGHNWKVEAEVEAETLDDTGMAVDFKVVKNAAREIAGQLDHRYLNDVPPFDTVNPTAENIARWFFRELAERLNRPGLRVSSLTLWETDRACVRYSEDG

SEQ ID NO: 26547 - protein, 132 aa, Thioalkalivibrio halophilus
  misc_feature (1)..(132): tr|A0A1V3A058|A0A1V3A058_9GAMM Uncharacterized protein OS=Thioalkalivibrio halophilus OX=252474 GN=B1A74_04015 PE=4 SV=1
MYSLNVRDHFMIAHSFAGEVFGPAQNLHGATYVVDVTFRRAELDDDGLVVDIGRAGEVLRSILAELNYQNLDDRPEFEGQNTTTEFLARAIHGRIATAIHEERLGASARGLDAVCVTLHESHVAWAAYEAAP

SEQ ID NO: 26548 - protein, 132 aa, Thioalkalivibrio nitratireducens
  misc_feature (1)..(132): tr|L0DYM8|L0DYM8_THIND PTPS-like type 4 OS=Thioalkalivi brio nitratireducens (strain DSM 14787 / UNIQEM 213 / A LEN2) OX=1255043 GN=TVNIR_1794 PE=4 SV=1
MYSVNVRDHFMIAHSFTGEAFGPAQRLHGATYVVDATFRRRELDADGVVVDIALAGAQLGAVLAGMNYQNLDDHPDFEGRNTTTEFLAREIHQRLADAIQRGKLGPSASGIDALCVTLHESHVAWASFEGPL

SEQ ID NO: 26549 - protein, 152 aa, Thioalkalivibrio nitratireducens
  misc_feature (1)..(152): tr|L0DYR4|L0DYR4_THIND Queuosine biosynthesis QueD, PTP S-I OS=Thioalkalivibrio nitratireducens (strain DSM 147 87 / UNIQEM 213 / ALEN2) OX=1255043 GN=queD [H] PE=4 SV =1
MRITRKLEFDAGHRIPDHRSQCRHLHGHRYTIMITLRGEIIEASGEPVNGMVMDFSDVKAIAKTHLVDRWDHAFLVYRGDHRVVEFLASMPDHKTVVLDCVPTAENLAQLAFRILDPLYRDTYGNQLRLDRVRLYETPNCWADAVREDLENR

SEQ ID NO: 26550 - protein, 152 aa, Thioalkalivibrio paradoxus
  misc_feature (1)..(152): tr|W0DPL7|W0DPL7_9GAMM 6-carboxy-5,6,7,8-tetrahydropter in synthase OS=Thioalkalivibrio paradoxus ARh 1 OX=7135 85 GN=THITH_13875 PE=4 SV=1
MRITRKLEFDAGHRIPDHRSQCRHLHGHRYTIMITLRGEIIEASGEPVNGMVMDFSDVKAIAKTHLVDHWDHAFLVYRGDHKVAEFLASMPDHKTVVLDCVPTAENLAQLAFRILDPLYRDTYGNQLRLDRVRLYETPNCWADAVRADLEDR

SEQ ID NO: 26551 - protein, 132 aa, Thioalkalivibrio paradoxus
  misc_feature (1)..(132): tr|W0DII9|W0DII9_9GAMM 6-pyruvoyl tetrahydropterin synt hase OS=Thioalkalivibrio paradoxus ARh 1 OX=713585 GN=T HITH_08025 PE=4 SV=1
MYSVNVRDHFMIAHSFTGEAFGPAQRLHGATYVVDATFRRRELDADGVVVDIALATAQLSAVLAGMNYQNLDDHPEFEGHNTTTEFLAREIHQRLADAIQRGKLGPSAPGLDALCVTLHESHVAWASFEAPL

SEQ ID NO: 26552 - protein, 132 aa, Thioalkalivibrio sp.
  misc_feature (1)..(132): tr|D3SFQ3|D3SFQ3_THISK Uncharacterized protein OS=Thioa lkalivibrio sp. (strain K90mix) OX=396595 GN=TK90_0768 PE=4 SV=1
MYSLNVRDHFMIAHSFSGETFGPAQNLHGATYVVDVTFRRAALDADGLVVDIGRASEVVRAILGELNYQNLDEREDFRGQNTTTEFLAHAIHQRVAQAIARGELGESARGLDAVAVTLHESHVAWASYEGAP

SEQ ID NO: 26553 - protein, 127 aa, Thioalkalivibrio sp.
  misc_feature (1)..(127): tr|A0A318VU06|A0A318VU06_9GAMM 6-carboxy-5,6,7,8-tetrah ydropterin synthase OS=Thioalkalivibrio sp. ALE21 OX=11 58175 GN=D893_01292 PE=3 SV=1
MSARYTLRVLTDFASAHTLRDYPGQCANMHGHNWKVEAEVEAETLDDTGMAVDFKVVKSAAREIAGQLDHRYLNDVPPFDTVNPTAENIARWFFRELAERLNRPGLRVSTLTLWETDRACVRYSEDG

SEQ ID NO: 26554 - protein, 126 aa, Thioalkalivibrio sulfidiphilus
  misc_feature (1)..(126): tr|B8GN61|B8GN61_THISH 6-carboxy-5,6,7,8-tetrahydropter in synthase OS=Thioalkalivibrio sulfidiphilus (strain H L-EbGR7) OX=396588 GN=Tgr7_0831 PE=3 SV=1
MAAQYTLKVLTDFASAHTLRDYPGACARMHGHNWKVEAEVIATRLDDIGMGMDFRDIKQIAREIAGRLDHRYLNELEPFTEVNPTAENIAAWFFREMAAQINGPHRRMHALTLWETERACVRYTED

SEQ ID NO: 26555 - protein, 132 aa, Thioalkalivibrio versutus
  misc_feature (1)..(132): tr|A0A1V3BUC5|A0A1V3BUC5_9GAMM Uncharacterized protein OS=Thioalkalivibrio versutus OX=106634 GN=B0684_03470 P E=4 SV=1
MYSLNVRDHFMIAHSFSGETFGPAQKLHGATYVVDVTFRRKALDADGLVVDIGRASEVVKALLADLNYQNLDEREEFRGQNTTTEFLAHALHQRVARAIHDGELGESARELDAVCVTLNESHVAWASYEAAP

SEQ ID NO: 26556 - protein, 127 aa, Thioalkalivibrio versutus
  misc_feature (1)..(127): tr|A0A0G3GAZ2|A0A0G3GAZ2_9GAMM 6-carboxy-5,6,7,8-tetrah ydropterin synthase OS=Thioalkalivibrio versutus OX=106 634 GN=B0684_11390 PE=3 SV=1
MSARYTLRVLTDFASAHTLRDYPGQCANMHGHNWKVEAEVQAETLDDSGMAVDFKVVKTAAREIAGQLDHRYLNDVPPFDTVNPTAENIAQWFYREMAGRLNRPGLRMHALTLWETDRACVRYSEDG

SEQ ID NO: 26557 - protein, 164 aa, Thiobaca trueperi
  misc_feature (1)..(164): tr|A0A4R3MW10|A0A4R3MW10_9GAMM 6-pyruvoyltetrahydropter in/6-carboxytetrahydropterin synthase OS=Thiobaca truep eri OX=127458 GN=EDC35_105179 PE=4 SV=1
MQQTLTRIDISKEYLNFSAGHFTLFSATERENLHGHNFQVRCAVTAAVGDDGLAFDYALLKRVLKALCDQLDERVLLPQWSPYLRIERQDGLVFACFADERIPFLDRDVLLLPIRNVTIEELAPLLLTRLREQAELTAQTIRTIELGVSSGRGQWAFSQWESHP

SEQ ID NO: 26558 - protein, 364 aa, Thiobaca trueperi
  misc_feature (1)..(364): tr|A0A4R3N1X9|A0A4R3N1X9_9GAMM 6-pyruvoyltetrahydropter in/6-carboxytetrahydropterin synthase OS=Thiobaca truep eri OX=127458 GN=EDC35_103209 PE=4 SV=1
MSERLLHVAAAPFEAACHIPILPEGHRSRRLHGHSFRARVRADLPSDWAPFPGAATGRLTEALKECIDALDYRNLNEILPVPTDENLARWVRARLTAPGIESVGIQSTHDQGADLDGADHVHLWHRFRFEAAHCLPNVPADHPCGRLHGHGFEVILHADQTLADEDMGMDFDRLAALWAPLQTELHYACLNDIAGLENPTSERLSHWIWQRLKPELPVLSWVTVYETATAGCHYDGTHYRIWKEQRFESALRLVAAPDGDPRRRLHGHSYLLRLHLTAPLDTVLGWTVDYGDVKRIFNPVYQLLDHHRLDALPGLDAADPGSLTRWIRARIADDLPQLDRIDLHETPGCGATLCWGELGPALPT

SEQ ID NO: 26559 - protein, 393 aa, Thiobacillaceae bacterium
  misc_feature (1)..(393): tr|A0A4R1B6L0|A0A4R1B6L0_9PROT 6-carboxytetrahydropteri n synthase OS=Thiobacillaceae bacterium LSR1 OX=2528202 GN=EZJ19_13555 PE=4 SV=1
MAAPDNRHLHACSGLTLQEYALRHALPLDRLVGPDALGEAEVAPLSAGTVPDEPARAVLAGLRLAGRVAERGTVCRVEGEVAWLDLLFWDLARLAPYGFRYRQEYLAEPGSHRVMARNRLVAHKRNLVGAWPPATEPPPPPALKYATYVAHAAELHAGYLFLPFVSPDEADDAAQYLARDLAVRTRRLDAGQPLLRTLALTDTERLLAGLEAELTAMPGVWARFHPDTPTISVTKEVVFDAAHFLTDHPAKCRNLHGGRYVLQVEVRGPIDPATGCLLDYGYLKRVVNARVVEDFDHHTLNYATPDLAWRSTTELICVYIWERLIDYLPGLASLTLYETPQSWCRYSGPDLAAWQALGKNPLLGRFTDPALGRSPWRPWQDGPEPKARPAAPR

SEQ ID NO: 26560 - protein, 119 aa, Thiobacillaceae bacterium
  misc_feature (1)..(119): tr|A0A4R1B3V6|A0A4R1B3V6_9PROT 6-carboxy-5,6,7,8-tetrah ydropterin synthase OS=Thiobacillaceae bacterium LSR1 O X=2528202 GN=queD PE=3 SV=1
MDIYNIFHLECARRLPNLPAEHPCARVHGHSFRVEVHVSGPLDERLAWVLDFADVETAWGPVKAALDHRYLNDVPGLDNPTSERMAIWIWDRLKPALPGLAKIVIQETAVSGCIYTGTG

SEQ ID NO: 26561 - protein, 149 aa, Thiobacillus denitrificans
  misc_feature (1)..(149): tr|Q3SGV6|Q3SGV6_THIDA 6-carboxy-5,6,7,8-tetrahydropter in synthase OS=Thiobacillus denitrificans (strain ATCC 25259) OX=292415 GN=Tbd_2184 PE=3 SV=1
MLITRRLEFDAGHRIPNHGSQCRHLHGHRYALEITLAGAIVATEGAREQGMVMDFSDVKAIAREVLVDRWDHAFLVYEGDRVVVDLLAALPEHKTVVLPVVPTAEHLAEEAFRVLDAAYRERYGGRLGLQRVRLYETPNNWADATRAAD

SEQ ID NO: 26562 - protein, 159 aa, Thiobacillus denitrificans
  misc_feature (1)..(159): tr|A0A106BW25|A0A106BW25_THIDE 6-carboxy-5,6,7,8-tetrah ydropterin synthase OS=Thiobacillus denitrificans OX=36 861 GN=ABW22_00540 PE=4 SV=1
MLITRRLEFDAGHRIPNHASQCRHLHGHRYALEITLSGEIIRTEGAAEQGMVMDFSDVKTIANTVLVDHWDHAFLVYQGDRAVVEFLASLPEHKTVVLPLVPTVENLAAEAFRILDAAYRDTYGNQLRLQRVRLYETPNNWADAVRQGSGPPSGMEPSC

SEQ ID NO: 26563 - protein, 399 aa, Thiobacillus sp.
  misc_feature (1)..(399): tr|A0A1Q4EHI9|A0A1Q4EHI9_9PROT Uncharacterized protein OS=Thiobacillus sp. 0-1251 OX=1895858 GN=BGP19_04120 PE =4 SV=1
MVSELDNEHLLACSGLTLQEYALRHALPLDLLVSPDRIEAGAAHAELPLMPVAVPDETARAVLAGLRLAGKVHDVGSVCFVEGEVSWLDLLFCDLAQLAPYGFRFHQEYHYAPGTHRVVAKNRLVTQKRNLVGPWLPARVPPPEQRLKYATYLAHAAELHAGFLFLPFASNDEAEAATEFLSRELNVRTRHLAAGTPLLRTLTKADTTRLLDSLRGELEAMPGVWSRFHPDTPEVTVSKEVVFDSAHFLTDHPAKCSNLHGGRYVLHVKVRGQIDPITGCVLDYGYLKRVVNTRVVERFDHHTLNYAGPELAWRSTTELLSVYIWEQLIDFLPELIELTLYETPQSWCQYSGPDLETWQRQGSQPLLGRFTDPALGHSPWRHWLRTWDGQHEKRQAQGD

SEQ ID NO: 26564 - protein, 117 aa, Thiobacillus sp.
  misc_feature (1)..(117): tr|A0A1E4NYN8|A0A1E4NYN8_9PROT 6-carboxy-5,6,7,8-tetrah ydropterin synthase OS=Thiobacillus sp. SCN 63-57 OX=16 60145 GN=ABT23_09785 PE=3 SV=1
MDIFRIFHLQCARRLPALPESHPCSRLHGHSFKIELTVSGDIDPVLGWVLDFADIETAWRPIHAALDHRCLNDIDGLDNPTSENLAVWLWRQLRPALPGLSAVSVMEAHDAGCIYRG

SEQ ID NO: 26565 - protein, 364 aa, Thiocapsa marina
  misc_feature (1)..(364): tr|F9UIC9|F9UIC9_9GAMM Uncharacterized protein OS=Thioc apsa marina 5811 OX=768671 GN=ThimaDRAFT_4682 PE=4 SV=1
MSEQLFHVAAVPFEAARRVSILPAGHRSRRLHGHGFLAKVRAQLPTDWAPFPGGETDALARVLADAIAPLDYSDLNEHLPIPTDENLARWVRAHLGIPGVVSVGVQSTRDQGVDLDGLEQAHVWRRFRFEAAHRLPNVPEGHQCGRMHGHGFEVILHANQDLAGSDMGIDFDRLEAIWGPLYAELDHACLNEIPGLENPTSEMLARWIWDRLRPVFPQLSVVTVYETATAGCHYDGVHYRIWKEQRFESALQLVQAPEGDRRRRLHGHSYLMRLHLTAPLDEVLGWTIDYGDVKRQFKPVYDRLDHHRLDALPRLRQADPSNLLLWIREEVAAALPRLDRIDLHETPGCGAVLCWGALGPALPL

SEQ ID NO: 26566 - protein, 164 aa, Thiocapsa marina
  misc_feature (1)..(164): tr|F9U893|F9U893_9GAMM Uncharacterized protein OS=Thioc apsa marina 5811 OX=768671 GN=ThimaDRAFT_0951 PE=4 SV=1
MDTDILTRIEISKEYLNFSAGHFTIFSATERENLHGHNFRIRCNVTAPIGADGMAFDYVMLKRVLKALCDELDERLLLPERSPHLRIERVDRMVIAWFGEERLTFLERDVLLLPIRNVTIEELAELLLARLRVRPELDGRDLRAIELGVSSGDGQWAFSSWSTP

SEQ ID NO: 26567 - protein, 364 aa, Thiocapsa rosea
  misc_feature (1)..(364): tr|A0A495VE59|A0A495VE59_9GAMM 6-pyruvoyltetrahydropter in/6-carboxytetrahydropterin synthase OS=Thiocapsa rose a OX=69360 GN=BDD21_5285 PE=4 SV=1
MSEQLFHVAAVPFEAARRVSILPAGHRSRRLHGHGFVAKVRAELPIAWAPFPGGETDALVRALADAIGPLDYSDLNEHLPIPTDENLARWVRAQLGVPGVVSVGVQSTRDQGVDLDGREQAHVWRRFRFEAAHRLPNVPEGHQCGRMHGHGFEVILHANQDLAGNDMGIDFDRLEAIWAPLSTELDHVCLNDIPGLENPTSEMLARWIWDRLRPVFPQLSVVTVYETATAGCHYDGVHYRIWKEQRFESALALMQAPKGDRRRRLHGHSYLMRLHLTAPLDEVLGWTIDYGDVKRQFKSVYDRLDHHRLDALPRLRQADPANLLLWIREEVAAALPQLDRIDLHETPGCGAVLCWGASGPALPL

SEQ ID NO: 26568 - protein, 407 aa, Thiocapsa rosea
  misc_feature (1)..(407): tr|A0A495VCI6|A0A495VCI6_9GAMM 6-pyruvoyl tetrahydropte rin synthase/QueD family protein OS=Thiocapsa rosea OX= 69360 GN=BDD21_4671 PE=4 SV=1
MSLPDSRADPAQSSPRHPPEPLGLTLQEQAIRRHLPLELLVDRSALTHRDRLGDYPSPGGFPSEAARAVLLGLRWAGLLREDADFVWIPGEIRRLELLLWDLSSLQDYGFRFRQDYVYAGSTHRVVALNGLKAPKANVEHFRSLGVCPIAPPDFLASLAVFLAHVGELHAGYLFLPFQRADQGRAVAVELTRHGIGFQELDAADEPQGLLLRSATLADARCLLDLLRDRLQPMPGALERFEQTTPEVTVSKELVFDAAHFITDHPAKCSNLHGGRYRLHVKVTGRIDPVTGCVVDYGYLKRVVSRRVVERFDHHTLNYCAPELAWRSSTELLCVYIWEQLIDYLPGLDELELYETPQSWCRYRGPTLEHLQRHGPDPVLTYFQQDLGSSPLRRQIQPLPVRDSGLER

SEQ ID NO: 26569 - protein, 364 aa, Thiocapsa roseopersicina
  misc_feature (1)..(364): tr|A0A1H2SV65|A0A1H2SV65_THIRO 6-pyruvoyltetrahydropter in/6-carboxytetrahydropterin synthase OS=Thiocapsa rose opersicina OX=1058 GN=SAMN05421783_103138 PE=4 SV=1
MREHLYHVAAVPFEAARRVSILPAGHRSRRLHGHGFLAKVRAELPVDWAPFPGGETEALARALADCIAPLDYSDLNAHLPIPTDENLARWVRAQLGVPGVVSLGIQSTRDQGVDLDGLEQAHVWRRFRFEAAHRLPNVPEGHQCGRMHGHGFEVILHANQDLAGSDMGVDFDRLEEIWAPLYAELDHACLNDIPGLENPTSEMLARWIWDRLQPVFPHLSCVTVYETATAGCHYDGVHYRIWKEQRFESALQLVQAPEGDRRRRLHGHSYLMRLHLTAPLDEVLGWTIDYGDVKRQFKPVYDRLDHHRLDALPRLRQADPANLLLWIREEVAAALPQLDRIDLHETPGCGAVLCWGALGPALPL

SEQ ID NO: 26570 - protein, 164 aa, Thiocapsa roseopersicina
  misc_feature (1)..(164): tr|A0A1H3C7Q8|A0A1H3C7Q8_THIRO 6-pyruvoyltetrahydropter in/6-carboxytetrahydropterin synthase OS=Thiocapsa rose opersicina OX=1058 GN=SAMN05421783_13121 PE=4 SV=1
MDTDTLTRIEISKEFLNFSAGHFTIFSATERENLHGHNFRIRCNVTAPVGADGMAFDYVMLKRVLKALCDELDERLLLPELSPHLRIERGDGMVIAWFGEERLTFLERDVLLLPIRNVTIEELAELLLARLRVRPELAGRDLRAIELGVSSGDGQWALSSWRTP

SEQ ID NO: 26571 - protein, 138 aa, Thiocapsa sp.
  misc_feature (1)..(138): tr|A0A0U5IBZ5|A0A0U5IBZ5_9GAMM Uncharacterized protein OS=Thiocapsa sp. KS1 OX=610332 GN=THIOKS11020038 PE=4 S V=1
MYSVCVRDHIMIAHSFRGDVFGPAQRLHGATYVVDVEFSRPELDADGLVVDIGLASQTLRALLADLDYRNLDEEPAFQGRNTTTEFLARVIFDRMAAQVSAGALGAGAGGITALRVQLSESHVAWAAYTAELPQRSRP

SEQ ID NO: 26572 - protein, 164 aa, Thiocapsa sp.
  misc_feature (1)..(164): tr|A0A0U5J8Q7|A0A0U5J8Q7_9GAMM Uncharacterized protein OS=Thiocapsa sp. KS1 OX=610332 GN=THIOKS12340069 PE=4 S V=1
MDTDTLTRIEISKEYLNFSAGHFTIFSATERENLHGHNFRIRCNVTAPVGTDGMAFDYVMLKRVLKALCDELDERLLLPERSPHLRIERGVGMVIAWFGEERLPFLERDVLVLPIRNVTIEELADLLLTRLRVRPELVGRDLRAIELGVSSGDGQWAFSSWRTP

SEQ ID NO: 26573 - protein, 117 aa, Thioclava atlantica
  misc_feature (1)..(117): tr|A0A085TSC8|A0A085TSC8_9RHOB 6-carboxy-5,6,7,8-tetrah ydropterin synthase OS=Thioclava atlantica OX=1317124 G N=DW2_16541 PE=3 SV=1
MYRISKEFHFSASHQLSHLPADHQCARLHGHNYIVVVELASAELNSDGFVRDYHELKPLKTYIDEIFDHRHLNDVLDVPSTAENLARHFFDWCRARWPETAAVKVSETPKTWAEFRP

SEQ ID NO: 26574 - protein, 117 aa, Thioclava dalianensis
  misc_feature (1)..(117): tr|A0A074TKR5|A0A074TKR5_9RHOB 6-carboxy-5,6,7,8-tetrah ydropterin synthase OS=Thioclava dalianensis OX=1185766 GN=DL1_12915 PE=3 SV=1
MYKISKEFHFSASHQLSHLPDDHQCARLHGHNYVVVVELAAAELNADGFVRDYGELKPLKSYIDAQFDHRHLNEVMERPSTAENMARHFYDWCVARWPETSAVRVSETPKTWAEYRP

SEQ ID NO: 26575 - protein, 117 aa, Thioclava electrotropha
  misc_feature (1)..(117): tr|A0A1W9XV20|A0A1W9XV20_9RHOB 6-carboxy-5,6,7,8-tetrah ydropterin synthase OS=Thioclava electrotropha OX=15498 50 GN=AKL02_02545 PE=3 SV=1
MFRIRKEFHFSASHQLSHLREDHQCARLHGHNYIVVVELAAATLDENGFVRDYHDLKPLKAYIDDTFDHRHLNDVMEVPSTAENMAKHFYDWCKARWPETSAALVSETPKTWAEYRP

SEQ ID NO: 26576 - protein, 117 aa, Thioclava sp.
  misc_feature (1)..(117): tr|A0A4R7KK97|A0A4R7KK97_9RHOB 6-carboxy-5,6,7,8-tetrah ydropterin synthase OS=Thioclava sp. ES.032 OX=1798206 GN=AXZ80_4235 PE=3 SV=1
MFRIRKEFHFSASHQLSHLPDDHQCARLHGHNYIVVVELAAATLDENGFVRDYHDLKPLKTYIDESFDHRHLNDVMEVPSTAENMAKHFYDWCKARWPETSAALVSETPKTWAEYRP

SEQ ID NO: 26577 - protein, 117 aa, Thioclava sp.
  misc_feature (1)..(117): tr|A0A1T2A6T5|A0A1T2A6T5_9RHOB 6-carboxy-5,6,7,8-tetrah ydropterin synthase OS=Thioclava sp. F28-4 OX=1915315 G N=BMI87_00245 PE=3 SV=1
MFRIRKEFHFSASHQLSHLPEDHQCARLHGHNYIVVVELAAATLDENGFVRDYHDLKPLKTYIDDTFDHRHLNDVMDVPSTAENMAKHFYDWCKARWPETSAALVSETPKTWAEYRP

SEQ ID NO: 26578 - protein, 364 aa, Thiocystis violascens
  misc_feature (1)..(364): tr|I3Y5B2|I3Y5B2_THIV6 6-pyruvoyl-tetrahydropterin synt hase OS=Thiocystis violascens (strain ATCC 17096 / DSM 198 / 6111) OX=765911 GN=Thivi_0093 PE=4 SV=1
MTERLFHVAAAPFEAARRVAILPEGHRARRLHGHGFLARVRADPPSDWAAFPGAATGMLTAALQACVGALDYRDLNEFLPVPTDENLARWVRDRLGVPGVASIGIQSTRDQGADLDGADHAHVWRRFRFEAAHRLPNVPPGHQCGRMHGHGFEVILHADQALAGRDMGSDFDRLDTLWAPLQAELHHACLNDIPGLENPTSELLASWLWQRLKPELPALSWVTVYETATAGCHYDGRHYRIWKEQRFESALQFPAAPEGDSRRRLHGHSYLLRLHLTAPLDTVLGWTVDYGDVKALFAPVYRQLDHHRLDALPRLDAADPGRLALWIREECAAVLPQLDRIDLHETPGCGASLCWGELGPALPT

SEQ ID NO: 26579 - protein, 166 aa, Thiocystis violascens
  misc_feature (1)..(166): tr|I3YDS2|I3YDS2_THIV6 6-pyruvoyl-tetrahydropterin synt hase OS=Thiocystis violascens (strain ATCC 17096 / DSM 198 / 6111) OX=765911 GN=Thivi_3266 PE=4 SV=1
MTPQQPLTRIEISKDYLNFSAGHFTLFSATERENLHGHNFQVRCAVTAAVGTDGLAFDYVLLKRVLKNLCDQLDERVLLPQRSPHLCIEHRDGMVFALFADERIPFLERDVLPLPIRNVTIEELAALLLARLRERPELAGRDLRAIELGVSSGLGQWAFSSWESRI

SEQ ID NO: 26580 - protein, 365 aa, Thioflavicoccus mobilis
  misc_feature (1)..(365): tr|L0H0S8|L0H0S8_9GAMM 6-pyruvoyl-tetrahydropterin synt hase OS=Thioflavicoccus mobilis 8321 OX=765912 GN=Thimo _2970 PE=4 SV=1
MMGEQLFHVAAAPFEAARRVAILPSGHRARRLHGHSFIARVWAAVPLGWASSPGGEGDALAAALGERVAQLDYRDLNEHLPVPTDENLARWLRRHLDVPGLTSVGIQSTREQGADLDGRDHVHVWRRFRFEAAHWLPRVAPDHQCGRLHGHGFEVIIHADQDLAGGDMGVDYDRLAALWAPLHDELQHACLNDIPGLENPTSELLARWLWQRLKPQLPALSWVSVYETATAGCHYDGERFRIWKELRFEAALQLRRAPDGDPRRRWHGHSYLLRLHLTAPLDEVLGWTLDYGDVKALFQPIYRQLDHQRLNALPHLSDADPASLAGWVREQAVACLPQLDRIDLYETPGCGVVLSWGGNGPALPL

SEQ ID NO: 26581 - protein, 140 aa, Thioflexothrix psekupsii
  misc_feature (1)..(140): tr|A0A251X6Y3|A0A251X6Y3_9GAMM 6-carboxy-5,6,7,8-tetrah ydropterin synthase OS=Thioflexothrix psekupsii OX=1570 016 GN=TPSD3_10905 PE=3 SV=1
MYSIITKVTYEYAHRLMYHQGKCRHVHGHSGEVTVELTASVLNENGFVMDFNDIKTPLKQWINEHWDHAYLANRHDPLLPTLQANGMKIFIFDAEPSAEVMAAFLYWKINDFITRPEVRVKRVTVRETCTGSASYEPEHH

SEQ ID NO: 26582 - protein, 128 aa, Thiogranum longum
  misc_feature (1)..(128): tr|A0A4R1H6R3|A0A4R1H6R3_9GAMM 6-carboxy-5,6,7,8-tetrah ydropterin synthase OS=Thiogranum longum OX=1537524 GN= DFR30_0674 PE=3 SV=1
MAACYTLKIVTDFASAHTLREYPGACARMHGHNWKVETEVRASSLDKMGMGVDFKVIKQATRDIAAKLDHRYLNDLEPFTDINPTAENIAAYFYQELSAQLNNESIRVHAVTLWETERACVRYAEDES

SEQ ID NO: 26583 - protein, 127 aa, Thiohalobacter thiocyanaticus
  misc_feature (1)..(127): tr|A0A426QHB1|A0A426QHB1_9GAMM 6-carboxy-5,6,7,8-tetrah ydropterin synthase OS=Thiohalobacter thiocyanaticus OX =585455 GN=queD PE=3 SV=1
MAARYTLKVLTEFASAHTLREYPGACARMHGHNWKVETEVDAGALDDVGMGVDFKVIKDAARRIGERLDHRYLNEVEPFTEVNPTAENIAAYFYRELAAELNNDRIHVRSVTLWETDRACVRYTEDH

SEQ ID NO: 26584 - protein, 127 aa, Thiohalobacter thiocyanaticus
  misc_feature (1)..(127): tr|A0A1Z4VPS2|A0A1Z4VPS2_9GAMM 6-carboxy-5,6,7,8-tetrah ydropterin synthase OS=Thiohalobacter thiocyanaticus OX =585455 GN=FOKN1_1192 PE=3 SV=1
MPARYTLKVLTEFASAHTLREYPGACARMHGHNWKVETEVDASALDEVGMGVDFKVIKNAARRIGERLDHRYLNEIEPFTEVNPTAENIAAYFYRELAAELNNDRIRIRSVTLWETDRACVRYTEDQ

SEQ ID NO: 26585 - protein, 127 aa, Thiohalomonas denitrificans
  misc_feature (1)..(127): tr|A0A1G5Q095|A0A1G5Q095_9GAMM 6-carboxy-5,6,7,8-tetrah ydropterin synthase OS=Thiohalomonas denitrificans OX=4 15747 GN=SAMN03097708_01072 PE=3 SV=1
MTAQYTLKVVTDFAAAHSLRDYPGDCQHLHGHNWKVEVEVAAPALDRMGMVVDFKRIKQAAREVTEELDHRYLNEIPPFDELNPTAENMAAYIYRQIGERLNDQRVKVCAITLWETERACVRYTEEG

SEQ ID NO: 26586 - protein, 126 aa, Thiohalophilus thiocyanatoxydans
  misc_feature (1)..(126): tr|A0A4R8ILL1|A0A4R8ILL1_9GAMM 6-carboxy-5,6,7,8-tetrah ydropterin synthase OS=Thiohalophilus thiocyanatoxydans OX=381308 GN=EDC23_1591 PE=3 SV=1
MAPRYTMTIVTDFAAAHYLRDYEGVCNRLHGHNWKVEVHVQASALDRVGMGMDFKDIKDATRGLLGGLDHYNLNDIAPFDQINPTAENIAAFFYSKLSDVLNSDVVKVSAVTIWETDRACVTYTED

SEQ ID NO: 26587 - protein, 175 aa, Thiohalorhabdus denitrificans
  misc_feature (1)..(175): tr|A0A0P9CXE1|A0A0P9CXE1_9GAMM 6-pyruvoyltetrahydropter in/6-carboxytetrahydropterin synthase OS=Thiohalorhabdu s denitrificans OX=381306 GN=SAMN05661077_1760 PE=4 SV= 1
MFTLAFTRRYSMSHRLLSLYNGPCGVPHGHNEHVTVRLQARHPEPLDGEANLVTPFHAAKKRWHAWIDERVDHALQLSDRDPLLTYFQAQEPALLDRILVTPGDPSTEALAACFMAKVNAFLAEQGGDLRCVEVTIEETPTNTVTFDGDPELVLPGVRFPDPPWWRRPDGSINDL

SEQ ID NO: 26588 - protein, 129 aa, Thiohalospira halophila
  misc_feature (1)..(129): tr|A0A1I1U6M7|A0A1I1U6M7_9GAMM 6-carboxy-5,6,7,8-tetrah ydropterin synthase OS=Thiohalospira halophila DSM 1507 1 OX=1123397 GN=SAMN05660831_02013 PE=3 SV=1
MTARYTMTIRTEFAAAHWLRDYDGPCNRLHGHNWKVDVEVDASGLDELGMGVDFGDIKAATREITDGLDHRNLNDLPPFDRLNPTAENIAAHLHGELSERLNDERVRVRAVTLWETDRACVRYTEDEPA

SEQ ID NO: 26589 - protein, 284 aa, Thiolapillus brandeum
  misc_feature (1)..(284): tr|W0TNR8|W0TNR8_9GAMM Uncharacterized protein OS=Thiol apillus brandeum OX=1076588 GN=TBH_C2352 PE=4 SV=1
MRLFVHQLSVLDFSYLHPSRGLVGESWHVDIELEGGLDDQGMVLDFGEVKRQVKQLIDENFDHRLLVPADHKGLTLADRQLSFVLDNGQRIRHQGPAEALLLIPGETISTRSVAQAIHQTLLPTLPDNVESLQISLYPESEEGAWYQYSHGLKLHYGNCQRIAHGHRSRIRIWRDGARNEMLEQLWAERLRDIYIGTEEDLVAITSWNDQSCFRFAYTAEQGSFELELDAGRCYLMNTESTVENIARHIRERLEEEHPDSHFRVQAFEGIGKGAISESIGPAPQ

SEQ ID NO: 26590 - protein, 126 aa, Thiomicrorhabdus sp.
  misc_feature (1)..(126): tr|A0A4P9K4W0|A0A4P9K4W0_9GAMM 6-carboxy-5,6,7,8-tetrah ydropterin synthase OS=Thiomicrorhabdus sp. G1 OX=25804 12 GN=queD PE=3 SV=1
MAQRFVLKTLLDFASAHSLRGYPGDCAKLHGHNWKIEVQVRGEKLNEIGMVIDFKEIKRHAKEVIKELDHSFLNDHEHFQEVNPTAENIAVYLFDEINKRISTDAVAMHSITVWENDRNCVTYSND

SEQ ID NO: 26591 - protein, 128 aa, Thiomicrospira aerophila
  misc_feature (1)..(128): tr|W0DQX7|W0DQX7_9GAMM 6-carboxy-5,6,7,8-tetrahydropter in synthase OS=Thiomicrospira aerophila AL3 OX=717772 G N=THIAE_03760 PE=3 SV=1
MKKNFILTTQLDFAAAHRLIGYEGDCAKLHGHNWKIEVSVIGHTLNDIGMVIDFKQVKQHAKDVVAELDHSYLNDHPHFQRTNPTAENIAHYLYNELAKRLDQDAFKMHQIRVWENDRNYVTYSETDH

SEQ ID NO: 26592 - protein, 128 aa, Thiomicrospira cyclica
  misc_feature (1)..(128): tr|F6D8E6|F6D8E6_THICA 6-carboxy-5,6,7,8-tetrahydropter in synthase OS=Thiomicrospira cyclica (strain DSM 14477 / JCM 11371 / ALM1) OX=717773 GN=Thicy_1030 PE=3 SV=1
MKKNFILTTQLDFAAAHRLIGYEGDCAKLHGHNWKIEVSVIGYSLNDIGMVVDFKLVKHHAKAVVAELDHSYLNDHPHFQRTNPTAENIAHYLYNELAKRLNQDQFKMHQVRVWENDRNYVTYSETEH

SEQ ID NO: 26593 - protein, 128 aa, Thiomicrospira sp.
  misc_feature (1)..(128): tr|A0A0X3T924|A0A0X3T924_9GAMM 6-carboxy-5,6,7,8-tetrah ydropterin synthase OS=Thiomicrospira sp. WB1 OX=168538 0 GN=AVO41_05610 PE=3 SV=1
MPQTYFLNTQLEFASAHRLHGYPGDCANLHGHNWKVEVTVKGHQLDDVGMVMDFKAIKREAKTIIDELDHTYLNDHPAFQSDNPTAENIARFIYQTLAKRINSEQVQMHRLTLWENDRNSVTYEQTDD

SEQ ID NO: 26594 - protein, 127 aa, Thiomicrospira sp.
  misc_feature (1)..(127): tr|A0A0X3TM05|A0A0X3TM05_9GAMM 6-carboxy-5,6,7,8-tetrah ydropterin synthase OS=Thiomicrospira sp. XS5 OX=177563 6 GN=AVO42_08930 PE=3 SV=1
MAQQFVLKTLLDFAAAHSLKNYPGDCAKLHGHNWKIEVQVQGSKLNEIGMLVDFKEIKKHAKQVVAELDHTFLNDHPSFQAQNPTAENIAVFLYREIESRIQSDTVKMHSLTVWENDRNCVIYSEND

SEQ ID NO: 26595 - protein, 121 aa, Thiomonas delicata
  misc_feature (1)..(121): tr|A0A238D4H9|A0A238D4H9_THIDL 6-carboxy-5,6,7,8-tetrah ydropterin synthase OS=Thiomonas delicata OX=364030 GN= THIARS_60931 PE=3 SV=1
MKFELSQRFFFEAAHTLDRSIDREGSLRVHGHTYWAEISVAGVPDPVTGMVVDLAYIRREIERVRDALDHRFLDDVDGLGPATLEGLCSYLWRQFRPALPHLSRVEVWREASGDRCRLTDD

SEQ ID NO: 26596 - protein, 81 aa, Thiomonas delicata
  misc_feature (1)..(81): tr|A0A238D188|A0A238D188_THIDL 6-pyruvoyl tetrahydrobio pterin synthase (PTPS) (Modular protein) OS=Thiomonas d elicata OX=364030 GN=THIARS_50271 PE=4 SV=1
MGWTVDFGDVKQIFEPIFKSIDHHPLFEVEGIRDGDTASIAAWVFENAARKPPELTQVDLYETPGCGSILAIDKDGPILPI

SEQ ID NO: 26597 - protein, 121 aa, Thiomonas sp.
  misc_feature (1)..(121): tr|A0A259Q1L9|A0A259Q1L9_9BURK 6-carboxy-5,6,7,8-tetrah ydropterin synthase OS=Thiomonas sp. 14-66-4 OX=1970450 GN=B7X42_02595 PE=3 SV=1
MKFELSQRFFFEAAHTLDRSIDREGSLRVHGHTYWAEISVAGVPDPVTGMVVDLAYIRREIERVRDALDHRFLDDVDGLGPATLEGLCAYLWRQFRPALPHLSRVEVWREASGDRCRFTDG

SEQ ID NO: 26598 - protein, 121 aa, Thiomonas sp.; identical to SEQ ID NO: 26597
  misc_feature (1)..(121): tr|A0A259QGJ5|A0A259QGJ5_9BURK 6-carboxy-5,6,7,8-tetrah ydropterin synthase OS=Thiomonas sp. 13-66-29 OX=197044 8 GN=B7X31_12550 PE=3 SV=1

SEQ ID NO: 26599 - protein, 119 aa, Thioploca ingrica
  misc_feature (1)..(119): tr|A0A090APW6|A0A090APW6_9GAMM 6-carboxy-5,6,7,8-tetrah ydropterin synthase OS=Thioploca ingrica OX=40754 GN=TH II_3323 PE=3 SV=1
MEIYKQFNIEAAHHLPNVPTGHKCARLHGHSFQVTIHVAGTVNEQMGWITDFADIKTAFAPLYEQLDHHYLNEIAGLENPTSENIARWIWQHLKPRLPNLWKITLQETCTSGCIYIGDN

SEQ ID NO: 26600 - protein, 118 aa, Thiopseudomonas denitrificans
  misc_feature (1)..(118): tr|A0A4R6U356|A0A4R6U356_9GAMM 6-carboxy-5,6,7,8-tetrah ydropterin synthase OS=Thiopseudomonas denitrificans OX =1501432 GN=DFQ45_101230 PE=3 SV=1
MYRISKEFHFSASHQLVNMPAGHPCARLHGHNYVVRLELASEELDQYGFVVDYTALKAFKDYIDDAFDHRHLNEVLDSDLPTAELLARHLHDWAKARWPQVCAVAVSETPKTWARYQP

SEQ ID NO: 26601 - protein, 397 aa, Thiorhodococcus drewsii
  misc_feature (1)..(397): tr|G2DX08|G2DX08_9GAMM Uncharacterized protein OS=Thior hodococcus drewsii AZ1 OX=765913 GN=ThidrDRAFT_0569 PE= 4 SV=1
MTMQDMGEVRSVGLEQWLDAEGLTLQEYAIRHHVPLDLLVERNDLNRPDRISDYPPPSHYPGERARAVLRGLGWAGLLREEGDFSVLPGEVRRLDLLFWNLDALSDYGFRFRQEYRYSDRSHRVVAHNRLKAPKSNLSLLDAVPHCPVPPPDFWLALATFVAHVAEWHAGYLFMPFQQASQAHWVAVELERQGITVIELDAADQPGGALLRTHALADTQCLLDRLRPHLSAMPGALERFEQETPTLTVCKNLVFDSAHFITDHPAKCSNLHGGRYALNVKVRGRMDPVTGCVIDYGYLKRVVGRRVIERFDHATLNYAASELAWRSSTEMLCVFIWEQLIDYLPGLVELELHETTQSWCNYSGPSLADFQRDGSDPVLTHFQRQIGASSWRASVAAI

SEQ ID NO: 26602 - protein, 136 aa, Thiorhodococcus drewsii
  misc_feature (1)..(136): tr|G2E2T5|G2E2T5_9GAMM Uncharacterized protein OS=Thior hodococcus drewsii AZ1 OX=765913 GN=ThidrDRAFT_2598 PE= 4 SV=1
MYGIRVRDHIMIAHSFQGEVFGPAQRLHGATYVVDVEFRRETLDEANLVVDIGLASQALRQVLDAFDYRNLDELPELTGQNTTTEFLARHIFDAMAQRIASGELGATALALNGMRVELAESHRAWAFFEGSLPGAT

SEQ ID NO: 26603 - protein, 126 aa, Thiorhodospira sibirica
  misc_feature (1)..(126): tr|G4E4P2|G4E4P2_9GAMM 6-carboxy-5,6,7,8-tetrahydropter in synthase OS=Thiorhodospira sibirica ATCC 700588 OX=7 65914 GN=ThisiDRAFT_1271 PE=3 SV=1
MPATYVLKVCVDFSAAHVLNGYDGGCAHLHGHNWQVEVEVKATALDDLGMGLDFKVIKQAAREVVAMLDHRYLNDLAAFSQQNPTAENIAAWIFGELATRLNRPHVRMHAVTLWETPRACVRYSET

SEQ ID NO: 26604 - protein, 370 aa, Thiorhodovibrio sp.
  misc_feature (1)..(370): tr|H8Z4H3|H8Z4H3_9GAMM 6-pyruvoyl-tetrahydropterin synt hase OS=Thiorhodovibrio sp. 970 OX=631362 GN=Thi970DRAF T_03854 PE=4 SV=1
MDALLFTAAETFHAARRLANLPAGHRARAVHGHGFGVKIHADLRERGDLGAGTETRALGDVLRQASAALDYQDLNAFIAEPGDLGIATWLGERLVESLHPGRLAALGLNSTAWQGVTTVAEAPTRGWRRYRFEAAHRLPSVPEGHPCGRMHGHGFEVTLHADLAPDDPTGLSGYDKLDAAWAPLARQLHHSCLNLLSGLENPTSELLCLWLWQRLEPELPGLRQVMVRETRTAGCCYDGQRFRIWKDLFFESALRFGELPEADPWHGLHGHSYALRLMLGAPLDEVLGWTVDFGDVKVLFKPVYARLDHFDLSTLPGLQRPGVAELLHWIAGQVADVLPQIDGIALNPTPGCGASLSLAGADHGLTLPAL

SEQ ID NO: 26605 - protein, 362 aa, Thiothrix caldifontis
  misc_feature (1)..(362): tr|A0A1H4FV87|A0A1H4FV87_9GAMM 6-pyruvoyltetrahydropter in/6-carboxytetrahydropterin synthase OS=Thiothrix cald ifontis OX=525918 GN=SAMN05660964_03141 PE=4 SV=1
MNETLFYVAAAPFEAACRVENALGQSPLSAAHPARRLHGHSFLAKVRAIGASSVEALRQQLAHSVAPLDYNDLNQFLPMPTDENLARWIRARLALPSVASVGVQSTQHQGADLDLADNAHIWRRFRFEAAHRLPNVAPGHQCGRMHGHGFEVILHANQNLQAQDMGVDFDRLAAVWQPLHDQLHHHCLNDIQGLDNPTSETLAAWLWERLKPELDALSWVSVYETVTAGCHYDGQHYRIWKDQRFESALTLSRADPADSVRRLHGHSYLLRLHLTAPLDTVMGWTVDYGDVKAQFKPIYQQLDHHNLNDLTGLDEPDPASVARWIRTQATAGLPQLDRIDLYETPGCGVVLSWGEHEPGLPV

SEQ ID NO: 26606 - protein, 125 aa, Thiothrix lacustris
  misc_feature (1)..(125): tr|A0A1Y1QVN2|A0A1Y1QVN2_9GAMM 6-carboxy-5,6,7,8-tetrah ydropterin synthase OS=Thiothrix lacustris OX=525917 GN =BWK73_08180 PE=3 SV=1
MALYTLKVIADFASAHTLRDYPGACSRMHGHNWKVEAEVEANTLNSIGMAIDFKDIKREVRAIAEELDHQYLNDLAPFQTINPTAEHIARYFFQTLSQRLNDERVRVCALTIWETERACVRYAEG

SEQ ID NO: 26607 - protein, 126 aa, Thiothrix sp.
  misc_feature (1)..(126): tr|A0A432UYE2|A0A432UYE2_9GAMM 6-carboxy-5,6,7,8-tetrah ydropterin synthase OS=Thiothrix sp. OX=1032 GN=queD PE =3 SV=1
MTEKYTLKIVTDFASAHTLRDYPGACSRMHGHNWKVEAEVTATQLDELGMGIDFKDIKRATREITARLDHRYLNDIAPFTEKNPTAENIAAYLYSELSKALNSDQVKVRSITLWETERACVRYSKD

SEQ ID NO: 26608 - protein, 128 aa, Thiotrichaceae bacterium
  misc_feature (1)..(128): tr|A0A2A4WK78|A0A2A4WK78_9GAMM 6-carboxy-5,6,7,8-tetrah ydropterin synthase OS=Thiotrichaceae bacterium OX=2030 882 GN=queD PE=3 SV=1
  misc_feature (55)..(55): Xaa can be any naturally occurring amino acid
MPARYTLKIVTDFAAAHSLRNYPGDCCRLHGHNWKVEAEVVCTQLDDLGIGIDFXTIKKETNAIADQLDHRYLNEVPPFDEINPTAENIAAFLFKRLSEKLNSEVLRVSAITLWETERACVRYSEDET

SEQ ID NO: 26609 - protein, 128 aa, Thiotrichaceae bacterium
  misc_feature (1)..(128): tr|A0A2A5FX99|A0A2A5FX99_9GAMM 6-carboxy-5,6,7,8-tetrah ydropterin synthase OS=Thiotrichaceae bacterium OX=2030 882 GN=queD PE=3 SV=1
MAARYQLKVVTEFASAHTLRGYPGACSRMHGHNWKVELEAVSTQLDAVGMGVDFKIMKNAANEIGNRLDHRYLNDLEPFKKVNPTAENIAAYMYKEISTRINSDTVKVTALTIWETERACVRYSEENE

SEQ ID NO: 26610 - protein, 118 aa, Thiotrichales bacterium
  misc_feature (1)..(118): tr|A0A1H6F9K8|A0A1H6F9K8_9GAMM 6-carboxy-5,6,7,8-tetrah ydropterin synthase OS=Thiotrichales bacterium HS_08 OX =1899563 GN=queD_2 PE=3 SV=1
MEIFKDFSFDAAHHLPNVPEGHKCARLHGHTYRIRIYICGEVGEDSGWVMDFGDIKQIFQPIYQQLDHYYLNEIPGLENPTAENLARWIWQHLKPTLPLLSKIMVKETCTAGCVYSGD

SEQ ID NO: 26611 - protein, 127 aa, Thiotrichales bacterium
  misc_feature (1)..(127): tr|A0A259KBE1|A0A259KBE1_9GAMM 6-carboxy-5,6,7,8-tetrah ydropterin synthase OS=Thiotrichales bacterium 34-46-19 OX=1970605 GN=B7X52_03390 PE=3 SV=1
MAMAFTLTTQLEFAAAHRLRGYDGNCARLHGHNWKVEISLTGSQLNDVGMLIDFKEIKRTGKQILTQLDHYYLNDISPFDAELNPTAENIAFYLFQQLSEALNDERISVSAVTVWENERNSATFSLD

SEQ ID NO: 26612 - protein, 125 aa, Bathymodiolus puteoserpentis; identical to SEQ ID NO: 18212
  misc_feature (1)..(125): tr|A0A483AP05|A0A483AP05_9BACT 6-carboxy-5,6,7,8-tetrah ydropterin synthase OS=thiotrophic endosymbiont of Bath ymodiolus puteoserpentis (Logatchev) OX=343240 GN=BPUTE OSOX_455 PE=3 SV=1

SEQ ID NO: 26613 - protein, 193 aa, Thiovulum sp.
  misc_feature (1)..(193): tr|J0UWS8|J0UWS8_9HELI 6-pyruvoyl-tetrahydropterin synt hase OS=Thiovulum sp. ES OX=1177931 GN=ThvES_00016710 P E=4 SV=1
MIIRKLFKFENAHIVRKCTSRRCRESIHGHSYKTEIFLESNFLDNGHMVYDFGLMKSYIKDLIDSFDHSISIWNGDKSEYISDMQKYSERWILLPVSPSAEQLSRIIFVLIDSFFKSNKMINGEKGVKLQSVIVHETDTGYAQCFREDAYSENMGKIELSEIIFSKDIISDWKDINLFENLKSGKPFANPKTL

SEQ ID NO: 26614 - protein, 134 aa, Tistlia consotensis
  misc_feature (1)..(134): tr|A0A1Y6BPR0|A0A1Y6BPR0_9PROT 6-pyruvoyl-tetrahydropte rin synthase OS=Tistlia consotensis USBA 355 OX=560819 GN=SAMN05428998_10546 PE=4 SV=1
MFSLTVRDHVMIAHSFEGAIFGPAQALHGATYVVDAEFRRAELDADGLVVDIGKAAEALKAVLAEINYRNLDALEAFRGRNTTTEFLANWVWRQLAARIAEGGLGPAATGLTGLKVTLAESHVAWAAYEAALPA

SEQ ID NO: 26615 - protein, 139 aa, Tistrella mobilis
  misc_feature (1)..(139): tr|A0A162LY66|A0A162LY66_9PROT 6-pyruvoyl tetrahydropte rin synthase OS=Tistrella mobilis OX=171437 GN=AUP44_19 665 PE=4 SV=1
MFTLGVRDHVMIAHSFRGEIFGPAQRLHGATYVVDVEFKRRALDDDGLVVDIGLAHQALKAALEPLAYRNLDDLPEFAGQNTTTEFLARHIHGRMAAAIDAGDLGASAAGIDAIRIVLHESHVAWAAFEGPVGDAARAG

SEQ ID NO: 26616 - protein, 139 aa, Tistrella mobilis
  misc_feature (1)..(139): tr|I3TR87|I3TR87_TISMK Uncharacterized protein OS=Tistr ella mobilis (strain KA081020-065) OX=1110502 GN=TMO_34 37 PE=4 SV=1
MFTLGVRDHVMIAHSFRGEIFGPAQRLHGATYVVDVEFKRRALDDDGLVVDIGLAHQALKAALEPLAYRNLDDLPEFAGRNTTTEFLARHIHGRMAAAIDAGDLGASASGIDAIRIVLHESHVAWAAFEGPVGDAARAG

SEQ ID NO: 26617 - protein, 139 aa, Tistrella sp.
  misc_feature (1)..(139): tr|A0A2E3EVH3|A0A2E3EVH3_9PROT Uncharacterized protein OS=Tistrella sp. OX=2024861 GN=CMO30_23320 PE=4 SV=1
MFTLGVRDHVMIAHSFRGEIFGPAQRLHGATYVVDVEFKRRALDDDGLVVDIGLAHQALKAALEPLAYRNLDDLPEFAGQNTTTEFLARYIHGRMAAAIDAGDLGASAAGIDAIRIVLHESHVAWAAFEGPVGDAARAG

SEQ ID NO: 26618 - protein, 128 aa, Tistrella sp.
  misc_feature (1)..(128): tr|A0A2E3EHR5|A0A2E3EHR5_9PROT 6-carboxy-5,6,7,8-tetrah ydropterin synthase OS=Tistrella sp. OX=2024861 GN=CMO3 0_00530 PE=3 SV=1
MFELSKQFRFEAAHTLHRVIDAEPSRRIHGHSYRAEVVIRGRPDPVTGMVLDLGLFERALAGARDGLDHRLLDEVPDLGPATMENLAAWIWRRLAGQLPGLARVIVHRDSTGDICTCFGPDAGSGVAA

SEQ ID NO: 26619 - protein, 292 aa, Tolumonas auensis
  misc_feature (1)..(292): tr|C4LBF3|C4LBF3_TOLAT Uncharacterized protein OS=Tolum onas auensis (strain DSM 9187 / TA4) OX=595494 GN=Tola_ 0760 PE=4 SV=1
MILFVRDLTVIDAAYLCPHRGVVGESWLVDVELTGELNEMSMLFDFSRVKKQLKAIIDAEVDHRLLIPQKASETMIEPAAAGYLFVDFLSEEHTIHLNCPEQAFAVIPAAEISTETVTDYLLTLIRHQLPGNIDGLKITLRHEHIPTPNYHYTHGLKKHDGNCQRIAHGHRSMIELWVDGARDHALEQYWATRWQDIYLGTEEDLVSVAELELSETGQELVSDQQHYCFRYTSAQGDFQLAIPKESCEIIDTDTTVELLASYIAAQLKPQLGEKELKVVAYEGVGKGAIEVL

SEQ ID NO: 26620 - protein, 289 aa, Tolypothrix bouteillei
  misc_feature (1)..(289): tr|A0A0C1N195|A0A0C1N195_9CYAN 6-pyruvoyl tetrahydropte rin synthase OS=Tolypothrix bouteillei VB521301 OX=1479 485 GN=DA73_0227130 PE=4 SV=1
MQCIVNRRAQFSASHRYWLPELSDAENIKQFGACSKFPGHGHNYVLYVSLFGELDKYGMVLNLSDVKQVIKREVTSQLDFSYLNDVWSEFQQTLPTTENIARVIWHKLAPYLPVARVQLYEHPELWADYLGNAMEAYLTLSTHFSAAHRLAHPDISNEANFEIYGKCARPNGHGHNYHLEVTVKGEINPRTGMIVDLGELNQIIEDYVVEPFDHTFLNKDIPYFAEVVPTAENIALHISQLLRSPIQELGAKLYKVKLIESPNNSCEIYCNDSDSNANTLQNESVLVRV

SEQ ID NO: 26621 - protein, 131 aa, Tolypothrix bouteillei
  misc_feature (1)..(131): tr|A0A0C1N613|A0A0C1N613_9CYAN 6-carboxy-5,6,7,8-tetrah ydropterin synthase OS=Tolypothrix bouteillei VB521301 OX=1479485 GN=DA73_0215640 PE=3 SV=1
MPKWKLVTEFTFDSAHYIRDYDGPCGRLHGHTYKVKIEATSSKLHSSQYCPHEVMVADFRTLRWAKQDVKKGGLDHCVLNEVIPPEYETTAEMIAKYIYDETKKRVPPGVHLKVAVSETPNSWAEYEDDDD

SEQ ID NO: 26622 - protein, 290 aa, Tolypothrix campylonemoides
  misc_feature (1)..(290): tr|A0A0C2LTV7|A0A0C2LTV7_9CYAN 6-pyruvoyl tetrahydropte rin synthase OS=Tolypothrix campylonemoides VB511288 OX =1245935 GN=SD81_02355 PE=4 SV=1
MQCIVNRRAQFSASHRYWLPELSEAENIEKFDASSKFPGHGHNYVLFVSLIGELDEYGMVLNLSDVKHVIKREVTSQLDFSYLNDVWSEFQQTLPTTENIARVIWQRLAPNLPLVRIQLFEHPQLWADYLGNGMEAYLTVSTHFSAAHRLAHPRLSSEENFEIYGKCARPNGHGHNYHLEVTVKGEIDARTGMIIDLGALNKVIEDYVVEPFDHTFLNKDIAHFAEVVPTAENIALHISQLLRSPIQELGAKLYKVKLIESPNNSCEIYCTESDPNSVNAAQNEPVLVRV

SEQ ID NO: 26623 - protein, 290 aa, Tolypothrix sp.; identical to SEQ ID NO: 20644
  misc_feature (1)..(290): tr|A0A0D6KFP1|A0A0D6KFP1_9CYAN Queuosine biosynthesis p rotein QueD OS=Tolypothrix sp. PCC 7601 OX=1188 GN=FDUT EX481_03850 PE=4 SV=1

SEQ ID NO: 26624 - protein, 158 aa, Tolypothrix sp.
  misc_feature (1)..(158): tr|A0A218QMT0|A0A218QMT0_9CYAN Queuosine biosynthesis p rotein QueD OS=Tolypothrix sp. NIES-4075 OX=2005459 GN= NIES4075_41950 PE=4 SV=1
MTNNQWLLAKEFRFEAAHQLPYHDGKCARLHGHSWRGVVYVAGGELVEKGAKQGMLIDYSDIKTYLKPLVENYLDHYHLNESTGLESPTSEQIAAWIYEKLEAAGLPGLLAVRIDETCTSICMYSKNRIAGWLNSGIDLNLHHSRSEEAVGINLTSIM

SEQ ID NO: 26625 - protein, 128 aa, Tolypothrix tenuis; identical to SEQ ID NO: 17729
  misc_feature (1)..(128): tr|A0A1Z4N7S8|A0A1Z4N7S8_9CYAN 6-carboxy-5,6,7,8-tetrah ydropterin synthase OS=Tolypothrix tenuis PCC 7101 OX=2 31146 GN=NIES37_57800 PE=3 SV=1

SEQ ID NO: 26626 - protein, 290 aa, Tolypothrix tenuis; identical to SEQ ID NO: 17728
  misc_feature (1)..(290): tr|A0A1Z4N6X6|A0A1Z4N6X6_9CYAN Putative 6-pyruvoyl tetr ahydropterin synthase OS=Tolypothrix tenuis PCC 7101 OX =231146 GN=NIES37_54570 PE=4 SV=1

SEQ ID NO: 26627 - protein, 120 aa, Trabulsiella guamensis
  misc_feature (1)..(120): tr|A0A085A888|A0A085A888_9ENTR 6-carboxy-5,6,7,8-tetrah ydropterin synthase OS=Trabulsiella guamensis ATCC 4949 0 OX=1005994 GN=queD PE=3 SV=1
MSTTLFKDFTFEAAHHLPHVPEGHKCGRLHGHSFMVRLEITGEVDPHTGWIMDFADLKAAFKPTYDRLDHYYLNEIHGLENPTSEVLAKWIWDQVKPVVPLLSAVMVKETCTAGCVYRGE

SEQ ID NO: 26628 - protein, 120 aa, Trabulsiella odontotermitis
  misc_feature (1)..(120): tr|A0A0L0GZM5|A0A0L0GZM5_9ENTR 6-carboxy-5,6,7,8-tetrah ydropterin synthase OS=Trabulsiella odontotermitis OX=3 79893 GN=GM31_14620 PE=3 SV=1
MSTTLFKDFTFEAAHHLPHVPEGHKCGRLHGHSFMVRLEITGDVDPHTGWIMDFADLKAAFKPTYDRLDHYYLNEIPGLENPTSEVLAKWIWDQIKPVVPLLSAVMVKETCTAGCVYRGE

SEQ ID NO: 26629 - protein, 117 aa, Tranquillimonas sp.
  misc_feature (1)..(117): tr|A0A438AL59|A0A438AL59_9RHOB 6-carboxy-5,6,7,8-tetrah ydropterin synthase OS=Tranquillimonas sp. M0103 OX=248 6419 GN=EKE94_01935 PE=3 SV=1
MFRIRKEFHFSASHRLAHLPDDHQCARLHGHNYIVVVELAAESLTRDGFVRDYHDLAPFKAYIDGTFDHRHLNDVLDVPSTAEHLARHFHDWCRARWRETAAVFVSETPKTWAEYRP

SEQ ID NO: 26630 - protein, 123 aa, Treponema azotonutricium
  misc_feature (1)..(123): tr|F5YE12|F5YE12_TREAZ Uncharacterized protein OS=Trepo nema azotonutricium (strain ATCC BAA-888 / DSM 13862 / ZAS-9) OX=545695 GN=TREAZ_1543 PE=4 SV=1
MEGEVNSKNGFVVACNSIKNHAWEYLVNFDHAIILQKEDPILPELLKVYEAQGIKGGSTWNTSVGIAFDTELAKAYPECRLVVVKKVATVENLIEVFYSLLKDTLNIKKLTFTSGDNAASFSV

SEQ ID NO: 26631 - protein, 124 aa, Treponema azotonutricium
  misc_feature (1)..(124): tr|F5YFK2|F5YFK2_TREAZ 6-carboxy-5,6,7,8-tetrahydropter in synthase OS=Treponema azotonutricium (strain ATCC BA A-888 / DSM 13862 / ZAS-9) OX=545695 GN=TREAZ_0075 PE=3 SV=1
MYSVRVEADFAAAHFLSHYHGKCENLHGHNYRVRAWARGESLSDGGMLLDFGVLKKCLREACAGLDHTNLNDKGIFANDPSAERIAKYIFDQTKALLPPEAAGLLHAVDVYETPTSMARYKPDK

SEQ ID NO: 26632 - protein, 130 aa, Treponema berlinense
  misc_feature (1)..(130): tr|A0A1T4NSV5|A0A1T4NSV5_9SPIO 6-carboxy-5,6,7,8-tetrah ydropterin synthase OS=Treponema berlinense OX=225004 G N=SAMN02745152_01315 PE=3 SV=1
MFEVRITDDFAAAHFLRDYNGKCENLHGHNYKVYVHVEGNELDEGGMLLDFTLLKTALKEVLSKIDHTNLNDIAIFDQNPSAERIAVYIYKNMLKVLSEKGLDLSKNSNRRISKVDVFETDKNRARYIPE

SEQ ID NO: 26633 - protein, 132 aa, Treponema brennaborense
  misc_feature (1)..(132): tr|F4LIE6|F4LIE6_TREBD 6-carboxy-5,6,7,8-tetrahydropter in synthase OS=Treponema brennaborense (strain DSM 1216 8 / CIP 105900 / DD5/3) OX=906968 GN=Trebr_0750 PE=3 SV =1
MYEVRIEADFAAAHFLKEYHGKCERLHGHNYKVFAHVRGSRLDEGGMLLDFSELKRVVRSVCAELDHTNLNDMQCDGVDVFDQNPSAEHIAQWIFRRIQSQLAGNAGMQSGTALYAVDVFETDTSRARYCEP

SEQ ID NO: 26634 - protein, 133 aa, Treponema bryantii
  misc_feature (1)..(133): tr|A0A1I3JKP0|A0A1I3JKP0_9SPIO 6-pyruvoyltetrahydropter in/6-carboxytetrahydropterin synthase OS=Treponema brya ntii OX=163 GN=SAMN04487775_10389 PE=4 SV=1
MFEVRVTADFAAAHFLRDYNGKCENLHGHNYKVYAHVRGEVLNEGGMLLDFTKLKAALRKVCKELDHTNLNDKEVFDQNPSAERIAMYIFHGIINELKDEGVDLSFVQGKKDPYLFAVDVFETDTSRARYSIL

SEQ ID NO: 26635 - protein, 134 aa, Treponema bryantii
  misc_feature (1)..(134): tr|A0A1H9HWU6|A0A1H9HWU6_9SPIO 6-carboxy-5,6,7,8-tetrah ydropterin synthase OS=Treponema bryantii OX=163 GN=SAM N04487977_10815 PE=3 SV=1
MFEVRVTADFAAAHFLRDYNGKCENLHGHNYKVYAHVKGPKLNEGGMLLDFSKLKAALREVCKQLDHTNLNDLAVFDQNPSAERIAMYIYDGIIALLKKEGIDLSYSAGKTEPALYCVDVFETETSRARYRVDE

SEQ ID NO: 26636 - protein, 125 aa, Treponema caldarium
  misc_feature (1)..(125): tr|F8F2M0|F8F2M0_TRECH 6-carboxy-5,6,7,8-tetrahydropter in synthase OS=Treponema caldarium (strain ATCC 51460 / DSM 7334 / H1) OX=744872 GN=Spica_0985 PE=3 SV=1
MYEVRVETDFAAAHFLSHYHGKCERLHGHNYRVRLWARGSELDTGGMLIDFGVLKGLLREVCGRLDHQNLNEFSVFSGDPSAERIAKYIFDEMLTLLSHGGYNAKLLYAVDVYETPTNMARYVRD

SEQ ID NO: 26637 - protein, 127 aa, Treponema phagedenis
  misc_feature (1)..(127): tr|E7NTZ7|E7NTZ7_TREPH 6-carboxy-5,6,7,8-tetrahydropter in synthase OS=Treponema phagedenis F0421 OX=754027 GN= queD PE=3 SV=1
MYEVRVEADFAAAHFLTDYHGKCERLHGHNYRVLAHAQGTELDEGGMLFDFGILKKALREVCAQLDHRNLNDFSFFNGNPSAERIAEFIFTEIKKLSPDCPLVAVDVYETPTSRARFYQENRLVLKS

SEQ ID NO: 26638 - protein, 127 aa, Treponema phagedenis; identical to SEQ ID NO: 26637
  misc_feature (1)..(127): tr|A0A5D5BHP1|A0A5D5BHP1_TREPH 6-carboxy-5,6,7,8-tetrah ydropterin synthase OS=Treponema phagedenis OX=162 GN=q ueD PE=3 SV=1

SEQ ID NO: 26639 - protein, 137 aa, Treponema porcinum
  misc_feature (1)..(137): tr|A0A1T4LXD0|A0A1T4LXD0_9SPIO 6-pyruvoyltetrahydropter in/6-carboxytetrahydropterin synthase OS=Treponema porc inum OX=261392 GN=SAMN02745149_01762 PE=4 SV=1
MYEVRVTADFAAAHFLKDYNGKCENLHGHNYKVYAHVRGNRLDEGGMLLDFTKLKSVLRGVCAELDHTNLNDMPVFKQNPSAERIAKYIFDAIIERELLSGEDLRKGEGKTSVWLQAVDVFETDTSRARYMPDDLPE

SEQ ID NO: 26640 - protein, 187 aa, Treponema porcinum
  misc_feature (1)..(187): tr|A0A1T4KUM9|A0A1T4KUM9_9SPIO 6-pyruvoyltetrahydropter in/6-carboxytetrahydropterin synthase OS=Treponema porc inum OX=261392 GN=SAMN02745149_01316 PE=4 SV=1
MRSITTLDLQYAHRFYGFKGEAQYLHGHTGKLTIEVEDSVEAGVNMVFPCNEIQKTAWEVLKNFDHALILREDDPLLPAILKVYEEQGIKDGAPTNKMKGPAFKTELATAYPDCRLVVTKETMTVEGMIKIVYDLLKDKLNIAKLTFTSGVNAASQEYDVTGTKDRCPLCGIALNENGVCPKCGYKK

SEQ ID NO: 26641 - protein, 206 aa, Treponema primitia
  misc_feature (1)..(206): tr|F5YKX2|F5YKX2_TREPZ Putative rubredoxin OS=Treponema primitia (strain ATCC BAA-887 / DSM 12427 / ZAS-2) OX= 545694 GN=TREPR_3243 PE=4 SV=1
MGVIKMKQWVCSKCGYVYTGESAPAQCPVCHVPSSAFKEKALGGEKRVLTSITKLNIQYAHRFLGYIGEAQYLHGHTGTLTLEVEGEVNTSNGFVVACNSIKNHAWEYLVNFDHAIILQKEDPILPELLKVYEAQGIKGGSPWNTSTGRAFDTDLAKAYPECRLVVVKKVATVENLIEVFYTLLKDTLNIKKLTFTSGDNAASFSV

SEQ ID NO: 26642 - protein, 128 aa, Treponema saccharophilum
  misc_feature (1)..(128): tr|H7EKE0|H7EKE0_9SPIO 6-carboxy-5,6,7,8-tetrahydropter in synthase OS=Treponema saccharophilum DSM 2985 OX=907 348 GN=TresaDRAFT_1780 PE=3 SV=1
MFEVRVNTDFAAAHFLRDYNGKCENLHGHNYKVYAHVRGNALNEGGMLLDFTELKRALKSVCARLDHTNLNDMEVFDQNPSAERIAKFIFDSILAMIPSLVKTDGDKAFLQAVDVFETDTNRARYSVD

SEQ ID NO: 26643 - protein, 145 aa, Treponema socranskii
  misc_feature (1)..(145): tr|U1GPT5|U1GPT5_TRESO 6-carboxy-5,6,7,8-tetrahydropter in synthase OS=Treponema socranskii subsp. socranskii V PI DR56BR1116 = ATCC 35536 OX=1125725 GN=queD PE=3 SV=1
MSFEGFYAILTVMFEVRVEANFSAAHFLRDYNGKCESLHGHNYTVFAHVQGTALGSGGMLIDFGKLKASLRAVCAELDHTNLNDNAVFLQNPSAERIAKYIYDALIAEVRHAGVDLSYIDGKTTAFLSAVDVFETDTSRARYSPA

SEQ ID NO: 26644 - protein, 133 aa, Treponema socranskii
  misc_feature (1)..(133): tr|S3JS46|S3JS46_TRESO Queuosine biosynthesis protein Q ueD OS=Treponema socranskii subsp. paredis ATCC 35535 O X=1125701 GN=HMPREF1221_00106 PE=4 SV=1
MFEVRVETNFSAAHFLRDYNGKCENLHGHNYTVRAHVKGATLGSGGMLIDFVKLKKALRAVCDELDHTNLNEYAVFLQNPSAERIAKYIYDALIAEVRHAGVDLSYTRGKEGAFLSAVDVFETDTSRARYSPE

SEQ ID NO: 26645 - protein, 119 aa, Treponema sp.
  misc_feature (1)..(119): tr|A0A521IFW7|A0A521IFW7_9SPIO 6-carboxy-5,6,7,8-tetrah ydropterin synthase OS=Treponema sp. OX=166 GN=queD PE= 3 SV=1
MFEVRVEAEFAAAHFLADYHGKCERLHGHNYRVLAHARGTELDAGGMLVDFGVLKKALRDVCSSLDHSNLNDMEAFSNNPSAERIARYVFKRLRELLPGCPLAAVDVYETPTSRARYSE

SEQ ID NO: 26646 - protein, 134 aa, Treponema sp.
  misc_feature (1)..(134): tr|I0X6C6|I0X6C6_9SPIO Queuosine biosynthesis protein Q ueD OS=Treponema sp. JC4 OX=1124982 GN=MSI_23630 PE=4 S V=1
MFEVRVEADFSAAHFLRDYNGKCENLHGHNYKVYAHVRGSQLNEGGMLLDFTKLKAALRAVCKELDHTNLNDFEYFDQNPSAERIAMYIAAGILNRLSQEGEDLSKPAAGDGRAFLYAVDVFETETSRARYILE

SEQ ID NO: 26647 - protein, 128 aa, Treponema succinifaciens
  misc_feature (1)..(128): tr|F2NXX1|F2NXX1_TRES6 6-carboxy-5,6,7,8-tetrahydropter in synthase OS=Treponema succinifaciens (strain ATCC 33 096 / DSM 2489 / 6091) OX=869209 GN=Tresu_0491 PE=3 SV= 1
MFEVRVTADFSAAHFLRDYNGKCENLHGHNYKVYAHVRGTELDRGGMLLDFTKLKKTLREVCGKIDHTNLNDIEFFEQNPSAERIAVYIYNHIIEGIPLLKKTDGKKAWLYAIDVFETETSRARYIAE

SEQ ID NO: 26648 - protein, 143 aa, Trichococcus collinsii
  misc_feature (1)..(143): tr|A0A143YYE4|A0A143YYE4_9LACT 6-carboxy-5,6,7,8-tetrah ydropterin synthase OS=Trichococcus collinsii OX=157076 GN=Tcol_1660 PE=3 SV=1
MYILKTEHSFDSAHFLAGYEGKCANIHGHRWRVEIQVQAEELVTSGQLDGMVVDFGDLKKDLKAAVDHLDHALIIEQGTMREQTLQCIKEDGFAVLEFPFRPTAENFAAHFYRTMADLGYDVKRATVYETPTNSAAYEESGVR

SEQ ID NO: 26649 - protein, 143 aa, Trichococcus ilyis
  misc_feature (1)..(143): tr|A0A143YHG4|A0A143YHG4_9LACT 6-carboxy-5,6,7,8-tetrah ydropterin synthase OS=Trichococcus ilyis OX=640938 GN= TR210_900 PE=3 SV=1
MYILKTEHSFDSAHFLAGYEGKCANIHGHRWRVEIEVQAEELINSGQLDGMVVDFGDLKKDLKAVVDRFDHALIIEQGTMRELTLQCIKEDGFNVIEFPARPTAENFAAHFYRTMKNLGYDVRRATVYETPTNSAAYEESGVR

SEQ ID NO: 26650 - protein, 143 aa, Trichococcus palustris
  misc_feature (1)..(143): tr|A0A143YDY6|A0A143YDY6_9LACT 6-carboxy-5,6,7,8-tetrah ydropterin synthase OS=Trichococcus palustris OX=140314 GN=Tpal_751 PE=3 SV=1
MYILKTEHSFDSAHFLADYDGKCGNIHGHRWRVEIEVQSEELVASGQLGGMVVDFGDLKKDLKAAVDYFDHSLIIEQGTMREKTLQCIKEDGFSVIEFPTRPTAENFAAHFYRTMAGLGYDVKRAIIYETPTNSATYEESGVK

SEQ ID NO: 26651 - protein, 143 aa, Trichococcus pasteurii
  misc_feature (1)..(143): tr|A0A1W1IGH9|A0A1W1IGH9_9LACT 6-carboxy-5,6,7,8-tetrah ydropterin synthase OS=Trichococcus pasteurii OX=43064 GN=TPAS_1573 PE=3 SV=1
MYILKTEHSFDSAHFLAGYAGKCANIHGHRWRVEIEVQAEALVASGQLDGMVVDFGDLKRDLKTAVDHLDHALIIEQGTMREQTLQCIKEDGFAVIEFPFRPTAENFAAHFYRTMAGLGYEVKRATVYETPTNSAVYEESGVR

SEQ ID NO: 26652 - protein, 143 aa, Trichococcus patagoniensis
  misc_feature (1)..(143): tr|A0A2T5IJ18|A0A2T5IJ18_9LACT 6-carboxy-5,6,7,8-tetrah ydropterin synthase OS=Trichococcus patagoniensis OX=38 2641 GN=C8U37_11293 PE=3 SV=1
MYILKTEHSFDSAHFLAGYEGKCANIHGHRWRVEIEVQAEELIASGQLDGMVVDFGDLKKDLKAAVDHFDHALIIEQGTMRAQTLQCIKEDGFNVIEIPSRPTAENFAEHFYRTMQVLGYDVKRATVYETPTNSAAYEESEVR

SEQ ID NO: 26653 - protein, 143 aa, Trichococcus sp.
  misc_feature (1)..(143): tr|A0A383TCB4|A0A383TCB4_9LACT 6-carboxy-5,6,7,8-tetrah ydropterin synthase OS=Trichococcus sp. ART1 OX=2094020 GN=TART1_0575 PE=3 SV=1
MYILKTEHSFDSAHFLAGYAGKCANIHGHRWRVEIEVQAEALVASGQLDGMVVDFGDLKRDLKTAVDHLDHALIIEQGTMREQTLQCIKEDGFAVIEFPFRPTAENFAAHFYRMMAGLGYDVKRATVYETPTNSAAYEESGVR

SEQ ID NO: 26654 - protein, 128 aa, Trichormus variabilis
  misc_feature (1)..(128): tr|Q3MD58|Q3MD58_TRIV2 6-carboxy-5,6,7,8-tetrahydropter in synthase OS=Trichormus variabilis (strain ATCC 29413 / PCC 7937) OX=240292 GN=Ava_1455 PE=3 SV=1
MPKWKVVTEFSFNSAHYIKDYNGPCGRMHGHNYQVRIEAISTQLHSSQYCPHPVMVADFRTLRWAKQDVTKGGLDHGILNEVMPPEYETTAEMIAKYIYDETKKRVPPDVQLKVHVSETPNSWVEYED

SEQ ID NO: 26655 - protein, 130 aa, Trichormus variabilis
  misc_feature (1)..(130): tr|A0A433UTX5|A0A433UTX5_ANAVA 6-carboxy-5,6,7,8-tetrah ydropterin synthase OS=Trichormus variabilis SAG 1403-4 b OX=447716 GN=DSM107003_20520 PE=3 SV=1
MPKWKLLTEFTFDSAHYIKDYKGPCGRMHGHTYKVKIEAKSSQLHSSEYCPHPVMVADFRSLRWAKKDVTQGGLDHCVLNEVLPPEYETTAEMIAKYIYDETKKRLPADVKLKVAVSETPNSWVEYEDDE

SEQ ID NO: 26656 - protein, 153 aa, Trinickia caryophylli
  misc_feature (1)..(153): tr|A0A1X7FA83|A0A1X7FA83_TRICW 6-pyruvoyltetrahydropter in/6-carboxytetrahydropterin synthase OS=Trinickia cary ophylli OX=28094 GN=SAMN06295900_10877 PE=4 SV=1
MIPAVLTITRKLEFDAGHRIPDHRSQCRNLHGHRYVLEITLQGDVVETEGAPDRGMVMDFADVKSLAMEHLVSRWDHAFLVYSGDTQVRGFLESMPDHKTVVLDRVPTVENLAAIAFETLAEVYDAHYGVNLRLERVRLYETPNCWADFVRAA

SEQ ID NO: 26657 - protein, 150 aa, Trinickia soli
  misc_feature (1)..(150): tr|A0A2N7VLJ0|A0A2N7VLJ0_9BURK 6-carboxytetrahydropteri n synthase QueD OS=Trinickia soli OX=380675 GN=queD PE= 4 SV=1
MTITRKLEFDAGHRIPDHRSQCRNLHGHRYVLEITLHGEIVETEGAPDRGMVMDFADVKSLAMEHLVSRWDHAFLVFEGDTRVREFLQSMPDHKTVVIDRIPTVEHLAAIAFETLSQVYDAHYGVNLQLHHVRLYETPNCWADVVRDGAR

SEQ ID NO: 26658 - protein, 148 aa, Trinickia sp.
  misc_feature (1)..(148): tr|A0A4U1HQA8|A0A4U1HQA8_9BURK 6-carboxy-5,6,7,8-tetrah ydropterin synthase OS=Trinickia sp. 7GSK02 OX=2571161 GN=queD PE=3 SV=1
MLTITRKLEFDAGHRIPDHRSQCRNLHGHRYVIEITLQGDVVETEGAPDRGMVMDFADVKSLAMEHLVNRWDHAFLVFEGDTKVREFLDSMPGHKTVVLDRIPTVENLAAVAFDVLANVYDAHYGVNLRLHRVRLYETPNCWADVVRG

SEQ ID NO: 26659 - protein, 148 aa, Trinickia symbiotica
  misc_feature (1)..(148): tr|A0A2N7X8M7|A0A2N7X8M7_9BURK 6-carboxytetrahydropteri n synthase QueD OS=Trinickia symbiotica OX=863227 GN=qu eD PE=4 SV=1
MTITRKLEFDAGHRIPDHRSQCRNLHGHRYVLEITLQGDVIETEGAPDRGMVMDFADVKSLAMEHLVSRWDHAFLVYEGDERVRDFLQSMPDHKTVVLERVPTVENLAAIAFETLSHVYDAHYGVNLRLTRVRLFETPNCWADFVRDA

SEQ ID NO: 26660 - protein, 148 aa, Trinickia symbiotica
  misc_feature (1)..(148): tr|A0A2T3XYW9|A0A2T3XYW9_9BURK 6-carboxytetrahydropteri n synthase QueD OS=Trinickia symbiotica OX=863227 GN=qu eD PE=4 SV=1
MTITRKLEFDAGHRIPDHRSQCRNLHGHRYVLEITLQGDVIETEGAPDRGMVMDFADVKSLAMEHLVSRWDHAFLVYEGDERVRDFLASMPDHKTVVLERVPTVENLAAIAFETLSHVYDAHYGVNLRLTRVRLFETPNCWADFVRDA

SEQ ID NO: 26661 - protein, 121 aa, Tropicibacter phthalicicus
  misc_feature (1)..(121): tr|A0A238JF20|A0A238JF20_9RHOB 6-carboxy-5,6,7,8-tetrah ydropterin synthase OS=Tropicibacter phthalicicus OX=10 37362 GN=queD PE=3 SV=1
MFRICKEFHFCASHSLETLPLGHKCAGLHGHNYIVYLELESETLDETGFIIDFHELSAFKDYIDDAFDHRHLNDVMDIPPTTENVAFHFYTWCKARWPQTSAVRVSETPKTWAEYRPKSAA

SEQ ID NO: 26662 - protein, 129 aa, Tumebacillus algifaecis
  misc_feature (1)..(129): tr|A0A223D7B0|A0A223D7B0_9BACL 6-carboxy-5,6,7,8-tetrah ydropterin synthase OS=Tumebacillus algifaecis OX=12146 04 GN=queD PE=3 SV=1
MSVTKSFTFDSAHRLDDYIGKCANLHGHTYKLEVTIKGRTDHRGIVVDFGDIKGIVNEQIIAKYDHRFLNDLMPFNTTAENMVFHFFEIIDTYLKQLIDNTPCRLMKVRLWETPTAYAELTREDYDAAE

SEQ ID NO: 26663 - protein, 129 aa, Tumebacillus avium
  misc_feature (1)..(129): tr|A0A1Y0IVC9|A0A1Y0IVC9_9BACL 6-carboxy-5,6,7,8-tetrah ydropterin synthase OS=Tumebacillus avium OX=1903704 GN =CBW65_12650 PE=3 SV=1
MSVTKIFTFDSAHRLDDYIGKCANLHGHTYKLEVTIKGRTDHRGIVVDFGDIKKIVNEQIIGVYDHRFLNDLMEFNTTAENMVFHFFEIIDTFLGKIVDDTPCRLMRLRLWETPTAYAELTREDYDAAE

SEQ ID NO: 26664 - protein, 140 aa, Tumebacillus flagellatus
  misc_feature (1)..(140): tr|A0A074LM26|A0A074LM26_9BACL 6-carboxy-5,6,7,8-tetrah ydropterin synthase OS=Tumebacillus flagellatus OX=1157 490 GN=EL26_17090 PE=3 SV=1
MMTQVPYHMKEVAVTKIFTFDSAHRLDDYIGKCANLHGHTYKLEVTIKGRTDHRGIVVDFGDIKSIVNEQIIGKYDHRFLNDLMDFNTTAENMVVHFFEIIDSYLQQIDNATPVRLVKCRLWETPSAYAEVTWEDFHAAQ

SEQ ID NO: 26665 - protein, 139 aa, Tumebacillus permanentifrigoris
  misc_feature (1)..(139): tr|A0A316D705|A0A316D705_9BACL 6-carboxy-5,6,7,8-tetrah ydropterin synthase OS=Tumebacillus permanentifrigoris OX=378543 GN=C7459_11248 PE=3 SV=1
MTQVPYHTKEVAVTKIFTFDSAHRLDDYIGKCANLHGHTYKLEVTIKGLTDHRGIVVDFGDIKSIVNDQIIGKYDHRFLNDLMDFNTTAENMVVHFFEIIDSYLQQLDNATPVRLMKCRLWETPSCYAEINREDFYAAQ

SEQ ID NO: 26666 - protein, 139 aa, Tumebacillus sp.
  misc_feature (1)..(139): tr|A0A4V2SUQ7|A0A4V2SUQ7_9BACL 6-carboxy-5,6,7,8-tetrah ydropterin synthase OS=Tumebacillus sp. BK434 OX=251216 9 GN=EV586_103199 PE=3 SV=1
MTKQPYHNREVSVTKIFTFDSAHRLDDYIGKCANLHGHTYKLEVTIKGRTDHRGIVVDFGDIKKIVNEQIIGVYDHRFLNDLMAFNTTAENMVFHFFEIIDTYLRKIADDTPCRLLRVRLWETPTAYAELTREDYDAAE

SEQ ID NO: 26667 - protein, 142 aa, Turicibacter sanguinis
  misc_feature (1)..(142): tr|A0A173SMT9|A0A173SMT9_9FIRM 6-carboxy-5,6,7,8-tetrah ydropterin synthase OS=Turicibacter sanguinis OX=154288 GN=queD PE=3 SV=1
MFTLKSEIEFDAAHYLSDYEGKCHNIHGHRYRVVIKVSADSLHETGQCRGMVDDFSTIKQALKKIHDLFDHRLILEENEEGKELAKKIAETKLGFEIYFVPYRPTAEEMSRDIYQRLQNLGIKVTEVELFETPKNSCIYTEV

SEQ ID NO: 26668 - protein, 143 aa, Turicibacter sanguinis
  misc_feature (1)..(143): tr|A0A173YSC0|A0A173YSC0_9FIRM 6-carboxy-5,6,7,8-tetrah ydropterin synthase OS=Turicibacter sanguinis OX=154288 GN=ERS852422_01364 PE=3 SV=1
MFTLKSEIQFDMAHYLSGYVGKCKNIHGHRYRLVVKVSSQTLHESGQLRGMVDDFSEVKAVLKEVHDLFDHKLVIEENEEGKRVVEKLNESGKVFEILFVPYRPTAEEMSRHIFNEIKKRGVRVTEVELFETPTNSCIYTEED

SEQ ID NO: 26669 - protein, 143 aa, Turicibacter sp.; identical to SEQ ID NO: 26668
  misc_feature (1)..(143): tr|A0A120IDS5|A0A120IDS5_9FIRM 6-carboxy-5,6,7,8-tetrah ydropterin synthase OS=Turicibacter sp. H121 OX=1712675 GN=AT726_11395 PE=3 SV=1

SEQ ID NO: 26670 - protein, 118 aa, Turneriella parva
  misc_feature (1)..(118): tr|I4BC21|I4BC21_TURPD 6-carboxy-5,6,7,8-tetrahydropter in synthase OS=Turneriella parva (strain ATCC BAA-1111 / DSM 21527 / NCTC 11395 / H) OX=869212 GN=Turpa_0026 P E=3 SV=1
MQIEKEFIFDSAHFLPLVPENHKCRKLHGHTYRVTIAVSGEINPQGWIMDFADIGDIVKPIVRSIDHTLLNSVEGLENPTAENIARWLFDRIKEKLPELAFVIVQEGESSRVIYPQRQ

SEQ ID NO: 26671 - protein, 290 aa, Tychonema bourrellyi
  misc_feature (1)..(290): tr|A0A2G4F5L1|A0A2G4F5L1_9CYAN 6-pyruvoyl tetrahydropte rin synthase OS=Tychonema bourrellyi FEM_GT703 OX=20406 38 GN=CP500_002240 PE=4 SV=1
MQCIINRRAQFSASHRYWLPELSEAENFERFGPTARAPGHGHNYVLYVSMIGKLDEYGMVLNLSDVKHVIKREVTKDLDFSYLNEAWPEFEQTLPTTENIARQIWLRLAPHLPLSKIQLFEHPELWAEYLGNGMEAYLTLSTHFSAAHRLARPDLSFEENSEIYGKCARPSGHGHNYHLEVTVKGEIDARTGMIADLGALQKAIDDYVVEPFDHTFLNKDIAYFENVVPTAENIAVRIGQLLRSPIRELGAELHKIKLIESPNNSCEIYGADLEELVAERQQPEAVLAGV

SEQ ID NO: 26672 - protein, 139 aa, Tyzzerella sp.
  misc_feature (1)..(139): tr|A0A1Y4UDN2|A0A1Y4UDN2_9FIRM 6-carboxy-5,6,7,8-tetrah ydropterin synthase OS=Tyzzerella sp. An114 OX=1965545 GN=B5E58_11575 PE=3 SV=1
MYMLQTEQSFDAAHFLKDYNGKCSNIHGHRWRVVVCISAEKLSTEQQTKGMIIDFSDLKKALKNICDYFDHTFIYEENSLKSETVIALQSENFRLITVPFRPTAENFARFIYEKLKKEKYTVCRVEVYETPNNCAIYEE

SEQ ID NO: 26673 - protein, 146 aa, Uliginosibacterium sp.
  misc_feature (1)..(146): tr|A0A2N4XKD1|A0A2N4XKD1_9RHOO 6-carboxy-5,6,7,8-tetrah ydropterin synthase OS=Uliginosibacterium sp. TH139 OX= 2067453 GN=queD PE=3 SV=1
MIITRRLEFDSGHRIPDHRSLCRHLHGHRYALEVTVSGDVTRMDGDPRNGMVLDFSEVKSLMRQYVVDVWDHAFLVYEGDKQIRDFLDSLPEHRTVVLNVVPTAENLAAKAFELLAPHINDLCDKALTLENVRIYETPNCWADARR

SEQ ID NO: 26674 - protein, 149 aa, Ulvibacter antarcticus
  misc_feature (1)..(149): tr|A0A3L9Z3S6|A0A3L9Z3S6_9FLAO 6-carboxy-5,6,7,8-tetrah ydropterin synthase OS=Ulvibacter antarcticus OX=442714 GN=BXY75_0497 PE=3 SV=1
MSNIRITKLFSFETGHALYGYDGKCRNVHGHSYRLSVTVIGTPIDNSDNVKYGMVIDFTDLKKIVKEEIVDVFDHATVFNKNTPHVELAKELSDRGHNVLLVDYQPTSEMMVIDFAEKIKNRLPKSILLHSLRLQETASSYAEWFASDN

SEQ ID NO: 26675 - protein, 137 aa, Ulvibacter antarcticus
  misc_feature (1)..(137): tr|A0A3L9YVG1|A0A3L9YVG1_9FLAO 6-carboxy-5,6,7,8-tetrah ydropterin synthase OS=Ulvibacter antarcticus OX=442714 GN=BXY75_1835 PE=3 SV=1
MSLTIFRKAHFNAAHRLYKASWDDAKNLEVFGKCSNPNYHGHNYELEVGLTGNIDPETGYLIDLKVLKDIIKSEVEDAFDHKNLNLEVEDFKELNPTVENIAIVIWKRLRNQLDSKYRITVKLYETPRNFVIYTGEE

SEQ ID NO: 26676 - protein, 149 aa, Ulvibacter litoralis
  misc_feature (1)..(149): tr|A0A1G7DDF6|A0A1G7DDF6_9FLAO 6-carboxy-5,6,7,8-tetrah ydropterin synthase OS=Ulvibacter litoralis OX=227084 G N=SAMN05421855_101910 PE=3 SV=1
MSNIRITKQFSFETGHALYGYDGKCRNVHGHSYKLSVTVIGTPNNDTTHAKFGMVIDFSDLKKIVKEEIVDVFDHATVFNKNTPHVELAKELSDRGHNVLLVDYQPTSEMMVIDFAEKIKNRLPNTIQLHSLKLQETDSSYAQWFASDN

SEQ ID NO: 26677 - protein, 135 aa, Ulvibacter litoralis
  misc_feature (1)..(135): tr|A0A1G7IWL8|A0A1G7IWL8_9FLAO 6-carboxy-5,6,7,8-tetrah ydropterin synthase OS=Ulvibacter litoralis OX=227084 G N=SAMN05421855_10758 PE=3 SV=1
MSLTIYRKAHFNAAHRLYKKEWSDAKNFEVFGKCSNPHYHGHNYDLEVGLTGTMDPETGFLIDLKILKTIIEEEILTPFDHKNLNVEVLEFKDLNPTVENIAIVIWNKLNTRLQSKYQISVKLYETPRNFVVYTG

SEQ ID NO: 26678 - protein, 149 aa, Ulvibacter marinus
  misc_feature (1)..(149): tr|A0A5J4IY75|A0A5J4IY75_9FLAO 6-carboxytetrahydropteri n synthase QueD OS=Ulvibacter marinus OX=1397112 GN=ULM A_06860 PE=4 SV=1
MSNIRITKQFSFETGHALYGYDGKCRNVHGHSYKLSVTVIGTPISEKDNAKYGMVIDFSDLKKIVKEEIVDVFDHATVFNKNTPHVELAKELSDRGHQVLLVNYQPTSEMMVIDFAEKIKQRLPQNINLHSLRLQETATSFAEWYASDN

SEQ ID NO: 26679 - protein, 150 aa, Ulvibacter sp.
  misc_feature (1)..(150): tr|A0A167J3W4|A0A167J3W4_9FLAO 6-pyruvoyl tetrahydropte rin synthase OS=Ulvibacter sp. LPB0005 OX=1763537 GN=UL VI_06085 PE=4 SV=1
MSNIRITKQFSFETGHALYGYDGKCRNVHGHSYKLSVTVIGTPNSDSNHVKFGMVIDFSDLKKIVKEEIVDVFDHATVFNKNTPHVELAKELADRGHNVLLVAYQPTSEMMVIDFAEKIKARLPEGIQLHALKLQETATSYAEWFASENK

SEQ ID NO: 26680 - protein, 169 aa, Ulvibacter sp.
  misc_feature (1)..(169): tr|A0A2N0ESD0|A0A2N0ESD0_9FLAO 6-pyruvoyltetrahydropter in/6-carboxytetrahydropterin synthase OS=Ulvibacter sp. MAR_2010_11 OX=1250229 GN=ATE92_1138 PE=4 SV=1
MVVIKYDFSKYRIFTYQFKRMSNIRITKQFSFETGHALYGYDGKCRNVHGHSYKLSVTVVGNPISDTSHVKFGMVIDFGDLKKIVKEEIVDVFDHATVFNKNTPHVELAKELSDRGHSVLLVNYQPTSEMMVIDFAGKIKARLPKNIQLHSLKLQETATSYAEWFASEN

SEQ ID NO: 26681 - protein, 121 aa, Umboniibacter marinipuniceus
  misc_feature (1)..(121): tr|A0A3M0A7A7|A0A3M0A7A7_9GAMM 6-carboxy-5,6,7,8-tetrah ydropterin synthase OS=Umboniibacter marinipuniceus OX= 569599 GN=DFR27_0821 PE=3 SV=1
MELFKEFTFEAAHRLPNVPEGHKCARLHGHSFMVRIAVEGPVDPVMGWVIDFGDIKKAFKPIYDQLDHYYLNDIPGLENPTSEVLAEWIWEKLQPTLPLLSRVEIRETCTSGCSYLGPKAK

SEQ ID NO: 26682 - protein, 136 aa, Umezawaea tangerina
  misc_feature (1)..(136): tr|A0A2T0SP00|A0A2T0SP00_9PSEU 6-pyruvoyl-tetrahydropte rin synthase OS=Umezawaea tangerina OX=84725 GN=CLV43_1 1455 PE=4 SV=1
MEVTLFSITVRDHVMIAHSFRGEVFGPAQRLHGATFVVDAKFNRTDLDSDNIVVDIGLATQELGAVLAEFNYRNLDEVPAFTGVNTSTEFLAKVIADRLADRVHAGALGEGARGLSAISVTLHESHVAWASYERPL

SEQ ID NO: 26683 - protein, 175 aa, Alphaproteobacteria bacterium
  misc_feature (1)..(175): tr|A0A212KJT9|A0A212KJT9_9PROT 6-pyruvoyl-tetrahydropte rin synthase OS=uncultured Alphaproteobacteria bacteriu m OX=91750 GN=KL86APRO_20353 PE=4 SV=1
MTLYHVTRRIGIDAGHRIRTHGSKCRNLHGHRYEIEATCAAPQPHAGGEQDGMVIDFGFLKEEMLEVIDAACDHGFIAELADDAVLEMLCPADAGFLDWKARIADAVGADGYALTHETRLGTKLYVIASTPTAEALAAHWFSRLAPRVAARSGGLARLVNLRVWETPNCHADYSA

SEQ ID NO: 26684 - protein, 190 aa, Anaerotruncus sp.
  misc_feature (1)..(190): tr|A0A1C6J9S5|A0A1C6J9S5_9FIRM Queuosine biosynthesis p rotein QueD OS=uncultured Anaerotruncus sp. OX=905011 G N=SAMEA3545359_02023 PE=4 SV=1
MRSITTLDLQYAHRFYGFKGEAQYLHGHTGVLTIEVEDTVEPGVNMVFPCNEIQKTAWGVLKNFDHALILRQDDPLLPAILDVYEKQGIRNGAPNNQMKGPAFKTELATAYPDCRLVVTKETMTVEGMIKIVYDLLKDKLNIAKITFTSGVNAASEEFSPNKVIDRCPLCGIALNENGVCPKCGYKKPQA

SEQ ID NO: 26685 - protein, 129 aa, Avibacterium sp.
  misc_feature (1)..(129): tr|A0A486XD77|A0A486XD77_9PAST 6-carboxy-5,6,7,8-tetrah ydropterin synthase OS=uncultured Avibacterium sp. OX=1 936169 GN=queD PE=3 SV=1
MAHLLDGHDGKCQNLHGHTYKLQVEVQGELHASGAKKGMVMDFSDLKQIVKEQILTPMDHAFIYDETSERESKIAQLLQDLNSKTFAMPTRTTAEEMARFIFQRLSAHLPISAIRLWETPTSFCEYREN

SEQ ID NO: 26686 - protein, 162 aa, Unknown
  misc_feature (1)..(162): tr|Q4JIS7|Q4JIS7_9BACT Putative 6-pyruvoyl tetrahydropt erin synthase OS=uncultured bacterium BAC10-4 OX=333425 GN=pts PE=4 SV=1
MAEYKIVVEKDYLVFACGHFITYEGSCETLHGHNYRARVELEGDLDENYYVWDFVSLKRLMRRLVDEMDHRMLLPLQNPALTLREEDGHVHVLYKDRRYVFPKQDVAFLPIPNTTAEMLARYLLGRVRDELRKLGGGRLKALAVEVEESFGQSGWCRERMSD

SEQ ID NO: 26687 - protein, 138 aa, Unknown
  misc_feature (1)..(138): tr|A0A1B2YQ65|A0A1B2YQ65_9BACT 6-carboxy-5,6,7,8-tetrah ydropterin synthase OS=uncultured bacterium OX=77133 PE =3 SV=1
MNKVTVSRKAHFNAAHRLYRKDWSDSKNEEVFDKCSNPYYHGHNYELVVSVTGNIDPETGYVMDMKVLKNLIKKHIEYVFDHKNLNEQVPDFATLIPTAENIVVVIWNKLRPHITAAHDLSITLYETPRNFVHFSGPN

SEQ ID NO: 26688 - protein, 110 aa, Bacteroides sp.
  misc_feature (1)..(110): tr|A0A1C5LJ01|A0A1C5LJ01_9BACE 6-carboxy-5,6,7,8-tetrah ydropterin synthase OS=uncultured Bacteroides sp. OX=16 2156 GN=queD PE=3 SV=1
MYTVIKRMEISASHSLQLSYQSKCEKLHGHNWIITVYCRSKELDENGMVVDFTHIKQAVEKQLDHNNLNDVLSFNPTAENIAFWVCNQVPHCFRVEVKESEGNTAIYEKD

SEQ ID NO: 26689 - protein, 110 aa, Bacteroides sp.; identical to SEQ ID NO: 18143
  misc_feature (1)..(110): tr|A0A1C6CIP6|A0A1C6CIP6_9BACE 6-carboxy-5,6,7,8-tetrah ydropterin synthase OS=uncultured Bacteroides sp. OX=16 2156 GN=queD PE=3 SV=1

SEQ ID NO: 26690 - protein, 151 aa, Bacteroidetes bacterium
  misc_feature (1)..(151): tr|H5SK66|H5SK66_9BACT Hypothetical conserved protein O S=uncultured Bacteroidetes bacterium OX=152509 GN=HGMM_ F40B03C40 PE=4 SV=1
MPPRVYVTRRFHFSAAHRVYNPAWSDEKNYEVFGPCSHPGFHGHNYELEVTVAGAPNPDTGYVLDLALLKKLIDSHLIAQLDHKNLNTDVPFLSGQIPSTENLIVALWKEIQRLLPPGVKLVRLRLQETPRNAFEYYGEEDPLPPAQHQTL

SEQ ID NO: 26691 - protein, 140 aa, Blautia sp.
  misc_feature (1)..(140): tr|A0A1C6JH10|A0A1C6JH10_9FIRM 6-carboxy-5,6,7,8-tetrah ydropterin synthase OS=uncultured Blautia sp. OX=765821 GN=SAMEA3545380_03176 PE=3 SV=1
MYYLQTKASFDAAHFLWKYEGKCRNIHGHRWNVVAKIKSQELEQEGQTRGMVVDFGNLKKDLKVLCDYFDHSLIYETGSLKAETVAALQNEDFHLEEVSFRPTAENFAYYFYKKLTDLGYGVHYVEVYETPNNCAVYEEE

SEQ ID NO: 26692 - protein, 149 aa, Blautia sp.
  misc_feature (1)..(149): tr|A0A1C5S9D5|A0A1C5S9D5_9FIRM 6-carboxy-5,6,7,8-tetrah ydropterin synthase OS=uncultured Blautia sp. OX=765821 GN=SAMEA2393092_02289 PE=3 SV=1
MYQLKTEADFDSAHFLSGYTGKCSNIHGHRWHVEIEIESRKLEKNGQGRGMLVDFGDLKKDLRELADSMDHTLIYEENTLRPKTLEALDEEGFHLVKVPFRPTAENFSEYFFRKMEEKGYPVKRAVVYETPNNCAAYRETEEETEAVWL

SEQ ID NO: 26693 - protein, 120 aa, Citrobacter sp.
  misc_feature (1)..(120): tr|A0A212IL61|A0A212IL61_9ENTR 6-carboxy-5,6,7,8-tetrah ydropterin synthase OS=uncultured Citrobacter sp. OX=20 0446 GN=ygcM PE=3 SV=1
MSTTLFKDFTFEAAHRLPHVPEGHKCGRLHGHSFMVRLEITGEVDPHIGWIMDFAELKAAFKPTYDRLDHYYLNDIPGLENPTSEVLAKWIWDQIKPVVPLLSAVMVKETCTAGCVYRGE

SEQ ID NO: 26694 - protein, 142 aa, Clostridium sp.
  misc_feature (1)..(142): tr|A0A1C6FLL6|A0A1C6FLL6_9CLOT 6-carboxy-5,6,7,8-tetrah ydropterin synthase OS=uncultured Clostridium sp. OX=59 620 GN=SAMEA3545367_02835 PE=3 SV=1
MFKVKSQIEFDMAHYLSGYDGKCSNIHGHRYKLIVSVKSETLHQEGQLRGMVDDFGNIKARLKEIEDLYDHKLVIEDNEDGRLVAQKLSELPNAFKVMLVPYRPTAEEMSRDIFYKLKDMGLNVSEVELFETPTNSCTYSED

SEQ ID NO: 26695 - protein, 118 aa, Clostridium sp.
  misc_feature (1)..(118): tr|A0A1C5UBT1|A0A1C5UBT1_9CLOT 6-carboxy-5,6,7,8-tetrah ydropterin synthase OS=uncultured Clostridium sp. OX=59 620 GN=queD PE=3 SV=1
MYEVKKRFEISAAHKLDLDYDSKCTNFHGHNWIIDVYLQSETLDKNGMVLDFTHIKRKIQDKFDHKVINEVVPFNPTAENLAKYICDELAPFCYRVDVQESQDNIASYIKDDVKIKLL

SEQ ID NO: 26696 - protein, 146 aa, Coprococcus sp.
  misc_feature (1)..(146): tr|A0A1C5QIW8|A0A1C5QIW8_9FIRM 6-pyruvoyl tetrahydropte rin synthase-related domain OS=uncultured Coprococcus s p. OX=458253 GN=SAMEA3545228_00950 PE=4 SV=1
MIDYYKCQYHFNASHSFDGNKEQAHSHTFTMILYIRNHSGRDMDFKRLDRMIEIFLGRYEGMYLNELPCFAGNASIEAIGDYFYEQLKIKLSELNAELMQLDIGDTPLGVYQVCDRILLPTVNERRSRENLEAILFYKKQMPDQKK

SEQ ID NO: 26697 - protein, 147 aa, Coprococcus sp.
  misc_feature (1)..(147): tr|A0A1C5QID1|A0A1C5QID1_9FIRM 6-pyruvoyl tetrahydropte rin synthase-related domain OS=uncultured Coprococcus s p. OX=458253 GN=SAMEA3545228_00945 PE=4 SV=1
MRYQQYKFKFYMDARHAIYIGGKLGEVHPHTWEIVLHVVKGKENFEPFHILEKAVEEFLEPFQNNYLNDIKPFDILNPTIENVCLYFKEKLQEILNAMGWIFLMIEMSETPGRTYVISMLDEQEMEQNQTVQTLTDLILDEIKHIGE

SEQ ID NO: 26698 - protein, 130 aa, Unknown
  misc_feature (1)..(130): tr|A0A212JK21|A0A212JK21_9DELT 6-carboxy-5,6,7,8-tetrah ydropterin synthase OS=uncultured delta proteobacterium OX=34034 GN=KL86DPRO_11658 PE=3 SV=1
MTKSIWRLAVRSEFAAAHALRHYKGKCESIHGHNFSVEAVVEGDTLTPDTELLADFSDLKRDLAAVLETLDHKDLNAAPPFDAINPSSENLARHIYRALAPLVAARGVRMHAVTVSERGPQSATYMELQE

SEQ ID NO: 26699 - protein, 124 aa, Desulfobacteraceae bacterium
  misc_feature (1)..(124): tr|A0A484HG61|A0A484HG61_9DELT 6-carboxy-5,6,7,8-tetrah ydropterin synthase OS=uncultured Desulfobacteraceae ba cterium OX=218296 GN=EPICR_10147 PE=3 SV=1
MFELTVKNRFAAAHQLKMVSQKCENLHGHNWEVEVCLAGESLDSAGVLMDFGEIKHMVADIMADLDHKFLNELECFPDQNPSSEHIAVYIAERMTGKVKNPGVSVRRVTVWESPGSGAAYIPPE

SEQ ID NO: 26700 - protein, 186 aa, Desulfobacteraceae bacterium
  misc_feature (1)..(186): tr|A0A484HL48|A0A484HL48_9DELT Rubredoxin OS=uncultured Desulfobacteraceae bacterium OX=218296 GN=EPICR_30261 PE=4 SV=1
MSSVILMKKQKHKKEIIMSNDKYTSIVNLDFQYAHRFMNWPREAKHLHGHSGLLTIEIEDTVDPVTGYAHACKKGFKKAWQVCDHFHHATLFQEGDPLLDAVLAVYKKEGIHNDPEHCVPLTKIDHALAWSYPEYRIVVTKKVSTCENLCELFYALLKDKMPIKKITFRSSSMNAASKEFKGSLKN

SEQ ID NO: 26701 - protein, 123 aa, Desulfobacterium sp.
  misc_feature (1)..(123): tr|A0A445MRH0|A0A445MRH0_9DELT 6-carboxy-5,6,7,8-tetrah ydropterin synthase OS=uncultured Desulfobacterium sp. OX=201089 GN=PITCH_A1150081 PE=3 SV=1
MYELEIISHFAAAHQLRGFEGGCENLHGHNWKVEVYVSGNKLEENGLLIDFKIIKAHTEKLLDSLDHKFLNELEPFSILNPSSENIACHLFRSLSGQLNTSNIKVSRVRVWESETACACYSEP

SEQ ID NO: 26702 - protein, 123 aa, Desulfobacterium sp.
  misc_feature (1)..(123): tr|E1YAN9|E1YAN9_9DELT 6-carboxy-5,6,7,8-tetrahydropter in synthase OS=uncultured Desulfobacterium sp. OX=20108 9 GN=N47_H24550 PE=3 SV=1
MFELKIITNFAAAHQLKLVAEKCENLHGHNWKIEACVTGDKLNDAGVVIDFGNLKIILSEIIAELDHKFLNDLEWFKGLNPSSETIAVRIAQELENRIDDPAVKVSSVTAWESDDACAKYICP

SEQ ID NO: 26703 - protein, 125 aa, Desulfofustis sp.; identical to SEQ ID NO: 19791
  misc_feature (1)..(125): tr|V4J9M5|V4J9M5_9DELT Uncharacterized protein OS=uncul tured Desulfofustis sp. PB-SRB1 OX=1385624 GN=N839_1420 0 PE=4 SV=1

SEQ ID NO: 26704 - protein, 127 aa, Desulfofustis sp.; identical to SEQ ID NO: 19792
  misc_feature (1)..(127): tr|V4J7C0|V4J7C0_9DELT 6-carboxy-5,6,7,8-tetrahydropter in synthase OS=uncultured Desulfofustis sp. PB-SRB1 OX= 1385624 GN=N839_00370 PE=3 SV=1

SEQ ID NO: 26705 - protein, 135 aa, Desulfovibrio sp.
  misc_feature (1)..(135): tr|A0A212KZZ4|A0A212KZZ4_9DELT 6-carboxy-5,6,7,8-tetrah ydropterin synthase OS=uncultured Desulfovibrio sp. OX= 167968 GN=KL86DES1_10692 PE=3 SV=1
MSKKLWRLTVRDDFSAGHALRHYEGKCERMHGHNFAVELTVEGSQLAAGTEMLLDFKVLKKGLKIVLDALDHRLLNETPPFDRINPSSENLARHIWQGMEAHLAAHDDPQARRVRLHSVTVSEKGAQSATYLETD

SEQ ID NO: 26706 - protein, 118 aa, Desulfovibrio sp.
  misc_feature (1)..(118): tr|A0A212IZQ8|A0A212IZQ8_9DELT 6-carboxy-5,6,7,8-tetrah ydropterin synthase OS=uncultured Desulfovibrio sp. OX= 167968 GN=ygcM PE=3 SV=1
MDIYVTMTFDAAHRLPAVPVGHKCGNLHGHTFVVEVYVQGEVSETNGWVVDFGDIKATAKSYVDQLDHTYLNDIEGLENPTSENIAIWLWGKLDPQIRGLSKIVVKESPTSGAVYTGK

SEQ ID NO: 26707 - protein, 150 aa, Dokdonia sp.
  misc_feature (1)..(150): tr|H8W428|H8W428_9FLAO Queuosine biosynthesis protein Q ueD OS=uncultured Dokdonia sp. OX=575653 GN=queD PE=4 S V=1
MSKIRITKQFTFETGHALYGYDGKCKNVHGHSYKLSVTVIGEPITDTGNAKLGMVIDFGDLKKIVNREIVNVFDHATVFNKNTPHVELAKELSDRGHDVLLVDYQPTSEMMVIDFAAKIQSFLPDTIKLHSLRLSETATSYAEWHAADQL

SEQ ID NO: 26708 - protein, 120 aa, Dysgonomonas sp.
  misc_feature (1)..(120): tr|A0A212JLD7|A0A212JLD7_9BACT 6-carboxy-5,6,7,8-tetrah ydropterin synthase OS=uncultured Dysgonomonas sp. OX=2 06096 GN=KL86DYS1_20136 PE=3 SV=1
MYKISKQFSFSASHILEGLPLEHPCSRLHGHNYVVTVHLQAKQLNNVGFIKDYRELDSLKKYIDDTLDHRHLNDVLPFNPTAENMAKYLYDTFKKDIPELYAVEVSETPKTTAIYEADSE

SEQ ID NO: 26709 - protein, 120 aa, Dysgonomonas sp.; identical to SEQ ID NO: 20033
  misc_feature (1)..(120): tr|A0A212JSY3|A0A212JSY3_9BACT 6-carboxy-5,6,7,8-tetrah ydropterin synthase OS=uncultured Dysgonomonas sp. OX=2 06096 GN=KL86DYS2_12259 PE=3 SV=1

SEQ ID NO: 26710 - protein, 142 aa, Eubacterium sp.
  misc_feature (1)..(142): tr|A0A1C6FMX4|A0A1C6FMX4_9FIRM 6-carboxy-5,6,7,8-tetrah ydropterin synthase OS=uncultured Eubacterium sp. OX=16 5185 GN=SAMEA3545427_01085 PE=3 SV=1
MYILETEQSFDSAHFLSGYKGKCSNLHGHRWRVVARIAMDELNKEGQTRDMVIDFGDFKDALKKLTDALDHSFIFETGSLKETTLTALKEEGFLLHEVPFRPTAEQFSRYFYEQLQELDFPVYNISVYETPTNCSTYQEASL

SEQ ID NO: 26711 - protein, 142 aa, Eubacterium sp.; identical to SEQ ID NO: 17450
  misc_feature (1)..(142): tr|A0A1C5WND7|A0A1C5WND7_9FIRM Queuosine biosynthesis p rotein QueD OS=uncultured Eubacterium sp. OX=165185 GN= SAMEA3545253_02764 PE=4 SV=1

SEQ ID NO: 26712 - protein, 151 aa, Flavobacteriia bacterium
  misc_feature (1)..(151): tr|H6RDX0|H6RDX0_9BACT 6-pyruvoyl tetrahydrobiopterin s ynthase OS=uncultured Flavobacteriia bacterium OX=21269 5 GN=queD PE=4 SV=1
MAQKIRITKEFHFETGHALYGYDGLCKNVHGHSYKLAVTVMGSPIVDPSQTKNGMVLDFSDLKKIVKEEIVFPFDHATVLNVNSPHKELAEEMESRGHKVLKVTYQPTSEMMVLDFADKIKMRLPEGISLFALKLRETETSFAEWHAADNL

SEQ ID NO: 26713 - protein, 134 aa, Flavobacteriia bacterium
  misc_feature (1)..(134): tr|H6RGD7|H6RGD7_9BACT 6-carboxy-5,6,7,8-tetrahydropter in synthase OS=uncultured Flavobacteriia bacterium OX=2 12695 GN=ygcM PE=3 SV=1
MKVGRRETFNSAHRLFHPDWSDEKNLEVFGKCSNPNYHGHNYVLETWVEGPIDPVTGFVMDLKLLKNLIRTEVTDKFDHRNLNLDIDEFKDLNPTAENIAKVAWELISVKLPTQMKLTVRLWETENNIVEYSGK

SEQ ID NO: 26714 - protein, 119 aa, Unknown
  misc_feature (1)..(119): tr|A0A0H4TCL6|A0A0H4TCL6_9GAMM 6-carboxy-5,6,7,8-tetrah ydropterin synthase OS=uncultured gamma proteobacterium Rifle_16ft_4_minimus_38164 OX=1665199 PE=3 SV=1
MDLYKAFTVEAAHHLPNLPEGHKCRRLHGHSFRIEIHVTGTVDKKPGWVMDFAEISQYFKPLFEQLDHHYLNEVPGLENPTSENLAVWIWQRLKPALPRLSSVAIQETCTSGCVYRGED

SEQ ID NO: 26715 - protein, 119 aa, Unknown
  misc_feature (1)..(119): tr|A0A0H4T7Z5|A0A0H4T7Z5_9GAMM 6-carboxy-5,6,7,8-tetrah ydropterin synthase OS=uncultured gamma proteobacterium Rifle_16ft_4_minimus_39789 OX=1665200 PE=3 SV=1
MELYKAFTVEAAHHLPNLPEGHKCRRLHGHSFRIEIHVTGTVDKKPGWVMDFAEISQYFKPLFEQLDHHYLNEVPGLENPTSENLAVWIWQRLKPDLSQLSSVAIQETCTSGCVYRGED

SEQ ID NO: 26716 - protein, 125 aa, Gammaproteobacteria bacterium
  misc_feature (1)..(125): tr|A0A5E5QKV1|A0A5E5QKV1_9GAMM 6-carboxy-5,6,7,8-tetrah ydropterin synthase OS=uncultured Gammaproteobacteria b acterium OX=86473 GN=BSPLISOX_2084 PE=3 SV=1
MFVLKIVTDFASAHSLRDYPGDCSRLHGHNWQVEVSVESAVLDTLGIAIDFREIKKQTKEVVKRLDHQYLNEIPPFDELNPTAENIAKYFYQEVGVLINNQDVRVCEVIIWETPRASVTYSEPRL

SEQ ID NO: 26717 - protein, 125 aa, Gammaproteobacteria bacterium
  misc_feature (1)..(125): tr|A0A5E5Q660|A0A5E5Q660_9GAMM 6-carboxy-5,6,7,8-tetrah ydropterin synthase OS=uncultured Gammaproteobacteria b acterium OX=86473 GN=BSPCLSOX_1722 PE=3 SV=1
MFVLKIVTDFASAHSLRDYPGDCSRLHGHNWQVEVSVESAVLDALGIAIDFREIKKQTKEVVKRLDHQYLNEIPPFDELNPTAENIAKYFYQEVGVLINNQDVRVCEVIIWETPRASVTYSEPRL

SEQ ID NO: 26718 - protein, 137 aa, Unknown
  misc_feature (1)..(137): tr|Q2PY17|Q2PY17_9BACT 6-carboxy-5,6,7,8-tetrahydropter in synthase OS=uncultured marine bacterium Ant39E11 OX= 360427 PE=3 SV=1
MIYIQRRAIFSAAHRLANPSWSDEKNQAVFGHCANEYSHGHNFQLIVTVKGEVNTDTGFVMNMVDLKAIMDSEIIQHVDHRNLNHDVPFMQGIMPSTENLAMIFWQQIEGPIAKHGAALHCIRIVETENNMVEYYGE

SEQ ID NO: 26719 - protein, 109 aa, Megasphaera sp.; identical to SEQ ID NO: 22394
  misc_feature (1)..(109): tr|A0A1C5MAQ7|A0A1C5MAQ7_9FIRM 6-carboxy-5,6,7,8-tetrah ydropterin synthase OS=uncultured Megasphaera sp. OX=16 5188 GN=queD PE=4 SV=1

SEQ ID NO: 26720 - protein, 164 aa, Unknown
  misc_feature (1)..(164): tr|A9LH53|A9LH53_9BACT 6-pyruvoyl-tetrahydropterin synt hase OS=uncultured planctomycete 13FN OX=455065 GN=13FN _13 PE=4 SV=1
MIIQKQYKFYAAHRNETLQDKCSNLHGHRYGVKCHFQVERDGDISTLFGDFDAKVEPWLKQNYDHGMLINRHDSLYESLEMHMERTGESLRLNVFDGPTSVENLCHKLFTEITQLGFRLATLEVQETDTFVVSYTREDWVADNRYFGKKTSIAAAASETTAIGS

SEQ ID NO: 26721 - protein, 118 aa, Pseudomonadales bacterium
  misc_feature (1)..(118): tr|E0XYB4|E0XYB4_9GAMM 6-carboxy-5,6,7,8-tetrahydropter in synthase OS=uncultured Pseudomonadales bacterium HF0 500_12O04 OX=710779 PE=3 SV=1
MEIFKEFTFESAHRLPFVPEGHKCGRLHGHSFKVAIHLSGDIDPATGWIRDFSEIKAIFKPLYEQLDHNYLNDIPGLENPTSEVLAKWIWQQLKPLLPELSAIRIHETCTSGCIYYGD

SEQ ID NO: 26722 - protein, 106 aa, Rhizobium sp.
  misc_feature (1)..(106): tr|E7C5Q2|E7C5Q2_9RHIZ Uncharacterized protein OS=uncul tured Rhizobium sp. HF0500_29J11 OX=723628 PE=4 SV=1
MHGATFVVDAAFFTDSLDADGLAIDIGLATEILAGVVKPLNYQNLDELEIFAGKVTTTEFLAKHLFDAIAEKIAAGELGDGGARVKRLKIQLHESHVARAWYEADL

SEQ ID NO: 26723 - protein, 146 aa, Roseburia sp.
  misc_feature (1)..(146): tr|A0A1C5VYL1|A0A1C5VYL1_9FIRM 6-carboxy-5,6,7,8-tetrah ydropterin synthase OS=uncultured Roseburia sp. OX=5123 14 GN=SAMEA3545351_00276 PE=3 SV=1
MYILKTEQSFDSAHFLYGYEGKCRNLHGHRWRVVAEICADTLQPQGQLKGMVTDFGDIKKDLQELADFYDHALIAEEGTLKPATKEAFKEEGFRIIWVPFRPTAENFSRHFYELLKEKGYQMHAVSVYETPNNCAVYCEQKERQNG

SEQ ID NO: 26724 - protein, 140 aa, Ruminococcus sp.
  misc_feature (1)..(140): tr|A0A1C6DMS3|A0A1C6DMS3_9FIRM 6-carboxy-5,6,7,8-tetrah ydropterin synthase OS=uncultured Ruminococcus sp. OX=1 65186 GN=SAMEA3545397_02081 PE=3 SV=1
MYFLKTEAAFDSAHFLYGYEGKCSNIHGHRWKIEVTVQNAFLQRNGQNKGMIMDFTDLKKALQLIADHYDHSLIYEKNTLKPDTMELLKRDGFRLVELPFRPTAENLSRHFFMILKERGFRPHNVTVYETPNNCAMYEEG

SEQ ID NO: 26725 - protein, 109 aa, Ruminococcus sp.; identical to SEQ ID NO: 22394
  misc_feature (1)..(109): tr|A0A1C5W2M1|A0A1C5W2M1_9FIRM 6-carboxy-5,6,7,8-tetrah ydropterin synthase OS=uncultured Ruminococcus sp. OX=1 65186 GN=queD PE=4 SV=1

SEQ ID NO: 26726 - protein, 92 aa, Unknown
  misc_feature (1)..(92): tr|A0A3P3XUA3|A0A3P3XUA3_9SPIR 6-carboxy-5,6,7,8-tetrah ydropterin synthase OS=uncultured spirochete OX=156406 GN=SPIRO4BDMA_51018 PE=4 SV=1
MWVSGKELGEGGMLVDFSIVKAALKKLIDEALDHRDLNGLPEFEDDPSAERIAKFIYDRLRGVLPEVPLSAVDVFETDTSMARYVPDSVERF

SEQ ID NO: 26727 - protein, 122 aa, Unknown; identical to SEQ ID NO: 25745
  misc_feature (1)..(122): tr|A0A3P3XFK6|A0A3P3XFK6_9SPIR 6-carboxy-5,6,7,8-tetrah ydropterin synthase OS=uncultured spirochete OX=156406 GN=queD PE=3 SV=1

SEQ ID NO: 26728 - protein, 125 aa, Sporomusa sp.; identical to SEQ ID NO: 25784
  misc_feature (1)..(125): tr|A0A212LR70|A0A212LR70_9FIRM 6-carboxy-5,6,7,8-tetrah ydropterin synthase OS=uncultured Sporomusa sp. OX=3072 49 GN=queD PE=3 SV=1

SEQ ID NO: 26729 - protein, 118 aa, Stenotrophomonas sp.; identical to SEQ ID NO: 25898
  misc_feature (1)..(118): tr|A0A1Y5Q4D9|A0A1Y5Q4D9_9GAMM 6-carboxy-5,6,7,8-tetrah ydropterin synthase OS=uncultured Stenotrophomonas sp. OX=165438 GN=ygcM PE=3 SV=1

SEQ ID NO: 26730 - protein, 178 aa, Unknown
  misc_feature (1)..(178): tr|A0A483A8H3|A0A483A8H3_9GAMM Potential queD like OS=u ncultured SUP05 cluster bacterium OX=655186 GN=CRYPA_17 51 PE=4 SV=1
MLELFKEMHIIWVVTLIVVIAIMLFSSGFVQAGNTYQYQKQQAVFTKAEINLLKVLEQVVINPNLAIYGKIRVADILKPAIQKNANRKKWWSAFSKISQKHVDFVIVDKHDYSVVSVIELNDKSHNRKDRQDRDKFIRKAYASANIELVEIKAARHYFVSDLLGQFSETTQRKLQGNN

SEQ ID NO: 26731 - protein, 123 aa, Unknown
  misc_feature (1)..(123): tr|A0A482ZS03|A0A482ZS03_9GAMM 6-carboxy-5,6,7,8-tetrah ydropterin synthase OS=uncultured SUP05 cluster bacteri um OX=655186 GN=SPONL_889 PE=3 SV=1
MFVLKIVTDFGAAHSLRNYPGDCARLHGHNWGVETEVCAQELDENGIAIDFREIKKQTKVVVKRLDHRYLNEIAPFDKLNPTAENIAKYFFEEIGILINNNDVKVKAVTIWETPRASVTYSNE

SEQ ID NO: 26732 - protein, 122 aa, Unknown
  misc_feature (1)..(122): tr|B1GYR9|B1GYR9_UNCTG 6-carboxy-5,6,7,8-tetrahydropter in synthase OS=Uncultured termite group 1 bacterium phy lotype Rs-D17 OX=471821 GN=TGRD_679 PE=3 SV=1
MKYKLSVTRSFSSAHCLREYKGRCENLHGHNWKIRAAFYGTELDDTGVLIDFMDIKMHLNKVINYLDHKFLNEIVPFDRVNPTAENIAAFILGRLKDIETKNAKVCEVEIWESESSSAVVCI

SEQ ID NO: 26733 - protein, 390 aa, Thiohalocapsa sp.
  misc_feature (1)..(390): tr|V4J475|V4J475_9GAMM Uncharacterized protein OS=uncul tured Thiohalocapsa sp. PB-PSB1 OX=1385625 GN=N838_2063 5 PE=4 SV=1
MHRPNGQHKTTAGMLHARNNNKMSERLFHVAAAPFEAARRVLTVPDQHPAHRLHGHSFVARLRAELPPGWAAFAGGETDALKAALDHCIATLDYSDLNQHLAIPTDENLARWVRRCLHVPGIKSVGIQSTRDQGANLDADEHASIWRRFRFEAAHQLPNVRRGHPCGRMHGHGFEVVLHAKQAQSDADRGIDLDALDVLWEPIQEELQYACLNDIPGLENPTSEMIAGWLWRRLKPQLPALCWITVYETITAGCHYDGTHYRIWKERRFESALRLMQAPQGDRRRRLHGHSYLLRLHLSAPLDQVLGWTVDYGDVKQCFEPVYKQLDHHLLNELPGLDRSDPASLARWMRETIGARLPRLDRIDLHQTPGCGAVLCWGASGPADAALVEG

SEQ ID NO: 26734 - protein, 168 aa, Thiohalocapsa sp.
  misc_feature (1)..(168): tr|V4JYH3|V4JYH3_9GAMM Uncharacterized protein OS=uncul tured Thiohalocapsa sp. PB-PSB1 OX=1385625 GN=N838_0386 0 PE=4 SV=1
MPAERITRIEISKQYLGFSAGHFTIFSATRRENLHGHNFAVRCAVTAVVGADGLIFDYGILKRTLKSLCDELDERVLLPEASPHLQIERDAGLVFARLADERIPFLERDVLLLPIRNTTIEELAAFLLEQLSIHPDLGERGIRGMELGVSSGDGQWAYAYHTMDENRR

SEQ ID NO: 26735 - protein, 147 aa, Undibacterium parvum
  misc_feature (1)..(147): tr|A0A3S5HM33|A0A3S5HM33_9BURK 6-carboxy-5,6,7,8-tetrah ydropterin synthase OS=Undibacterium parvum OX=401471 G N=queD PE=3 SV=1
MLTITRKVEFDTGHRIPDHNSQCRNLHGHRYTLLITLTGDVVEKDGESDNGMIMDFGDIKALANQYLVDLWDHAFIVYEKDSVVREFLESMPNHKTVVIDRVPTVENLAKIAFDILKNVYHDRYGRHMSLSKVTLYETPNCWAEIDA

SEQ ID NO: 26736 - protein, 147 aa, Undibacterium pigrum
  misc_feature (1)..(147): tr|A0A318JCF0|A0A318JCF0_9BURK 6-pyruvoyltetrahydropter in/6-carboxytetrahydropterin synthase OS=Undibacterium pigrum OX=401470 GN=DFR42_101855 PE=4 SV=1
MLTITRKLEFDAGHRIPDHGSQCRNLHGHRYTLQITLTGEVVQKDGESDNGMIMDFGDIKALANEHLVNLWDHSFIVYEKDYIIKNFLEKLPGHKTVVIDRVPTVENLAKIAFDILKVVYHGRFGRTLELTKVTLYETPNCWAEIDG

SEQ ID NO: 26737 - protein, 147 aa, Undibacterium sp.
  misc_feature (1)..(147): tr|A0A3S0JFI7|A0A3S0JFI7_9BURK 6-carboxytetrahydropteri n synthase QueD OS=Undibacterium sp. S11R28 OX=2495591 GN=queD PE=4 SV=1
MLTITRKVEFDSGHRIPDHNSQCRNLHGHRYTLLITLTGDVVEKDGESDNGMIMDFGDIKSLANQYLVNLWDHAFIVYEKDTMVRTFLDSMPGHKTVVIDRVPTVENLAKIAFDILKDVYHDRYGRHMSLSKVTLYETPNCWAEVDA

SEQ ID NO: 26738 - protein, 150 aa, Unknown
  misc_feature (1)..(150): tr|A6EKZ4|A6EKZ4_9BACT Conserved possible 6-pyruvoyl te trahydrobiopterin synthase OS=unidentified eubacterium SCB49 OX=50743 GN=SCB49_05542 PE=4 SV=1
MSKIRITKQFSFETGHALYGYDGKCRNVHGHSYKLSVTVIGTPIADSNHVKFGMVIDFTDLKKIVTEEIVDVFDHATVFNKNTPHVELAKELSDRGHCVLLVDYQPTSEMMVIDFAEKIKQRLPENISLFSLRLQETTTSFAEWFASDNE

SEQ ID NO: 26739 - protein, 135 aa, Unknown
  misc_feature (1)..(135): tr|A6ESX3|A6ESX3_9BACT 6-pyruvoyl tetrahydrobiopterin s ynthase OS=unidentified eubacterium SCB49 OX=50743 GN=S CB49_01097 PE=4 SV=1
MSLTVYRKAHFNAAHRLYKEEWSNEKNALIFGKCSNPNYHGHNYDLEVGVTGEIDEETGFLIDLKILKKVIYEEVEVPFDHKNLNLEVEAFKTVNPTVENIAIEIYNRIVKRLDSRFDISVKLYETPRNFVVYTG

SEQ ID NO: 26740 - protein, 156 aa, Ureibacillus terrenus
  misc_feature (1)..(156): tr|A0A540UX43|A0A540UX43_9BACL 6-carboxytetrahydropteri n synthase QueD OS=Ureibacillus terrenus OX=118246 GN=q ueD PE=4 SV=1
MFEFRIVDRLQKLGEDIQKEQLRYHSKRVLVSKEFTFDAAHHLHTYEGKCKNLHGHTYKVIVGVSGYPDERGIVIDFADLKEIWKEKIEIYLDHRYLNETLPPMNTTAENMVVWIYEQFAEALEDAGLEGARVEFIRLYETPTSFAEARREWMELE

SEQ ID NO: 26741 - protein, 156 aa, Ureibacillus thermophilus
  misc_feature (1)..(156): tr|A0A4P6UVM6|A0A4P6UVM6_9BACL 6-carboxytetrahydropteri n synthase QueD OS=Ureibacillus thermophilus OX=367743 GN=queD PE=4 SV=1
MLDFRIVDKLQKLDEDIQRDQLRYHSKRVLVSKEFTFDAAHHLHAYEGKCKNLHGHTYKVVLGVSGYPDDRGLVIDFADLKDIWKEKIEIYLDHRYLNETLPPMNTTAENMVVWIYEKLAEALQEKGFDGARVEFIRLYETPTSYAEARREWMESE

SEQ ID NO: 26742 - protein, 141 aa, Uruburuella suis
  misc_feature (1)..(141): tr|A0A4R2MGH7|A0A4R2MGH7_9NEIS 6-carboxy-5,6,7,8-tetrah ydropterin synthase OS=Uruburuella suis OX=252130 GN=EV 680_11413 PE=3 SV=1
MMKITKTFSFDMAHMLDHHDGKCKNLHGHTYKLEVEISGDLILGGAKDGMVIDFADLKTIVKKLVVEPFDHAFIYHTESARECEIAAMLEGWQLKTLPMAKRTTAENMAQYMFDLLRNEGRLNVSALRLWETPTSYCECSA

SEQ ID NO: 26743 - protein, 123 aa, Vampirococcus sp.
  misc_feature (1)..(123): tr|A0A410P3D1|A0A410P3D1_9BACT 6-carboxy-5,6,7,8-tetrah ydropterin synthase OS=Vampirococcus sp. LiM OX=1930593 GN=BU251_01605 PE=3 SV=1
MYEVCVSMNFSAAHNLRGYQGKCEALHGHNWKVEVILRSALLDKIGMVEDFTLIKSKLKEVLALFDHKYLNTLSYFKKKNPTSENIAKIIYGKMKERMNGSSVLLEAVKVWETETTFASYREP

SEQ ID NO: 26744 - protein, 132 aa, Variibacter gotjawalensis
  misc_feature (1)..(132): tr|A0A0S3PX48|A0A0S3PX48_9BRAD 6-pyruvoyl tetrahydropte rin synthase OS=Variibacter gotjawalensis OX=1333996 GN =GJW-30_1_03046 PE=4 SV=1
MFAVEVRDHIMIAHSFRGAVFGPAQALHGATFVVDACFIAKSLDDNGIVVDIGRALDVLKATLKPLNYSNLDDNPKFKGQNTTTEFMCKYIYDALAEAARSGGLGRDGKDLNSIRVTLSESHVARAWYEQAL

SEQ ID NO: 26745 - protein, 118 aa, Variibacter gotjawalensis
  misc_feature (1)..(118): tr|A0A0S3PVS0|A0A0S3PVS0_9BRAD 6-carboxy-5,6,7,8-tetrah ydropterin synthase OS=Variibacter gotjawalensis OX=133 3996 GN=queD PE=3 SV=1
MKISQAFRFEAAHRLPNVPATHRCHRMHGHSYRIEIQLEGATDPHTGFVVDFFDIEAVVGPLIAEIDHQCLNEIGGLENPTAENIAVWIWQRTKPSLAQLSAVRVYETPDCWAEYDGG

SEQ ID NO: 26746 - protein, 120 aa, Variovorax boronicumulans
  misc_feature (1)..(120): tr|A0A1E7U2E4|A0A1E7U2E4_9BURK 6-carboxy-5,6,7,8-tetrah ydropterin synthase OS=Variovorax boronicumulans OX=436 515 GN=AO062_14245 PE=3 SV=1
MRFTISQRFFFDAAHTLKREIEVEGSRRIHGHTYHAEVWLAGERDPVTGMVIDLGLLRRRLEDVREQLDHHLLDDVPGLHPPTLENLCVFIADALPDLRPSLARVRVWREALGDSCTVEF

SEQ ID NO: 26747 - protein, 120 aa, Variovorax gossypii
  misc_feature (1)..(120): tr|A0A431TK59|A0A431TK59_9BURK 6-carboxy-5,6,7,8-tetrah ydropterin synthase OS=Variovorax gossypii OX=1679495 G N=EJP69_18755 PE=3 SV=1
MRFTISQRFFFDAAHTLKREIEVEGSRRIHGHTYHAEVWLTGERDPVTGMVIDLGLLRRRLEDVREQLDHHLLDDVAGLHPPTLENLCVFIADALPDLRPSLARVRVWREALGDSCTVDF

SEQ ID NO: 26748 - protein, 139 aa, Variovorax guangxiensis
  misc_feature (1)..(139): tr|A0A502DT73|A0A502DT73_9BURK 6-carboxytetrahydropteri n synthase OS=Variovorax guangxiensis OX=1775474 GN=EAH 82_06895 PE=4 SV=1
MYSVNVRDHFMIAHSFRGEAFGPAQRLHGATYVVDAEFRRRALDADGMVVDIALATEVLRRVLGELNLRNLDDDAAFAGQNTTTEFMARVVFDRIAARIAAGELGPHASGLDGLHVRLHESHVAWAAYEAALPGADTAR

SEQ ID NO: 26749 - protein, 120 aa, Variovorax guangxiensis
  misc_feature (1)..(120): tr|A0A3S0XI87|A0A3S0XI87_9BURK 6-carboxy-5,6,7,8-tetrah ydropterin synthase OS=Variovorax guangxiensis OX=17754 74 GN=EJP67_26570 PE=3 SV=1
MRFTISQRFFFDAAHTLKREIEAEGSRRIHGHTYHAEVWLSGERDPVTGMVIDLGLLRRRLAEVREQLDHHLLDDVPGLHPPTLENLCVFIADALPDLRPSLARVRVWREAMGDSCTVDF

SEQ ID NO: 26750 - protein, 120 aa, Variovorax paradoxus
  misc_feature (1)..(120): tr|E6UYM1|E6UYM1_VARPE 6-carboxy-5,6,7,8-tetrahydropter in synthase OS=Variovorax paradoxus (strain EPS) OX=595 537 GN=Varpa_4763 PE=3 SV=1
MRFTISQRFFFDAAHTLKREIEVEGSRRIHGHTYHAEVWLAGERDPVTGMVIDLGLLRRRLEDVRELLDHHLLDDVAGLHPPTLENLCLFIADALPEFRASLARVRVWREALGDSCTLEF

SEQ ID NO: 26751 - protein, 120 aa, Variovorax paradoxus
  misc_feature (1)..(120): tr|A0A0P8YZI0|A0A0P8YZI0_VARPD 6-carboxy-5,6,7,8-tetrah ydropterin synthase OS=Variovorax paradoxus OX=34073 GN =APR47_34140 PE=3 SV=1
MRFTISQRFFFDAAHTLKREIEAEGSRRIHGHTYHAEVWLAGERDPATGMVIDLGLLRRRLDDVRDRLDHRLLDEVPGLHPPTLENLCLFIAEALGELQASLARVRVWREALGDSCTLEF

SEQ ID NO: 26752 - protein, 120 aa, Variovorax sp.; identical to SEQ ID NO: 26747
  misc_feature (1)..(120): tr|A0A1H7MBW2|A0A1H7MBW2_9BURK 6-carboxy-5,6,7,8-tetrah ydropterin synthase OS=Variovorax sp. YR750 OX=1884384 GN=SAMN05518845_104396 PE=3 SV=1

SEQ ID NO: 26753 - protein, 366 aa, Variovorax sp.
  misc_feature (1)..(366): tr|A0A1C6NQK2|A0A1C6NQK2_9BURK 6-pyruvoyltetrahydropter in/6-carboxytetrahydropterin synthase OS=Variovorax sp. HW608 OX=1034889 GN=VAR608DRAFT_2954 PE=4 SV=1
MSSPIRTLFTAALTFESACHVDVLPAGHRSRRLHGHSYLAKLRCALPPDWAAFPGGEVERLRDSLAAQVARLDYRLLNEVVTQPTDENLARWIRAHVDAPGIEQVGIQSTAHEGVDLDAAGHAHVWRRFAFQSAHRLPQVRPGHKCGRMHGHGFEVIVHADQDIGKSDLAIDYDRLEALWAPLSAQLDHACLNDVPGLENPTSELLSSWLWKRLEPALPALSWVTVYETGSSGAHYDGTRYRIWKEFSLDSALQLRRAPQGSVLRRIHGHTYVLRLHLSAPLDTVMGWTMDFGDVKELFSPIFDMLDHRPLHETAELEDCDTASLARWILGKAREVLPALDRVDLYETRGCGAIVLAGDEGPALPV

SEQ ID NO: 26754 - protein, 176 aa, Varunaivibrio sulfuroxidans
  misc_feature (1)..(176): tr|A0A4R3JGM8|A0A4R3JGM8_9PROT 6-pyruvoyltetrahydropter in/6-carboxytetrahydropterin synthase OS=Varunaivibrio sulfuroxidans OX=1773489 GN=EDD55_101416 PE=4 SV=1
MTYLVTRTIGIDAGHRIMTHGSKCRHLHGHRYTIEATCKARGDALQSNGEQTDMVIDFGFLKEEMERHIDAPCDHGFIAALGDVEVLAMFAPLDCDFEIWHQDIRAEIEKIGYCTTVDCRLQTKLYIVDFHPTAECLAKHWFMRLDEAVRARSGDAAVIDRVRVWETPNCWAEYGA

SEQ ID NO: 26755 - protein, 112 aa, Veillonella atypica
  misc_feature (1)..(112): tr|E1L5B2|E1L5B2_9FIRM 6-carboxy-5,6,7,8-tetrahydropter in synthase OS=Veillonella atypica ACS-049-V-Sch6 OX=86 6776 GN=queD PE=3 SV=1
MYTVSKRLEVSASHQLQLDYPSKCQNLHGHNWIITVHARSEELDHNGMVIDFTIIKEKIHGCLDHKHINDVLGGINPTAENMAKWIADELGPKCFKVEVQESEGNVAIYERD

SEQ ID NO: 26756 - protein, 112 aa, Veillonella atypica
  misc_feature (1)..(112): tr|E1LC18|E1LC18_9FIRM 6-carboxy-5,6,7,8-tetrahydropter in synthase OS=Veillonella atypica ACS-134-V-Col7a OX=8 66778 GN=queD PE=3 SV=1
MYTVSKRLEVSASHQLQLDYPSKCQNLHGHNWIITVHARSEELDHNGMVIDFTIIKEKIHGRLDHKHINDVLGGINPTAENMAKWIADELGPKCFKVEVQESEGNVAIYERD

SEQ ID NO: 26757 - protein, 112 aa, Veillonella criceti
  misc_feature (1)..(112): tr|A0A380NM76|A0A380NM76_9FIRM 6-carboxy-5,6,7,8-tetrah ydropterin synthase OS=Veillonella criceti OX=103891 GN =queD PE=3 SV=1
MFTVVKKLEISASHQLKLTYKSKCQNLHGHNWIVHIYARSAELDENGMVIDFGHIKEAIHGRLDHKHVNDIMGDINPTAENMAKWIADELGEKCFKVVVQESEGNVAIYERD

SEQ ID NO: 26758 - protein, 112 aa, Veillonella denticariosi
  misc_feature (1)..(112): tr|A0A2S7Z7W1|A0A2S7Z7W1_9FIRM 6-carboxy-5,6,7,8-tetrah ydropterin synthase OS=Veillonella denticariosi JCM 156 41 OX=1298594 GN=VEHSUH05_08355 PE=3 SV=1
MFTVCKRLEVSASHQLKLDYPSKCQQLHGHNWIITVYARSEELDHNGMVIDFTIIKEKIHGRLDHHHINDMLGDINSTAENMAKWIADELGSKCFKVEVQESEGNVAIYERD

SEQ ID NO: 26759 - protein, 112 aa, Veillonella dispar
  misc_feature (1)..(112): tr|W1UUG6|W1UUG6_9FIRM 6-carboxy-5,6,7,8-tetrahydropter in synthase OS=Veillonella dispar DORA_11 OX=1403949 GN =Q619_VDC00600G0101 PE=3 SV=1
MFTVTKRLEVSASHQLQLDYPSKCQNLHGHNWIITVHARSEELDHNGMVIDFTIIKEKIHGRLDHRHINDVLGDINPTAENMAKWIADELGPKCFKVEVQESEGNTAIYERD

SEQ ID NO: 26760 - protein, 112 aa, Veillonella dispar
  misc_feature (1)..(112): tr|C4FPK8|C4FPK8_9FIRM 6-carboxy-5,6,7,8-tetrahydropter in synthase OS=Veillonella dispar ATCC 17748 OX=546273 GN=queD PE=3 SV=1
MFTVTKRLEVSASHQLKLDYPSKCQNLHGHNWIITVHARSEELDHNGMVIDFTIIKEKIHGRLDHRHINDVLGDINPTAENMAKWIADELGPKCFKVEVQESEGNTAIYERD

SEQ ID NO: 26761 - protein, 112 aa, Veillonella montpellierensis
  misc_feature (1)..(112): tr|A0A096AMQ1|A0A096AMQ1_9FIRM 6-carboxy-5,6,7,8-tetrah ydropterin synthase OS=Veillonella montpellierensis DNF 00314 OX=1401067 GN=HMPREF0872_00340 PE=3 SV=1
MYYVSKRMEIAGSHKLNLDYESKCQNLHGHNWIVTVFMSGKELNSNGMIMDFTHIKRAIHDRLDHAHINDVVGDINPTAENMAKWICDQLGECCYKVSVQESEGNIAIYERD

SEQ ID NO: 26762 - protein, 112 aa, Veillonella parvula
  misc_feature (1)..(112): tr|A0A418PGL8|A0A418PGL8_9FIRM 6-carboxy-5,6,7,8-tetrah ydropterin synthase OS=Veillonella parvula OX=29466 GN= queD PE=3 SV=1
MFTVTKRLEVSASHQLKLDYPSKCQNLHGHNWIITVHARSEELDHNGMVIDFTIIKEKIHGRLDHRHINDVLGNINPTAENMAKWIADELGPKCFKVEVQESEGNTAIYERD

SEQ ID NO: 26763 - protein, 112 aa, Veillonella parvula; identical to SEQ ID NO: 26759
  misc_feature (1)..(112): tr|D1BNB7|D1BNB7_VEIPT 6-carboxy-5,6,7,8-tetrahydropter in synthase OS=Veillonella parvula (strain ATCC 10790 / DSM 2008 / JCM 12972 / Te3) OX=479436 GN=Vpar_1194 PE= 3 SV=1

SEQ ID NO: 26764 - protein, 112 aa, Veillonella rodentium
  misc_feature (1)..(112): tr|A0A239ZDY1|A0A239ZDY1_9FIRM 6-carboxy-5,6,7,8-tetrah ydropterin synthase OS=Veillonella rodentium OX=248315 GN=queD PE=3 SV=1
MFTVCKRLEVSASHQLKLDYPSKCQQLHGHNWIITVYARSEELDHNGMVIDFTIIKKKIHRRLDHHHINDVLGDINPTAENMAKWIADELGPKCFKVEVQESEGNVAIYERD

SEQ ID NO: 26765 - protein, 112 aa, Veillonella seminalis
  misc_feature (1)..(112): tr|K9D2X3|K9D2X3_9FIRM 6-carboxy-5,6,7,8-tetrahydropter in synthase OS=Veillonella seminalis ACS-216-V-Col6b OX =883156 GN=HMPREF9282_00490 PE=3 SV=1
MFTVVKKLEISASHQLKLTYKSKCQNLHGHNWIVHIHARSAELDENGMVIDFGHIKEAIHGRLDHKHVNDIMGDINPTAENMAKWIADQLGEKCFKVVVQESEGNVAIYERD

SEQ ID NO: 26766 - protein, 112 aa, Veillonella sp.
  misc_feature (1)..(112): tr|A0A2S7Z9E9|A0A2S7Z9E9_9FIRM 6-carboxy-5,6,7,8-tetrah ydropterin synthase OS=Veillonella sp. T34266-5 OX=2027 457 GN=queD PE=3 SV=1
MYTVSKRLEVSASHQLQLDYPSKCQNLHGHNWIITVHARSEELDHNGMVIDFTIIKEKIHGRLDHKHINDVLGNINPTAENMAKWIADELGPKCFKVEVQESEGNVAIYERD

SEQ ID NO: 26767 - protein, 112 aa, Veillonella sp.
  misc_feature (1)..(112): tr|R5BS34|R5BS34_9FIRM 6-carboxy-5,6,7,8-tetrahydropter in synthase OS=Veillonella sp. CAG:933 OX=1262980 GN=BN 814_02370 PE=3 SV=1
MFTVVKKLEISASHQLKLTYPSKCQNLHGHNWIVHIHARAAELDENGMVIDFGHIKEAIHGQLDHKHVNDVMGDINPTAENMAKWIADQLGEKCFKVVVQESEGNVAIYERD

SEQ ID NO: 26768 - protein, 112 aa, Veillonella tobetsuensis
  misc_feature (1)..(112): tr|A0A480B7S6|A0A480B7S6_9FIRM 6-carboxy-5,6,7,8-tetrah ydropterin synthase OS=Veillonella tobetsuensis OX=1110 546 GN=PAGU1579_01160 PE=3 SV=1
MYTVSKRLEVSASHKLTLDYPSKCQNLHGHNWIITVHARSEELDHNGMVIDFTIIKEKIHSRLDHKHINDVLGDINPTAENMAKWIADELGPKCFKVEVQESEGNVAIYERD

SEQ ID NO: 26769 - protein, 112 aa, Veillonella tobetsuensis
  misc_feature (1)..(112): tr|A0A2S7ZRA1|A0A2S7ZRA1_9FIRM 6-carboxy-5,6,7,8-tetrah ydropterin synthase OS=Veillonella tobetsuensis OX=1110 546 GN=queD PE=3 SV=1
MYTVSKRLEVSASHKLTLDYPSKCQNLHGHNWIITVHARSEELDHNGMVIDFTIIKEKIHGRLDHKHINDVLGDINPTAENMAKWIADELGPKCFKVEVQESEGNVAIYERD

SEQ ID NO: 26770 - protein, 109 aa, Veillonellaceae bacterium; identical to SEQ ID NO: 22389
  misc_feature (1)..(109): tr|A0A134CK79|A0A134CK79_9FIRM Putative queuosine biosy nthesis protein QueD OS=Veillonellaceae bacterium DNF00 751 OX=1384082 GN=HMPREF3033_00684 PE=4 SV=1

SEQ ID NO: 26771 - protein, 109 aa, Veillonellaceae bacterium
  misc_feature (1)..(109): tr|A0A134CB15|A0A134CB15_9FIRM Putative queuosine biosy nthesis protein QueD OS=Veillonellaceae bacterium DNF00 626 OX=1588754 GN=HMPREF3191_01292 PE=4 SV=1
MYTVTKRMEISGAHFLHLDYPSKCQSLHGHNWVVTVTVQNDSLDKNGMVVDFTQIKDVVNEFDHHLANDIMKDVNPTAENMAKWIYDRIPHCIRVSVQETEGNVATYEE

SEQ ID NO: 26772 - protein, 128 aa, Verminephrobacter eiseniae
  misc_feature (1)..(128): tr|A1WH97|A1WH97_VEREI 6-carboxy-5,6,7,8-tetrahydropter in synthase OS=Verminephrobacter eiseniae (strain EF01- 2) OX=391735 GN=Veis_1235 PE=3 SV=1
MQHTISQRFFFDAAHTLRREIEAEGSRRVHGHTYHAEVALTGACDPATGMVLDLGLLRQGLERVRAQLDHHMLDDVPGLGPPTLENLCVFIARALPDELRWRASRVRVWREALGDGCTLDLPASTQAP

SEQ ID NO: 26773 - protein, 128 aa, Verminephrobacter sp.; identical to SEQ ID NO: 26772
  misc_feature (1)..(128): tr|A0A4Q2LEH3|A0A4Q2LEH3_9BURK 6-carboxy-5,6,7,8-tetrah ydropterin synthase OS=Verminephrobacter sp. Larva24 OX =2509434 GN=ET532_10070 PE=3 SV=1

SEQ ID NO: 26774 - protein, 129 aa, Verrucomicrobia bacterium
  misc_feature (1)..(129): tr|A0A1Q6V3D5|A0A1Q6V3D5_9BACT 6-carboxy-5,6,7,8-tetrah ydropterin synthase OS=Verrucomicrobia bacterium 13_2_2 0CM_55_10 OX=1805420 GN=AUH19_10470 PE=3 SV=1
MESDGIFPTVTARLTKDFTFEAAQTLPNAPQGHKCRRVHGHSFKVEVSVEGRVDPKTGWVYDHADISAAMKPILHMLDHTYLNDIEGLENPTIEKMAEWFWQKLESQCPGLCEVVVHETPTARCVYRGD

SEQ ID NO: 26775 - protein, 149 aa, Verrucomicrobia bacterium
  misc_feature (1)..(149): tr|A0A3R7P253|A0A3R7P253_9BACT 6-carboxytetrahydropteri n synthase OS=Verrucomicrobia bacterium TMED71 OX=19868 78 GN=CBC31_005150 PE=4 SV=1
MFTCQKTYSEIPFAHRQHRHDGHCAKIHGHNWSFTFTFGCNQLDDCGFVVDFGKLKELRAWLEENLDHACVFNQDDPLLESFMKLKDENGNSVFKSLVVEQCSSEGMAKCLFNVAKPMIQEMSGGRAFLISVTVKEDFRNSATYCPELD

SEQ ID NO: 26776 - protein, 121 aa, Verrucomicrobia subdivision
  misc_feature (1)..(121): tr|A0A5C9DVL9|A0A5C9DVL9_9BACT 6-carboxy-5,6,7,8-tetrah ydropterin synthase OS=Verrucomicrobia subdivision 3 ba cterium OX=2052186 GN=FD140_240 PE=3 SV=1
MKMELRKSFQFEAAHLLPLLPEAHKCRRLHGHSFKVDIVVAGECDPKLGWLMDYADITAAFKPLWEQLDHRYLNEVPGLENPTSEIVAVWIWEQLKPALPLLTEVVVAETCTAQAVYRGGQ

SEQ ID NO: 26777 - protein, 118 aa, Verrucomicrobia subdivision; identical to SEQ ID NO: 23833
  misc_feature (1)..(118): tr|A0A520RVI7|A0A520RVI7_9BACT 6-carboxy-5,6,7,8-tetrah ydropterin synthase OS=Verrucomicrobia subdivision 3 ba cterium OX=2052186 GN=queD PE=3 SV=1

SEQ ID NO: 26778 - protein, 121 aa, Verrucomicrobiaceae bacterium
  misc_feature (1)..(121): tr|A0A1Z9FMR5|A0A1Z9FMR5_9BACT 6-carboxy-5,6,7,8-tetrah ydropterin synthase OS=Verrucomicrobiaceae bacterium TM ED137 OX=1986879 GN=CBC97_01070 PE=3 SV=1
  misc_feature (28)..(28): Xaa can be any naturally occurring amino acid
  misc_feature (53)..(53): Xaa can be any naturally occurring amino acid
  misc_feature (67)..(67): Xaa can be any naturally occurring amino acid
  misc_feature (94)..(94): Xaa can be any naturally occurring amino acid
MRARIIKDFRFEAAHTLPSLPADHKCRXMHGHSFKVEIHVEGEVNPEIGWVYXHKCISDAMTPLIDXMDHSYLNDIKGLESPTIEVMAAWFWRXLEEDLPGLCEIVIYETPTARCSFRGEF

SEQ ID NO: 26779 - protein, 163 aa, Verrucomicrobiaceae bacterium
  misc_feature (1)..(163): tr|A0A1Z8XWN4|A0A1Z8XWN4_9BACT Uncharacterized protein OS=Verrucomicrobiaceae bacterium TMED76 OX=1986880 GN=C BC36_05915 PE=4 SV=1
MGHRLISGAAKNCQIPHGHDEVVTVNITKRSNRVLDSKTNMLVEFEEAKRRWFEWIDESVDHSFHINNEDPIINYFIENEPELLPKLLITPGDPTTEIRAACYYAKLSNFLDENKTELFCTDLKIQETPTNAVCFSCENIESFLPSGECHWWNRPDLSINDLS

SEQ ID NO: 26780 - protein, 151 aa, Verrucomicrobiae bacterium
  misc_feature (1)..(151): tr|A0A2A2Q1X1|A0A2A2Q1X1_9BACT 6-pyruvoyl tetrahydropte rin synthase OS=Verrucomicrobiae bacterium Tous-C2TDCM OX=1982329 GN=B9S36_01945 PE=4 SV=1
MPYRVCRIFEVENGHMLSKHPDKCRFPHGHSRKVECVLEAGDLDGREMVCDFKVLKLILSDYLDRYDHAVCMNTEDPAYGDFKARYGDRVIGYESEDPTTEVLARDIFHHLRDALADYRAREVSGFPLRESVRVVSVKVWETSGSWAEYLA

SEQ ID NO: 26781 - protein, 121 aa, Verrucomicrobiae bacterium
  misc_feature (1)..(121): tr|A0A2A2YB47|A0A2A2YB47_9BACT 6-carboxy-5,6,7,8-tetrah ydropterin synthase OS=Verrucomicrobiae bacterium AMD-G 2 OX=1982328 GN=CAK88_06225 PE=3 SV=1
MRARLTKEFRFEAAHTLPSLPDGHKCRNMHGHSFKVTITVEGEVDESIGWIYDHKRISDAMNPLLELLDHGYLNDIEGLESPTIEKMCAWFWKKIESQLPGLFEICIYETPTASCSFRGEF

SEQ ID NO: 26782 - protein, 144 aa, Verrucomicrobiales bacterium
  misc_feature (1)..(144): tr|A0A3D0YM93|A0A3D0YM93_9BACT 6-pyruvoyl tetrahydropte rin synthase OS=Verrucomicrobiales bacterium OX=2026801 GN=DEP88_06245 PE=4 SV=1
MIEVENGHLLSKHPDKCRFPHGHTRKVELVFEANSLDDREMVFDFKLIGRMIGDFLETYDHALCMNTEDPKFDFFKEAYGERIIGFESEDPTTEVMARTIYQHTKASLHQFVNDADPDYPVRADVRISKIRVWETTSSWAEYAE

SEQ ID NO: 26783 - protein, 121 aa, Verrucomicrobiales bacterium
  misc_feature (1)..(121): tr|A0A354FV80|A0A354FV80_9BACT 6-carboxy-5,6,7,8-tetrah ydropterin synthase OS=Verrucomicrobiales bacterium OX= 2026801 GN=queD PE=3 SV=1
MRARIIKDFRFEAAHTLPSLPADHKCRQMHGHSFKVEIHVEGEVNPEIGWVYDHKCISDAMTPLIDIMDHSYLNDIKGLESPTIEVMAAWFWRKLEEDLPGLCEIVIYETPTARCSFRGEF

SEQ ID NO: 26784 - protein, 120 aa, Verrucomicrobium sp.
  misc_feature (1)..(120): tr|A0A1H2GW01|A0A1H2GW01_9BACT 6-carboxy-5,6,7,8-tetrah ydropterin synthase OS=Verrucomicrobium sp. GAS474 OX=1 882831 GN=SAMN05444156_2780 PE=3 SV=1
MKITLCKDFEFEAAQALPSFPEGHKCRAMHGHSFKLTISVTGEVDPKTGIFYDHALISEAMAPLMETLDHACLNDIPGLEIPSIENICHWLWTRLAPKLPGLSEIVLHETSRSRCVYRGD

SEQ ID NO: 26785 - protein, 140 aa, Verrucosispora maris
  misc_feature (1)..(140): tr|F4FHG0|F4FHG0_VERMA 6-pyruvoyl tetrahydropterin synt hase OS=Verrucosispora maris (strain AB-18-032) OX=2633 58 GN=VAB18032_20160 PE=4 SV=1
MFSVTVRDHIMIAHSFRGDVFGPAQRLHGATFVVDATFRRPDLDADGIVVDIGLATDQLKAVLGELNYRNLDDEPAFAGTNTTTEVLARTIADRLADRVHAGDLGAGAHGLTGITVTLHESHVAWASYERSLPGASGTGA

SEQ ID NO: 26786 - protein, 143 aa, Verrucosispora sediminis
  misc_feature (1)..(143): tr|A0A1I1HLM2|A0A1I1HLM2_9ACTN 6-pyruvoyl-tetrahydropte rin synthase OS=Verrucosispora sediminis OX=547162 GN=S AMN05216284_103316 PE=4 SV=1
MFSVTVRDHIMIAHSFRGEVFGPAQRLHGATFVVDATFRRPDLDDDGIVVDIGLATEQLKAVLGELNYRNLDDEPAFAGQNTTTEVLARTIADRLAERVAAGQLGGGARGLTGITVTLHESHVAWASYERALPGSTAVGEGTA

SEQ ID NO: 26787 - protein, 141 aa, Verrucosispora sp.
  misc_feature (1)..(141): tr|A0A4Q9C4D2|A0A4Q9C4D2_9ACTN 6-carboxytetrahydropteri n synthase OS=Verrucosispora sp. SN26_14.1 OX=2527879 G N=EYA84_30100 PE=4 SV=1
MFSVTVRDHIMIAHSFRGDVFGPAQRLHGATFVVDATFRRPDLDADGIVVDIGLATDQLKAVLGELNYRNLDDEPAFAGTNTTTEVLARTIADRLADAVAAGALGAGAHGLTGITVTLHESHVAWAAYERSLPGGSGGGAA

SEQ ID NO: 26788 - protein, 143 aa, Verrucosispora sp.
  misc_feature (1)..(143): tr|A0A2G7D2N5|A0A2G7D2N5_9ACTN 6-pyruvoyl-tetrahydropte rin synthase OS=Verrucosispora sp. CNZ293 OX=2035249 GN =CLT74_1507 PE=4 SV=1
MFSVTVRDHIMIAHSFRGQVFGPAQRLHGATFVVDATFRRPDLDDDGIVVDIGLATDQLKAVLGELNYRNLDDEPAFTGMNTTTEVLARTIADRLAERVRAGQLGAGARGLTGITVTLHESHVAWASYERALPGSTAAGEGTA

SEQ ID NO: 26789 - protein, 129 aa, Verticiella sediminum
  misc_feature (1)..(129): tr|A0A556AWM1|A0A556AWM1_9BURK 6-carboxy-5,6,7,8-tetrah ydropterin synthase OS=Verticiella sediminum OX=1247510 GN=FOZ76_06410 PE=3 SV=1
MKFELSQRFWFDAAHTLDREIEREGSLRIHGHTYHAEVFVEGVRNPRTGMVMDLGHLRRELAAVRDALDHRLLDEVPELGPPTLENLCVFIARKLSPQVPVTAVRVWRESVGDSCKLTLPPQPQADGTN

SEQ ID NO: 26790 - protein, 125 aa, Vesicomyosocius okutanii
  misc_feature (1)..(125): tr|A5CXA0|A5CXA0_VESOH 6-carboxy-5,6,7,8-tetrahydropter in synthase OS=Vesicomyosocius okutanii subsp. Calyptog ena okutanii (strain HA) OX=412965 GN=ptpS PE=3 SV=1
MFVLKIVTDFASAHSLRNYPGDCSRLHGHNWQVEVMVGSKELNNNGIVIDFRDIKKQTKTVVKRLDHQYLNKIVPFDKLNPTSENLAKYFFDEVGRLININDVKVKAVTIWETSRVSVTYSQGDL

SEQ ID NO: 26791 - protein, 144 aa, Vespertiliibacter pulmonis
  misc_feature (1)..(144): tr|A0A3N4VLB9|A0A3N4VLB9_9PAST 6-carboxy-5,6,7,8-tetrah ydropterin synthase OS=Vespertiliibacter pulmonis OX=14 43036 GN=EDC46_0868 PE=3 SV=1
MFKIAKEFSFDMAHMLDGHDGKCKNLHGHTYTLQVEITGKLHQNGAKSGMVMDYSDLKTTVKTHIIEKFDHAFIYDITSERECQVANLLNSLNSKTFGLSTRTTAEQMAKYIFDALKEQGLPVSLVRLWETPTSYCEYSNNASG

SEQ ID NO: 26792 - protein, 120 aa, Vibrio aerogenes
  misc_feature (1)..(120): tr|A0A1M5XR79|A0A1M5XR79_9VIBR 6-carboxy-5,6,7,8-tetrah ydropterin synthase OS=Vibrio aerogenes CECT 7868 OX=12 16006 GN=queD PE=3 SV=1
MILYKEFTFEAAHRLPHVPDGHKCGRLHGHSFLVRIYVEGDVDPQAGWVIDFSEIKQAFKPVYEQLDHHYLNEIEGLENPTSEVIARWIWQKLKPSLPLLSQVEIKETCTAGCIYQGEAE

SEQ ID NO: 26793 - protein, 121 aa, Vibrio agarivorans
  misc_feature (1)..(121): tr|A0A2K1CPT2|A0A2K1CPT2_9VIBR 6-carboxy-5,6,7,8-tetrah ydropterin synthase OS=Vibrio agarivorans OX=153622 GN= queD PE=3 SV=1
MKTELYKEFMFEAAHHLPHVPEGHKCGRLHGHSFLVRIYVEGEVDPHTGWVVDFAEIKAAFKPIYDRLDHYYLNDIEGLENPTSEILAKWIWQQLKSDLPLLSKIEIKETCTAGCIYTGEK

SEQ ID NO: 26794 - protein, 120 aa, Vibrio alfacsensis
  misc_feature (1)..(120): tr|A0A347UR61|A0A347UR61_9VIBR 6-carboxy-5,6,7,8-tetrah ydropterin synthase OS=Vibrio alfacsensis OX=1074311 GN =queD PE=3 SV=1
MKTELYKEFMFEAAHHLPHVPEGHKCGRLHGHSFLVRLYVEGDVNPHTGWVVDFAEIKAAFKPIYDRLDHYYLNDIEGLENPTSEVLAKWIWQQLKPKLTLLSKVEIKETCTAGCIYKGE

SEQ ID NO: 26795 - protein, 120 aa, Vibrio alginolyticus
  misc_feature (1)..(120): tr|A0A0H0Y7X0|A0A0H0Y7X0_VIBAL 6-carboxy-5,6,7,8-tetrah ydropterin synthase OS=Vibrio alginolyticus OX=663 GN=q ueD PE=3 SV=1
MKTELYKEFMFEAAHHLPHVPEGHKCGRLHGHSFLVRLYVEGEVDPHTGWVVDFAEIKAAFKPIYNRLDHYYLNDIEGLENPTSEVLAKWIWQQLKPSLPLLSKVEIKETCTAGCIYKGE

SEQ ID NO: 26796 - protein, 219 aa, Vibrio alginolyticus
  misc_feature (1)..(219): tr|A0A0H0YIS7|A0A0H0YIS7_VIBAL DNA topoisomerase I OS=V ibrio alginolyticus OX=663 GN=AT730_02060 PE=4 SV=1
MTNIFIIVVLLVLFFFVIQKYVIKHDDTRDYPYRSKGPLLRGQEGAFYNALRAAVGEHAVVFAKVNMSSLVTPKEIKNKKQFFVANNRISRSYFDYVICDPRTLEPRVIVELDNGQELNKGKIERQKLLIHVCKTANLPLIGASVKHSYQVGRLRRLLAAHIDLIEPDKEVRFCKKCGSPMIIKTASQGEFKGRRFFTCSRQPNCTYTENYNVVFEADD

SEQ ID NO: 26797 - protein, 119 aa, Vibrio algivorus
  misc_feature (1)..(119): tr|A0A557P8T2|A0A557P8T2_9VIBR 6-carboxy-5,6,7,8-tetrah ydropterin synthase OS=Vibrio algivorus OX=1667024 GN=q ueD PE=3 SV=1
MTCEIYKDFIFEAAHHLPNVPEGHKCGRLHGHSFFVRLYIQGEVDPTTGWIIDFGDVKKIFAPIYDQLDHYYLNDIPGLENPTSEVLAKWIWEKVKPLLPQLSQVEIKETCTAGCIYRG

SEQ ID NO: 26798 - protein, 119 aa, Vibrio anguillarum
  misc_feature (1)..(119): tr|A0A191W427|A0A191W427_VIBAN 6-carboxy-5,6,7,8-tetrah ydropterin synthase OS=Vibrio anguillarum OX=55601 GN=q ueD PE=3 SV=1
MKTELYKEFMFEAAHRLPHVPAGHKCGRLHGHSFLVRLYVEGEVDPHTGWVIDFSEIKAIFKPIYDRLDHYYLNDIEGLENPTSEVLAKWIWQQLKPSLPLLSKVEIKETCTAGCIYKG

SEQ ID NO: 26799 - protein, 123 aa, Vibrio anguillarum
  misc_feature (1)..(123): tr|F7YIJ9|F7YIJ9_VIBA7 6-carboxy-5,6,7,8-tetrahydropter in synthase OS=Vibrio anguillarum (strain ATCC 68554 / 775) OX=882102 GN=VAA_01423 PE=3 SV=1
MRTKMKTELYKEFMFEAAHRLPHVPAGHKCGRLHGHSFLVRLYVEGEVDPHTGWVIDFSEIKAIFKPIYDRLDHYYLNDIEGLENPTSEVLAKWIWQQLKPSLPLLSKVEIKETCTAGCIYKG

SEQ ID NO: 26800 - protein, 120 aa, Vibrio atlanticus
  misc_feature (1)..(120): tr|A0A558H5W0|A0A558H5W0_9VIBR 6-carboxy-5,6,7,8-tetrah ydropterin synthase OS=Vibrio atlanticus OX=693153 GN=q ueD PE=3 SV=1
MRSELYKEFMFEAAHHLPHVPEGHKCGRLHGHSFLVRLYVEGEVDPHTGWVIDFSEIKEVFKPIYDRLDHYYLNDIEGLENPTSEVLAKWIWNELKPNLPLLSKVEIKETCTAGCIYRGE

SEQ ID NO: 26801 - protein, 120 aa, Vibrio atlanticus
  misc_feature (1)..(120): tr|A0A1C3INL9|A0A1C3INL9_9VIBR 6-carboxy-5,6,7,8-tetrah ydropterin synthase OS=Vibrio atlanticus OX=693153 GN=q ueD PE=3 SV=1
MRTELYKEFMFEAAHHLPHVPEGHKCGRLHGHSFLVRLYVEGEVDPHTGWVIDFSEIKAVFKPIYDRLDHYYLNDIEGLENPTSEVLAKWIWNELKPSLSLLSKVEIKETCTAGCIYRGE

SEQ ID NO: 26802 - protein, 121 aa, Vibrio azureus
  misc_feature (1)..(121): tr|U3C7D9|U3C7D9_9VIBR 6-carboxy-5,6,7,8-tetrahydropter in synthase OS=Vibrio azureus NBRC 104587 OX=1219077 GN =queD PE=3 SV=1
MKTELYKEFMFEAAHHLPHVPEGHKCGRLHGHSFLVRIYVEGEVDPHTGWVVDFAEIKAAFKPIYDRLDHYYLNDIEGLENPTSEVLAKWIWQQLKPSLPLLSKVEIKETCTAGCIYIGKQ

SEQ ID NO: 26803 - protein, 120 aa, Vibrio barjaei
  misc_feature (1)..(120): tr|A0A1J4QQI3|A0A1J4QQI3_9VIBR 6-carboxy-5,6,7,8-tetrah ydropterin synthase OS=Vibrio barjaei OX=1676683 GN=AWH 66_2020690 PE=3 SV=1
MKTELYKEFMFEAAHHLPHVPEGHKCGRLHGHSFLVRLYVEGEVDPHTGWVVDFAEIKAAFKPIYDRLDHYYLNDIEGLENPTSEVLAKWIWGQLKPNLPLLSKVEIKETCTAGCIYKGE

SEQ ID NO: 26804 - protein, 292 aa, Vibrio bivalvicida
  misc_feature (1)..(292): tr|A0A177XTM1|A0A177XTM1_9VIBR 6-pyruvoyl tetrahydropte rin synthase OS=Vibrio bivalvicida OX=1276888 GN=APB76_ 21670 PE=4 SV=1
MNLFVRDLTVIDSSYICEHRGVVGDSWILDVTMSGELNEMSMVLDFGRVKKQIKQLVDQYVDHRLLVPKQSSAVVYKPSKAGYSTLDVLRGEKSIHLHCPNEAYCLIDAEEINLDSITSHVYQILRNNLPSNVTGIDITLRHENISGAFYHYTHGLKKHDGNCQRIAHGHRSPIEILVDGQRDSVKEAAFAQRWQDIYLGSKEDQVFVAELNLSETANGVTDETHFGFRYTAPQGEFELAIGKSETEILPTDTTVELLACYIADEVKPSLKDGQSLQIIAYEGVGKGAMAFK

SEQ ID NO: 26805 - protein, 220 aa, Vibrio bivalvicida
  misc_feature (1)..(220): tr|A0A177Y5Z0|A0A177Y5Z0_9VIBR Queuosine biosynthesis p rotein QueD OS=Vibrio bivalvicida OX=1276888 GN=APB76_0 0410 PE=4 SV=1
MESVFIVVAILVIFFVVIQRRYLNQDELKDSAYKKKGPLLNAQESAFYNALITAVGQHGVVMSKVNLSNVVTPLATDKKQWFIASNRISKSYFDYVVCDPRTLEVRVAIELDDGKELNKGKVDRQKLLIHVTKSAGVPLIGANIKHSYQVGRLRRLLAAHIDLIEPDKEIRFCKRCGSPMTIKTASQGEHKGRRFFTCSRQPHCTYTENYNVVFEEDSDS

SEQ ID NO: 26806 - protein, 220 aa, Vibrio brasiliensis
  misc_feature (1)..(220): tr|E8LT39|E8LT39_9VIBR QueD-like protein OS=Vibrio bras iliensis LMG 20546 OX=945543 GN=VIBR0546_00665 PE=4 SV= 1
MESVFIVVGILVIFFVVVQKRYLKQDELKDCAYKKKGPLLSGQESAFYNALIAAVGQHGVVMSKVNLSNVITPMATDKKQWFIANNRIAKSYFDYVVCDPRTLEVRVAIELDNGKELDKGKVDRQKLLIHVCKSAGIPLIGANIKHSYQVSRLRRLLAAHIDLIEPDKEVRFCKRCGSPMIIKIASQGEHKGRRFFTCSRQPHCTYTENYNVVFEEDQQG

SEQ ID NO: 26807 - protein, 260 aa, Vibrio brasiliensis
  misc_feature (1)..(260): tr|E8LY09|E8LY09_9VIBR Isocitrate dehydrogenase OS=Vibr io brasiliensis LMG 20546 OX=945543 GN=VIBR0546_20058 P E=4 SV=1
MSGELNEMSMVLDFGRVKKQVKQLIDEYVDHRLLVPMQSSAIVYKPSKAGYSTLDVMRGEKSIHLNCPDQAYCLIDAETVTIESITDHVYRILRNNLPSNVTGIEITLRHENISGAFYHYSHGLKKHDGNCQRIAHGHRSPIEILVDGQRDSEREAAFARRWQDIYLGSKEDQVSVSELNLAQEANAVTDQSHYGFRYTAPQGEFELAIAKAETEILPTDTTVELLAGYIADEVKPSLAQGQSLQIVAYEGVGKGAMAFR

SEQ ID NO: 26808 - protein, 120 aa, Vibrio breoganii
  misc_feature (1)..(120): tr|A0A193KHT2|A0A193KHT2_9VIBR 6-carboxy-5,6,7,8-tetrah ydropterin synthase OS=Vibrio breoganii OX=553239 GN=qu eD PE=3 SV=1
MTTEIYKEFMFEAAHKLPHVPEGHKCGRLHGHSFLVRLYLKGEVDAHTGWIIDFSDVKEKFKPIYDRLDHHYLNDIEGLENPTSEVLAKWVFEQTKPLLPLLSKVEIKETCTAGCIYTGE

SEQ ID NO: 26809 - protein, 292 aa, Vibrio campbellii
  misc_feature (1)..(292): tr|A0A1P8MJ02|A0A1P8MJ02_9VIBR Uncharacterized protein OS=Vibrio campbellii OX=680 GN=BWP24_17795 PE=4 SV=1
MNLFVNDLTVIDASYLCQTRGMVGESWILDVVMHGDLNEMSMVLDFSKVKKQIKQLVDQYVDHRLLIPVKNEAVEITNGKAGYSQVDLMRGEKSIHLHCPDEAFCFVNAEDISIESVTQHIHDVLQGHLPSNVASIDLTLRHEKLDGAYYHYTHGLKKHDGNCQRIAHGHRSPIQILVDGQRDTAREQAFAQRWQDIYLASIEDLVEIGHLELSEHASLINCDTHFGFRYTTSQGDFQLAIAHSETEVLNTDTTVELLAVFIANEIAPSLDEGQSLQIIAYEGVGKGAMAFR

SEQ ID NO: 26810 - protein, 120 aa, Vibrio campbellii; identical to SEQ ID NO: 26795
  misc_feature (1)..(120): tr|A0A0A3ELK1|A0A0A3ELK1_9VIBR 6-carboxy-5,6,7,8-tetrah ydropterin synthase OS=Vibrio campbellii OX=680 GN=queD PE=3 SV=1

SEQ ID NO: 26811 - protein, 167 aa, Vibrio caribbeanicus
  misc_feature (1)..(167): tr|A0A0A6QV34|A0A0A6QV34_9VIBR Queuosine biosynthesis p rotein QueD OS=Vibrio caribbeanicus OX=701175 GN=NM09_0 0365 PE=4 SV=1
MQIHTLDKASIINELQFGTGINHAVHEGRRADFALILSMFSDDVRDNTPVEKIEQPELTENVLRQRFELPEPQPLRSDQSSYDISATQASLFHSAGLPSAKLSHYLKPDALTYLPEDTHGLPEEVYHNLSGHQRRQLGEKEPKQLMPADLYNKLISAQRSFQISAQA

SEQ ID NO: 26812 - protein, 219 aa, Vibrio caribbeanicus
  misc_feature (1)..(219): tr|A0A0A6QVA5|A0A0A6QVA5_9VIBR Queuosine biosynthesis p rotein QueD OS=Vibrio caribbeanicus OX=701175 GN=NM09_0 2460 PE=4 SV=1
MESVFIVVAILVIFFFVVQQRYLKQDELKDSAYKKKGPLLNMQESAFYNALVTAVGQHGVVLAKVNMSNAIAPLATNKKEWFIANNRIAKSYFDFVVCDPRTLHPRVVIELDNGKELDKGKVERQKLLMHVCKSAGVPLIGASIKHSYQVGRLRRLLAAHIDLIEPEKEVRFCKRCGSPMVIKIASQGEHKGRRFFTCSRQPHCTYTENYNVVFDEEAS

SEQ ID NO: 26813 - protein, 120 aa, Vibrio casei
  misc_feature (1)..(120): tr|A0A368LHI6|A0A368LHI6_9VIBR 6-carboxy-5,6,7,8-tetrah ydropterin synthase OS=Vibrio casei OX=673372 GN=queD P E=3 SV=1
MTCEIYKDFIFEAAHHLPNVPEGHKCGRLHGHSFFVRLYIQGEVDATTGWIIDFGDVKKIFSPIYDRLDHYYLNDIPGLENPTSEVIAKWIWEQVKPLLPELSKVEIKETCTAGCIYVGQ

SEQ ID NO: 26814 - protein, 292 aa, Vibrio celticus
  misc_feature (1)..(292): tr|A0A1C3JE28|A0A1C3JE28_9VIBR 6-pyruvoyl tetrahydropte rin synthase OS=Vibrio celticus OX=446372 GN=VCE7224_02 090 PE=4 SV=1
MNLFVRDLTVIDSSYICEHRGVVGDSWILDVTMSGELNEMSMVLDFSKVKKQIKQLVDEQVDHRLLLPMQNAAIVLQASKAGYSKVDVLRGDKSLHLHCPDEAYCLIDAEAITIESVTAHVYNILRDNLPSNVTGLEITLRHENINGAFYHYTHGLKKHDGNCQRIAHGHRSPVEIVVDGQRDEQREQAFAQRWEDIYLGSKEDQVSVSSLNLSEHAKSVNDESHYGFRYTAPQGEFELAIAKSETEILPTDTTVELLAGYIADQVEPSLAENQSLQIVAYEGVGKGAMAFR

SEQ ID NO: 26815 - protein, 292 aa, Vibrio chagasii
  misc_feature (1)..(292): tr|A0A2S7VRW2|A0A2S7VRW2_9VIBR Uncharacterized protein OS=Vibrio chagasii OX=170679 GN=BTO10_06235 PE=4 SV=1
MNLFVRDLTVIDSSYICEHRGVVGDSWILDVTMSGELNEMSMVLDFSRVKKQIKNLVDQHVDHRLLLPMKNAVIVHQASKPGYAKVDVLRGDKSLHLHCPDEAYCLVDAEAITIESVTAHVYDILRDNLPSNVTGLEITLRHENINGAFYHYTHGLKKHDGNCQRIAHGHRSPVEIVVDGQRDEQRELAFAKRWEDIYLGSKEDQVSVSSLNLSERSQSVNDESHYGFSYTAPQGEFELAIAKSETEILPTDTTVELLAGYIADQVSPSLTENQSLQIVAYEGVGKGAMAFR

SEQ ID NO: 26816 - protein, 122 aa, Vibrio cholerae
  misc_feature (1)..(122): tr|A0A0H3AIV3|A0A0H3AIV3_VIBC3 6-carboxy-5,6,7,8-tetrah ydropterin synthase OS=Vibrio cholerae serotype O1 (str ain ATCC 39541 / Classical Ogawa 395 / O395) OX=345073 GN=VC0395_A0917 PE=3 SV=1
MMMKTELYKEFMFEAAHHLPHVPAGHKCGRLHGHSFLVRLYVEGEVDPHTGWVVDFAEIKAAFKPIYDRLDHYYLNDIEGLENPTSEVLAKWIWQQLKPSLPLLSKVEIKETCTAGCIYRGE

SEQ ID NO: 26817 - protein, 122 aa, Vibrio cholerae; identical to SEQ ID NO: 26816
  misc_feature (1)..(122): tr|A0A2V4ND51|A0A2V4ND51_VIBCL 6-carboxy-5,6,7,8-tetrah ydropterin synthase OS=Vibrio cholerae OX=666 GN=queD P E=3 SV=1

SEQ ID NO: 26818 - protein, 167 aa, Vibrio cidicii
  misc_feature (1)..(167): tr|A0A151KXE0|A0A151KXE0_9VIBR Queuosine biosynthesis p rotein QueD OS=Vibrio cidicii OX=1763883 GN=ATY37_16385 PE=4 SV=1
MQIHTLDKAGIINELQFGTGMNHAIHDGRRADFALLLSMFSNDARHITPVEETDSQPVTEQILRQQFALCEPQKLRSDQSSYTISAEQAKQFHRAGLAASKLSHYLIADALAYMPEETFDLPEEVYQNLSGHERRQLAQPNTPLLPEAGLYNQLSTAWAKARLGTSV

SEQ ID NO: 26819 - protein, 221 aa, Vibrio cidicii
  misc_feature (1)..(221): tr|A0A151JLF6|A0A151JLF6_9VIBR Queuosine biosynthesis p rotein QueD OS=Vibrio cidicii OX=1763883 GN=ATY37_09405 PE=4 SV=1
MTNIFIIVALLILFFFIIQKYVVKQDDSKDYAYRVKGPVLRSQEVAFFNALKTAVGEHGVVFSKVNMSSVIAPRDIVSKKQLFIASNKISRSHFDYLICDPRTFEPRVVIELDNGKELNKSKVEREKLLMQVCKSANIPLIGTSVKHSYQVGRLRRLLAAHIDLIEPDKEIRFCKKCGSPMVIKVASQGEFKGRRFFTCSRQPNCTYTENYNVVFDTDDDE

SEQ ID NO: 26820 - protein, 119 aa, Vibrio cincinnatiensis
  misc_feature (1)..(119): tr|A0A1T4LYD0|A0A1T4LYD0_VIBCI 6-carboxy-5,6,7,8-tetrah ydropterin synthase OS=Vibrio cincinnatiensis DSM 19608 OX=1123491 GN=SAMN02745782_00797 PE=3 SV=1
MKTEIYKEFMFEAAHRLPHVPEGHKCGRLHGHSFLVRLYVEGEVDPHTGWIVDFAEIKAVFKPIYERLDHYYLNDIEGLENPTSEVLAKWIWQQLKPNLPLLSKVEIKETCTAGCVYTG

SEQ ID NO: 26821 - protein, 120 aa, Vibrio comitans
  misc_feature (1)..(120): tr|A0A4Y3IMZ5|A0A4Y3IMZ5_9VIBR 6-carboxy-5,6,7,8-tetrah ydropterin synthase OS=Vibrio comitans NBRC 102076 OX=1 219078 GN=VCO01S_20720 PE=3 SV=1
MTTEIYKEFMFEAAHKLPHVPEGHKCGRLHGHSFLVRLYLKGEVDAHTGWIIDFSDVKEKFKPIYDRLDHHYLNDIEGLENPTSEVLAKWVYEQTKPLLPLLSKVEIKETCTAGCIYTGE

SEQ ID NO: 26822 - protein, 292 aa, Vibrio coralliilyticus
  misc_feature (1)..(292): tr|A0A2A2MX83|A0A2A2MX83_9VIBR Uncharacterized protein OS=Vibrio coralliilyticus OX=190893 GN=CKJ79_02005 PE=4 SV=1
MNLFVRDLTVIDSSFICEHRGIVGDSWILDATLSGELNEMSMVLDFGKVKKQIKHLVDLHVDHRLLVPMKSAAVVHNTSKPGYATLDVMRDNKSIHLQCPDEAYCLIDAEAITIESLTEHVYHILRDNLPSNVTGLEITLRHENITGAFYHYTHGLKKHDGNCQRIAHGHRSPVEILVDGQRDNEKEAAFAKRWEDIYLGSIEDQVSVTKLNLSPRAQVISDESHYGFRYTAPQGEFELAIAKSETEILPTDTTVELLAGYIADQVKPSLESNQSLQIIAYEGVGKGAMAFR

SEQ ID NO: 26823 - protein, 292 aa, Vibrio coralliilyticus
  misc_feature (1)..(292): tr|A0A1V0IDE6|A0A1V0IDE6_9VIBR Uncharacterized protein OS=Vibrio coralliilyticus OX=190893 GN=B6A42_21315 PE=4 SV=1
MNLFVRDLTVIDSSFICEHRGIVGDSWILDATLSGELNEMSMVLDFGKVKKQIKHLVDLHVDHRLLVPMKSAAVVHNTSKPGYATLDVMRDNKSIHLQCPDEAYCLIDAEAITIESLTEHVYHILRDNLPSNVTGLEITLRHENITGAFYHYTHGLKKHDGNCQRIAHGHRSPVEILVDGQRDNEKEAAFAKRWEDIYLGSIEDQVSVTKLNLSPRAQVISDENHYGFRYTAPQGEFELAIAKSETEILPTDTTVELLAGYIADQVKPSLESNQSLQIIAYEGVGKGAMAFR

SEQ ID NO: 26824 - protein, 292 aa, Vibrio crassostreae
  misc_feature (1)..(292): tr|A0A4V2RV25|A0A4V2RV25_9VIBR 6-pyruvoyl tetrahydropte rin synthase-like protein OS=Vibrio crassostreae OX=246 167 GN=EDB30_106180 PE=4 SV=1
MNLFVRDLTVIDSSYICEHRGVVGDSWILDVTMSGELNEMSMVLDFSRVKKQIKQLVDQHVDHRLLLPMKNAAIVHQASKPGYAKVDVLRGDKSLHLHCPDEAYCLIDAKAITIESVTAHVYNILRDNLPSNVTGLEITLRHENINGAFYHYTHGLKKHDGNCQRIAHGHRSPVEIVVDGQRDEQREQAFAQRWEDIYLGSKEDQVSVSSLNLSEHAKSVDDESHYGFRYTAPQGEFELAIAKSETEILPTDTTVELLAGYIADQVAPSLVENQSLQIVAYEGVGKGAMAFR

SEQ ID NO: 26825 - protein, 292 aa, Vibrio crassostreae
  misc_feature (1)..(292): tr|A0A4V2RSA6|A0A4V2RSA6_9VIBR 6-pyruvoyl tetrahydropte rin synthase-like protein OS=Vibrio crassostreae OX=246 167 GN=EDB37_101767 PE=4 SV=1
MNLFVRDLTVIDSSYICEHRGVVGDSWILDVTMSGELNEMSMVLDFSRVKKQIKQLVDQHVDHRLLLPMKNAAIVHQASKSGYSKVDVLRGDKSLHLHCPDEAYCLIDAKAITIESVTAHVYNILRDNLPSNVTGLEITLRHENINGAFYHYTHGLKKHDGNCQRIAHGHRSPVEIVVDGQRDEQREQAFAQRWEDIYLGSKEDQVSVSSLNLSEHAKSVDDESHYGFRYTAPQGEFELAIAKSETEILPTDTTVELLAGYIADQVAPSLVENQSLQIVAYEGVGKGAMAFR

SEQ ID NO: 26826 - protein, 120 aa, Vibrio diabolicus; identical to SEQ ID NO: 26795
  misc_feature (1)..(120): tr|A0A2L2K0V2|A0A2L2K0V2_9VIBR 6-carboxy-5,6,7,8-tetrah ydropterin synthase OS=Vibrio diabolicus OX=50719 GN=qu eD PE=3 SV=1

SEQ ID NO: 26827 - protein, 121 aa, Vibrio diazotrophicus
  misc_feature (1)..(121): tr|A0A2J8GK23|A0A2J8GK23_VIBDI 6-carboxy-5,6,7,8-tetrah ydropterin synthase OS=Vibrio diazotrophicus OX=685 GN= queD PE=3 SV=1
MKTEIYKEFMFEAAHHLPHVPEGHKCGRLHGHSFLVRLYVAGDVDPHTGWLVDFAEIKAAFKPIYDRLDHYYLNDIEGLENPTSEVLAKWIWQQLKPSLPLLSKVEIKETCTAGCIYTGEA

SEQ ID NO: 26828 - protein, 221 aa, Vibrio europaeus
  misc_feature (1)..(221): tr|A0A178JG08|A0A178JG08_9VIBR Queuosine biosynthesis p rotein QueD OS=Vibrio europaeus OX=300876 GN=AZ468_0507 5 PE=4 SV=1
MESVFIVVAILVIFFVVIQKRYLKQDELKDSTYKKKGPLLNAQESAFYNALITAVGQHGVVMSKVNLSNVITPLATDKKQWFIANNRISKSYYDYVVCDPRTLEVRVAIELDDGKELNKGKVDRQKLLIHVSKSAGIPLIGANIKHSYQVGRLRRLLAAHIDLIEPDKEIRFCKRCGSPMTIKTASQGEHKGRRFFTCSRQPQCTYTENYNVVFEEEDNEN

SEQ ID NO: 26829 - protein, 292 aa, Vibrio europaeus
  misc_feature (1)..(292): tr|A0A178JF92|A0A178JF92_9VIBR 6-pyruvoyl tetrahydropte rin synthase OS=Vibrio europaeus OX=300876 GN=AZ468_055 00 PE=4 SV=1
MNLFVRDLTVIDSSYICEQRGVVGDSWIVDVIMSGELNEMSMVLDFGRVKKQIKQLVDEFVDHRLLIPVQNAAIVYKPSKTGYSTLDVLRGEKSIHLNCPNEAYCLIDAEAVTIESITKHVYQILRNNLPSNVTGLEITLRHENIAGAFYHYTHGLKKHDGNCQRIAHGHRSPIEIIVDGERDIDKEVAFAKRWEDIYLGSKEDQVSVSMLNLSESAKAISDESHYGFRYTAPQGEFELAIAKSETEILPTDTTVELLAVYIADEVKPTVAEGQSLQVIAYEGVGKGAMAFR

SEQ ID NO: 26830 - protein, 120 aa, Vibrio ezurae
  misc_feature (1)..(120): tr|U3B123|U3B123_9VIBR 6-carboxy-5,6,7,8-tetrahydropter in synthase OS=Vibrio ezurae NBRC 102218 OX=1219080 GN= queD PE=3 SV=1
MTTEIYKEFMFEAAHKLPHVPEGHKCGRLHGHSFLVRLYLAGEVDQHTGWIIDFGDVKESFKPIYDRLDHHYLNDIEGLENPTSEVLAKWVYEQTKPLLPLLTKVEIKETCTAGCIYTGE

SEQ ID NO: 26831 - protein, 121 aa, Vibrio fluvialis
  misc_feature (1)..(121): tr|A0A0X8LLW9|A0A0X8LLW9_VIBFL 6-carboxy-5,6,7,8-tetrah ydropterin synthase OS=Vibrio fluvialis OX=676 GN=queD PE=3 SV=1
MKTEIYKEFMFEAAHHLPHVPEGHKCGRLHGHSFLVRLYVAGDVDPHTGWLVDFAEIKAAFKPIYDRLDHYYLNDIEGLENPTSEVLAKWIWQELKPSLPMLSKVEIKETCTAGCIYSGEA

SEQ ID NO: 26832 - protein, 121 aa, Vibrio fluvialis; identical to SEQ ID NO: 26831
  misc_feature (1)..(121): tr|S7JFM1|S7JFM1_VIBFL 6-carboxy-5,6,7,8-tetrahydropter in synthase OS=Vibrio fluvialis PG41 OX=1336752 GN=L910 _1427 PE=3 SV=1

SEQ ID NO: 26833 - protein, 167 aa, Vibrio fortis
  misc_feature (1)..(167): tr|A0A066UK13|A0A066UK13_9VIBR Queuosine biosynthesis p rotein QueD OS=Vibrio fortis OX=212667 GN=VFDL14_01925 PE=4 SV=1
MQVNTLDNNVIINELKFGTGINQAVEQGRRADFALLLSMFSDDVRDNTPLDVLSVEETTESKLRQQFGVAEPQPLRSNQSSYEISAKQSQGFHQAGLPSAKLNHYLTPEALAFMPEGTHDFPEEVYHNLSTHERRKLAKQPATELPHATLYNELTTAQRQFHIQAQA

SEQ ID NO: 26834 - protein, 292 aa, Vibrio fortis
  misc_feature (1)..(292): tr|A0A066ULK7|A0A066ULK7_9VIBR 6-pyruvoyl tetrahydropte rin synthase OS=Vibrio fortis OX=212667 GN=VFDL14_02960 PE=4 SV=1
MNLFVRDLTVIDSSYICEHRGVVGDSWILDVIMSGELNEMSMVLDFSRVKKQIKHLVDEYVDHRLLVPMKNSAIIHNATKPGYSTLDVMRGDKSIHLQCPDEAYCLIDAEAITIESITAHVYDILRDNLPSNVSGLEITLRHEKIDGAFYHYTHGLKKHDGNCQRIAHGHRSPVEILVDGNRDAEREEAFAKRWEDIYLGSKEDVTTLDTLNLSEHAKAVTDESHYAFRYTAPQGEFELAIAKSETEILPTDTTVELLAGYIADQVKPSLNEGQSLQIVAYEGVGKGAMASR

SEQ ID NO: 26835 - protein, 121 aa, Vibrio furnissii
  misc_feature (1)..(121): tr|A0A0Q2SAG2|A0A0Q2SAG2_VIBFU 6-carboxy-5,6,7,8-tetrah ydropterin synthase OS=Vibrio furnissii OX=29494 GN=AMR 76_19035 PE=3 SV=1
MKTEIYKEFMFEAAHHLPHVPEGHKCGRLHGHSFLVRLYVAGDVDPHTGWLVDFAEIKAAFKPIYDRLDHYYLNDIDGLENPTSEVLAKWIWQQLKPSLPLLSKVEIKETCTAGCIYSGDA

SEQ ID NO: 26836 - protein, 121 aa, Vibrio furnissii; identical to SEQ ID NO: 26835
  misc_feature (1)..(121): tr|F0LTB7|F0LTB7_VIBFN 6-carboxy-5,6,7,8-tetrahydropter in synthase OS=Vibrio furnissii (strain DSM 14383 / NCT C 11218 / VL 6966) OX=903510 GN=vfu_A01771 PE=3 SV=1

SEQ ID NO: 26837 - protein, 167 aa, Vibrio galatheae
  misc_feature (1)..(167): tr|A0A0F4NSW5|A0A0F4NSW5_9VIBR Queuosine biosynthesis p rotein QueD OS=Vibrio galatheae OX=579748 GN=TW81_00815 PE=4 SV=1
MHIHTLDKAAIISELQFGTGISNAVHEGRRADFALILSMFSDDVRDNTPLEKIDEVDNSEQALRKRFELQQPQQLRSDQSSYEVSAQQASLFHSAGLVSTKLSHYLVPDALSYMPEDTHDLPEEVYHNLSGHQRRAMGEKEPKELMPIDLYNQLIKAQRTFQIQAQA

SEQ ID NO: 26838 - protein, 292 aa, Vibrio galatheae
  misc_feature (1)..(292): tr|A0A0F4NP68|A0A0F4NP68_9VIBR 6-pyruvoyl tetrahydropte rin synthase OS=Vibrio galatheae OX=579748 GN=TW81_0274 5 PE=4 SV=1
MNLFVRDLTVIDSSYICEQRGVVGDSWILDVTMSGELNEMSMVLDFGRVKKQIKRLVDEYVDHRLIVPARSSAIIHKESKAGYATLDLLRGSKSIHLHCPNEAYCLIDAEEVNIESLTEHVYLILRDNLPSNVTGIEITLRHEAISGAFYHYTHGLKKHDGNCQRIAHGHRSPIEILVDGQRDKEKESAFAKRWQDIYLGSKEDQVAVADLSFVEQTNSICDETHYGFRYTAPQGEFELAIAKSETEILPTDTTVELLACYIADQVKPSLNEDQSLQIIAYEGVGKGAMAFK

SEQ ID NO: 26839 - protein, 118 aa, Vibrio gazogenes
  misc_feature (1)..(118): tr|A0A1Z2SBK4|A0A1Z2SBK4_VIBGA 6-carboxy-5,6,7,8-tetrah ydropterin synthase OS=Vibrio gazogenes OX=687 GN=BSQ33 _01550 PE=3 SV=1
MIIYKEFTFEAAHHLPHVPEGHKCGRLHGHSFLVRVSVEGEVDPQTGWVIDFADIKAAFKPIYQRLDHYYLNEIEGLDNPTSEVLARWIWHELKPNLPLLSQIEVKETCTAGCVYRGE

SEQ ID NO: 26840 - protein, 118 aa, Vibrio gazogenes
  misc_feature (1)..(118): tr|A0A1M4Z9B0|A0A1M4Z9B0_VIBGA 6-carboxy-5,6,7,8-tetrah ydropterin synthase OS=Vibrio gazogenes DSM 21264 = NBR C 103151 OX=1123492 GN=SAMN02745781_01524 PE=3 SV=1
MIIYKEFTFEAAHHLPHVPEGHKCGRLHGHSFLVRVSVEGEVDPQTGWVIDFADIKAAFKPIYQRLDHYYLNEIEGLENPTSEVLARWIWHELKPNLPLLSQIEVKETCTAGCVYRGE

SEQ ID NO: 26841 - protein, 112 aa, Vibrio genomosp.
  misc_feature (1)..(112): tr|A0A1B9R2L7|A0A1B9R2L7_9VIBR 6-carboxy-5,6,7,8-tetrah ydropterin synthase OS=Vibrio genomosp. F10 OX=723171 G N=A6E14_17490 PE=3 SV=1
MFEAAHHLPHVPEGHKCGRLHGHSFLVRLFVEGEVDPHTGWVIDFSEIKEAFKPIYDRLDHYYLNDIKGLENPTSEVLAKWIWLELKPSLPLLSKVEIKETCTAGCIYVGEN

SEQ ID NO: 26842 - protein, 121 aa, Vibrio genomosp.
  misc_feature (1)..(121): tr|A0A4U1YWF6|A0A4U1YWF6_9VIBR 6-carboxy-5,6,7,8-tetrah ydropterin synthase OS=Vibrio genomosp. F6 OX=723172 GN =queD PE=3 SV=1
MEMKTELYKDFMFEAAHHLPHVPEGHKCGRLHGHSFMVRLYVEGEVDPHTGWIIDFSEIKAAFKPIYDRLDHYYLNDIEGLENPTSEVLSKWIWQQLKPALPLLSKVEIKETCTAGCTYIG

SEQ ID NO: 26843 - protein, 120 aa, Vibrio halioticoli
  misc_feature (1)..(120): tr|V5FGV4|V5FGV4_9VIBR 6-carboxy-5,6,7,8-tetrahydropter in synthase OS=Vibrio halioticoli NBRC 102217 OX=121907 2 GN=queD PE=3 SV=1
MTTEIYKEFMFEAAHKLPHVPDGHKCGRLHGHSFLVRLYLKGEVDQHTGWIIDFGDVKQSFKPIYDRLDHHYLNDIEGLENPTSEVLAKWVFEQTKPLLPLLSKVEIKETCTAGCIYTGE

SEQ ID NO: 26844 - protein, 120 aa, Vibrio hangzhouensis
  misc_feature (1)..(120): tr|A0A1H6BNC2|A0A1H6BNC2_9VIBR 6-carboxy-5,6,7,8-tetrah ydropterin synthase OS=Vibrio hangzhouensis OX=462991 G N=SAMN04488244_12410 PE=3 SV=1
MKTELYKEFMFEAAHHLPNVPEGHKCGRLHGHSFLVRLYVEGEVDPHTGWVVDFAEIKAAFKPIYDRLDHYYLNDIEGLENPTSEVLAKWIWGQLKPSLPLLSKVEIKETCTAGCIYKGE

SEQ ID NO: 26845 - protein, 120 aa, Vibrio harveyi; identical to SEQ ID NO: 26795
  misc_feature (1)..(120): tr|K5UMD2|K5UMD2_VIBHA 6-carboxy-5,6,7,8-tetrahydropter in synthase OS=Vibrio harveyi OX=669 GN=queD PE=3 SV=1

SEQ ID NO: 26846 - protein, 120 aa, Vibrio harveyi; identical to SEQ ID NO: 26795
  misc_feature (1)..(120): tr|D0XBG9|D0XBG9_VIBH1 6-carboxy-5,6,7,8-tetrahydropter in synthase OS=Vibrio harveyi (strain 1DA3) OX=673519 G N=VME_24320 PE=3 SV=1

SEQ ID NO: 26847 - protein, 220 aa, Vibrio hepatarius
  misc_feature (1)..(220): tr|A0A0M0I236|A0A0M0I236_9VIBR Queuosine biosynthesis p rotein QueD OS=Vibrio hepatarius OX=171383 GN=AKJ31_077 55 PE=4 SV=1
MESVFIVVVVLVVFFFVVQKRFLKQEELKDSEYKKKGALLNMQESAFYNALVTAVGEHGVVLTKVSMSNVVAPVATNKKHWFIANNRIAKSYFDYVVCDPRTLEPRVAIEFDNGKQLDKGKIERHKLLMHVCKSAGIPLIGATIKHSYQVGRLRRLLAAHIDLIEPDKEVRFCKRCGSPMVIKTASSGEHKGRRFFTCSRQPHCTYTENYNVVFEEDSSE

SEQ ID NO: 26848 - protein, 167 aa, Vibrio hepatarius
  misc_feature (1)..(167): tr|A0A0M0I2S1|A0A0M0I2S1_9VIBR Queuosine biosynthesis p rotein QueD OS=Vibrio hepatarius OX=171383 GN=AKJ31_063 55 PE=4 SV=1
MQVHTLDKATIINELQFGNGINHAVHEGRRADFALILSMFSDDVRDNTPVEKVEAVNTTDQLLRQRFELQPPQPLRSDQSSYEISAQQANLFHTSGLPSAKLSHYLKPEVLAYLPEDTHDLPEEVYHNLSGHQRRKLSEAEPKQLLPADLYNKLVDAQRTFQISTRA

SEQ ID NO: 26849 - protein, 121 aa, Vibrio ichthyoenteri
  misc_feature (1)..(121): tr|F9S3U9|F9S3U9_9VIBR 6-carboxy-5,6,7,8-tetrahydropter in synthase OS=Vibrio ichthyoenteri ATCC 700023 OX=8709 68 GN=VII00023_07059 PE=3 SV=1
MMKTELYKEFMFEAAHHLPHVPEGHKCGRLHGHSFLVRLYVEGEVDPYTGWVVDFAEIKAAFKPIYNRLDHYYLNDIEGLENPTSEVLAKWIWQQLKPSLPLLSKVEIKETCTAGCIYKGE

SEQ ID NO: 26850 - protein, 120 aa, Vibrio inusitatus
  misc_feature (1)..(120): tr|A0A4Y3HUE6|A0A4Y3HUE6_9VIBR 6-carboxy-5,6,7,8-tetrah ydropterin synthase OS=Vibrio inusitatus NBRC 102082 OX =1219070 GN=VIN01S_14820 PE=3 SV=1
MTTEIYKEFMFEAAHKLPHVPAGHKCGRLHGHSFLVRLYLKGEVDAHTGWIIDFSDVKEKFKPIYDRLDHHYLNDIEGLENPTSEVLAKWVFEQTKPLLPLISKVEIKETCTAGCIYTGE

SEQ ID NO: 26851 - protein, 85 aa, Vibrio ishigakensis
  misc_feature (1)..(85): tr|A0A0B8PQW9|A0A0B8PQW9_9VIBR NADPH-dependent 7-cyano- 7-deazaguanine reductase OS=Vibrio ishigakensis OX=1481 914 GN=JCM19232_4880 PE=4 SV=1
MKLFVRDLTVIDSSYLCPQRGMVGESWILDVVMSGELNEMSMVLDFSRVKKQIKQIVDEYIDHRLIVPNQIQQSAPNQPSLATRP

SEQ ID NO: 26852 - protein, 173 aa, Vibrio ishigakensis
  misc_feature (1)..(173): tr|A0A0B8PLD1|A0A0B8PLD1_9VIBR NADPH dependent preQ0 re ductase OS=Vibrio ishigakensis OX=1481914 GN=JCM19232_4 879 PE=4 SV=1
MLKGKLPENVQGLEITLRHEDISGPFYHYSHGLKKHDGNCQRIAHGHRSPVELLVNGKRDLELEQEWAERWKDIYLGSQEDECELADLNLSPAANSLTEMTHHAFRYTAPQGEFELAIARSDVEMIDTDTTVELLAQYIAEEVSFSIEPDSTLEVVAYEGVGKGAMASSKGQA

SEQ ID NO: 26853 - protein, 292 aa, Vibrio jasicida
  misc_feature (1)..(292): tr|A0A2S7W6L1|A0A2S7W6L1_9VIBR Uncharacterized protein OS=Vibrio jasicida OX=766224 GN=BTO01_08070 PE=4 SV=1
MNLFVKDLTVIDASYLCATRGMVGESWILDVVMHGDLNEMSMVLDFSKVKKQIKQLVDEHVDHRLLVPSKNSAVHSAHVKAGYSQVDLIRGEKSIHLNCPDEAFCFIETEAISIESVTEHIHKVLIGHLPSNVASIDVTLRHEQINGAYYHYTHGLKKHDGNCQRIAHGHRSPIEILTDGERDTAREHAFAQRWQDIYLASIEDLVEIGHLELSEHASLINCDTHFGFRYTTSQGDFQLAIAHSETEVLDTDTTVELLAVFIANDIAPSLAKGQSLQVIAYEGVGKGAMAFR

SEQ ID NO: 26854 - protein, 120 aa, Vibrio jasicida
  misc_feature (1)..(120): tr|A0A2S7VAX2|A0A2S7VAX2_9VIBR 6-carboxy-5,6,7,8-tetrah ydropterin synthase OS=Vibrio jasicida OX=766224 GN=BTO 01_21095 PE=3 SV=1
MKTELYKEFMFEAAHHLPHVPEGHKCGRLHGHSFLVRLYVEGEVDPHTGWVIDFSEIKAAFKPTYDRLDHYYLNDIEGLENPTSEVLAKWIWQELKPSLPLLSKVEIKETCTAGCIYKGE

SEQ ID NO: 26855 - protein, 121 aa, Vibrio kanaloae
  misc_feature (1)..(121): tr|A0A1E5DTR5|A0A1E5DTR5_9VIBR 6-carboxy-5,6,7,8-tetrah ydropterin synthase OS=Vibrio kanaloae 5S-149 OX=119129 9 GN=A132_12005 PE=3 SV=1
MRTELYKEFMFEAAHHLPHVPEGHKCGRLHGHSFLVRLYVEGEVDPHTGWVIDFSEIKAVFKPIYNRLDHYYLNDIKGLENPTSEVLAKWIWNELKPNLPLLSKVEIKETCTAGCIYIGEA

SEQ ID NO: 26856 - protein, 121 aa, Vibrio kanaloae; identical to SEQ ID NO: 26855
  misc_feature (1)..(121): tr|A0A2N7JGI7|A0A2N7JGI7_9VIBR 6-carboxy-5,6,7,8-tetrah ydropterin synthase OS=Vibrio kanaloae OX=170673 GN=que D PE=3 SV=1

SEQ ID NO: 26857 - protein, 295 aa, Vibrio lentus
  misc_feature (1)..(295): tr|A0A2N7GU76|A0A2N7GU76_9VIBR Uncharacterized protein OS=Vibrio lentus OX=136468 GN=BCU02_10965 PE=4 SV=1
MNLFVKALTVIDASYLCDKRGMVGESWILDVTLSGQLNEMSMVLDFGQVKSQIKRLVDQFVDHRLLIPKRNPLIHSTQTNSGYTSIDLVRETKSIYLNCPDEAYCFIDAEEINIDSVTKHVYQLLKGYLPDNVDGLDITLRPEKIDGALYHYSHGLKKHDGNCQRIAHGHRSPIELIVDGQRDSIRELEFCKRWEDIYLGSLEDKVPVTSLTLSKNSQGISEESHYAFSYTSPQGKFELAISKCETEILDTDTTVELLANYISNEVQKSLSPIQTLKVVAYEGVGKGAMAFHNCK

SEQ ID NO: 26858 - protein, 292 aa, Vibrio lentus
  misc_feature (1)..(292): tr|A0A2N7GIG1|A0A2N7GIG1_9VIBR Uncharacterized protein OS=Vibrio lentus OX=136468 GN=BCU02_04885 PE=4 SV=1
MNLFVRDLTVIDSSYICEHRGVVGDSWILDVTMSGELNEMSMVLDFSKVKKQIKHLVDQHVDHRLLLPMQSAAIVHQASKAGYSKVDVLRGDKSLHLHCPDEAYCLIDAEAITIESVTAHVYHILRDNLPSNVTGLEITLRHENINGAFYHYTHGLKKHDGNCQRIAHGHRSPVEIVVDGQRDEQREQAFAQRWEDIYLGSKEDQVSVSSLNLSEHANSVNDESHYGFCYTAPQGEFELAIAKSETEILPTDTTVELLAGYIADQVAPSLAENQSLQIVAYEGVGKGAMAFL

SEQ ID NO: 26859 - protein, 118 aa, Vibrio mangrovi
  misc_feature (1)..(118): tr|A0A1Y6IPT2|A0A1Y6IPT2_9VIBR 6-carboxy-5,6,7,8-tetrah ydropterin synthase OS=Vibrio mangrovi OX=474394 GN=que D PE=3 SV=1
MIIYKEFTFEAAHHLPHVPEGHKCGRLHGHSFLVRVCVEGEVDPLTGWVIDFADIKSAFKPIYQRLDHYYLNEIEGLENPTSEVLARWIWDELKPNLPLLSQIEVKETCTAGCVYRGE

SEQ ID NO: 26860 - protein, 60 aa, Vibrio maritimus
  misc_feature (1)..(60): tr|A0A090SWZ1|A0A090SWZ1_9VIBR NADPH dependent preQ0 re ductase OS=Vibrio maritimus OX=990268 GN=JCM19240_5642 PE=4 SV=1
MDVVLSGELNEMSMVLDFGKVKKQIKHLIDEYVDHRLLVPMKSNAVRHQASNQLHQVRLS

SEQ ID NO: 26861 - protein, 150 aa, Vibrio maritimus
  misc_feature (1)..(150): tr|A0A090TLM7|A0A090TLM7_9VIBR NADPH dependent preQ0 re ductase OS=Vibrio maritimus OX=990268 GN=JCM19240_5643 PE=4 SV=1
MINGAFYHYTHGLKKHDGNCQRIAHGHRSPIELVVNGERDVEREAAFAARWQDIYLGSLEDKVSLAALSLSDNATGITDDTHYGFRYSAPQGEFELAISKLETEILDTDTTVELLANYVADEVNKTLAENQTLQVIAYEGVGKGAMAFRS

SEQ ID NO: 26862 - protein, 120 aa, Vibrio mediterranei; identical to SEQ ID NO: 26803
  misc_feature (1)..(120): tr|A0A2C9P709|A0A2C9P709_9VIBR 6-carboxy-5,6,7,8-tetrah ydropterin synthase OS=Vibrio mediterranei OX=689 GN=qu eD PE=3 SV=1

SEQ ID NO: 26863 - protein, 122 aa, Vibrio metoecus
  misc_feature (1)..(122): tr|A0A271VVR0|A0A271VVR0_9VIBR 6-carboxy-5,6,7,8-tetrah ydropterin synthase OS=Vibrio metoecus OX=1481663 GN=qu eD PE=3 SV=1
MMMKTELYKEFMFEAAHHLPHVPAGHKCGRLHGHSFLVRLYVEGEVNPHTGWVVDFAEIKAAFKPIYDRLDHYYLNDIEGLENPTSEVLAKWIWQQLKPSLPLLSKVEIKETCTAGCIYRGE

SEQ ID NO: 26864 - protein, 167 aa, Vibrio metoecus
  misc_feature (1)..(167): tr|A0A067BK61|A0A067BK61_9VIBR Queuosine biosynthesis p rotein QueD OS=Vibrio metoecus OX=1481663 GN=AAY55_1584 5 PE=4 SV=1
MQVHTLDKAGIISELHFGQGISQAVTQGRRADFALLLALFSNDVRDNTPIDKIHESPTTEQVLRQRFELAEPQPLENDESSYQISAKQAALFHEGGMASAKLSHYLTPEALTYRPQDTQGFPEEVYLNLSGHERRHLAEKTPTALLAKDFYHRLATAYRQDQFRLSV

SEQ ID NO: 26865 - protein, 119 aa, Vibrio metschnikovii
  misc_feature (1)..(119): tr|C9P4Z1|C9P4Z1_VIBME 6-carboxy-5,6,7,8-tetrahydropter in synthase OS=Vibrio metschnikovii CIP 69.14 OX=675813 GN=VIB_001363 PE=3 SV=1
MKTEIYKEFMFEAAHHLPHVPEGHKCGRLHGHSFLVRLYVAGEVDAHTGWLIDFAEIKAAFQPIYDRLDHYYLNDIEGLENPTSEVLAKWIWQQLKPSLPLLSKVEIKETCTAGCVYTG

SEQ ID NO: 26866 - protein, 119 aa, Vibrio metschnikovii; identical to SEQ ID NO: 26865
  misc_feature (1)..(119): tr|A0A380NVM6|A0A380NVM6_VIBME 6-carboxy-5,6,7,8-tetrah ydropterin synthase OS=Vibrio metschnikovii OX=28172 GN =queD PE=3 SV=1

SEQ ID NO: 26867 - protein, 122 aa, Vibrio mimicus; identical to SEQ ID NO: 26816
  misc_feature (1)..(122): tr|A0A2J9V318|A0A2J9V318_VIBMI 6-carboxy-5,6,7,8-tetrah ydropterin synthase OS=Vibrio mimicus OX=674 GN=queD PE =3 SV=1

SEQ ID NO: 26868 - protein, 122 aa, Vibrio mimicus
  misc_feature (1)..(122): tr|D2YJJ4|D2YJJ4_VIBMI 6-carboxy-5,6,7,8-tetrahydropter in synthase OS=Vibrio mimicus VM603 OX=671074 GN=VMB_36 910 PE=3 SV=1
MMMKTELYKEFMFEAAHHLPHVPAGHKCGRLHGHSFLVRLYVEGEVDPYTGWVVDFAEIKAAFKPIYDRLDHYYLNDIEGLENPTSEVLAKWIWQQLKPSLPLLSKVEIKETCTAGCIYRGE

SEQ ID NO: 26869 - protein, 120 aa, Vibrio mytili
  misc_feature (1)..(120): tr|A0A0C3HNT1|A0A0C3HNT1_9VIBR 6-carboxy-5,6,7,8-tetrah ydropterin synthase OS=Vibrio mytili OX=50718 GN=SU60_1 6760 PE=3 SV=1
MKTELYKEFMFEAAHHLPHVPEGHKCGRLHGHSFLVRLYVEGEVDPHTGWVVDFAEIKAAFNPIYDRLDHYYLNDIEGLENPTSEVLAKWIWQQLKPNLPLLSKVEIKETCTAGCIYKGE

SEQ ID NO: 26870 - protein, 167 aa, Vibrio mytili
  misc_feature (1)..(167): tr|A0A0C3E6D6|A0A0C3E6D6_9VIBR Queuosine biosynthesis p rotein QueD OS=Vibrio mytili OX=50718 GN=SU60_16600 PE= 4 SV=1
MQIHTLDKASVINELHIGNGINHAVNEGRRADFALILSMFSNDVRDAVPIEEVDSVKTSDDILRQQFSLSQPQALRSDTSSYELAAEQAKQFQTSGLPSAKLCHYLKPDALTYLPEDTFNLPEEVYHNLSGHERRSLGERNKKLIPDANLYNQLVTAQRQYHIQAQV

SEQ ID NO: 26871 - protein, 120 aa, Vibrio natriegens
  misc_feature (1)..(120): tr|A0A1B1ED24|A0A1B1ED24_VIBNA 6-carboxy-5,6,7,8-tetrah ydropterin synthase OS=Vibrio natriegens OX=691 GN=BA89 4_09350 PE=3 SV=1
MKTELYKEFMFEAAHHLPHVPEGHKCGRLHGHSFLVRLYVEGEVDPHTGWVVDFAEIKAAFKPIYDRLDHYYLNDIEGLENPTSEVLAKWIWQQLKPSLPLLSKVEIKETCTAGCIYKGE

SEQ ID NO: 26872 - protein, 167 aa, Vibrio navarrensis
  misc_feature (1)..(167): tr|A0A099MNZ3|A0A099MNZ3_9VIBR Queuosine biosynthesis p rotein QueD OS=Vibrio navarrensis OX=29495 GN=EA26_1647 5 PE=4 SV=1
MQIHTLDKAGIINELQFGTGINHAIHDGRRADFALLLSMFSNDARHITPVEETDSQPVTEQILRQQFALSEPQKLRSDQSSYTISAEQAKQFHRAGLASSKLSHYLIADALAYMPEETFDLPEEVYQNLSGHERRQLAQPNTPLLPEAGLYNQLSTAWAKARLSASV

SEQ ID NO: 26873 - protein, 221 aa, Vibrio navarrensis
  misc_feature (1)..(221): tr|A0A099LSS2|A0A099LSS2_9VIBR Queuosine biosynthesis p rotein QueD OS=Vibrio navarrensis OX=29495 GN=EA26_0750 0 PE=4 SV=1
MTNIFIIVALLILFFFIIQKYVVKQDNSKDYSYRVKGPVLRSQEVAFFNALKTAVGEHGVVFSKVNMSSVIAPRDIVSKKQLFIASNKISRSHFDYLICDPRTFEPRVVIELDNGKELNKSKVEREKLLMQVCKSANIPLIGTSVKHSYQVGRLRRLLAAHIDLIEPDKEIRFCKKCGSPMVIKVASQGEFKGRRFFTCSRQPNCTYTENYNVVFDTDDDE

SEQ ID NO: 26874 - protein, 120 aa, Vibrio neocaledonicus; identical to SEQ ID NO: 26795
  misc_feature (1)..(120): tr|A0A4P8G0I7|A0A4P8G0I7_9VIBR 6-carboxy-5,6,7,8-tetrah ydropterin synthase OS=Vibrio neocaledonicus OX=1208308 GN=queD PE=3 SV=1

SEQ ID NO: 26875 - protein, 221 aa, Vibrio neptunius
  misc_feature (1)..(221): tr|A0A0F4PFN7|A0A0F4PFN7_9VIBR Queuosine biosynthesis p rotein QueD OS=Vibrio neptunius OX=170651 GN=TW84_01050 PE=4 SV=1
MESVFIIVVLLVLFFVFVQKRYLKQDELKDSSYKKKGPLMNMQESAFYNALITAVGQHGVVMSKVNMTNIVAPLATDKKQWFIANNRIAKSYFDYVVCDPRTLQVRVAIELDNGRALDKGKIERQKLLMHVCKSSGIPLIGTSVKHSYQVGKLRRLLASHIDLIEPEKEIRFCKRCGSPMVIKTASQGEFKGRRFFTCSRQPQCTYTENYNVVFDEDGVDE

SEQ ID NO: 26876 - protein, 169 aa, Vibrio neptunius
  misc_feature (1)..(169): tr|A0A0F4P9M1|A0A0F4P9M1_9VIBR Queuosine biosynthesis p rotein QueD OS=Vibrio neptunius OX=170651 GN=TW84_07225 PE=4 SV=1
MQTQIHTLDKAGIINELQFGKGINHAVHEGRRADFALILSMFSDDVRDNTPIEKVNEQDTTEKALRRRFEIQPPQQIRSDQSSYPISAIQADMFHRAGLPSAKLTHYLHPEVLAYMPEDTHDLPEEIYNNLSGHQRRQLDEKEAKELIPIDLYNQLIKAQRTFQIQTQV

SEQ ID NO: 26877 - protein, 222 aa, Vibrio nereis
  misc_feature (1)..(222): tr|A0A0M0HN49|A0A0M0HN49_VIBNE Queuosine biosynthesis p rotein QueD OS=Vibrio nereis OX=693 GN=AKJ17_09105 PE=4 SV=1
MESVFIVVGLLVLFFLVVQKRYLKQEELKDSAYKKKGPILSMQESAFFNALVTAVGSHGVVLTKVNMANVLSPLETDKKRWFIANNRIAKSYFDFVVCDPRTLDIRVIIEFDNGKPLDKGKIERQKLLMHVCKSASIPLIGTTIKHSYQVGRLRRLLAAHIDLIEPEKEVRFCKRCGSPMVIKIASVGDHKGRRFFTCSRQPQCTYTENYNVVFDEEDSPNQ

SEQ ID NO: 26878 - protein, 122 aa, Vibrio nereis
  misc_feature (1)..(122): tr|A0A0M0HNB9|A0A0M0HNB9_VIBNE 6-carboxy-5,6,7,8-tetrah ydropterin synthase OS=Vibrio nereis OX=693 GN=AKJ17_09 520 PE=3 SV=1
MRTELYKEFMFEAAHRLPHVPEGHKCGRLHGHSFLVRLYVEGEVDPHTGWVIDFSEIKTAFKPIYDRLDHYYLNDIEGLENPTSEVLAKWIWQQLKPGLPLLSKVEIKETCTAGCIYKGEEE

SEQ ID NO: 26879 - protein, 291 aa, Vibrio nigripulchritudo
  misc_feature (1)..(291): tr|U4DZX6|U4DZX6_9VIBR Putative 6-pyruvoyl-tetrahydropt erin synthase OS=Vibrio nigripulchritudo FTn2 OX=123844 1 GN=VIBNIFTn2_1590032 PE=4 SV=1
MNLFVKNLTVIDSSYLCEKRGMVGDSWIVDVSLTGDLNEMSMILDFGKVKKIIKELIDEHVDHKLIVPASNPNIEYSETQPGYTKLGFLRGEQTLHLNCPNSAYCFIETSEIDNRALTAHIYQVLKQYLPNNVSDIDITLRHEDIKEHYYHYTHGLKKHDGNCQRIAHGHRSTLEIYVNGERDSKREEDFCERWKDIYLGSQEDKVSIASLDFIAQEDLVSDDSHYAFMYSTGQGDYELIISKEVTEIIDTDTTVELLAQFIQKEVKKTLNSEDSLSVVAYEGVGKGAKVF

SEQ ID NO: 26880 - protein, 291 aa, Vibrio nigripulchritudo
  misc_feature (1)..(291): tr|U4KCB3|U4KCB3_9VIBR Putative 6-pyruvoyl-tetrahydropt erin synthase OS=Vibrio nigripulchritudo OX=28173 GN=VI BNI_A1958 PE=4 SV=1
MNLFVKNLTVIDSSYLCEKRGMVGDSWIVDVSLTGDLNEMSMILDFGKVKKIIKELIDEHVDHKLIVPASNPNIEYSETQPGYTKLGFLRGEQTLHLNCPNSAYCFIETSEIDNHALTAHIYQVLKQYLPNNVSDIDITLRHEDIKEHYYHYTHGLKKHDGNCQRIAHGHRSTLEIYVNGERDSKREEDFCERWKDIYLGSQEDKVSIASLDFIAQEDLVSDDSHYAFMYSTSQGDYELIISKEVTEIIDTDTTVELLAQFIQKEVKKTLDSEDSLSVVAYEGVGKGAKVF

SEQ ID NO: 26881 - protein, 292 aa, Vibrio orientalis
  misc_feature (1)..(292): tr|F9SW55|F9SW55_VIBOR Uncharacterized protein OS=Vibri o orientalis CIP 102891 = ATCC 33934 OX=675816 GN=VIOR3 934_15896 PE=4 SV=1
MNLFVRDLTVIDSSYICEQRGVVGDSWILDVTMSGELNEMSMVLDFGRVKKQIKHLVDEYVDHRLLVPAKSSAVTLKPTKVGYSTLDVKRGDKSIHLHCPNEAYCLIEAESISIESITEHVYQILRNNLPSNVTGIEITLRHENISGAFYHYTHGLKKHDGNCQRIAHGHRSPIEILIDGQRDSEIEARLAKRWQDIYLGSKEDQISVTQLNLSEQAKSVTDETHFGFRYTAPQGEFELAIAKSETEILPTDTTVELLACYIADVVKPDVDDGKSLQVIAYEGVGKGAMAFA

SEQ ID NO: 26882 - protein, 120 aa, Vibrio owensii; identical to SEQ ID NO: 26795
  misc_feature (1)..(120): tr|A0A0C1ZM08|A0A0C1ZM08_9VIBR 6-carboxy-5,6,7,8-tetrah ydropterin synthase OS=Vibrio owensii CAIM 1854 = LMG 2 5443 OX=1229493 GN=H735_05100 PE=3 SV=1

SEQ ID NO: 26883 - protein, 292 aa, Vibrio owensii
  misc_feature (1)..(292): tr|A0A3G2PUL7|A0A3G2PUL7_9VIBR Uncharacterized protein OS=Vibrio owensii OX=696485 GN=D0812_09585 PE=4 SV=1
MNLFVRDLTVIDSSYLCETRGMVGESWILDISLSGELNEMSMVLDFGQVKKQIKRLVDEYVDHKLLVPTKNKKIFVANTKQGYSSVDLIRGDQGIHIHCPNEALCLVDADTITMFSVTKHLYTILKSHLPQNVNDLELTLRTESIDGAFYHYSHGLKKHDGNCQRIAHGHRSPIELIVNGMRDAQREARFATRWQDIYLGSKEDQVTLAELSLNIRNKEINDHTHYAFKYTAPQGKFELAIAKNETEILESDTTIELLVNYIADEVKKDLTAKDTLKVIGYEGVGKGAIATR

SEQ ID NO: 26884 - protein, 271 aa, Vibrio palustris
  misc_feature (1)..(271): tr|A0A1R4B104|A0A1R4B104_9VIBR 6-pyruvoyl tetrahydropte rin synthase OS=Vibrio palustris OX=1918946 GN=VPAL9027 _00530 PE=4 SV=1
MKTAMYIDDLTAIDFSVYDGTDIKGDSISLSVMVTGEENETGMISDFGKIKPKLKFICDEEVDHRLVCDSRYLTVDNDRSAGEFPVSGGIIHAQGPSVMFCAIPMVSEDYVADIKHYLITKFCQAMPEFEFEIELTRSTTASFQYNHGLKLHDGNCQRIIHGHSSDLEIQINGQTCPKHHDWMAANLNGKHFFNANDVAVGEERTTVRYSASQGDFEVQIPNQLVEIVQGEPSIENISKHIAVLVKDLNPDAHSVRVKVSEGLSKGAVTLA

SEQ ID NO: 26885 - protein, 120 aa, Vibrio panuliri
  misc_feature (1)..(120): tr|A0A1Q9HIY7|A0A1Q9HIY7_9VIBR 6-carboxy-5,6,7,8-tetrah ydropterin synthase OS=Vibrio panuliri OX=1381081 GN=BI Y22_04540 PE=3 SV=1
MKSELYKEFMFEAAHRLPHVPEGHKCGRLHGHSFLVRLYVEGEVDPHTGWVIDFSEIKAAFKPIYDRLDHYYLNDIEGLENPTSEVLAKWIWQQLKPSLALLSKVEIKETCTAGCIYRGE

SEQ ID NO: 26886 - protein, 219 aa, Vibrio parahaemolyticus
  misc_feature (1)..(219): tr|A0A0L8UR56|A0A0L8UR56_VIBPH Queuosine biosynthesis p rotein QueD OS=Vibrio parahaemolyticus OX=670 GN=CA163_ 01360 PE=4 SV=1
MTNIFIIVVLLVVFFIIIQKYVIKHDDTRDYPYRAKGPLLRGQEGAFFNALRAAVGEHAVVFAKVNMSTLVAPKDIKNKKQFFVANNRIARSYFDYVICDPRTLEPRVIIEFDNGQQLNKGKAERQKLLMHVCKSANLPLIGTSVKHSYQVGRLRRLLAAHIDLIEPEKEVRFCKKCGSPMIIKTASQGEFKGRRFFTCSRQPNCTYTENYNVVFESDD

SEQ ID NO: 26887 - protein, 120 aa, Vibrio parahaemolyticus
  misc_feature (1)..(120): tr|A0A0D1FWD8|A0A0D1FWD8_VIBPH 6-carboxy-5,6,7,8-tetrah ydropterin synthase OS=Vibrio parahaemolyticus 49 OX=12 88779 GN=H320_21750 PE=3 SV=1
MKTELYKEFMFEAAHHLPHVPEGHKCGRLHGHSFLVRLYVEGEVDPHTGWVVDFAEIKAAFKPIYNRLDHYYLNDIEGLENPTSEVLAKWIWQQLKPNLPLLSKVEIKETCTAGCIYKGE

SEQ ID NO: 26888 - protein, 120 aa, Vibrio pectenicida
  misc_feature (1)..(120): tr|A0A427U7B8|A0A427U7B8_9VIBR 6-carboxy-5,6,7,8-tetrah ydropterin synthase OS=Vibrio pectenicida OX=62763 GN=q ueD PE=3 SV=1
MKTELYKEFMFEAAHHLPNVPEGHKCGRLHGHSFLVRLYVEGEVDPHTGWLIDFAELKAAFKPIYEQLDHYYLNDIEGLENPTSEVLARWIWLKLKPTLPLLSKVEIKETCTAGCIYAGG

SEQ ID NO: 26889 - protein, 120 aa, Vibrio penaeicida
  misc_feature (1)..(120): tr|A0A432D8P7|A0A432D8P7_9VIBR 6-carboxy-5,6,7,8-tetrah ydropterin synthase OS=Vibrio penaeicida OX=104609 GN=q ueD PE=3 SV=1
MKTELYKEFMFEAAHRLPHVPEGHKCGRLHGHSFLVRLYVEGEVDQYTGWVIDFSEIKAAFKPIYDRLDHYYLNDIPGLENPTSEVLAKWIWNELKPSLPLLSKVEIKETCTAGCIYKGE

SEQ ID NO: 26890 - protein, 120 aa, Vibrio ponticus
  misc_feature (1)..(120): tr|A0A3N3DVH3|A0A3N3DVH3_9VIBR 6-carboxy-5,6,7,8-tetrah ydropterin synthase OS=Vibrio ponticus OX=265668 GN=que D PE=3 SV=1
MKTELYKEFMFEAAHHLPNVPEGHKCGRLHGHSFLVRLYVEGEVDPHTGWVVDFAEIKAAFKPIYDRLDHYYLNDIEGLENPTSEVLAKWIWQQLKPSLPLLSKVEIKETCTAGCIYRGE

SEQ ID NO: 26891 - protein, 228 aa, Vibrio ponticus
  misc_feature (1)..(228): tr|A0A090P6E6|A0A090P6E6_9VIBR QueD-like protein OS=Vib rio ponticus OX=265668 GN=JCM19238_2170 PE=4 SV=1
MEYVAILLVVFVAFYLFIHQRYLKQDALKDSAYKKKGPILNQKESAFYNALLSAVGQQAVVMPKVTMSKVIAPKATDKKQWFIANNRIAKSYFDFVVCDPRNLEARVVLELDDGAPLNKGKVERQKLLMHACKSAGIPLIGATVKHSYQVGKLRRLLAAHIDLIEADKEVRFCKRCGSPMNIKTASQGDYKGVASSPVAASLSVITPRTTMWCLTKSRLTTRRTNICV

SEQ ID NO: 26892 - protein, 121 aa, Vibrio proteolyticus
  misc_feature (1)..(121): tr|U2ZWZ4|U2ZWZ4_VIBPR 6-carboxy-5,6,7,8-tetrahydropter in synthase OS=Vibrio proteolyticus NBRC 13287 OX=12190 65 GN=queD PE=3 SV=1
MKTELYKEFMFEAAHRLPHVPEGHKCGRLHGHSFLVRLYVEGEVDPHTGWVVDFSEIKAAFKPIYDRLDHYYLNDIEGLENPTSEVLAKWIWQQLKPALPLLSKVEIKETCTAGCIYIGEE

SEQ ID NO: 26893 - protein, 119 aa, Vibrio qinghaiensis; identical to SEQ ID NO: 26798
  misc_feature (1)..(119): tr|A0A223MXM9|A0A223MXM9_9VIBR 6-carboxy-5,6,7,8-tetrah ydropterin synthase OS=Vibrio qinghaiensis OX=2025808 G N=queD PE=3 SV=1

SEQ ID NO: 26894 - protein, 119 aa, Vibrio quintilis
  misc_feature (1)..(119): tr|A0A1M7Z2C8|A0A1M7Z2C8_9VIBR 6-carboxy-5,6,7,8-tetrah ydropterin synthase OS=Vibrio quintilis OX=1117707 GN=q ueD PE=3 SV=1
MILYKEFTFEAAHRLPHVPEGHKCGRLHGHSFLVRIYVEGDVDPQAGWVIDFAEIKQAFKPVYEQLDHHYLNEVEGLENPTSEVIARWIWQKLKPSLPLLSQVEIKETCTAGCIYKGEA

SEQ ID NO: 26895 - protein, 167 aa, Vibrio renipiscarius
  misc_feature (1)..(167): tr|A0A0C2NWQ7|A0A0C2NWQ7_9VIBR Queuosine biosynthesis p rotein QueD OS=Vibrio renipiscarius OX=1461322 GN=OJ16_ 04490 PE=4 SV=1
MHVETINNINPVSELHFSNGINHAVHEGRRADFALLVSMFSHDLRDNTPVEQIDAVEISDTSLRQRFDLPSPQQLKSDQSSYQISAQQAHQFHHGGLASAKLAHYLMPEALVYLPEQTHDLPEEVYHNLSVHQQSQLGSKTPKKLMPFDLYNQLVTAQRTYQIQAQA

SEQ ID NO: 26896 - protein, 218 aa, Vibrio renipiscarius
  misc_feature (1)..(218): tr|A0A0C2NN89|A0A0C2NN89_9VIBR Queuosine biosynthesis p rotein QueD OS=Vibrio renipiscarius OX=1461322 GN=OJ16_ 06635 PE=4 SV=1
MEYIAVVVLLFIGFYLFVQKRYLNQDDLKDSTYKKNGPLLNSKESAFYAALMTAVGDHGVVMSKVVMSKVVVPKASDKKGWFIANNRIAKSYFDYVVCDPRSLEVRVAIELDDGNPLNKGKIERQKLLMHVCKSAGIPLIGTSVKHSYQVGRLRRLLATHIDLIEPEKEVRFCKRCGSPMVIKTATQGDFKGRRFFTCSRQPHCTYTENYNIVFEDSE

SEQ ID NO: 26897 - protein, 292 aa, Vibrio rotiferianus
  misc_feature (1)..(292): tr|A0A510IBU5|A0A510IBU5_9VIBR Uncharacterized protein OS=Vibrio rotiferianus OX=190895 GN=queD PE=4 SV=1
MNLFVNDLTVIDASYLCQTRGMVGESWILDVVVHGDLNEMSMVLDFSKVKKQIKQLVDQYVDHRLLIPVKNEAVEITNGKAGYSQVDLMRGEKSIHLHCPDEAFCFVDAEDISIESVTQHIHKVLQGNLPSNVASIDLTLRHEKLDGAYYHYTHGLKKHDGNCQRIAHGHRSPIQILVDGQHDTAREHAFAQRWQDIYLASIEDLVEIGHLELSEHATLINSDTHFGFRYTTSQGDFQLAIAHSETEVLNTDTTVELLAVFIANEIASSLEEGQSLQVIAYEGVGKGAMAFR

SEQ ID NO: 26898 - protein, 120 aa, Vibrio rotiferianus
  misc_feature (1)..(120): tr|A0A2K7SZ99|A0A2K7SZ99_9VIBR 6-carboxy-5,6,7,8-tetrah ydropterin synthase OS=Vibrio rotiferianus OX=190895 GN =BI375_13175 PE=3 SV=1
MRTELYKEFMFEAAHHLPHVPEGHKCGRLHGHSFLVRLYVEGEVDPHTGWVVDFAEIKAAFKPIYDRLDHYYLNDIEGLENPTSEVLSKWIWQQLKPNLPLLSKVEIKETCTAGCIYTGE

SEQ ID NO: 26899 - protein, 118 aa, Vibrio ruber
  misc_feature (1)..(118): tr|A0A1R4L879|A0A1R4L879_9VIBR 6-carboxy-5,6,7,8-tetrah ydropterin synthase OS=Vibrio ruber DSM 16370 OX=112349 8 GN=queD PE=3 SV=1
MIIYKEFTFEAAHHLPHVPEGHKCGRLHGHSFLVRVSVEGEVDPLTGWVIDFADIKAAFNPIYQRLDHYYLNEIEGLENPTSEVLARWIWHELKPNLPLLSQIEVKETCTAGCVYRGE

SEQ ID NO: 26900 - protein, 120 aa, Vibrio rumoiensis
  misc_feature (1)..(120): tr|A0A1E5E4C3|A0A1E5E4C3_9VIBR 6-carboxy-5,6,7,8-tetrah ydropterin synthase OS=Vibrio rumoiensis 1S-45 OX=11882 52 GN=A1QC_06190 PE=3 SV=1
MTCEIYKDFIFEAAHHLPNVPEGHKCGRLHGHSFFVRLYILGEVDATTGWVIDFGDVKKIFAPIYDRLDHYYLNDIPGLENPTSEVLAKWIWNEVKPLLPELSKVEIKETCTAGCIYVGQ

SEQ ID NO: 26901 - protein, 121 aa, Vibrio sagamiensis; identical to SEQ ID NO: 26793
  misc_feature (1)..(121): tr|A0A511QAZ3|A0A511QAZ3_9VIBR 6-carboxy-5,6,7,8-tetrah ydropterin synthase OS=Vibrio sagamiensis NBRC 104589 O X=1219064 GN=VSA01S_05930 PE=3 SV=1

SEQ ID NO: 26902 - protein, 120 aa, Vibrio scophthalmi
  misc_feature (1)..(120): tr|A0A1B1NPK1|A0A1B1NPK1_9VIBR 6-carboxy-5,6,7,8-tetrah ydropterin synthase OS=Vibrio scophthalmi OX=45658 GN=q ueD PE=3 SV=1
MKTELYKEFMFEAAHHLPHVPEGHKCGRLHGHSFLVRLYVEGEVDPYTGWVVDFAEIKAAFKPIYNRLDHYYLNDIEGLENPTSEVLAKWIWQQLKPALPLLSKVEIKETCTAGCIYKGE

SEQ ID NO: 26903 - protein, 120 aa, Vibrio scophthalmi; identical to SEQ ID NO: 26902
  misc_feature (1)..(120): tr|F9RTK2|F9RTK2_9VIBR 6-carboxy-5,6,7,8-tetrahydropter in synthase OS=Vibrio scophthalmi LMG 19158 OX=870967 G N=VIS19158_13362 PE=3 SV=1

SEQ ID NO: 26904 - protein, 120 aa, Vibrio shilonii; identical to SEQ ID NO: 26803
  misc_feature (1)..(120): tr|A6D4Z2|A6D4Z2_9VIBR 6-carboxy-5,6,7,8-tetrahydropter in synthase OS=Vibrio shilonii AK1 OX=391591 GN=VSAK1_0 7224 PE=3 SV=1

SEQ ID NO: 26905 - protein, 292 aa, Vibrio sinaloensis
  misc_feature (1)..(292): tr|E8MDE4|E8MDE4_9VIBR Uncharacterized protein OS=Vibri o sinaloensis DSM 21326 OX=945550 GN=VISI1226_08384 PE= 4 SV=1
MNLFVRDLTVIDSSFICERRGVVGDSWILDVTMSGELNEMSMVLDFGRVKKQIKHLVDEHVDHRLLVPMKSDAISYQSTKPGYATLDVQRGAKSIHLQCPDEAYCLIDAEEITLESVTQHVYDILRDNLPSNVTGIEITLRNEHIAGAFYHYTHGLKKHDGNCQRIAHGHRSPIEIVVDGKRDSDKEAAFAKRWQDIYLGSQEDKVMVGELELSELAQSISDQSHYGFRYTAPQGEFQLAIPKEDTEILPTDTTVELLAGYIADQVKPTLAGGESLQIIAYEGVGKGAMAFR

SEQ ID NO: 26906 - protein, 219 aa, Vibrio sinaloensis; identical to SEQ ID NO: 26812
  misc_feature (1)..(219): tr|A0A0A5JRS8|A0A0A5JRS8_9VIBR Queuosine biosynthesis p rotein QueD OS=Vibrio sinaloensis OX=379097 GN=NM06_010 15 PE=4 SV=1

SEQ ID NO: 26907 - protein, 198 aa, Vibrio sp.
  misc_feature (1)..(198): tr|A0A3N9TKI0|A0A3N9TKI0_9VIBR 6-carboxytetrahydropteri n synthase OS=Vibrio sp. LJC006 OX=2487322 GN=EES38_071 80 PE=4 SV=1
MIIRKLFKFEGAHIVRNCSSERCKKSIHGHSYTVEIFVKSQGFDNGMMVMDFGLMKDNMKDFIDGFDHAYSMWNKESDEFQTFMKNHSDRWIEMPVSPSAEAYSLMFFKVLDEMIKATEFNNGEKNVELHSVRVHETATGYAESFRDDLDWINFELKDIVLSEGIKAEFKDPQMFDKLIQASINGTKCFINPIVDQQV

SEQ ID NO: 26908 - protein, 167 aa, Vibrio sp.
  misc_feature (1)..(167): tr|A0A084T7A1|A0A084T7A1_9VIBR Queuosine biosynthesis p rotein QueD OS=Vibrio sp. ER1A OX=1517681 GN=HW45_21785 PE=4 SV=1
MQIHSLDKANLISELQCGTSLCRAVEQGRRADFALMLSMFSDDCRETSFIEDIDTAITDETVLRQRFNVPTAQKLQGELDDYQTSAAIANQFHRGGLASAKLQHYSTPEPLNYQPTDTIGLSEEVYQNLSGHTRRQLAQGSVNTPNIDYLYNHLSTAYRKDTLAIQA

SEQ ID NO: 26909 - protein, 118 aa, Vibrio spartinae
  misc_feature (1)..(118): tr|A0A1N6M3S8|A0A1N6M3S8_9VIBR 6-carboxy-5,6,7,8-tetrah ydropterin synthase OS=Vibrio spartinae OX=1918945 GN=q ueD PE=3 SV=1
MIIYKEFTFEAAHHLPYVPEGHKCGRLHGHSFLVRVSVEGEVDPQTGWVIDFADIKAAFKPIYQRLDHYYLNEIEGLENPTSEVLARWIWHELKPTLPLLSQLEVKETCTAGCVYRGE

SEQ ID NO: 26910 - protein, 222 aa, Vibrio splendidus
  misc_feature (1)..(222): tr|A0A1A6LZW8|A0A1A6LZW8_VIBSP DUF2726 domain-containin g protein OS=Vibrio splendidus OX=29497 GN=A9262_05845 PE=4 SV=1
MTNIFIVVIVLVVFFYFIQKYLVKHDDTKDHAYQKKGSLMSAQQATFYNALKSAVGNHGEVFAKVSMSNVLVPAKANNKKNWFIANNKISRSYFDFVVCDPRTLEPRVIIELDNGKELNKGKADREKLLIHVCKSAGLPLIGASIKHSYQVSRLKRLLAAHIDLIEPSKEVRFCKKCGSPMIIKLASQGDYKGRRFFTCSRQPNCTYTENYNVVFDVDEDSN

SEQ ID NO: 26911 - protein, 120 aa, Vibrio splendidus; identical to SEQ ID NO: 26800
  misc_feature (1)..(120): tr|A0A1E5B1K3|A0A1E5B1K3_VIBSP 6-carboxy-5,6,7,8-tetrah ydropterin synthase OS=Vibrio splendidus ZS-139 OX=6171 40 GN=A143_21755 PE=3 SV=1

SEQ ID NO: 26912 - protein, 120 aa, Vibrio superstes; identical to SEQ ID NO: 26808
  misc_feature (1)..(120): tr|A0A511QU32|A0A511QU32_9VIBR 6-carboxy-5,6,7,8-tetrah ydropterin synthase OS=Vibrio superstes NBRC 103154 OX= 1219062 GN=VSU01S_31230 PE=3 SV=1

SEQ ID NO: 26913 - protein, 120 aa, Vibrio tapetis
  misc_feature (1)..(120): tr|A0A2N8ZA85|A0A2N8ZA85_9VIBR 6-carboxy-5,6,7,8-tetrah ydropterin synthase OS=Vibrio tapetis subsp. tapetis OX =1671868 GN=ygcM PE=3 SV=1
MTTELYKEFMFEAAHHLPHVPEGHKCGRLHGHSFLVRLFVEGEVDAHTGWVIDFSEIKAAFKPIYDRLDHYYLNDIPGLENPTSEVLAKWIWNELKPSLPLLSKIEIKETCTAGCIYRGE

SEQ ID NO: 26914 - protein, 136 aa, Vibrio tasmaniensis
  misc_feature (1)..(136): tr|B7VPP0|B7VPP0_VIBTL 6-carboxy-5,6,7,8-tetrahydropter in synthase OS=Vibrio tasmaniensis (strain LGP32) OX=57 5788 GN=VS_1806 PE=3 SV=1
MVLRNIACHFFSLRNTMRTELYKEFMFEAAHHLPHVPEGHKCGRLHGHSFLVRLYVEGEVDPHTGWVIDFSEIKAVFKPIYDRLDHYYLNDIDGLENPTSEVLAKWIWNELKPSLPLLSKVEIKETCTAGCIYRGE

SEQ ID NO: 26915 - protein, 120 aa, Vibrio tasmaniensis
  misc_feature (1)..(120): tr|A0A2N7HWM6|A0A2N7HWM6_9VIBR 6-carboxy-5,6,7,8-tetrah ydropterin synthase OS=Vibrio tasmaniensis OX=212663 GN =queD PE=3 SV=1
MRTELYKEFMFEAAHHLPHVPEGHKCGRLHGHSFLVRLYVEGEVDPHTGWVIDFSEIKAVFKPIYDRLDHYYLNDIEGLENPTSEVLAKWIWNELKPSLPLLSKVEIKETCTAGCIYRGE

SEQ ID NO: 26916 - protein, 120 aa, Vibrio thalassae; identical to SEQ ID NO: 26803
  misc_feature (1)..(120): tr|A0A240EKP1|A0A240EKP1_9VIBR 6-carboxy-5,6,7,8-tetrah ydropterin synthase OS=Vibrio thalassae OX=1243014 GN=q ueD PE=3 SV=1

SEQ ID NO: 26917 - protein, 220 aa, Vibrio toranzoniae
  misc_feature (1)..(220): tr|A0A120DGQ0|A0A120DGQ0_9VIBR Queuosine biosynthesis p rotein QueD OS=Vibrio toranzoniae OX=1194427 GN=APQ14_0 5905 PE=4 SV=1
MTNIFIVVIVLVVFFYFIQKYLVKHDDTKDHAYQKKGSLMSAQQATFYNALKSAVGNHGEVFAKVSMSNVLVPAKANNKKNWFIANNKISRSYFDFVVCDPRTLEPRVIIELDNGKELNKGKADREKLLIHVCKSAGLPLIGASIKHSYQVSRLKRLLAAHIDLIEPSKEVRFCKKCGSPMIIKLASQGDHKGRRFFTCSRQPNCTYTENYNVVFDVDDE

SEQ ID NO: 26918 - protein, 171 aa, Vibrio toranzoniae
  misc_feature (1)..(171): tr|A0A109DAR1|A0A109DAR1_9VIBR Queuosine biosynthesis p rotein QueD OS=Vibrio toranzoniae OX=1194427 GN=APQ14_0 3015 PE=4 SV=1
MRGVMQIHTLDKAGVINELKFGIGISQAVEQGRRADFSLLLSMFSNDVRDCTPIDTLQVIETSEDRLRNQFGVAEPQQLRSTQSSYEISAQQSDHFHQASLASAKLSHYLKPEALAFRPEDTADFPEEVYQNLSGHDRRKLANKHVPDLPHATLYNALSTAQRQYQIQAQV

SEQ ID NO: 26919 - protein, 167 aa, Vibrio tubiashii
  misc_feature (1)..(167): tr|F9TCK2|F9TCK2_9VIBR Queuosine biosynthesis protein Q ueD OS=Vibrio tubiashii ATCC 19109 OX=1051646 GN=IX91_1 0785 PE=4 SV=1
MQIHTLDKAAIISELQFGTGINHAVHEGRRADFALILSMFSDDVRDNTPLEKVDEIDTSEQALRKKFELQAPQQLRSDQSSYQVSATQASLFHSSGLPSTKLSHYLTPDALTYLPEDTHNLPEEVYHNLSGHQRRAMGEKEPKELMPIDLYNQLIKAQRTFQIQAQA

SEQ ID NO: 26920 - protein, 221 aa, Vibrio tubiashii
  misc_feature (1)..(221): tr|A0A0A5I391|A0A0A5I391_9VIBR Queuosine biosynthesis p rotein QueD OS=Vibrio tubiashii OX=29498 GN=NM22_13445 PE=4 SV=1
MESVFIVVAILVIFFVIIQKRYLKQDELKDSSYKKKGALLNAKESAFYNALIAAVGQHGVVMSKVSLANVIVPLATDKKQWFIANNRISKSYFDYVVCDPRTFEVRVAIELDDGKELNKGKVDRQKLLMHTCKSAGIPLIGANIKHSYQVGRLRRLLAAHIDLIEPDKEVRFCKRCGSPMTIKIASQGEHKGRRFFTCSRQPHCTYTENYNVVFDEEEDRS

SEQ ID NO: 26921 - protein, 226 aa, Vibrio variabilis
  misc_feature (1)..(226): tr|A0A090TF95|A0A090TF95_9VIBR NADPH dependent preQ0 re ductase OS=Vibrio variabilis OX=990271 GN=JCM19239_6810 PE=4 SV=1
MVGESWILDVSLSGKLNEMSMVLDFGKVKSQIKRLVDQYVDHRLLIPSQSQHIRFSETQNGYATLDLIRPEKSIHLNCPEEAYCFIDAETITTESVQEHVYHILKSHLPDNVEGLEIVLRPEKIDGAYYHYSHGLKKHDGNCQRIAHGHRSPIELYVDGHRDETLEHSFAQRWKDIYLGSAEDQVSLQTLSLSEHASQCKEDTHYALDTKRHRVTLSLQLLKVKLK

SEQ ID NO: 26922 - protein, 151 aa, Vibrio variabilis
  misc_feature (1)..(151): tr|A0A090TH60|A0A090TH60_9VIBR Potential queD like 2 OS =Vibrio variabilis OX=990271 GN=JCM19239_260 PE=4 SV=1
MCTSLNRAVEQGRRADFALMLSMFSQDSRETSVTEDVDTKITDEAILRKRFDVPTAQKLQGELDDYEVSASIAKQFHDGGLPSAKLQHYSRPEPLNYAPVDTHGLAEEVYHNLSGHTRRQLGQKSAPKPTIDILYNQLSTAHRKDGLSIHL

SEQ ID NO: 26923 - protein, 120 aa, Vibrio vulnificus
  misc_feature (1)..(120): tr|A0A087JHX0|A0A087JHX0_VIBVL 6-carboxy-5,6,7,8-tetrah ydropterin synthase OS=Vibrio vulnificus OX=672 GN=queD PE=3 SV=1
MRTELYKEFMFEAAHHLPHVPEGHKCGRLHGHSFLVRLYVEGEVDPHTGWVVDFAEIKAAFKPIYNRLDHYYLNDIEGLENPTSEVLAKWIWQQLKPNLPLLSKVEIKETCTAGCIYKGE

SEQ ID NO: 26924 - protein, 221 aa, Vibrio vulnificus
  misc_feature (1)..(221): tr|A0A087J7L7|A0A087J7L7_VIBVL DUF2726 domain-containin g protein OS=Vibrio vulnificus OX=672 GN=CRN32_23105 PE =4 SV=1
MTNIFIIVALLILFFFVIQKYVVKQDDTKEYAYRSKGSVLKGHEVAFFNALKTAVGEHGVVFAKVNMSNVVAPRDINSKKQLFIASNRISRMYFDYVICDPRTFEPRVIIELDNGKELNKVKVEREKLLMQVCKTANIPLIGTSIKHSYQVGRLRRLLAAHIDLIEPDKEVRFCKKCGSPMIIKIASQGEFKGRRFFTCSRQPNCTYTENYNVVFDVDDDD

SEQ ID NO: 26925 - protein, 271 aa, Vibrio xiamenensis
  misc_feature (1)..(271): tr|A0A1G8HEC8|A0A1G8HEC8_9VIBR 6-pyruvoyl-tetrahydropte rin synthase OS=Vibrio xiamenensis OX=861298 GN=SAMN044 88136_1505 PE=4 SV=1
MKTAMYIDDLTAIDFSVYDGKEIRGDSVSLSVMVTGKLDESGMISDFGKIKPRLKAICDNQVDHKLVCDPKFLRAENGISRGEFHVASGVITSTGPSSMYCPIELKSSHYVADIKEYLHAKFLDAMPDFEFDIELARNANASFQYNHGLKLHDGNCQRIIHGHSAELEIVIDGQPNTDIHDRIAARLNGKHFFNQSDVEQGESLSTIRYQASQGDFEVSMPNALLEIVASEPSIENISKHVTLMVKEMYPDAGSIRVRVSEGLSKGAVTLL

SEQ ID NO: 26926 - protein, 121 aa, Vibrionales bacterium
  misc_feature (1)..(121): tr|A0A366XFS0|A0A366XFS0_9GAMM 6-carboxy-5,6,7,8-tetrah ydropterin synthase OS=Vibrionales bacterium C3R12 OX=2 267228 GN=queD PE=3 SV=1
MEMKTELYKDFMFEAAHHLPHVPEGHKCGRLHGHSFMVRLYVEGEVDPHTGWIIDFSEIKAAFKPIYDRLDHYYLNDIEGLENPTSEVLSKWIWQQLKPSLPLLSKVEIKETCTAGCTYIG

SEQ ID NO: 26927 - protein, 292 aa, Vibrionales bacterium
  misc_feature (1)..(292): tr|A5KVV3|A5KVV3_VIBBS Uncharacterized protein OS=Vibri onales bacterium (strain SWAT-3) OX=391574 GN=VSWAT3_17 818 PE=4 SV=1
MNLFVRDLTVIDSSYICERRGVVGDSWILDVTMSGELNEMSMVLDFSRVKKQIKNLVDQHVDHRLLLPMKNAAIVHQASKPGYAKVDVLRGDKSLHLHCPDEAYCLIDAEAITIESVTAHVYDILRDNLPSNVTGLEITLRHENINGAFYHYTHGLKKHDGNCQRIAHGHRSPVEIVVDGQRDEQRELAFAERWEDIYLGSKEDQVSVSSLNLSEHAKSANDESHYGFQYTAPQGEFELAIAKSETEILPTDTTVELLAGYIADQVAPSLAENQSLQIVAYEGVGKGAMAFR

SEQ ID NO: 26928 - protein, 136 aa, Vibrionimonas magnilacihabitans; identical to SEQ ID NO: 21163
  misc_feature (1)..(136): tr|A0A2S8SIC7|A0A2S8SIC7_9BACT 6-pyruvoyltetrahydropter in/6-carboxytetrahydropterin synthase OS=Vibrionimonas magnilacihabitans OX=669455 GN=CLV53_10629 PE=4 SV=1

SEQ ID NO: 26929 - protein, 137 aa, Vibrionimonas magnilacihabitans; identical to SEQ ID NO: 21164
  misc_feature (1)..(137): tr|A0A2S8SIN6|A0A2S8SIN6_9BACT 6-pyruvoyltetrahydropter in/6-carboxytetrahydropterin synthase OS=Vibrionimonas magnilacihabitans OX=669455 GN=CLV53_10628 PE=4 SV=1

SEQ ID NO: 26930 - protein, 146 aa, Vicingus serpentipes
  misc_feature (1)..(146): tr|A0A5C6RU74|A0A5C6RU74_9FLAO 6-carboxytetrahydropteri n synthase OS=Vicingus serpentipes OX=1926625 GN=FRY74_ 04190 PE=4 SV=1
MSVIRITKEFDFEMAHALLGYDGPCKNIHGHSYKLKVSVKGDVKTGSSDSDEGMVVDFGIIKKIVKDLVVDVYDHALVLNEKMEINVSQFEFMNKLIRVPFQPTCENLLIYYADLIKKELPENLSLTYLFLRETPTSYAEWFESDN

SEQ ID NO: 26931 - protein, 136 aa, Vicingus serpentipes
  misc_feature (1)..(136): tr|A0A5C6RYQ1|A0A5C6RYQ1_9FLAO 6-carboxy-5,6,7,8-tetrah ydropterin synthase OS=Vicingus serpentipes OX=1926625 GN=FRY74_02610 PE=3 SV=1
MKTAIYRLEHFSASHRLHNPRWDDKKNKEVFGKCNNPNYHGHNYELEVCVIGDCDEDTGYVIDTKILSTIIKDEVLDKLDHNNLNLDVEEFKNLNPTTENVARVIYEILRKKIDTNLELKIKLYETRKNYVEYPIY

SEQ ID NO: 26932 - protein, 187 aa, Victivallales bacterium
  misc_feature (1)..(187): tr|A0A2S0KSZ5|A0A2S0KSZ5_9BACT Rubredoxin OS=Victivalla les bacterium CCUG 44730 OX=2094242 GN=C5Q97_05310 PE=4 SV=1
MRSITKFELQYAHRFYKFQGEAQYLHGHTGVLTIEVEDAIEPGVNMVYPCNEIQKVAWNVLKNFDHALVLREDDPLLPAILDVYEKQGIRNGAPANKMKGEAFRTGLATAYPDCRLVVTKETMTVEGMIKIVYDLLKDKLNIAKITFTSGVNAATQEYAPGKTIDRCPLCGVALIDGVCPKCGYRKH

SEQ ID NO: 26933 - protein, 123 aa, Victivallales bacterium
  misc_feature (1)..(123): tr|A0A2S0KU25|A0A2S0KU25_9BACT 6-carboxy-5,6,7,8-tetrah ydropterin synthase OS=Victivallales bacterium CCUG 447 30 OX=2094242 GN=queD PE=3 SV=1
MFEIEIDRTFSAAHQLRGYNGDCCKLHGHNYKVTVVVRSPEQDEIGIALDFKKLKSELDSLLAVYDHSNLSELPEFREINPTSENLAKTIYRKISEKMNGGAIRVHRVRIGESDHSAVTYFEE

SEQ ID NO: 26934 - protein, 187 aa, Victivallis vadensis
  misc_feature (1)..(187): tr|A0A2U1B065|A0A2U1B065_9BACT 6-pyruvoyltetrahydropter in/6-carboxytetrahydropterin synthase OS=Victivallis va densis OX=172901 GN=C8D82_11277 PE=4 SV=1
MRSITKIELQYAHRFYKFQGEAQYLHGHTGVLTIEVEDTVDPGVNMVFPCNEIQKVAWDVLKNFDHALVLREDDPLLPAILDVYDKQGIRNGSPNNKMKGAAFKTELATAYPDCRLVVTKETMTVEGMIKIVYDLLKDKLNIARLTFTSGVNAATQEYAPDKTVDRCPLCGVALVNGVCPKCGYRKH

SEQ ID NO: 26935 - protein, 123 aa, Victivallis vadensis
  misc_feature (1)..(123): tr|A0A2U1B4J4|A0A2U1B4J4_9BACT 6-carboxy-5,6,7,8-tetrah ydropterin synthase OS=Victivallis vadensis OX=172901 G N=C8D82_108120 PE=3 SV=1
MFEIEIDRSFSAAHQLRGYNGDCCKLHGHNYKITVTVRSSELDEIGIALDFKKLKAELDALLAEYDHSNLSELADFQAVNPTSENLARTIYRKISEKMNSGTIRVHRVRVGESDHSAVTYFED

SEQ ID NO: 26936 - protein, 144 aa, Virgibacillus massiliensis
  misc_feature (1)..(144): tr|A0A024QE52|A0A024QE52_9BACI 6-carboxy-5,6,7,8-tetrah ydropterin synthase OS=Virgibacillus massiliensis OX=14 62526 GN=queD PE=3 SV=1
MIQQIYPFINHNYTYEINKDFHFAAAHYIPHQDTGKCQSMHGHTYFTNITIVGEELNHTGFLVDFKQIKNLIHKRFDHVVMNQDVAFSDHNPNAFPTTEIVARTIYELVQEYLDTLSHSPRCMQVYLRETPSSYCVYRPKKGDR

SEQ ID NO: 26937 - protein, 144 aa, Virgibacillus necropolis
  misc_feature (1)..(144): tr|A0A221MA78|A0A221MA78_9BACI 6-carboxy-5,6,7,8-tetrah ydropterin synthase OS=Virgibacillus necropolis OX=1638 77 GN=CFK40_05535 PE=3 SV=1
MMQQIYPAATHDYSFEINKDFHFAAAHYIAHADAGKCKQTHGHTYFANITIVGDELGSTGFLVNFKTVKELIERRFDHGVLNEDPAFSNKQSEFFPTTEVIARTIYEIIQDHLNTLQNKPLCLQVYLRETPTSYCVYRPRKVDK

SEQ ID NO: 26938 - protein, 145 aa, Virgibacillus phasianinus
  misc_feature (1)..(145): tr|A0A220U370|A0A220U370_9BACI 6-carboxy-5,6,7,8-tetrah ydropterin synthase OS=Virgibacillus phasianinus OX=201 7483 GN=queD PE=3 SV=1
MMQQIYPVTPHPYSFEINKDFHFAAAHYIAHDDAGKCKHTHGHTYFVNITIAGDELDHTGFLVDFKAVKNLIHKRFDHGLLNDDQAFSDDEPNYFPTTEVIARTIYEVVQAHLNTLANQPACIQVYLRETPTSYCVYRPGKGDKE

SEQ ID NO: 26939 - protein, 145 aa, Virgibacillus soli; identical to SEQ ID NO: 17852
  misc_feature (1)..(145): tr|A0A0Q9XYS6|A0A0Q9XYS6_9BACI 6-carboxy-5,6,7,8-tetrah ydropterin synthase OS=Virgibacillus soli OX=480284 GN= ACA30_13885 PE=3 SV=1

SEQ ID NO: 26940 - protein, 145 aa, Virgibacillus sp.
  misc_feature (1)..(145): tr|A0A268I0E4|A0A268I0E4_9BACI 6-carboxy-5,6,7,8-tetrah ydropterin synthase OS=Virgibacillus sp. 7505 OX=202254 8 GN=queD PE=3 SV=1
MIQQIYPQVQHDYSYELNKDLHFAAAHSIQHPDAGKCQQVHGHTYFANVTIAGNELDDSGFLFNFSTIKALIHKKFDHTLLNDHTDVFGKDDFPTTEVMARKIYELIQQELDQLPHQPKCLQVFLRETPTSYCVYRPKRGTENGK

SEQ ID NO: 26941 - protein, 149 aa, Vitellibacter aquimaris
  misc_feature (1)..(149): tr|A0A137RKP4|A0A137RKP4_9FLAO 6-carboxy-5,6,7,8-tetrah ydropterin synthase OS=Vitellibacter aquimaris OX=15487 49 GN=LS48_05060 PE=3 SV=1
MRQIRITKIFSFETGHALYGYDGKCRNVHGHSYKLSVTVIGTPISDNDNVKFGMVIDFGDLKKIVKEEIVDVFDHATVFNKNTPHVELAKELSDRGHSVLLVDYQPTSEMMVIDFSEKIKKRLPKNIMLHSLRLQETDSSYAEWFAGDN

SEQ ID NO: 26942 - protein, 136 aa, Vitellibacter aquimaris
  misc_feature (1)..(136): tr|A0A137REE8|A0A137REE8_9FLAO 6-carboxy-5,6,7,8-tetrah ydropterin synthase OS=Vitellibacter aquimaris OX=15487 49 GN=LS48_14440 PE=3 SV=1
MSLTVYRKAHFNAAHRLFKKEWNDAKNLQVFGKCSNPNYHGHNYELEVGVSGEIDPETGFLIDLKILSDIIKEEVEDSFDHKNLNIEVPEFKNLNPTVENIAVVIWNKIRNRIDSNYGISVKLYETPRNFVFYNGN

SEQ ID NO: 26943 - protein, 120 aa, Vitiosangium sp.
  misc_feature (1)..(120): tr|A0A2T4VVS7|A0A2T4VVS7_9DELT 6-carboxy-5,6,7,8-tetrah ydropterin synthase OS=Vitiosangium sp. GDMCC 1.1324 OX =2138576 GN=queD PE=3 SV=1
MEIFKEFTFEAAHRLPNVPPGHKCARLHGHSYRVTLHVEGSVGADSGWVMDFSEITEAFKPLQAQLDHYYLNEIEGLSNPTSENLARWIWQRVRPRLPQLTQVMVRETCTSGCIYRGEAD

SEQ ID NO: 26944 - protein, 165 aa, Vitiosangium sp.
  misc_feature (1)..(165): tr|A0A2T4VM17|A0A2T4VM17_9DELT Folate biosynthesis prot ein OS=Vitiosangium sp. GDMCC 1.1324 OX=2138576 GN=DAT3 5_18745 PE=4 SV=1
MARTTTIELHKEEMKFSAGHFTIFSATHRENLHGHNFTVYVALTGEVADNGMLADYGPLKKAVIERCRSWNEHFLLPGLSPHLKIERDARGDVLARFHDEELRFLARDVLVLPVENVTLEELARVFGEELVGEGLALRADRIKHVVVKCASGPGQWSSWEWRADG

SEQ ID NO: 26945 - protein, 126 aa, Vitreoscilla filiformis
  misc_feature (1)..(126): tr|A0A221KI25|A0A221KI25_VITFI 6-carboxy-5,6,7,8-tetrah ydropterin synthase OS=Vitreoscilla filiformis OX=63 GN =VITFI_CDS2792 PE=3 SV=1
MKAARMKYELSQTFFFEAAHTLRRQVEVEPSLRIHGHTYVAEVCVGGTPDPVSGMVVDLALLRRSIAALRETLDHRFLDHVEGLGPATLENLSTYIWHAMAREYPTQLQWVEVRREVSGDRCRIQR

SEQ ID NO: 26946 - protein, 336 aa, Vogesella indigofera
  misc_feature (1)..(336): tr|A0A495B1G2|A0A495B1G2_VOGIN 6-pyruvoyltetrahydropter in/6-carboxytetrahydropterin synthase OS=Vogesella indi gofera OX=45465 GN=C8E02_3037 PE=4 SV=1
MNSSHILAGASFEAARNLAGIGEHGHSFRVLARADAHPGSEAVLHADLAAAVAPFHYAHVNATLADGSDLSIARYLASQCGQAVSLQLASAADRGVLLAEDGSEYVYVDTRFEAAHQLPHVAPGHKCGRLHGHGFGVRIVADASRSSLNDILLKAWPPLFARLNHKYLNDIAGLDNPTSEVMAAWLYRELAANLAGLAWVEVRETHTAGSQFDGQTYRIWKEQHFESAVPFDAAGNYTGHSYLIRLMLQGSVDRVMGWVLDFGDVKDRFKPVYRQLDHNPLDKLPGIRAADAASVAEWVHGELKPLVPELARIDLMETPQRGVSLTFRGDMQWPLL

SEQ ID NO: 26947 - protein, 338 aa, Vogesella sp.
  misc_feature (1)..(338): tr|A0A1C6MHL6|A0A1C6MHL6_9NEIS 6-pyruvoyltetrahydropter in/6-carboxytetrahydropterin synthase OS=Vogesella sp. LIG4 OX=1192162 GN=PSELUDRAFT_1984 PE=4 SV=1
MNSHNQLAAAGFEAARTLPGVGEHGHSFRVLARANAVPGQLTLAAELQRAAAALDYSHLNHKLEHCSDLALAQHLAAQCSLPVDLHLASAPDRGVLLGENGDAYVYLDTRFEAAHHLPHVPPGHKCGRLHGHGFGVRIVAAADKAGVNDILLKAWPPLFARLNHRYLNDIPGLGNPTSEVLAAWLYHELQPALAGLAWVEVRETHTAGSQFDGQNFRIWKEQHFESAVPFNDEGMYTGHSYLIRLMLQGKLDQVMGWVLDFGDVKERFKPIYRQLDHNPLDKLPDIQGHDAASVAEWVHGQLKGRVPELARIDLMSTPQHGASLTWHGDMRWPLLFGH

SEQ ID NO: 26948 - protein, 336 aa, Vogesella sp.
  misc_feature (1)..(336): tr|A0A0J5GIC5|A0A0J5GIC5_9NEIS 6-pyruvoyl tetrahydrobio pterin synthase OS=Vogesella sp. EB OX=1526735 GN=ACG97 _04565 PE=4 SV=1
MNSSHILAGASFEAARNLAGIGEHGHSFRVLARADAHPGSEAALHAELAAAVAPFHYAHVNATLADGSDLSIARYLASQCGQAVSLQLASAADRGVLLAEDGSEYIYVDTRFEAAHQLPHVAPGHKCGRLHGHGFGVRIVADASRSSLNDILLKAWPPLFARLNHKYLNDIAGLDNPTSEVMAAWLYRELAANLAGLAWVEVRETHTAGSQFDGQTYRIWKEQHFESAVPFDAAGNYTGHSYLIRLLLQGSVDRVMGWVLDFGDVKDRFKPVYRQLDHNPLDKLPGIRAADAASVAEWVHGELKPLVPELARIDLMETPQRGVSLTFRGDMQWPLL

SEQ ID NO: 26949 - protein, 142 aa, Volucribacter psittacicida
  misc_feature (1)..(142): tr|A0A4R1FTH9|A0A4R1FTH9_9PAST 6-carboxy-5,6,7,8-tetrah ydropterin synthase OS=Volucribacter psittacicida OX=20 3482 GN=EV694_0976 PE=3 SV=1
MAFKISKEFSFDMAHLLDGHDGKCQNLHGHTYKLQVEVSQPLQQTGAKKGMVMDFSDIKSIVKRAILDPLDHAFIYDQHSERESQIAQLLNQLNSKTFAFPTRTTAEEMARFIFNRLKYEENLPVSAIRLWETPTSFCEYQE

SEQ ID NO: 26950 - protein, 142 aa, Vulcanibacillus modesticaldus
  misc_feature (1)..(142): tr|A0A1D2YW91|A0A1D2YW91_9BACI 6-carboxy-5,6,7,8-tetrah ydropterin synthase OS=Vulcanibacillus modesticaldus OX =337097 GN=BHF71_07350 PE=3 SV=1
MYVLKAEHSFDSAHFLANYDGKCGNIHGHRWRVVIEVQSETLIEEGQLDGMVIDFGDLKRDIKELVDYYDHAFIIQEGTLRKETLQNLLDEGFRIIELGFRPTAENFAKFFFTSMEKKGYNVKRATVYETPSNCAIYEKDGV

SEQ ID NO: 26951 - protein, 118 aa, Vulcaniibacterium tengchongense
  misc_feature (1)..(118): tr|A0A3N4VRY4|A0A3N4VRY4_9GAMM 6-carboxy-5,6,7,8-tetrah ydropterin synthase OS=Vulcaniibacterium tengchongense OX=1273429 GN=EDC50_2711 PE=3 SV=1
MKIFKAFTIEAAHRLPNVPEGHKCARLHGHSFRIELHVEGELDPRLGWVMDFADLKAAFQPLYERLDHHYLNEIEGLENPTSERLAQWIWQRLKPSLPLLAEVVVHETCTSGCRYRGD

SEQ ID NO: 26952 - protein, 122 aa, Vulgatibacter incomptus
  misc_feature (1)..(122): tr|A0A0K1PBT3|A0A0K1PBT3_9DELT 6-carboxy-5,6,7,8-tetrah ydropterin synthase OS=Vulgatibacter incomptus OX=13916 53 GN=AKJ08_1372 PE=3 SV=1
MPKVELRVEFLFSAAHRLPFHKGVCFRMHGHNYKLLVTVEREVDPATGMVMDFEDLRLQVWEHALDRCDHHTLNDFLENPTAENIVVWMWGELAPKIPGLKEIVLFETPEYSVVYRGAGHGS

SEQ ID NO: 26953 - protein, 176 aa, Waddlia chondrophila
  misc_feature (1)..(176): tr|D6YVR6|D6YVR6_WADCW Putative 6-pyruvoyl tetrahydrobi opterin synthase OS=Waddlia chondrophila (strain ATCC V R-1470 / WSU 86-1044) OX=716544 GN=ptpS PE=4 SV=1
MSAILEKCFGVATEAPPNFMINVLTTDSCAWNDNLSCVILSYLFRINFKSSNLFTIIKTFRFEAGHQLAHHDGACKHPHGHSYVLEIQVKSGTLIDDGPKKNMVIDFHHISDIVKPMINTYFDHKWLNDTLETDSPTSEFIARWIYRHLDRQIPGLHAIGLSETATSKVIYTETDS

SEQ ID NO: 26954 - protein, 121 aa, Waddliaceae bacterium
  misc_feature (1)..(121): tr|A0A2E3LWX9|A0A2E3LWX9_9BACT 6-carboxy-5,6,7,8-tetrah ydropterin synthase OS=Waddliaceae bacterium OX=2026802 GN=queD PE=3 SV=1
MYELEKTFTFEAGHVLTHHDGKCSRPHGHSYGLTVTLRGNNLHKNGPKTNMLIDFSDVSSIVKQMIKDYLDHHWLNDTLKTDSPTAEFIAKWIFDFLNPLLDDLHCITLEETATSRVRYFG

SEQ ID NO: 26955 - protein, 152 aa, Weeksella virosa
  misc_feature (1)..(152): tr|F0P1Y8|F0P1Y8_WEEVC Uncharacterized protein OS=Weeks ella virosa (strain ATCC 43766 / DSM 16922 / JCM 21250 / NBRC 16016 / NCTC 11634 / CL345/78) OX=865938 GN=Weev i_0989 PE=4 SV=1
MKIIRLSKAFTFETAHALYGYDGKCKNIHGHSYKLYVTLKGQPSEKEGDVKLGMVMDFGDLKKIVNKAVVDIFDHAILLNENSPHKSLGDQLLAEGHKVIFTAYQPSCENMILWIVDQLKPLLPSHTELVALKLYETENSYCEWLASDNQSE

SEQ ID NO: 26956 - protein, 136 aa, Weeksella virosa
  misc_feature (1)..(136): tr|F0NZC1|F0NZC1_WEEVC 6-carboxy-5,6,7,8-tetrahydropter in synthase OS=Weeksella virosa (strain ATCC 43766 / DS M 16922 / JCM 21250 / NBRC 16016 / NCTC 11634 / CL345/7 8) OX=865938 GN=Weevi_0531 PE=3 SV=1
MKVTVNRKAHFNAAHRLYNPKWTDEKNREIFGKCSNPNYHGHNYELIVSVRGDIDPDTGFVMNLDDLRKIIEVEVEDYLDHKNLNLDIVDFQNLNPTAENIVIIIYNRIRAKLENHLDLKVTLFETPRNFVEYSGD

SEQ ID NO: 26957 - protein, 317 aa, Weissella cibaria
  misc_feature (1)..(317): tr|A0A2S1KQV0|A0A2S1KQV0_9LACT Uncharacterized protein OS=Weissella cibaria OX=137591 GN=B6254_0896 PE=4 SV=1
METLIYEFIGDHMIAKLLCLPSIIGAIFIVQFGLQRRFMNSQTMYLVTYTLNFVAWLVIAKIVFNDFFQDVVVINPYVNDGSLILIIMFYFVMIDTQRYTIIPITISTLLFDAVLLVSSHFNVRIGLLVIGTIIFLGVRYYLSKNRHRIIVTFVEYELATFVFSAAAWLIVLAVRRDMPHSFAIAFVLKFMILMTIVHYGIVFVRELVTRSNDYEIEVNTDPLTNMKNRRLLGKVLNEVVPFTDYEKKIGTFLAQYDGQVLNDVPPFDQINPTVENFATEIFQRLRVHPELIGAHVMLEKLEVSEGPTRSYILMNID

SEQ ID NO: 26958 - protein, 122 aa, Weissella cibaria
  misc_feature (1)..(122): tr|A0A1X4JNA8|A0A1X4JNA8_9LACT 6-pyruvoyl tetrahydropte rin synthase OS=Weissella cibaria OX=137591 GN=B9D04_01 990 PE=4 SV=1
MEARYRLKFYINAYHFIRWQGHDGAVHPHTWEIVSDFSCLTDEEVPFTDYEKKIGTFLAQYDGQVLNDVPPFDQINPTVENFATEIFQRLRVHPELIGAHVMLEKLEVSEGPTRSYILMNID

SEQ ID NO: 26959 - protein, 122 aa, Weissella confusa
  misc_feature (1)..(122): tr|A0A4Z0RWL2|A0A4Z0RWL2_WEICO 6-pyruvoyl tetrahydropte rin synthase OS=Weissella confusa OX=1583 GN=C6P11_0561 0 PE=4 SV=1
MEAHYRLKFYINAYHFIRWNGRDGETHPHTWEIVSDFACDMEEKVPFYEYETKINTFLSTYDGQVLNDIAPFDKINPSLENFATELFDRLQTHPELIGSAVKLEELAVSEGPTRTYVLTNRD

SEQ ID NO: 26960 - protein, 123 aa, Weissella koreensis
  misc_feature (1)..(123): tr|J0WBI0|J0WBI0_9LACT Uncharacterized protein OS=Weiss ella koreensis KCTC 3621 OX=1123721 GN=JC2156_06650 PE= 4 SV=1
MQTMYRLKFYINAYHAVEWNGKMGQLHPHTWEIISDFSTSSDANIQFNEYEKDIMDYLKRYEDSTLNEVKPFDKLNPTVENFAEVVFNDLRYHSKLIENKIILQKLEVSEGPTRTYIIVNDDI

SEQ ID NO: 26961 - protein, 123 aa, Weissella koreensis; identical to SEQ ID NO: 26960
  misc_feature (1)..(123): tr|F8I116|F8I116_WEIKK 6-pyruvoyl-tetrahydropterin synt hase-like protein OS=Weissella koreensis (strain KACC 1 5510) OX=1045854 GN=WKK_01860 PE=4 SV=1

SEQ ID NO: 26962 - protein, 123 aa, Weissella sp.
  misc_feature (1)..(123): tr|A0A139RA54|A0A139RA54_9LACT 6-pyruvoyl-tetrahydropte rin synthase related domain / membrane protein OS=Weiss ella sp. DD23 OX=1777865 GN=WEIDD23_00070 PE=4 SV=1
MIEARYRLKFYINAYHFIRWQGHDGAVHPHTWEIVSDFSCLTDEEVPFTDYEKKIGTFLAQYDGQVLNDVPPFDQINPTVENFATEIFQRLRVHPELIGAHVMLEKLEVSEGPTRSYILMNID

SEQ ID NO: 26963 - protein, 150 aa, Wenyingzhuangia fucanilytica
  misc_feature (1)..(150): tr|A0A1B1Y8H9|A0A1B1Y8H9_9FLAO 6-pyruvoyl tetrahydropte rin synthase OS=Wenyingzhuangia fucanilytica OX=1790137 GN=AXE80_12695 PE=4 SV=1
MNRKIRITKKFDFETGHALHGYDGKCRNVHGHSYKLYVTVIGTPIQDPNHVKNGMVIDFTDLKEIVKSEVEDVFDHATVFNKNTPHVELAKELQDRGHNVILVDYQPTSEMMILDFAEKIKNRLPNHIQLHSLKLQETSSSFAEWYASDQ

SEQ ID NO: 26964 - protein, 136 aa, Wenyingzhuangia fucanilytica
  misc_feature (1)..(136): tr|A0A1B1Y571|A0A1B1Y571_9FLAO 6-carboxy-5,6,7,8-tetrah ydropterin synthase OS=Wenyingzhuangia fucanilytica OX= 1790137 GN=AXE80_06365 PE=3 SV=1
MEITVHRVAYFNAAHRLFRPDWDDAKNFEVFGKCSNPNYHGHNYELVVSVTGPIDQETGFVMDLKILKKLIKLEVEDTLDHKNLNLEIPEFKSTNPTAENISIYIWNKLRTHIPSHLKLAITLYETPRNYVTYSGK

SEQ ID NO: 26965 - protein, 136 aa, Wenyingzhuangia marina
  misc_feature (1)..(136): tr|A0A1M5U2T3|A0A1M5U2T3_9FLAO 6-carboxy-5,6,7,8-tetrah ydropterin synthase OS=Wenyingzhuangia marina OX=119576 0 GN=SAMN05444281_0994 PE=3 SV=1
MEITVHRVAYFNAAHRLFRADWDDAKNFEVFGKCSNPNYHGHNYELVVSVTGAIDPETGFVMDLKVLKRLIKTEVEDVLDHKNLNLEIAEFKTTNPTAENISIYIWNKLRIHIPNHLKLAITLYETPRNYVTYSGK

SEQ ID NO: 26966 - protein, 151 aa, Wenyingzhuangia marina
  misc_feature (1)..(151): tr|A0A1M5T547|A0A1M5T547_9FLAO 6-pyruvoyltetrahydropter in/6-carboxytetrahydropterin synthase OS=Wenyingzhuangi a marina OX=1195760 GN=SAMN05444281_0684 PE=4 SV=1
MNRKIRITKKFDFETGHALHGYDGKCRNVHGHSYKLYVTVIGSPIQDPNHVKNGMVIDFTDLKEIVKSEVEDVFDHATVFNKNTPHVELAKELQERGHNVILVDYQPTSEMMILDFAEKIKKRLPNHIQLHSLKLQETSSSFAEWYASDQE

SEQ ID NO: 26967 - protein, 132 aa, Wenzhouxiangella marina
  misc_feature (1)..(132): tr|A0A0K0Y083|A0A0K0Y083_9GAMM 6-pyruvoyl tetrahydropte rin synthase OS=Wenzhouxiangella marina OX=1579979 GN=W M2015_2942 PE=4 SV=1
MYTLTVRDHLMIAHSFTGEVFGPAQRLHGATYLVDARFHRGELDSDGLVVDIGLATTVLGEILAEFNYRNLDELEEFEGRNTTTEFMARVIADRLAEAIREGRLGPQAGGVDALHVELHESDRARASYERAL

SEQ ID NO: 26968 - protein, 118 aa, Wenzhouxiangella marina
  misc_feature (1)..(118): tr|A0A0K0XTI3|A0A0K0XTI3_9GAMM 6-carboxy-5,6,7,8-tetrah ydropterin synthase OS=Wenzhouxiangella marina OX=15799 79 GN=WM2015_550 PE=3 SV=1
MELFKIFTLESAHFLPRVPEGHKCRRMHGHSFRVEVHVSAPVDEDAGWVMDFADLKRAFQPIHDQLDHRLLNEVDGLENPTSENLARWIWQRLKPELPALSAILIQETCTSGCVYRGD

SEQ ID NO: 26969 - protein, 361 aa, Wenzhouxiangella sediminis
  misc_feature (1)..(361): tr|A0A3E1K9Z3|A0A3E1K9Z3_9GAMM 6-pyruvoyl tetrahydropte rin synthase OS=Wenzhouxiangella sediminis OX=1792836 G N=DZC52_05680 PE=4 SV=1
MNAHSLFLTALRPFEAARRLAVADGERLHGHGFEARIFAAAASCPGDFPGDETRALGAILDEAVAPLDYALVNELIGAPDDARIAEWLLERAASAQPHAIVLRSAPDRGAVVEPGKHPLAWRRFRFESAHRLPSVPRGHKCGRMHGHGFEAVIHARVDAGQDAWRTQDRIAEAWQPVHEQIHFACLNDLPGLDNPTSEVLARWLWQNLTDVLPGLTGISVLETASAGCHYDGRTWRIWKAMSFDSAVRLARAPQGDPRRLLHGHTFTTRLHLAGGLDEVMGWVHDYGDVKQRFDPLFRELDHQPLHQKAGLEDNDPAAIARHIEARMAAELPGLSRIDVLEKPGHGALLLRGGSTRGLLVP

SEQ ID NO: 26970 - protein, 132 aa, Wenzhouxiangella sediminis
  misc_feature (1)..(132): tr|A0A3E1K682|A0A3E1K682_9GAMM 6-carboxytetrahydropteri n synthase OS=Wenzhouxiangella sediminis OX=1792836 GN= DZC52_12845 PE=4 SV=1
MFSLTVRDHFMIAHSFTGEIFGPAQKLHGATYVVEASFMRPELDDDDLVVDIGLAGEVLGKILGEFNFRNLDELEQFEGRNTTTEFMARVVFDRLAEAIENGRLGPTGQGLTRLRVELHESHVARAAYEASI

SEQ ID NO: 26971 - protein, 362 aa, Wenzhouxiangella sp.
  misc_feature (1)..(362): tr|A0A372BVD0|A0A372BVD0_9GAMM 6-pyruvoyl tetrahydropte rin synthase OS=Wenzhouxiangella sp. 15181 OX=2301224 G N=DZK25_08015 PE=4 SV=1
MNPHSLFITALRPFEAARYLPSTGPEKSLHGHGFRARIVVPRSACRPRFPGIETQWLNDCLGKTTTVLDYSLLNDRIPEPCDASVAEWLLDRSGLSGTAGLALQSAPDRGAIVRPEGSRLAWQRFRLEAAHRLPNVPAGHKCGRMHGHGFEVVLFSALDPEADSRTAQRDIADAWDPLHRQLHLTCLNDLPGLENPTSEVLAQWIWQSITDVLPGLAGVTVMETDLAGCHFDGQGWRIWKSMSFDSAVRLTRAPEGDPRRMIHGHTFTTRLHLSGGLDEVMGWVYDYGDVKRRFDPVFRALDHRPLYENPQLTDNDAASIAAYIDAEMSADLPGLSRIDVLSTPGCGALLCRQPDDRGLLVP

SEQ ID NO: 26972 - protein, 132 aa, Wenzhouxiangella sp.
  misc_feature (1)..(132): tr|A0A372BVU1|A0A372BVU1_9GAMM 6-carboxytetrahydropteri n synthase OS=Wenzhouxiangella sp. 15181 OX=2301224 GN= DZK25_07375 PE=4 SV=1
MYTLTVRDHFMIAHSFAGEIFGPAQRLHGATYVVDASFSRPELDDDDLVVDIGLAGKVLGEILAEFNHRNLDEIDEFSGRNTTTEFMARVVFDRLAGAISEGRLGSAADGLGYLKVELKESHQAWASFEGAL

SEQ ID NO: 26973 - protein, 290 aa, Westiellopsis prolifica
  misc_feature (1)..(290): tr|A0A4Q9JBE0|A0A4Q9JBE0_9CYAN 6-pyruvoyl tetrahydropte rin synthase OS=Westiellopsis prolifica IICB1 OX=197020 6 GN=B4U84_06995 PE=4 SV=1
MQCVVNRRAQFSASHRYWLPELSEAENLEKFGVCSRFPGHGHNYVLFVSLIGELDKYGMVLNLSDVKHVIKQEVTSQLDFSYLNDVWAEFQQILPTTENIARVIWQKLAPHLPLVRVQLFENPELWADYMGNGMEAYLSVSTHFSAAHRLAHPDLSDQDNFEIYGKCARPNGHGHNYHLEVTVKGEIDPRTGMIVDLGALNQVIEDYVVEPFDHTFLNKDIPYFSEVVPTAENIALHISNLLRSPIEKLGAKLYKVKLIESPNNSCEIYCTDTESNSVNIAETQPVLARI

SEQ ID NO: 26974 - protein, 325 aa, Westiellopsis prolifica
  misc_feature (1)..(325): tr|A0A4Q9J214|A0A4Q9J214_9CYAN Uncharacterized protein OS=Westiellopsis prolifica IICB1 OX=1970206 GN=B4U84_26 075 PE=4 SV=1
MLNEVSIFLSGVTVVDHAYIDNQGNIVGGSFNPGFLVTGKIDPVEKVVVDFSTIKKTIKGLLDERLTGFDHKLWILEGYSKCKKEFQEDRVSIQSASLQLNIPSNALKVFDANKYSIKEIELAFDQYLNQKLAVLYPGVKVKCFNTINSQQLIPSQYPVSYFTYCHGLKNSTSWGCQNNSHGHLSFISLLGEQTDKQQVGSTELFTLQKEIAKELDRTIFLWKDNLTLQKNDWVTIEYATEDRGYFLAEYCTKRNKLAFLNTETTVEFLANYVCYRWKNELNSTGATVVALSEGLSKGGYVDFRSQFKEECIIKDSFYLCSTGVQ

SEQ ID NO: 26975 - protein, 150 aa, Williamwhitmania taraxaci
  misc_feature (1)..(150): tr|A0A1G6GZY1|A0A1G6GZY1_9BACT 6-pyruvoyltetrahydropter in/6-carboxytetrahydropterin synthase OS=Williamwhitman ia taraxaci OX=1640674 GN=SAMN05216323_100574 PE=4 SV=1
MALIRLTKEFNFEMAHYLSGYDGACKNIHGHSYRLFVTVIGEPISEEKHSKLGMVMDFGQLKELVHRRIISKLDHALLIHDTPESKELQPLLTKNFEKVEIVAYQPTCENLLIHFAAVIKAELPSNIRLHHLRLNETITSFAEWYDEDNK

SEQ ID NO: 26976 - protein, 139 aa, Williamwhitmania taraxaci
  misc_feature (1)..(139): tr|A0A1G6HPI0|A0A1G6HPI0_9BACT 6-pyruvoyltetrahydropter in/6-carboxytetrahydropterin synthase OS=Williamwhitman ia taraxaci OX=1640674 GN=SAMN05216323_101250 PE=4 SV=1
MAEVLITRRERFNAAHRLFRPELSNDENYNVYGKCSNPNWHGHNYILFVTVKAQVNQKVGFAMNLKDLSTILKTEIIEKIDHKNMNLEVDFMRGKIASTENLTIAIWEVIAPLIEEKGATLHCVRVEETENNSAEYYGN

SEQ ID NO: 26977 - protein, 150 aa, Winogradskyella arenosi
  misc_feature (1)..(150): tr|A0A368ZIQ6|A0A368ZIQ6_9FLAO 6-pyruvoyltetrahydropter in/6-carboxytetrahydropterin synthase OS=Winogradskyell a arenosi OX=533325 GN=DFQ08_101470 PE=4 SV=1
MSKIRITKQFSFETGHALYGYDGKCKNVHGHSYRLYVTVIGSPISDSSNVKYGMVIDFGDLKKIVKEDIVDVFDHATVFNKNTPHVELAKELADRDHNVLLVDYQPTSEMMVIDFADKIKKRLPDDIKLHSLRLSETASSYAEWFASDNE

SEQ ID NO: 26978 - protein, 136 aa, Winogradskyella arenosi
  misc_feature (1)..(136): tr|A0A368ZEC2|A0A368ZEC2_9FLAO 6-pyruvoyltetrahydropter in/6-carboxytetrahydropterin synthase OS=Winogradskyell a arenosi OX=533325 GN=DFQ08_103433 PE=4 SV=1
MQVTVHRKAHFNAAHRLYRKDWSAEKNQAVFGLCNNPNFHGHNYEMIASVTGEIDPETGYVIDIKTLKGLIKSEVEDAFDHKNLNLDVPEFQDLNPTAENIVVVIYNKLKAKLNAKFQLEITLYETPRNFVTYSGN

SEQ ID NO: 26979 - protein, 136 aa, Winogradskyella aurantia
  misc_feature (1)..(136): tr|A0A265UQC0|A0A265UQC0_9FLAO 6-carboxy-5,6,7,8-tetrah ydropterin synthase OS=Winogradskyella aurantia OX=1915 063 GN=CA834_11115 PE=3 SV=1
MKVTVHRKAHFNAAHRLYRKDWSFEKNDTIFGKCNNPNFHGHNYELIASVTGEIDQETGYVIDVKILKDIIKAEVEDAFDHKNLNVEVPEFQDLNPTAENIAVVIYNKVKAKLDPKFHLEITLYETPRNFVTYSGD

SEQ ID NO: 26980 - protein, 150 aa, Winogradskyella aurantia
  misc_feature (1)..(150): tr|A0A265V027|A0A265V027_9FLAO 6-carboxytetrahydropteri n synthase QueD OS=Winogradskyella aurantia OX=1915063 GN=CA834_02020 PE=4 SV=1
MSQIRITKQFSFETGHALYGYDGKCKNVHGHSYRLDVTVIGIPISDSTHVKFGMVIDFGDLKKIVKEEIVDVFDHATVFNKNTPHIELAKELENRGHNVLLVDYQPTSEMMVIDFAVKIKKRLPKNIKLHSLKLQETATSFAEWFASDNE

SEQ ID NO: 26981 - protein, 136 aa, Winogradskyella epiphytica
  misc_feature (1)..(136): tr|A0A2V4XC70|A0A2V4XC70_9FLAO 6-carboxy-5,6,7,8-tetrah ydropterin synthase OS=Winogradskyella epiphytica OX=26 2005 GN=DFQ11_10746 PE=3 SV=1
MKVTVHRKAHFNAAHRLHRKDWSAEKNEAVFGLCNNPNYHGHNYELIASVTGEIDPETGYVIDIKTLKDLIKLEVEDAFDHKNLNLEVPEFENLNPTAENIAVIIYNKLKPKLKPEFQLEITLYETPRNFVTYSGD

SEQ ID NO: 26982 - protein, 150 aa, Winogradskyella epiphytica
  misc_feature (1)..(150): tr|A0A2V4XBG1|A0A2V4XBG1_9FLAO 6-pyruvoyltetrahydropter in/6-carboxytetrahydropterin synthase OS=Winogradskyell a epiphytica OX=262005 GN=DFQ11_101819 PE=4 SV=1
MNKIRITKQFSFETGHALYGYDGKCKNVHGHSYSLFVTVIGTPISDNTNVKFGMVIDFGDLKKIVKEEIVDVFDHATVFNKNTPHVELAKELQQRDHNVLLVDYQPTSEMMVIDFAEKIKERLPKTIKLHSLKLQETTSSFAEWYASDNE

SEQ ID NO: 26983 - protein, 136 aa, Winogradskyella eximia
  misc_feature (1)..(136): tr|A0A3D9GZX1|A0A3D9GZX1_9FLAO 6-carboxy-5,6,7,8-tetrah ydropterin synthase OS=Winogradskyella eximia OX=262006 GN=DFQ10_108221 PE=3 SV=1
MKVTVHRKAHFNAAHRLYRKDWSFEKNDAVFGLCNNPNFHGHNYELIASVTGEIDPETGYVIDVKILKDIIKSEVEDAFDHKNLNVEVPEFKDLNPTAENIAVVIYNKIKPKLDPKFQLKITLYETPRNFVTYSGD

SEQ ID NO: 26984 - protein, 150 aa, Winogradskyella eximia
  misc_feature (1)..(150): tr|A0A3D9H9V6|A0A3D9H9V6_9FLAO 6-pyruvoyltetrahydropter in/6-carboxytetrahydropterin synthase OS=Winogradskyell a eximia OX=262006 GN=DFQ10_10127 PE=4 SV=1
MSKIRITKQFSFETGHALYGYDGKCKNVHGHSYHLFVTVIGTPIADSNHVKFGMVIDFGDLKKIVKEEIVDVFDHATVFNKNTPHVELARELEARDHNVLLVDYQPTSEMMVIDFAEKIKQRLPETIKLHSLRLSETTSSFAEWYASDND

SEQ ID NO: 26985 - protein, 149 aa, Winogradskyella jejuensis
  misc_feature (1)..(149): tr|A0A1M5N6M8|A0A1M5N6M8_9FLAO 6-carboxy-5,6,7,8-tetrah ydropterin synthase OS=Winogradskyella jejuensis OX=108 9305 GN=SAMN05444148_1100 PE=3 SV=1
MSNIRITKQFSFETGHALYGYDGKCKNVHGHSYRLDVTVIGTPISDNTNVKFGMVIDFGDLKKIVKAEIVDVFDHATVFNKNTPHVELAKELQDRGHNVLLVDYQPTSEMMVIDFAEKIKRHLPSNIKLHSLKLQETATSYAEWFASDN

SEQ ID NO: 26986 - protein, 136 aa, Winogradskyella jejuensis
  misc_feature (1)..(136): tr|A0A1M5K3F9|A0A1M5K3F9_9FLAO 6-carboxy-5,6,7,8-tetrah ydropterin synthase OS=Winogradskyella jejuensis OX=108 9305 GN=SAMN05444148_0217 PE=3 SV=1
MRVTVSRRAHFNAAHRLYRKDWSFEKNDAVFGKCNNPNFHGHNYELIASVTGNIDPETGYVIDVKILKDLIKSEVEDAFDHKNLNVEVPEFQDLNPTAENIVVVIYNKLKAKLDAKFDLEVTLYETPRNFVKYSGE

SEQ ID NO: 26987 - protein, 136 aa, Winogradskyella pacifica
  misc_feature (1)..(136): tr|A0A3D9MYN6|A0A3D9MYN6_9FLAO 6-carboxy-5,6,7,8-tetrah ydropterin synthase OS=Winogradskyella pacifica OX=6646 42 GN=DFQ09_10496 PE=3 SV=1
MRVTVHRKAHFNAAHRLYRKEWSFEKNDAVFGLCNNPNFHGHNYELIASVTGEIDPETGYVIDIKILKDIIKSEVEDAFDHKNLNVEVPEFKDLNPTAENIAVVIYNKIKPKLDPKFHLEITLYETPRNFVTYSGD

SEQ ID NO: 26988 - protein, 150 aa, Winogradskyella pacifica
  misc_feature (1)..(150): tr|A0A3D9N7A2|A0A3D9N7A2_9FLAO 6-pyruvoyltetrahydropter in/6-carboxytetrahydropterin synthase OS=Winogradskyell a pacifica OX=664642 GN=DFQ09_101795 PE=4 SV=1
MSKIRITKQFSFETGHALYGYDGKCKNVHGHSYRLYVTVIGTPISDASNVKFGMVIDFGDLKKIVKEDIVDVFDHATVFNKNTPHVDLAKELQDRDHNVLLVDYQPTSEMMVIDFAEKIKQRLPDNIKLHSLRLSETASSFAEWFASDNE

SEQ ID NO: 26989 - protein, 136 aa, Winogradskyella psychrotolerans
  misc_feature (1)..(136): tr|S7VPT6|S7VPT6_9FLAO 6-carboxy-5,6,7,8-tetrahydropter in synthase OS=Winogradskyella psychrotolerans RS-3 OX= 641526 GN=ADIWIN_2845 PE=3 SV=1
MKVTVHRKAHFNAAHRLYRKDWTFEKNDAVFGLCNNPNFHGHNYELIASVTGEIDPETGYVIDIKTLKDIIKLEVEDAFDHKNLNVEVPEFKDLNPTAENIAVVIYNKIKPKLNAKFHLEITLYETPRNFVTYSGN

SEQ ID NO: 26990 - protein, 150 aa, Winogradskyella psychrotolerans
  misc_feature (1)..(150): tr|S7X8Q3|S7X8Q3_9FLAO Queuosine biosynthesis QueD, PTP S-I OS=Winogradskyella psychrotolerans RS-3 OX=641526 G N=ADIWIN_2593 PE=4 SV=1
MSKIRITKQFSFETGHALYGYDGKCKNVHGHSYRLYVTVIGTPISDASNVKYGMVIDFGDLKKIVKEDIVDVFDHATVFNKNTPHVDLAKELQARDHNVLLVDYQPTSEMMVIDFAEKIKQRLPDNIKLHSLRLSETASSFAEWFASDNE

SEQ ID NO: 26991 - protein, 136 aa, Winogradskyella sp.
  misc_feature (1)..(136): tr|A0A024FIC4|A0A024FIC4_9FLAO 6-pyruvoyl tetrahydrobio pterin synthase OS=Winogradskyella sp. PG-2 OX=754409 G N=WPG_2456 PE=4 SV=1
MRVTVHRKAHFNAAHRLYRKDWSFEKNETVFGLCNNPNFHGHNYELIASVTGEIDPETGYVIDVKILKDIIKAEVEDAFDHKNLNIEVPEFYNLNPTAENIAVVIYNKVKAKLDSKFHLEITLYETPRNFVTYSGH

SEQ ID NO: 26992 - protein, 150 aa, Winogradskyella sp.
  misc_feature (1)..(150): tr|A0A520L953|A0A520L953_9FLAO 6-carboxytetrahydropteri n synthase OS=Winogradskyella sp. OX=1883156 GN=EVB11_0 3715 PE=4 SV=1
MSNIRITKQFSFETGHALYGYDGKCKNVHGHSYRLDVTVIGVPISDTSNVKFGMVIDFGDLKKIVKAEIVDVFDHATVFNKNTPHVELAKELQDRGHNVLLVDYQPTSEMMVIDFAEKIKKHLPPDIQLHSLKLQETATSFAEWFASDND

SEQ ID NO: 26993 - protein, 150 aa, Winogradskyella thalassocola
  misc_feature (1)..(150): tr|A0A1G7X649|A0A1G7X649_9FLAO 6-pyruvoyltetrahydropter in/6-carboxytetrahydropterin synthase OS=Winogradskyell a thalassocola OX=262004 GN=SAMN04489796_101612 PE=4 SV =1
MSKIRITKQFSFETGHALYGYDGKCKNVHGHSYHLFVTVIGIPISDSTNVKFGMVIDFGDLKKIVKEEIVDVFDHATVFNKNTPHVELARELEARDHNVLLVDYQPTSEMMVIDFAEKIKQRLPETIKLHSLRLSETTSSFAEWYASDNE

SEQ ID NO: 26994 - protein, 136 aa, Winogradskyella thalassocola
  misc_feature (1)..(136): tr|A0A1G8H1W6|A0A1G8H1W6_9FLAO 6-carboxy-5,6,7,8-tetrah ydropterin synthase OS=Winogradskyella thalassocola OX= 262004 GN=SAMN04489796_106102 PE=3 SV=1
MRVTVHRKAHFNAAHRLYRKDWSFEKNDAVFGLCNNPNFHGHNYELVASVTGEIDPETGYVIDIKTLKDIIKSEVEDAFDHKNLNVEVPEFKDLNPTAENIAVVIYNKIKPKLNPNFHLEITLYETPRNFVTYSGN

SEQ ID NO: 26995 - protein, 136 aa, Winogradskyella wandonensis
  misc_feature (1)..(136): tr|A0A4R1KP20|A0A4R1KP20_9FLAO 6-carboxy-5,6,7,8-tetrah ydropterin synthase OS=Winogradskyella wandonensis OX=1 442586 GN=DFQ05_2073 PE=3 SV=1
MRVTVSRRAHFNAAHRLYRKDWSFEKNDAVFGKCNNPNFHGHNYELIASVTGNIDPETGYVIDVKILKDFIKSEVEDAFDHKNLNLEVPEFQDLNPTAENIVVVIYNKLKAKLDSKLDLEVTLYETPRNFVTYSGE

SEQ ID NO: 26996 - protein, 149 aa, Winogradskyella wandonensis
  misc_feature (1)..(149): tr|A0A4R1KS83|A0A4R1KS83_9FLAO 6-carboxy-5,6,7,8-tetrah ydropterin synthase OS=Winogradskyella wandonensis OX=1 442586 GN=DFQ05_1699 PE=3 SV=1
MSNIRITKQFSFETGHALYGYDGKCKNVHGHSYRLDVTVIGTPISDNTNVKFGMVIDFGDLKKIVKAEIVDVFDHATVFNKNTPHVELAKELADRGHNVLLVDYQPTSEMMVIDFAEKIKKHLPENIKLHSLKLQETATSFAEWFASDN

SEQ ID NO: 26997 - protein, 136 aa, Woeseiaceae bacterium
  misc_feature (1)..(136): tr|A0A2D9M1Y5|A0A2D9M1Y5_9GAMM 6-pyruvoyl tetrahydrobio pterin synthase OS=Woeseiaceae bacterium OX=2026806 GN= CMP01_03005 PE=4 SV=1
  misc_feature (35)..(35): Xaa can be any naturally occurring amino acid
MYSVIKRIDFCYGHRLLDYEGICKHPHGHNAVAEXEIRTSALDKRSMVYDFGDVKRIVKGWIDQEIDHKMILREDDPLVEPLRQLGEPVFLVESNPTVERIARLIFEHVQNAGLPVVRVKVWETPTSSATYEPEPV

SEQ ID NO: 26998 - protein, 141 aa, Wohlfahrtiimonas chitiniclastica
  misc_feature (1)..(141): tr|L8XVR7|L8XVR7_9GAMM 6-carboxy-5,6,7,8-tetrahydropter in synthase OS=Wohlfahrtiimonas chitiniclastica SH04 OX =1261130 GN=F387_00706 PE=3 SV=1
MLQQFYPTVTHAFRYELNKDMHFAAAHFIPNESAGVCQRVHGHTYFANVTIAGDQLDECGFLVNFQTLKHLVHGEYDHTLLNDHTDFNSAPPSTEIVAERIWRRIQDHLNQLDNQPRCVQILVRETPTSYVRYLPRAEDFA

SEQ ID NO: 26999 - protein, 141 aa, Wohlfahrtiimonas chitiniclastica
  misc_feature (1)..(141): tr|A0A162VSQ6|A0A162VSQ6_9GAMM 6-carboxy-5,6,7,8-tetrah ydropterin synthase OS=Wohlfahrtiimonas chitiniclastica OX=400946 GN=BMY_1714 PE=3 SV=1
MLQQFYPTVTHAFRYELNKDMHFAAAHFIPNESAGVCQRVHGHTYFANVTIAGDQLDECGFLVNFQTLKHLVHGEYDHTLLNDHADFNSAPPSTEIVAERIWRRIQDHLNQLDNQPRCVQILVRETPTSYVRYLPRAEDFA

SEQ ID NO: 27000 - protein, 141 aa, Wohlfahrtiimonas sp.
  misc_feature (1)..(141): tr|A0A256C5M3|A0A256C5M3_9GAMM 6-carboxy-5,6,7,8-tetrah ydropterin synthase OS=Wohlfahrtiimonas sp. G9077 OX=19 80118 GN=B9T20_06810 PE=3 SV=1
MLQQFYPTVTHVFRYELNKDMHFAAAHFIPNDSAGVCQRVHGHTYFANVTIAGDQLDACGFLVNFQTLKHLVHGEYDHTLLNDHADFNGAPPSTEIVAERIWRRIQDHLNQLDNQPRCVQVLVRETPTSYVRYLPRAEDFV

SEQ ID NO: 27001 - protein, 180 aa, Wolinella succinogenes
  misc_feature (1)..(180): tr|Q7MR56|Q7MR56_WOLSU Uncharacterized protein OS=Wolin ella succinogenes (strain ATCC 29543 / DSM 1740 / LMG 7 466 / NCTC 11488 / FDC 602W) OX=273121 GN=WS1659 PE=1 S V=1
MIYQIAKEFDFCYGHRVWSQELNPDFSLDPCLSCRHLHGHQGKVIVHLESRELQRGMVTDFAHLNWFKRFIDEVLDHRFIIDIDDPLFPTLLPHFADKSALVWMEEGYARVDFERIKGESSPILELYESFVVVRFVPTSESIASWLLELLRSRIQPLGVKVSSVEFLETPKSRARVYNEA

SEQ ID NO: 27002 - protein, 129 aa, Xanthobacter autotrophicus
  misc_feature (1)..(129): tr|A7IK78|A7IK78_XANP2 6-carboxy-5,6,7,8-tetrahydropter in synthase OS=Xanthobacter autotrophicus (strain ATCC BAA-1158 / Py2) OX=78245 GN=Xaut_3191 PE=3 SV=1
MSSSATPVPRRARITQGFTFEAAHFLPHVPETHRCRRMHGHSYRVDLTLEGPVDAVTGFVVDFFDVEAAFGPVLKQLDHYCLNEVEGLENPTAEIIAAWIWDRVKPVLPLLSSVRVYETPFSFAEFDGD

SEQ ID NO: 27003 - protein, 159 aa, Xanthobacter autotrophicus
  misc_feature (1)..(159): tr|A7IHR5|A7IHR5_XANP2 Uncharacterized protein OS=Xanth obacter autotrophicus (strain ATCC BAA-1158 / Py2) OX=7 8245 GN=Xaut_2315 PE=4 SV=1
MPPPSGTRRNPPRELRMYAVEVREHIMIAHSFKGALFGPAQALHGATFVVDVAFYRRELTVEGVVVDIGRAHDALKAVLGPLNYKNLDELPDFAGRNTTTEVLCRHVFDKMAQAARAGELGAGSEALARIRVTLHESHVARAWFEADLAADDATLQLMS

SEQ ID NO: 27004 - protein, 117 aa, Xanthobacter tagetidis
  misc_feature (1)..(117): tr|A0A3L7ABK9|A0A3L7ABK9_9RHIZ 6-carboxy-5,6,7,8-tetrah ydropterin synthase OS=Xanthobacter tagetidis OX=60216 GN=queD PE=3 SV=1
MRITQGFTFEAAHFLPRVPQTHRCFRMHGHSYRVDLTLEGEVDTATGFVVDFFDVEAAFAPLLAQLDHHCLNDIEGLENPTAELIAVWIWERVRPRLPQLAQVRVYETPLSFADYSG

SEQ ID NO: 27005 - protein, 133 aa, Xanthobacter tagetidis
  misc_feature (1)..(133): tr|A0A3L7AQ25|A0A3L7AQ25_9RHIZ 6-carboxytetrahydropteri n synthase OS=Xanthobacter tagetidis OX=60216 GN=D9R14_ 00600 PE=4 SV=1
MYSVEVRDHIMIAHSFKGDLFGPAQKLHGATFVVDVAFFRPDLTPEGVVVDIGRAHEALKAILGPLNYQNLDEVPDFAGRNTTTEVLCRHVFDRMAEAARTGALGTGGDGIARIKVTLHESHVARAAYEAALS

SEQ ID NO: 27006 - protein, 45 aa, Xanthomarina gelatinilytica
  misc_feature (1)..(45): tr|A0A3D6BR20|A0A3D6BR20_9FLAO 6-pyruvoyl tetrahydrobio pterin synthase (Fragment) OS=Xanthomarina gelatinilyti ca OX=1137281 GN=DHV22_08895 PE=4 SV=1
KDLNPTAENIVVVIYNKLKPKLEPKLKLEVTLFETPRNFVSYSGA

SEQ ID NO: 27007 - protein, 136 aa, Xanthomarina gelatinilytica
  misc_feature (1)..(136): tr|M7N5Y5|M7N5Y5_9FLAO 6-carboxy-5,6,7,8-tetrahydropter in synthase OS=Xanthomarina gelatinilytica OX=1137281 G N=D778_01507 PE=3 SV=1
MKVTVSRKAHFNAAHRLYRKDWSNDKNNAVFGKCNNPNYHGHNYELIVSVTGEIDKETGYVIDMKVLKELIREEVEDAFDHKNLNEDVEDFKDLNPTAENIVVVIYNKLKPKLEPKLKLEVTLFETPRNFVSYSGA

SEQ ID NO: 27008 - protein, 136 aa, Xanthomarina sp.; identical to SEQ ID NO: 27007
  misc_feature (1)..(136): tr|A0A2D8CZ35|A0A2D8CZ35_9FLAO 6-carboxy-5,6,7,8-tetrah ydropterin synthase OS=Xanthomarina sp. OX=1931211 GN=C MP04_10790 PE=3 SV=1

SEQ ID NO: 27009 - protein, 150 aa, Xanthomarina sp.
  misc_feature (1)..(150): tr|A0A2D8CVE6|A0A2D8CVE6_9FLAO 6-carboxytetrahydropteri n synthase OS=Xanthomarina sp. OX=1931211 GN=CMP04_0395 0 PE=4 SV=1
MSSKIRITKQFTFETGHALYGYDGKCKNVHGHSYKLSVTVIGHPISDTNHVKYGMVIDFGDLKKIVKNEIVDVFDHATVFNKNTPHVELAKELEHRGHNVLLVDYQPTSEMMVIDFAEKIKSQLPSHIVLHSLKLQETETSFAEWYASDN

SEQ ID NO: 27010 - protein, 122 aa, Xanthomonadaceae bacterium
  misc_feature (1)..(122): tr|A0A2A3VH13|A0A2A3VH13_9GAMM 6-carboxy-5,6,7,8-tetrah ydropterin synthase OS=Xanthomonadaceae bacterium NML93 -0792 OX=2032566 GN=queD PE=3 SV=1
MDIFKVFTLEAAHRLPNVPPGHKCARLHGHSFQVEVHVSGTPGAESGWIMDFGDLKAAFAPLYAQLDHHYLNDIPGLENPTSEMLAIWIWDRLAPTLPGLSAIVIRETCTSGCRYTGPSKSA

SEQ ID NO: 27011 - protein, 163 aa, Xanthomonadaceae bacterium
  misc_feature (1)..(163): tr|A0A1E4L9F9|A0A1E4L9F9_9GAMM Uncharacterized protein OS=Xanthomonadaceae bacterium SCN 69-48 OX=1660171 GN=A BS98_06030 PE=4 SV=1
MSAAVTIRLAKQNMKFSAAHFTIFSATERERLHGHNFTVEVDIDARMLGNGMCFDYGIYKDRVVALCRELNEWTILPTRSPYLRIEEGDGHVYAHFDGQRIPFLRGDVLLLPIENATLEEFAYWFLQRLCEDREALRAHAIAAIEVRVFSGPGQSAGRRMALD

SEQ ID NO: 27012 - protein, 119 aa, Xanthomonadales bacterium
  misc_feature (1)..(119): tr|A0A3N5JTL1|A0A3N5JTL1_9GAMM 6-carboxytetrahydropteri n synthase QueD OS=Xanthomonadales bacterium OX=2006849 GN=queD PE=4 SV=1
MDVFRVFQVEAAHHLPNVPEGHKCARMHGHSFRIEIHVSGPVGAETGWVMDFADLRRAFQPLHDQLDHHCLNDIAGLENPTSENLARWIWPRLAPQLPGLSKVVVQETCNAGCVFTGPA

SEQ ID NO: 27013 - protein, 120 aa, Xanthomonadales bacterium
  misc_feature (1)..(120): tr|A0A1Q4F7F9|A0A1Q4F7F9_9GAMM 6-carboxy-5,6,7,8-tetrah ydropterin synthase OS=Xanthomonadales bacterium 63-13 OX=1895867 GN=BGP25_02755 PE=3 SV=1
MEIFKKFRIEAAHRLPSVPQGHKCSRLHGHSFEIEIHLRGAIEPTLGWVCDFADVKAAFAPLFDQLDHHYLNDVPGLENPTSENLAVWIWNALQPRLPLLARVVIHETCTSGCSYAGPQA

SEQ ID NO: 27014 - protein, 120 aa, Xanthomonas albilineans
  misc_feature (1)..(120): tr|D2UFN7|D2UFN7_XANAP 6-carboxy-5,6,7,8-tetrahydropter in synthase OS=Xanthomonas albilineans (strain GPE PC73 / CFBP 7063) OX=380358 GN=ptpS PE=3 SV=1
MDIFKVFTLEAAHRLPNVPPGHKCARLHGHSFRVELHVSGEPDPETGWLVDFGDIKAAFLPLYEQLDHHYLNDIEGLENPTSERLAVWIWERLKPVLPILSEVVVHETCTSGCRYRGPAA

SEQ ID NO: 27015 - protein, 117 aa, Xanthomonas alfalfae
  misc_feature (1)..(117): tr|A0A1S1XKN5|A0A1S1XKN5_9XANT 6-carboxy-5,6,7,8-tetrah ydropterin synthase OS=Xanthomonas alfalfae OX=366650 G N=BHL63_18795 PE=3 SV=1
MDIFKVFTLEAAHRLPNVPPGHKCARLHGHSFRVELHVSGEPGAETGWIMDFGDIKAAFQPIYDRLDHHYLNDIEGLENPTSERLAIWIWQQLKPALPQLSEIVVHETCTSGCRYRG

SEQ ID NO: 27016 - protein, 117 aa, Xanthomonas arboricola
  misc_feature (1)..(117): tr|A0A2S6YXD2|A0A2S6YXD2_9XANT 6-carboxy-5,6,7,8-tetrah ydropterin synthase OS=Xanthomonas arboricola OX=56448 GN=queD PE=3 SV=1
MDIFKVFTLEAAHRLPNVPPGHKCARLHGHSFRVELHVSGEPGAETGWIMDFGDIKAAFQPIYDRLDHHYLNDIEGLENPTSERLAIWIWDQLKPALPQLSEIVVHETCTSGCRYRG

SEQ ID NO: 27017 - protein, 117 aa, Xanthomonas arboricola
  misc_feature (1)..(117): tr|A0A2S6YCR6|A0A2S6YCR6_9XANT 6-carboxy-5,6,7,8-tetrah ydropterin synthase OS=Xanthomonas arboricola OX=56448 GN=queD PE=3 SV=1
MDIFKVFTLEAAHRLPNVPPGHKCARLHGHSFRVELHVSGEPGAETGWIMDFGDIKAAFQPIYDRLDHHYLNDIEGLENPTSERLAIWIWNQLKPALPQLSEIVVHETCTSGCRYRG

SEQ ID NO: 27018 - protein, 117 aa, Xanthomonas axonopodis
  misc_feature (1)..(117): tr|A0A2S6YBV0|A0A2S6YBV0_9XANT 6-carboxy-5,6,7,8-tetrah ydropterin synthase OS=Xanthomonas axonopodis pv. begon iae OX=473403 GN=queD PE=3 SV=1
MDIFKVFTLEAAHRLPNVPPGHKCARLHGHSFRVELHVSGEPGAETGWIMDFGDIKAAFQPIYDRLDHHYLNDIEGLENPTSERLAIWIWQQLKPVLPQLSEIVVHETCTSGCRYRG

SEQ ID NO: 27019 - protein, 117 aa, Xanthomonas axonopodis
  misc_feature (1)..(117): tr|A0A1T1P0S9|A0A1T1P0S9_9XANT 6-carboxy-5,6,7,8-tetrah ydropterin synthase OS=Xanthomonas axonopodis pv. melhu sii OX=487834 GN=Xmlh_02505 PE=3 SV=1
MDIFKVFTLEAAHRLPNVPPGHKCARLHGHSFRVELHVSGEPGAETGWIMDFGDIKAAFQPIYDRLDHHYLNEIEGLENPTSERLAIWIWQQLKPALPQLSEIVVHETCTSGCRYRG

SEQ ID NO: 27020 - protein, 117 aa, Xanthomonas bromi
  misc_feature (1)..(117): tr|A0A1C3NRQ9|A0A1C3NRQ9_9XANT 6-carboxy-5,6,7,8-tetrah ydropterin synthase OS=Xanthomonas bromi OX=56449 GN=XB LMG947_3859 PE=3 SV=1
MDIFKVFTLEAAHRLPNVPPGHKCARLHGHSFRVELHVSGEPGAETGWIMDFGDIKAAFQPIYDRLDHHYLNDIEGLENPTSERLAIWIWQQLKPALPQLSEVVVHETCTSGCRYRG

SEQ ID NO: 27021 - protein, 117 aa, Xanthomonas campestris; identical to SEQ ID NO: 27015
  misc_feature (1)..(117): tr|Q3BP48|Q3BP48_XANC5 6-carboxy-5,6,7,8-tetrahydropter in synthase OS=Xanthomonas campestris pv. vesicatoria ( strain 85-10) OX=316273 GN=ptpS PE=3 SV=1

SEQ ID NO: 27022 - protein, 117 aa, Xanthomonas campestris
  misc_feature (1)..(117): tr|A0A2S4JK57|A0A2S4JK57_XANCA 6-carboxy-5,6,7,8-tetrah ydropterin synthase OS=Xanthomonas campestris OX=339 GN =TR80_15770 PE=3 SV=1
MDIFKVFTLEAAHRLPNVPPGHKCARLHGHSFRVELHVSGEPGAETGWIMDFGDIKAAFQPIYDRLDHHYLNDIEGLENPTSERLAIWIWQQLKPALPALSEIVVHETCTSGCRYRG

SEQ ID NO: 27023 - protein, 117 aa, Xanthomonas cannabis; identical to SEQ ID NO: 27015
  misc_feature (1)..(117): tr|A0A0B2CNV6|A0A0B2CNV6_9XANT 6-carboxy-5,6,7,8-tetrah ydropterin synthase OS=Xanthomonas cannabis pv. cannabi s OX=1885894 GN=OZ10_04915 PE=3 SV=1

SEQ ID NO: 27024 - protein, 117 aa, Xanthomonas citri; identical to SEQ ID NO: 27019
  misc_feature (1)..(117): tr|A0A2R2WR40|A0A2R2WR40_XANCI 6-carboxy-5,6,7,8-tetrah ydropterin synthase OS=Xanthomonas citri pv. aurantifol ii OX=76802 GN=TP45_07765 PE=3 SV=1

SEQ ID NO: 27025 - protein, 117 aa, Xanthomonas citri; identical to SEQ ID NO: 27019
  misc_feature (1)..(117): tr|A0A220WDI6|A0A220WDI6_XANCI 6-carboxy-5,6,7,8-tetrah ydropterin synthase OS=Xanthomonas citri pv. vignicola OX=473426 GN=queD PE=3 SV=1

SEQ ID NO: 27026 - protein, 117 aa, Xanthomonas codiaei; identical to SEQ ID NO: 27017
  misc_feature (1)..(117): tr|A0A2S7CRR5|A0A2S7CRR5_9XANT 6-carboxy-5,6,7,8-tetrah ydropterin synthase OS=Xanthomonas codiaei OX=56463 GN= queD PE=3 SV=1

SEQ ID NO: 27027 - protein, 117 aa, Xanthomonas cucurbitae
  misc_feature (1)..(117): tr|A0A2S7DVQ7|A0A2S7DVQ7_9XANT 6-carboxy-5,6,7,8-tetrah ydropterin synthase OS=Xanthomonas cucurbitae OX=56453 GN=queD PE=3 SV=1
MDIFKVFTLEAAHRLPNVPPGHKCARLHGHSFRVELHVSGEPGADTGWIMDFGDIKAAFQPIYDRLDHHYLNDIEGLENPTSEQLAIWIWNQLKPALPQLSEIVVHETCTSGCRYRG

SEQ ID NO: 27028 - protein, 117 aa, Xanthomonas cynarae
  misc_feature (1)..(117): tr|A0A2S7BTB1|A0A2S7BTB1_9XANT 6-carboxy-5,6,7,8-tetrah ydropterin synthase OS=Xanthomonas cynarae OX=109214 GN =queD PE=3 SV=1
MDIFKVFTLEAAHRLPNVPPGHKCARLHGHSFRIELHVSGEPGAETGWIMDFGDIKAAFQPIYDRLDHHYLNDIEGLENPTSERLAIWIWQQLKPALPQLSEIVVHETCTSGCRYRG

SEQ ID NO: 27029 - protein, 117 aa, Xanthomonas dyei
  misc_feature (1)..(117): tr|A0A2S7C6U8|A0A2S7C6U8_9XANT 6-carboxy-5,6,7,8-tetrah ydropterin synthase OS=Xanthomonas dyei OX=743699 GN=qu eD PE=3 SV=1
MDIFKVFTLEAAHRLPNVPPGHKCARLHGHSFRVELHVSGEPGADTGWIMDFGDIKAAFQPIYDRLDHHYLNDIEGLENPTSERLAIWIWQQLKPALPQLSEIVVHETCTSGCRYRG

SEQ ID NO: 27030 - protein, 117 aa, Xanthomonas euvesicatoria; identical to SEQ ID NO: 27015
  misc_feature (1)..(117): tr|A0A2S7EF28|A0A2S7EF28_XANEU 6-carboxy-5,6,7,8-tetrah ydropterin synthase OS=Xanthomonas euvesicatoria pv. ci trumelonis OX=189396 GN=queD PE=3 SV=1

SEQ ID NO: 27031 - protein, 117 aa, Xanthomonas floridensis; identical to SEQ ID NO: 27017
  misc_feature (1)..(117): tr|A0A1A9M8C5|A0A1A9M8C5_9XANT 6-carboxy-5,6,7,8-tetrah ydropterin synthase OS=Xanthomonas floridensis OX=18435 80 GN=A7D17_05130 PE=3 SV=1

SEQ ID NO: 27032 - protein, 123 aa, Xanthomonas fragariae
  misc_feature (1)..(123): tr|A0A1Y6H6Z9|A0A1Y6H6Z9_9XANT 6-carboxy-5,6,7,8-tetrah ydropterin synthase OS=Xanthomonas fragariae OX=48664 G N=PD5205_03238 PE=3 SV=1
MFAHHAMDIFKVFTLEAAHRLPNVPPDHKCARLHGHSFRVELHVSGEPGAETGWIMDFGDIKAAFRPIYDRLDHHYLNDIEGLENPTSERLAIWIWQQLKPALPSLSEIVVHETCTSGCRYRG

SEQ ID NO: 27033 - protein, 120 aa, Xanthomonas gardneri
  misc_feature (1)..(120): tr|F0C5J3|F0C5J3_9XANT 6-carboxy-5,6,7,8-tetrahydropter in synthase OS=Xanthomonas gardneri ATCC 19865 OX=92577 7 GN=XGA_2156 PE=3 SV=1
MARMDIFKVFTLEAAHRLPNVPPGHKCARLHGHSFRIELHVSGEPGAETGWIMDFGDIKAAFQPIYDRLDHHYLNDIEGLENPTSERLAIWIWQQLKPALPQLSEIVVHETCTSGCRYRG

SEQ ID NO: 27034 - protein, 117 aa, Xanthomonas gardneri; identical to SEQ ID NO: 27028
  misc_feature (1)..(117): tr|A0A0G8L9R6|A0A0G8L9R6_9XANT 6-carboxy-5,6,7,8-tetrah ydropterin synthase OS=Xanthomonas gardneri OX=90270 GN =BI317_04005 PE=3 SV=1

SEQ ID NO: 27035 - protein, 117 aa, Xanthomonas hortorum; identical to SEQ ID NO: 27028
  misc_feature (1)..(117): tr|A0A248YGA4|A0A248YGA4_9XANT 6-carboxy-5,6,7,8-tetrah ydropterin synthase OS=Xanthomonas hortorum OX=56454 GN =XJ27_12155 PE=3 SV=1

SEQ ID NO: 27036 - protein, 117 aa, Xanthomonas hortorum
  misc_feature (1)..(117): tr|A0A2S7E7M9|A0A2S7E7M9_9XANT 6-carboxy-5,6,7,8-tetrah ydropterin synthase OS=Xanthomonas hortorum pv. hederae OX=453603 GN=queD PE=3 SV=1
MDIFKVFTLEAAHRLPNVPPGHKCARLHGHSFRIELHVSGEPGAETGWIMDFGDIKAAFKPIYDRLDHHYLNDIEGLENPTSERLAIWIWQQLKPALPQLSEIVVHETCTSGCRYRG

SEQ ID NO: 27037 - protein, 120 aa, Xanthomonas hyacinthi
  misc_feature (1)..(120): tr|A0A2S7F3S1|A0A2S7F3S1_9XANT 6-carboxy-5,6,7,8-tetrah ydropterin synthase OS=Xanthomonas hyacinthi OX=56455 G N=queD PE=3 SV=1
MVIFKVFTLEAAHRLPNVPPGHKCARLHGHSFRVELHVSGEPGAQTGWVMDFGDIKAAFRPIYDQLDHHYLNDIEGLENPTSERLAVWIWERLKPALPPLSEIVVHETCTSGCRYRGPGA

SEQ ID NO: 27038 - protein, 117 aa, Xanthomonas manihotis; identical to SEQ ID NO: 27015
  misc_feature (1)..(117): tr|A0A0W7XHX6|A0A0W7XHX6_XANMN 6-carboxy-5,6,7,8-tetrah ydropterin synthase OS=Xanthomonas manihotis OX=43353 G N=AO826_13635 PE=3 SV=1

SEQ ID NO: 27039 - protein, 117 aa, Xanthomonas melonis
  misc_feature (1)..(117): tr|A0A2S7DM70|A0A2S7DM70_9XANT 6-carboxy-5,6,7,8-tetrah ydropterin synthase OS=Xanthomonas melonis OX=56456 GN= queD PE=3 SV=1
MDIFKVFTLEAAHRLPNVPPGHKCARLHGHSFRVELHVSGEPGAETGWIMDFGDIKAAFQPIYERLDHHYLNDIEGLENPTSERLAIWIWNQLKPALPQLSEIVVHETCTSGCRYRG

SEQ ID NO: 27040 - protein, 117 aa, Xanthomonas nasturtii; identical to SEQ ID NO: 27029
  misc_feature (1)..(117): tr|A0A3E1KL65|A0A3E1KL65_9XANT 6-carboxy-5,6,7,8-tetrah ydropterin synthase OS=Xanthomonas nasturtii OX=1843581 GN=queD PE=3 SV=1

SEQ ID NO: 27041 - protein, 117 aa, Xanthomonas oryzae
  misc_feature (1)..(117): tr|A0A0U4W7E5|A0A0U4W7E5_XANOO 6-carboxy-5,6,7,8-tetrah ydropterin synthase OS=Xanthomonas oryzae pv. oryzae OX =64187 GN=BCR61_03975 PE=3 SV=1
MDIFKVFTLEAAHRLPNVPPGHKCARLHGHSFRVELHVSGEPGAETGWIMDFGDIKAAFQPIYDRLDHHYLNDIEGLENPTSERLAIWIWQQLKPTLPQLSEIVVHETCTSGCRYRG

SEQ ID NO: 27042 - protein, 117 aa, Xanthomonas oryzae; identical to SEQ ID NO: 27015
  misc_feature (1)..(117): tr|A0A0C5UWA6|A0A0C5UWA6_9XANT 6-carboxy-5,6,7,8-tetrah ydropterin synthase OS=Xanthomonas oryzae pv. oryzicola OX=129394 GN=BE73_04300 PE=3 SV=1

SEQ ID NO: 27043 - protein, 117 aa, Xanthomonas perforans; identical to SEQ ID NO: 27015
  misc_feature (1)..(117): tr|A0A0G9EXM1|A0A0G9EXM1_9XANT 6-carboxy-5,6,7,8-tetrah ydropterin synthase OS=Xanthomonas perforans OX=442694 GN=BJD13_21080 PE=3 SV=1

SEQ ID NO: 27044 - protein, 117 aa, Xanthomonas phaseoli
  misc_feature (1)..(117): tr|A0A1V9H6S9|A0A1V9H6S9_9XANT 6-carboxy-5,6,7,8-tetrah ydropterin synthase OS=Xanthomonas phaseoli pv. syngoni i LMG 9055 OX=1437878 GN=IA54_000670 PE=3 SV=1
MDIFKVFTLEAAHRLPNVPPGHKCARLHGHSFRVELHVSGEPGAETGWIMDFGDIKAAFQPIYDRLDHHYLNDIEGLENPTSERLAIWIWQQLKPVLPQLSEIVVHETCTSGCRYRS

SEQ ID NO: 27045 - protein, 117 aa, Xanthomonas phaseoli; identical to SEQ ID NO: 27018
  misc_feature (1)..(117): tr|A0A1V9H6A6|A0A1V9H6A6_9XANT 6-carboxy-5,6,7,8-tetrah ydropterin synthase OS=Xanthomonas phaseoli pv. dieffen bachiae OX=92828 GN=IM53_011885 PE=3 SV=1

SEQ ID NO: 27046 - protein, 117 aa, Xanthomonas pisi
  misc_feature (1)..(117): tr|A0A2S7D3J1|A0A2S7D3J1_9XANT 6-carboxy-5,6,7,8-tetrah ydropterin synthase OS=Xanthomonas pisi OX=56457 GN=que D PE=3 SV=1
MDIFKVFTLEAAHRLPNVPPGHKCARLHGHSFRVELHVSGEPDADSGWIMDFGDIKAAFKPIYDRLDHHYLNDIEGLENPTSERLAIWIWQQLKPALPQLSEIVVHETCTSGCRYRG

SEQ ID NO: 27047 - protein, 117 aa, Xanthomonas populi
  misc_feature (1)..(117): tr|A0A2S7EXK6|A0A2S7EXK6_9XANT 6-carboxy-5,6,7,8-tetrah ydropterin synthase OS=Xanthomonas populi OX=53414 GN=q ueD PE=3 SV=1
MDIFKVFTLEAAHRLPNVPPGHKCARLHGHSFRIELHVSGEPGAETGWIMDFGDIKAAFKPIYERLDHHYLNEIEGLENPTSEHLAIWIWQQLKPALSALSEIVVHETCTSGCRYRG

SEQ ID NO: 27048 - protein, 117 aa, Xanthomonas prunicola
  misc_feature (1)..(117): tr|A0A2N3RQH9|A0A2N3RQH9_9XANT 6-carboxy-5,6,7,8-tetrah ydropterin synthase OS=Xanthomonas prunicola OX=2053930 GN=queD PE=3 SV=1
MDIFKVFTLEAAHRLPNVPPGHKCARLHGHSFRVELHVSGEPDADTGWIMDFGDIKAAFQPIYDRLDHHYLNDIEGLENPTSERLAIWIWQQLKPALPQLSEIVVHETCTSGCRYRG

SEQ ID NO: 27049 - protein, 119 aa, Xanthomonas sacchari
  misc_feature (1)..(119): tr|A0A2P5Z2H9|A0A2P5Z2H9_9XANT 6-carboxy-5,6,7,8-tetrah ydropterin synthase OS=Xanthomonas sacchari OX=56458 GN =queD PE=3 SV=1
MDIFKVFTLEAAHRLPNVPPGHKCARLHGHSFRIELHVSGEPGAESGWVMDFGDIKAAFRPLYDQLDHHYLNDIDGLDNPTSERLAMWIWERLKPALPLLSEVVVHETCTSGCRYRGPG

SEQ ID NO: 27050 - protein, 119 aa, Xanthomonas sacchari
  misc_feature (1)..(119): tr|A0A0A8DXB5|A0A0A8DXB5_9XANT 6-carboxy-5,6,7,8-tetrah ydropterin synthase OS=Xanthomonas sacchari OX=56458 GN =SB85_09795 PE=3 SV=1
MDIFKVFTLEAAHRLPNVPPGHKCARLHGHSFRIELHVSGEPGAESGWVMDFGDIKAAFRPLYDQLDHHYLNDIEGLDNPTSERLAVWIWDRLKPALPLLSEVVVHETCTSGCRYRGPG

SEQ ID NO: 27051 - protein, 117 aa, Xanthomonas sp.; identical to SEQ ID NO: 27029
  misc_feature (1)..(117): tr|A0A0Q5IYI7|A0A0Q5IYI7_9XANT 6-carboxy-5,6,7,8-tetrah ydropterin synthase OS=Xanthomonas sp. Leaf148 OX=17362 75 GN=ASF90_07170 PE=3 SV=1

SEQ ID NO: 27052 - protein, 117 aa, Xanthomonas sp.; identical to SEQ ID NO: 27015
  misc_feature (1)..(117): tr|A0A3Q9Q2W4|A0A3Q9Q2W4_9XANT 6-carboxy-5,6,7,8-tetrah ydropterin synthase OS=Xanthomonas sp. ISO98C4 OX=16801 58 GN=AC801_18140 PE=3 SV=1

SEQ ID NO: 27053 - protein, 120 aa, Xanthomonas theicola
  misc_feature (1)..(120): tr|A0A2S6ZM52|A0A2S6ZM52_9XANT 6-carboxy-5,6,7,8-tetrah ydropterin synthase OS=Xanthomonas theicola OX=56464 GN =queD PE=3 SV=1
MDIFKVFTLEAAHRLPNVPPGHKCARLHGHSFRIELHVSGEPGAETGWVMDFGDIKTAFRPIYDSLDHHYLNDIDGLENPTSERLAVWIWERLKPALPLLSEVVIHETCMSGCRYRGPDA

SEQ ID NO: 27054 - protein, 120 aa, Xanthomonas translucens
  misc_feature (1)..(120): tr|A0A1M4JDI7|A0A1M4JDI7_XANCT 6-carboxy-5,6,7,8-tetrah ydropterin synthase OS=Xanthomonas translucens pv. gram inis OX=134874 GN=XTGNCPPB3709_0288 PE=3 SV=1
MDIFKSFTLEAAHRLPNVPPGHKCARLHGHSFRIELHVSGEPGADSGWVMDFGDIKAAFRPIYERLDHHYLNDIEGLENPTSERLAMWIWEQLKPALPLLSEIVVHETCTSGCRYRGPQA

SEQ ID NO: 27055 - protein, 120 aa, Xanthomonas translucens
  misc_feature (1)..(120): tr|A0A514EF97|A0A514EF97_XANCT 6-carboxy-5,6,7,8-tetrah ydropterin synthase OS=Xanthomonas translucens pv. cere alis OX=152263 GN=queD PE=3 SV=1
MDIFKRFTLEAAHRLPNVPPGHKCARLHGHSFQIELHVSGEPGADTGWVMDFGDIKAAFGPIYDQLDHHYLNDIEGLENPTSERLAVWIWERLKPALPLLSEIVVHETCTSGCRYRGPQA

SEQ ID NO: 27056 - protein, 117 aa, Xanthomonas vasicola
  misc_feature (1)..(117): tr|A0A0A3HRT0|A0A0A3HRT0_XANVA 6-carboxy-5,6,7,8-tetrah ydropterin synthase OS=Xanthomonas vasicola OX=56459 GN =queD PE=3 SV=1
MDIFKVFTLEAAHRLPNVPPGHKCARLHGHSFRVELHVSGEPGAETGWIMDFGDIKAAFQPIYDRLDHHYLNDIDGLENPTSERLAIWIWQQLKPALPQLSEIVVHETCTSGCRYRG

SEQ ID NO: 27057 - protein, 117 aa, Xanthomonas vesicatoria
  misc_feature (1)..(117): tr|A0A1L5QYD3|A0A1L5QYD3_9XANT 6-carboxy-5,6,7,8-tetrah ydropterin synthase OS=Xanthomonas vesicatoria OX=56460 GN=BI313_11765 PE=3 SV=1
MDIFKVFTLEAAHRLPNVPPGHKCARLHGHSFRVELHVSGEPGADTGWIMDFGDIKAAFKPIYDRLDHHYLNDIEGLENPTSERLAIWIWDQLKPALPQLSEIVVHETCTSGCRYRG

SEQ ID NO: 27058 - protein, 122 aa, Xanthomonas vesicatoria
  misc_feature (1)..(122): tr|F0BCX1|F0BCX1_9XANT 6-carboxy-5,6,7,8-tetrahydropter in synthase OS=Xanthomonas vesicatoria ATCC 35937 OX=92 5775 GN=XVE_1950 PE=3 SV=1
MPITVMDIFKVFTLEAAHRLPNVPPGHKCARLHGHSFRVELHVSGEPGADTGWIMDFGDIKAAFKPIYDRLDHHYLNDIEGLENPTSERLAIWIWDQLKPALPQLSEIVVHETCTSGCRYRG

SEQ ID NO: 27059 - protein, 128 aa, Xenococcus sp.
  misc_feature (1)..(128): tr|L8M4A3|L8M4A3_9CYAN 6-carboxy-5,6,7,8-tetrahydropter in synthase OS=Xenococcus sp. PCC 7305 OX=102125 GN=Xen 7305DRAFT_00037710 PE=3 SV=1
MEEWIIYKEFRFEAAHRLPTYNGKCNRLHGHSWVGRIHVKGNELIDQGSQQGMLIDYGEISDYIQPLLDNFLDHYYLNETTGLENPTSENLSRWIFEKLEKVGLPGLYAVEIRETCTSGCIYKKSVDS

SEQ ID NO: 27060 - protein, 292 aa, Xenococcus sp.
  misc_feature (1)..(292): tr|L8M3S3|L8M3S3_9CYAN 6-pyruvoyl-tetrahydropterin synt hase OS=Xenococcus sp. PCC 7305 OX=102125 GN=Xen7305DRA FT_00027040 PE=4 SV=1
MKCIINRRAEFSASHRYCLSELTSAENIQLFGDGSRFPGHGHNYELYVSLEGELDDYGMVENLSTVKKVIKQEVTSQLNYSHLNDAWPEFQETLPTTENIARIIWQKLEPHLSLVNIKLYEHPKLWADYQGKNMEASLTVKTHFSAAHRLASPQLSLEENTEIYGKCARPHGHGHNYHLEVSVVGKIDSRTGMLVDLGALQQVIDDYVVEPFDHTFLNKDIPYFAQVVPTAENIALHIANLLSSPIQSLGAELDKVKLIESPNNSCEIYCRLGGSQNSNNTLTKELEPAISI

SEQ ID NO: 27061 - protein, 335 aa, Xenophilus sp.
  misc_feature (1)..(335): tr|A0A254VM02|A0A254VM02_9BURK 6-pyruvoyl tetrahydrobio pterin synthase OS=Xenophilus sp. AP218F OX=2014876 GN= CEK28_17785 PE=4 SV=1
MHASFVLAGAGFEAARRLPGQDRFHGHSFRALARCDSQNSSQSALQAALRQAAAAFDYAEINQALADADDLSLAHHLRAALPAPAALSLRAAPHSGVLLDNGQELSWINVQFEAAHQLPNVPPGHKCGRLHGHGFGVRLVADARRAGRAELEAAWAPLRQRLHHRYLNDIEGLANPTSEVLAHWLYQRLDGALPGLAWVEVRETHSAGSQYDGQRFRIWKEQRFESAMPLDAAGNYSGHSYLVRLMLTGSLDRTMGWVLDFGDVKDRFKPIYRQLDHNPLDKLAGLYRNDSAAVAEWVHAQLSPLVPELSRIDLMEDDDSGVSLLFRHDMRWPLL

SEQ ID NO: 27062 - protein, 120 aa, Xenorhabdus beddingii
  misc_feature (1)..(120): tr|A0A1Y2SS87|A0A1Y2SS87_9GAMM 6-carboxy-5,6,7,8-tetrah ydropterin synthase OS=Xenorhabdus beddingii OX=40578 G N=Xbed_00236 PE=3 SV=1
MITTIFKDFQFEAAHHLPHVPEGHKCGRLHGHSFMVRLELTGEVDPLSGWLMDFADVKAAFKPIWERLDHYYLNDIPGLENPTSEVLAKWIWGQLKPTLSQLSAVMVKETCSAGCIYRGE

SEQ ID NO: 27063 - protein, 120 aa, Xenorhabdus bovienii
  misc_feature (1)..(120): tr|A0A0B6XFX1|A0A0B6XFX1_XENBV 6-carboxy-5,6,7,8-tetrah ydropterin synthase OS=Xenorhabdus bovienii OX=40576 GN =queD PE=3 SV=1
MSTTIFKDFQFEAAHRLPHVPEGHKCGRLHGHSFMVRLEITGEVDPLSGWIMDFADVKSAFKPIWERLDHNYLNEIPGLENPTSEVLAKWIWEKLKPTLPQLSAVMVKETCSAGCIYRDE

SEQ ID NO: 27064 - protein, 120 aa, Xenorhabdus bovienii
  misc_feature (1)..(120): tr|A0A077NVD1|A0A077NVD1_XENBV 6-carboxy-5,6,7,8-tetrah ydropterin synthase OS=Xenorhabdus bovienii str. oregon ense OX=1398202 GN=sscR PE=3 SV=1
MSTTIFKDFQFEAAHRLPHVPEGHKCGRLHGHSFMVRLEITGEVDPLSGWIMDFSDVKAAFKPIWERLDHNYLNEIPGLENPTSEVLAKWIWEKLKPTLPQLSAVMVKETCSAGCIYRGE

SEQ ID NO: 27065 - protein, 120 aa, Xenorhabdus budapestensis
  misc_feature (1)..(120): tr|A0A2D0J0Y8|A0A2D0J0Y8_XENBU 6-carboxy-5,6,7,8-tetrah ydropterin synthase OS=Xenorhabdus budapestensis OX=290 110 GN=Xbud_01991 PE=3 SV=1
MSTTIFKDFQFEAAHRLPHVPEGHKCGRLHGHSFMVRLEITGQVDPHSGWLMDFADVKAAFKPIWERLDHNYLNEIPGLENPTSEVLAKWIWRELKPTLPQLSTVMVKETCSAGCIYRGE

SEQ ID NO: 27066 - protein, 120 aa, Xenorhabdus cabanillasii
  misc_feature (1)..(120): tr|W1J958|W1J958_9GAMM 6-carboxy-5,6,7,8-tetrahydropter in synthase OS=Xenorhabdus cabanillasii JM26 OX=1427517 GN=queD PE=3 SV=1
MSTTIFKDFQFEAAHRLPHVPEGHKCGRLHGHSFMVRLEITGEVDPHSGWLMDFADVKATFKPIWERLDHHYLNEIPGLENPTSEVLAKWIWKELKPTLPQLSAVMVKETCSAGCIYRGE

SEQ ID NO: 27067 - protein, 120 aa, Xenorhabdus cabanillasii
  misc_feature (1)..(120): tr|A0A3D9UGG0|A0A3D9UGG0_9GAMM 6-carboxy-5,6,7,8-tetrah ydropterin synthase OS=Xenorhabdus cabanillasii OX=3516 73 GN=BDD26_1772 PE=3 SV=1
MSTTIFKDFQFEAAHRLPHVPEGHKCGRLHGHSFMVRLEITGEVDPHSGWLMDFADVKATFKPIWERLDHHYLNEIPGLENPTSEVLAKWIWRELKPTLPQLSAVMVKETCSAGCIYRGE

SEQ ID NO: 27068 - protein, 120 aa, Xenorhabdus doucetiae
  misc_feature (1)..(120): tr|A0A068QVR7|A0A068QVR7_9GAMM 6-carboxy-5,6,7,8-tetrah ydropterin synthase OS=Xenorhabdus doucetiae OX=351671 GN=queD PE=3 SV=1
MSTTIFKDFQFEAAHHLPHVPEGHKCGRLHGHSFMVRLEITGEVDPLTGWLMDFADVKAVFKPIWEQLDHHYLNKIPGLENPTSEVLAKWIWEQLKPTLPQLSAIMVKETCSAGCIYRGQ

SEQ ID NO: 27069 - protein, 120 aa, Xenorhabdus eapokensis
  misc_feature (1)..(120): tr|A0A1Q5TSE2|A0A1Q5TSE2_9GAMM 6-carboxy-5,6,7,8-tetrah ydropterin synthase OS=Xenorhabdus eapokensis OX=187348 2 GN=Xedl_01212 PE=3 SV=1
MSTTIFKDFQFEAAHRLPHVPEGHKCGRLHGHSFMVRLEITGEVDPLSGWLMDFADVKAAFKPVWEQLDHHYLNEIPGLENPTSEVLARWIWEKLKPTLPQLSAVMVKETCSAGCIYRGE

SEQ ID NO: 27070 - protein, 120 aa, Xenorhabdus ehlersii
  misc_feature (1)..(120): tr|A0A2D0IVG2|A0A2D0IVG2_9GAMM 6-carboxy-5,6,7,8-tetrah ydropterin synthase OS=Xenorhabdus ehlersii OX=290111 G N=Xehl_00948 PE=3 SV=1
MSTTIFKDFQFEAAHRLPHVPEGHKCGRLHGHSFMVRLEVTGEVDPLSGWLMDFADVKTAFKPVWEQLDHHYLNEIPGLENPTSEVLAKWIWEKLKPTLPQLSAVMVKETCSAGCIYRGE

SEQ ID NO: 27071 - protein, 120 aa, Xenorhabdus hominickii
  misc_feature (1)..(120): tr|A0A2G0Q4F3|A0A2G0Q4F3_9GAMM 6-carboxy-5,6,7,8-tetrah ydropterin synthase OS=Xenorhabdus hominickii OX=351679 GN=Xhom_03165 PE=3 SV=1
MSTTIFKDFQFEAAHHLPHVPEGHKCGRLHGHSFMVRLEITGEVDPLTGWIMDFADVKTAFKPIWERLDHHYLNEIPGLENPTSEILAKWIWEQLKPTLTQLSAIMVKETCSAGCIYRGE

SEQ ID NO: 27072 - protein, 120 aa, Xenorhabdus innexi
  misc_feature (1)..(120): tr|A0A1N6MTN9|A0A1N6MTN9_9GAMM 6-carboxy-5,6,7,8-tetrah ydropterin synthase OS=Xenorhabdus innexi OX=290109 GN= queD PE=3 SV=1
MSTTIFKDFQFEAAHRLPHVPEGHKCGRLHGHSFMVRLEITGEIDPHSGWLMDFADVKAAFKPIWERLDHNYLNEIPGLENPTSEVLAKWIWKEVQPALPQLSAVMVKETCSAGCIYRGE

SEQ ID NO: 27073 - protein, 120 aa, Xenorhabdus ishibashii
  misc_feature (1)..(120): tr|A0A2D0KE90|A0A2D0KE90_9GAMM 6-carboxy-5,6,7,8-tetrah ydropterin synthase OS=Xenorhabdus ishibashii OX=103447 1 GN=Xish_00895 PE=3 SV=1
MSTTIFKDFQFEAAHRLPHVPEGHKCGRLHGHSFMVRLEITGEIDPLSGWLMDFADVKAAFKPVWERLDHHYLNEIPGLENPTSEVLAKWIWEKLKPTLPQLSAVMVKETCSAGCIYRDE

SEQ ID NO: 27074 - protein, 120 aa, Xenorhabdus japonica
  misc_feature (1)..(120): tr|A0A1I5A7L2|A0A1I5A7L2_9GAMM 6-carboxy-5,6,7,8-tetrah ydropterin synthase OS=Xenorhabdus japonica OX=53341 GN =SAMN05421579_11054 PE=3 SV=1
MSTTIFKDFQFEAAHHLPNVPDGHKCGRLHGHSFMVRLEVTGEIDPHSGWLMDFADVKVAFKPIWEQLDHHYLNEIPGLENPTSEVLAKWIWEKLQPTLPQLSAVMVKETCSAGCIYRGE

SEQ ID NO: 27075 - protein, 120 aa, Xenorhabdus khoisanae
  misc_feature (1)..(120): tr|A0A0J5FNZ1|A0A0J5FNZ1_9GAMM 6-carboxy-5,6,7,8-tetrah ydropterin synthase OS=Xenorhabdus khoisanae OX=880157 GN=AB204_18350 PE=3 SV=1
MITTIFKDFQFEAAHHLPHVPEGHKCGRLHGHSFMVRVELTGEVDPLSGWLMDFADVKTAFKPIWEQLDHHYLNEIPGLENPTSEVLAKWIWGRLKPTLSQLSAVMVKETCSAGCIYRGE

SEQ ID NO: 27076 - protein, 120 aa, Xenorhabdus koppenhoeferi
  misc_feature (1)..(120): tr|A0A1I7ESR1|A0A1I7ESR1_9GAMM 6-carboxy-5,6,7,8-tetrah ydropterin synthase OS=Xenorhabdus koppenhoeferi OX=351 659 GN=SAMN05421784_10166 PE=3 SV=1
MNTTIFKDFQFEAAHHLPHVPEGHKCGRLHGHSFMVRLEITGDVDPFTGWIMDFADVKAAFKPIWERLDHHYLNEIPGLENPTSEVLAKWIWGQLKPTLSQLSAVMVKETCSAGCIYRGE

SEQ ID NO: 27077 - protein, 120 aa, Xenorhabdus kozodoii
  misc_feature (1)..(120): tr|A0A2D0LCE9|A0A2D0LCE9_9GAMM 6-carboxy-5,6,7,8-tetrah ydropterin synthase OS=Xenorhabdus kozodoii OX=351676 G N=Xkoz_01985 PE=3 SV=1
MSTTIFKDFQFEAAHRLPHVPEGHKCGRLHGHSFMVRLEITGEVDPFSGWLMDFADVKAVFKPIWEQLDHHYLNEIPGLENPTSEVLAKWIWEKLTLTLPQLSAVMVKETCSAGCIYRGE

SEQ ID NO: 27078 - protein, 120 aa, Xenorhabdus mauleonii
  misc_feature (1)..(120): tr|A0A1I3WJZ6|A0A1I3WJZ6_9GAMM 6-carboxy-5,6,7,8-tetrah ydropterin synthase OS=Xenorhabdus mauleonii OX=351675 GN=SAMN05421680_12734 PE=3 SV=1
MSTTIFKDFQFEAAHRLPHVPEGHKCGRLHGHSFMVRLEITGEVDPLTGWIMDFSDVKVAFKPIWEQLDHHYLNEIPGLENPTSEVLAKWIWEELKPVLPQLSSVMVKETCNAGCVYRGK

SEQ ID NO: 27079 - protein, 120 aa, Xenorhabdus miraniensis
  misc_feature (1)..(120): tr|A0A2D0JTC2|A0A2D0JTC2_9GAMM 6-carboxy-5,6,7,8-tetrah ydropterin synthase OS=Xenorhabdus miraniensis OX=35167 4 GN=Xmir_01024 PE=3 SV=1
MITTIFKDFQFEAAHHLPHVPEGHKCGRLHGHSFMVRVELTGEVDPLSGWLMDFADVKTAFKPIWEQLDHHYLNEIPGLENPTSEVLAKWIWERLKPILSQLSAVMVKETCSAGCIYRGE

SEQ ID NO: 27080 - protein, 120 aa, Xenorhabdus nematophila
  misc_feature (1)..(120): tr|N1NNS3|N1NNS3_XENNE 6-carboxy-5,6,7,8-tetrahydropter in synthase OS=Xenorhabdus nematophila F1 OX=1306162 GN =queD PE=3 SV=1
MSITIFKDFQFEAAHHLPHVPEGHKCGRLHGHSFMVRLEITGELDPLSGWIMDFADVKAAFKPIWERLDHHYLNEIPGLENPTSEVLAKWIWKQLKPTLSPLSAVMVKETCSAGCIYRGE

SEQ ID NO: 27081 - protein, 120 aa, Xenorhabdus nematophila; identical to SEQ ID NO: 27080
  misc_feature (1)..(120): tr|A0A0A8NNB5|A0A0A8NNB5_XENNE 6-carboxy-5,6,7,8-tetrah ydropterin synthase OS=Xenorhabdus nematophila str. Web steri OX=1437826 GN=sscR PE=3 SV=1

SEQ ID NO: 27082 - protein, 120 aa, Xenorhabdus poinarii
  misc_feature (1)..(120): tr|A0A068R686|A0A068R686_9GAMM 6-carboxy-5,6,7,8-tetrah ydropterin synthase OS=Xenorhabdus poinarii G6 OX=13543 04 GN=queD PE=3 SV=1
MSTTIFKDFQFEAAHRLPNVPEGHKCGRLHGHSFMVRLEITGEIDPVSGWLMDFADVKAAFKPIWEQLDHHYLNEIPGLENPTSEVLAKWIWAMLKSTLPQLSAVIVKETCSAGSIYQGK

SEQ ID NO: 27083 - protein, 120 aa, Xenorhabdus sp.
  misc_feature (1)..(120): tr|A0A2D0KYZ0|A0A2D0KYZ0_9GAMM 6-carboxy-5,6,7,8-tetrah ydropterin synthase OS=Xenorhabdus sp. KJ12.1 OX=185157 1 GN=Xekj_03211 PE=3 SV=1
MSTTIFKDFQFEAAHRLPHVPEGHKCGRLHGHSFMVRLEITGEIDPHSGWLMDFADVKAIFKPIWERLDHHYLNEIPGLENPTSEVLAQWIWRELQPALPQLSAVMVKETCSAGCIYRGK

SEQ ID NO: 27084 - protein, 120 aa, Xenorhabdus sp.
  misc_feature (1)..(120): tr|A0A0M0T677|A0A0M0T677_9GAMM 6-carboxy-5,6,7,8-tetrah ydropterin synthase OS=Xenorhabdus sp. GDc328 OX=742178 GN=AFK69_16075 PE=3 SV=1
MSTTIFKDFQFEAAHHLPHVPEGHKCGRLHGHSFMVRLEVTGDVDPLSGWLMDFADVKAAFKPVWEQLDHHYLNEIPGLENPTSEVLATWIWEKLKPTLPQLSAVMVKETCSAGCIYRGE

SEQ ID NO: 27085 - protein, 120 aa, Xenorhabdus stockiae; identical to SEQ ID NO: 27083
  misc_feature (1)..(120): tr|A0A2D0KVI1|A0A2D0KVI1_9GAMM 6-carboxy-5,6,7,8-tetrah ydropterin synthase OS=Xenorhabdus stockiae OX=351614 G N=Xsto_00257 PE=3 SV=1

SEQ ID NO: 27086 - protein, 120 aa, Xenorhabdus szentirmaii
  misc_feature (1)..(120): tr|W1IUM9|W1IUM9_9GAMM 6-carboxy-5,6,7,8-tetrahydropter in synthase OS=Xenorhabdus szentirmaii DSM 16338 OX=142 7518 GN=queD PE=3 SV=1
MNTTIFKDFQFEAAHYLPHVPEGHKCGRLHGHSFMVRLEITGEVDPLSGWLMDFADVKAVFKPIWEQLDHHYLNEIPGLENPTSEVLAKWIWDKVKPTLPQLSAVMVKETCSAGCLYRGE

SEQ ID NO: 27087 - protein, 120 aa, Xenorhabdus thuongxuanensis
  misc_feature (1)..(120): tr|A0A1Q5U5Z0|A0A1Q5U5Z0_9GAMM 6-carboxy-5,6,7,8-tetrah ydropterin synthase OS=Xenorhabdus thuongxuanensis OX=1 873484 GN=Xentx_00941 PE=3 SV=1
MSTTIFKDFQFEAAHRLPHVPEGHKCGRLHGHSFMVRLEITGEVDPLSGWLMDFADVKAAFKPVWERLDHHYLNEIPGLENPTSEVLAKWIWEKLKPTLPQLSAVMVKETCSAGCIYRGE

SEQ ID NO: 27088 - protein, 122 aa, Xenorhabdus vietnamensis
  misc_feature (1)..(122): tr|A0A1Y2SGK5|A0A1Y2SGK5_9GAMM 6-carboxy-5,6,7,8-tetrah ydropterin synthase OS=Xenorhabdus vietnamensis OX=3516 56 GN=Xvie_01260 PE=3 SV=1
MSMSTTIFKDFQFEAAHHLPNVPEGHKCGRLHGHSFMVRLEITGEIDPLSGWLMDFSDVKAAFKPIWEQLDHHYLNEIPGLENPTSEVLAMWIWEKLKPTLPQLSAVMVKETCSAGCIYRGE

SEQ ID NO: 27089 - protein, 142 aa, Xiangella phaseoli
  misc_feature (1)..(142): tr|A0A1H6UKD5|A0A1H6UKD5_9ACTN 6-pyruvoyl-tetrahydropte rin synthase OS=Xiangella phaseoli OX=1144548 GN=SAMN05 443287_102155 PE=4 SV=1
MFSVTVRDHIMIAHSFRGDVFGPAQRLHGATFVVDATFRRPDLDDDGIVVDIGLATDQLKAVLGELNYRNLDEEPAFAGTNTTTEVLARTIADRLADRVHAGDLGVGAHGLTGLTVTLHESHVAWASYERSLPAAVADEGTA

SEQ ID NO: 27090 - protein, 118 aa, Xylella fastidiosa
  misc_feature (1)..(118): tr|Q87EY7|Q87EY7_XYLFT 6-carboxy-5,6,7,8-tetrahydropter in synthase OS=Xylella fastidiosa (strain Temecula1 / A TCC 700964) OX=183190 GN=ygcM PE=3 SV=1
MDIFKVFIIEAAHRLPHVPPGHKCARLHGHSFRIEVHVSGALESDTGWIMDFSDLKRAFQPIYDQLDHHYLNEIEGLENPTSERLAIWVWDRLKPVLPALTEIVVHETCTSGCRYRGG

SEQ ID NO: 27091 - protein, 118 aa, Xylella fastidiosa; identical to SEQ ID NO: 27090
  misc_feature (1)..(118): tr|A0A060HCA7|A0A060HCA7_XYLFS 6-carboxy-5,6,7,8-tetrah ydropterin synthase OS=Xylella fastidiosa MUL0034 OX=14 01256 GN=P303_11105 PE=3 SV=1

SEQ ID NO: 27092 - protein, 117 aa, Xylella taiwanensis
  misc_feature (1)..(117): tr|Z9JIN6|Z9JIN6_9GAMM 6-carboxy-5,6,7,8-tetrahydropter in synthase OS=Xylella taiwanensis OX=1444770 GN=AF72_0 6040 PE=3 SV=1
MDIFKVFIIEAAHCLPHVPAGHKCARLHGHSFRIEVHVSGTLDPDTGWIMDFSDLKHAFQPIYDQLDHHYLNEIEGLENPTSERLAMWIWDRLKPVLPALSEIVVHETCTSGCRYRG

SEQ ID NO: 27093 - protein, 124 aa, Xylophilus ampelinus
  misc_feature (1)..(124): tr|A0A318SE75|A0A318SE75_9BURK 6-carboxy-5,6,7,8-tetrah ydropterin synthase OS=Xylophilus ampelinus OX=54067 GN =DFQ15_11873 PE=3 SV=1
MQFTVHQRFFFEAAHTLQRAIDAAGSRRIHGHTYHAEVAVRGPRDPRTGMVVDLGHLRAKLQGVRDQLDHHLLDEVPGLGTPTLENLCLFIARALADLQPVPSQVRVWRDAMGDACTLDLVPGA

SEQ ID NO: 27094 - protein, 124 aa, Xylophilus sp.
  misc_feature (1)..(124): tr|A0A0Q4GPR6|A0A0Q4GPR6_9BURK 6-carboxy-5,6,7,8-tetrah ydropterin synthase OS=Xylophilus sp. Leaf220 OX=173568 6 GN=ASE76_03795 PE=3 SV=1
MQFTVHQRFFFDAAHTLQREIEAAGSRRIHGHTYHAEVAVRGPRDPATGMVIDLGHLRARLQEMRERLDHHLLDEVPGLGTPTLENLCLFIARALSDLQPAPSQVRVWRDAMGDACTLDLSPGA

SEQ ID NO: 27095 - protein, 122 aa, Yangia pacifica
  misc_feature (1)..(122): tr|A0A1I6TQH0|A0A1I6TQH0_9RHOB 6-carboxy-5,6,7,8-tetrah ydropterin synthase OS=Yangia pacifica OX=311180 GN=SAM N04488050_106278 PE=3 SV=1
MFRISKEFHFSASHQLTHLPGDHQCARMHGHNYIVVVELAARELNSDGFVRDYHELAPLKAYIDECFDHRHLNDVLNVASTAENLALHFYEWCAARWPETTSVKVSETPKTWAEYRPAPLAA

SEQ ID NO: 27096 - protein, 122 aa, Yangia pacifica
  misc_feature (1)..(122): tr|A0A2U8HEH0|A0A2U8HEH0_9RHOB 6-carboxy-5,6,7,8-tetrah ydropterin synthase OS=Yangia pacifica OX=311180 GN=CEW 88_11330 PE=3 SV=1
MFRISKEFHFSASHQLTHLPSDHQCARMHGHNYIVVVELAARALNADGFVRDYHELAPLKAYIDECFDHRHLNDVLNVASTAENLALHFYEWCAARWPETASVKVSETPKTWAEYRPAPLAA

SEQ ID NO: 27097 - protein, 117 aa, Yangia sp.; identical to SEQ ID NO: 19297
  misc_feature (1)..(117): tr|A0A2E1DG33|A0A2E1DG33_9RHOB 6-carboxy-5,6,7,8-tetrah ydropterin synthase OS=Yangia sp. OX=2024862 GN=queD PE =3 SV=1

SEQ ID NO: 27098 - protein, 122 aa, Yangia sp.
  misc_feature (1)..(122): tr|A0A1B1PMA8|A0A1B1PMA8_9RHOB 6-carboxy-5,6,7,8-tetrah ydropterin synthase OS=Yangia sp. CCB-MM3 OX=1792508 GN =AYJ57_04710 PE=3 SV=1
MYRISKEFHFSASHQLVHLPEDHQCARMHGHNYIVVVELAAHELNADGFVRDYHELAPLKAYIDESFDHRHLNDVLNVASTAENLARHFYEWCAARWPETASVKVSETPKTWAEYRPAPLAA

SEQ ID NO: 27099 - protein, 120 aa, Yersinia aldovae
  misc_feature (1)..(120): tr|A0A0T9TZ90|A0A0T9TZ90_YERAL 6-carboxy-5,6,7,8-tetrah ydropterin synthase OS=Yersinia aldovae OX=29483 GN=que D PE=3 SV=1
MSTTLFKDFQFEAAHRLPHVPEGHKCGRLHGHSFMIRIEVTGEVDAHSGWVMDFAELKAAFNPIWERLDHHYLNDIPGLENPTSEVLASWIWQQLKPQLPELSAVMVKETCSAGCVYRGE

SEQ ID NO: 27100 - protein, 120 aa, Yersinia bercovieri
  misc_feature (1)..(120): tr|A0A2G4U9N1|A0A2G4U9N1_YERBE 6-carboxy-5,6,7,8-tetrah ydropterin synthase OS=Yersinia bercovieri OX=634 GN=qu eD PE=3 SV=1
MKTTLFKDFTFEAAHHLPHVPDGHKCGRLHGHSFVVRLEITGEVDKHTGWIIDFAELKAIFKRTLDRLDHYYLNDIVGLENPTSEVLAEWIWRQVKPQLPLLSAVMVKETCTAGCIYRGK

SEQ ID NO: 27101 - protein, 119 aa, Yersinia bercovieri
  misc_feature (1)..(119): tr|A0A2G4U7J2|A0A2G4U7J2_YERBE 6-carboxy-5,6,7,8-tetrah ydropterin synthase OS=Yersinia bercovieri OX=634 GN=qu eD PE=3 SV=1
MSTTLFKDFQFEAAHRLPHVAAGHKCGRLHGHSFMVRIEVTGEVDAHSGWVMDFADLKAAFNPIWERLDHHYLNDIPGLENPTSEVLACWIWQQLKPQLPELSAVMVKETCSAGCVYRG

SEQ ID NO: 27102 - protein, 120 aa, Yersinia enterocolitica
  misc_feature (1)..(120): tr|A0A0H3NLA4|A0A0H3NLA4_YERE1 6-carboxy-5,6,7,8-tetrah ydropterin synthase OS=Yersinia enterocolitica subsp. p alearctica serotype O:3 (strain DSM 13030 / CIP 106945 / Y11) OX=930944 GN=Y11_22931 PE=3 SV=1
MSTTLFKDFQFEAAHLLPHVPEGHKCGRLHGHSFMVRIEVTGEVDAHSGWVMDFAELKAAFKPIWERLDHHYLNDIPGLENPTSEVLASWIWQQLKPQLPELSAVMVKETCSAGCIYRGE

SEQ ID NO: 27103 - protein, 121 aa, Yersinia enterocolitica
  misc_feature (1)..(121): tr|A0A447S6E5|A0A447S6E5_YEREN 6-carboxy-5,6,7,8-tetrah ydropterin synthase OS=Yersinia enterocolitica subsp. e nterocolitica OX=150052 GN=queD PE=3 SV=1
MMSTTLFKDFQFEAAHLLPHVPEGHKCGRLHGHSFMVRIEVTGEVDAHSGWVMDFAELKAAFKPIWERLDHHYLNDIPGLENPTSEVLASWIWQQLKPQLPELSAVMVKETCSAGCIYRGE

SEQ ID NO: 27104 - protein, 119 aa, Yersinia entomophaga
  misc_feature (1)..(119): tr|A0A3S6F3T0|A0A3S6F3T0_YERET 6-carboxy-5,6,7,8-tetrah ydropterin synthase OS=Yersinia entomophaga OX=935293 G N=PL78_14370 PE=3 SV=1
MSTTLFKDFQFEAAHRLPNVAEGHKCGRLHGHSFMVRLEVTGEVDAHSGWVMDFAELKAAFQPIWERLDHHYLNDIPGLENPTSEVLAAWIWQQLKPQLPELSAVMVKETCSAGCVYRG

SEQ ID NO: 27105 - protein, 119 aa, Yersinia frederiksenii
  misc_feature (1)..(119): tr|A0A0T9TCV2|A0A0T9TCV2_YERFR 6-carboxy-5,6,7,8-tetrah ydropterin synthase OS=Yersinia frederiksenii OX=29484 GN=queD_1 PE=3 SV=1
MSTTLFKDFQFEAAHLLPHVPEGHKCGRLHGHSFMVRIEVTGEVDAHSGWVMDFADLKAAFNPIWARLDHHYLNDIPGLENPTSEVLASWIWQQLKPQLPELSAVMVKETCSAGCVYRG

SEQ ID NO: 27106 - protein, 119 aa, Yersinia frederiksenii
  misc_feature (1)..(119): tr|A0A0B6FQN3|A0A0B6FQN3_YERFR 6-carboxy-5,6,7,8-tetrah ydropterin synthase OS=Yersinia frederiksenii Y225 OX=1 454377 GN=queD PE=3 SV=1
MSTTLFKDFQFEAAHLLPHVPEDHKCGRLHGHSFMVRIEVTGEVDAHSGWVMDFADLKAAFKPIWERLDHHYLNDIPGLENPTSEVLACWIWQQLKPQLPELSAVMVKETCSAGCVYRG

SEQ ID NO: 27107 - protein, 119 aa, Yersinia hibernica
  misc_feature (1)..(119): tr|A0A481QKS5|A0A481QKS5_9GAMM 6-carboxy-5,6,7,8-tetrah ydropterin synthase OS=Yersinia hibernica OX=2339259 GN =queD PE=3 SV=1
MSTTLFKDFQFEAAHRLPHVPEGHKCGRLHGHSFMIRIEVTGEVDAHSGWVMDFADLKAAFKPVWERLDHHYLNDIPGLENPTSEVLASWIWQQLKPQLPELSAVMVKETCSAGCVYRG

SEQ ID NO: 27108 - protein, 120 aa, Yersinia intermedia
  misc_feature (1)..(120): tr|A0A0T9LKD9|A0A0T9LKD9_YERIN 6-carboxy-5,6,7,8-tetrah ydropterin synthase OS=Yersinia intermedia OX=631 GN=qu eD PE=3 SV=1
MSTTLFKDFQFEAAHRLPHVAEGHKCGRLHGHSFMVRIEVTGEVDAHSGWVMDFADLKAAFKPIWERLDHYYLNDIPGLENPTSEVLASWIWQQLKPQLPELSAVMVKETCSAGCVYRGE

SEQ ID NO: 27109 - protein, 119 aa, Yersinia intermedia
  misc_feature (1)..(119): tr|A0A0U1ESB3|A0A0U1ESB3_YERIN 6-carboxy-5,6,7,8-tetrah ydropterin synthase OS=Yersinia intermedia OX=631 GN=qu eD PE=3 SV=1
MSTTLFKDFQFEAAHRLPHVPEGHKCGRLHGHSFMVRLEVTGEVDAHSGWVMDFAALKAVFQPIWERLDHHYLNDIPGLENPTSEVLARWIWQQLKPQLPELSAVMIKETCSAGCVYRG

SEQ ID NO: 27110 - protein, 120 aa, Yersinia kristensenii
  misc_feature (1)..(120): tr|A0A0T9R0Q5|A0A0T9R0Q5_YERKR 6-carboxy-5,6,7,8-tetrah ydropterin synthase OS=Yersinia kristensenii OX=28152 G N=queD_2 PE=3 SV=1
MKTTLFKDFTFEAAHHLPHVPDGHKCGRLHGHSFVVRLEITGEVDKHTGWIIDFAELKAIFKPTLDRLDHYYLNDIPGLENPTCEVLAEWIWNQVKPQLPILSAVVVRETCTAGCIYRCE

SEQ ID NO: 27111 - protein, 119 aa, Yersinia kristensenii
  misc_feature (1)..(119): tr|A0A0T9TU76|A0A0T9TU76_YERKR 6-carboxy-5,6,7,8-tetrah ydropterin synthase OS=Yersinia kristensenii OX=28152 G N=queD PE=3 SV=1
MSTTLFKDFQFEAAHRLPHVPAGHKCGRLHGHSFMVRIEVTGEVDAHSGWVMDFADLKAAFNPIWERLDHHYLNDIPGLENPTSEVLASWIWQQLKPQLPELSAVMVKETCSAGCVYRG

SEQ ID NO: 27112 - protein, 119 aa, Yersinia massiliensis; identical to SEQ ID NO: 27105
  misc_feature (1)..(119): tr|A0A0T9NPT0|A0A0T9NPT0_9GAMM 6-carboxy-5,6,7,8-tetrah ydropterin synthase OS=Yersinia massiliensis OX=419257 GN=queD PE=3 SV=1

SEQ ID NO: 27113 - protein, 119 aa, Yersinia mollaretii
  misc_feature (1)..(119): tr|A0A0U1I5A7|A0A0U1I5A7_YERMO 6-carboxy-5,6,7,8-tetrah ydropterin synthase OS=Yersinia mollaretii OX=33060 GN= queD PE=3 SV=1
MSTTLFKDFQFEAAHLLPHVPEGHKCGRLHGHSFMVRIEVTGEVDAHSGWVMDFAELKAAFNPIWERLDHHYLNDIPGLENPTSEVLASWIWQQLKPQLPELSAVMVKETCSAGCIYRG

SEQ ID NO: 27114 - protein, 119 aa, Yersinia mollaretii
  misc_feature (1)..(119): tr|A0A0U1KAT8|A0A0U1KAT8_YERMO 6-carboxy-5,6,7,8-tetrah ydropterin synthase OS=Yersinia mollaretii OX=33060 GN= queD PE=3 SV=1
MSTTLFKDFQFEAAHLLPHVPEGHKCGRLHGHSFMVRIEVTGEVDAHSGWVMDFAELKAAFNPIWERLDHHYLNDIPGLENPTSEVLASWIWQQLKPQLPELSAVMVKETCSAGCVYRG

SEQ ID NO: 27115 - protein, 119 aa, Yersinia nurmii; identical to SEQ ID NO: 27104
  misc_feature (1)..(119): tr|A0A0T9LMX2|A0A0T9LMX2_9GAMM 6-carboxy-5,6,7,8-tetrah ydropterin synthase OS=Yersinia nurmii OX=685706 GN=que D PE=3 SV=1

SEQ ID NO: 27116 - protein, 119 aa, Yersinia pekkanenii
  misc_feature (1)..(119): tr|A0A0T9PY19|A0A0T9PY19_9GAMM 6-carboxy-5,6,7,8-tetrah ydropterin synthase OS=Yersinia pekkanenii OX=1288385 G N=queD PE=3 SV=1
MSTTLFKDFQFEAAHRLPHVPQGHKCGRLHGHSFMIRIEVTGEVDAHSGWVMDFAELKAAFKPIWERLDHHYLNDIPGLENPTSEVLASWIWQQLKPQLSELSAVMVKETCSAGCIYRG

SEQ ID NO: 27117 - protein, 119 aa, Yersinia pestis; identical to SEQ ID NO: 27109
  misc_feature (1)..(119): tr|A0A384KEQ9|A0A384KEQ9_YERPE 6-carboxy-5,6,7,8-tetrah ydropterin synthase OS=Yersinia pestis OX=632 GN=ygcM P E=3 SV=1

SEQ ID NO: 27118 - protein, 119 aa, Yersinia pestis; identical to SEQ ID NO: 27109
  misc_feature (1)..(119): tr|A0A454XIM9|A0A454XIM9_YERPE 6-carboxytetrahydropteri n synthase QueD OS=Yersinia pestis OX=632 GN=queD PE=4 SV=1

SEQ ID NO: 27119 - protein, 119 aa, Yersinia pseudotuberculosis; identical to SEQ ID NO: 27109
  misc_feature (1)..(119): tr|A0A0T9JGZ6|A0A0T9JGZ6_YERPU 6-carboxy-5,6,7,8-tetrah ydropterin synthase OS=Yersinia pseudotuberculosis OX=6 33 GN=queD PE=3 SV=1

SEQ ID NO: 27120 - protein, 119 aa, Yersinia pseudotuberculosis
  misc_feature (1)..(119): tr|A0A0H3B7R0|A0A0H3B7R0_YERPY 6-carboxy-5,6,7,8-tetrah ydropterin synthase OS=Yersinia pseudotuberculosis sero type O:3 (strain YPIII) OX=502800 GN=YPK_3443 PE=3 SV=1
MSTTLFKDFQFEAAHRLPHVPEGHKCGRLHGHSFMVRLEVTGEVDAHSGWVMDFAALKAVFQPIWERLDHHYLNDIPGLENPTSEVLARWIWQQLKPQLSELSAVMIKETCSAGCVYRG

SEQ ID NO: 27121 - protein, 119 aa, Yersinia rohdei
  misc_feature (1)..(119): tr|A0A0U1HT53|A0A0U1HT53_YERRO 6-carboxy-5,6,7,8-tetrah ydropterin synthase OS=Yersinia rohdei OX=29485 GN=queD PE=3 SV=1
MSTTLFKDFQFEAAHRLPHVPEGHKCGRLHGHSFMIRIEVTGEVDAHSGWVMDFADLKAAFKPIWERLDHHYLNDIPGLENPTSEVLASWIWQQLKPQLPELSAVMVKETCSAGCVYRG

SEQ ID NO: 27122 - protein, 119 aa, Yersinia ruckeri
  misc_feature (1)..(119): tr|A0A085U385|A0A085U385_YERRU 6-carboxy-5,6,7,8-tetrah ydropterin synthase OS=Yersinia ruckeri OX=29486 GN=que D PE=3 SV=1
MSTTLFKDFQFEAAHRLPNVAEGHKCGRLHGHSFMVRLEVTGEVDAHSGWVMDFAELKAAFQPIWDRLDHHYLNDIAGLENPTSEVLAAWIWQQLKPQLPELSAVMVKETCSAGCIYRG

SEQ ID NO: 27123 - protein, 119 aa, Yersinia similis
  misc_feature (1)..(119): tr|A0A0T9NSK5|A0A0T9NSK5_9GAMM 6-carboxy-5,6,7,8-tetrah ydropterin synthase OS=Yersinia similis OX=367190 GN=qu eD PE=3 SV=1
MSTTLFKDFQFEAAHRLPHVPEGHKCGRLHGHSFMVRLEVTGEVDAHSGWVMDFAALKAVFQPIWERLDHHYLNDIPGLENPTSEVLARWIWQQLKPELPELSAVMIKETCSAGCVYRG

SEQ ID NO: 27124 - protein, 119 aa, Yersinia wautersii; identical to SEQ ID NO: 27109
  misc_feature (1)..(119): tr|A0A0E8XIL0|A0A0E8XIL0_9GAMM 6-carboxy-5,6,7,8-tetrah ydropterin synthase OS=Yersinia wautersii OX=1341643 GN =queD PE=3 SV=1

SEQ ID NO: 27125 - protein, 120 aa, Yersiniaceae bacterium
  misc_feature (1)..(120): tr|A0A2N5EKB1|A0A2N5EKB1_9GAMM 6-carboxy-5,6,7,8-tetrah ydropterin synthase OS=Yersiniaceae bacterium 2016Iso3 OX=2060066 GN=queD PE=3 SV=1
MVTTLFKDFQFEAAHRLPHVPEGHKCGRLHGHSFMVRLEITGEVDPHTGWVMDFSELKALFKPTWERLDHFYLNDIPGLENPTSEVLAKWIWDELKPQLPILSAVLVKETCTAGCIYKGE

SEQ ID NO: 27126 - protein, 120 aa, Yersiniaceae bacterium
  misc_feature (1)..(120): tr|A0A2N5E9I7|A0A2N5E9I7_9GAMM 6-carboxy-5,6,7,8-tetrah ydropterin synthase OS=Yersiniaceae bacterium 2016Iso4 OX=2060068 GN=queD PE=3 SV=1
MVTTLFKDFQFEAAHRLPHVPEGHKCGRLHGHSFMVRLEITGEVDPHTGWVMDFSELKALFKPTWERLDHFYLNDIPGLENPTSEVLAKWIWDELKPQLPILSAVLVKETCTAGCIYKGD

SEQ ID NO: 27127 - protein, 121 aa, Yokenella regensburgei
  misc_feature (1)..(121): tr|G9Z3D5|G9Z3D5_9ENTR 6-carboxy-5,6,7,8-tetrahydropter in synthase OS=Yokenella regensburgei ATCC 43003 OX=100 2368 GN=HMPREF0880_02041 PE=3 SV=1
MMSTTLFKDFTFEAAHHLPHVPKGHKCGRLHGHSFMVRLEITGDVDPHTGWIMDFADLKAAFKPTYDRLDHYYLNDIPGLENPTSEVLAKWIWDQVKPVVPLLSAVMIKETCTAGCVYRGE

SEQ ID NO: 27128 - protein, 121 aa, Yokenella regensburgei; identical to SEQ ID NO: 27127
  misc_feature (1)..(121): tr|A0A2X2Q764|A0A2X2Q764_9ENTR 6-carboxy-5,6,7,8-tetrah ydropterin synthase OS=Yokenella regensburgei OX=158877 GN=queD PE=3 SV=1

SEQ ID NO: 27129 - protein, 131 aa, Yoonia maricola
  misc_feature (1)..(131): tr|A0A2M8W0I9|A0A2M8W0I9_9RHOB 6-pyruvoyl-tetrahydropte rin synthase OS=Yoonia maricola OX=420999 GN=BC777_3490 PE=4 SV=1
MFAVEVRDHVMIAHSLPSPVFGPAQGMHGATFVVDAAFYTKDLDDNGLVVDIGLALEALAEALKPLKYANLDEVPAFKSKITTTEFLCHYIWQQLRDTAKTTGLGDGGRVCRIKVSLEESHVARGWYEADI

SEQ ID NO: 27130 - protein, 117 aa, Yoonia maritima
  misc_feature (1)..(117): tr|A0A2T0VT86|A0A2T0VT86_9RHOB 6-carboxy-5,6,7,8-tetrah ydropterin synthase OS=Yoonia maritima OX=1435347 GN=CL V80_1203 PE=3 SV=1
MFRISKEFHFSASHQLSHLPQDHQCARLHGHNYIVVVELAAASLNSDGFVRDYHELKPLKDYIDGTFDHRHLNDVLDGPSTAENMAHHFYEWCKARWPEASAVKVSETPKTWAEYRP

SEQ ID NO: 27131 - protein, 117 aa, Yoonia sediminilitoris
  misc_feature (1)..(117): tr|A0A2T6KC40|A0A2T6KC40_9RHOB 6-carboxy-5,6,7,8-tetrah ydropterin synthase OS=Yoonia sediminilitoris OX=128614 8 GN=C8N45_110108 PE=3 SV=1
MYRITKEFHFSASHQLSHLPHDHQCARLHGHNYVVVVELASATLNSDGFVRDYGELKPLKTYIDDTFDHRHLNDVMAEASTGENMARHFYDWCVARWPETSAVKVSETPKTWAEYRP

SEQ ID NO: 27132 - protein, 118 aa, Yoonia vestfoldensis
  misc_feature (1)..(118): tr|A0A1Y0E729|A0A1Y0E729_9RHOB 6-carboxy-5,6,7,8-tetrah ydropterin synthase OS=Yoonia vestfoldensis OX=245188 G N=queD PE=3 SV=1
MFRITKEFHFSASHQLCHLHQDHPCARLHGHNYIVVVELACDTLDEDGFVLDYNALAPLKRYIDDEMDHRHLNEVFGHDKVTSEWMAQMLYDWCKARWDQTSAVKVSETPKTWAEYRP

SEQ ID NO: 27133 - protein, 177 aa, Zavarzinia sp.
  misc_feature (1)..(177): tr|A0A317EG44|A0A317EG44_9PROT 6-carboxytetrahydropteri n synthase OS=Zavarzinia sp. HR-AS OX=2211142 GN=DKG74_ 09710 PE=4 SV=1
MDFTITRQIAIDAGHRIASHGSKCRHLHGHRYVIEASCRPVSGELRAAGEQAGMVLDFGFLKDEMMALIDAPCDHGLIADIADRALLDLFTPEGRKGDDWHAALAATVAAGGFATTTDGRLGQKLYVVPFPPTAEGLARHWFHRLAPAVARRSDGLAALTRVTVHETPNCRADYAPL

SEQ ID NO: 27134 - protein, 150 aa, Zeaxanthinibacter enoshimensis
  misc_feature (1)..(150): tr|A0A4R6TN26|A0A4R6TN26_9FLAO 6-pyruvoyltetrahydropter in/6-carboxytetrahydropterin synthase OS=Zeaxanthinibac ter enoshimensis OX=392009 GN=CLV82_0741 PE=4 SV=1
MEKIRVTKEFTFETGHALYGYDGKCRNVHGHSYKLSVTVIGEPITDQDHVKLGMVIDFGDLKKIVKEEVVDPFDHATVFNKNSPHIELANELESRGHKVILADYQPTSENMVLDFASKIKKRLPDNLSLHSLQLRETDTAYAEWYASDNA

SEQ ID NO: 27135 - protein, 135 aa, Zeaxanthinibacter enoshimensis
  misc_feature (1)..(135): tr|A0A4R6TJ02|A0A4R6TJ02_9FLAO 6-carboxy-5,6,7,8-tetrah ydropterin synthase OS=Zeaxanthinibacter enoshimensis O X=392009 GN=CLV82_1530 PE=3 SV=1
MKVKVSRAAHFNAAHRLYRPDWDEEKNNAVFGKCNNPNFHGHNYELIVSVTGPIDKETGMVIDLKDLKDLIRSEVEDAFDHKNLNLEVPEFAKLNPTAENIAVIIWNKLKPHLKEEQELEVVLYETPRNFVTYSG

SEQ ID NO: 27136 - protein, 124 aa, Zetaproteobacteria bacterium
  misc_feature (1)..(124): tr|A0A2A5EED4|A0A2A5EED4_9PROT 6-carboxy-5,6,7,8-tetrah ydropterin synthase OS=Zetaproteobacteria bacterium OX= 2026807 GN=queD PE=3 SV=1
MPHYELSIETHFSAAHQLRDYPGDCARLHGHNWHVKLFVSCQDLDDLGLGIDYKTMKIQIKEALEKWDHYNLNDIAPFDTINPSSENVARLLFEEMCERLNNERLHVSRVSISETCTAKVSYWA

SEQ ID NO: 27137 - protein, 124 aa, Zetaproteobacteria bacterium
  misc_feature (1)..(124): tr|A0A3M1ZK67|A0A3M1ZK67_9PROT 6-carboxy-5,6,7,8-tetrah ydropterin synthase OS=Zetaproteobacteria bacterium OX= 2026807 GN=queD PE=3 SV=1
MSCFELCCKAHFSAAHFLRGYNGDCARLHGHNWHVRLYVKCEQLDKLGMGIDYAVMKRELKQALACWDHYHLNEIPPFDRINPTSENVAAELYKQLRPRLENERLTISRIEIAETCTASVTYWP

SEQ ID NO: 27138 - protein, 141 aa, Zhizhongheella caldifontis
  misc_feature (1)..(141): tr|A0A2S5SUH7|A0A2S5SUH7_9BURK Uncharacterized protein OS=Zhizhongheella caldifontis OX=1452508 GN=C1704_09550 PE=4 SV=1
MYSVNVRDHFMIAHSFQGAVFGPAQRLHGATYVVDLELRRPELDADGIVVDIGRATEVLREILSALNFRNLDEEAVFRGRNTTTEFLARVIFDRVAERIARGDLGASAAGLTHAKVTLHESHVAWAAYEAALPVPRPPLQA

SEQ ID NO: 27139 - protein, 165 aa, Zhongshania aliphaticivorans
  misc_feature (1)..(165): tr|A0A127M2Z7|A0A127M2Z7_9GAMM 6-pyruvoyl tetrahydropte rin synthase OS=Zhongshania aliphaticivorans OX=1470434 GN=AZF00_04545 PE=4 SV=1
MPVKAYTCIEISKEDLKFSGAHFTIFSATERERLHGHNFKVSLLLTADVGDNGMCFSYVEIKTRLRKLCAQLDEYTLLPAASPFMQIRTEGAQYIAEFNGEEIPFLISDTLVLPVRNTTVEEFARYLLELLLRDAPFIEGNEIRELIMKVSSGPGQWGSASWSRD

SEQ ID NO: 27140 - protein, 118 aa, Zhongshania aliphaticivorans
  misc_feature (1)..(118): tr|A0A127M467|A0A127M467_9GAMM 6-carboxy-5,6,7,8-tetrah ydropterin synthase OS=Zhongshania aliphaticivorans OX= 1470434 GN=AZF00_06850 PE=3 SV=1
MEIYKDFTFEAAHLLPNVPQGHKCGRLHGHSFLIRLYIAGDIDPHTGWLMDFSDIKQIFKPIYEQLDHNYLNDIPGLENPTSENLAIWIWQQLKPILSALSQVEVRETCTSGCIYRGE

SEQ ID NO: 27141 - protein, 118 aa, Zhongshania sp.
  misc_feature (1)..(118): tr|A0A3N0CJH2|A0A3N0CJH2_9GAMM 6-carboxy-5,6,7,8-tetrah ydropterin synthase OS=Zhongshania sp. DSW25-10 OX=2304 603 GN=queD PE=3 SV=1
MEIYKEFTFEAAHRLPNVPEGHKCARLHGHSFLVRIFIAGDIDPHTGWLMDFSEVKKIFAPIYDQLDHHYLNDIPGLENPTSENLAIWIWKQLKPRLNALSQVEIRETCTSGCIYKGE

SEQ ID NO: 27142 - protein, 165 aa, Zhongshania sp.
  misc_feature (1)..(165): tr|A0A2S4HBP5|A0A2S4HBP5_9GAMM 6-pyruvoyl tetrahydropte rin synthase OS=Zhongshania sp. ZX-21 OX=2067667 GN=C00 68_17365 PE=4 SV=1
MPVKAYTNIEISKEDLKFSGAHFTIFSATDRERLHGHNFKVSLLLTADVGDNGMCFSYVEIKTRLRKLCASLDEYTLLPAESPYMRVVERGNFYIAEFNGEEIPFLQSDTLVLPVRNTTVEEFARYLLELLLTDAPFIEGNEIRELVMKVSSGPGQWGSASWTRD

SEQ ID NO: 27143 - protein, 150 aa, Zhouia amylolytica
  misc_feature (1)..(150): tr|A0A1I6SB56|A0A1I6SB56_9FLAO 6-pyruvoyltetrahydropter in/6-carboxytetrahydropterin synthase OS=Zhouia amyloly tica OX=376730 GN=SAMN04487906_1508 PE=4 SV=1
MSKIRITKQFDFETGHALYGYDGKCRNVHGHSYKLAVTVIGSPITDTSHVKLGMVIDFGDLKKIVKEDIVDIFDHATVFNKNTPHIELAKELQDRGHNVILVDYQPTSENMVIDFAHKISARLPENIKLHSLKLQETETSFAEWYASDNL

SEQ ID NO: 27144 - protein, 150 aa, Zhouia amylolytica; identical to SEQ ID NO: 27143
  misc_feature (1)..(150): tr|W2UKU4|W2UKU4_9FLAO 6-pyruvoyltetrahydrobiopterin sy nthase OS=Zhouia amylolytica AD3 OX=1286632 GN=P278_269 30 PE=4 SV=1

SEQ ID NO: 27145 - protein, 118 aa, Zobellella denitrificans
  misc_feature (1)..(118): tr|A0A291HPW7|A0A291HPW7_9GAMM 6-carboxy-5,6,7,8-tetrah ydropterin synthase OS=Zobellella denitrificans OX=3475 34 GN=AN401_10215 PE=3 SV=1
MYTIKKEFHFSASHQLKQMPDWHPCARLHGHNYVVVLELQSETLDQYGFVRDYLELKAFKDYIDERLDHRHLNEVLGDECTTAERLACHLFDWARARWPEVSAVLVSETPKTWAEYRP

SEQ ID NO: 27146 - protein, 118 aa, Zobellella denitrificans
  misc_feature (1)..(118): tr|A0A231MVE7|A0A231MVE7_9GAMM 6-carboxy-5,6,7,8-tetrah ydropterin synthase OS=Zobellella denitrificans OX=3475 34 GN=CGX12_15695 PE=3 SV=1
MYTIKKEFHFSASHQLKQMPDWHPCARLHGHNYVVVLELQSETLDQYGFVRDYLELKAFKDYIDERLDHRHLNEVLGDECTTAERLACHLYDWARARWPEVSAVLVSETPKTWAEYRP

SEQ ID NO: 27147 - protein, 118 aa, Zobellella endophytica
  misc_feature (1)..(118): tr|A0A2P7RBG9|A0A2P7RBG9_9GAMM 6-carboxy-5,6,7,8-tetrah ydropterin synthase OS=Zobellella endophytica OX=211670 0 GN=C7H85_01560 PE=3 SV=1
MYTIKKEFHFSASHQLKQMPDHHPCSRLHGHNYVVVIELKSEHLDQYGFVRDYLELADFKRFIDHELDHRHLNEVLGDECTTAERLARYLFDWAHARWPEVSAMSVSETPKTWAEYRP

SEQ ID NO: 27148 - protein, 118 aa, Zobellella taiwanensis
  misc_feature (1)..(118): tr|A0A2P7RE09|A0A2P7RE09_9GAMM 6-carboxy-5,6,7,8-tetrah ydropterin synthase OS=Zobellella taiwanensis OX=347535 GN=queD PE=3 SV=1
MYTIKKEFHFSASHQLKQMPDWHPCARLHGHNYVVVIELQSETLDQYGFVRDYLELKAFKDYIDDKLDHRHLNEVLGDECTTAERLARHLYDWACERWPEVSAVAVSETPKTWAEYRP

SEQ ID NO: 27149 - protein, 150 aa, Zobellia galactanivorans
  misc_feature (1)..(150): tr|G0L4A6|G0L4A6_ZOBGA 6-Pyruvoyl tetrahydrobiopterin s ynthase OS=Zobellia galactanivorans (strain DSM 12802 / CCUG 47099 / CIP 106680 / NCIMB 13871 / Dsij) OX=63186 GN=ptsA PE=4 SV=1
MGIIRITKQFNFETGHALYGYDGKCRNVHGHSYKLSVTVIGRPITDTSHVKLGMVIDFGDLKKIVKEEIVDQFDHATVFNKNTPHVELAKELTDRGHNVILADYQPTSENMVIDFAKRIRARLPENISLHSLRLQETDTSFAEWYASDNQ

SEQ ID NO: 27150 - protein, 135 aa, Zobellia galactanivorans
  misc_feature (1)..(135): tr|G0L1H9|G0L1H9_ZOBGA 6-carboxy-5,6,7,8-tetrahydropter in synthase OS=Zobellia galactanivorans (strain DSM 128 02 / CCUG 47099 / CIP 106680 / NCIMB 13871 / Dsij) OX=6 3186 GN=pts PE=3 SV=1
MRVKVSRKAHFNAAHRLYRKDWSDEKNTQVFGKCNNPNYHGHNYELVVSVTGKIDPETGFVMDMKVLKDLIAEKVEDALDHKNLNIEVPEFKDLNPTAENISIIIWNKLRPHINPNHDLEVVLYETPRNFVTYSG

SEQ ID NO: 27151 - protein, 135 aa, Zobellia uliginosa; identical to SEQ ID NO: 27150
  misc_feature (1)..(135): tr|A0A1N7NP41|A0A1N7NP41_9FLAO 6-carboxy-5,6,7,8-tetrah ydropterin synthase OS=Zobellia uliginosa OX=143224 GN= SAMN05421766_106198 PE=3 SV=1

SEQ ID NO: 27152 - protein, 150 aa, Zobellia uliginosa
  misc_feature (1)..(150): tr|A0A1N7IQF1|A0A1N7IQF1_9FLAO 6-pyruvoyltetrahydropter in/6-carboxytetrahydropterin synthase OS=Zobellia uligi nosa OX=143224 GN=SAMN05421766_101426 PE=4 SV=1
MGKIRITKQFNFETGHALYGYDGKCRNVHGHSYKLSVTVIGTPITDTSHVKWGMVIDFGDLKKIVKEEIVDQFDHATVFNKNTPHVELAQELISRGHNVILADYQPTSENMVIDFSKKIRARLPENISLHSLKLQETDTSFAEWYASDNQ

SEQ ID NO: 27153 - protein, 150 aa, Zoogloea ramigera
  misc_feature (1)..(150): tr|A0A4Y4CU58|A0A4Y4CU58_ZOORA 6-carboxytetrahydropteri n synthase QueD OS=Zoogloea ramigera OX=350 GN=ZRA01_08 660 PE=4 SV=1
MRITRRLEFDAGHRIPDHASQCRHLHGHRYALEITLSGDTIKRDGSPVNGMVMDFGDVKAIAKQQVVDVWDHAFLAYRGDTAVVAFLQSMPGHKTVILDVVPTAENLAAEAFRILDPAYRDIYGNHLRLERVRLFETPNCWADAVRAEQA

SEQ ID NO: 27154 - protein, 123 aa, Zoogloea sp.
  misc_feature (1)..(123): tr|A0A5C7KAL0|A0A5C7KAL0_9RHOO 6-carboxy-5,6,7,8-tetrah ydropterin synthase OS=Zoogloea sp. OX=49181 GN=E6R15_0 7050 PE=3 SV=1
MHELSRAFLFEAAHTLQRDIGTEGSRRIHGHSYRATITLAGVPDPVTGMLIDIGHLDTLLADTRDALDHRFLDEVPGLGPATLENLCSFLWARLAPSLPQLHRVTVSRDLSGDACSFVGQAVC

SEQ ID NO: 27155 - protein, 150 aa, Zoogloea sp.
  misc_feature (1)..(150): tr|A0A5C7K370|A0A5C7K370_9RHOO 6-carboxytetrahydropteri n synthase QueD OS=Zoogloea sp. OX=49181 GN=queD PE=4 S V=1
MRITRRLEFDAGHRIPDHASQCRHLHGHRYALEITLSGEIIQATGEAVNGMVMDFADVKAVAKQHVVDVWDHAFLAYRGDTAVVSFLQSMPGHKTVLLDVVPTAENLAAEAFRILDPLYRDVYGNHLRLERVRLFETPNCWADALRSELD

SEQ ID NO: 27156 - protein, 149 aa, Zoogloeaceae bacteirum
  misc_feature (1)..(149): tr|A0A2S0QZX4|A0A2S0QZX4_9RHOO 6-carboxy-5,6,7,8-tetrah ydropterin synthase OS=Zoogloeaceae bacteirum Par-f-2 O X=2080469 GN=queD PE=3 SV=1
MRITRRLEFDAGHRIPDHASQCRHLHGHRYAIEVTLSGRIIDAAGQPVNGMVMDFADVKTIAKQHLVDLWDHAFLVYRGDTVVVDLLARIPGHKTVVLDVIPTAENLARLAFEILDPLYRDIYGNNLRLERVRLFETPNCWADAVRGAD

SEQ ID NO: 27157 - protein, 283 aa, Zooshikella ganghwensis
  misc_feature (1)..(283): tr|A0A4P9VTK7|A0A4P9VTK7_9GAMM 6-pyruvoyl tetrahydropte rin reductase OS=Zooshikella ganghwensis OX=202772 GN=B 9G39_19075 PE=4 SV=1
MASLFVEQLTVIDFSYLCPERGLVGESWLVDVVLDGSLNEQGMVFDFGNVKKDIKQAIDSTIDHTLVVPSKSKAIQLVDHGDIREVMLETSQNGILHCQAPSAAIVPIPVDVITPSTLKAVVEEHLKSVVPDNVDSVSVNLYPQSIQEAYYHYSHGLKKHHGDCQRIAHGHRSPLKVKLDGQTSPQLASQWAKKWQDIYLVTEADILDEFENKGFRYIKCGYQAPQGYFELTINKKCCYFFQTDTTVELIAQHLAQEIKKDYPSHQVTVHAYEGYKKGAIATA

SEQ ID NO: 27158 - protein, 149 aa, Zunongwangia atlantica
  misc_feature (1)..(149): tr|A0A1Y1T1E0|A0A1Y1T1E0_9FLAO 6-carboxy-5,6,7,8-tetrah ydropterin synthase OS=Zunongwangia atlantica 22II14-10 F7 OX=1185767 GN=IIF7_13577 PE=3 SV=1
MAKIRITKQFSFETGHALYGYDGKCRNVHGHSYKLSVTVIGEPITDTENVKYGMVIDFGDLKKIVKSEIVDQFDHATVFNQNTPHLELAKELQDRGHHVILVDYQPTSENMVIDFAEKINKHLPDHIKLHSLKLQETETSFAEWYASDN

SEQ ID NO: 27159 - protein, 136 aa, Zunongwangia atlantica
  misc_feature (1)..(136): tr|A0A1Y1T9X8|A0A1Y1T9X8_9FLAO 6-carboxy-5,6,7,8-tetrah ydropterin synthase OS=Zunongwangia atlantica 22II14-10 F7 OX=1185767 GN=IIF7_01985 PE=3 SV=1
MRLTVHRKAHFNAAHRLFKKEWSDEKNFEIFGKCSNPNFHGHNYELIVAVTGEIDPETGFVMDLKRLKDLIYTEVETPFDHKNLNVEVEEFKSLNPTAENIAVVIWNKLRDKLRANLELEVTLYETPRNYVSYKGE

SEQ ID NO: 27160 - protein, 136 aa, Zunongwangia mangrovi
  misc_feature (1)..(136): tr|A0A1I1LRM6|A0A1I1LRM6_9FLAO 6-carboxy-5,6,7,8-tetrah ydropterin synthase OS=Zunongwangia mangrovi OX=1334022 GN=SAMN04487907_108128 PE=3 SV=1
MRLTVHRKAHFNAAHRLFKKEWSDEKNFEVFGKCSNPNFHGHNYELIVAVTGEVDPETGFVMDLKRLKDLIYTEVETPFDHKNLNVEVEEFKSLNPTAENIAVVIWNKLRDKLRANLDLEVTLYETPRNYVSYKGE

SEQ ID NO: 27161 - protein, 149 aa, Zunongwangia mangrovi
  misc_feature (1)..(149): tr|A0A1I1DIR5|A0A1I1DIR5_9FLAO 6-carboxy-5,6,7,8-tetrah ydropterin synthase OS=Zunongwangia mangrovi OX=1334022 GN=SAMN04487907_101408 PE=3 SV=1
MAKIRITKQFSFETGHALYGYDGKCRNVHGHSYKLSVTVIGEPIADTENVKYGMVIDFGDLKKIVKSEIVDQFDHATVFNQNTPHLELAKELQDRGHHVILVDYQPTSENMVIDFAEKINKHLPDHIKLHSLKLQETETSFAEWYASDN

SEQ ID NO: 27162 - protein, 136 aa, Zunongwangia profunda
  misc_feature (1)..(136): tr|D5BIR3|D5BIR3_ZUNPS 6-carboxy-5,6,7,8-tetrahydropter in synthase OS=Zunongwangia profunda (strain DSM 18752 / CCTCC AB 206139 / SM-A87) OX=655815 GN=ZPR_1175 PE=3 SV=1
MRLTVHRKAHFNAAHRLFKKEWTDEKNFEVFGKCSNPNYHGHNYELTVSVTGEVDPETGFVMDLKRLKDLIYTEVETPFDHKNLNVEVEEFKTLNPTAENIAVVIWNKLREKLRENLDLQVTLYETPRNFVSYKGE

SEQ ID NO: 27163 - protein, 149 aa, Zunongwangia profunda
  misc_feature (1)..(149): tr|A0A3D5IUB8|A0A3D5IUB8_9FLAO 6-carboxy-5,6,7,8-tetrah ydropterin synthase OS=Zunongwangia profunda OX=398743 GN=DGQ38_00360 PE=3 SV=1
MAKIRITKQFSFETGHALYGYDGKCRNVHGHSYKLSVTVIGEPITDTENVKYGMVIDFGDLKKIVKSEIVDQFDHATVFNQNTPHIELAKELKNRGHHVILVDYQPTSENMVIDFAEKIKKHLPDHIQLHSLKLQETESSFAEWYAIDN

SEQ ID NO: 27164 - protein, 149 aa, Zunongwangia sp.
  misc_feature (1)..(149): tr|A0A2E0NXX4|A0A2E0NXX4_9FLAO 6-carboxy-5,6,7,8-tetrah ydropterin synthase OS=Zunongwangia sp. OX=1965325 GN=C MP13_08180 PE=3 SV=1
MAKIRITKQFSFETGHALYGYDGKCRNVHGHSYKLSVTVIGEPITDTENVKYGMVIDFGDLKKIVKSEIVDQFDHATVFNQNTPHIELAKELKNRGHHVILVDYQPTSENMVIDFAEKIKKHLPDHIQLHSLKLQETESSFAEWYASDN

SEQ ID NO: 27165 - protein, 136 aa, Zunongwangia sp.
  misc_feature (1)..(136): tr|A0A2E0NUC1|A0A2E0NUC1_9FLAO 6-carboxy-5,6,7,8-tetrah ydropterin synthase OS=Zunongwangia sp. OX=1965325 GN=C MP13_01820 PE=3 SV=1
MRLTVHRKAHFNAAHRLFKKEWTDEKNFEVFGKCSNPNYHGHNYELTVSVTGEVDPETGFVMDLKRLKDLIYTEVETPFDHKNLNVEVEEFKTLNPTAENITVVIWNKLREKLRENLDLQVTLYETPRNFVTYKGE

SEQ ID NO: 27166 - protein, 279 aa, Zymobacter palmae
  misc_feature (1)..(279): tr|A0A348HE35|A0A348HE35_9GAMM 6-pyruvoyl-tetrahydropte rin synthase OS=Zymobacter palmae OX=33074 GN=ZBT109_11 26 PE=4 SV=1
MSLFVHGLSALDLSWWCGERGLVGASWHVDLLLNGELGEDGMLFDFGEVKPWVKQHVDGTVDHTLLVPTKMAGVSVTECREGLCVRFSSPWPMEIRAPRQAFTLLPWQIIDADRIGRYLSEQLMKRPPARVTDIQLTLREEPIPEGFCYGYSHGLKRHIGNCQRIAHGHRSRLYIWRDGELDEALIQHWCERLADIYLADREDCIGAEDGDTLSLAYDAPQGHFRMTLPRQRAAILPTTTTVEQIAQWIANETARMQPGRIRVQAFEGIGKGAIAEAHR

SEQ ID NO: 27167 - protein, 118 aa, Zymomonas mobilis
  misc_feature (1)..(118): tr|A0A2R9NUN5|A0A2R9NUN5_ZYMMB 6-carboxy-5,6,7,8-tetrah ydropterin synthase OS=Zymomonas mobilis subsp. mobilis NRRL B-12526 OX=1194424 GN=queD PE=3 SV=1
MRITQAFTFEAAHRLPHVPETHRCRRLHGHSYRVELRLEGAVNPETGFVVDFFDVEHIFGPVLKQLDHYCLNDIPGLENPTAENISQWIWRKIKNDLPLLAAVTVYETPHCWAEYLGD

SEQ ID NO: 27168 - protein, 118 aa, Zymomonas mobilis
  misc_feature (1)..(118): tr|A0A542W0Y5|A0A542W0Y5_ZYMMB 6-carboxy-5,6,7,8-tetrah ydropterin synthase OS=Zymomonas mobilis OX=542 GN=FBY5 8_0812 PE=3 SV=1
MRITQAFTFEAAHRLPHVPETHRCHRLHGHSYRVELRLEGPVNPKTGFVVDFFDVEHIFGPVLKQLDHYCLNDIAGLENPTAEHIAQWIWRKIKSDLPLLSAVLVYETPHCWAEYLGD

SEQ ID NO: 27169 - protein, 121 aa, Escherichia coli; identical to SEQ ID NO: 16827
  misc_feature (1)..(121): sp|P65870|QUED_ECOLI 6-carboxy-5,6,7,8-tetrahydropterin synthase OS=Escherichia coli (strain K12) OX=83333 GN= queD PE=1 SV=1

SEQ ID NO: 27170 - protein, 121 aa, Escherichia coli; identical to SEQ ID NO: 16827
  misc_feature (1)..(121): tr|C3SXD2|C3SXD2_ECOLX 6-carboxy-5,6,7,8-tetrahydropter in synthase OS=Escherichia coli OX=562 GN=queD PE=3 SV= 1

SEQ ID NO: 27171 - protein, 246 aa, Abditibacterium utsteinense
  misc_feature (1)..(246): tr|A0A2S8SSK5|A0A2S8SSK5_9BACT 7-carboxy-7-deazaguanine synthase OS=Abditibacterium utsteinense OX=1960156 GN= queE PE=3 SV=1
MKPILISEIFGPTIQGEGSLIGRPTVFVRTGGCDFRCAWCDTLYAVLPEFKSDWTPQSPAEIIAQVEHLSGGFPILITVSGGNPALQLLEDLLDLGHEHGHTFALETQASRPQSWFCKLDYLVLSPKPPSSGMEFRAEKLAQCIEAAIVQGIPTKNEGSATQVSLKVVVFDEDDYLFAWRVHALHPEIPFYLSVGNPSPQSGSEADAGDLVTRFEWLLARAARDGWFSATISPQLHVLLWGNKRGV

SEQ ID NO: 27172 - protein, 212 aa, Abyssibacter profundi
  misc_feature (1)..(212): tr|A0A363UPW7|A0A363UPW7_9GAMM 7-carboxy-7-deazaguanine synthase OS=Abyssibacter profundi OX=2182787 GN=queE P E=3 SV=1
MRLRITEIFRSVQGESTLAGLPTTFVRLTGCPLRCGYCDTAYAFQGGQWMTGSEILDTVQDFSVRHVCVTGGEPLAQKAAPALLSTLCDAGYTVSLETSGALPIEGLDRRVIVVMDVKTPSSGECSRNLATNPQALKSGDQVKFVVGESADLDWCRQWLRDAALPAGVEILWSPVWETMSLPELAEWVASSGVPGRLQLQMHKIIWGQEPGR

SEQ ID NO: 27173 - protein, 236 aa, Abyssicoccus albus
  misc_feature (1)..(236): tr|A0A3N5C577|A0A3N5C577_9STAP 7-carboxy-7-deazaguanine synthase OS=Abyssicoccus albus OX=1817405 GN=queE PE=3 SV=1
MIPVLEIFGPTIQGEGAVIGKKTMFVRTAGCDFRCSWCDSSFTWDGSQKHLIQRMTAEEVYNELNKLAPNNFNHVTISGGNPALIKSLDSLVRLLKIQHIEIAVETQGTVFHSWLNEVDDLTISPKPRSSGMNQSLEQLDQFINSTKAVKRRSLKVVVFDEDDIEDALIYHKRYPDIPFYIQVGNPFLNESVENHRDYLLSRYEWLIESVMNDERFLNVHILPQLHTILWSNKQKV

SEQ ID NO: 27174 - protein, 256 aa, Acaryochloris marina
  misc_feature (1)..(256): tr|B0C252|B0C252_ACAM1 7-carboxy-7-deazaguanine synthas e OS=Acaryochloris marina (strain MBIC 11017) OX=329726 GN=queE PE=3 SV=1
MKTASTANLVEIFSAIQGEGLNVGTRQIFIRFGGCDLRCHFCDSAHTWTPKSSCQIEKTPGCRDFARYPNPVTLPQILEWVQDQDLPGMHDSISLTGGEPLLQVAFLQNLLPLLRQQTSLPIYLETGGHHPEALDPLLPHLDSVGMDLKLPSVSGENHWPQHRQSLELCHQAHIDVFCKLIISEKTDWPELVQAAQMVADISPTVLMFLQPVTPLTAQHPVQPPTPDQVLAWQGQLKQMGRQIRVVPQTHKFLGQL

SEQ ID NO: 27175 - protein, 271 aa, Acaryochloris sp.
  misc_feature (1)..(271): tr|A0A2W1JVV7|A0A2W1JVV7_9CYAN 7-carboxy-7-deazaguanine synthase OS=Acaryochloris sp. RCC1774 OX=1764569 GN=qu eE_1 PE=3 SV=1
MSNAVPTSISTPDALTSSALTTAALVEIFSAIQGEGVNVGTRQIFIRFGGCDLRCRFCDSVHTWHPSETCRIEQTPGLRDFVTYPNPISQTQLLTWIAQQNQPNLHDSISLTGGEPLLHADFLRLFLPQLRDSIHLPIYLETGGHRPQDLQTLLPYLDLIGMDLKLPSVSGETHWREHSQCLKLCQQARIDVFCKVIVAQHTDPEDLQQVLQTIATISPNIPVYLQPVTPLPQSIMQPPTPAQVLQWQADLKQRLKTVRVVPQTHKMLDQL

SEQ ID NO: 27176 - protein, 219 aa, Accumulibacter phosphatis
  misc_feature (1)..(219): tr|C7RPH0|C7RPH0_ACCPU 7-carboxy-7-deazaguanine synthas e OS=Accumulibacter phosphatis (strain UW-1) OX=522306 GN=queE PE=3 SV=1
MKASGKPLSLKISEIFLSLQGETSRVGLPTVFVRLTGCPLRCVWCDTAYAFAGGRTMTLPDILAEVARHDVRHVCVTGGEPLAQPACLALLSELCDTGYAVSLETSGALDIGGVDQRVARIVDLKAPGSGESDRNLWANLSLLNSGDEIKFVLAHRADYEWARQVIVERRLADVCPLLFSPVAGELAASTLAEWILADRLPVRFQLQLHKVLWGNMRGK

SEQ ID NO: 27177 - protein, 224 aa, Acetitomaculum ruminis
  misc_feature (1)..(224): tr|A0A1I0YX15|A0A1I0YX15_9FIRM 7-carboxy-7-deazaguanine synthase OS=Acetitomaculum ruminis DSM 5522 OX=1120918 GN=queE PE=3 SV=1
MKVVEKFISINGEGERAGELAAFIRFWGCNLACTYCDTKWANETSCPYEDLSPKDIYDYILSCNVTNVTLTGGEPLLQKDMIKLLEILLKDKSLHIEIETNGAVSIEKVAKLRDELNAYDNLSFTMDYKLISSGFEDAMILENFDYLKPVDIVKFVCESTDLERAAFVIEKYKLTDKCIVYLSPVFGKIELEEMVEFMKKNCMNKVRLQIQMHKVIWEPDKKGV

SEQ ID NO: 27178 - protein, 211 aa, Acetobacter aceti
  misc_feature (1)..(211): tr|A0A0D6MZZ3|A0A0D6MZZ3_ACEAC 7-carboxy-7-deazaguanine synthase OS=Acetobacter aceti NBRC 14818 OX=887700 GN= queE PE=3 SV=1
MSYAVKELFHTLQGEGGQTGRPAVFCRFSGCNLWTGREVDREKAICRFCDTDFIGTDGEGGGRFADAAALAKAIVETWALPEHDQRFVVFTGGEPLLQLDKALIDAVHQEGFMIAVESNGTIAAPEGIDWLCISPKAGSEWVQKSGHELKLVYPQPELDPADMTALDFRQFWLQPMDGPDRVANTNAVVRYCLAHPRWRLSLQTHKLIGIP

SEQ ID NO: 27179 - protein, 211 aa, Acetobacter aceti
  misc_feature (1)..(211): tr|A0A1U9KJS9|A0A1U9KJS9_ACEAC 7-carboxy-7-deazaguanine synthase OS=Acetobacter aceti OX=435 GN=queE PE=3 SV=1
MSYSVKELFHTLQGEGGQAGRAAVFCRFSGCNLWTGREADREKATCRFCDTDFIGTDGDGGGRFADAASLARAIAETWALPEHAQRFVVFTGGEPLLQLDAALIEAVHLEGFMIAVESNGTIVAPDGIDWLCISPKAGSEWIQKSGHELKLVYPQPEFDPADMTALDFSQFWLQPMDGPDRIANTDAVVRYCLAHPRWRLSLQTHKLIGIP

SEQ ID NO: 27180 - protein, 216 aa, Acetobacter ascendens
  misc_feature (1)..(216): tr|A0A1D8QUS2|A0A1D8QUS2_9PROT 7-carboxy-7-deazaguanine synthase OS=Acetobacter ascendens OX=481146 GN=queE PE =3 SV=1
MTYSVKEIFLTLQGEGGQAGRAAVFCRFTGCNLWSGREEDRAKAICQFCDTDFIGTDGVNGGKFENAVELAATIASFWPQPTQDVKATGQKLVVFTGGEPLLQLDSALINAMHAQDFTIAVESNGTVIAPEGIDWLCISPKAGAELVQKAGTELKLVFPQSGIDPSTLENFDFQHFWLQPMDGPQQAANTQAAIEYCLEHPLWGLSLQTHKLIGIP

SEQ ID NO: 27181 - protein, 214 aa, Acetobacter cerevisiae
  misc_feature (1)..(214): tr|A0A149VBE2|A0A149VBE2_9PROT 7-carboxy-7-deazaguanine synthase OS=Acetobacter cerevisiae OX=178900 GN=queE P E=3 SV=1
MSYMVKEMFLTLQGEGGQAGRPAVFCRFAGCNLWSGREADRAEAICQFCDTDFVGTDGDGGGKFETAEKLAETIAGLWPVSGNAMTVPGLVVFTGGEPLLQLDAALIDAMHARNFTIAVESNGTLHAPEGIDWLCISPKEGAALAQTSGTELKLVYPQPGLDPATLEHLDFKHFWLQPMDGPNQNDNIQAAIRYCLAHPKWGLSLQTHKLTGIP

SEQ ID NO: 27182 - protein, 214 aa, Acetobacter cerevisiae
  misc_feature (1)..(214): tr|A0A149UZ28|A0A149UZ28_9PROT 7-carboxy-7-deazaguanine synthase OS=Acetobacter cerevisiae OX=178900 GN=queE P E=3 SV=1
MSYMVKEMFLTLQGEGGQAGRPAVFCRFAGCNLWSGREADRAEAICQFCDTDFVGTDGDGGGKFETAEKLAETIAGLWPESGSAMTVPGLVVFTGGEPLLQLDAALIDAMHARNFTIAVESNGTLHAPQGIDWLCISPKEGAALEQTSGTELKLVYPQPGLDPATVEHLDFKHFWLQPMDGPNQNDNIQAAIRYCLAHPKWGLSLQTHKLTGIP

SEQ ID NO: 27183 - protein, 211 aa, Acetobacter cibinongensis
  misc_feature (1)..(211): tr|A0A1Z5YS46|A0A1Z5YS46_9PROT 7-carboxy-7-deazaguanine synthase OS=Acetobacter cibinongensis OX=146475 GN=que E PE=3 SV=1
MTYSVKEVFLTLQGEGGQAGRAAIFCRFTGCNLWSGREADRATAICQFCDTDFIGTDGDGGGKFPTADNLAAHINALWPHSDIDHKLVVFTGGEPLLQLDDTLIQAMHQAGFKIAVESNGTVQAPEGIDWLCISPKAGGELVQTQGTELKLVYPQSGIDPASLETLDFQQFWLQPMDGPNQADNLQAAIRYCLKHPKWGLSLQTHKLTGIP

SEQ ID NO: 27184 - protein, 211 aa, Acetobacter cibinongensis
  misc_feature (1)..(211): tr|A0A0D6N6S1|A0A0D6N6S1_9PROT 7-carboxy-7-deazaguanine synthase OS=Acetobacter cibinongensis 4H-1 OX=1231339 GN=queE PE=3 SV=1
MTYSVKEVFLTLQGEGGQAGRAAIFCRFTGCNLWSGREADRATAICQFCDTDFIGTDGDGGGKFPTADDLAAHINALWPQSDIDHKLVVFTGGEPLLQLDDTLIQAMHQAGFKIAVESNGTVQAPEGIDWLCISPKAGGELVQTQGTELKLVYPQSGIDPASLETLDFQQFWLQPMDGPNQADNLQAAIRYCLKHPKWGLSLQTHKLTGIP

SEQ ID NO: 27185 - protein, 212 aa, Acetobacter fabarum
  misc_feature (1)..(212): tr|A0A269Y0Z3|A0A269Y0Z3_9PROT 7-carboxy-7-deazaguanine synthase OS=Acetobacter fabarum OX=483199 GN=queE PE=3 SV=1
MVYSVKEIFLTLQGEGGQAGRVAVFCRFTGCNLWSGREEDRAQAVCQFCDTDFIGTNGTGGGRFHNAAELATRIAGFWPASASPGRPLVVFTGGEPLLQLDAPLIAAMHDKGFAIAVESNGTVLAPEGIDWLCISPKACAQLVQTSGAELKLVYPQPGLDPADLAGLDFTNFWLQPMDGPEQAANTQAAIAYCLQNPRWALSLQTHKLTGIP

SEQ ID NO: 27186 - protein, 214 aa, Acetobacter ghanensis
  misc_feature (1)..(214): tr|A0A0U5F7U9|A0A0U5F7U9_9PROT 7-carboxy-7-deazaguanine synthase OS=Acetobacter ghanensis OX=431306 GN=queE PE =3 SV=1
MVYSVKEIFLTLQGEGGQAGRVAVFCRFTGCNLWSGREEDRQEAICQFCDTDFVGTDGSNGGRFQTAADLADCIANFWPAQAPATPQRRLIVFTGGEPLLQLDAPLIDAMHARGFSIAVESNGTIAAPQGIDWLCISPKAGAPLVQTSGTELKLVYPQEGLNPADVAGLDFTHFWLQPKDGPDQAANTQAAIAYCLQTPQWALSLQTHKLTGIP

SEQ ID NO: 27187 - protein, 214 aa, Acetobacter indonesiensis
  misc_feature (1)..(214): tr|A0A252AV34|A0A252AV34_9PROT 7-carboxy-7-deazaguanine synthase OS=Acetobacter indonesiensis OX=104101 GN=que E PE=3 SV=1
MTYSVKEIFLTLQGEGGQAGRAAVFCRFTGCNLWTGREEDRAKAVCQFCDTDFIGTDGDGGGKFETADTLADAILSQWPENPLTSSTPGLVVFTGGEPLLQLDATLIDAMHKRGFSIAVESNGTVVAPAGIDWLCISPKAGSTLEQTSGTELKLVFPQPGLDPASLSKLDFKHFWLQPMDGPNQSTNIQAAIAYCMTHPQWGLSLQTHKLTGIP

SEQ ID NO: 27188 - protein, 214 aa, Acetobacter indonesiensis; identical to SEQ ID NO: 27187
  misc_feature (1)..(214): tr|A0A0D6NCY4|A0A0D6NCY4_9PROT 7-carboxy-7-deazaguanine synthase OS=Acetobacter indonesiensis 5H-1 OX=1231340 GN=queE PE=3 SV=1

SEQ ID NO: 27189 - protein, 214 aa, Acetobacter malorum
  misc_feature (1)..(214): tr|A0A1Y3G480|A0A1Y3G480_9PROT 7-carboxy-7-deazaguanine synthase OS=Acetobacter malorum OX=178901 GN=queE PE=3 SV=1
MSYMVKEMFLTLQGEGGQAGRPAVFCRFAGCNLWSGREADRAEAICQFCDTDFVGTDGDGGGKFETAERLAETIARFWPESGAAMTVPGLVVFTGGEPLLQLDAALIDAMHARNFTIAVESNGTLRAPEGIDWLCISPKAGAALEQTSGTELKLVYPQPGLDPATVEHLDFRHFWLQPMDGPNQNDNIQAAIRYCLAHPKWGLSLQTHKLTGIP

SEQ ID NO: 27190 - protein, 214 aa, Acetobacter malorum
  misc_feature (1)..(214): tr|A0A149UHJ7|A0A149UHJ7_9PROT 7-carboxy-7-deazaguanine synthase OS=Acetobacter malorum OX=178901 GN=queE PE=3 SV=1
MSYMVKEMFLTLQGEGGQAGRPAVFCRFAGCNLWSGREADRAEAICQFCDTDFVGTDGDGGGKFETAEKLAETIAGFWPVSGNAMTVPGLVVFTGGEPLLQLDAALIDAMHARNFTIAVESNGTLHAPEGIDWLCISPKEGAALEQTSGTELKMVYPQPGLDPATVEHLDFKHFWLQPMDGPNQNDNIQAAIRYCLAHPKWGLSLQTHKLTGIP

SEQ ID NO: 27191 - protein, 211 aa, Acetobacter nitrogenifigens
  misc_feature (1)..(211): tr|A0A511X7N3|A0A511X7N3_9PROT 7-carboxy-7-deazaguanine synthase OS=Acetobacter nitrogenifigens DSM 23921 = LM G 23498 OX=1120919 GN=queE PE=3 SV=1
MTYAVKELFHTLQGEGGQTGRSAVFCRFAGCNLWTGREADRATAVCQFCDTDFIGTDGDGGGKFESAASLATAIAAAWPAPGQDRRFVVFTGGEPLLQLDEALIDAVHAEGFTIAVESNGTLTAPAGIDWLCVSPKAGSTLVQKSGQELKLVYPQAGFDPADFLKLDFEQFWLQPMDGPQQAANIAAATRYCLENPRWRLSLQTHKMIGIP

SEQ ID NO: 27192 - protein, 207 aa, Acetobacter oeni
  misc_feature (1)..(207): tr|A0A511XLS1|A0A511XLS1_9PROT 7-carboxy-7-deazaguanine synthase OS=Acetobacter oeni OX=304077 GN=queE PE=3 SV =1
MKELFHTLQGEGGQTGRAAVFCRFAGCNLWTGREADREKATCQFCDTDFIGTDGPGGGRFDNAKALAEAIAATWPAPGRDRRFVVFTGGEPLLQLDTPLIDAVHEQDFTIAVESNGTIAAPSGIDWLCISPKAGSTLLQKSGQELKLVYPQTTFDPQDFLALDFEQFWLQPMDGPDQKTNTDAATQYCLEHPRWRLSLQTHKLIGIP

SEQ ID NO: 27193 - protein, 214 aa, Acetobacter okinawensis
  misc_feature (1)..(214): tr|A0A252BX35|A0A252BX35_9PROT 7-carboxy-7-deazaguanine synthase OS=Acetobacter okinawensis OX=1076594 GN=queE PE=3 SV=1
MVYSVKEIFLTLQGEGGQAGRVAVFCRFTGCNLWSGREEDRAQATCQFCDTDFIGTNGTGGGRFNTAAALADRIAGFWPASAPPTPARRLVVFTGGEPLLQLDTALIAAMHDRGFSIAVESNGTVLAPPGIDWLCISPKAGAPLVQTSGTELKLVYPQSGLNPADVAGLDFAQFWLQPMDGPAQAANTQAAIAYCLQTPQWALSLQTHKLTGIP

SEQ ID NO: 27194 - protein, 211 aa, Acetobacter orientalis
  misc_feature (1)..(211): tr|A0A252B4Q1|A0A252B4Q1_9PROT 7-carboxy-7-deazaguanine synthase OS=Acetobacter orientalis OX=146474 GN=queE P E=3 SV=1
MTYSVKEIFLTLQGEGGQAGRAAVFCRFTGCNLWTGREEDRAKALCQFCDTDFIGTDGEGGGKFETATALAATIAAQWPASDANNKLVVFTGGEPLLQLDDALIDAMHHNGFSIAVESNGTIVAPAGIDWLCISPKAGTDFVQQRGMELKLVFPQTGLDPASLEHLDFKKFWLQPMDGPEQEDNIQAAIRYCLQHPQWGLSLQTHKLTGIP

SEQ ID NO: 27195 - protein, 211 aa, Acetobacter orientalis
  misc_feature (1)..(211): tr|A0A0D6NMR5|A0A0D6NMR5_9PROT 7-carboxy-7-deazaguanine synthase OS=Acetobacter orientalis 21F-2 OX=1231341 GN =queE PE=3 SV=1
MTYSVKEIFLTLQGEGGQAGRAAVFCRFTGCNLWTGREEDRAKALCQFCDTDFIGTDGEGGGKFETATALAATIAAQWPASDANNKLVVFTGGEPLLQLDDALIDAMHHNGFSIAVESNGTVIAPVGIDWLCISPKAGTDFVQQRGMELKLVFPQNGLDPASLEHLDFKKFWLQPMDGPEQEDNIQAAIRYCLQHPQWGLSLQTHKLTGIP

SEQ ID NO: 27196 - protein, 214 aa, Acetobacter orleanensis
  misc_feature (1)..(214): tr|A0A4Y3TIQ8|A0A4Y3TIQ8_9PROT 7-carboxy-7-deazaguanine synthase OS=Acetobacter orleanensis OX=104099 GN=queE PE=3 SV=1
MSYMVKEMFLTLQGEGGQAGRPAVFCRFAGCNLWSGREADRAEAICQFCDTDFIGTDGEGGGKFETAEKLADTIARFWPETGKAMTVPGLVVFTGGEPLLQLDAPLIEAMHARNFTIAVESNGTLPAPDGVDWLCISPKAGAPLEQTSGMELKLVYPQPGLDPATLEQLNFKHFWLQPMDGPNQHENTQAAIRYCLTHPKWGLSLQTHKLTGIP

SEQ ID NO: 27197 - protein, 216 aa, Acetobacter pasteurianus
  misc_feature (1)..(216): tr|A0A1Y0XYR9|A0A1Y0XYR9_ACEPA 7-carboxy-7-deazaguanine synthase OS=Acetobacter pasteurianus subsp. pasteurian us OX=481145 GN=queE PE=3 SV=1
MTYSVKEIFLTLQGEGGQAGRAAVFCRFTGCNLWSGREEDRAKAICQFCDTDFIGTDGVNGGKFENAAELAATIASFWPQPTQDTKATGQKLVVFTGGEPLLQLDAALIDAMHAQGFSIAVESNGTVTAPAGIDWLCISPKAGAELVQKTGTELKFVFPQPDIDPAALENLDFQHFWLQPMDGPQQAANTQAAIEYCLAHPLWGLSLQTHKLIGIP

SEQ ID NO: 27198 - protein, 216 aa, Acetobacter pasteurianus
  misc_feature (1)..(216): tr|A0A1A0DDT9|A0A1A0DDT9_ACEPA 7-carboxy-7-deazaguanine synthase OS=Acetobacter pasteurianus OX=438 GN=queE PE =3 SV=1
MTYSVKEIFLTLQGEGGQAGRAAVFCRFTGCNLWSGREEDRAKAICQFCDTDFIGTDGVNGGKFENAAALAATIASFWPQPTEDTKATGQKLVVFTGGEPLLQLDTALIDAMHAQGFSIAVESNGTVMAPKGIDWLCISPKAGAELVQKAGTELKLVFPQPGIDPAALENLDFQHFWLQPMDGPQQAANTQAAIEYCLAHPLWGLSLQTHKLIGIP

SEQ ID NO: 27199 - protein, 213 aa, Acetobacter peroxydans
  misc_feature (1)..(213): tr|A0A4Y3TRX8|A0A4Y3TRX8_9PROT 7-carboxy-7-deazaguanine synthase OS=Acetobacter peroxydans OX=104098 GN=queE P E=3 SV=1
MSYTVKEIFLTLQGEGGQAGRVAVFCRFTGCNLWSGREQDRESAQCRFCDTDFVGTDGVNGGRFETAAELAGKIDSFWPAPSEDNGRKLVVFTGGEPLLQLDTPLIEAMHVLDFDIAVESNGTVSAPAGIDWLCISPKAGAPLRQTQGTELKLVYPQPGLNPADLAQLDFRLFWLQPMDGAHQAENLKAAIGYCLEHPQWGLSLQTHKLTGIP

SEQ ID NO: 27200 - protein, 214 aa, Acetobacter persici
  misc_feature (1)..(214): tr|A0A252APB1|A0A252APB1_9PROT 7-carboxy-7-deazaguanine synthase OS=Acetobacter persici OX=1076596 GN=queE PE= 3 SV=1
MSYMVKEMFLTLQGEGGQAGRPAVFCRFAGCNLWSGREADRAEAICQFCDTDFIGTDGEGGGKFETAEKLAETIASFWPESGQAMTVPGLVVFTGGEPLLQLDAPLIKAMHARNFFIAVESNGTLTAPEGVDWLCISPKAGAPLEQKSGMELKLVYPQTGLDPATLEQLDFQYFWLQPMDGPNQQENTQAAIRYCLAHPKWGLSLQTHKLTGIP

SEQ ID NO: 27201 - protein, 216 aa, Acetobacter pomorum
  misc_feature (1)..(216): tr|A0A2G4RAN7|A0A2G4RAN7_9PROT 7-carboxy-7-deazaguanine synthase OS=Acetobacter pomorum OX=65959 GN=queE PE=3 SV=1
MTYSVKEIFLTLQGEGGQAGRAAVFCRFTGCNLWSGREEDRAKAICQFCDTDFIGTDGINGGKFENAAELANTIAGFWPHPTQDTKANGQKLVVFTGGEPLLQLDSALIDAMHARGFTIAVESNGTILAPEGIDWLCISPKAGAELVQKTGTELKLVFPQPGIDPAALENLDFQHFWLQPMDGPHQAANTQTAIEYCLEHPLWGLSLQTHKLIGIP

SEQ ID NO: 27202 - protein, 216 aa, Acetobacter pomorum
  misc_feature (1)..(216): tr|A0A346DUT2|A0A346DUT2_9PROT 7-carboxy-7-deazaguanine synthase OS=Acetobacter pomorum OX=65959 GN=queE PE=3 SV=1
MTYSVKEIFLTLQGEGGQAGRAAVFCRFAGCNLWSGREEDRATATCQFCDTDFIGTDGINGGKFENAADLAATIASFWPQPTQDVKATGQKLVVFTGGEPLLQLDTALINAMHAQGFTIAVESNGTIAAPKGIDWLCISPKAGSELVQKAGTELKLVFPQPGIDPASVENLDFQHFWLQPMDGPQQAANTQAAIEYCLEHPLWGLSLQTHKLIGIP

SEQ ID NO: 27203 - protein, 214 aa, Acetobacter senegalensis
  misc_feature (1)..(214): tr|A0A252EKB4|A0A252EKB4_9PROT 7-carboxy-7-deazaguanine synthase OS=Acetobacter senegalensis OX=446692 GN=queE PE=3 SV=1
MTYSVKEMFLTLQGEGGQAGRAAVFCRFTGCNLWTGREEDRAKATCQFCDTDFIGTDGSGGGKFENADALADAIASLWPDKPVSRSVPGLVVFTGGEPLLQLDTSLIDAMHQWGFKIAVESNGTVAAPDGIDWLCISPKAGAPLEQRHGTELKLVFPQSGLDPTTLENLDFSHFWLQPMDGPEQSANIQAAIRYCMAHPKWGLSLQTHKLTGIP

SEQ ID NO: 27204 - protein, 214 aa, Acetobacter senegalensis
  misc_feature (1)..(214): tr|A0A0U5EYW5|A0A0U5EYW5_9PROT 7-carboxy-7-deazaguanine synthase OS=Acetobacter senegalensis OX=446692 GN=queE PE=3 SV=1
MTYSVKEMFLTLQGEGGQAGRAAVFCRFTGCNLWTGREEDRAKATCQFCDTDFIGTDGSGGGKFENADALADAIASLWPDKPVSRSVPGLVVFTGGEPLLQLDTPLIDAMHQRGFKIAVESNGTVAAPDGIDWLCISPKAGAPLEQQHGTELKLVFPQSGLDPATLENLDFSHFWLQPMDGPEQSANIQAAIRYCMAHPKWGLSLQTHKLTGIP

SEQ ID NO: 27205 - protein, 216 aa, Acetobacter sp.
  misc_feature (1)..(216): tr|A0A368AGJ5|A0A368AGJ5_9PROT 7-carboxy-7-deazaguanine synthase OS=Acetobacter sp. BCRC 14118 OX=1868878 GN=q ueE PE=3 SV=1
MTYSVKEIFLTLQGEGGQAGRAAVFCRFTGCNLWSGREEDRAKAICQFCDTDFIGTDGVNGGKFENAVELAATIASFWPQPTQDVKATGQKLVVFTGGEPLLQLDSALINAMHAQDFTIAVESNGTVIAPEGIDWLCISPKAGAELVQKAGTELKLVFPQSGIDPSTLENLDFQHFWLQPMDGPQQAANTQAAIEYCLEHPLWGLSLQTHKLIGIP

SEQ ID NO: 27206 - protein, 214 aa, Acetobacter sp.
  misc_feature (1)..(214): tr|A0A5C1YSX1|A0A5C1YSX1_9PROT 7-carboxy-7-deazaguanine synthase OS=Acetobacter sp. KACC 21233 OX=2592655 GN=q ueE PE=3 SV=1
MSYAVKEMFLTLQGEGGQAGRVAVFCRFAGCNLWSGREEDRQSATCRFCDTDFVGTNGIDGGRFETADALADAVSRFWPNSPPQPHEEPLVVFTGGEPLLQLDPPLIEAMHDRGFSIAVESNGTLPAPPGIDWLCISPKAGASLQQTQGMELKLVFPQPDLDPADLTGLDFHHFWLQPMDGPDQQANVQAAIAYCLSHPQWGLSLQTHKLTGIP

SEQ ID NO: 27207 - protein, 214 aa, Acetobacter syzygii
  misc_feature (1)..(214): tr|A0A270BTJ9|A0A270BTJ9_9PROT 7-carboxy-7-deazaguanine synthase OS=Acetobacter syzygii OX=146476 GN=queE PE=3 SV=1
MVYSVKEIFITLQGEGGQAGHVAVFCRFTGCNLWSGREEDRAQAQCQFCDTDFIGTDGTNGGRFHTAAELADRIAGFWPEQPANSPARRLVVFTGGEPLLQLDAPLIAAMHERDFFIAVESNGTLSAPAGIDWLCISPKAGTPLVQTSGTELKLVYPQAELDPADVAGLDFAHFWLQPMDGPEQAANTQAAIAYCLQNPQWALSLQTHKLTGIP

SEQ ID NO: 27208 - protein, 214 aa, Acetobacter tropicalis
  misc_feature (1)..(214): tr|A0A511FJT6|A0A511FJT6_9PROT 7-carboxy-7-deazaguanine synthase OS=Acetobacter tropicalis OX=104102 GN=queE P E=3 SV=1
MTYSVKEMFLTLQGEGGQAGRAAVFCRFTGCNLWTGREEDRSKAICQFCDTDFIGTDGEGGGKFEHADALADAISSLWPDKPASAAIPGLVVFTGGEPLLQLDSALINAMHQRGFNIAVESNGTVEAPAGIDWLCISPKAGAQLEQKRGTELKLVFPQPGLDPALLESLDFKYFWLQPMDGPDQNANIQAAIRYCMAHPKWGLSLQTHKLTGIP

SEQ ID NO: 27209 - protein, 214 aa, Acetobacter tropicalis
  misc_feature (1)..(214): tr|A0A095AX61|A0A095AX61_9PROT 7-carboxy-7-deazaguanine synthase OS=Acetobacter tropicalis OX=104102 GN=queE P E=3 SV=1
MTYSVKEMFLTLQGEGGQAGRAAVFCRFTGCNLWTGREEDRSKAICQFCDTDFIGTDGEGGGKFEHADALADAISSLWPDKPASAAIPGLVVFTGGEPLLQLDSALINAMHQRGFNIAVESNGTVKAPAGIDWLCISPKAGALLEQKRGTELKLVFPQPGLDPALLESLDFKYFWLQPMDGPDQNANIQAAIRYCMAHPKWGLSLQTHKLTGIP

SEQ ID NO: 27210 - protein, 216 aa, Acetobacteraceae bacterium
  misc_feature (1)..(216): tr|A0A4P7W9H9|A0A4P7W9H9_9PROT 7-carboxy-7-deazaguanine synthase OS=Acetobacteraceae bacterium OX=1909293 GN=q ueE PE=3 SV=1
MTYSIKEIFLSLQGEGIQSGKISLFCRFSGCNLWNGLEKDREKSICKFCDTDFIGTNGAYGGKYASPENLAETIADIWEKETKSSAEKHVIFTGGEPLLQLDAPLLSALKDHGFKISLETNGSLMPSKDVLTLLDWICVSPKEEKLALTAGDELKFIYPQTHLTPESFQHLKFKHFILQPMDNENKKENTKQALNYCLTHPNWRLGLQLHKILDIE

SEQ ID NO: 27211 - protein, 210 aa, Acetobacteraceae bacterium
  misc_feature (1)..(210): tr|A0A327MG37|A0A327MG37_9PROT 7-carboxy-7-deazaguanine synthase OS=Acetobacteraceae bacterium DB1506 OX=22308 85 GN=queE PE=3 SV=1
MSYAVKEIFPTLQGEGGQAGRAAVFCRFAGCNLWSGREEDRAAAVCRFCDTAFVGLDGEGGGRFADAAALAAAILAAWRGGAEGRHVVFTGGEPLLQLDAPLIAAMHAAGFAISVESNGTLEPPPGIDWLCVSPKAGAPLRATRGEELKLVYPQPGLMPEAVAHLDFRHFFLQPMDGPDRAAHTAAAVAYCLRHPRWRLSLQTHKLIGIP

SEQ ID NO: 27212 - protein, 228 aa, Acetobacteroides hydrogenigenes
  misc_feature (1)..(228): tr|A0A4R2EP31|A0A4R2EP31_9BACT 7-carboxy-7-deazaguanine synthase OS=Acetobacteroides hydrogenigenes OX=979970 GN=queE PE=3 SV=1
MSQASSGTLPIYEAFYAFQGEGSHIGRAAFFIRTIGCPVRCSWCDSPGTWHKDHQPESIQRLTVDELVGRVQESGAPLAVITGGEPTIYDLAPLTQALQQAGIRTHLETCGAFDIRGSFDWITVSPKWNLPPLRQNIQKAHEIKIVVDGPTAIEDWWEQIGSHCTTNDFRMGAPDIWLQPEANQVGTAIHDAITNAVKSYPTRYRAGVQLHKIYSCDALDPNSMPVVG

SEQ ID NO: 27213 - protein, 240 aa, Acetohalobium arabaticum
  misc_feature (1)..(240): tr|D9QQX8|D9QQX8_ACEAZ 7-carboxy-7-deazaguanine synthas e OS=Acetohalobium arabaticum (strain ATCC 49924 / DSM 5501 / Z-7288) OX=574087 GN=queE PE=3 SV=1
MEMEGVKLPVVEIFNSISGEGISAGEIVTFVRVAGCNLRCDYCDTMYSYQDEEYELLTPQQIVNRINNFGTQQVICTGGEPLEEDKPKRYLPLYLAKQGFEVRIETNGSWSVYNQQELQKFGLDGEGINYTLDIKCPSSNMAEYNLFTNLEQLGLNDEIKFVVQDKSDIDYALKVIDDYKNELSKQEIVINFSPVFEELAPKKLVSILQEHQTYFAQFNLKVRLSIQLHKLIWDPEVTGV

SEQ ID NO: 27214 - protein, 198 aa, Acetonema longum
  misc_feature (1)..(198): tr|F7NNG7|F7NNG7_9FIRM 7-carboxy-7-deazaguanine synthas e OS=Acetonema longum DSM 6540 OX=1009370 GN=queE PE=3 SV=1
MELITYPFVETFAGIQGEGTFMGMGATFIRLAGCNLRCAWCDTTHSFDVDRARRLTVNELLQECSLTQPLVVITGGEPTLYNLQPLVTAIHKLDKRVAIETNGTNPIPAEWDIDWVTASPKPGSNYAINCRPNELKYVVDDRLSVTDIAADRVPPGHVYLQIESCRPESARKAYKMVVEYPELKLRVGIQLHKILGVE

SEQ ID NO: 27215 - protein, 213 aa, Achromatium sp.
  misc_feature (1)..(213): tr|A0A0M1JJC5|A0A0M1JJC5_9GAMM 7-carboxy-7-deazaguanine synthase OS=Achromatium sp. WMS3 OX=1604836 GN=queE PE =3 SV=1
MSYLRISEIFLSLQGETRTVGIPTIFIRLTGCPLRCQYCDTNYAFTGGTVISIKAIIAQVANYKVPYVTVTGGEPLAQPACLELLTNLCDQNYTVSLETNGAMDISMVDIRVSKVMDLKTPGSGVVNQNCYSNIELLTSNDQIKFVICNRQDYEWSKIKLQTYQLAKSCEVLFSPVAEILPASDLANWILRDQLPVRLQIQLHKLLWGNRPGC

SEQ ID NO: 27216 - protein, 270 aa, Achromobacter agilis
  misc_feature (1)..(270): tr|A0A446CIJ2|A0A446CIJ2_9BURK 7-carboxy-7-deazaguanine synthase OS=Achromobacter agilis OX=1353888 GN=queE_2 PE=4 SV=1
MNAASSSNAAPEGAQSGPACGPGAGPAARRLAARPAYPAPPQPVVQPLPRHAHAVGGLVPFSTVDWPGQLAAVVFISGCPWRCHYCHNTELQTRAARYDWREMRAFLETRKGLLDAVVFSGGEPLSEPRLPQMIRDVRRMGYRVGLHTAGIYPLRLADIMRHLDWVGLDIKADSQGYDDITGRRDSERPAQACLAQLLSAGRDFECRITWHPDWLDETRLLALARELARRGVRRFAVQGARRSPDSPPVRNLSAQAEALMRQWFQEFDYR

SEQ ID NO: 27217 - protein, 210 aa, Achromobacter agilis
  misc_feature (1)..(210): tr|A0A446CH03|A0A446CH03_9BURK 7-carboxy-7-deazaguanine synthase OS=Achromobacter agilis OX=1353888 GN=queE_1 PE=3 SV=1
MTYSAKEIFKTLQGEGAHAGRAAVFCRFAGCNLWTGRESDRASAACTFCDTDFVGTDGEGGGKFATPELLADTIAACWGPGTEDRYVVFTGGEPLLQLDALLLMAIHARGFTVAIETNGTIKPPAGIDWICVSPKGTAPVVLERGDELKLVYPQANALPEAFAHLDFDHFFLQPMDGPARAANTEQAVQYCMQHPQWRLSLQTHKYIGIP

SEQ ID NO: 27218 - protein, 210 aa, Achromobacter aloeverae
  misc_feature (1)..(210): tr|A0A4Q1HLL5|A0A4Q1HLL5_9BURK 7-carboxy-7-deazaguanine synthase OS=Achromobacter aloeverae OX=1750518 GN=queE PE=3 SV=1
MTYAAKEIFKTLQGEGAQAGRAAVFCRFAGCNLWSGRESDRASAACTFCDTDFVGTDGPGGGKFATPQALAATLAATWGPNRDRRYVVFTGGEPLLQLDAALLEAVHAEGFEVAIETNGTLLPPPGIDWICVSPKGTAPVALRSGNELKLVYPQLDAPPEAFAGLDFEHFFLQPMDGPQRAAHTERAVRYCTQHPQWRLSLQTHKYIGIP

SEQ ID NO: 27219 - protein, 210 aa, Achromobacter arsenitoxydans
  misc_feature (1)..(210): tr|H0F6C5|H0F6C5_9BURK 7-carboxy-7-deazaguanine synthas e OS=Achromobacter arsenitoxydans SY8 OX=477184 GN=queE PE=3 SV=1
MTYSAKEIFKTLQGEGAHAGRAAVFCRFAGCNLWTGRESDRASAACTFCDTDFIGTDGDGGGKFASAELLADAIAAAWGPGLENRYVVFTGGEPLLQLDAPLLAAIHARGFTVAIETNGTIKPPAGIDWICVSPKGTAPVVIERGNELKLVYPQLNALPETFAGLDFEHFFLQPMDGPARAANTEQAVQYCMQHPQWRLSLQTHKYIGIP

SEQ ID NO: 27220 - protein, 210 aa, Achromobacter denitrificans
  misc_feature (1)..(210): tr|A0A427WHX6|A0A427WHX6_ACHDE 7-carboxy-7-deazaguanine synthase OS=Achromobacter denitrificans OX=32002 GN=qu eE PE=3 SV=1
MTYSAKEIFKTLQGEGAHAGRAAVFCRFAGCNLWTGRESDRASAACTFCDTDFVGTDGEGGGKFATPELLADAIAACWGPGADDRYVVFTGGEPLLQLDAPLLTAIHARGFTVAIETNGTIKPPAGIDWICVSPKGTAPVVLERGDELKLVYPQANALPEAFAHLDFDHFFLQPMDGPARAANTEQAVQYCMQHPQWRLSLQTHKYIGIP

SEQ ID NO: 27221 - protein, 210 aa, Achromobacter insolitus
  misc_feature (1)..(210): tr|A0A167CMQ2|A0A167CMQ2_9BURK 7-carboxy-7-deazaguanine synthase OS=Achromobacter insolitus OX=217204 GN=queE PE=3 SV=1
MTYSAKEIFKTLQGEGAHAGRAAVFCRFAGCNLWTGRESDRASAACTFCDTDFVGTDGEGGGKFATPDLLADAIAAAWGPGTDDRYVVFTGGEPLLQLDAPLLTAVHARGFTIAIETNGTIKPPAGIDWICVSPKGTAPVILERGDELKLVYPQANARPEAFAHLDFDHFFLQPMDGPARAANTEQAVQYCMQHPQWRLSLQTHKYIGIP

SEQ ID NO: 27222 - protein, 210 aa, Achromobacter insuavis
  misc_feature (1)..(210): tr|F7T6R6|F7T6R6_9BURK 7-carboxy-7-deazaguanine synthas e OS=Achromobacter insuavis AXX-A OX=1003200 GN=queE PE =3 SV=1
MTYTAKEIFKTLQGEGAHAGRAAVFCRFAGCNLWTGRESDRASAACTFCDTDFIGTDGDGGGKFATPELLADAIEAAWGPDTANRYIVFTGGEPLLQLDAPLLAVVHARGFTVAIETNGTVQPPPGIDWICVSPKGTAPVVIERGNELKLVYPQANALPPRFEHLDFEHFFLQPMDGPARLANTEQAVQYCMQHPQWRLSLQTHKYIGIP

SEQ ID NO: 27223 - protein, 210 aa, Achromobacter marplatensis
  misc_feature (1)..(210): tr|J4YLM1|J4YLM1_9BURK 7-carboxy-7-deazaguanine synthas e OS=Achromobacter marplatensis OX=470868 GN=queE PE=3 SV=1
MTYSAKEIFKTLQGEGAHAGRAAVFCRFAGCNLWTGRESDRASAACTFCDTDFIGTDGEGGGKFATADLLADAIAASWGAGTEDRYVVFTGGEPLLQLDAALLTAIHARGFTVAIETNGTVKPPAGIDWICVSPKGTAPIVIERGDELKLVYPQSNALPETFAHLDFEHFFLQPMDGPARVANTEQAVQYCMQHPQWRLSLQTHKYIGIP

SEQ ID NO: 27224 - protein, 210 aa, Achromobacter piechaudii
  misc_feature (1)..(210): tr|D4XE25|D4XE25_9BURK 7-carboxy-7-deazaguanine synthas e OS=Achromobacter piechaudii ATCC 43553 OX=742159 GN=q ueE PE=3 SV=1
MTYTAKEIFKTLQGEGAHAGRAAVFCRFAGCNLWTGRESDRASAACTFCDTDFIGTDGEGGGKFATPDLLADTIAATWGPDTQDRYVVFTGGEPLLQLDAPLLTAIHARGFTVAIETNGTVKAPAGIDWICVSPKGTAPIVIDRGDELKLVYPQHNALPETFAHLDFEHFFLQPMDGPARVANTEQAVQYCMQHPQWRLSLQTHKYIGIP

SEQ ID NO: 27225 - protein, 210 aa, Achromobacter piechaudii
  misc_feature (1)..(210): tr|A0A0L6I586|A0A0L6I586_9BURK 7-carboxy-7-deazaguanine synthase OS=Achromobacter piechaudii OX=72556 GN=queE PE=3 SV=1
MTYTAKEIFKTLQGEGAHAGRAAVFCRFAGCNLWTGRESDRASAACTFCDTDFIGTDGEGGGKFATPDLLADTIAATWGPGTQDRYVVFTGGEPLLQLDAPLLTAIHARGFTVAIETNGTVKAPAGIDWICVSPKGTAPIVIDRGDELKLVYPQHNALPETFAHLDFEHFFLQPMDGPARVANTEQAVQYCMQHPQWRLSLQTHKYIGIP

SEQ ID NO: 27226 - protein, 210 aa, Achromobacter pulmonis
  misc_feature (1)..(210): tr|A0A2N8KA53|A0A2N8KA53_9BURK 7-carboxy-7-deazaguanine synthase OS=Achromobacter pulmonis OX=1389932 GN=queE PE=3 SV=1
MTYSAKEIFKTLQGEGAHAGRAAVFCRFAGCNLWSGRESDRASAACTFCDTDFVGTDGEGGGKFATAELLADTIAACWGPGAEDRYVVFTGGEPLLQLDAALLTAVHARGFTVAIETNGTIKPPAGIDWICVSPKGTAPVVLERGDELKLVYPQANALPEAFAHLDFDHFFLQPMDGPARAANTRQAVQYCMQHPQWRLSLQTHKYIGIP

SEQ ID NO: 27227 - protein, 210 aa, Achromobacter ruhlandii
  misc_feature (1)..(210): tr|A0A1D8IAB5|A0A1D8IAB5_9BURK 7-carboxy-7-deazaguanine synthase OS=Achromobacter ruhlandii OX=72557 GN=queE P E=3 SV=1
MTYTAKEIFKTLQGEGAHAGRAAVFCRFAGCNLWSGRESDRASAACTFCDTDFIGTDGDGGGKFATPELLADAIEAAWGPDTANRYIVFTGGEPLLQLDEALLAVVHARGFTVAIETNGTVQPPPGIDWICVSPKGTAPVVIERGNELKLVYPQANALPPRFEHLDFDHFFLQPMDGPARLANTEQAVQYCMQHPQWRLSLQTHKYIGIP

SEQ ID NO: 27228 - protein, 210 aa, Achromobacter sp.
  misc_feature (1)..(210): tr|A0A226Y0Q6|A0A226Y0Q6_9BURK 7-carboxy-7-deazaguanine synthase OS=Achromobacter sp. KAs 3-5 OX=1915388 GN=qu eE PE=3 SV=1
MTYSAKEIFKTLQGEGAHAGRAAVFCRFAGCNLWSGRESDRASAACTFCDTDFIGTDGDGGGKFATADLLADAIAAAWGPGADNRYVVFTGGEPLLQLDTPLLDAIHARGFTVAIETNGTIKPPAGVDWICVSPKGTAPVVVERGNELKLVYPQLNALPDAFAHLDFEHFFLQPMDGPARAANTEQAVQYCMQHPQWRLSLQTHKYIGIP

SEQ ID NO: 27229 - protein, 210 aa, Achromobacter sp.
  misc_feature (1)..(210): tr|A0A0Q8BU69|A0A0Q8BU69_9BURK 7-carboxy-7-deazaguanine synthase OS=Achromobacter sp. Root565 OX=1736564 GN=qu eE PE=3 SV=1
MTYSAKEIFKTLQGEGAHAGRAAVFCRFSGCNLWTGRESDRASAACTFCDTDFIGTDGDGGGKFASAERLADAIAAAWGPDAGNRYVVFTGGEPLLQLDAPLLDAIHARGFTVAIETNGTIKPPAGIDWICVSPKGTAPVVIERGNELKLVYPQLNALPDAFAHLDFEHFFLQPMDGPARAANTEQAVQYCMQHPQWRLSLQTHKYIGIP

SEQ ID NO: 27230 - protein, 210 aa, Achromobacter spanius
  misc_feature (1)..(210): tr|A0A2S0I763|A0A2S0I763_9BURK 7-carboxy-7-deazaguanine synthase OS=Achromobacter spanius OX=217203 GN=queE PE =3 SV=1
MTYSAKEIFKTLQGEGAHAGRAAVFCRFAGCNLWTGRESDRASAACTFCDTDFIGTDGDGGGKFATAERLADAIAAAWGPDAGNRYVVFTGGEPLLQLDAPLLDAIHARGFTVAIETNGTIKPPAGIDWICVSPKGTAPVVIERGNELKLVYPQLNALPDAFAHLDFEHFFLQPMDGPARAANTEQAVQYCMQHPQWRLSLQTHKYIGIP

SEQ ID NO: 27231 - protein, 210 aa, Achromobacter spanius
  misc_feature (1)..(210): tr|A0A448CDJ5|A0A448CDJ5_9BURK 7-carboxy-7-deazaguanine synthase OS=Achromobacter spanius OX=217203 GN=queE PE =3 SV=1
MTYSAKEIFKTLQGEGAHAGRAAVFCRFAGCNLWTGRESDRASAACTFCDTDFIGTDGEGGGKFATADLLADTIATTWGPGTQDRYVVFTGGEPLLQLDAALLTAIHARGFTVAIETNGTVKPPAGIDWICVSPKGTAPLVIERGDELKLVYPQLNALPETFAHLDFEHFFLQPMDGPARVANTERAVQYCMQHPQWRLSLQTHKYIGIP

SEQ ID NO: 27232 - protein, 226 aa, Achromobacter xylosoxidans
  misc_feature (1)..(226): tr|E3HK34|E3HK34_ACHXA 7-carboxy-7-deazaguanine synthas e OS=Achromobacter xylosoxidans (strain A8) OX=762376 G N=queE PE=3 SV=1
MPDLSEVRPYPAAGTTMTYSAKEIFKTLQGEGAHAGRAAVFCRFAGCNLWTGRESDRASAACTFCDTDFIGTDGEGGGKFATPELLADAIAAAWGPGATDRYVVFTGGEPLLQLDAPLLTAVHARGFTIAIETNGTIKPPAGIDWICVSPKGTAPVVLERGDELKLVYPQANARPEAFAHLDFDHFFLQPMDGPARAANTEQAVQYCMQHPQWRLSLQTHKYIGIP

SEQ ID NO: 27233 - protein, 222 aa, Acidaminobacter hydrogenoformans
  misc_feature (1)..(222): tr|A0A1G5RZ86|A0A1G5RZ86_9FIRM 7-carboxy-7-deazaguanine synthase OS=Acidaminobacter hydrogenoformans DSM 2784 OX=1120920 GN=queE PE=3 SV=1
MAQYKVVERFVSINGEGPSAGQLAVFIRFKGCNLACSYCDTAWANTENAAFTSMSEDDIYRYIKETAIKNVTLTGGEPLLQPAIIDLLKLLATDEALHVEIETNGSIDITPYTLMYNPPVFTMDYKLPGSLMESSMLVSNFERLTQKDTLKFVIGSLEDFNVARDIIHRHALVGKCNVYLSAVFGQIRLEEIVELMKDHHMNGVNLQLQMHKIIWDPNEKGV

SEQ ID NO: 27234 - protein, 218 aa, Acidaminococcus fermentans
  misc_feature (1)..(218): tr|A0A1I5GR87|A0A1I5GR87_ACIFE 7-carboxy-7-deazaguanine synthase OS=Acidaminococcus fermentans OX=905 GN=queE PE=3 SV=1
MKTETFPVVELFDSIEGEGKRTGAMAVFVRFAGCNLRCSYCDTGYALEPADAREHLTEEDLMGRIRRYPWKKVTLTGGEPLLQPLDSLCRTLSREGYEVNIETNGAVPLLEERPRGLFYTMDVKSPSSGMRGRMRMENLTRLTGEDVVKFVVGSREDLEDMDRVLREYTLRSQVYVSPVYGAIEPRELVEFVREHKLAQVRVQVQLHKIIWDPEMRGV

SEQ ID NO: 27235 - protein, 218 aa, Acidaminococcus fermentans
  misc_feature (1)..(218): tr|D2RLP6|D2RLP6_ACIFV 7-carboxy-7-deazaguanine synthas e OS=Acidaminococcus fermentans (strain ATCC 25085 / DS M 20731 / VR4) OX=591001 GN=queE PE=3 SV=1
MKTETFPVVELFDSIEGEGKRTGAMAVFVRFAGCNLRCSYCDTGYALEPADAREHLTEEDLMGRIRRYPWKKVTLTGGEPLLQPLDSLCRTLSREGYEVNIETNGAVPLLEERPRGLFYTMDVKSPSSGMRGRMRMENLTRLTGEDVVKFVVGSREDLEDMDRVLREYTLRSQVYVSPVYGAIEPRELVEFVREHKLAQVRVQVQLHKIIWNPEMRGV

SEQ ID NO: 27236 - protein, 210 aa, Acidaminococcus intestini
  misc_feature (1)..(210): tr|G4Q907|G4Q907_ACIIR 7-carboxy-7-deazaguanine synthas e OS=Acidaminococcus intestini (strain RyC-MR95) OX=568 816 GN=queE PE=3 SV=1
MEIFDSIDGEGKRTGYMATFVRFAGCNLRCSYCDTAYAWDASQAKEWLSEDNLFQQITAYPWKRVTLTGGEPMLQPIETLCRRLGDAGYEVNIETNGAAALFLERPDRLFYTMDIKSPSSGEKDRMRWENLSLLTADDVLKFVVGSVEDLRYMETILSTYSIKAQIYVSPVFGKIEPVALVDFVKHHQLSRVCVQVQLHKVIWDPEARGV

SEQ ID NO: 27237 - protein, 222 aa, Acidaminococcus intestini
  misc_feature (1)..(222): tr|C0WAE5|C0WAE5_9FIRM 7-carboxy-7-deazaguanine synthas e OS=Acidaminococcus intestini OX=187327 GN=queE PE=3 S V=1
MWLFMKTERFPVVEIFDSIDGEGKRTGYMATFVRFAGCNLRCSYCDTAYAWDASQAKEWLSEDNLFQQITAYPWKRVTLTGGEPMLQPIETLCRRLGDAGYEVNIETNGAAALFLERPDRLFYTMDIKSPSSGEKDRMRWENLSLLTADDVLKFVVGSVEDLRYMETILSTYSIKAQIYVSPVFGKIEPVALVDFVKHHQLSRVCVQVQLHKVIWDPEARGV

SEQ ID NO: 27238 - protein, 222 aa, Acidaminococcus sp.
  misc_feature (1)..(222): tr|A0A3A5R7Y8|A0A3A5R7Y8_9FIRM 7-carboxy-7-deazaguanine synthase OS=Acidaminococcus sp. AM33-14BH OX=2292909 G N=queE PE=3 SV=1
MWLFMKTERFPVVEIFDSIDGEGKRTGYMATFVRFAGCNLRCSYCDTAYAWDASQAKEWLSEDNLFQQITAYPWKRVTLTGGEPMLQPIETLCRRLGDAGYEVNIETNGAAALFLDRPDRLFYTMDIKSPSSGEKDRMRWENLSLLTADDVLKFVVGSVEDLRYMETILSTYSIKAQIYVSPVFGKIEPVALVDFVKHHQLSRVCVQVQLHKVIWDPEARGV

SEQ ID NO: 27239 - protein, 218 aa, Acidaminococcus sp.
  misc_feature (1)..(218): tr|R7LWA2|R7LWA2_9FIRM 7-carboxy-7-deazaguanine synthas e OS=Acidaminococcus sp. CAG:542 OX=1262687 GN=queE PE= 3 SV=1
MKTETFPVVELFDSIEGEGKRTGYMAVFVRFAGCNLRCSYCDTGYALERSDARNHLTEGELLERIRSYPWKKVTLTGGEPLLQPLDGLCRALSREGYEVNIETNGAVPLLEERPKGLFYTMDVKSPSSGMRGRMRMENLTRLTGDDVVKFVVGSREDLLDMEQVLQEYTIRSQVYVSPVYGAIEPKELVEFVRDHKLAQVCIQVQLHKIIWDPEMRGV

SEQ ID NO: 27240 - protein, 235 aa, Acidibacillus ferrooxidans
  misc_feature (1)..(235): tr|A0A124IW13|A0A124IW13_9BACL 7-carboxy-7-deazaguanine synthase OS=Acidibacillus ferrooxidans OX=1765683 GN=q ueE PE=3 SV=1
MSGAETGRDTQAIRLPLVEIFETVEGEGTQAGYPTVFVRLFGCPLRCTWCDTPYSYAPAKAEFTMSIDEIVLRVASYKSARVCLTGGEPLMYRDHSATLLQALAELPRLVDVHVETSGAIDITPFLQDVKSSKVRYIVDYKLKESGETANMVEANFTALRPQDELKFVIASDDDFDEAMAVLDRFHPLCTVLVSPVFGAMEPDHLVDRLLKEGRPHVKLNLQIHKVIWDPNRRGV

SEQ ID NO: 27241 - protein, 235 aa, Acidibacillus ferrooxidans
  misc_feature (1)..(235): tr|A0A162TX24|A0A162TX24_9BACL 7-carboxy-7-deazaguanine synthase OS=Acidibacillus ferrooxidans OX=1765683 GN=q ueE PE=3 SV=1
MSEAAVGRETQAIRLPLVEIFETVEGEGTQAGYPTVFVRLFGCPLRCVWCDTPYSYAPAKAEFTMTIEQIVLRVASFKAARVCLTGGEPLMYHEHSAALLRALSELPRLVDVHVETSGAIDLTSFLKDVRSSKVRYIVDYKLKESGETAKMIAANFTVLRPQDELKFVIASDADFDEAMAVLDRFHPLCTVLVSPVFGAMEPEHLVDRLLKEGRPHVKLNLQIHKVIWDPNQRGV

SEQ ID NO: 27242 - protein, 235 aa, Acidibacillus sulfuroxidans
  misc_feature (1)..(235): tr|A0A2U3CVR3|A0A2U3CVR3_9BACL 7-carboxy-7-deazaguanine synthase OS=Acidibacillus sulfuroxidans OX=1765684 GN= queE PE=3 SV=1
MKIINTQEPEKLVRERGILDVHSIFHTIQGEGPFCGQPAVFVRLAGCNLQCPGCDTNYTSNRKKMSHCDIWQEIVRVTGEAKTNLVVITGGEPFRQPEVANFINYLIDMKGYRVQVETNGTMPIPRELNYNCVVVCSPKAAKIHPSVSARADAFKYVMKSGNVNEEDGLPLQALDHRATPFIARPPVHFKGKIYLQPMDEQDDDANKANAQAVVKYAMKHNYIVQLQIHKYLGVE

SEQ ID NO: 27243 - protein, 232 aa, Acidibacillus sulfuroxidans
  misc_feature (1)..(232): tr|A0A2U3D6R0|A0A2U3D6R0_9BACL 7-carboxy-7-deazaguanine synthase OS=Acidibacillus sulfuroxidans OX=1765684 GN= queE PE=3 SV=1
MEQGQAMRTLTLPLVEIFETVEGEGTAAGFPTIFIRLFGCPLRCSWCDTPYSYPPASAEMVLSVDEIIQRVKQFRAARICLTGGEPLLYTRPAIALLNELATLEAIVDIHVETSGAIDLAPFLREVASPKVRYILDYKLASSGETDKMQLSNLKDLRSQDELKFVIASRSDFDQACTVLTDYHVRGTPLFSPVWGALEPSELVKWMLEKGLAHVKLNLQIHKVIWDPAQRGV

SEQ ID NO: 27244 - protein, 204 aa, Acidiferrobacter sp.
  misc_feature (1)..(204): tr|A0A2D7VJP2|A0A2D7VJP2_9GAMM 7-carboxy-7-deazaguanine synthase OS=Acidiferrobacter sp. OX=1872107 GN=queE PE =3 SV=1
MKKEIYSIAPNGIFWSIQGEGHLRGVQMFFIRFSGCSVGCPGCDTDYSVAEKLKLDEILARLERMLPDRPRECWVWLTGGEPADRDLTPVILRLKRAGYSVAIATSGVHRISDPVDWLSVSPHSTGFVQKFGHEIKIIDSLNGADLEELSREADQADFFFRYVQPVTLPDGSECPESLSRCMEFLKERPDWALSRQDHRVWGVA

SEQ ID NO: 27245 - protein, 214 aa, Acidiferrobacter sp.
  misc_feature (1)..(214): tr|A0A2Z3R276|A0A2Z3R276_9GAMM 7-carboxy-7-deazaguanine synthase OS=Acidiferrobacter sp. SPIII_3 OX=1281578 GN =queE PE=3 SV=1
MLRDLRITEIFYSLQGEARTVGWPTVFVRLTGCPLRCRYCDTTYAFHGGERRSVESILEEVSHYSPRFVTVTGGEPLAQPTVLPLLQGLCDRGYEVSLETSGALATHDVDPRVAVVLDLKTPGSGESARNAYENIERLRAIDQVKFVITNADDYEWSRGIVEQYGLAGRCDVLFSPVHDGLAPRELADWILRDRLPVRFQIQLHKVLWGDVRGR

SEQ ID NO: 27246 - protein, 214 aa, Acidiferrobacter thiooxydans
  misc_feature (1)..(214): tr|A0A1C2G0W1|A0A1C2G0W1_9GAMM 7-carboxy-7-deazaguanine synthase OS=Acidiferrobacter thiooxydans OX=163359 GN= queE PE=3 SV=1
MLRDLRITEIFYSLQGEARTVGWPTVFVRLTGCPLRCRYCDTTYAFHGGERLSVEGVLEKVSDYSPRFVTVTGGEPLAQPAVLPLLRGLCDRGYEVSLETSGALPTHDVDPRVAVVLDLKTPGSGESARNAYANIERLRAIDQVKFVITNADDYEWSRGIVEKYDLAGRCDVLFSPVHDGLAPRDLADWILRDRLPVRFQIQLHKVLWGDVRGR

SEQ ID NO: 27247 - protein, 224 aa, Acidihalobacter ferrooxidans
  misc_feature (1)..(224): tr|A0A1P8UHQ4|A0A1P8UHQ4_9GAMM 7-carboxy-7-deazaguanine synthase OS=Acidihalobacter ferrooxidans OX=1765967 GN =queE PE=3 SV=1
MSTTIPIGSAESLRLRITEIFLSLQGEARSVGWPTVFVRLTGCPLRCSYCDTAYAFSGGEWMDIPDICSKVEAFGVRHVTVTGGEPLAQRNVHRFMTLLCDQGYVLSLETSGALDVAGVDPRVSKVIDLKTPGSGESERNLWDNLNYLSALDQIKLVIADRSDYEWARERLGEHGLMDRVEVLMSPVHGRLSPRELAEWILNDRLHVRMQVQLHKYLWGDEPGR

SEQ ID NO: 27248 - protein, 212 aa, Acidihalobacter prosperus
  misc_feature (1)..(212): tr|A0A1D8KA56|A0A1D8KA56_9GAMM 7-carboxy-7-deazaguanine synthase OS=Acidihalobacter prosperus OX=160660 GN=que E PE=3 SV=1
MQLRITEIFLSLQGEARDVGRPTVFVRLTGCPLRCHYCDTAYAFSGGLAMPVDEVLAKVEAYGVRHVTVTGGEPLAQRAVLPLLASLSDAGLAVSLETSGALDVSAVDPRVVKVMDLKCPDSGEADRNRLENLASIGPQDQIKFVIASRNDYIWSREMMSEHGLAERCEILFSPVHGRLEPQALAEWILEDRLPVRFQIQLHKYLWGEEQGR

SEQ ID NO: 27249 - protein, 223 aa, Acidihalobacter prosperus
  misc_feature (1)..(223): tr|A0A1D8ITP5|A0A1D8ITP5_9GAMM 7-carboxy-7-deazaguanine synthase OS=Acidihalobacter prosperus OX=160660 GN=que E PE=3 SV=1
MSAEPSATRGSAKLRITEIFLSLQGEARDVGWPTVFVRLTGCPLRCHYCDTAYAFSGGSAMSLDEVLSKVADYAVSHVTVTGGEPLAQRSVLPLLVALCDAGYTVSLETSGALDVSAVDPRVVKVVDLKCPDSGESGKNRLENLQHLGTRDQIKFVISGRKDYEWACTQLKAFDLVTRVEVLFSPVHDQLEPTMLAEWILEDRLPVRFQIQLHKYLWGEAAGR

SEQ ID NO: 27250 - protein, 210 aa, Acidimicrobiaceae bacterium
  misc_feature (1)..(210): tr|A0A2E9JA33|A0A2E9JA33_9ACTN 7-carboxy-7-deazaguanine synthase OS=Acidimicrobiaceae bacterium OX=2024894 GN= queE PE=3 SV=1
MMFQVKEMYYTLQGEGARSGRPSVFCRFTGCNLWSGREVDREKAVCNFCDTDFIGTDGPGGGKFIDEVSLSEIINNVWPKKEPNKYVVFTGGEPALQLTEALIDSLHKLDFEVAIETNGTLDLPSNIDWITVSPKGNSELKVKKGDELKLVFPQQELKPETFFKLDFDHFFLQPKDCKDEEDYTQKTIQYCLENPRWRLSLQTHKYIGID

SEQ ID NO: 27251 - protein, 214 aa, Acidimicrobiales bacterium
  misc_feature (1)..(214): tr|A0A520XKW5|A0A520XKW5_9ACTN 7-carboxy-7-deazaguanine synthase OS=Acidimicrobiales bacterium OX=2201156 GN=q ueE PE=3 SV=1
MKYSVKEIFLSVQGEGAQTGRPSVFVRFAGCNLWSGREKDRASAVCKFCDTEFVGTDGVGGGVFTTPEDLANEAMSYWPKRDGKPIGEPWVICTGGEPLLQLDAHLIAALHGAGFNIAVETNGTIEAPGGIDWLCVSPKANAELLQRSGDELKLVYPQKENSPPDFAELDFKRFSLQPLDDQRGDQHRQAAFEYCMQNPQWRLSLQTHKWLGVR

SEQ ID NO: 27252 - protein, 252 aa, Acidimicrobiales bacterium
  misc_feature (1)..(252): tr|A0A2W6C4N0|A0A2W6C4N0_9ACTN 7-carboxy-7-deazaguanine synthase OS=Acidimicrobiales bacterium OX=2201156 GN=q ueE PE=3 SV=1
MTPSSMLVTEVFSAIQGEAALVGERQVFLRLTGCNIRCRYCDQPEALEKRGGPCRLEQTPGRRDWAQATSPLLLAEVVEAVDRLWRALPHHSVSVTGGEPLLQAGRLARLLPLLAARGHRVMLETNATLPGRLAQVLPWVDHVSADIKLDSVDGQGTQLDTQRRFLELAGGHHLFVKVVIGPDTSRPQLEAAVAMVHRVAPTSEIFLQPVTPFAAVLTAPSPELVLELQDLALRLHPRVRVVPQTHRLIDQL

SEQ ID NO: 27253 - protein, 211 aa, Acidiphilium cryptum
  misc_feature (1)..(211): tr|A5G266|A5G266_ACICJ 7-carboxy-7-deazaguanine synthas e OS=Acidiphilium cryptum (strain JF-5) OX=349163 GN=qu eE PE=3 SV=1
MAYSVKEIFPTLQGEGRNAGRAAVFCRFAGCNLWSGREEDRASATCRFCDTDFVGTDGPGGGRFADAAGLARAIQAAWSAACTRDALVVFTGGEPLLQLDAPLIEAVHDAGFEIAVETNGTIEPPPGIDWLCVSPKEGAELVVRQGSELKLVYPQKEATPERFAGLDFAHFLLQPMDGPDRAANTRAAIEYCLTHPQWRLSMQTHKYLGIP

SEQ ID NO: 27254 - protein, 211 aa, Acidiphilium multivorum
  misc_feature (1)..(211): tr|F0J5P0|F0J5P0_ACIMA 7-carboxy-7-deazaguanine synthas e OS=Acidiphilium multivorum (strain DSM 11245 / JCM 88 67 / NBRC 100883 / AIU301) OX=926570 GN=queE PE=3 SV=1
MAYSVKEIFPTLQGEGRNAGRAAVFCRFAGCNLWSGREEDRASATCRFCDTDFVGTDGPGGGRFADAAGLARAIQAAWPAACTRDALVVFTGGEPLLQLDAPLIEAVHDAGFEIAVETNGTIEPPPGIDWLCVSPKEGAELVVRQGSELKLVYPQKEATPERFAGLDFAHFLLQPMDGPDRAANTRAAIEYCLTHPQWRLSTQTHKYLGIP

SEQ ID NO: 27255 - protein, 211 aa, Acidiphilium rubrum
  misc_feature (1)..(211): tr|A0A1N6VYV4|A0A1N6VYV4_ACIRU 7-carboxy-7-deazaguanine synthase OS=Acidiphilium rubrum OX=526 GN=queE PE=3 SV =1
MTYSVKEIFLTLQGEGSNAGRAAVFCRFAGCNLWTGREADRTTATCQFCDTDFIGTDGTGGGKFTDAASLAAAIRAAWTAPTTAHALVVITGGEPLLQLDEPLIAAIHAQGFSIAVETNGTITPPPGIDWLCVSPKARAPLALSQGDELKLVYPQPEAMPERFTSLDFKTFLLQPMDGPDRTANTQAAIAYCQTHPKWRLSMQTHKYLGIP

SEQ ID NO: 27256 - protein, 211 aa, Acidiphilium sp.
  misc_feature (1)..(211): tr|F7S5Z3|F7S5Z3_9PROT 7-carboxy-7-deazaguanine synthas e OS=Acidiphilium sp. PM OX=1043206 GN=queE PE=3 SV=1
MAYSVKEIFPTLQGEGRNAGRAAVFCRFAGCNLWSGREEDRASATCRFCDTDFVGTDGPGGGRFADAAGLARAIQAAWPAACTRDALVVFTGGEPLLQLDAPLIEAVHDAGFEIAVETNGTIEPPPGIDWLCVSPKEGAELVVRQGSELKLVYPQKEATPERFAGLDFAHFLLQPMDGPDRAANTRAAIEYCLAHPQWRLSTQTHKYLGIP

SEQ ID NO: 27257 - protein, 211 aa, Acidiphilium sp.
  misc_feature (1)..(211): tr|A0A257S9B1|A0A257S9B1_9PROT 7-carboxy-7-deazaguanine synthase OS=Acidiphilium sp. 21-60-14 OX=1970292 GN=qu eE PE=3 SV=1
MAYSVKEIFLTLQGEGRNAGRAAVFCRFTGCNLWSGREQDRAAAICQFCDTDFIGTDGPGGGRFATAEDLAAAVRAAWRGPSMAEAMVVCTGGEPLLQLDAPLIAALRAAGFHIAVETNGTIAPPDGIDWLCVSPKASAPLAVTGGDELKLVYPQVEAMPERFVGLDFAHFLLQPMDGPMREQNTAAAIEYCLAHPHWRLSMQTHKYLGIP

SEQ ID NO: 27258 - protein, 226 aa, Acidipila dinghuensis
  misc_feature (1)..(226): tr|A0A4Q1SI83|A0A4Q1SI83_9BACT 7-carboxy-7-deazaguanine synthase OS=Acidipila dinghuensis OX=1560006 GN=queE P E=3 SV=1
MYLIEIYKSVQGESSFAGVPCIFVRLAGCNLRCSWCDSEYTFTGGYKLTQDEVMAEIEKLAPVKLVEFTGGEPLLQEREVVPLMQRLLAAGYELMIETSGERPVVNVPEAVHKIVDVKCPGSGEANRFHRPNLASLTMRDELKFVISDRADYEYARDFIRTNSLEGRVGQLLLSPAFSKTPLPERSTANAVLDPRELVHWMLEDGLDARLSLQIHKYIWEPQKKGV

SEQ ID NO: 27259 - protein, 226 aa, Acidipila rosea
  misc_feature (1)..(226): tr|A0A4R1L2C7|A0A4R1L2C7_9BACT 7-carboxy-7-deazaguanine synthase OS=Acidipila rosea OX=768535 GN=queE PE=3 SV= 1
MHLIELYKSVQGESSFAGRPCIFVRLAGCNLRCSWCDSEYTFASGFRQSEDEVVAAIEKLAPVKLVEFTGGEPMLQERELIPLMERLLASGYELMIETSGERPLERVPPAVHKIVDVKCPGSGEQASFRLSNLEYLSSRDEVKFVLTDRRDYEFAREFLRKHTLESRAGSILLSPAFSKTPSPERSTINCLLDPRELVEWMLADGLEARLSLQIHKYVWEPQKKGV

SEQ ID NO: 27260 - protein, 226 aa, Acidipila sp.
  misc_feature (1)..(226): tr|A0A372IKD2|A0A372IKD2_9BACT 7-carboxy-7-deazaguanine synthase OS=Acidipila sp. 4G-K13 OX=2303751 GN=queE PE =3 SV=1
MHFIEIYKSVQGESSFAGRPCIFVRLAGCNLRCSWCDSEYTFTGGHRLTDEEVIAAMEALAPVKLIEFTGGEPMLQERELVPLMERLLAAGYELMIETSGERPLDRVPKAVHKIVDVKCPGSGEGGSFRMTNLDHLTKRDEVKFVIAGRPDYEFARAFVREHDLAAKAGSVLFSPAFSKTPSPERSTANALLDPRELVEWMLADGLDARLSLQIHKYIWEPQKKGV

SEQ ID NO: 27261 - protein, 226 aa, Acidipila sp.
  misc_feature (1)..(226): tr|A0A3P0XA16|A0A3P0XA16_9BACT 7-carboxy-7-deazaguanine synthase OS=Acidipila sp. EB88 OX=2305226 GN=queE PE=3 SV=1
MFLIETYKSVQGESSFAGVPCIFVRLAGCNLRCSWCDSEYTFTGGYKQSADEVIAAVEALAPVRLVEFTGGEPLLQARELIPVMERLLADGYQLMIETSGERPLSDVPPAVHKIVDVKCPASGECGRFRLDNLDTLTARDEAKFVISDRADYEFARDFTLEHSLHTRAGHVLFSPAFKKAPSLERSTANCALDPRQLVDWMLADAVPARLSLQIHKYIWEPQKKGV

SEQ ID NO: 27262 - protein, 226 aa, Acidisarcina polymorpha
  misc_feature (1)..(226): tr|A0A2Z5G8M9|A0A2Z5G8M9_9BACT 7-carboxy-7-deazaguanine synthase OS=Acidisarcina polymorpha OX=2211140 GN=queE PE=3 SV=1
MYLIEIYKSVQGESSFAGRPCIFVRLAGCNLRCSWCDSEYTFKGGYKLTEDEVVAEVEKLAPVRLVEFTGGEPMLQQRELVPLMQRLLAAGYELMIETSGERPLQSVPEEVHKIVDVKCPGSGEGGTFRMENLSALTNRDEVKFVISDRSDYEFALQFVRAQELEQRVGSVLFSPAFTKTPSPVRTAENCLLDPRILVEWMMADGVEARLSLQIHKFVWEPSKKGV

SEQ ID NO: 27263 - protein, 211 aa, Acidisphaera rubrifaciens
  misc_feature (1)..(211): tr|A0A0D6P2F7|A0A0D6P2F7_9PROT 7-carboxy-7-deazaguanine synthase OS=Acidisphaera rubrifaciens HS-AP3 OX=123135 0 GN=queE PE=3 SV=1
MVAYAVKEIFYTLQGEGRHAGRAAVFCRFAGCNLWSGREQDRGTATCRFCDTDFVGVDGQGGGRFQDAAALAQAISDAWIGRGGRRLVVLTGGEPLLQVDELLIERLHAMDFEVAVETNGTVPAPAGLDWIAVSPKGNAKLQILQGNELKLVYPQPEALPDRFEELAFAHHLLQPMDGPDLAANTAAAVAYCLANPRWRLSLQSHKVLGIP

SEQ ID NO: 27264 - protein, 198 aa, Acidithiobacillales bacterium
  misc_feature (1)..(198): tr|A0A0S8G3M5|A0A0S8G3M5_9PROT 7-carboxy-7-deazaguanine synthase OS=Acidithiobacillales bacterium SM23_46 OX=1 703385 GN=queE PE=3 SV=1
MARSESPSSLAAASAADRLRVNEIFFSLQGEARTVGFPTVFVRLTGCPLRCGYCDTEYAFTEGRWMSFEEVEAAVAQYAPRHVTVTGGEPLAQRPCRTLLKRLCDHGYEVSLETSGALDIGDIDARVSVVMDLKTPGSGEEARNRIENIALLKPKDQVSPVHGELSATELAEWILADRLPVRMQIQLHKYLWQDARGR

SEQ ID NO: 27265 - protein, 193 aa, Acidithiobacillales bacterium
  misc_feature (1)..(193): tr|A0A0S8L083|A0A0S8L083_9PROT 7-carboxy-7-deazaguanine synthase (Fragment) OS=Acidithiobacillales bacterium S M1_46 OX=1703384 GN=AMJ72_11795 PE=3 SV=1
MARSESPSSLAAASAADRLRVNEIFFSLQGEARTVGFPTVFVRLTGCPLRCGYCDTEYAFTEGRWMSFEEVEAAVAQYAPRHVTVTGGEPLAQRPCRTLLKRLCDHGYEVSLETSGALDIGDIDARVSVVMDLKTPGSGEEARNHIENIALLKPKDQVKFVIRDRADYDWSRAMVAAHELDKRCEVLFSPVHG

SEQ ID NO: 27266 - protein, 213 aa, Acidithiobacillus caldus
  misc_feature (1)..(213): tr|A0A059ZYF6|A0A059ZYF6_ACICK 7-carboxy-7-deazaguanine synthase OS=Acidithiobacillus caldus (strain ATCC 5175 6 / DSM 8584 / KU) OX=637389 GN=queE PE=3 SV=1
MSRLRVSEIFHSLQGETTASGVPATFVRLTGCPLRCSYCDTAYAFHGGEWLDADQILARVAERDNRLVVITGGEPLAQPAVHALMTALCDGGREVYLETSGALSVAEVDPRVVKILDLKSPGSGELERNLWENLDYLGSRDQVKFVLCNRDDYEWARTTVRERKLQGRCELLFSPAYGQLTARDLAEWILEDRLPVRLQIQLHKFIWGDVPGH

SEQ ID NO: 27267 - protein, 213 aa, Acidithiobacillus caldus; identical to SEQ ID NO: 27266
  misc_feature (1)..(213): tr|A0A1E7YMT5|A0A1E7YMT5_9PROT 7-carboxy-7-deazaguanine synthase OS=Acidithiobacillus caldus OX=33059 GN=queE PE=3 SV=1

SEQ ID NO: 27268 - protein, 214 aa, Acidithiobacillus ferridurans
  misc_feature (1)..(214): tr|A0A2Z6IKN1|A0A2Z6IKN1_9PROT 7-carboxy-7-deazaguanine synthase OS=Acidithiobacillus ferridurans OX=1232575 G N=queE PE=3 SV=1
MEGRLRVTEIFHSLQGETRSVGRPATFVRLTGCPLRCRYCDTAYAFHGGEWRRIPEILEQVRAGGNRLVVVTGGEPLAQADVLPLLTQLCDAGHEVFLETSGALSLAGVDTRVVKVLDLKSPDSGECERNLWENLPLLNPQDQIKFVLCSRADYDWAKEVLAREALAERCEILFSPSHGTLALRDLAEWILADHLPVRLQIQLHKLIWGDLPGH

SEQ ID NO: 27269 - protein, 214 aa, Acidithiobacillus ferrivorans
  misc_feature (1)..(214): tr|A0A060UYP1|A0A060UYP1_9PROT 7-carboxy-7-deazaguanine synthase OS=Acidithiobacillus ferrivorans OX=160808 GN =queE PE=3 SV=1
MEGRLRITEIFHSLQGETRSVGRPATFVRLTGCPLRCHYCDTAYAFYGGEWQQIAGILEAVRAGGNRLVVVTGGEPLAQADVLPLLTQLCDAGYEVFLETSGALSVAGVDTRVVKVLDLKSPDSGECERNLWENLPLLNPQDQIKFVLCSRADYDWAKDVLVREALAERCEILFSPSHGALALRDLAEWILADHLPVRLQIQLHKLIWGDLPGH

SEQ ID NO: 27270 - protein, 214 aa, Acidithiobacillus ferrivorans
  misc_feature (1)..(214): tr|A0A1B9BV90|A0A1B9BV90_9PROT 7-carboxy-7-deazaguanine synthase OS=Acidithiobacillus ferrivorans OX=160808 GN =queE PE=3 SV=1
MEGRLRITEIFHSLQGETRSVGRPATFVRLTGCPLRCHYCDTAYAFHGGEWQQIAGILEAVRAGGNRLVVVTGGEPLAQADVLPLLTQLCDAGYEVFLETSGALSVAGVDTRVVKVLDLKSPDSGECERNLWENLPLLNPQDQIKFVLCSRADYDWAKDVLVREALAERCEILFSPSHGALALRDLAEWILADHLPVRLQIQLHKLIWGDLPGH

SEQ ID NO: 27271 - protein, 214 aa, Acidithiobacillus ferrooxidans
  misc_feature (1)..(214): tr|A0A365YJ43|A0A365YJ43_ACIFR 7-carboxy-7-deazaguanine synthase OS=Acidithiobacillus ferrooxidans OX=920 GN=q ueE PE=3 SV=1
MEGRLRVTEIFHSLQGETRSVGRPATFVRLTGCPLRCRYCDTAYAFHGGAWQRIPEILEQVRAGGNRLVVVTGGEPLAQADVLPLLTQLCDAGHEVFLETSGALSLAGVDTRVVKVLDLKSPDSGECERNLWENLPLLNPQDQIKFVLCSRADYDWAKEVLAREALAERCEILFSPSHGTLALRDLAEWILADHLPVRLQIQLHKLIWGDLPGH

SEQ ID NO: 27272 - protein, 214 aa, Acidithiobacillus ferrooxidans
  misc_feature (1)..(214): tr|B7J3H0|B7J3H0_ACIF2 7-carboxy-7-deazaguanine synthas e OS=Acidithiobacillus ferrooxidans (strain ATCC 23270 / DSM 14882 / CIP 104768 / NCIMB 8455) OX=243159 GN=que E PE=3 SV=1
MEGRLRITEIFHSLQGETRSVGRPATFVRLTGCPLRCRYCDTAYAFHGGEWRRIPEILEQVRAGGNRLVVVTGGEPLAQADVLPLMTQLCDAGHEVFLETSGALSLAGVDTRVVKVLDLKSPDSGECERNLWENLPLLNPQDQIKFVLCSRADYDWAKEVLAREALAERCEILFSPSHGTLALRDLAEWMLADHLPVRLQIQLHKLIWGDLPGH

SEQ ID NO: 27273 - protein, 214 aa, Acidithiobacillus sp.
  misc_feature (1)..(214): tr|A0A2I1DQW5|A0A2I1DQW5_9PROT 7-carboxy-7-deazaguanine synthase OS=Acidithiobacillus sp. SH OX=187490 GN=queE PE=3 SV=1
MDGRLRITEIFHSLQGETRSVGRPATFVRLTGCPLRCHYCDTAYAFHGGEWQTLDTIMASVQAGGSHLVVVTGGEPLAQAEVLPLLTRLCDSGYEVFLETSGALPVAAVDPRVVKVLDLKTPDSGESERNLWENLPHLNAQDQIKFVICSRQDYDWAQQVVQRENLNQICEVLFSPAQGEMPLRDLADWILADKLPVRLQIQLHKLIWGDVPGR

SEQ ID NO: 27274 - protein, 214 aa, Acidithiobacillus sp.
  misc_feature (1)..(214): tr|A0A3M8RRC3|A0A3M8RRC3_9PROT 7-carboxy-7-deazaguanine synthase OS=Acidithiobacillus sp. CJ-2 OX=1867749 GN=q ueE PE=3 SV=1
MKERLRISEIFHSLQGETRSVGRPATFVRLTGCPLRCQYCDTAYAFHGGEWMEPADIHERIRAEGSPLVVVTGGEPLAQRAVLPFLSRLCDDGYEVFLETSGALPVADVDGRVVKVLDLKTPDSGEAPRNLWENIAHLSPRDQIKFVLCSRTDYDWAREVLEREHLATRCEVLFSPAHGQLALRDLAEWILADRLPVRLQVQLHKLIWGDVPGH

SEQ ID NO: 27275 - protein, 214 aa, Acidithiobacillus thiooxidans
  misc_feature (1)..(214): tr|A0A543Q6U5|A0A543Q6U5_ACITH 7-carboxy-7-deazaguanine synthase OS=Acidithiobacillus thiooxidans ATCC 19377 O X=637390 GN=queE PE=3 SV=1
MDERLRITEIFHSLQGETRSVGRPATFVRLTGCPLRCHYCDTAYAFHGGEWQTLDVIMDAVRAGGNRLVVVTGGEPLAQQDVLPLMTRLCDSGYEVFLETSGALSVEAVDPRVIKVLDLKTPDSGESDRNLWENLVRLNAQDQIKFVICSRRDYDWAKEVLAREDLSQICEVLFSPSQGEMPLRDLADWILTDQLPVRLQIQLHKLIWGDVPGR

SEQ ID NO: 27276 - protein, 214 aa, Acidithiobacillus thiooxidans
  misc_feature (1)..(214): tr|A0A1C2I346|A0A1C2I346_ACITH 7-carboxy-7-deazaguanine synthase OS=Acidithiobacillus thiooxidans OX=930 GN=qu eE PE=3 SV=1
MDERLRITEIFHSLQGETRSVGRPATFVRLTGCPLRCHYCDTAYAFHGGEWQTLDVIIDAVRAGGNRLVVVTGGEPLAQQDVLPLMTRLCDSGYEVFLETSGALSVEAVDPRVIKVLDLKTPDSGESDRNLWENLVRLNAQDQIKFVICSRRDYDWAKEVLAREDLSQICEVLFSPSQGEMPLRDLADWILTDQLPVRLQIQLHKLIWGDVPGR

SEQ ID NO: 27277 - protein, 211 aa, Acidithrix ferrooxidans
  misc_feature (1)..(211): tr|A0A0D8HCP3|A0A0D8HCP3_9ACTN 7-carboxy-7-deazaguanine synthase OS=Acidithrix ferrooxidans OX=1280514 GN=queE PE=3 SV=1
MSYVVKEIFYTLQGEGHRSGRPAVFLRFAGCNLWTGREVNRLKAICQFCDTDFVGTDGTDGGIYKTALELGDMVDRIWPDNFSDRKYVVCTGGEPLLQLDAELVNALHERGFEIAIETNGTQLPPEGIDWICVSPKAGAELNLTYGNELKVVVPQSGIDLEYLRKLDFENFYLQPMENENLDSNIKFAIAYCLENPVWNLSLQTHKMIGIR

SEQ ID NO: 27278 - protein, 213 aa, Acidobacteria bacterium
  misc_feature (1)..(213): tr|A0A1F2REZ1|A0A1F2REZ1_9BACT 7-carboxy-7-deazaguanine synthase OS=Acidobacteria bacterium RIFCSPLOWO2_02_FUL L_64_15 OX=1797181 GN=queE PE=3 SV=1
MLTVNEIFYSIQGESTQAGRPCVFVRLTACDLRCSWCDTPYAFVEGRKMSVDEVVAAVGQYGCPLIEITGGEPLLQEDVYELMDRLMGGGYAVMLETGGHRTIARVPSAVLKIVDVKCPGSGESAKNDWTNLDRLTPHDEVKFVISDRADYQFARDLIGRYGLAERTAAVLLSPVHGVLDPKTLAEWILADRLPARLQVQLHKYIWPPTARGV

SEQ ID NO: 27279 - protein, 231 aa, Acidobacteria bacterium
  misc_feature (1)..(231): tr|A0A1Q7L363|A0A1Q7L363_9BACT 7-carboxy-7-deazaguanine synthase OS=Acidobacteria bacterium 13_1_40CM_4_58_4 O X=1803453 GN=queE PE=3 SV=1
MVITEIFKSIQGEGTRAGLPCIFVRLTGCNLRCTWCDTAYAFHGGKKMSVEEVLETMDELAGRREGGSDGEPTVPLVELTGGEPLLQEEIYPLAKKLLAAGYTVMIETSGERFIGRLPKEVIKIVDVKCPDSGEPDTFEMRNLEELTENDEVKFVLSTRRDYEFAREFTRLHGLARQVKQVLFSPVCEDPEGKWPGLEPRLLAEWILAEGLPVRLGLQLHKFIWDPATKGV

SEQ ID NO: 27280 - protein, 227 aa, Acidobacteriales bacterium
  misc_feature (1)..(227): tr|A0A1Q3QMT8|A0A1Q3QMT8_9BACT 7-carboxy-7-deazaguanine synthase OS=Acidobacteriales bacterium 59-55 OX=189569 0 GN=queE PE=3 SV=1
MHLIELYKSVQGESSFAGLPCIFVRFAGCNLRCAWCDSEYTFTGGRPFSEDEVVAQIEALAPCRLIEFTGGEPMLQAKELIPLMERLLAEGYTLMIETSGERPLAEVPKAVHKIVDVKCPGAGAAAGSFRRENLDALTKNDEVKFVITSREDYDFAREFIGRHEVNRRAGGVLLSPAFRKSPSPERTAENMALDPRDLVEWMLADGLDARLSLQIHKFIWEPMKKGV

SEQ ID NO: 27281 - protein, 227 aa, Acidobacteriales bacterium
  misc_feature (1)..(227): tr|A0A1Q7N4J4|A0A1Q7N4J4_9BACT 7-carboxy-7-deazaguanine synthase OS=Acidobacteriales bacterium 13_1_40CM_3_55_ 5 OX=1803468 GN=queE PE=3 SV=1
MQITEIYKSIQGESTHAGLPCVFVRLTGCNLRCSWCDSEYTFTGGRRMALDEVLEEVERLSPDGGLVEITGGEPMLQEREAIPLMQRLLDAGYTVLLETSGERPLAGVPPGVIKIVDVKCPNSGEPETFYMENLDTLGLQDEVKFVLSDRSDYEFARNFVERHALDRRVNAVLFSPAFRKDAEGDRDCSHCLLDPRELAEWMLEDNSTARLGLQIHKFIWDPALKGV

SEQ ID NO: 27282 - protein, 237 aa, Acidobacteriia bacterium
  misc_feature (1)..(237): tr|A0A317IYZ4|A0A317IYZ4_9BACT 7-carboxy-7-deazaguanine synthase OS=Acidobacteriia bacterium OX=2081523 GN=que E PE=3 SV=1
MPACCGARVLKRPGLKIAELFYSVQGEGSLVGVPSFFIRTSGCNLRCAWCDTPYTSWQPEGADLPLDRIVDEVKAHRVHHVVVTGGEPMIAPEIIPLTERLRALNLHITIETAGTVFKPVACDLMSISPKLSNSTPRDPWAGQHERLRINPGVLAGLMAKYDYQLKFVIEHQRDLDEVRLLVGSLEADTTRVILMPEGTDRDVLRERGVWLAEICKAEGYRFSPRLHVELYGNRRGV

SEQ ID NO: 27283 - protein, 227 aa, Acidobacteriia bacterium
  misc_feature (1)..(227): tr|A0A2N9LSG2|A0A2N9LSG2_9BACT 7-carboxy-7-deazaguanine synthase OS=Acidobacteriia bacterium SbA2 OX=2043162 G N=queE PE=3 SV=1
MDWIEEIPSRSFREEMVITEIFKSIQGESTYAGLPCLFVRLTGCNLRCHWCDTAYAFYGGQKMTVAEVLTRLQQLGGNLVELTGGEPLLQQEIYSLTDQLLAQGFRVLIETSGERSVAQLPRQVVKVLDVKCPGSGEEGKFCFDNLGLLERKDQIKFVILNEDDYGYARDFLARHDLHRHVDEVIFSPVFDQLSPRSLAEWILRDNLEVRLGLQIHKFIWGPETRGV

SEQ ID NO: 27284 - protein, 226 aa, Acidobacterium capsulatum
  misc_feature (1)..(226): tr|C1F2N6|C1F2N6_ACIC5 7-carboxy-7-deazaguanine synthas e OS=Acidobacterium capsulatum (strain ATCC 51196 / DSM 11244 / JCM 7670 / NBRC 15755 / NCIMB 13165 / 161) OX= 240015 GN=queE PE=3 SV=1
MRLIEIYKSVQGESSFAGRPCIFVRLAGCNLRCSWCDSEYTFTGGEAFSDDEILARIEALAPVRLVEFTGGEPLLQAKQLIPFMERLLAAGYELMIETSGERPLREVPAAVHKIVDVKCPGSGEAGKFLMENLEFLTPRDEVKFVIADRADYEFAREFLRAHALDRKAGQILLSPTFSKTPTPERSTSNATLDPRLLVEWMLEDGLPARLSLQIHKYIWEPQKKGV

SEQ ID NO: 27285 - protein, 226 aa, Acidobacterium sp.; identical to SEQ ID NO: 27284
  misc_feature (1)..(226): tr|A0A3D4VJW6|A0A3D4VJW6_9BACT 7-carboxy-7-deazaguanine synthase OS=Acidobacterium sp. OX=1872119 GN=queE PE=3 SV=1

SEQ ID NO: 27286 - protein, 213 aa, Acidobacterium sp.
  misc_feature (1)..(213): tr|A0A2G4JIX3|A0A2G4JIX3_9BACT 7-carboxy-7-deazaguanine synthase OS=Acidobacterium sp. OX=1872119 GN=queE PE=3 SV=1
MLTINEIFHSIQGESTHAGRPCVFVRLTACDLRCRWCDTPYAFHEGRKMSVDEVVAEVEARGCPVVEVTGGEPLLQADVYPLMQRLLDAGKTVLIETGGHRSIAQVPAGVVRIMDIKCPGSGESSRNDWSNLLLLTPTDEVKFVIADRVDYEYAREIVNREDLANRVAAVLFSPVHGELVAKQLAEWVIADRLAVRVQLQMHKYIWSPETRGV

SEQ ID NO: 27287 - protein, 211 aa, Acidocella aminolytica
  misc_feature (1)..(211): tr|A0A0D6PGC1|A0A0D6PGC1_9PROT 7-carboxy-7-deazaguanine synthase OS=Acidocella aminolytica 101 = DSM 11237 OX= 1120923 GN=queE PE=3 SV=1
MTYSIKEIFYTLQGEGRNAGRAAVFCRFAGCNLWTGRETDRHTATCRFCDTDFVGTDGTGGGRFADAADLAAAVEAVWPARAQEARLVVLTGGEPLLQVDAALIAALHAAGFEIAVETNGTIAPPDGIDWLCVSPKAGAALAVEKGEELKLVFPQAGAEPAQFEHLAFQHFLLQPMDGPDQAANTEKAVAFCMANPLWRLSLQTHKFLGIR

SEQ ID NO: 27288 - protein, 210 aa, Acidocella sp.
  misc_feature (1)..(210): tr|A0A257QIH5|A0A257QIH5_9PROT 7-carboxy-7-deazaguanine synthase OS=Acidocella sp. 20-58-15 OX=1970302 GN=queE PE=3 SV=1
MTYNVKEIFYTLQGEGRNVGRAAIFCRFTGCNLWSGREMDRNTAVCRFCDTDFVGIDGTGGGRFATADQLAIAIDAVRPTGTKVELVVLTGGEPMLQIDDALIDALHNLGFKIAVETNGTIPVPAEIDWLCVSPKAGTQLAISQGDELKLVFPQPNAGPECFESLAFTDFLLQPMDGPDQTDNTAAAVSYCLAHPRWRLSLQTHKLLGLR

SEQ ID NO: 27289 - protein, 211 aa, Acidocella sp.
  misc_feature (1)..(211): tr|K5YUY6|K5YUY6_9PROT 7-carboxy-7-deazaguanine synthas e OS=Acidocella sp. MX-AZ02 OX=1214225 GN=queE PE=3 SV= 1
MAYSVKEIFYTLQGEGRNAGRAAVFCRFAGCNLWSGREEDRATAICRFCDTDFIGTNGTGGGRFADAADLSAAIAAAWSQDQPEDRLVVLTGGEPLLQLDTPLVDALHAAGFEIAVETNGTIAPPAGVDWLCVSPKAGAVLAVAGGDELKLVFPQPDALPARFEGLAFRHFLLQPMDGPDQAANTAAAVAYCMAHPRWRLSLQTHKFLGIR

SEQ ID NO: 27290 - protein, 213 aa, Acidomonas methanolica
  misc_feature (1)..(213): tr|A0A023D1K3|A0A023D1K3_ACIMT 7-carboxy-7-deazaguanine synthase OS=Acidomonas methanolica NBRC 104435 OX=1231 351 GN=queE PE=3 SV=1
MSYAVKEIFPTLQGEGAQTGRAAVFCRFAGCNLWSGREEDRARAACRFCDTDFVGTDGEGGGRFADSEALADAIAACWRAIAGEAAGRYVVFTGGEPLLQLDAALIAAMKARDFEIALETNGTLAVPDGIDWICVSPKPGGPVVQTRGDELKLVYPQPELPPASFEDWSFGHFWLQPMDGPERAAHTSAAAAYCMGHPRWRLSLQTHKLIGLP

SEQ ID NO: 27291 - protein, 212 aa, Acidovorax anthurii
  misc_feature (1)..(212): tr|A0A328YS67|A0A328YS67_9BURK 7-carboxy-7-deazaguanine synthase OS=Acidovorax anthurii OX=78229 GN=queE PE=3 SV=1
MTYAVKEIFYTLQGEGGQAGMPAVFCRFAGCNLWSGREEDRATAVCRFCDTDFVGTDGTLGGKYAAADALADVIAAQWPPHDADHRLVVATGGEPLLQLDAPLIDALHARGFRIAVESNGTVAAPPRIDWLCISPKAGAPWVQREGQELKLVWPQPGFDLAELEAGTRFTHRFLQPMDGPDQADNIGRCIATCMERPAWRLSLQTHKLTGIR

SEQ ID NO: 27292 - protein, 212 aa, Acidovorax avenae
  misc_feature (1)..(212): tr|A0A2R4EEB2|A0A2R4EEB2_9BURK 7-carboxy-7-deazaguanine synthase OS=Acidovorax avenae subsp. avenae OX=80870 G N=queE PE=3 SV=1
MTYSVKEIFYTLQGEGGQAGMPAVFCRFAGCNLWSGREEDRSTAVCRFCDTDFVGTDGTLGGKYAQADALADVIAAQWPAHDADHRLVVLTGGEPLLQLDTPLIDALHARGFRIAVESNGTVAAPPGIDWLCVSPKAGAPWVQRAGQELKLVWPQPGFDLAELESATRFEHRFLQPMDGPEQAANISLCIAACMERPAWRLSLQTHKLTGIR

SEQ ID NO: 27293 - protein, 212 aa, Acidovorax avenae
  misc_feature (1)..(212): tr|A0A2R4EQ04|A0A2R4EQ04_9BURK 7-carboxy-7-deazaguanine synthase OS=Acidovorax avenae subsp. avenae OX=80870 G N=queE PE=3 SV=1
MTYSVKEIFYTLQGEGGQAGMPAVFCRFAGCNLWSGREEDRSSAICRFCDTDFVGTDGTLGGKYAQADALADVIAAQWPAHDADHRLVVLTGGEPLLQLDTPLIDALHARGMRIAVESNGTVAAPPGIDWLCVSPKAGAPWVQRAGQELKLVWPQPGFDLAELESATRFEHRFLQPMDGPEQAANTGLCIAACMERPAWRLSLQTHKLTGIR

SEQ ID NO: 27294 - protein, 212 aa, Acidovorax carolinensis
  misc_feature (1)..(212): tr|A0A240TP66|A0A240TP66_9BURK 7-carboxy-7-deazaguanine synthase OS=Acidovorax carolinensis OX=553814 GN=queE PE=3 SV=1
MTYSVKEIFYTLQGEGGQAGSPAVFCRFAGCNLWSGREQDRATAICRFCDTDFVGTDGTLGGKFADAPGLARQIAALWPAGDAHHRLVVLTGGEPLLQVDAALIEALHAQGFRIAVETNGTVAAPQGIDWLCVSPKAGADWVQRQGQELKVVWPQPGLDLDVLETTGQFQHRFLQPMDGPDQARHIALCIDLCLQRPAWRLSLQTHKLTGIR

SEQ ID NO: 27295 - protein, 212 aa, Acidovorax carolinensis
  misc_feature (1)..(212): tr|A0A240U0S8|A0A240U0S8_9BURK 7-carboxy-7-deazaguanine synthase OS=Acidovorax carolinensis OX=553814 GN=queE PE=3 SV=1
MTYSVKEIFYTLQGEGGQAGSPAVFCRFAGCNLWSGREQDRATAICRFCDTDFVGTDGTLGGKFADAPTLARQIAALWPADDAHHRLVVLTGGEPLLQVDVALIEALHAQGFRIAVETNGTVAAPQGIDWLCVSPKAGADWVQRQGQELKVVWPQPGLDLDVLETTGQFLHRFLQPMDGPDQARHIALCIDLCLQRPAWRLSLQTHKLTGIR

SEQ ID NO: 27296 - protein, 212 aa, Acidovorax cattleyae
  misc_feature (1)..(212): tr|A0A1H0T5P1|A0A1H0T5P1_9BURK 7-carboxy-7-deazaguanine synthase OS=Acidovorax cattleyae OX=80868 GN=queE PE=3 SV=1
MTYSVKEIFYTLQGEGGQAGMPAVFCRFAGCNLWSGREEDRTTAVCRFCDTDFVGTDGTLGGKYARADALADVISAQWPAHDADHRLVVLTGGEPLLQLDTPLIDALHARGFRIAVESNGTVAAPPGIDWLCVSPKAGAPWVQREGQELKLVWPQPGFDLAELESATRFAHRFLQPMDGPVQAENTGLCIAACMERPAWRLSLQTHKLTGIR

SEQ ID NO: 27297 - protein, 212 aa, Acidovorax cavernicola
  misc_feature (1)..(212): tr|A0A3A1W4H7|A0A3A1W4H7_9BURK 7-carboxy-7-deazaguanine synthase OS=Acidovorax cavernicola OX=1675792 GN=queE PE=3 SV=1
MTYSVKEIFYTLQGEGGQAGMPAVFCRFAGCNLWTGREEDRDTAVCRFCDTDFVGTDGTLGGKFKTADQLADTIAAQWPAGDTDHRLVVLTGGEPLLQVDAALVDALHARHFRIAVESNGTVAAPAGIDWLCISPKAGAPWVQQRGQELKLVWPQAGLDLDAMARTGEFTHRFLQPMDGPDRVANTELCIAECMKQPAWRLSVQTHKITGIR

SEQ ID NO: 27298 - protein, 212 aa, Acidovorax citrulli
  misc_feature (1)..(212): tr|A1TTV1|A1TTV1_ACIAC 7-carboxy-7-deazaguanine synthas e OS=Acidovorax citrulli (strain AAC00-1) OX=397945 GN= queE PE=3 SV=1
MTYSVKEIFYTLQGEGGQAGMPAVFCRFAGCNLWSGREEDRSSAVCRFCDTDFVGTDGTLGGKYAQAEALADVIAAQWPAHDADHRLVVLTGGEPLLQLDTPLIDALHARGMRIAVESNGTVAAPPGIDWLCVSPKAGAPWVQRAGQELKLVWPQPGFDLAELESATRFEHRFLQPMDGPDQAANTGLCIAACMERPAWRLSLQTHKLTGIR

SEQ ID NO: 27299 - protein, 211 aa, Acidovorax delafieldii
  misc_feature (1)..(211): tr|A0A561XIR2|A0A561XIR2_ACIDE 7-carboxy-7-deazaguanine synthase OS=Acidovorax delafieldii OX=47920 GN=queE PE =3 SV=1
MTYSVKEIFYTLQGEGGQAGTPAVFCRFAGCNLWTGREQDRAQAICQFCDTDFVGTDGTLGGKFETAAALAELIAAQWPAGASHRLVVLTGGEPLLQVDAALIDALHAQQFRIAVESNGTVAAPEGIDWLCISPKAGAPWVQRSGQELKLVWPQPGFDLQALEQDTQFTHRFLQPMDGLLQRQNTAACIDACLAHPAWRLSLQTHKLTGIR

SEQ ID NO: 27300 - protein, 211 aa, Acidovorax delafieldii
  misc_feature (1)..(211): tr|C5T9G6|C5T9G6_ACIDE 7-carboxy-7-deazaguanine synthas e OS=Acidovorax delafieldii 2AN OX=573060 GN=queE PE=3 SV=1
MTYSVKEIFYTLQGEGGQAGTPAVFCRFAGCNLWTGREQDRAQAICQFCDTDFVGTDGTLGGKFETAAALAQSIAAQWPAGAGHRLVVLTGGEPLLQVDSELIAALHAQQFRIAVESNGTVAAPEGIDWLCISPKAGAPFVQRSGQELKLVWPQPGFDLGALERETHFTHRFLQPMDGPLQRQNTAACIAACLAHPAWRLSLQTHKLTGIR

SEQ ID NO: 27301 - protein, 211 aa, Acidovorax kalamii
  misc_feature (1)..(211): tr|A0A235EHM1|A0A235EHM1_9BURK 7-carboxy-7-deazaguanine synthase OS=Acidovorax kalamii OX=2004485 GN=queE PE=3 SV=1
MTYSVKEIFYTLQGEGGQAGTPAVFCRFAGCNLWTGREQDRAQAICQFCDTDFVGTDGTLGGKFETATALAELIAAQWPAGAGHRLVVLTGGEPLLQVDRELIDALHAQQFRIAVESNGTVAAPEGIDWLCISPKAGAPWVQRSGQELKLVWPQPGFDLLALEQDTQFTHRFLQPMDGLLQRQNTAACIDACLAHPAWRLSLQTHKLTGIR

SEQ ID NO: 27302 - protein, 212 aa, Acidovorax konjaci
  misc_feature (1)..(212): tr|A0A1I1SK63|A0A1I1SK63_9BURK 7-carboxy-7-deazaguanine synthase OS=Acidovorax konjaci OX=32040 GN=queE PE=3 S V=1
MTYSVKEIFYTLQGEGGQAGTPAVFCRFAGCNLWSGREEDRSSAVCRFCDTDFVGTDGTLGGKYATADALADVVAAQWPAHDADHRLVVITGGEPLLQLDAPLIDALHARGLRIAVESNGTIAAPPGIDWLCISPKAGAPWVQREGQELKLVWPQPGFDLAALESQTRFTHRFLQPMDGPDQAAHTARCIDACLERPAWRLSLQTHKLTGIR

SEQ ID NO: 27303 - protein, 212 aa, Acidovorax radicis
  misc_feature (1)..(212): tr|A0A561CP15|A0A561CP15_9BURK 7-carboxy-7-deazaguanine synthase OS=Acidovorax radicis OX=758826 GN=queE PE=3 SV=1
MTYSVKEIFYTLQGEGGQAGMPAVFCRFAGCNLWSGREADRASAICRFCDTDFVGTDGTLGGKFADADALAERIAAQWPAHDAAHRLVVLTGGEPLLQVDAALIEALHARRFRIAVETNGSVAAPPGIDWLCVSPKAGAPWVQQQGQELKLVWPQAGMDLAAIAATGQFAQRFLQPMDGPDQAAHIALCIATCMEQPAWRLSLQTHKISGIR

SEQ ID NO: 27304 - protein, 211 aa, Acidovorax soli
  misc_feature (1)..(211): tr|A0A1H3W7Q0|A0A1H3W7Q0_9BURK 7-carboxy-7-deazaguanine synthase OS=Acidovorax soli OX=592050 GN=queE PE=3 SV= 1
MTYSVKEIFYTLQGEGGQAGTPAVFCRFAGCNLWTGREQDRAQAVCQFCDTDFVGTDGTLGGKFETATALAGLIAAQWPAGAGHRLVVLTGGEPLLQVDSELIDALHAQQFRIAVESNGTVAAPNGIDWLCISPKAGAPWVQRSGQELKLVWPQPGFDLQALEQDTHFTHRFLQPMDGLLQRQNTAACIDACLAHPAWRLSLQTHKLTGIR

SEQ ID NO: 27305 - protein, 211 aa, Acidovorax sp.
  misc_feature (1)..(211): tr|A0A495FGR6|A0A495FGR6_9BURK 7-carboxy-7-deazaguanine synthase OS=Acidovorax sp. 93 OX=2135632 GN=queE PE=3 SV=1
MTYSVKEIFYTLQGEGGQAGTPAVFCRFAGCNLWTGREQDRAQAICQFCDTDFVGTDGTLGGKFETATALAELIAAQWPAGAGHRLVVLTGGEPLLQVDTALIDALHAQQFRIAVESNGTVAAPEGIDWLCISPKAGAPWVQRSGQELKLVWPQPGFDLQALEQDTQFTHRFLQPMDGLLQRQNTAACIDACLAHPAWRLSLQTHKLTGIR

SEQ ID NO: 27306 - protein, 211 aa, Acidovorax sp.
  misc_feature (1)..(211): tr|A0A1Q3J5A8|A0A1Q3J5A8_9BURK 7-carboxy-7-deazaguanine synthase OS=Acidovorax sp. 65-7 OX=1895692 GN=queE PE= 3 SV=1
MTYSVKEIFYTLQGEGGQAGTPAVFCRFAGCNLWTGREQDRAQAICQFCDTDFVGTDGTLGGKFETATALAELIAAQWPAGAGHRLVVLTGGEPLLQVDSDLIDALHAQQFRIAVESNGTVAAPEGIDWLCISPKAGAPWVQRSGQELKLVWPQPGFDLQALEQDTQFTHRFLQPMDGLLQRQNTAACIDACLAHPAWRLSLQTHKLTGIR

SEQ ID NO: 27307 - protein, 211 aa, Acidovorax temperans
  misc_feature (1)..(211): tr|A0A543LAA4|A0A543LAA4_9BURK 7-carboxy-7-deazaguanine synthase OS=Acidovorax temperans OX=80878 GN=queE PE=3 SV=1
MTYSVKEIFYTLQGEGGQAGTPAVFCRFAGCNLWTGREQDRAQAICQFCDTDFVGTDGTLGGKFETAAALAELIAAQWPAGAGHRLVVLTGGEPLLQVDRELIDALHAQQFRIAVESNGTVKAPEGIDWLCISPKAGAPWVQRSGQELKLVWPQPGFDLPTLEQDTDFAQRYLQPMDGPLQRQNTALCIDTCMQRPAWRLSLQTHKLTGIR

SEQ ID NO: 27308 - protein, 212 aa, Acidovorax valerianellae
  misc_feature (1)..(212): tr|A0A1G6PH11|A0A1G6PH11_9BURK 7-carboxy-7-deazaguanine synthase OS=Acidovorax valerianellae OX=187868 GN=queE PE=3 SV=1
MTYSVKEIFYTLQGEGGQAGTPAVFCRFAGCNLWSGREEDRATAVCRFCDTDFVGTDGTLGGKFATADALADVIAAQWPAHDAAHRLVVLTGGEPLLQVDAAFIDALHARRFRIAVESNGTVAAPPGIDWLCISPKAGAPWLQQSGQELKLVWPQPGFDLAALEVQTQFTHRFLQPMDGPDQAANTERCIAACLERPAWRLSLQTHKLTGIR

SEQ ID NO: 27309 - protein, 212 aa, Acidovorax wautersii
  misc_feature (1)..(212): tr|A0A1I2BQI0|A0A1I2BQI0_9BURK 7-carboxy-7-deazaguanine synthase OS=Acidovorax wautersii OX=1177982 GN=queE PE =3 SV=1
MTYSVKEIFYTLQGEGGQAGTPAVFCRFAGCNLWSGREEDRASAICRFCDTDFVGTDGTLGGKFATADALADLIAAQWPAHDEQHRLVVLTGGEPLLQVDAALVDALHARRFRIAVESNGTVAAPAGIDWLCISPKAGADWVQRQGQELKLVWPQPGFDLAALEAQTRFTHRFLQPMDGPDQAANTALCIEACMQRPAWRLSLQTHKLTGIR

SEQ ID NO: 27310 - protein, 236 aa, Acinetobacter albensis
  misc_feature (1)..(236): tr|A0A1C4GV69|A0A1C4GV69_9GAMM 7-carboxy-7-deazaguanine synthase OS=Acinetobacter albensis OX=1673609 GN=queE PE=3 SV=1
MNTLRSSAIPVSDPSAGLRITEIFYSLQGEANAAGLPTVFIRLTGCPLRCSYCDTTYSFEGGERQSLEQIIQTTLDFKTPYICVTGGEPLAQPNALPLMTRLADLGCEVSLETSGALDVSKVDPRVSKVLDLKTPTSGEEHRNLLSNLDYLTQHDQIKFVICNREDYEWSKQQVKQYQLNNKVSTVWFSPAFAVEKGHVGLPQLARDLAQWILDDHLPVRFQLQLHKLLWNDETGR

SEQ ID NO: 27311 - protein, 238 aa, Acinetobacter apis
  misc_feature (1)..(238): tr|A0A217EF26|A0A217EF26_9GAMM 7-carboxy-7-deazaguanine synthase OS=Acinetobacter apis OX=1229165 GN=queE PE=3 SV=1
MTTSSLRSQAIPVTNPSAGLRITEIFYSLQGEADTAGLPTVFIRLTGCPLRCTYCDTTYSFEGGQRQTLESIIDTAKSHNTPYICVTGGEPLAQPNCIPLLKQLCDLGFDVSLETSGALDVSQVDPRVSKVLDLKTPASGESHRNLMSNLDHLTPRDQIKFVICDRNDYEWSKQQVLDYQLNQKVNTVWFSPAFAVDKTQAKLPRFARDLAQWLLEDHIPVRFQLQLHKLLWQDEMGR

SEQ ID NO: 27312 - protein, 434 aa, Acinetobacter baumannii
  misc_feature (1)..(434): tr|A0A3D5C6B5|A0A3D5C6B5_ACIBA Multifunctional fusion p rotein OS=Acinetobacter baumannii OX=470 GN=queC PE=3 S V=1
  misc_feature (214)..(214): Xaa can be any naturally occurring amino acid
MASLRSSAIPVSDPASGLRITEIFYSLQGEANASGLPTVFIRLTGCPLRCSYCDTTYSFEGGERLSLEHIIETAEKYQTPYICVTGGEPLAQPNCLILLQRLCDAGFDVSLETSGALDVSRVDPRVSKVLDLKTPTSGEEHRNLISNLDHLTPRDQIKFVICNREDYEWSKQQVEQYQLQTKVSTVWFSPAFAVEKGAVGLPRLARDLAQWILXRAIVLLSGGLDSTTCLAWAQARYECIAISFMYGQRSTTELDAAKALAQRAGVEHRVINIDLANLGGSALTDHNIAVPEQLQEGIPVTYVPARNTIFLSYALAAAEVFNAEAIVIGINAVDYSGYPDCRPEFIDAFANMARLATKAGVEGKPLKFETPLLHLSKANIIRLGIEHGVDYSQTVSCYQADAQGRACGKCDSCRLRKEGFIDAGVTDPTRYIPQ

SEQ ID NO: 27313 - protein, 236 aa, Acinetobacter baumannii
  misc_feature (1)..(236): tr|S3TW68|S3TW68_ACIBA 7-carboxy-7-deazaguanine synthas e OS=Acinetobacter baumannii NIPH 410 OX=1217634 GN=que E PE=3 SV=1
MASLRSSAIPVSDPASGLRITEIFYSLQGEANASGLPTVFIRLTGCPLRCSYCDTTYSFEGGERLSLEHIIETAEKYQTPYICVTGGEPLAQPNCLILLQRLCDAGFDVSLETSGALDVSRVDPRVSKVLDLKTPTSGEEHRNLISNLDHLTPRDQIKFVICNREDYEWSKQQVEQYQLQTKVSTVWFSPAFAVEKGAVGLPRLARDLAQWILDDKLPVRFQLQLHKLLWNDESGR

SEQ ID NO: 27314 - protein, 245 aa, Acinetobacter baylyi
  misc_feature (1)..(245): tr|Q6F9A4|Q6F9A4_ACIAD 7-carboxy-7-deazaguanine synthas e OS=Acinetobacter baylyi (strain ATCC 33305 / BD413 / ADP1) OX=62977 GN=queE PE=3 SV=1
MFSNLGNSAMTSLRSTTIPVSDPAAGLRITEIFYSLQGEANAAGLPTVFIRLTGCPLRCTYCDTTYSFEGGERLSLDEIINTALSYKTPYICVTGGEPLAQPNCLILLSRLSDLGCQVSLETSGTLDVSKVDPRVSKVLDLKTPTSGEEKRNLLSNLDYLTQHDQIKFVICNHEDYIWSKQQVVEYQLEKKVSTVWFSPAFAVEKGAVKLPQLARDLAQWILDDHLPVRFQLQLHKLLWNDETGR

SEQ ID NO: 27315 - protein, 236 aa, Acinetobacter beijerinckii
  misc_feature (1)..(236): tr|N9FFH5|N9FFH5_9GAMM 7-carboxy-7-deazaguanine synthas e OS=Acinetobacter beijerinckii CIP 110307 OX=1217648 G N=queE PE=3 SV=1
MASLRSSAIPVSDPAAGLRITEIFYSLQGEANTFGLPTVFIRLTGCPLRCSYCDTTYSFEGGERQSLEQIIETASQHKTPYICVTGGEPLAQPNCLILLQRLCDLGFEVSLETSGALDVSKVDPRVSKVLDLKTPTSNEDHRNLFTNIDYLTQHDQIKFVICNRADYEWSKLQLEKLQLQDKVSTVWFSPAFAVEKGAVALPAFACDLAQWILEDHLPVRFQLQLHKLLWNDESGR

SEQ ID NO: 27316 - protein, 236 aa, Acinetobacter beijerinckii
  misc_feature (1)..(236): tr|N9FH41|N9FH41_9GAMM 7-carboxy-7-deazaguanine synthas e OS=Acinetobacter beijerinckii ANC 3835 OX=1217649 GN= queE PE=3 SV=1
MASLRSSAIPVSDPAAGLRITEIFYSLQGEANTFGLPTVFIRLTGCPLRCSYCDTTYSFEGGERQSLEQIIETANQHKTPYICVTGGEPLAQPNCLILLQRLCDLGFEVSLETSGALDVSKVDPRVSKVLDLKTPTSNEDHRNLFTNIDYLTQHDQIKFVICNRADYEWSKLQLEQLQLQDKVSTVWFSPAFAVEKGAVALPALARDLAQWILEDHLPVRFQLQLHKLLWNDESGR

SEQ ID NO: 27317 - protein, 236 aa, Acinetobacter bereziniae
  misc_feature (1)..(236): tr|N8XEJ1|N8XEJ1_ACIBZ 7-carboxy-7-deazaguanine synthas e OS=Acinetobacter bereziniae NIPH 3 OX=1217651 GN=queE PE=3 SV=1
MNSLRSSTIPVSDPSAGLRITEIFYSLQGEANTLGLPTVFIRLTGCPLRCTYCDTTYSFEGGERQSLDQIIQTALDYKTPYICVTGGEPLAQPNALPLMQRLADLGCEVSLETSGALDVSKVDSRVSKVLDLKTPTSGEVTRNLITNFEHLTPHDQIKFVICNREDYEWSKQQVEHYALNQKVSTVWFSPAFAVEKGATRLPQLARDLAQWILEDHLPVRFQLQLHKLLWNDETGR

SEQ ID NO: 27318 - protein, 236 aa, Acinetobacter bereziniae
  misc_feature (1)..(236): tr|A0A3S0AYD3|A0A3S0AYD3_ACIBZ 7-carboxy-7-deazaguanine synthase OS=Acinetobacter bereziniae OX=106648 GN=queE PE=3 SV=1
MSSLRSSTIPVSDPSAGLRITEIFYSLQGEANTLGLPTVFIRLTGCPLRCTYCDTTYSFEGGERQSLDQIIQTALDYKTPYICVTGGEPLAQPNALPLMQRLADLGCEVSLETSGALDVSKVDSRVSKVLDLKTPTSGEVTRNLITNFEHLTPHDQIKFVICNREDYEWSKQQVELYALNQKVSTVWFSPAFAVEKGATRLPQLARDLAQWILEDHLPVRFQLQLHKLLWNDETGR

SEQ ID NO: 27319 - protein, 236 aa, Acinetobacter bohemicus
  misc_feature (1)..(236): tr|A0A1I6U4K1|A0A1I6U4K1_9GAMM 7-carboxy-7-deazaguanine synthase OS=Acinetobacter bohemicus OX=1435036 GN=queE PE=3 SV=1
MNTLRSSTIPVSDPSAGLRITEIFYSLQGEANAAGLPTVFIRLTGCPLRCTYCDTTYSFEGGERQSLEQIIQTTLDFKTPYICVTGGEPLAQPNALPLMTRLADLGCEVSLETSGALDVSKVDPRVSKVLDLKTPTSGEEKRNLLSNLDHLTQHDQIKFVICNREDYEWSKQQVEQYQLVDKVSTVWFSPAFAVEKGNVRLPQLARDLAQWILEDHLPVRFQLQLHKLLWNDETGR

SEQ ID NO: 27320 - protein, 236 aa, Acinetobacter bohemicus; identical to SEQ ID NO: 27319
  misc_feature (1)..(236): tr|N8NY33|N8NY33_9GAMM 7-carboxy-7-deazaguanine synthas e OS=Acinetobacter bohemicus ANC 3994 OX=1217715 GN=que E PE=3 SV=1

SEQ ID NO: 27321 - protein, 237 aa, Acinetobacter boissieri
  misc_feature (1)..(237): tr|A0A1G6II40|A0A1G6II40_9GAMM 7-carboxy-7-deazaguanine synthase OS=Acinetobacter boissieri OX=1219383 GN=queE PE=3 SV=1
MNALRRSKSIPVTDPTAGLKITEIFYSLQGEADAAGLPTVFIRLTGCPLRCTYCDTTYSFEGGQRQSLESIIATAKSYNTPYICVTGGEPLAQPNCIALLTQLCDLGFEVSLETSGALDVSKVDPRVSKVLDLKTPTSGEDHRNLMSNLAHLTPKDQIKFVICNQTDYEWSKQQVLFYQLHKKVNTVWFSPAFAVEKGNAKLPQFARDLAQWLLDDQLPVRFQLQLHKLLWQDETGR

SEQ ID NO: 27322 - protein, 236 aa, Acinetobacter bouvetii
  misc_feature (1)..(236): tr|A0A4Q7ATB1|A0A4Q7ATB1_9GAMM 7-carboxy-7-deazaguanine synthase OS=Acinetobacter bouvetii OX=202951 GN=queE P E=3 SV=1
MSTLRSSAIPVSDPSAGLRITEIFYSLQGEANTAGLPTVFIRLTGCPLRCTYCDTTYSFEGGERQSLDDIIQTALDFKTPFICVTGGEPLAQPNALPLMQRLADLGCEVSLETSGALDVSKVDPRVSKVLDLKTPTSGESARNLLSNIDYLTEHDQVKFVICNREDYEWSKQQVKQLKLNEKAGTIWFSPAFAVEKGAVRLPQLARDLAQWILEDHLPVRFQLQLHKLLWNDETGR

SEQ ID NO: 27323 - protein, 251 aa, Acinetobacter bouvetii
  misc_feature (1)..(251): tr|N9DL79|N9DL79_9GAMM 7-carboxy-7-deazaguanine synthas e OS=Acinetobacter bouvetii DSM 14964 = CIP 107468 OX=1 120925 GN=queE PE=3 SV=1
MTVEILFFCLWLFFVMSTLRSSAIPVSDPSAGLRITEIFYSLQGEANTAGLPTVFIRLTGCPLRCTYCDTTYSFEGGERQSLDDIIQTALDFKTPFICVTGGEPLAQPNALPLMQRLADLGCEVSLETSGALDVSKVDPRVSKVLDLKTPASGESARNLLSNIDYLTEHDQIKFVICNREDYEWSKQQVEQLKLNEKAGTIWFSPAFAVEKGAVRLPQLARDLAQWILEDHLPVRFQLQLHKLLWNDETGR

SEQ ID NO: 27324 - protein, 236 aa, Acinetobacter brisouii
  misc_feature (1)..(236): tr|V2U9J2|V2U9J2_9GAMM 7-carboxy-7-deazaguanine synthas e OS=Acinetobacter brisouii CIP 110357 OX=1341683 GN=qu eE PE=3 SV=1
MNPLRSSQIPVTDPAAGLRITEIFYSLQGEANTAGLPTVFIRLTGCPLRCTYCDTTYSFEGGERWSLDKIIETAQAYQTPYICVTGGEPLAQPNCIALLNRLCELGFEVSLETSGALDVSKVDQRVSKVLDLKTPTSGEAHRNLLSNLDLLTTKDQIKFVICNREDYEWSKQQLAEYQLQQKVSTVWFSPAFAVEKGNAKLPRFARDLAQWILDDHLPVRFQLQLHKLLWQDETGR

SEQ ID NO: 27325 - protein, 236 aa, Acinetobacter calcoaceticus
  misc_feature (1)..(236): tr|A0A1A0GL96|A0A1A0GL96_ACICA 7-carboxy-7-deazaguanine synthase OS=Acinetobacter calcoaceticus OX=471 GN=queE PE=3 SV=1
MASLRSSAIPVSDPASGLRITEIFYSLQGEANASGLPTVFIRLTGCPLRCSYCDTTYSFEGGERFSLEHIIETATQFQTPYICVTGGEPLAQPNCLILLQRLCEAGFDVSLETSGALDVSRVDPHVSKVLDLKTPTSGEEHRNLISNLDHLTSRDQIKFVICNREDYEWSKQQVEKYQLQTKVSTVWFSPAFAVEKGAVGLPRLARDLAQWILDDKLPVRFQLQLHKLLWNDESGR

SEQ ID NO: 27326 - protein, 236 aa, Acinetobacter calcoaceticus; identical to SEQ ID NO: 27313
  misc_feature (1)..(236): tr|A0A1C4HLG6|A0A1C4HLG6_ACICA 7-carboxy-7-deazaguanine synthase OS=Acinetobacter calcoaceticus OX=471 GN=queE PE=3 SV=1

SEQ ID NO: 27327 - protein, 236 aa, Acinetobacter calcoaceticus; identical to SEQ ID NO: 27313
  misc_feature (1)..(236): tr|A0A2S4T6R2|A0A2S4T6R2_9GAMM 7-carboxy-7-deazaguanine synthase OS=Acinetobacter calcoaceticus/baumannii comp lex sp. ABNIH27 OX=2080673 GN=queE PE=3 SV=1

SEQ ID NO: 27328 - protein, 236 aa, Acinetobacter celticus
  misc_feature (1)..(236): tr|A0A1C3CWN0|A0A1C3CWN0_9GAMM 7-carboxy-7-deazaguanine synthase OS=Acinetobacter celticus OX=1891224 GN=queE PE=3 SV=1
MNTLRSSAIPVSDPSAGLRITEIFYSLQGEANAAGLPTVFIRLTGCPLRCTYCDTTYSFEGGERKSLEEIIQTTLDFKTPYICVTGGEPLAQPNALPLMSRLADLGCDVSLETSGALDVSKVDPRVSKILDLKTPTSGEVTRNLLSNFDHLTQHDQIKFVICNREDYEWSKQQVEQYALNEKVSTVWFSPAFAVEKGVVRLPQLARDLAQWILEDHLPVRFQLQLHKLLWNDETGR

SEQ ID NO: 27329 - protein, 236 aa, Acinetobacter colistiniresistens
  misc_feature (1)..(236): tr|N9PJI4|N9PJI4_9GAMM 7-carboxy-7-deazaguanine synthas e OS=Acinetobacter colistiniresistens OX=280145 GN=queE PE=3 SV=1
MASLRSSAIPVSDPAAGLRITEIFYSLQGEANTFGLPTVFIRLTGCPLRCSYCDTTYSFEGGERLSLEQIIETASQHKTPYICVTGGEPLAQPNCLILLQRLCDLGFDVSLETSGALDVSKVDPRVSKVLDLKTPTSKEDHRNLYSNLDYLTQHDQIKFVICNREDYEWSRQQLEQFQLQNKVSTVWFSPAFAVEKGAVALPALARDLAQWILEDHLPIRFQLQLHKLLWNDESGR

SEQ ID NO: 27330 - protein, 236 aa, Acinetobacter colistiniresistens
  misc_feature (1)..(236): tr|S3TC99|S3TC99_9GAMM 7-carboxy-7-deazaguanine synthas e OS=Acinetobacter colistiniresistens OX=280145 GN=queE PE=3 SV=1
MASLRSSAIPVSDPAAGLRITEIFYSLQGEANTFGLPTVFIRLTGCPLRCSYCDTTYSFEGGERLSLEQIIETASQHKTPYICVTGGEPLAQPNCLILLQRLCDLGFDVSLETSGALDVSKVDPRVSKVLDLKTPTSKEDHRNLYSNLDYLTQHDQIKFVICNREDYEWSRQQLEQFQLQNKVSTVWFSPAFAVEKGAVALPALARDLAQWILEDHLPVRFQLQLHKLLWNDESGR

SEQ ID NO: 27331 - protein, 236 aa, Acinetobacter cumulans
  misc_feature (1)..(236): tr|A0A4P8DWU1|A0A4P8DWU1_9GAMM 7-carboxy-7-deazaguanine synthase OS=Acinetobacter cumulans OX=2136182 GN=queE PE=3 SV=1
MSTLRSSAIPVSDPSAGLRITEIFYSLQGEANAAGLPTVFIRLTGCPLRCTYCDTTYSFEGGQRQSLEEIIQTTLDFKTPYICVTGGEPLAQPNALPLMTKLADLGCQVSLETSGALDVSKVDPRVSKVLDLKTPTSGESARNLLSNLDYLTEHDQIKFVICNREDYEWSKQQVEQFQLHQKVSTVWFSPAFAVEKGAARLPQLARDLAQWILDDHLPVRFQLQLHKLLWNDETGR

SEQ ID NO: 27332 - protein, 236 aa, Acinetobacter cumulans
  misc_feature (1)..(236): tr|A0A3A8GDY1|A0A3A8GDY1_9GAMM 7-carboxy-7-deazaguanine synthase OS=Acinetobacter cumulans OX=2136182 GN=queE PE=3 SV=1
MSTLRSSAIPVSDPSAGLRITEIFYSLQGEANAAGLPTVFIRLTGCPLRCTYCDTTYSFEGGQRQSLEEIIQTTLDFKTPYICVTGGEPLAQPNALPLMTKLADLGCQVSLETSGALDVSKVDPRVSKVLDLKTPTSGESARNLLSNLDYLTEHDQIKFVICNREDYEWSKQQVEQFQLHQKVSTVWFSPAFAVEKGAVRLPQLARDLAQWILDDHLPVRFQLQLHKLLWNDETGR

SEQ ID NO: 27333 - protein, 236 aa, Acinetobacter defluvii
  misc_feature (1)..(236): tr|A0A2S2FF82|A0A2S2FF82_9GAMM 7-carboxy-7-deazaguanine synthase OS=Acinetobacter defluvii OX=1871111 GN=queE PE=3 SV=1
MTSLRSSSIHVSDPSAGLRITEIFYSLQGEANAAGLPTVFIRLTGCPLRCTYCDTTYSFEGGERQSLEDIIQTTLSFQTPYICVTGGEPLAQPNALPLMTRLADLGCEVSLETSGALDVSKVDPRISKVLDLKTPTSGESHRNLLSNLEHLTLKDQIKFVICNREDYDWAKQQMAEFQLNKKVSTVWFSPAFAVEKGAVRLPQLARDLAQWILDDHLPVRFQLQLHKLLWNDETGR

SEQ ID NO: 27334 - protein, 236 aa, Acinetobacter equi
  misc_feature (1)..(236): tr|A0A0N9W4C8|A0A0N9W4C8_9GAMM 7-carboxy-7-deazaguanine synthase OS=Acinetobacter equi OX=1324350 GN=queE PE=3 SV=1
MTHLRSSAIPVSDPSAGLRITEIFYSLQGEADTAGLPTVFIRLTGCPLRCTYCDTTYSFEGGERKSLEEIIQTTLDFKTPYICVTGGEPLAQPNALPLMQRLADLGCEVSLETSGALDVSKVDVRVSKVLDLKTPTSGEVTRNLLSNFDHLTQHDQIKFVICNREDYEWSKEQVEKYQLNDKVSTIWFSPAFAVEKGAVRLPQLARDLAQWILEDHLPVRFQLQLHKLLWNDETGR

SEQ ID NO: 27335 - protein, 236 aa, Acinetobacter gandensis
  misc_feature (1)..(236): tr|A0A1A7RBQ4|A0A1A7RBQ4_9GAMM 7-carboxy-7-deazaguanine synthase OS=Acinetobacter gandensis OX=1443941 GN=queE PE=3 SV=1
MSTLRSSTIPVSDPSAGLRITEIFYSLQGEANTAGLPTVFIRLTGCPLRCTYCDTTYSFEGGERQSLEEIIQTTLDFKTPYICVTGGEPLAQPNALPLMTRLADLGCEVSLETSGALDVSKVDPRVSKVMDLKTPTSGEVARNLLSNFDHLTQHDQIKFVICNREDYEWSKQQVEQYKLNEKVSTIWFSPAFAVEKGAVRLPQLARDLAQWILEDHLPVRFQLQLHKLLWNDETGR

SEQ ID NO: 27336 - protein, 236 aa, Acinetobacter genomosp.
  misc_feature (1)..(236): tr|A0A1V2V3Z8|A0A1V2V3Z8_9GAMM 7-carboxy-7-deazaguanine synthase OS=Acinetobacter genomosp. 33YU OX=1675530 GN =queE PE=3 SV=1
MASLRSSAIPVSDPASGLRITEIFYSLQGEANASGLPTVFIRLTGCPLRCTYCDTTYSFEGGERLSLEHIIETAEKYKTPYICVTGGEPLAQPNCLILLQRLCDAGFDVSLETSGALDVSKVDPRVSKVLDLKTPTSGEEHRNLISNLDYLTSHDQIKFVICNREDYEWSKQQVEQYQLQTKVSTVWFSPAFAVEKGAVGLPRLARDLAQWILDDKMPVRFQLQLHKLLWNDESGR

SEQ ID NO: 27337 - protein, 236 aa, Acinetobacter gerneri
  misc_feature (1)..(236): tr|N8ZPL1|N8ZPL1_9GAMM 7-carboxy-7-deazaguanine synthas e OS=Acinetobacter gerneri DSM 14967 = CIP 107464 OX=11 20926 GN=queE PE=3 SV=1
MNSLRTQNIPVTDPASGLRITEIFYSLQGEANAAGLPTVFIRLTGCPLRCTYCDTTYSFEGGERQSLEEIIQTAKSFNTPYICVTGGEPLAQPNCLVLLEQLCELGFDVSLETSGALDVSKVDPRVSKVLDLKTPTSGEDKRNLLSNLEHLSKRDQIKFVICNREDYEWSKQQVQQHHLDQLVSSVWFSPAFAVEKNAAKLPELAKNLAQWILDDQLSVRFQLQLHKLLWNDETGR

SEQ ID NO: 27338 - protein, 236 aa, Acinetobacter guillouiae
  misc_feature (1)..(236): tr|A0A077L2F5|A0A077L2F5_ACIGI 7-carboxy-7-deazaguanine synthase OS=Acinetobacter guillouiae OX=106649 GN=queE PE=3 SV=1
MNSLRSSTIPVSDPSAGLRITEIFYSLQGEANTAGLPTVFIRLTGCPLRCTYCDTTYSFEGGERQSLDQIIQTTLDYKTPYICVTGGEPLAQPNALPLMQRLADLGCEVSLETSGALDVSKVDPRVSKVLDLKTPTSGEVARNLLSNLDHLTQHDQIKFVICNREDYEWSKQQVEQYALAQKVSTVWFSPAFAVEKGAARLPQLARDLAQWILEDHLPVRFQLQLHKLLWNDETGR

SEQ ID NO: 27339 - protein, 236 aa, Acinetobacter guillouiae; identical to SEQ ID NO: 27338
  misc_feature (1)..(236): tr|N8WTB0|N8WTB0_ACIGI 7-carboxy-7-deazaguanine synthas e OS=Acinetobacter guillouiae NIPH 991 OX=1217656 GN=qu eE PE=3 SV=1

SEQ ID NO: 27340 - protein, 236 aa, Acinetobacter gyllenbergii
  misc_feature (1)..(236): tr|A0A1B8UHP3|A0A1B8UHP3_9GAMM 7-carboxy-7-deazaguanine synthase OS=Acinetobacter gyllenbergii OX=134534 GN=qu eE PE=3 SV=1
MASLRSSAIPVSDPAAGLRITEIFYSLQGEANTFGLPTVFIRLTGCPLRCSYCDTTYSFEGGERLSLEHIIETASQHKTPYICVTGGEPLAQPNCLILLQRLCDLGFEVSLETSGALDVSKVDPRVSKVLDLKTPTSKEDHRNLYSNLDYLTPHDQIKFVICNREDYEWSRQQLEQFQLQDKVSTIWFSPAFAVEKGAVGLPALARDLAQWILDDHLPVRFQLQLHKLLWNDESGR

SEQ ID NO: 27341 - protein, 236 aa, Acinetobacter gyllenbergii
  misc_feature (1)..(236): tr|V2UL66|V2UL66_9GAMM 7-carboxy-7-deazaguanine synthas e OS=Acinetobacter gyllenbergii NIPH 230 OX=1217658 GN= queE PE=3 SV=1
MASLRSSAIPVSDPAAGLRITEIFYSLQGEANTFGLPTVFIRLTGCPLRCSYCDTTYSFEGGERLSLEHIIETASQHKTPYICVTGGEPLAQPNCLILLQRLCDLGFEVSLETSGALDVSKVDPRVSKVLDLKTPTSKEDHRNLYSNLDYLTPHDQIKFVICNREDYEWSRQQLKQFQLQNKVSTVWFSPAFAIEKGAVGLPALARDLAQWILDDHLPVRFQLQLHKLLWNDESGR

SEQ ID NO: 27342 - protein, 238 aa, Acinetobacter haemolyticus
  misc_feature (1)..(238): tr|D4XS97|D4XS97_ACIHA 7-carboxy-7-deazaguanine synthas e OS=Acinetobacter haemolyticus ATCC 19194 OX=707232 GN =queE PE=3 SV=1
MFMASLRSSAIPVSDPAAGLRITEIFYSLQGEANTFGLPTVFIRLTGCPLRCSYCDTTYSFEGGERLSLEHIIETASQYKTPYICVTGGEPLAQPNCLILLQRLCDLGFQVSLETSGALDVSKVDSRVSKVLDLKTPTSKEDHRNLLTNLDYLTQHDQIKFVICNRADYEWSRQQLEQFQLQDKVSTVWFSPAFAVEKGAVALPALARDLAQWILDDHLPVRFQLQLHKLLWNDESGR

SEQ ID NO: 27343 - protein, 238 aa, Acinetobacter haemolyticus; identical to SEQ ID NO: 27342
  misc_feature (1)..(238): tr|N9FE93|N9FE93_ACIHA 7-carboxy-7-deazaguanine synthas e OS=Acinetobacter haemolyticus NIPH 261 OX=1217986 GN= queE PE=3 SV=1

SEQ ID NO: 27344 - protein, 236 aa, Acinetobacter halotolerans
  misc_feature (1)..(236): tr|A0A4Q6XE37|A0A4Q6XE37_9GAMM 7-carboxy-7-deazaguanine synthase OS=Acinetobacter halotolerans OX=1752076 GN=q ueE PE=3 SV=1
MASLRSSAIPVSDPAAGLRITEIFYSLQGEANTFGLPTVFIRLTGCPLRCSYCDTTYSFEGGERLSLEHIIETASQFKTPYICVTGGEPLAQPNCLILLQRLCDLGFQVSLETSGALDVAKVDPRVSKVLDLKTPTSKEDHRNLFSNFDYLTQHDQIKFVICNRADYEWSKQQLEQFQLQTKVSTVWFSPAFAVEKGAAVLPTFARDLAQWILDDHLPVRFQLQLHKLLWNDESGR

SEQ ID NO: 27345 - protein, 236 aa, Acinetobacter idrijaensis
  misc_feature (1)..(236): tr|A0A098YE09|A0A098YE09_9GAMM 7-carboxy-7-deazaguanine synthase OS=Acinetobacter idrijaensis OX=1507807 GN=qu eE PE=3 SV=1
MNTLRSSAIPVSDPSAGLRITEIFYSLQGEANAAGLPTVFIRLTGCPLRCSYCDTTYSFEGGERQSLDDIIQTTLDFKTPYVCVTGGEPLAQPNALPLMQRLADLGCEVSLETSGALDVSKVDPRVSKVLDLKTPASGEVARNLLSNLDHLTAHDQIKFVICNREDYEWSKQQLELYQLQDKVSTVWFSPAFAVEKGAVRLPPLARDLAQWILEDHLPVRFQLQLHKLLWNDETGR

SEQ ID NO: 27346 - protein, 236 aa, Acinetobacter indicus
  misc_feature (1)..(236): tr|V2ULJ2|V2ULJ2_9GAMM 7-carboxy-7-deazaguanine synthas e OS=Acinetobacter indicus CIP 110367 OX=1341679 GN=que E PE=3 SV=1
MSTLRSSAIPVSDPSAGLRITEIFYSLQGEANTSGLPTVFIRLTGCPLRCTYCDTTYSFEGGERQSLEAIIQTTLDFNTPYVCVTGGEPLAQPNALPLMQRLADLGCEVSLETSGALDVSKVDPRVSKVLDLKTPTSGEVARNLLSNLDYLTAHDQIKFVICNREDYEWSKQQLELYQLHKKVSTVWFSPAFEVENGAARMPQLARDLAQWILEDHLPVRFQLQLHKLLWNDETGR

SEQ ID NO: 27347 - protein, 236 aa, Acinetobacter indicus
  misc_feature (1)..(236): tr|A0A437J0I7|A0A437J0I7_9GAMM 7-carboxy-7-deazaguanine synthase OS=Acinetobacter indicus OX=756892 GN=queE PE =3 SV=1
MSTLRSSAIPVSDPSAGLRITEIFYSLQGEANTSGLPTVFIRLTGCPLRCTYCDTTYSFEGGERQSLEAIIQTTLDFNTPYVCVTGGEPLAQPNALPLMQRLADLGCEVSLETSGALDVSKVDPRVSKVLDLKTPTSGEVARNLLSNLDYLTAHDQIKFVICNREDYEWSKQQVELYQLHKKVSTVWFSPAFEVENGAARMPQLARDLAQWILEDHLPVRFQLQLHKLLWNDETGR

SEQ ID NO: 27348 - protein, 236 aa, Acinetobacter johnsonii
  misc_feature (1)..(236): tr|A0A239RZ49|A0A239RZ49_ACIJO 7-carboxy-7-deazaguanine synthase OS=Acinetobacter johnsonii OX=40214 GN=queE P E=3 SV=1
MNTLRSSAIPVSDPSAGLRITEIFYSLQGEANTSGLPTVFIRLTGCPLRCTYCDTTYSFEGGERQSLDQIIQTTLDFKTPYVCVTGGEPLAQPNALPLMQRLADLGCEVSLETSGALDVSKVDPRVSKVLDLKTPTSGEVARNLLSNLDHLTQHDQIKFVICNREDYEWSKQQVEDYKLNEKVSTVWFSPAFAVEKGAARLPQLARDLAQWILEDHLPVCFQLQLHKLLWNDETGR

SEQ ID NO: 27349 - protein, 236 aa, Acinetobacter johnsonii
  misc_feature (1)..(236): tr|N9BEB2|N9BEB2_ACIJO 7-carboxy-7-deazaguanine synthas e OS=Acinetobacter johnsonii ANC 3681 OX=1217662 GN=que E PE=3 SV=1
MNTLRSSAIPVSDPSAGLRITEIFYSLQGEANTSGLPTVFIRLTGCPLRCTYCDTTYSFEGGERQSLDQIIQTTLDFKTPYVCVTGGEPLAQPNALPLMQRLADLGCAVSLETSGALDVSKVDPRVSKVLDLKTPTSGEVARNLLSNLDHLTQHDQIKFVICNREDYEWSKQQVEDYKLNEKVSTVWFSPAFAVEKGAARLPQLARDLAQWILEDHLPVCFQLQLHKLLWNDETGR

SEQ ID NO: 27350 - protein, 236 aa, Acinetobacter junii
  misc_feature (1)..(236): tr|D0SK34|D0SK34_ACIJU 7-carboxy-7-deazaguanine synthas e OS=Acinetobacter junii SH205 OX=575587 GN=queE PE=3 S V=1
MTSLRSSAIPVSDPAAGLRITEIFYSLQGEANTFGLPTVFIRLTGCPLRCSYCDTTYSFEGGERQSLEHIIETASQFKTPYICVTGGEPLAQPNCLVLLQRLCDLGFDVSLETSGALDVSKVDPRVSKVLDLKTPTSNEDHRNLLTNLDYLTQHDQIKFVICNRADYEWSKQQLENFQLQDKVSTVWFSPAFAVEKGAVALPALARDLAQWILDDHLPVRFQLQLHKLLWNDESGR

SEQ ID NO: 27351 - protein, 236 aa, Acinetobacter junii
  misc_feature (1)..(236): tr|A0A365PH15|A0A365PH15_ACIJU 7-carboxy-7-deazaguanine synthase OS=Acinetobacter junii OX=40215 GN=queE PE=3 SV=1
MTSLRSSAIPVSDPAAGLRITEIFYSLQGEANTFGLPTVFIRLTGCPLRCSYCDTTYSFEGGERQSLEHIIETASQFKTPYICVTGGEPLAQPNCLVLLQRLCDLGFDVSLETSGALDVSKVDPRVSKVLDLKTPTSNEDHRNLLINLDYLTQHDQIKFVICNRADYEWSKQQLENFQLQDKVSTVWFSPAFAVEKGAVALPALARDLAQWILDDHLPVRFQLQLHKLLWNDESGR

SEQ ID NO: 27352 - protein, 236 aa, Acinetobacter kookii
  misc_feature (1)..(236): tr|A0A1G6H0M4|A0A1G6H0M4_9GAMM 7-carboxy-7-deazaguanine synthase OS=Acinetobacter kookii OX=1226327 GN=queE PE =3 SV=1
MSTLRSSAIPVTDPSAGLRITEIFYSLQGEANAAGLPTVFIRLTGCPLRCTYCDTTYSFEGGERQSLDDIIQTALDFKTPYICVTGGEPLAQPNALPLMQRLADLGCEVSLETSGALDVSKVDPRVSKVLDFKTPTSGEVARNLLSNLDHLTPHDQIKFVICNREDYEWSKQQVEQFKLADKVSTVWFSPAFAVEKGAVKLPQLARDLAQWILDDHLPVRFQLQLHKLLWNDETGR

SEQ ID NO: 27353 - protein, 236 aa, Acinetobacter kyonggiensis; identical to SEQ ID NO: 27319
  misc_feature (1)..(236): tr|A0A1H3HI96|A0A1H3HI96_9GAMM 7-carboxy-7-deazaguanine synthase OS=Acinetobacter kyonggiensis OX=595670 GN=qu eE PE=3 SV=1

SEQ ID NO: 27354 - protein, 236 aa, Acinetobacter lactucae
  misc_feature (1)..(236): tr|A0A151YMX3|A0A151YMX3_9GAMM 7-carboxy-7-deazaguanine synthase OS=Acinetobacter lactucae OX=1785128 GN=queE PE=3 SV=1
MASLRSSAIPVSDPASGLRITEIFYSLQGEANASGLPTVFIRLTGCPLRCSYCDTTYSFEGGERFSLEHIIETATQFQTPYICVTGGEPLAQPNCLILLQRLCEAGFDVSLETSGALDVSRVDPRVSKVLDLKTPTSGEEHRNLISNLDHLTPHDQIKFVICNREDYEWSKQQVEKYQLHTKVSTVWFSPAFAVEKGAVGLPRLARDLAQWILDDKLPVRFQLQLHKLLWNDESGR

SEQ ID NO: 27355 - protein, 236 aa, Acinetobacter lactucae
  misc_feature (1)..(236): tr|A0A429K9K3|A0A429K9K3_9GAMM 7-carboxy-7-deazaguanine synthase OS=Acinetobacter lactucae OX=1785128 GN=queE PE=3 SV=1
MASLRSSAIPVSDPASGLRITEIFYSLQGEANASGLPTVFIRLTGCPLRCSYCDTTYSFEGGERFSLEHIIETATQFQTPYICVTGGEPLAQPNCLILLQRLCEAGFDVSLETSGALDVSRVDPRVSKVLDLKTPTSGEEHRNLISNLDHLTPHDQIKFVICNREDYEWSKQQVKKYQLHTKVSTVWFSPAFAVEKGAVGLPRLARDLAQWILDDKLPVRFQLQLHKLLWNDESGR

SEQ ID NO: 27356 - protein, 236 aa, Acinetobacter larvae
  misc_feature (1)..(236): tr|A0A1B2LXR4|A0A1B2LXR4_9GAMM 7-carboxy-7-deazaguanine synthase OS=Acinetobacter larvae OX=1789224 GN=queE PE =3 SV=1
MHARRSTAIPVSDPAAGLRITEIFYSLQGEANSAGLATVFIRLTGCPLRCHYCDTTYSFEGGERLSLAHIIDVARAYQTPHICITGGEPLAQPNCIPLMTQLADLGCQVSLETSGALDVSKVDPRVSKVMDLKTPSSGEERKNLLSNLDHLTAHDQIKFVICNREDYIWAKNQVERYRLEQRVGSVWFSPAFAIEKGAVALPALARDLAQWILDDRLQVRFQLQLHKLLWNDETGR

SEQ ID NO: 27357 - protein, 236 aa, Acinetobacter lwoffii
  misc_feature (1)..(236): tr|A0A4Q4DW20|A0A4Q4DW20_ACILW 7-carboxy-7-deazaguanine synthase OS=Acinetobacter lwoffii OX=28090 GN=queE PE= 3 SV=1
MNTLRSSAIPVSDPSAGLRITEIFYSLQGEANAAGLPTVFIRLTGCPLRCSYCDTTYSFEGGERQSLDDIIQTTLDFKTPYVCVTGGEPLAQPNALPLMQRLADLGCEVSLETSGALDVSKVDSRVSKVLDLKTPTSGEVARNLLSNLDHLTAHDQIKFVICNREDYEWSKQQLEQYQLQDKVSTVWFSPAFAVEKGAVRLPPLARDLAQWILEDHLPVRFQLQLHKLLWNDETGR

SEQ ID NO: 27358 - protein, 236 aa, Acinetobacter lwoffii
  misc_feature (1)..(236): tr|N9HC98|N9HC98_ACILW 7-carboxy-7-deazaguanine synthas e OS=Acinetobacter lwoffii ATCC 9957 = CIP 70.31 OX=131 1804 GN=queE PE=3 SV=1
MNTLRSSAIPVSDPSAGLRITEIFYSLQGEANAAGLPTVFIRLTGCPLRCSYCDTTYSFEGGERQSLDDIIQTTLDFKTPYVCVTGGEPLAQPNALPLMQRLADLGCQVSLETSGALDVSKVDSRVSKVLDLKTPTSGEVARNLLSNLDHLTAHDQIKFVICNREDYEWSKQQLELYQLQDKVSTVWFSPAFAVEKGAVCLPPLARDLAQWILEDHLPVRFQLQLHKLLWNDETGR

SEQ ID NO: 27359 - protein, 232 aa, Acinetobacter marinus
  misc_feature (1)..(232): tr|A0A1G6J5K6|A0A1G6J5K6_9GAMM 7-carboxy-7-deazaguanine synthase OS=Acinetobacter marinus OX=281375 GN=queE PE =3 SV=1
MRTQSIPVTDPAAGLKLTEIFYSLQGEANEAGHPTVFVRLTGCPLRCVYCDTTYSFDGGTRFGLDDIIQQISQYNAKYVCVTGGEPLAQPNCVVLLKTLCDSGFKVSLETSGALDISKVDTRVSRIVDVKTPSSHEQHRNMIENYPHLTQHDQIKFVISDRADYEWSKDFLMQHQLANLVSTVWFSPAFAIEGNVRLPPLARNLAQWILEDHLPVKFQLQLHKLLWQDEKGR

SEQ ID NO: 27360 - protein, 242 aa, Acinetobacter nectaris
  misc_feature (1)..(242): tr|V2TQV0|V2TQV0_9GAMM 7-carboxy-7-deazaguanine synthas e OS=Acinetobacter nectaris CIP 110549 OX=1392540 GN=qu eE PE=3 SV=1
MVDFAMNSPLRSTTIPVTDPSSGLRITEIFYSLQGEADTAGLPTVFIRLTGCPLRCTYCDTTYSFEGGKRQSLESIITEAQKHNTPYICVTGGEPLAQPNCIALLNQLCHLGFEISLETSGALSIANVDTRVSKVLDLKTPTSGESHRNLIENFEYLTKKDQIKFVICNREDYEWSKQQVEKYQLEKKVNTVWFSPAFAVEKGNAKLPAFARDLAQWVLEDQLPVRFQLQLHKLLWQDETGR

SEQ ID NO: 27361 - protein, 236 aa, Acinetobacter nosocomialis
  misc_feature (1)..(236): tr|A0A0E2GCL3|A0A0E2GCL3_ACINO 7-carboxy-7-deazaguanine synthase OS=Acinetobacter nosocomialis NIPH 386 OX=121 7985 GN=queE PE=3 SV=1
MASLRSSAIPVSDPASGLRITEIFYSLQGEANASGLPTVFIRLTGCPLRCSYCDTTYSFEGGERLSLEHIIETAEKYQTPYICVTGGEPLAQPNCLILLQRLCDAGFDVSLETSGALDVSKVDPRVSKVLDLKTPTSGEEHRNLISNLDYLTSHDQIKFVICNREDYEWSKQQVEQYQLQNKVSTVWFSPAFAVEKGAVGLPRLARDLAQWILDDKLPVRFQLQLHKLLWNDESGR

SEQ ID NO: 27362 - protein, 236 aa, Acinetobacter nosocomialis; identical to SEQ ID NO: 27361
  misc_feature (1)..(236): tr|A0A2T7FRR4|A0A2T7FRR4_ACINO 7-carboxy-7-deazaguanine synthase OS=Acinetobacter nosocomialis OX=106654 GN=qu eE PE=3 SV=1

SEQ ID NO: 27363 - protein, 236 aa, Acinetobacter oleivorans
  misc_feature (1)..(236): tr|A0A0B2UAG8|A0A0B2UAG8_9GAMM 7-carboxy-7-deazaguanine synthase OS=Acinetobacter oleivorans OX=1148157 GN=que E PE=3 SV=1
MASLRSSAIPVSDPASGLRITEIFYSLQGEANASGLPTVFIRLTGCPLRCSYCDTTYSFEGGERFSLEHIIETATQFQTPYICVTGGEPLAQPNCLILLQRLCEAGFDVSLETSGALDVSKVDSRVSKVLDLKTPTSGEEHRNLISNLDHLTAHDQIKFVICNREDYEWSKQQVEKYQLHKKVSTVWFSPAFAVEKGAVGLPRLARDLAQWILDDKLPVRFQLQLHKLLWNDESGR

SEQ ID NO: 27364 - protein, 236 aa, Acinetobacter oleivorans
  misc_feature (1)..(236): tr|D8JEE1|D8JEE1_ACISD 7-carboxy-7-deazaguanine synthas e OS=Acinetobacter oleivorans (strain JCM 16667 / KCTC 23045 / DR1) OX=436717 GN=queE PE=3 SV=1
MASLRSSAIPVSDPASGLRITEIFYSLQGEANASGLPTVFIRLTGCPLRCSYCDTTYSFEGGERFSLEHIIETATQYQTPYICVTGGEPLAQPNCLILLQRLCEAGFDVSLETSGALDVSKVDSRVSKVLDLKTPTSGEEHRNLISNLDHLTAHDQIKFVICNREDYEWSKQQVEKYQLHKKVSTVWFSPAFAVEKGAVSLPRLARDLAQWILDDKLLVRFQLQLHKLLWNDESGR

SEQ ID NO: 27365 - protein, 236 aa, Acinetobacter parvus
  misc_feature (1)..(236): tr|N8RMB4|N8RMB4_9GAMM 7-carboxy-7-deazaguanine synthas e OS=Acinetobacter parvus NIPH 1103 OX=1217671 GN=queE PE=3 SV=1
MASLRSSAIPVSDPAAGLRITEIFYSLQGEANTFGLPTVFIRLTGCPLRCSYCDTTYSFEGGERLSLEHIIETASQHKTPYICVTGGEPLAQPNCLVLLQRLCDLGFQVSLETSGALDVSKVEPRVSKVLDLKTPTSKEDHRNLLTNLDYLTQHDQIKFVICNREDYEWSKQQLINFQLQDKVSTVWFSPAFAVEKGAAVLPAFARDLAQWILDDHLPVRFQLQLHKLLWNDESGR

SEQ ID NO: 27366 - protein, 236 aa, Acinetobacter parvus
  misc_feature (1)..(236): tr|N8RR18|N8RR18_9GAMM 7-carboxy-7-deazaguanine synthas e OS=Acinetobacter parvus DSM 16617 = CIP 108168 OX=981 333 GN=queE PE=3 SV=1
MASLRSSAIPVSDPAAGLRITEIFYSLQGEANTFGLPTVFIRLTGCPLRCSYCDTTYSFEGGERLSLEHIIETASQHKTPYICVTGGEPLAQPNCLILLQRLCDLGFQVSLETSGALDVSKVEPRVSKVLDLKTPTSKEDHRNLLTNLDYLTQHDQIKFVICNREDYEWSKQQLINFQLQDKVSTVWFSPAFAVEKGAAVLPALARDLAQWILDDHLPVRFQLQLHKLLWNDESGR

SEQ ID NO: 27367 - protein, 236 aa, Acinetobacter piscicola
  misc_feature (1)..(236): tr|A0A4Q4H130|A0A4Q4H130_9GAMM 7-carboxy-7-deazaguanine synthase OS=Acinetobacter piscicola OX=2006115 GN=queE PE=3 SV=1
MNALRTSTIPVSDPSAGLRITEIFYSLQGEANAAGLPTVFIRLTGCPLRCTYCDTTYSFEGGERQSLEQIIQTTLDFKTPYICVTGGEPLAQPNALPLMTHLADLGCDVSLETSGALDVSKVDPRVSKVLDLKTPTSGEMQRNLLSNFEHLTPHDQIKFVICNREDYDWAKQQVADFQLNEKVSTVWFSPAFAVEKGAVRLPQLARDLAQWILDDHLPVRFQLQLHKLLWNDETGR

SEQ ID NO: 27368 - protein, 236 aa, Acinetobacter pittii
  misc_feature (1)..(236): tr|R8YPP9|R8YPP9_ACIPI 7-carboxy-7-deazaguanine synthas e OS=Acinetobacter pittii ANC 4050 OX=1217691 GN=queE P E=3 SV=1
MASLRSSAIPVSDPASGLRITEIFYSLQGEANASGLPTVFIRLTGCPLRCSYCDTTYSFEGGERFSLEHIIETAKQYQTPYICVTGGEPLAQPNCLILLQRLCEAGFDVSLETSGALDVSKVDSRVSKVLDLKTPTSGEEHRNLISNLDHLTLHDQIKFVICNREDYEWSKQQVEKYQLHKKVSTVWFSPAFAVEKGAVGLPRLARDLAQWILDDKLSVRFQLQLHKLLWNDESGR

SEQ ID NO: 27369 - protein, 236 aa, Acinetobacter pittii
  misc_feature (1)..(236): tr|A0A0R0RY63|A0A0R0RY63_ACIPI 7-carboxy-7-deazaguanine synthase OS=Acinetobacter pittii OX=48296 GN=queE PE=3 SV=1
MASLRSSAIPVSDPASGLRITEIFYSLQGEANASGLPTVFIRLTGCPLRCSYCDTTYSFEGGERFSLEHIIETATQFQTPYICVTGGEPLAQPNCLILLQRLCEAGFDVSLETSGALDVSKVDSRVSKVLDLKTPTSGEEHRNLISNLDHLTPRDQIKFVICNREDYEWSKQQVEKYQLQTKVSTVWFSPAFAVEKGAVGLPRLARDLAQWILDDKLPVRFQLQLHKLLWNDESGR

SEQ ID NO: 27370 - protein, 232 aa, Acinetobacter populi
  misc_feature (1)..(232): tr|A0A1Z9Z135|A0A1Z9Z135_9GAMM 7-carboxy-7-deazaguanine synthase OS=Acinetobacter populi OX=1582270 GN=queE PE =3 SV=1
MRNQFIPVTDPAAGLKITEIFYSLQGEANEAGSPTVFVRLTGCPLRCHYCDTTYSFEGGKRMTLEDIYQQIASYQAKFVCVTGGEPLAQPNCLTLLSALCNKGYRVSLETSGALDISRVDTRVSRIVDVKTPSSGEEHRNLIDNYQHLTQHDQIKFVISDEDDYQWAKDFLARHQLAQKVGTVWFSPAFAIEGDVRLPAFARQLAGWILQDHLPVKFQLQLHKLLWQDEKGR

SEQ ID NO: 27371 - protein, 236 aa, Acinetobacter pragensis
  misc_feature (1)..(236): tr|A0A151Y1R3|A0A151Y1R3_9GAMM 7-carboxy-7-deazaguanine synthase OS=Acinetobacter pragensis OX=1806892 GN=queE PE=3 SV=1
MSTLRSAAIPVSDPSAGLRITEIFYSLQGEANTAGLPTVFIRLTGCPLRCTYCDTTYSFEGGERKSLDDIIQTTLDFKTPYICVTGGEPLAQPNALPLMQRLADLGCEVSLETSGALDVSKVDPRVSKVLDLKTPASGESARNLLSNIDYLTEHDQIKFVICDREDYEWSKQQVQQLELNKKAGTIWFSPAFAVEKGVVRLPQLARDLAQWILEDRLPVRFQLQLHKLLWNDETGR

SEQ ID NO: 27372 - protein, 236 aa, Acinetobacter proteolyticus
  misc_feature (1)..(236): tr|A0A1E7RAI6|A0A1E7RAI6_9GAMM 7-carboxy-7-deazaguanine synthase OS=Acinetobacter proteolyticus OX=1776741 GN= queE PE=3 SV=1
MASLRSSAIPVSDPAAGLRITEIFYSLQGEANTFGLPTVFIRLTGCPLRCSYCDTTYSFEGGERLSLEQIIETASQHKTPYICVTGGEPLAQPNCLILLQRLCDLGFEVSLETSGALDVSKVDPRVSKVLDLKTPTSKEDHRNLYSNLDYLTPHDQIKFVICNRADYEWSKQQLEQFQLQDKVSTVWFSPAFAVEKGAVALPPLARDLAQWILEDHLPVRFQLQLHKLLWNDESGR

SEQ ID NO: 27373 - protein, 236 aa, Acinetobacter proteolyticus
  misc_feature (1)..(236): tr|A0A2N0WFX8|A0A2N0WFX8_9GAMM 7-carboxy-7-deazaguanine synthase OS=Acinetobacter proteolyticus OX=1776741 GN= queE PE=3 SV=1
MASLRSSAIPVSDPAAGLRITEIFYSLQGEANTFGLPTVFIRLTGCPLRCSYCDTTYSFEGGERLSLEHIIETASQHKTPYICVTGGEPLAQPNCLILLQRLCDLGFEVSLETSGALDVSKLDPRVSKVLDLKTPTSKEDHRNLYSNLDYLTSHDQIKFVICNREDYEWSRQQLEQFQLQDKVSTVWFSPAFAVEKGAVGLPALARDLAQWILDDHLPVRFQLQLHKLLWNDESGR

SEQ ID NO: 27374 - protein, 232 aa, Acinetobacter puyangensis
  misc_feature (1)..(232): tr|A0A240E5E5|A0A240E5E5_9GAMM 7-carboxy-7-deazaguanine synthase OS=Acinetobacter puyangensis OX=1096779 GN=qu eE PE=3 SV=1
MRNQFIPVTDPAAGLKITEIFYSLQGEANEAGSPTVFVRLTGCPLRCNYCDTTYSFEGGKRITLADIYQQIASYQAKFVCVTGGEPLAQPNCLILLKTLCDEGYHVSLETSGALDISRVDTRVSRIVDVKTPSSGEEQRNLIENYQHLTCHDQIKFVISDQEDYLWAKDFLAEHQLAEKVGTVWFSPAFAIEGDVRLPAFARQLAGWILQDHLPVKFQLQLHKLLWQDEKGR

SEQ ID NO: 27375 - protein, 232 aa, Acinetobacter qingfengensis
  misc_feature (1)..(232): tr|A0A1E7RDP5|A0A1E7RDP5_9GAMM 7-carboxy-7-deazaguanine synthase OS=Acinetobacter qingfengensis OX=1262585 GN= queE PE=3 SV=1
MRTQSIPVTDPAAGLRLTEIFYSLQGEANEAGHPTVFVRLTGCPLRCQYCDTTYSFEGGYRTSLEHIHDEIANYQAKYVCVTGGEPLAQPNCLVLLQSLCDAGYHVSLETSGALDISRVDTRVSRIVDVKTPSSAEQHRNLIRNYAYLTSHDQIKFVIGSLEDYEWSKAFLAEHELASKVSTVWFSPAFAITGDVKLPTFARQLAQWILEDHLPVKFQLQLHKLLWQDEKGR

SEQ ID NO: 27376 - protein, 236 aa, Acinetobacter radioresistens
  misc_feature (1)..(236): tr|A0A0E2GYF0|A0A0E2GYF0_ACIRA 7-carboxy-7-deazaguanine synthase OS=Acinetobacter radioresistens DSM 6976 = NB RC 102413 = CIP 103788 OX=981334 GN=queE PE=3 SV=1
MNPLRSSVIPVSDPAAGLRITEIFYSLQGEANAAGLPTVFIRLTGCPLRCTYCDTTYSFEGGVRQSLEEIIATARSYNTPYICVTGGEPLAQPNCLVLLQRLCDLGHKVSLETSGALDVSKVDPRVSKVLDLKTPSSGEVIRNLMSNLEFLTSNDQIKFVICNRDDYQWAKEQLALYSLEQKVSTVWFSPAFAVEKGAAQLPKLARELAQWILDDQLPVRFQLQLHKLLWNDETGR

SEQ ID NO: 27377 - protein, 236 aa, Acinetobacter radioresistens
  misc_feature (1)..(236): tr|A0A2T1J1J0|A0A2T1J1J0_ACIRA 7-carboxy-7-deazaguanine synthase OS=Acinetobacter radioresistens OX=40216 GN=q ueE PE=3 SV=1
MNPLRSSVIPVSDPAAGLRITEIFYSLQGEANAAGLPTVFIRLTGCPLRCTYCDTTYSFEGGVRQSLEEIIATARSYNTPYICVTGGEPLAQPNCLVLLQRLCDLGHKVSLETSGALDVSKVDPRVSKVLDLKTPSSGEVTRNLMSNLEFLTSNDQIKFVICNRDDYQWAKEQLALYSLEQKVSTVWFSPAFAVEKGAAQLPKLARELAQWILDDQLPVRFQLQLHKLLWNDETGR

SEQ ID NO: 27378 - protein, 241 aa, Acinetobacter rudis
  misc_feature (1)..(241): tr|S3PEU7|S3PEU7_9GAMM 7-carboxy-7-deazaguanine synthas e OS=Acinetobacter rudis CIP 110305 OX=421052 GN=queE P E=3 SV=1
MVKGVMQTLRSTAIPVSDPSAGLRITEIFYSLQGEANAAGLPTVFIRLTGCPLRCTYCDTTYSFEGGERRSLDEIISTTMAFKTPYICVTGGEPLAQPNVHPLMTRLADLGCEVSLETSGALDVAKVDQRVSKVLDLKTPTSGEQQRNLLSNFEHLTQHDQIKFVICNREDYLWAKTQLEQYKLQDKVSTIWFSPAFAIEKGAIRLPELARDLAQWILDDHLPVRFQLQLHKLLWNDETGR

SEQ ID NO: 27379 - protein, 236 aa, Acinetobacter schindleri
  misc_feature (1)..(236): tr|N8Y1J5|N8Y1J5_9GAMM 7-carboxy-7-deazaguanine synthas e OS=Acinetobacter schindleri NIPH 900 OX=1217675 GN=qu eE PE=3 SV=1
MSTLRSSAIPVSDPSAGLRITEIFYSLQGEANTAGLPTVFIRLTGCPLRCTYCDTTYSFEGGERKSLEEIIQTTLDFKTPYICVTGGEPLAQPNALPLMQRLADAGCEVSLETSGALDVSKVDPRVSKVLDLKTPTSGEVARNLLSNLDHLTQHDQIKFVICNREDYEWSKQQVEQYQLNEKVSTVWFSPAFEVEKGTARMPQLARDLAQWILEDHLPVRFQLQLHKLLWNDETGR

SEQ ID NO: 27380 - protein, 236 aa, Acinetobacter schindleri
  misc_feature (1)..(236): tr|N9ALG6|N9ALG6_9GAMM 7-carboxy-7-deazaguanine synthas e OS=Acinetobacter schindleri CIP 107287 OX=1217988 GN= queE PE=3 SV=1
MSTLRSSAIPVSDPSAGLRITEIFYSLQGEANTAGLPTVFIRLTGCPLRCTYCDTTYSFEGGERKSLEEIIQTTLDFKTPYICVTGGEPLVQPNALPLMQRLADAGCEVSLETSGALDVSKVDPRVSKVLDLKTPTSGEVARNLLSNLDHLTQHDQIKFVICNREDYEWSKQQVEQYQLNEKVSTVWFSPAFEVEKGTARMPQLARDLAQWILEDHLPVRFQLQLHKLLWNDETGR

SEQ ID NO: 27381 - protein, 236 aa, Acinetobacter seifertii; identical to SEQ ID NO: 27336
  misc_feature (1)..(236): tr|N8SDD7|N8SDD7_9GAMM 7-carboxy-7-deazaguanine synthas e OS=Acinetobacter seifertii OX=1530123 GN=queE PE=3 SV =1

SEQ ID NO: 27382 - protein, 236 aa, Acinetobacter seifertii
  misc_feature (1)..(236): tr|A0A2M8MIJ6|A0A2M8MIJ6_9GAMM 7-carboxy-7-deazaguanine synthase OS=Acinetobacter seifertii OX=1530123 GN=queE PE=3 SV=1
MASLRSSAIPVSDPASGLRITEIFYSLQGEANASGLPTVFIRLTGCPLRCTYCDTTYSFEGGERLSLEHIIETAEEYKTPYICVTGGEPLAQPNCLILLQRLCDAGFDVSLETSGALDVSKVDPRVSKVLDLKTPTSGEEHRNLISNLDYLTSHDQIKFVICNREDYEWSKQQVEQYQLQTKVSTVWFSPAFAVEKGAVGLPRLARDLAQWILDDKMPVRFQLQLHKLLWNDESGR

SEQ ID NO: 27383 - protein, 236 aa, Acinetobacter soli
  misc_feature (1)..(236): tr|N9ACF4|N9ACF4_9GAMM 7-carboxy-7-deazaguanine synthas e OS=Acinetobacter soli NIPH 2899 OX=1217677 GN=queE PE =3 SV=1
MTSLRSTTIPVTDPAAGLRITEIFYSLQGEANTAGLPTVFIRLTGCPLRCTYCDTTYSFEGGQRLSIDEIIETARAYKTPYICVTGGEPLAQPNCQVLLTRLCDLGFDVSLETSGALDVSMVDARVSKVLDLKTPTSGEEKRNLMSNLDHLTPHDQIKFVICNREDYEWSKLQVEQFQLEKKVSTVWFSPAFAVEKNAAKLPQLARDLAEWILNDHLPVRFQLQLHKILWNDETGR

SEQ ID NO: 27384 - protein, 236 aa, Acinetobacter soli; identical to SEQ ID NO: 27383
  misc_feature (1)..(236): tr|A0A1P8EEY1|A0A1P8EEY1_9GAMM 7-carboxy-7-deazaguanine synthase OS=Acinetobacter soli OX=487316 GN=queE PE=3 SV=1

SEQ ID NO: 27385 - protein, 236 aa, Acinetobacter sp.; identical to SEQ ID NO: 27361
  misc_feature (1)..(236): tr|A0A4V7TDM2|A0A4V7TDM2_9GAMM 7-carboxy-7-deazaguanine synthase OS=Acinetobacter sp. FDAARGOS_131 OX=1876769 GN=queE PE=3 SV=1

SEQ ID NO: 27386 - protein, 236 aa, Acinetobacter sp.
  misc_feature (1)..(236): tr|A0A1E3GMC4|A0A1E3GMC4_9GAMM 7-carboxy-7-deazaguanine synthase OS=Acinetobacter sp. 51m OX=1856846 GN=queE P E=3 SV=1
MNTLRSSAIPVSDPSAGLRITEIFYSLQGEANAAGLPTVFIRLTGCPLRCSYCDTTYSFEGGERQSLDDIIQTTLDFKTPYVCVTGGEPLAQPNALPLMQRLADLGCQVSLETSGALDVSKVDSRVSKVLDLKTPTSGEVARNLLSNLDHLTAHDQIKFVICNREDYEWSKQQLELYQLQDKVSTVWFSPAFAVEKGAVQLPPLARDLAQWILEDHLPVRFQLQLHKLLWNDETGR

SEQ ID NO: 27387 - protein, 236 aa, Acinetobacter tandoii
  misc_feature (1)..(236): tr|A0A515BDL2|A0A515BDL2_9GAMM 7-carboxy-7-deazaguanine synthase OS=Acinetobacter tandoii OX=202954 GN=queE PE =3 SV=1
MNTLRSSAIPVSDPAAGLRITEIFYSLQGEANTAGLPTVFIRLTGCPLRCTYCDTTYSFEGGERQSLEQIIQTTLDFKTPYVCVTGGEPLAQPNALPLMTRLADLGCEVSLETSGALDVSKVDPRVSKVLDLKTPTSGEEQRNLMSNLDHLTQHDQIKFVICNREDYEWSKQQLAQYQLQDKVSTVWFSPAFAVEKGAARLPQLARDLAQWILEDHLPVRFQLQLHKLLWNDETGR

SEQ ID NO: 27388 - protein, 236 aa, Acinetobacter tandoii
  misc_feature (1)..(236): tr|R9B3F3|R9B3F3_9GAMM 7-carboxy-7-deazaguanine synthas e OS=Acinetobacter tandoii DSM 14970 = CIP 107469 OX=11 20927 GN=queE PE=3 SV=1
MNTLRSSAIPVSDPAAGLRITEIFYSLQGEANTAGLPTVFIRLTGCPLRCTYCDTTYSFEGGERQSLDQIIQTTLDFKTPYVCVTGGEPLAQPNALPLMQRLADLGCEVSLETSGALDVSKVDPRISKVLDLKTPTSGEEQRNLISNLDHLTQHDQIKFVICNREDYEWSKLQVAQYQLQDKVSTVWFSPAFAVEKGAVRLPQLARDLAQWILEDHLPVRFQLQLHKLLWNDETGR

SEQ ID NO: 27389 - protein, 236 aa, Acinetobacter tjernbergiae
  misc_feature (1)..(236): tr|V2V6S3|V2V6S3_9GAMM 7-carboxy-7-deazaguanine synthas e OS=Acinetobacter tjernbergiae DSM 14971 = CIP 107465 OX=1120928 GN=queE PE=3 SV=1
MASLRSSAIPVSDPAAGLRITEIFYSLQGEANTFGLPTVFIRLTGCPLRCSYCDTTYSFEGGERQSLEQIIETASQHKTPYICVTGGEPLAQPNCLILLQRLCDLGFEVSLETSGALDVSKVDPRVSKVLDLKTPTSKEDHRNLLTNIDYLTQHDQIKFVICNRADYEWSKQQLEQLQLQDKVSTVWFSPAFAVEKGTVALPVLARDLAQWILEDHLPVRFQLQLHKLLWNDESGR

SEQ ID NO: 27390 - protein, 251 aa, Acinetobacter towneri
  misc_feature (1)..(251): tr|N9CQ73|N9CQ73_9GAMM 7-carboxy-7-deazaguanine synthas e OS=Acinetobacter towneri DSM 14962 = CIP 107472 OX=11 20929 GN=queE PE=3 SV=1
MTVGIFVFLHTVMNFMNTLRSSAIPVSDPSAGLRITEIFYSLQGEANTSGLPTVFIRLTGCPLRCHYCDTTYSFEGGERQSLDDIIQTTLEFKTPYVCVTGGEPLAQPNALPLIQRLADLGCEVSLETSGALDISKVDNRVSKVLDLKTPASGEMSRNLLSNLDFLNPHDQIKFVICNHDDYLWAKQQVEQYQLHKKVDTVWFSPAFAVEKGAVALPQLARDLAQWILADHLPVRFQLQLHKLLWNDETGR

SEQ ID NO: 27391 - protein, 236 aa, Acinetobacter towneri
  misc_feature (1)..(236): tr|A0A1E8E2J4|A0A1E8E2J4_9GAMM 7-carboxy-7-deazaguanine synthase OS=Acinetobacter towneri OX=202956 GN=queE PE =3 SV=1
MSTLRSSAIPVSDPSAGLRITEIFYSLQGEANTSGLPTVFIRLTGCPLRCHYCDTTYSFEGGERQSLDDIIQTTLDFKTPYVCVTGGEPLAQPNALPLMQRLADLGCEVSLETSGALDISKVDNRVSKVLDLKTPASGEMSRNLLSNLDFLNPHDQIKFVICNHDDYLWAKQQVEQYQLHKKVNTVWFSPAFAVEKGAVALPQLARDLAQWILADHLPVRFQLQLHKLLWNDETGR

SEQ ID NO: 27392 - protein, 259 aa, Acinetobacter ursingii
  misc_feature (1)..(259): tr|N9D943|N9D943_9GAMM 7-carboxy-7-deazaguanine synthas e OS=Acinetobacter ursingii ANC 3649 OX=1257043 GN=queE PE=3 SV=1
MFLVSTFKSDRRDFCFLRCGISAMTSLRSTTIPVSDPAAGLRITEIFYSLQGEANTAGLPTVFIRLTGCPLRCSYCDTTYSFEGGERQSLDQIIETALSFKTPYICVTGGEPLAQPNCLHLLTRLSDLGCQVSLETSGALDVSKVDSRVSKVLDLKTPTSGEEKRNLLSNLDYLTPHDQIKFVICNREDYEWSKQQLENYQLNEKVSTVWFSPAFAVEKASVKLPQLARDMAQWILDDHLPVRFQLQLHKLLWNDETGR

SEQ ID NO: 27393 - protein, 259 aa, Acinetobacter ursingii
  misc_feature (1)..(259): tr|N9QRP7|N9QRP7_9GAMM 7-carboxy-7-deazaguanine synthas e OS=Acinetobacter ursingii NIPH 706 OX=1217716 GN=queE PE=3 SV=1
MFLVSTFKSDRRDFCFLRCGISAMTSLRSTTIPVSDPAAGLRITEIFYSLQGEANTAGLPTVFIRLTGCPLRCTYCDTTYSFEGGERQSLDQIIETALSFKTPYICVTGGEPLAQPNCLHLLTRLSDLGCQVSLETSGALDVSKVDSRVSKVLDLKTPTSGEEKRNLLSNLDYLTPHDQIKFVICNREDYEWSKQQLENYQLDEKVSTVWFSPAFAVEKASVKLPQLARDMAQWILDDHLPVRFQLQLHKLLWNDETGR

SEQ ID NO: 27394 - protein, 236 aa, Acinetobacter variabilis
  misc_feature (1)..(236): tr|N9MEC6|N9MEC6_9GAMM 7-carboxy-7-deazaguanine synthas e OS=Acinetobacter variabilis OX=70346 GN=queE PE=3 SV= 1
MNTLRSSAIPVSDPSAGLRITEIFYSLQGEANTAGLPTVFIRLTGCPLRCTYCDTTYSFEGGERKSLDDIIQTTLDFKTPYVCVTGGEPLAQPNALPLMQRLADLGCEVSLETSGALDVSKVDARVSKVLDLKTPTSGEVARNLLTNLDHLTQHDQIKFVICNREDYEWSKQQVEQYQLNEKVSTVWFSPAFAVEKGAARLPQLARDLAQWILEDHLPVRFQLQLHKLLWNDETGR

SEQ ID NO: 27395 - protein, 236 aa, Acinetobacter venetianus
  misc_feature (1)..(236): tr|N8YLU9|N8YLU9_ACIVR 7-carboxy-7-deazaguanine synthas e OS=Acinetobacter venetianus (strain ATCC 31012 / CIP 110063 / RAG-1) OX=1191460 GN=queE PE=3 SV=1
MASLRSSAIPVSDPAAGLRITEIFYSLQGEANTFGLPTVFIRLTGCPLRCSYCDTTYSFEGGERFSLEHIIETASQYKTPYICVTGGEPLAQPNCLILLQRLCDLGFQVSLETSGALDVSKVDSRVSKVLDLKTPTSKEDHRNLLSNIDHLTRHDQIKFVICNREDYEWSKLQLEQFQLQEKVSTVWFSPAFAVEKGAVALPALARDLAQWILEDHLPVRFQLQLHKLLWNDESGR

SEQ ID NO: 27396 - protein, 236 aa, Acinetobacter venetianus
  misc_feature (1)..(236): tr|A0A150I1L7|A0A150I1L7_9GAMM 7-carboxy-7-deazaguanine synthase OS=Acinetobacter venetianus OX=52133 GN=queE PE=3 SV=1
MASLRSSAIPVSDPAAGLRITEIFYSLQGEANTFGLPTVFIRLTGCPLRCSYCDTTYSFEGGERFSLEHIIETASQYKTPYICVTGGEPLAQPNCLILLQRLCNLGFQVSLETSGALDVSKVDSRVSKVLDLKTPTSKEDHRNLLSNIDHLTQHDQIKFVICNREDYEWSKQQLEQFQLQEKVSTVWFSPAFAIEKGAIALPALARDLAQWILEDHLPVRFQLQLHKLLWNDESGR

SEQ ID NO: 27397 - protein, 236 aa, Acinetobacter wuhouensis
  misc_feature (1)..(236): tr|A0A385C730|A0A385C730_9GAMM 7-carboxy-7-deazaguanine synthase OS=Acinetobacter wuhouensis OX=1879050 GN=que E PE=3 SV=1
MNALRSSTIPVSDPSAGLRITEIFYSLQGEANAAGLPTVFIRLTGCPLRCTYCDTTYSFEGGERQSLDQIIQTTLDFKTPYICVTGGEPLAQPNALPLMQRLADLGCEVSLETSGALDVSKVDPRVSKVLDLKTPTSGEAARNLMSNLEHLTQHDQIKFVICNREDYEWSKQQVEQFLLNEKVSTVWFSPAFAVEKGAVRLPQLARDLAQWILEDHLPVRFQLQLHKLLWNDETGR

SEQ ID NO: 27398 - protein, 239 aa, Actinoalloteichus hoggarensis
  misc_feature (1)..(239): tr|A0A221W780|A0A221W780_9PSEU 7-carboxy-7-deazaguanine synthase OS=Actinoalloteichus hoggarensis OX=1470176 G N=queE PE=3 SV=1
MIGMAADGEPLLLIAEVFGPTLQGEGPSTGRPAMFVRLSRCNLSCTWCDTPETWDTTRFDLRRHTTAQTSARLAETVLHADVELVVITGGEPLIQQRRLVDLLDLLLAAGRRIEIETNGTITPEPGLIRPGVRFNVSPKLPGSGLPAHRRLVPTALKTLAAADSVCKFVIAPAHQEIDLAEADAIATAYPFREVWLMPEATTHTDATAGLRALAEPVLARGWALSPRLHITLWEGQPGR

SEQ ID NO: 27399 - protein, 212 aa, Actinobacillus delphinicola
  misc_feature (1)..(212): tr|A0A448TSX6|A0A448TSX6_9PAST 7-carboxy-7-deazaguanine synthase OS=Actinobacillus delphinicola OX=51161 GN=qu eE PE=3 SV=1
MQNLVDPSYAIVEIFESLQGEGANCGMPAIFLRFGKCNLRCTWCDTPYEEYQSMTMSEILTKIEAFNAKNIIVTGGEPAVVPNIDIILQALKKRGYFLAIETNGLQEVPAEIDYIATSPKAQYAKMYAKQCLSHADEVRIVVDDKDNPEKFVQFCEFIRANIPARFYFLSPCDNEGEMNLHQTLNYLGKLNQNHSEMPWLLSLQTHKLVGIE

SEQ ID NO: 27400 - protein, 210 aa, Actinobacillus equuli
  misc_feature (1)..(210): tr|A0A448QTM4|A0A448QTM4_ACTEU 7-carboxy-7-deazaguanine synthase OS=Actinobacillus equuli OX=718 GN=queE PE=3 SV=1
MTAIIYPNIEFPIVEIFESLQGEGFNTGLPCIFVRLGKCNLACPWCDTNYNEYEKWSVAKILERVKSYSAKNIIITGGEPTMYANLSVLLDVFKAEGYWLAIETNGLKTVPKQIDYIATSPKLMYQEKYLKECIPFANEVRIVMDKGDVQGFCEQIETQITAEHYYLSPCEVDGKMNLLETITQLGILNQRANKPKWQLSLQTHKLVGIE

SEQ ID NO: 27401 - protein, 210 aa, Actinobacillus equuli
  misc_feature (1)..(210): tr|A0A0A7MFD2|A0A0A7MFD2_ACTEU 7-carboxy-7-deazaguanine synthase OS=Actinobacillus equuli subsp. equuli OX=202 947 GN=queE PE=3 SV=1
MTAIIYPNIEFPIVEIFESLQGEGFNTGLPCIFVRLGKCNLACPWCDTNYNEYEKWSVAKILERVKSYSAKNIIITGGEPTMYANLSVLLDVFKAEGYWLAIETNGLKAVPKQIDYIATSPKLMYQEKYLKECIPFANEVRIVMDKGDVQGFCEQIETQITAEHYYLSPCEVDGKMNLLETITQLGILNQRANKPKWQLSLQTHKLVGIE

SEQ ID NO: 27402 - protein, 210 aa, Actinobacillus lignieresii
  misc_feature (1)..(210): tr|A0A380TXN3|A0A380TXN3_ACTLI 7-carboxy-7-deazaguanine synthase OS=Actinobacillus lignieresii OX=720 GN=queE PE=3 SV=1
MTNTIFTTTAFPIVEIFESLQGEGFNTGLPCIFVRLGKCNLACPWCDTNYNEYEKWSVTKILERVKSYSAKHIIITGGEPTMYANLSVLLDVFKAEGYWLAIETNGLKTVPKQIDYIATSPKLMYQEKYLRECISFANEVRIVMDKGDVQGFCEQIETQITAEHYYLSPCEVDGKMNLLETITQLGILNQRANKPKWQLSLQTHKLVGIE

SEQ ID NO: 27403 - protein, 206 aa, Actinobacillus minor
  misc_feature (1)..(206): tr|C5S1U3|C5S1U3_9PAST 7-carboxy-7-deazaguanine synthas e OS=Actinobacillus minor NM305 OX=637911 GN=queE PE=3 SV=1
MIFSTITYPIVEIFESLQGEGFNTGMPSIFIRFGKCNLTCSWCDTPYHQFDSWTLTQILEKVEGYQAKNIIITGGEPTIQPNLTVLLDELKQRGYFLAIETNGLKDIPTQIDYIATSPKRLYAKKYQRRCIPFAHEVRIVADENVIAFCEQIETQINAERYYLSPCEVEGKMNLLETITQIGLLNQRKNKPKWQLSIQTHKIVGIE

SEQ ID NO: 27404 - protein, 264 aa, Actinobacillus pleuropneumoniae
  misc_feature (1)..(264): tr|A0A4U9TSU2|A0A4U9TSU2_ACTPL 7-carboxy-7-deazaguanine synthase OS=Actinobacillus pleuropneumoniae OX=715 GN= queE_1 PE=3 SV=1
MNNVHETPVTDSNGASSPAMTVDRPIPVMEIFGPTVQGEGMVVGRKTMFVRTAGCDYRCSWCDSAFTWDGSAKDSISLLSADEIWQELYRLGGERFDHVTLSGGNPALLPQLGALVDELHRHGITVAVETQGSRWQDWLNHIDEVTISPKPPSSGMDTDWGKLDDIVSRLSARPPGRTFSLKVVVFDDKDLTYAETVHERYPNVPFYLQTGNPDVGTGDTSSLVSHLLDRYESLVDAVMQSDRLNDVRVLPQLHTLVWGNKRGV

SEQ ID NO: 27405 - protein, 210 aa, Actinobacillus pleuropneumoniae
  misc_feature (1)..(210): tr|A0A380W0Q4|A0A380W0Q4_ACTPL 7-carboxy-7-deazaguanine synthase OS=Actinobacillus pleuropneumoniae OX=715 GN= queE PE=3 SV=1
MKNTIFTTTAFPIVEIFESLQGEGFNTGLPCIFVRLGKCNLACPWCDTNYNEYEKWSVAKILERVKSYSAKNIIITGGEPTMYANLSVLLDVFKAEGYWLAIETNGLKAVPKQIDYIATSPKLMYQEKYLRECISFANEVRIVMDKGDVQSFCEQIETQITAEHYYLSPCEVDGKMNLLETITQLGILNQRAYKPKWQLSLQTHKLVGIE

SEQ ID NO: 27406 - protein, 208 aa, Actinobacillus porcinus
  misc_feature (1)..(208): tr|A0A4V0II89|A0A4V0II89_9PAST 7-carboxy-7-deazaguanine synthase OS=Actinobacillus porcinus OX=51048 GN=queE P E=3 SV=1
MSSLIQEPSFPIVEIFESLQGEGANTGMPSIFVRFGKCNLACPWCDTPYNEFQSWTLSQILAKVRSFSAKNVIITGGEPTLHPKIVLLLEILKQDGYFLAIETNGLKDVPPQIDYIATSPKAMYANKYQRRCISKANEVRIVMDAQAKEFCEFIEQKIQADYYFLSPCEIDGKMNLHETIALLGQLNSRIHKPKWLLSIQTHKLIGIE

SEQ ID NO: 27407 - protein, 206 aa, Actinobacillus porcitonsillarum
  misc_feature (1)..(206): tr|A0A2U8FIZ7|A0A2U8FIZ7_9PAST 7-carboxy-7-deazaguanine synthase OS=Actinobacillus porcitonsillarum OX=189834 GN=queE PE=3 SV=1
MIFSTITYPIVEIFESLQGEGFNTGMPSIFIRFGKCNLTCSWCDTPYHQFDSWTLPQILEKVEGYQAKNIIITGGEPTIQPNLTVLLDELKRRGYFLAIETNGLKDIPSQIDYIATSPKRLYAEKYQRRCIPFAHEVRIVADENVIAFCEQIEAQINAERYYLSPCEVEGKMNLLETITQIGLLNQRKNKPKWQLSIQTHKIVGIE

SEQ ID NO: 27408 - protein, 208 aa, [Actinobacillus] rossii
  misc_feature (1)..(208): tr|A0A380TN76|A0A380TN76_9PAST 7-carboxy-7-deazaguanine synthase OS=[Actinobacillus] rossii OX=123820 GN=queE PE=3 SV=1
MSSLINEPSFPIVEIFESLQGEGANTGMPSIFVRFGKCNLACPWCDTPYNEFESWTLSQILAKMRSFSAKSVIITGGEPTIHPKIVLLLDILKKDGYFLAIETNGLKEIPPQIDYIATSPKAMYVEKYQRRCIKKANEVRVVMDAQAEAFCEFIEGKINADYYFLSPCEVGGKMNLHETITLLGRLNSRANKPKWLLSIQTHKLIGIE

SEQ ID NO: 27409 - protein, 208 aa, Actinobacillus seminis
  misc_feature (1)..(208): tr|A0A263HEE4|A0A263HEE4_9PAST 7-carboxy-7-deazaguanine synthase OS=Actinobacillus seminis OX=722 GN=queE PE=3 SV=1
MSLLINAPCFPIVEIFESLQGEGANTGMPSIFVRLGKCNLACPWCDTNYNKFEPWTLSQILAKVQSFSAKNVIITGGEPTIHPKIVLLLDELKKDGYFLAIETNGLKEIPSQIDYIATSPKAMYAEKYQRRCIKKANEVRIVMDADAREFCEFIERKISADYYFLSPCEVDGKMNLHETIQLLGELNARPNKPKWLLNIQTHKLIGIE

SEQ ID NO: 27410 - protein, 208 aa, Actinobacillus succinogenes
  misc_feature (1)..(208): tr|A6VQW8|A6VQW8_ACTSZ 7-carboxy-7-deazaguanine synthas e OS=Actinobacillus succinogenes (strain ATCC 55618 / D SM 22257 / 130Z) OX=339671 GN=queE PE=3 SV=1
MNVIASTHSYPIVEIFESLQGEGANTGMPAIFIRFGKCNLACPWCDTPYNEFAALTFSQIIQKVRSFSAKNIIITGGEPTIQPRLSLLLEQLKQEGYFLAIETNGLKTVPSQIDYIAVSPKGLYWEKYHSRCISFAHEVRIVADENVLKFCAFIEDKIKANHYYLSPCETDGKMNLYETVTLLGQLNQRANRPKWQLSLQTHKLIGIE

SEQ ID NO: 27411 - protein, 210 aa, Actinobacillus suis
  misc_feature (1)..(210): tr|K0G4N9|K0G4N9_ACTSU 7-carboxy-7-deazaguanine synthas e OS=Actinobacillus suis H91-0380 OX=696748 GN=queE PE= 3 SV=1
MTNTIFTTTTFPIVEIFESLQGEGFNTGLPCIFVRLGKCNLACPWCDTNYNEYEKWSVAKILERVKSYSAKNIIITGGEPTMYANLSVLLDVFKAEGYWLAIETNGLKAVPKQIDYIATSPKLMYQEKYLRECISFANEVRIVMDKGDVQGFCEQIETQITAEHYYLSPCEVDGKMNLLETITQLGILNQRANKPKWQLSLQTHKLVGIE

SEQ ID NO: 27412 - protein, 210 aa, Actinobacillus ureae
  misc_feature (1)..(210): tr|E8KIR4|E8KIR4_9PAST 7-carboxy-7-deazaguanine synthas e OS=Actinobacillus ureae ATCC 25976 OX=887324 GN=queE PE=3 SV=1
MTNTIFTTTTFPIVEIFESLQGEGFNTGLPCIFVRLGKCNLACPWCDTNYNEYEKWNVAKILERVKSYSAKNIIITGGEPTMYANLSVLLDVFKVEGYWLAIETNGLKAVPKQIDYIATSPKLMYQEKYLRECIPFANEVRIVMDKGDVQGFCEQIETQITAEHYYLSPCEVDGKMNLLETITQLGILNQRANKPKWQLSLQTHKLVGIE

SEQ ID NO: 27413 - protein, 245 aa, Actinobacteria bacterium
  misc_feature (1)..(245): tr|A0A1F2WWN9|A0A1F2WWN9_9ACTN 7-carboxy-7-deazaguanine synthase OS=Actinobacteria bacterium RBG_16_64_13 OX=1 797200 GN=queE PE=3 SV=1
MAPLRVLEIFHSLQGEGYWSGVPMTFVRLAGCNAAELGLGCTAWCDTPAGWALDEGEDREIGEVLSAVTLPRLCLTGGEPLLQTGGVAELIGEAEQRGIRVHVETNGTVDPLPILELARDYATARPGATPRPFPEFGWAAVSPKPPDYAVAPGWAGLVDELKLVADEHLDAATAERLAAANLGAFVCIQPLYAQGPAPPDCGSGRGPDGAGAAPQRTSSERAVELVMRHPEWRLSLQLHKHLGIR

SEQ ID NO: 27414 - protein, 226 aa, Actinobacteria bacterium
  misc_feature (1)..(226): tr|A0A538JK70|A0A538JK70_9ACTN 7-carboxy-7-deazaguanine synthase OS=Actinobacteria bacterium OX=1883427 GN=que E PE=3 SV=1
MTLVVSELFGPTLQGEGPSAGRRAGFVRLGRCSLNCSWCDTPYSWDWKRYDPAMELRELSVDEVAATIRAMDVPMVVVTGGEPLLQQRAIVELLKQLPGLGVEVETNGIHVPEPALVAYIDRFNVSPKLANAGIERSRRHKPDVLRAFQATGKAVFKFVVCGPQDLDEIDAVVAECGLTDVWVMPEGTDAPTLVARARRLEDDVVARGWHLTPRLHILLWGAERGR

SEQ ID NO: 27415 - protein, 241 aa, Actinocrispum wychmicini
  misc_feature (1)..(241): tr|A0A4R2ISB2|A0A4R2ISB2_9PSEU 7-carboxy-7-deazaguanine synthase OS=Actinocrispum wychmicini OX=1213861 GN=que E PE=3 SV=1
MTTSDRANTLEIAELFGPTVQGEGPSLGRPAGFLRLGGCNFTCLWCDSAYTWDATRFDLRVELDRRDVADVAEQLRAMAVGLVVITGGEPLMQQRTPGFAALLGLLADLDIEIETNGSIHPTDALMDNATVRFNVGLKLANSGVPEHLRIRAASLRAFWRLAGEGRACFKAVCCHRGDVAELAGLVDRLELDPATVWVMPEGQTDLDTVHHLRRIAEPAIQYGFNITPRLHISIWETERGR

SEQ ID NO: 27416 - protein, 234 aa, Actinokineospora auranticolor
  misc_feature (1)..(234): tr|A0A2S6GDR9|A0A2S6GDR9_9PSEU 7-carboxy-7-deazaguanine synthase OS=Actinokineospora auranticolor OX=155976 GN =queE PE=3 SV=1
MSALVIPVGRAESTAILAEKFESFQGEGPWMGQRCVFLRLSRCNLRCGFCDTPETWDWSRYNSSEVSRRVPIADLVSWVRERAVDLVVITGGEPMLQQLAIGTLARDLPGVRVQIETNGTMEPIPELADRVDLWVVSPKLANSGMDYPARIKPQALAALSATGRAVFKFVVSDPANDLDEIAELVEEYGLTPVWAMPEGTTREAVLAGMDSLYGPAIDRGWNVSTRLHILTGAR

SEQ ID NO: 27417 - protein, 212 aa, Actinokineospora cianjurensis
  misc_feature (1)..(212): tr|A0A421BAK2|A0A421BAK2_9PSEU 7-carboxy-7-deazaguanine synthase OS=Actinokineospora cianjurensis OX=585224 GN =queE PE=3 SV=1
MYLVKEIFYTLQGEGTHAGRPSVFCRFSLCNLWTGREKDRHRAICTFCDTDFIGTDGPGGGRFATAADLAAAISAAWAGAAHPRSKPYVVCTGGEPLLQLDKDAVDALHDAGFEVAVETNGTRPAPPGLDWVCVSPKSTAEVVLTSGDDLKLVYPQPDARPERFEHLDFAHFLLQPMDGPDVEANTRATVEYCLRNPQWHLSLQTHKYLGIA

SEQ ID NO: 27418 - protein, 175 aa, Actinokineospora spheciospongiae
  misc_feature (1)..(175): tr|W7IWI7|W7IWI7_9PSEU Queuosine Biosynthesis QueE Radi cal SAM OS=Actinokineospora spheciospongiae OX=909613 G N=UO65_3543 PE=4 SV=1
MEKDRHRAICQFCDTDFVGTDGDGGGKFATADDLADAVESHWPSERGEHRFVVCTGGEPLLQLDEAATRALHERGFEIAVETNGTRPAPAGIDWLCVSPKIGAGLALTSGDELKLVYPQAGGDPAQFEHLDFRHFRLQPLDSADQEANTRAALEYCLKNPQWSLSLQTHKYIGIR

SEQ ID NO: 27419 - protein, 212 aa, Actinokineospora terrae
  misc_feature (1)..(212): tr|A0A1H9NXT8|A0A1H9NXT8_9PSEU 7-carboxy-7-deazaguanine synthase OS=Actinokineospora terrae OX=155974 GN=queE PE=3 SV=1
MYLVKEIFYTLQGEGTHAGRPSVFCRFSLCNLWTGREKDRHRAICTFCDTDFIGTDGPGGGRFATAADLAAAISAAWAGAAHPRSKPYVVCTGGEPLLQLDKDAVDALHDAGFEVAVETNGTRPAPPGLDWVCVSPKSTAEVVLTSGDDLKLVYPQPDAQPERFEHLDFAHFLLQPMDGPDVEANTRATVEYCLRHPQWHLSLQTHKYLGIA

SEQ ID NO: 27420 - protein, 231 aa, Actinomadura echinospora
  misc_feature (1)..(231): tr|A0A1H6E9B5|A0A1H6E9B5_9ACTN 7-carboxy-7-deazaguanine synthase OS=Actinomadura echinospora OX=1992 GN=queE P E=3 SV=1
MSGKELLVSEIFGPTFQGEGPSAGVRAAFLRLSRCPLACRWCDTPYTWDTSRYDLTTETRRMSEEEVLADLLARPAPLVVITGGEPLLQQDRLTWLIDMCRARRRRVEVETSGTVVPSRGVLGAAHRFNVSPKLANSGMPQHRRINPDALRAFTRSGKAAFKFVVEGLADLEEIAELEAEYGLAPIWVMPQATTAEGVLDGLRTVADEVLARGWNLTGRLHVLLWGDVRGR

SEQ ID NO: 27421 - protein, 228 aa, Actinomadura sp.
  misc_feature (1)..(228): tr|A0A3M2LUK6|A0A3M2LUK6_9ACTN 7-carboxy-7-deazaguanine synthase OS=Actinomadura sp. NEAU-Ht49 OX=2483351 GN=q ueE PE=3 SV=1
MDTLLVSEIFGPTCQGEGASLGQCAVFVRLGLCNLSCAWCDTPYTWDRAHYDLRHQPAPISREVVWARIRAIPAPLVVITGGEPLIQQRRLTWLIDRCSAAGRMVEIETNATLVPSLPMLQCRARFNASVKLASSGVPAARRIRPEAIRALAKARTCWKFVVNDLADLEEIADLENRFGLAPIWVMPEGTDATTILRRLHEFADPVLARGWNLTPRLHVLLWGDERGR

SEQ ID NO: 27422 - protein, 246 aa, Actinomadura sp.
  misc_feature (1)..(246): tr|A0A4R4XK42|A0A4R4XK42_9ACTN 7-carboxy-7-deazaguanine synthase OS=Actinomadura sp. KC06 OX=2530369 GN=queE P E=3 SV=1
MNETARHSHSLWVSERFGPTFQGEGPSAGRQAVFVRLLSCNLDCGRGEGAAWSCDTPYTWDWDRFDRKAEGRRVPVRDLVSWILDRRVELMVITGGEPLLQQRRLVDLVVQVLAEGRRVEIETNGTVVPLSDLCRANVTFNVSPKLSASGVATSRRVVDEPLRVFGRLARAGGAVFKFVVTCQAELDEVARLVDAHALAPVWIMPAGTDADVVLRRARELAEPVLARGWHLTPRLHTLLWGDARGR

SEQ ID NO: 27423 - protein, 250 aa, Actinoplanes regularis
  misc_feature (1)..(250): tr|A0A238X610|A0A238X610_9ACTN 7-carboxy-7-deazaguanine synthase OS=Actinoplanes regularis OX=52697 GN=queE PE =3 SV=1
MKTDEADIGLLESSDGGMPALPVSEVFGPTIQGEGPYAGRSAWFVRLGGCNLSCSWCDSPYTWDAQRFDLRREIPMTPVEEVIAGVASSSLVVVTGGEPLLHQNRPAWRALCTGLRARGCTLQIETNGTIVPNSTTRGLVQTFVVSPKLANAGAHRGNVDPALRTGWVEVAKSGHAHLKVVCTSADDVAGVVDIARTTGWPLSQVWVMPEGTTAQELNGRWRAIADAAAQAGINATHRLHILAWQDRRGH

SEQ ID NO: 27424 - protein, 237 aa, Actinoplanes sp.
  misc_feature (1)..(237): tr|R4LB42|R4LB42_9ACTN 7-carboxy-7-deazaguanine synthas e OS=Actinoplanes sp. N902-109 OX=649831 GN=queE PE=3 S V=1
MEQDLVVNEVFGPTVQGEGRSMGRRCAFLRLGGCNLSCTWCDTPYTWDWTGVSDSGVAHDPRQELHRRPVADVLAELLAFGTDLIVISGGEPLGQQERLIPLVRALVEHGKEIEIETNGTHAAHPDLVAAGVRFNVSPKLSHSGDPEHRRIVPDALENLAALPGSTFKFVCRDTRDLDEVSGLVSAFELSSVWIMPIGRTADDVTRHLSALADAVVERGWNLTTRLHTLVWDDKRAV

SEQ ID NO: 27425 - protein, 254 aa, Actinopolyspora erythraea
  misc_feature (1)..(254): tr|A0A223RSS8|A0A223RSS8_9ACTN 7-carboxy-7-deazaguanine synthase OS=Actinopolyspora erythraea OX=414996 GN=que E PE=3 SV=1
MSETVRDSVTRSGGSGYPDRSGLVVNEIFGPTVQGEGPSAGRICAFVRLGGCNLSCRWCDTPYTWDWTGIASPVPHDPAEELHLLPVEEVADRIRATGVDRVIVSGGEPLNQQHRLVPLLELLSGEAVTVEVETNGTHEPVAPLARLVDRFVVSPKLSHSGDSERRRISAAALRSFRELGKSDFKFVVTSPEDLREVDGIVAANSLRPVWIMPEGRDVDTLVRNLSAVADEVVRRKWNLTGRLHILAWNDVRGV

SEQ ID NO: 27426 - protein, 232 aa, Actinopolyspora erythraea
  misc_feature (1)..(232): tr|A0A099D4Z6|A0A099D4Z6_9ACTN 7-carboxy-7-deazaguanine synthase OS=Actinopolyspora erythraea OX=414996 GN=que E PE=3 SV=1
MVVNEIFGPTVQGEGPSAGRICAFVRLGGCNLSCRWCDTPYTWDWTGIASPVPHDPAEELHLLPVEEVADRIRATGVDRVIVSGGEPLNQQHRLVPLLELLSGEAVTVEVETNGTHEPVAPLARLVDRFVVSPKLSHSGDSERRRISAAALRSFRELGKSDFKFVVTSPEDLREVDGIVAANSLRPVWIMPEGRDVDTLVRNLSAVADEVVRRKWNLTGRLHILAWNDVRGV

SEQ ID NO: 27427 - protein, 254 aa, Actinopolyspora xinjiangensis
  misc_feature (1)..(254): tr|A0A1H0S1I1|A0A1H0S1I1_9ACTN 7-carboxy-7-deazaguanine synthase OS=Actinopolyspora xinjiangensis OX=405564 GN =queE PE=3 SV=1
MSETVCDPVSGSGGAGHPDRSGLVVNEIFGPTVQGEGPSAGRICAFVRLGGCNLSCRWCDTPYTWDWTGIASPVPHDPAEELHLLAVEEVADRIRATGVDRVIVSGGEPLNQQHRLVPLLELLSSEAVTVEVETNGTHEPVAPLARLVDRFVVSPKLSHSGDSERRRISAAALRSFRELGKSDFKFVVTSPEDLSEVDGIVAANSLRPVWIMPEGRDVDTLVRNLSAVADEVVRRRWNLTGRLHILAWNDARGV

SEQ ID NO: 27428 - protein, 211 aa, Actinosynnema pretiosum
  misc_feature (1)..(211): tr|A0A290Z120|A0A290Z120_9PSEU 7-carboxy-7-deazaguanine synthase OS=Actinosynnema pretiosum OX=42197 GN=queE P E=3 SV=1
MSYLIKEIFYTLQGEGHHAGRPAVFCRFSRCNLWTGREKDRARAICKFCDTDFVGVDGTGGGRFATSSDLVDAIEAAWPSEDRAHRFVVCTGGEPLLQLDVAAIDELHARGFEVAVETNGTRVPPAGIDWLCVSPKIGADLVVTGGDELKLVYPQEGGDPAQFEHLDFTSFRIQPMDWGDREANTRAAVEYCLKNPQWSLSMQTHKYLGIR

SEQ ID NO: 27429 - protein, 233 aa, Actinosynnema pretiosum
  misc_feature (1)..(233): tr|A0A347Q2G0|A0A347Q2G0_9PSEU 7-carboxy-7-deazaguanine synthase OS=Actinosynnema pretiosum subsp. pretiosum O X=103721 GN=queE PE=3 SV=1
MVLMRLAVNELFGPTFQGEGVSQGRVASFLRLHGCHLACAWCDTPQTWDHDRHPPAGERRLLDTTEVLDWVVEQPTELLVITGGEPLLQQRALGELLTAITDRRAVSEIEVETSGTITPSLVVAQTVNRFTVSTKLANAKMPLHRRVRPAALRALAMTGKASWKFVVQSPDDLDEAAELVQTYRLGPVWVMPEGTEEAVLLQRMRELADPVLARGWNLTSRLHILLWGDVRGR

SEQ ID NO: 27430 - protein, 252 aa, Actinosynnema sp.
  misc_feature (1)..(252): tr|A0A1V2QFS6|A0A1V2QFS6_9PSEU 7-carboxy-7-deazaguanine synthase OS=Actinosynnema sp. ALI-1.44 OX=1933779 GN=q ueE PE=3 SV=1
MPVAGSGLARHRQTLPLSEVFGPTFQGEGPFTGYRARFVRLGGCNLSCGTGDAPMVCDTEYTWNAAKFDLAVECPEIRTSTILERAGRISAPISVLTGGEPMTHQRKPAFTALLTGLRELGQVHVETNGTIPPTPAVGELVDHFTVSPKLANTGDPAGRRLKPRALAAFAAAAPGRAVFKFVAASPTDLTEVDRLVSEYSIPRRAVWIMPEGRTAARVLACHRSLADAILTRGYNTTTRLHMLLWPEEDRGR

SEQ ID NO: 27431 - protein, 232 aa, Actinosynnema sp.
  misc_feature (1)..(232): tr|A0A1V2P5H5|A0A1V2P5H5_9PSEU 7-carboxy-7-deazaguanine synthase OS=Actinosynnema sp. ALI-1.44 OX=1933779 GN=q ueE PE=3 SV=1
MDQYVVVDETFGPTFQGEGSSAGRYAHFIRLFGCRLSCAWCDSPQTHDATRCDVAAEQRILSIEDVTSWLAADPAGLLVITGGEPLLQPHVVGRLLCAIRERALATDIEIETSGAIAPADMITSAVTRFNVSPKLAHSGLRRHQRIRPAVLRGFADSGKAIWKFVVQELDDLDEIQDLVDTYGLHPVWVMPEGTDSATVLARMRMLADPVLARRWHLSTRLHTLLWENDRGR

SEQ ID NO: 27432 - protein, 217 aa, Adhaeribacter aerolatus
  misc_feature (1)..(217): tr|A0A512AYD9|A0A512AYD9_9BACT 7-carboxy-7-deazaguanine synthase OS=Adhaeribacter aerolatus OX=670289 GN=queE PE=3 SV=1
MEDLKEITQASIHSVPKDGSILPVMEAFYTVQGEGFYTGHAAYFIRLAGCDVGCHWCDVKESWDAEQHPLTALDDIVAGALAFPGRLVVITGGEPLIYNLSPLTAKLKAAGFQINIETSGAYPLSGNIDWVCLSPKKFKQPVTEILPKAQELKIIVFNKSDFKWAEDYAAQVSPATRLYLQPEWSRHAEMLPLIIDYVKEHPKWQISLQTHKYMNIP

SEQ ID NO: 27433 - protein, 193 aa, Adhaeribacter sp.
  misc_feature (1)..(193): tr|A0A2T2YNQ2|A0A2T2YNQ2_9BACT 7-carboxy-7-deazaguanine synthase OS=Adhaeribacter sp. HMF7605 OX=2072846 GN=qu eE PE=3 SV=1
MEAFYTIQGEGHNTGRAAYFIRLGGCDVGCHWCDVKESWDATSHPLTSVETIVAQAKEYPGQAVVITGGEPLIYNLDVLTQELQAAGIRTFLETSGAYPLSGSWDWICVSPKKFKKPQPDVLQKASELKVVVFHKSDFGWAEEHADQVAPHTKLYLQPEWSKAEQMMPLIVEYVKNNPKWQVSLQTHKYLNIP

SEQ ID NO: 27434 - protein, 217 aa, Adhaeribacter sp.
  misc_feature (1)..(217): tr|A0A369QJE6|A0A369QJE6_9BACT 7-carboxy-7-deazaguanine synthase OS=Adhaeribacter sp. HMF7616 OX=2072847 GN=qu eE PE=3 SV=1
MNLTKEIKQPAVLSVPASGRELPLMEAFYTIQGEGYNTGKAAYFIRLGGCDIGCHWCDVKESWDAAAHPLTSVASIVAQAQQYPGKAVVVTGGEPLIYNLDLLTLTLQQAGILTFLETSGAYPLSGSWDWVCVSPKKFKKPLPSVLAKADELKVIVFNKSDFAWAEEHAGQVAPHTRLYLQPEWSKAQQIVPDIVDYVKNNPKWQVSLQTHKYLNIP

SEQ ID NO: 27435 - protein, 261 aa, Adlercreutzia equolifaciens
  misc_feature (1)..(261): tr|A0A3E2EFT3|A0A3E2EFT3_9ACTN 7-carboxy-7-deazaguanine synthase OS=Adlercreutzia equolifaciens OX=446660 GN=q ueE PE=3 SV=1
MVPEEENDGLLDAERHQARHTIAPRAQLFPVAEKFVSVNGEGLAAGRPAAFIRFAGCNMWCTYCDTRWANHPLVEVEGWSVPDLVAWVAETGVSCVTLTGGEPLLQPYLPDLVQTLLAVDDPRPLRVEIETNGSRDLSPMAHLREACAEAGLPGSLHFTVDWKTPTAGEAVSAAMRRENYDLLDTRDAVKFVVGTEDDLVFMERCADEAGLWDRCSVLASPVWGAIESAEIAAYLIEHGLDRARLQLQLHKIIWPDETRGV

SEQ ID NO: 27436 - protein, 210 aa, Advenella incenata
  misc_feature (1)..(210): tr|A0A4V2FS54|A0A4V2FS54_9BURK 7-carboxy-7-deazaguanine synthase OS=Advenella incenata OX=267800 GN=queE PE=3 SV=1
MTYAVKELFKTLQGEGAQAGRAAVFCRFAGCNLWSGREIDRASAACTFCDTDFVGTNGIGGGKFGTAVDLAGTLAKTWGPDRTSRYVVFTGGEPLLQLDTALIDAVHAEGFEIAIETNGTLAAPAGIDWICVSPKGNNQLVQTRGNELKLVFLQSDAPPERFETLDFSHFFLQPMDGPDRLAATEHAVQYCMDHPKWRLSVQTHKYIGIP

SEQ ID NO: 27437 - protein, 213 aa, Advenella kashmirensis
  misc_feature (1)..(213): tr|V8QMA4|V8QMA4_9BURK 7-carboxy-7-deazaguanine synthas e OS=Advenella kashmirensis W13003 OX=1424334 GN=queE P E=3 SV=1
MTYSIKEIFYTLQGEGIQAGMPAVFCRVAGCNLWSGRESDRSTAICQFCDTDFVGTDGTFGGKFRTAEALADAIEAQWPKHDDTSRLVVVTGGEPLLQLDGALIDALHDRKFRIAVETNGTVAAPPGIDWICVSPKQGAPLVQTTGNELKLVFPQEQLRPESLDRSILRFDHYLLQPMDGPLLNDNTQAAIRYCQDNPQWRLSVQTHKIIGIR

SEQ ID NO: 27438 - protein, 210 aa, Advenella kashmirensis
  misc_feature (1)..(210): tr|A0A356LE77|A0A356LE77_9BURK 7-carboxy-7-deazaguanine synthase OS=Advenella kashmirensis OX=310575 GN=queE P E=3 SV=1
MTYAVKEIFKTLQGEGAQAGRAAVFCRFAGCNLWSGREIDRASAACTFCDTDFVGTNGVGGGKFATAVDLAATLAKTWGPDGASRYVVFTGGEPLLQLDTALIDAVHAEGFEIAIETNGTLAAPAGIDWICVSPKGNNELVQTQGDELKLVFLQSNAPPERFEALAFSHFFLQPMDGPNRLAATEHAVQYCMDHPKWRLSVQTHKYIGIP

SEQ ID NO: 27439 - protein, 210 aa, Advenella mimigardefordensis
  misc_feature (1)..(210): tr|W0PDB5|W0PDB5_9BURK 7-carboxy-7-deazaguanine synthas e OS=Advenella mimigardefordensis DPN7 OX=1247726 GN=qu eE PE=3 SV=1
MTYAVKEIFKTLQGEGAQAGRAAVFCRFAGCNLWSGREADRASAACTFCDTDFVGTNGIGGGKFNTAAELAMTLGKTWGPDQASRYVVFTGGEPLLQLDTALIEAVHAEGFEIAIETNGTLAAPAGIDWICVSPKGNNTLVQTRGDELKLVFRQSDALPEQFEALDFSHFFLQPMDGPDRLAATERAVQYCMDHPKWRLSVQTHKYIGIP

SEQ ID NO: 27440 - protein, 210 aa, Advenella sp.
  misc_feature (1)..(210): tr|A0A2M9TZ13|A0A2M9TZ13_9BURK 7-carboxy-7-deazaguanine synthase OS=Advenella sp. S44 OX=1982755 GN=queE PE=3 SV=1
MAYAVKEIFKTLQGEGAHAGRAAVFCRFAGCNLWSGREVDRAAAACTFCDTDFIGTDGMGGGKFSAAADLARTLAQTWGPDSTSRYVVFTGGEPLLQLDASLIDAVHAEGFEIAIETNGTIAAPAGIDWICVSPKGNNKLVQTRGNELKLVFHQSDAPPERFEALDFSHFFLQPMDGPDRRAATEHAVRYCMDHPQWRLSLQTHKYIGIP

SEQ ID NO: 27441 - protein, 209 aa, Aequorivita antarctica
  misc_feature (1)..(209): tr|A0A5C6YXH0|A0A5C6YXH0_9FLAO 7-carboxy-7-deazaguanine synthase OS=Aequorivita antarctica OX=153266 GN=queE P E=3 SV=1
MKKEVQHLVDKGVMLPLMEEFYTIQGEGFHKGTAAYFIRVGGCDVGCHWCDVKESWNAELHPPTAIEAIVENASKYSKTIVITGGEPLTWDMGPLTEMLKTRGMQTHIETSGAYKLTGTWDWICLSPKKMKLPTEEVYKAANELKVIVFNNDDFRFAEEQAAKVGKDCILYLQPEWSKREKMSPLIVDYVMQNPQWKVSLQTHKYLNIP

SEQ ID NO: 27442 - protein, 209 aa, Aequorivita lipolytica
  misc_feature (1)..(209): tr|A0A5C6YSC0|A0A5C6YSC0_9FLAO 7-carboxy-7-deazaguanine synthase OS=Aequorivita lipolytica OX=153267 GN=queE P E=3 SV=1
MKEETKILVEKGEMLPLMEEFYTIQGEGFHKGTAAYFIRVGGCDVGCHWCDVKESWNAELHPPTAIENIVENAAKHSKTIVITGGEPLTWDMGPLTKMLKDRGMQIHIETSGAYKLTGIWDWVCLSPKKMKLPTEEVYRKADELKVIVFNNDDFRFAEEQAAKVNEECILYLQPEWSKREKMSALIVDYVMQNPKWKVSLQTHKYLNIP

SEQ ID NO: 27443 - protein, 209 aa, Aequorivita soesokkakensis
  misc_feature (1)..(209): tr|A0A1A9LGK9|A0A1A9LGK9_9FLAO 7-carboxy-7-deazaguanine synthase OS=Aequorivita soesokkakensis OX=1385699 GN=q ueE PE=3 SV=1
MKKEVQILVDKGVMLPLMEEFYTIQGEGFHKGTAAYFIRVGGCDVGCHWCDVKESWNADLHPPTAIEAIVENAAKHSKTIVITGGEPLTWDMGPLTEMLKERGMQTHIETSGAYKLTGIWDWICLSPKKMKLPTEEVYKAANELKVIVFNKDDFRFAEEQAAKVGGDCILYLQPEWSKREKMSPLIVDYVMQNPKWKVSLQTHKYLNIP

SEQ ID NO: 27444 - protein, 209 aa, Aequorivita sp.
  misc_feature (1)..(209): tr|A0A2G2CR20|A0A2G2CR20_9FLAO 7-carboxy-7-deazaguanine synthase OS=Aequorivita sp. OX=1872390 GN=queE PE=3 SV =1
MKKEVQQLVDKGVMLPLMEEFYTIQGEGFHKGTAAYFIRVGGCDVGCHWCDVKESWNAELHPPTAIEAIVENAAKYSKTIVITGGEPLTWDMAPLTEMLKGKGMQTHIETSGAYKLTGIWDWICLSPKKMKLPTEEVYKAADELKVIVFNKDDFRFAEEQAAKVGPDCILYLQPEWSKREKMSPLIVDYVMQNPKWKVSLQTHKYLNIP

SEQ ID NO: 27445 - protein, 209 aa, Aequorivita sp.
  misc_feature (1)..(209): tr|A0A2D4XGE5|A0A2D4XGE5_9FLAO 7-carboxy-7-deazaguanine synthase OS=Aequorivita sp. OX=1872390 GN=queE PE=3 SV =1
MKKEVQQLVDKGVMLPLMEEFYTIQGEGFHKGTAAYFIRVGGCDVGCHWCDVKESWNAELHPPTAIEAIVENAAKYSKTIVITGGEPLTWNMGPLTEMLKEKGMQTHIETSGAYRLTGTWDWICLSPKKMKLPTEEVYKAANELKVIVFNKDDFRFAEEQAAKVGPDCILYLQPEWSKREKMSPLIVDYVMQNPKWKVSLQTHKYLNIP

SEQ ID NO: 27446 - protein, 209 aa, Aequorivita sublithincola
  misc_feature (1)..(209): tr|I3YSX9|I3YSX9_AEQSU 7-carboxy-7-deazaguanine synthas e OS=Aequorivita sublithincola (strain DSM 14238 / LMG 21431 / ACAM 643 / 9-3) OX=746697 GN=queE PE=3 SV=1
MKKEVQDLVNAGVMLPLMEEFYTIQGEGFHKGTAAYFIRVGGCDVGCHWCDVKESWNADLHPPTAIESIVENAAKYSKTIVITGGEPLTWNMDPLTEMLKSQGMQIHIETSGAYKLTGTWDWVCLSPKKMKLPTKEVYKAANELKVIIFNKDDFRFAEEQAAKINENCILYLQPEWSKRDKMVPLIVDYVMQNPQWKVSLQTHKYLNIP

SEQ ID NO: 27447 - protein, 233 aa, Aequorivita viscosa
  misc_feature (1)..(233): tr|A0A1M6D3Z6|A0A1M6D3Z6_9FLAO 7-carboxy-7-deazaguanine synthase OS=Aequorivita viscosa OX=797419 GN=queE PE=3 SV=1
MVYQLVFVRCILLFEVYFYSTFAPMKNEVQSLVDRGLVLPLMEEFYTIQGEGYHKGTAAYFIRVGGCDVGCHWCDVKESWNAELHPPTTIESMVQKATSHSKTVVITGGEPLTYDMGPLTKMLKDNGANVHIETSGAYKLTGTWDWICLSPKKVKLPTEEIYEVAHELKVIVFNKDDFRFAEEQAAKVNDNCLLYLQPEWGNREKMSPLIVDYVMQNPKWKVSLQTHKYLNIP

SEQ ID NO: 27448 - protein, 242 aa, Aeribacillus composti
  misc_feature (1)..(242): tr|A0A559TXK7|A0A559TXK7_9BACI 7-carboxy-7-deazaguanine synthase OS=Aeribacillus composti OX=1868734 GN=queE P E=3 SV=1
MKKIPVIEIFGPTIQGEGMVIGQKTMFVRTAGCDYSCSWCDSAFTWNGSAKDEIKQMTAAEILDDLIELGGDRFNHVTISGGNPALIRGLDELIILLREQGFRTALETQGSRYQDWFLLIDDLTLSPKPPSSGMKTNFTVLDDIMKRLIDGGRKDNVSLKVVVFNEEDFDYAKNVHLRYPNISFYLQPGNDQVNEQNDHLLRNQLLEKLEWLIELTVQSKEMNDARVLPQLHALVWGNKRGV

SEQ ID NO: 27449 - protein, 242 aa, Aeribacillus pallidus; identical to SEQ ID NO: 27448
  misc_feature (1)..(242): tr|A0A161WFC6|A0A161WFC6_9BACI 7-carboxy-7-deazaguanine synthase OS=Aeribacillus pallidus OX=33936 GN=queE PE= 3 SV=1

SEQ ID NO: 27450 - protein, 242 aa, Aeribacillus pallidus
  misc_feature (1)..(242): tr|A0A165WD92|A0A165WD92_9BACI 7-carboxy-7-deazaguanine synthase OS=Aeribacillus pallidus OX=33936 GN=queE PE= 3 SV=1
MKKIPVIEIFGPTIQGEGMVIGQKTMFVRTAGCDYSCSWCDSAFTWNGSAKDEIKQMTAAEILDDLIELGGDRFNHVTISGGNPALIRGLDELIILLREQGFRTALETQGSRYQDWFLLIDDLTLSPKPPSSGMKTNFTVLDDIMKRLIDGGRKDNVSLKVVVFNEEDFDYAKNVHLRYPNISFYLQPGNDQVNEQNDHLLRNQLLEKLEWLIELTVLSKEMNDARVLPQLHALVWGNKRGV

SEQ ID NO: 27451 - protein, 211 aa, Aeromicrobium sp.
  misc_feature (1)..(211): tr|A0A0S9RC14|A0A0S9RC14_9ACTN 7-carboxy-7-deazaguanine synthase OS=Aeromicrobium sp. Leaf289 OX=1736324 GN=qu eE PE=3 SV=1
MTYKVKEIFYTLQGEGTHAGRPAVFCRFSSCNLWTGREADRSRAVCKFCDTDFVGTDGEGGGKFADAHELAAAIAAKWPAGGGGRPMVVCTGGEPLLQLDAPAVDALHELGFYVAVETNGTISPPSGIDWLCVSPKIGSQLVVGQGHELKFVVPQGGVDPTAFEHLEFESFRVQPMDGPDVAANTELAVKFCLDHPLWQLSLQTHKHLGIP

SEQ ID NO: 27452 - protein, 211 aa, Aeromicrobium sp.
  misc_feature (1)..(211): tr|A0A3B7D7T1|A0A3B7D7T1_9ACTN 7-carboxy-7-deazaguanine synthase OS=Aeromicrobium sp. A1-2 OX=2107713 GN=queE PE=3 SV=1
MTYKVKEIFYTLQGEGSHAGRPAVFCRFSLCNLWTGHEKDRHRAICQFCDTDFVGTDGPGGGRFETADDLADAVEQAWPSTERDYRMVVCTGGEPLLQLDEAAVGALHARGFYVAVETNGTQVPPTGIDWLCVSPKVGADLVVTGGDEIKFVYPQGGVDPKDFESLAFANWRLQPMDNPESARNTELAVQYCLDNPRWQISLQTHKMMGIP

SEQ ID NO: 27453 - protein, 223 aa, Aeromonas allosaccharophila
  misc_feature (1)..(223): tr|A0A1Q5VW68|A0A1Q5VW68_9GAMM 7-carboxy-7-deazaguanine synthase OS=Aeromonas allosaccharophila OX=656 GN=queE PE=3 SV=1
MHYPINEIFQTIQGEGIFTGLPAIFVRLQGCPVGCPWCDTRHTWVVDPAREVGKEAVLDRSNESDCWSQLSTAQIIKSFSELGYQARHVVITGGEPCLYDLHELSSALLAAGYQVQIETSGTSEIKTHEQTWVTVSPKIGMKGGLPVLVSALERANEIKHPVATEHHIEELDALLATAALRPDVVIALQPISQKPRATQLAMDTCIARNWRLSIQTHKYLDID

SEQ ID NO: 27454 - protein, 223 aa, Aeromonas allosaccharophila
  misc_feature (1)..(223): tr|A0A0T6V0V5|A0A0T6V0V5_9GAMM 7-carboxy-7-deazaguanine synthase OS=Aeromonas allosaccharophila OX=656 GN=queE PE=3 SV=1
MHYPINEIFQTIQGEGIFTGLPAIFVRLQGCPVGCPWCDTRHTWVVDPAREAGKEAVLDRSNESDCWSTLSTAQIIASFSELGYQARHVVITGGEPCLYDLHELSSALLATGYQVQIETSGTSEIKTHEQTWVTVSPKIGMKGGLPVLVSALERANEIKHPVATEHHIEELDALLATATLRPDVVIALQPISQKPRATQLAMDTCIARNWRLSIQTHKYLDID

SEQ ID NO: 27455 - protein, 223 aa, Aeromonas cavernicola
  misc_feature (1)..(223): tr|A0A2H9U7S6|A0A2H9U7S6_9GAMM 7-carboxy-7-deazaguanine synthase OS=Aeromonas cavernicola OX=1006623 GN=queE P E=3 SV=1
MDYPINEIFQTIQGEGCFTGQPAIFVRLQGCPVGCPWCDTRHTWEVDPARQVAAQAVLNRSNESDCWSALTSTQILSQFQALGYQARHVVITGGEPCLYDLHELCAVLLAAGYQVQIETSGTSEIKAHEQAWVTVSPKIGMKGGLPVLISALERANEIKHPVATEHHIAELDTLLASATLRPEVVIALQPISQKPRATQLAIATCIARNWRLSIQTHKYLEIA

SEQ ID NO: 27456 - protein, 237 aa, Aeromonas caviae
  misc_feature (1)..(237): tr|A0A3N9YED9|A0A3N9YED9_AERCA 7-carboxy-7-deazaguanine synthase OS=Aeromonas caviae OX=648 GN=queE PE=3 SV=1
MGYNPPLLQQVVTKMHYPINEIFQTIQGEGVFTGLPAIFVRLQGCPVGCPWCDTRHTWVVDPEREVAPGEVLDRSNESDGWSKMSTEDILASFTRLGYRARHVVLTGGEPCLYDLRELSSALVASGYQVQIETSGTSEVLTHEQTWVTVSPKIGMKGGLPVLVSALERANEIKHPVATEHHIEELDALLATARLRPDVMIALQPISQKARATELAMATCIARNWRLSIQTHKYLNID

SEQ ID NO: 27457 - protein, 242 aa, Aeromonas caviae
  misc_feature (1)..(242): tr|A0A2X4RC87|A0A2X4RC87_AERCA 7-carboxy-7-deazaguanine synthase OS=Aeromonas caviae OX=648 GN=queE PE=3 SV=1
MPSPGLGYNPPLLQQVVTKMHYPINEIFQTIQGEGVFTGLPAIFVRLQGCPVGCPWCDTRHTWVVDPEREVAPGEVLDRSNESDGWSKMSTKDILASFTRLGYRARHVVLTGGEPCLYDLRELSSALVASGYQVQIETSGTSEVLTHEQTWVTVSPKIGMKGGLPVLVSALERANEIKHPVATEHHIEELDALLATARLRPDVMIALQPISQKARATELAMATCIARNWRLSIQTHKYLNID

SEQ ID NO: 27458 - protein, 223 aa, Aeromonas dhakensis
  misc_feature (1)..(223): tr|K1KBR8|K1KBR8_9GAMM 7-carboxy-7-deazaguanine synthas e OS=Aeromonas dhakensis OX=196024 GN=queE PE=3 SV=1
MHYPINEIFQTIQGEGVFTGLPAIFVRLQGCPVGCPWCDTRHTWVVDPAREVGVQAVLDCSNESDGWSKMSTAQILASFQQLGYQARHVVITGGEPCLYDLQDLSTALIAAGYQVQIETSGTSEIQTHERTWVTVSPKINMKGGLPVLVSALERANEIKHPVATERHVEELDALLATARLRDDVVIALQPISQKPRATQLAMATCIARNWRLSIQTHKYLDID

SEQ ID NO: 27459 - protein, 237 aa, Aeromonas dhakensis
  misc_feature (1)..(237): tr|A0A433GCG9|A0A433GCG9_9GAMM 7-carboxy-7-deazaguanine synthase OS=Aeromonas dhakensis OX=196024 GN=queE PE=3 SV=1
MGYNPRLLQPAVTKMHYPINEIFQTIQGEGVFTGLPAIFVRLQGCPVGCPWCDTRHTWVVDPAREVGVQAVLDCSNESDGWSKMSTEQILASFQQLGYQARHVVITGGEPCLYDLQDLSTALIAAGYQVQIETSGTSEIKTHERTWVTVSPKINMKGGLPVLVSALERANEIKHPVATERHVEELDALLATARLRDDVVIALQPISQKPRATQLAMVTCIARNWRLSIQTHKYLDID

SEQ ID NO: 27460 - protein, 224 aa, Aeromonas diversa
  misc_feature (1)..(224): tr|N9V840|N9V840_9GAMM 7-carboxy-7-deazaguanine synthas e OS=Aeromonas diversa CDC 2478-85 OX=1268237 GN=queE P E=3 SV=1
MIHYPINEIFQTIQGEGVYTGLPAIFVRLQGCPVGCPWCDTRHTWVVSPEREVPSRQVLDRSNESDAWSAMSAVEIRESFQRLGYTARHVVITGGEPCLYDLRELSVLLLAEGFTVQVETSGTHEVLVHEEAWVTVSPKLGMKGGLEVLPQALSRANEIKHPVATERHIEELDALLHFATLRPDVQIALQPISQKKHATELAMRVCIERHWRLSIQTHKYLDID

SEQ ID NO: 27461 - protein, 223 aa, Aeromonas encheleia
  misc_feature (1)..(223): tr|A0A448KWU0|A0A448KWU0_9GAMM 7-carboxy-7-deazaguanine synthase OS=Aeromonas encheleia OX=73010 GN=queE PE=3 SV=1
MHYPINEIFQTIQGEGVFTGLPAIFVRLQGCPVGCPWCDTRHTWVVDPAREVGSSEVLDRSNESDGWSKMSTVQILASFETLGYRARHVVLTGGEPCLYDLHELSAALLAAGYQVQIETSGTSEIQTHDDTWVTVSPKIGMKGGLPVLVSALERANEIKHPVATERHIEELDALLATASLRPDVMIALQPISQKPRATELAMATCIARNWRLSIQTHKYLNID

SEQ ID NO: 27462 - protein, 223 aa, Aeromonas enteropelogenes
  misc_feature (1)..(223): tr|A0A175VND9|A0A175VND9_AEREN 7-carboxy-7-deazaguanine synthase OS=Aeromonas enteropelogenes OX=29489 GN=queE PE=3 SV=1
MHYPINEIFQTIQGEGIFTGLPAIFVRLQGCPVGCPWCDTRHTWIVDPEREVGVQAVLDCSNESDGWSKMSTAEILASFQQLGYQAHHVVITGGEPCLYDLHELSTALLAAGYQVQIETSGTSEIKTHDDTWVTVSPKIGMKGGLPVLVSALERANEIKHPVATEHHIEELDELLATAHLRADVVIALQPISQKPRATQLAMATCIARNWRLSIQTHKYLDID

SEQ ID NO: 27463 - protein, 230 aa, Aeromonas hydrophila
  misc_feature (1)..(230): tr|V9ZZW7|V9ZZW7_AERHY 7-carboxy-7-deazaguanine synthas e OS=Aeromonas hydrophila 4AK4 OX=1354302 GN=queE PE=3 SV=1
MQQAVTEMHYPINEIFQTIQGEGVFTGVPAIFVRLQGCPVGCPWCDTRHTWVVDPAREVGSREVLDRSNESDSWSKMSTGEILESFETLGYRARHVVLTGGEPCLYDLHELSSALLAAGYQVQIETSGTSEILTHAQTWVTVSPKIGMKGGLPVLVSALERANEIKHPVATERHIEELDVLLATASLRPDVVIALQPISQKPRATELAMATCIARNWRLSIQTHKYLNID

SEQ ID NO: 27464 - protein, 237 aa, Aeromonas hydrophila
  misc_feature (1)..(237): tr|A0A4P7IU76|A0A4P7IU76_AERHY 7-carboxy-7-deazaguanine synthase OS=Aeromonas hydrophila OX=644 GN=queE PE=3 S V=1
MGYNPRLLQPAVTKMHYPINEIFQTIQGEGVFTGLPAIFVRLQGCPVGCPWCDTRHTWVVDPAREVGVQAVLDCSNESDGWSKMSTEQILASFQQLGYQARHVVITGGEPCLYDLQDLSAVLIEAGYQVQIETSGTSEIQTHEQTWVTVSPKINMKGGLPVLVSALERANEIKHPVATERHVEELDALLATARLRENVVIALQPISQKPRATQLAMATCIARNWRLSIQTHKYLDID

SEQ ID NO: 27465 - protein, 237 aa, Aeromonas jandaei
  misc_feature (1)..(237): tr|A0A3N6VKY1|A0A3N6VKY1_AERJA 7-carboxy-7-deazaguanine synthase OS=Aeromonas jandaei OX=650 GN=queE PE=3 SV=1
MGYNLRLLQQAVTKMHYPINEIFQTIQGEGVFTGLPAIFVRLQGCPVGCPWCDTRHTWVVDPAREVGRERVLDRSNESDCWSQLTTEQILASFVELGYQARHVVITGGEPCLYDLTELSSALLAAGYQVQIETSGTSEIKTHEQTWVTVSPKIGMKGGLPVLVSALERANEIKHPVATEHHIDELDALLVTANLRQDVVIALQPISQKPRATQLAMATCIARNWRLSIQTHKYLDID

SEQ ID NO: 27466 - protein, 237 aa, Aeromonas jandaei
  misc_feature (1)..(237): tr|A0A2S5FGC5|A0A2S5FGC5_AERJA 7-carboxy-7-deazaguanine synthase OS=Aeromonas jandaei OX=650 GN=queE PE=3 SV=1
MGYNPRLLQQAVTKMHYPINEIFQTIQGEGVFTGLPAIFVRLQGCPVGCPWCDTRHTWVVDPAREVGREHVLDRSNESDCWSQLTTEQILASFVELGYQARHVVITGGEPCLYDLTELSSALLAAGYQIQIETSGTSEIKTHEQTWVTVSPKIGMKGGLPVLVSALERANEIKHPVATEHHIEELDALLVTANLRPDVVIGLQPISQKPRATQLAMATCIARNWRLSIQTHKYLDID

SEQ ID NO: 27467 - protein, 237 aa, Aeromonas lusitana
  misc_feature (1)..(237): tr|A0A2M8HBY7|A0A2M8HBY7_9GAMM 7-carboxy-7-deazaguanine synthase OS=Aeromonas lusitana OX=931529 GN=queE PE=3 SV=1
MGYNPRLLQQVVTSMHYPINEIFQTIQGEGVFTGVPAIFVRLQGCPVGCPWCDTRHTWVVDPAREVGKGEVLDRSNESDGWSKMSTADILASFETLGYKARHVVITGGEPCLYDLTELSGALLASGYQVQIETSGTSEILTHEQTWVTVSPKIGMKGGLPVLVSALERANEIKHPVATERHIEELDALLETATLRADVIVALQPISQKPRATELAMATCIARNWRLSIQTHKYLNID

SEQ ID NO: 27468 - protein, 226 aa, Aeromonas media
  misc_feature (1)..(226): tr|A0A023RIW9|A0A023RIW9_AERME 7-carboxy-7-deazaguanine synthase OS=Aeromonas media WS OX=1208104 GN=queE PE=3 SV=1
MTEMHYPINEIFQTIQGEGVFTGVPAIFVRLQGCPVGCPWCDTRHTWVVDPAREVGCREVLDRSNESDGWSKMSTEEILGSFETLGYRARHVVLTGGEPCLYDLHELSSALLAAGYQVQIETSGTSEILTHAQTWVTVSPKIGMKGGLPVLVSALARANEIKHPVATERHIEELDALLATASLRPDVVIALQPISQKPRATELAMATCIARNWRLSIQTHKYLNID

SEQ ID NO: 27469 - protein, 223 aa, Aeromonas molluscorum
  misc_feature (1)..(223): tr|R1H5E0|R1H5E0_9GAMM 7-carboxy-7-deazaguanine synthas e OS=Aeromonas molluscorum 848 OX=1268236 GN=queE PE=3 SV=1
MLYPINEIFQTIQGEGVFTGLPAIFVRLQGCPVGCPWCDTRHTWVVDPARQVPISQVLDCSNESDGWSPMSGAQVLASFAELGYRAKHVVITGGEPCLYDLNELSETLHQAGYQLQIETSGTSEILTHPATWVTVSPKIGMAGGLTVLPSALARANEIKHPVAMMRHVEELDDLLSGAQLREDVVIALQPISQKPRATELAMAVCIERNWRLSIQTHKYLEID

SEQ ID NO: 27470 - protein, 237 aa, Aeromonas rivipollensis
  misc_feature (1)..(237): tr|A0A2P1PGR1|A0A2P1PGR1_9GAMM 7-carboxy-7-deazaguanine synthase OS=Aeromonas rivipollensis OX=948519 GN=queE PE=3 SV=1
MGYNPRLLQQAVTEMHYPINEIFQTIQGEGVFTGVPAIFVRLQGCPVGCPWCDTRHTWVVDPAREVGSREVLDRSNESDGWSKMSTEEILGSFETLGYRARHVVLTGGEPCLYDLHELSSALLAAGYQVQIETSGTSEILTHAQTWVTVSPKIGMKGGLPVLVSALERANEIKHPVATERHIEELDVLLATASLRPDVVIALQPISQKPRATELAMATCIARNWRLSIQTHKYLNID

SEQ ID NO: 27471 - protein, 250 aa, Aeromonas salmonicida
  misc_feature (1)..(250): tr|A4SLT3|A4SLT3_AERS4 7-carboxy-7-deazaguanine synthas e OS=Aeromonas salmonicida (strain A449) OX=382245 GN=q ueE PE=3 SV=1
MRKAYCEPASCPCLGYNPRLLQQAVTVMHYPINEIFQTIQGEGIFTGLPAIFVRLQGCPVGCPWCDTRHTWIVDPAREVGVQAVLDCSNESDSWSKMSTDQILASFQQLGYQARHVVITGGEPCLYDLHELSTVLLAAGYQVQIETSGTSEIKTHDSTWVTVSPKIGMKGGLPVLVSALERANEIKHPVATERHIEELDALLATATLRPDVEIALQPISQKPRATQLAMAVCIARNWRLSIQTHKYLDID

SEQ ID NO: 27472 - protein, 223 aa, Aeromonas salmonicida
  misc_feature (1)..(223): tr|T0QWC0|T0QWC0_AERSA 7-carboxy-7-deazaguanine synthas e OS=Aeromonas salmonicida subsp. pectinolytica 34mel O X=1324960 GN=queE PE=3 SV=1
MHYPINEIFQTIQGEGIFTGLPAIFVRLQGCPVGCPWCDTRHTWIVDPAREVGVQAVLDCSNESDSWSKMSTDQILASFQQLGYQARHVVITGGEPCLYDLHELSTVLLAAGYQVQIETSGTSEIKTHDSTWVTVSPKIGMKGGLPVLVSALERANEIKHPVATERHIEELDALLATATLRPDVEIALQPISQKPRATQLAMAVCIARNWRLSIQTHKYLDID

SEQ ID NO: 27473 - protein, 224 aa, Aeromonas schubertii
  misc_feature (1)..(224): tr|A0A0S2SIE8|A0A0S2SIE8_9GAMM 7-carboxy-7-deazaguanine synthase OS=Aeromonas schubertii OX=652 GN=queE PE=3 S V=1
MIHYPINEIFQTIQGEGVYTGLPAIFVRLQGCPVGCPWCDTRHTWVVDPERQVPSRQVLDRSNESDAWSAMSAAEIRESFQRLDYTARHVVITGGEPCLYDLRELSILLLAEGFTVQVETSGTHEILVHDEAWVTVSPKLGMKGGLEVLPQALARANEIKHPVATEHHIEELDALLHFATLRPDVQIGLQPISQKKHATELAMRVCIERHWRLSIQTHKYLDID

SEQ ID NO: 27474 - protein, 223 aa, Aeromonas schubertii
  misc_feature (1)..(223): tr|A0A0W7U741|A0A0W7U741_9GAMM 7-carboxy-7-deazaguanine synthase OS=Aeromonas schubertii OX=652 GN=queE PE=3 S V=1
MHYPINEIFQTIQGEGVYTGLPAIFVRLQGCPVGCPWCDTRHTWVVDPERQVPSRQVLDRSNESDAWSAMSAAEIRESFQRLDYTARHVVITGGEPCLYDLRELSVLLLAEGFTVQVETSGTHEIQVHDEAWVTVSPKLGMKGGLEVLPQALARANEIKHPVATEHHIEELDALLHFATLRPDVQIGLQPISQKKHATELAMRVCIERHWRLSIQTHKYLDID

SEQ ID NO: 27475 - protein, 224 aa, Aeromonas simiae
  misc_feature (1)..(224): tr|A0A5J6WVB6|A0A5J6WVB6_9GAMM 7-carboxy-7-deazaguanine synthase QueE OS=Aeromonas simiae OX=218936 GN=queE PE =4 SV=1
MIHYPINEIFQTIQGEGVNTGLPAIFVRLQGCPVGCPWCDTRHTWVVDPERQVASQQVLDRSNESDGWSPMSAPEVLESFRRLGYTARLVVITGGEPCLYDLRELSTLLLGEGYAVQVETSGTHEVRVHDAAWVTVSPKLGMKGGFAVLPQALARANEIKHPVATEHHIEELDELLHFATLRPDVQIALQPISQKRRATELAMRVCIERHWRLSIQTHKYLDID

SEQ ID NO: 27476 - protein, 223 aa, Aeromonas sobria
  misc_feature (1)..(223): tr|A0A2N3IWF0|A0A2N3IWF0_AERSO 7-carboxy-7-deazaguanine synthase OS=Aeromonas sobria OX=646 GN=queE PE=3 SV=1
MHYPINEIFQTIQGEGIFTGLPAIFVRLQGCPVGCPWCDTRHTWVVDPAREVGQEAVLDRSNESDCWSKLSTAQIIASFSGLGYQARHVVITGGEPCLYDLHELSSALLAAGYQVQIETSGTSEIKTHEQTWVTVSPKIGMKGGQPVLVSALERANEIKHPVATEHHIEELDTLLATATLRPDVVIALQPISQKPRATQLAMDTCIARNWRLSIQTHKYLDID

SEQ ID NO: 27477 - protein, 223 aa, Aeromonas sobria
  misc_feature (1)..(223): tr|A0A1S2D5T9|A0A1S2D5T9_AERSO 7-carboxy-7-deazaguanine synthase OS=Aeromonas sobria OX=646 GN=queE PE=3 SV=1
MHYPINEIFQTIQGEGIFTGLPAIFVRLQGCPVGCPWCDTRHTWVVDPAREVGQEAVLDRSNESDCWSQLSTAQIIASFSDLGYQARHVVITGGEPCLYDLHELSSALLAAGYQVQIETSGTSEIKTHEQTWVTVSPKIGMKGGLPVLVSALARANEIKHPVATEHHIEELDALLATAALRPDVVIALQPISQKPRATQLAMETCIARNWRLSIQTHKYLDID

SEQ ID NO: 27478 - protein, 237 aa, Aeromonas sp.
  misc_feature (1)..(237): tr|A0A2R7MUA5|A0A2R7MUA5_9GAMM 7-carboxy-7-deazaguanine synthase OS=Aeromonas sp. HMWF017 OX=2056853 GN=queE P E=3 SV=1
MGYNPRLLQQAVIEMHYPINEIFQTIQGEGIFTGLPAIFVRLQGCPVGCPWCDTRHTWVVDPAREVGKAAVLDRSNESDCWSQLSTAQIIKSFTDLGYQARHVVITGGEPCLYDLHELSSALLAAGYRVQIETSGTSEIKTHEQTWVTVSPKIGMKGGLPVLVSALERANEIKHPVATEHHIEELDALLATATLRPDVVIALQPISQKPRATQLAMDTCIARNWRLSIQTHKYLDID

SEQ ID NO: 27479 - protein, 237 aa, Aeromonas sp.; identical to SEQ ID NO: 27456
  misc_feature (1)..(237): tr|A0A369SVD8|A0A369SVD8_9GAMM 7-carboxy-7-deazaguanine synthase OS=Aeromonas sp. ARM81 OX=1747384 GN=queE PE= 3 SV=1

SEQ ID NO: 27480 - protein, 223 aa, Aeromonas taiwanensis
  misc_feature (1)..(223): tr|A0A5F0KDL1|A0A5F0KDL1_9GAMM 7-carboxy-7-deazaguanine synthase OS=Aeromonas taiwanensis OX=633417 GN=queE PE =3 SV=1
MHYPINEIFQTIQGEGVFTGLPAIFVRLQGCPVGCPWCDTRHTWVVDPAREVGRGEVLDRSNESDGWSKMSTHDILASFDTLGYRARHVVLTGGEPCLYDLNELSSALVASGYQVQIETSGTSEILTHEQTWVTVSPKIGMKGGLPVLVSALERANEIKHPVATERHIEELDALLASARLREDVVIALQPISQKPRATELAMATCIARNWRLSIQTHKYLNID

SEQ ID NO: 27481 - protein, 223 aa, Aeromonas veronii
  misc_feature (1)..(223): tr|A0A318DN27|A0A318DN27_9GAMM 7-carboxy-7-deazaguanine synthase OS=Aeromonas veronii OX=654 GN=queE PE=3 SV=1
MHYPINEIFQTIQGEGIFTGLPAIFVRLQGCPVGCPWCDTRHTWVVDPAREVGKAAVLDRSNESDCWSQLSTAQIIKSFTDLGYQARHVVITGGEPCLYDLHELSSALLAAGYQVQIETSGTSEIKTHEQTWVTVSPKIGMKGGLPVLVSALERANEIKHPVATEHHIEELDTLLATATLRPDVVIALQPISQKPRATQLAMDICIARNWRLSIQTHKYLDID

SEQ ID NO: 27482 - protein, 237 aa, Aeromonas veronii
  misc_feature (1)..(237): tr|A0A3D8JLS8|A0A3D8JLS8_9GAMM 7-carboxy-7-deazaguanine synthase OS=Aeromonas veronii OX=654 GN=queE PE=3 SV=1
MGYNPRLLQQAVIEMHYPINEIFQTIQGEGIFTGLPAIFVRLQGCPVGCPWCDTRHTWVVDPAREVGKEAVLDRSNESDCWSQLSTTQIIKSFTDLGYQARHVVITGGEPCLYDLHELSSALLAAGYQVQIETSGTSEIKTHEQTWVTVSPKIGMKGGLPVLVSALERANEIKHPVATEHHIEELDTLLATATLRPDVVIALQPISQKPRATQLAMDTCIARNWRLSIQTHKYLDID

SEQ ID NO: 27483 - protein, 215 aa, Aestuariibacter sp.
  misc_feature (1)..(215): tr|A0A2D6XYM0|A0A2D6XYM0_9ALTE 7-carboxy-7-deazaguanine synthase OS=Aestuariibacter sp. OX=1872400 GN=queE PE= 3 SV=1
  misc_feature (17)..(17): Xaa can be any naturally occurring amino acid
  misc_feature (24)..(24): Xaa can be any naturally occurring amino acid
  misc_feature (51)..(51): Xaa can be any naturally occurring amino acid
  misc_feature (54)..(54): Xaa can be any naturally occurring amino acid
  misc_feature (69)..(69): Xaa can be any naturally occurring amino acid
  misc_feature (77)..(77): Xaa can be any naturally occurring amino acid
  misc_feature (92)..(92): Xaa can be any naturally occurring amino acid
  misc_feature (95)..(95): Xaa can be any naturally occurring amino acid
  misc_feature (197)..(197): Xaa can be any naturally occurring amino acid
MFETIQGEGVYTGVPAXFVRLQGXPVGCPWCDTKHTWTLDENLIDSVDAVXNKXEESERFFGISDLGLXALFEQQGXNAKHVVITGGEPCMXDLXGLTELLHERGFTSQIETSGTFEVKCAQQTWVTVSPKVNMKGGYDVLTSALQRANEIKHPIAMQKHVDELDALLAGIDLTDKVVCLQPISQQARATELAIKTXIDRNWRLSLQTHKYVGIA

SEQ ID NO: 27484 - protein, 215 aa, Aestuariibacter sp.
  misc_feature (1)..(215): tr|A0A506RU16|A0A506RU16_9ALTE 7-carboxy-7-deazaguanine synthase OS=Aestuariibacter sp. GS-14 OX=2590670 GN=qu eE PE=3 SV=1
MFETIQGEGVYTGVPAIFVRLQGCPVGCPWCDTKHTWVLDENLIDSVDAVIRKSEESERFFGISDLGLLALFEQQGYHAKHVVITGGEPCMYDLTGLTTLLHERGYTSQIETSGTFEVKCAPQTWVTVSPKVNMKGGYEVLTSALQRANEIKHPIAMQKHIDELDALLKNIELGNKVVCLQPISQQARATELAIKTCIERNWRLSLQTHKYLGIA

SEQ ID NO: 27485 - protein, 242 aa, Aestuariispira insulae
  misc_feature (1)..(242): tr|A0A3D9HGK5|A0A3D9HGK5_9PROT 7-carboxy-7-deazaguanine synthase OS=Aestuariispira insulae OX=1461337 GN=queE PE=3 SV=1
MATDTIRISEIFGPTIQGEGALIGEPTVFVRTGGCDYRCSWCDTLHAVESDYRHDWTPMTAEAIFAEVERLSGGKPLTLSLSGGNPAIQPLGDLIALGKAKAYRFALETQGSVAAPWFSGLDVLTLSPKGPSSGMDTDWSKFDECLEIAGHSPDIALKIVVFDEADYAYAQDAAARYPKLPLYLQPGNHTPPPADDDDAEIDIDGILARMRWLVDKVAEDQWYDAKILPQLHVLLWGNLRGV

SEQ ID NO: 27486 - protein, 210 aa, Afipia broomeae
  misc_feature (1)..(210): tr|K8PNV1|K8PNV1_9BRAD 7-carboxy-7-deazaguanine synthas e OS=Afipia broomeae ATCC 49717 OX=883078 GN=queE PE=3 SV=1
MSYAVKEIFLTLQGEGAHAGRTAVFCRFSGCNLWTGREQDRASAVCQFCDTDFVGTDGTLGGRYANADELAATIAAQWQGPEGHRYTVLTGGEPLLQVDTALIDALHAQGFTIAIETNGTIEPPPGLDWICVSPKAGSELVIRKGHELKLVYPQAENTPEDFAGLEFERFSLQPMDGPDIAQSTQAAIAYCLRHPQWRLSVQTHKTLGIR

SEQ ID NO: 27487 - protein, 210 aa, Afipia broomeae
  misc_feature (1)..(210): tr|A0A2M8ZXL0|A0A2M8ZXL0_9BRAD 7-carboxy-7-deazaguanine synthase OS=Afipia broomeae OX=56946 GN=queE PE=3 SV=1
MSYAVKEIFLTLQGEGAHAGRAAVFCRFSGCNLWSGREQDRATATCRFCDTDFVGTDGTLGGRYGSAAELADTIAGQWIGAKANRYVVLTGGEPLLQVDTALIDALHGHRFSIGIETNGTIEPPDGMDWICVSPKAGAELVVRRGHELKLIYPQTDAAPEAFVDLAFERFSLQPMDGPDVIENTARAVDYCLRHPQWRLSLQTHKTLGIR

SEQ ID NO: 27488 - protein, 210 aa, Afipia clevelandensis
  misc_feature (1)..(210): tr|K8P350|K8P350_9BRAD 7-carboxy-7-deazaguanine synthas e OS=Afipia clevelandensis ATCC 49720 OX=883079 GN=queE PE=3 SV=1
MSYAVKEIFLTLQGEGAHAGRTAVFCRFSGCNLWTGREQDRPEAVCKFCDTDFVGMDGTLGGRYANADDLAAVIAAQWEGPPEHRYTVLTGGEPLLQVDPALIDALHARGFTIAVETNGTVTAPPGLDWICVSPKAGAELILRKGHELKLVYPQPENKPEDFAGLEFERFSLQPMDGPDIAQSTQAAIAYCLAHPQWRLSVQTHKTLGIR

SEQ ID NO: 27489 - protein, 210 aa, Afipia felis
  misc_feature (1)..(210): tr|A0A380WCF1|A0A380WCF1_AFIFE 7-carboxy-7-deazaguanine synthase OS=Afipia felis OX=1035 GN=queE PE=3 SV=1
MSYAVKEIFLTLQGEGMQAGRPAVFCRFSGCNLWSGREQDRADAVCQFCDTDFVGTDGTLGGRYATADDLAERIATTWGPHPDHRFVVLTGGEPMLQIDDALIGALHARGFMIAVETNGTLPAPPGLDWICVSPKADTELAIRQGHELKLVYPQTQNAPEDYTALAFQHFLLQPMDGPDLAQNTKHAIDYCLRHPQWRLSVQTHKTIGIR

SEQ ID NO: 27490 - protein, 210 aa, Afipia felis
  misc_feature (1)..(210): tr|A0A090N7P1|A0A090N7P1_AFIFE 7-carboxy-7-deazaguanine synthase OS=Afipia felis OX=1035 GN=queE PE=3 SV=1
MSYAVKEIFLTLQGEGMQAGRPAVFCRFAGCNLWSGREQDRAEAVCQFCDTDFVGTDGTLGGRYATADDLAERIAATWGPDSRHRFVVLTGGEPMLQIDDALIAALHARGFMIAVETNGTLPAPPGLDWICVSPKADTELAIRQGHELKLVYPQRQNAPEDYTALAFQHFLLQPMDGPDLEQNTARAIDYCLRHPQWRLSVQTHKTIGIR

SEQ ID NO: 27491 - protein, 210 aa, Afipia massiliensis
  misc_feature (1)..(210): tr|A0A4U6BJP7|A0A4U6BJP7_9BRAD 7-carboxy-7-deazaguanine synthase OS=Afipia massiliensis OX=211460 GN=queE PE=3 SV=1
MSYAVKEIFLTLQGEGAHAGRTAVFCRFSGCNLWTGREQDRADAVCKFCDTDFVGMDGTLGGRYANADDLACAIAEQWVGPQDHRYTVLTGGEPLLQIDPALIDALHARGFTIAVETNGTIAAPPGLDWICVSPKAGSELVIRKGHELKLVYPQEENTPEDFAGLEFERFSLQPMDGPDIAQSTQAAIAYCLRHPQWRLSVQTHKTLGIR

SEQ ID NO: 27492 - protein, 210 aa, Afipia sp.
  misc_feature (1)..(210): tr|A0A5C8CNQ2|A0A5C8CNQ2_9BRAD 7-carboxy-7-deazaguanine synthase OS=Afipia sp. OX=1871052 GN=queE PE=3 SV=1
MSYAVKEIFLTLQGEGAHAGRTAVFCRFSGCNLWTGREQDRAEAICKFCDTDFVGMDGTLGGRYANADALASAVAAQWEGPPEHRYTVLTGGEPLLQVDSALIDALHTRGFTIAVETNGTVAAPPGLDWICVSPKAGAELILRKGHELKLVYPQPENKPEDFANLEFERFSLQPLDGPDIAQSTQAAIAYCLAHPQWRLSVQTHKTLGIR

SEQ ID NO: 27493 - protein, 210 aa, Afipia sp.; identical to SEQ ID NO: 27490
  misc_feature (1)..(210): tr|D6V920|D6V920_9BRAD 7-carboxy-7-deazaguanine synthas e OS=Afipia sp. 1NLS2 OX=666684 GN=queE PE=3 SV=1

SEQ ID NO: 27494 - protein, 225 aa, Agarivorans albus
  misc_feature (1)..(225): tr|R9PQX0|R9PQX0_AGAAL 7-carboxy-7-deazaguanine synthas e OS=Agarivorans albus MKT 106 OX=1331007 GN=queE PE=3 SV=1
MASLALPVNEVFETIQGEGFHTGVPSIFVRLQGCDVGCSWCDTKHTWQVLESDRVQPELIIGASGDTARWAMLTPNQLLEQFKTRYQAKHIVITGGEPCIYDLHELTNVLITAGYSVQIETSGTYPVKAAAKAWVTVSPKVDMKGGKVVIEQALHRANEIKHPVARERDLTNLKTLLTGMTSNLDVLVCLQPISQQQRATELCIQACIENNWRLSLQTHKFIGIE

SEQ ID NO: 27495 - protein, 224 aa, Agarivorans sp.
  misc_feature (1)..(224): tr|A0A4D4J1Q7|A0A4D4J1Q7_9ALTE 7-carboxy-7-deazaguanine synthase OS=Agarivorans sp. Toyoura001 OX=2283141 GN=y gcF PE=3 SV=1
MPQPTLPINEIFETIQGEGFHTGVPAVFIRLQGCDVGCSWCDTKHTWEVLAADKVQVEQIIGVSGDTARWAGYSVEQLLKVLTQYSGTHIVITGGEPCIYDLEPLTSALISHGKSVQIETSGTYPVKANGKTWVTVSPKVAMKGEKEILIEALQRANEIKHPVARERDLENLNELLARLPEEHHALVCLQPISQQPRATELCIEACIKNNWRLSLQTHKYIGIE

SEQ ID NO: 27496 - protein, 222 aa, Agathobacter ruminis
  misc_feature (1)..(222): tr|A0A2G3E269|A0A2G3E269_9FIRM 7-carboxy-7-deazaguanine synthase OS=Agathobacter ruminis OX=1712665 GN=queE PE =3 SV=1
MAKFQVVEKFVSINGEGQSAGALAVFIRLRGCNLACSYCDTRWACTDDAEAVEMTEGEIIDYVKSTGVTRVTLTGGEPLLAKSIDVLLQAFAQCSDLALEIETNGSISIAKYASMEHAPSFTLDYKLAGSGMEQYMDVSNFALLQPKDTVKFVCSSVDELDRVCEIVDQYRISEKCRVLISPVFGSIEPADMVDYLILHQRNDIRLQLQLHKFIWDPNKRGV

SEQ ID NO: 27497 - protein, 202 aa, Aggregatibacter actinomycetemcomitans
  misc_feature (1)..(202): tr|H0KCN7|H0KCN7_AGGAC 7-carboxy-7-deazaguanine synthas e OS=Aggregatibacter actinomycetemcomitans RhAA1 OX=108 9447 GN=queE PE=3 SV=1
MPSYNIVEIFESLQGEGFNTGMPCIFVRFGKCNLACPWCDTNYNQFERMTLAQVMEEVRSFSSKNIIITGGEPTIVPNIEILLEQMKSEGYFLAIETNGLKPIPPQIDYIATSPKRLYRYKYEQRCTDFAHEVRIVADENIMAFCELIEDRIRAERYYLSPCEINGKMNLLETITQLGQLNQRANKPKWLLSVQTHKLIGIE

SEQ ID NO: 27498 - protein, 209 aa, Aggregatibacter actinomycetemcomitans
  misc_feature (1)..(209): tr|A0A5D0KSE0|A0A5D0KSE0_AGGAC 7-carboxy-7-deazaguanine synthase QueE OS=Aggregatibacter actinomycetemcomitans OX=714 GN=FXB84_05470 PE=4 SV=1
MQNSSVFMPSYNIVEIFESLQGEGFNTGMPCIFVRFGKCNLACPWCDTNYNQFERMTLAQVMEEVRSFSSKNIIITGGEPTIVPNIEILLEQMKSEGYFLAIETNGLKPIPPQIDYIATSPKRLYPHKYERRCIDFAHEVRIVADENVMAFCELIEDKIRAERYYLSPCEINGKMNLLETITQLGQLNQRVNRPKWLLSVQTHKLIGIE

SEQ ID NO: 27499 - protein, 209 aa, Aggregatibacter aphrophilus
  misc_feature (1)..(209): tr|A0A448F7X3|A0A448F7X3_AGGAP 7-carboxy-7-deazaguanine synthase OS=Aggregatibacter aphrophilus ATCC 33389 OX= 985008 GN=queE PE=3 SV=1
MQKIDVFTPSYNIVEIFESLQGEGFNTGMPSIFVRFGKCNLACPWCDTNYNQFERMTLAQIMEEVRSFSAKNIIITGGEPTIVPNIELLLDQMKSEGYFLAIETNGLKPIPTQIDYIATSPKRLYQHKYEQCCIEFADEVRIVADGDVSDFCALIEENIQATRYYLSPCEINGKMNLLETITQLGLLNQRPNKPKWLLSVQTHKLIGIA

SEQ ID NO: 27500 - protein, 209 aa, Aggregatibacter aphrophilus; identical to SEQ ID NO: 27499
  misc_feature (1)..(209): tr|A0A336N8Y7|A0A336N8Y7_AGGAP 7-carboxy-7-deazaguanine synthase OS=Aggregatibacter aphrophilus OX=732 GN=queE PE=3 SV=1

SEQ ID NO: 27501 - protein, 220 aa, Agitococcus lubricus
  misc_feature (1)..(220): tr|A0A2T5IWI5|A0A2T5IWI5_9LACT 7-carboxy-7-deazaguanine synthase OS=Agitococcus lubricus OX=1077255 GN=queE PE =3 SV=1
MASDVLGQELRITEIFFSLQGEARTVGLPTVFIRLTGCPLRCAYCDTTYSFTGGEKFSIGQILQQVADYGAHYVCVTGGEPLAQPNCLLLLTALCDLGYSVSLETSGALDVREVDIRVSKVVDLKTPDSGESHRNLYENLPHLSPHDQIKFVICSRRDYDWARFKIDEYQLKHRVSDILLSPSHGQQNPTELAQWIIQDKLPVRLQVQLHKYLWNNEPGH

SEQ ID NO: 27502 - protein, 251 aa, Agrobacterium arsenijevicii
  misc_feature (1)..(251): tr|A0A0D8KWB7|A0A0D8KWB7_9RHIZ 7-carboxy-7-deazaguanine synthase OS=Agrobacterium arsenijevicii OX=1585697 GN= queE PE=3 SV=1
MTAAAQKVAAKETAIRISEIFGPTIQGEGPLIGLPTVFVRTGGCDYRCSWCDTLHAVDSEYRDTWKPMPVETIWQEVRQLSGGVPLTVSLSGGNPAIQPLGALIAKGHGEGYRFALETQGSIAKDWFANLDHLVLSPKPPSSGMETDWQAFENCLAAAGDEPQVALKVVVFDDADYAYAKAASARFPHLPVYLQPGNHTPPPPDDDDARVDVDGIMDRMLWLVEKVSEDRWFSARVLPQLHVLLWGNKRGV

SEQ ID NO: 27503 - protein, 245 aa, Agrobacterium bohemicum
  misc_feature (1)..(245): tr|A0A135P8N0|A0A135P8N0_9RHIZ 7-carboxy-7-deazaguanine synthase OS=Agrobacterium bohemicum OX=2052828 GN=queE PE=3 SV=1
MSSTKDIPIRISEIFGPTIQGEGLLIGVPTVFVRTGGCDYRCSWCDTLHAVDSQYRDDWKPMSVDAIWQDVTALSGGKPLTVSLSGGNPAIQPLGGLIDKGHAEGYRFALETQGSIAKRWFADLDYLILSPKPPSSGMQTDWEAFESCLAAAGKGPHIALKVVIFDDADYAYAKNAAARFPDLPVYLQPGNHTPPPPDDDDAVVDIDGVMNRMLWLVDKVSADHWFNVRVLPQLHVLLWGNKRGV

SEQ ID NO: 27504 - protein, 251 aa, Agrobacterium deltaense
  misc_feature (1)..(251): tr|A0A1S7U1L3|A0A1S7U1L3_9RHIZ 7-carboxy-7-deazaguanine synthase OS=Agrobacterium deltaense NCPPB 1641 OX=1183 425 GN=queE PE=3 SV=1
MTAAAHKIAAKETTIRISEIFGPTIQGEGVLIGLPTVFVRTGGCDYRCSWCDTLHAVDSEYRDTWKPMPVEVIWQEVRRLSGGVPLTVSLSGGNPAIQPFAALIAKGQGEGYRFALETQGSIAKDWFAALDHLVLSPKPPSSGMETDWQAFEDCLAAAGDGPQVALKIVVFDDADYAYAKAASARFPHLPVYLQPGNHTPPPPDDDDARVDIDGVMDRMLWLVGKVSEDRWFSARVLPQLHVLLWGNKRGV

SEQ ID NO: 27505 - protein, 251 aa, Agrobacterium deltaense
  misc_feature (1)..(251): tr|A0A1S7RXQ5|A0A1S7RXQ5_9RHIZ 7-carboxy-7-deazaguanine synthase OS=Agrobacterium deltaense Zutra 3/1 OX=11834 27 GN=queE PE=3 SV=1
MTVAAHKIAAKETTIRISEIFGPTIQGEGLLIGLPTVFVRTGGCDYRCSWCDTLHAVDSDYRDTWKPLSVEVIWQEVRQLSGGVPLTVSLSGGNPAIQPLGPLITRGQDEGYRFALETQGSIAKDWFADLDHLVLSPKPPSSGMETDWQAFEDCLAAAGEGPQVALKIVVFDDVDYAYAKAASARFPHLPVYLQPGNHTPPPPDDDDARVDIDGVMDRMLWLVDKVSEDRWFSARVLPQLHVLLWGNKRGV

SEQ ID NO: 27506 - protein, 251 aa, Agrobacterium fabrum
  misc_feature (1)..(251): sp|A9CF16|QUEE_AGRFC 7-carboxy-7-deazaguanine synthase OS=Agrobacterium fabrum (strain C58 / ATCC 33970) OX=17 6299 GN=queE PE=3 SV=1
MTEAARNIAARETTVRISEIFGPTIQGEGPLIGLPTVFVRTGGCDYRCSWCDTLHAVDSEYRDTWKPMSVEAIWQEVLGLSGGMPLTVSLSGGNPAIQPLGTLIAKGQGEGYRFALETQGSIAKDWFADLDHLVLSPKPPSSGMETDWQAFEDCLAAAGDGPQVALKVVIFDDADYAYAKAASARFPHLPVYLQPGNHTPPPPDDDDARVDIDGVMDRMLWLVEKISEDRWFSARVLPQLHVLLWGNKRGV

SEQ ID NO: 27507 - protein, 251 aa, Agrobacterium fabrum
  misc_feature (1)..(251): tr|A0A3G2D9T7|A0A3G2D9T7_9RHIZ 7-carboxy-7-deazaguanine synthase OS=Agrobacterium fabrum OX=1176649 GN=exsD PE =3 SV=1
MTAAARNIAARETTIRISEIFGPTIQGEGPLIGLPTVFVRTGGCDYRCSWCDTLHAVDSEYRDTWKPMSVEAIWQEVLGLSGGVPLTVSLSGGNPAIQPLGALIAKGQGEGYRFALETQGSIAKDWFADLDHLVLSPKPPSSGMETDWQAFEDCLAAAGDGPQVALKVVIFDDADYAYAKAASARFPHLPVYLQPGNHTPPPPDDDDARVDIDGVMDRMLWLVEKISEDRWFSARVLPQLHVLLWGNKRGV

SEQ ID NO: 27508 - protein, 251 aa, Agrobacterium genomosp.
  misc_feature (1)..(251): tr|A0A1S7QV69|A0A1S7QV69_9RHIZ 7-carboxy-7-deazaguanine synthase OS=Agrobacterium genomosp. 3 str. CFBP 6623 O X=1183432 GN=queE PE=3 SV=1
MTAAAQKIAAKETTIRISEIFGPTIQGEGLLIGLPTVFVRTGGCDYRCSWCDTLHAVDSDYRDTWKPMPVEAIWQEVRRLSGGVPLTVSLSGGNPAIQPLGSLIAKGQGEGYRFALETQGSIAKDWFADLDHLVLSPKPPSSGMETDWQAFEDCLAAADDGPQVALKIVVFDDADYAYAKAASARFPHLPVYLQPGNHTPPPPDDDDARVDIDGVMDRMLWLVNKVSEDRWFSARVLPQLHVLLWGNKRGV

SEQ ID NO: 27509 - protein, 251 aa, Agrobacterium genomosp.
  misc_feature (1)..(251): tr|A0A1S7S6V0|A0A1S7S6V0_9RHIZ 7-carboxy-7-deazaguanine synthase OS=Agrobacterium genomosp. 5 str. CFBP 6626 O X=1183435 GN=queE PE=3 SV=1
MTTAAQQVVAKESTIRISEIFGPTIQGEGLLIGLPTVFVRTGGCDYRCSWCDTLHAVDSDYRDTWKPMPVEAIWQEVRRLSGGVPLTVSLSGGNPAIQPLGALIAKGQNEGYRFALETQGSIAKDWFADLDHLVLSPKPPSSGMETDWQAFENCLAAAGERPQVALKIVVFDDADYAYARAASARFPHLPVYLQPGNHTPPPPDDDDARVDIEGVMDRMLWLVEKVSEDRWFSARVLPQLHVLLWGNKRGV

SEQ ID NO: 27510 - protein, 245 aa, Agrobacterium larrymoorei
  misc_feature (1)..(245): tr|A0A4D7DX13|A0A4D7DX13_9RHIZ 7-carboxy-7-deazaguanine synthase OS=Agrobacterium larrymoorei OX=160699 GN=que E PE=3 SV=1
MSAAKEAPIRISEIFGPTIQGEGLLIGLPTVFVRTGGCDYRCSWCDTLHAVDSDYREDWKPSSVDEIWAEVTELSGGKPITVSLSGGNPAIQPLGPLIQRGHAEGYTFALETQGSVSKDWFADLDYLVLSPKPPSSGMETDWQAFENCLAAAGDRPKIALKVVVFDDADFAYVREAAQRFPQLPVYLQPGNHTPPPPDDDDATVDVDGIMDRMLWLVEKVASERWFEARVLPQLHVLLWGNRRGV

SEQ ID NO: 27511 - protein, 245 aa, Agrobacterium larrymoorei
  misc_feature (1)..(245): tr|A0A4Z1PVX6|A0A4Z1PVX6_9RHIZ 7-carboxy-7-deazaguanine synthase OS=Agrobacterium larrymoorei OX=160699 GN=que E PE=3 SV=1
MSAAKEAPIRISEIFGPTIQGEGLLIGLPTVFVRTGGCDYRCSWCDTLHAVDSDYREDWKPSSVDEIWAEVTELSGGNPITVSLSGGNPAIQPLGPLIHRGHAEGYTFALETQGSVSKDWFADLDYLVLSPKPPSSGMETDWQAFENCLAAAGDQPKIALKIVVFDDADFAYAREAAQRFPQLPVYLQPGNHTPPPPDDDDATVDVDGIMDRMLWLVEKVASERWFEARVLPQLHVLLWGNRRGV

SEQ ID NO: 27512 - protein, 251 aa, Agrobacterium radiobacter
  misc_feature (1)..(251): tr|W1L3K8|W1L3K8_RHIRD 7-carboxy-7-deazaguanine synthas e OS=Agrobacterium radiobacter DSM 30147 OX=1336745 GN= queE PE=3 SV=1
MTAAAHKIAAKETTIRISEIFGPTIQGEGVLIGLPTVFVRTGGCDYRCSWCDTLHAVDSEYRDTWKPMPVEAIWQEVRRLSGGVPLTVSLSGGNPAIQPLGALIAKGQGEGYRFALETQGSIAKDWFAALDHLVLSPKPPSSGMETDWRAFEDCLAAAGDGPQVALKIVVFDDADYAYAKAASARFPHLPVYLQTGNHTPPPPDDDDARVDIDGVMDRMLWLVEKVSEDRWFSARVLPQLHVLLWGNKRGV

SEQ ID NO: 27513 - protein, 279 aa, Agrobacterium radiobacter
  misc_feature (1)..(279): tr|B9JLH8|B9JLH8_AGRRK 7-carboxy-7-deazaguanine synthas e OS=Agrobacterium radiobacter (strain K84 / ATCC BAA-8 68) OX=311403 GN=exsD PE=3 SV=1
MSGQAFLRLVQGDAARDLGGTRQRNAEDMGGIPAMSEAREARIRVSEIFGPTIQGEGILIGLPTVFVRTGGCDYRCSWCDTLHAVDSDYRDQWQPMSVDEIWQDVIRLSGGKPLAVSLSGGNPAIQPLGPLIARGHGEGYSFALETQGSVAKDWFADLDTLVLSPKPPSSGMVTDWAVFDDCLRLAADKPQVALKIVVFDDHDYAYARDAAARYPYLPVYLQPGNHTPPPPDADDAKIDIDGIMDRMLWLVDKVTADRWFEARVLPQLHVLLWGNKRGV

SEQ ID NO: 27514 - protein, 251 aa, Agrobacterium rhizogenes
  misc_feature (1)..(251): tr|A0A546WK90|A0A546WK90_AGRRH 7-carboxy-7-deazaguanine synthase OS=Agrobacterium rhizogenes OX=359 GN=queE PE =3 SV=1
MTAAAQKVAAKETAIRISEIFGPTIQGEGLLIGLPTVFVRTGGCDYRCSWCDTLHAVDSEYRDTWKPMSVEAIWQEVRRLSGGVPLTVSLSGGNPAIQPLGQLIAKGQGEGYRFALETQGSIAKDWFGDLDHLVLSPKPPSSGMETDWRAFEDCLAAAGDGPQVALKIVVFDDADYAYAKAASARFPHLPIYLQPGNHTPPPPDDDDARVDIDGIMDRMLWLVDKVSEDRWFSARVLPQLHVLLWGNKRGV

SEQ ID NO: 27515 - protein, 251 aa, Agrobacterium rhizogenes
  misc_feature (1)..(251): tr|A0A178H1N5|A0A178H1N5_AGRRH 7-carboxy-7-deazaguanine synthase OS=Agrobacterium rhizogenes OX=359 GN=queE PE =3 SV=1
MTVAAHKIAAKETTIRISEIFGPTIQGEGLLIGLPTVFVRTGGCDYRCSWCDTLHAVDSDYRDTWKPLSVEAIWQEVRRLSGGVPLTVSLSGGNPAIQPLGALIAKGQGEGYRFALETQGSIAKDWFAGLDHLVLSPKPPSSGMETDWRAFEDCLAAAGDGPQVALKIVVFDDVDYAYAKAASARFPHLPVYLQPGNHTPPPPDDDDARVDIDGVMDRMLWLVDKVSEDRWFSARVLPQLHVLLWGNKRGV

SEQ ID NO: 27516 - protein, 245 aa, Agrobacterium rosae
  misc_feature (1)..(245): tr|A0A2S4EAF6|A0A2S4EAF6_9RHIZ 7-carboxy-7-deazaguanine synthase OS=Agrobacterium rosae OX=1972867 GN=queE PE= 3 SV=1
MSSTKDTPIRISEIFGPTIQGEGLLIGVPTIFVRTGGCDYRCSWCDTLHAVDSQYRDDWKPMSVDAIWQDVTTLSGGKPLTVSLSGGNPAIQPLGKLIEKGHGEGYRFALETQGSIAKDWFADLDYLVLSPKPPSSGMDTDWNAFEHCLEKAGGGPQTALKFVVFDDADYAYAKHAAARYPHLAVHLQPGNHTPPPPDDDDALVDIDGVMDRMLWLVDRVSADRWFDVRVLPQLHVLLWGNKRGV

SEQ ID NO: 27517 - protein, 245 aa, Agrobacterium rubi
  misc_feature (1)..(245): tr|A0A081CSA8|A0A081CSA8_9RHIZ 7-carboxy-7-deazaguanine synthase OS=Agrobacterium rubi TR3 = NBRC 13261 OX=136 8415 GN=queE PE=3 SV=1
MNTQKEAPVRISEIFGPTIQGEGLLIGLPTVFVRTGGCDYRCSWCDTLHAVESKYREDWTPMSAEEIWQEVKRLSGGKPLTVSLSGGNPAIQPLGPLIAKGHGEGYRFALETQGSLAKDWFADLDYLVLSPKPPSSGMQTDWPAFESCLTAAGSGPQLALKIVVFDDVDYAYAKDAHRRYPQLPVYLQPGNHTPPPPEDDDAVVDIDGVMERMLWLVEKVNADRWFDVRVLPQLHVLLWGNKRGV

SEQ ID NO: 27518 - protein, 245 aa, Agrobacterium rubi
  misc_feature (1)..(245): tr|A0A1B9TX19|A0A1B9TX19_9RHIZ 7-carboxy-7-deazaguanine synthase OS=Agrobacterium rubi OX=28099 GN=queE PE=3 S V=1
MKTQKEAPVRISEIFGPTIQGEGLLIGLPTVFVRTGGCDYRCSWCDTLHAVESKYREDWTPMSADDIWQEVTRLSGGKPLTVSLSGGNPAIQPLGPLIAKGHGEGYRFALETQGSLSKDWFADLDYLVFSPKPPSSGMQTDWPAFESCLTAAGSGPQLALKIVVFDDADYAYAKDAHQRYPQLPVYLQPGNHTPPPPEDDDAVVDIDGVTERMVWLVEKVNADLWFDVRVLPQLHVLLWGNKRGV

SEQ ID NO: 27519 - protein, 251 aa, Agrobacterium salinitolerans
  misc_feature (1)..(251): tr|A0A1S9E5G0|A0A1S9E5G0_9RHIZ 7-carboxy-7-deazaguanine synthase OS=Agrobacterium salinitolerans OX=1183413 GN =queE PE=3 SV=1
MTMAAHKIAAKDATIRISEIFGPTIQGEGLLIGLPTVFVRTGGCDYRCSWCDTLHAVDSDYRETWKPMSIDAIWQEVRRLSGGVPLTVSLSGGNPAIQPLGSLISKGQGEGYRFALETQGSIAKDWFADLDHLVLSPKPPSSEMETDWQAFESCLAAAGDGPQVALKIVVFDDADYAYAKAASARFPHLPVYLQPGNHTPPPPDDDDARVDIDGVMDRMLWLVDKVSVDRWFSARVLPQLHVLLWGNKRGV

SEQ ID NO: 27520 - protein, 251 aa, Agrobacterium salinitolerans
  misc_feature (1)..(251): tr|A0A1S7UDT5|A0A1S7UDT5_9RHIZ 7-carboxy-7-deazaguanine synthase OS=Agrobacterium salinitolerans str. Hayward 0363 OX=1183434 GN=queE PE=3 SV=1
MTAAAHKIAAKDTTIRISEIFGPTIQGEGLLIGLPTVFVRTGGCDYRCSWCDTLHAVDSDYRDTWKPMSVDAIWRDVRRLSGGVPLTVSLSGGNPAIQPLGALIAKGRGEGYRFALETQGSIAKDWFADLDHLVLSPKPPSSGMGTDWQAFEDCLTAAGEGPQVALKIVVFDDADYAYAKAASARFPHLPVYLQPGNHTPPPPDDDDARVDIDGVMDRMLWLVDKVSEDRWFSARVLPQLHVLLWGNKRGV

SEQ ID NO: 27521 - protein, 251 aa, Agrobacterium sp.
  misc_feature (1)..(251): tr|A0A3R9DRM9|A0A3R9DRM9_9RHIZ 7-carboxy-7-deazaguanine synthase OS=Agrobacterium sp. FDAARGOS_525 OX=2420311 GN=queE PE=3 SV=1
MTAARQKSAAKDTTIRISEIFGPTIQGEGLLIGLPTVFVRTGGCDYRCSWCDTLHAVDSDYRDTWKPVPVDAIWQEVRRLSGGVPLTVSLSGGNPAIQPLGSLIAKGHGEGYRFALETQGSIAKDWFADLDHLVLSPKPPSSGMGTDWQAFEDCLAAAGEGPQVALKIVVFDDADYAYAKAASARFPHLPVYLQPGNHTPPPPDDDDARVDIDGVMERMLWLVDKVSEDRWFSARVLPQLHVLLWGNKRGV

SEQ ID NO: 27522 - protein, 251 aa, Agrobacterium sp.
  misc_feature (1)..(251): tr|A0A437L7E1|A0A437L7E1_9RHIZ 7-carboxy-7-deazaguanine synthase OS=Agrobacterium sp. CNPSo 2736 OX=2499627 GN =queE PE=3 SV=1
MIAAAQKIAAKETTIRISEIFGPTIQGEGVLIGLPTVFVRTGGCDYRCSWCDTLHAVDSEYRDTWKPMPVEAIWQEVRRLSGGVPLTVSLSGGNPAIQPLGALIAKGQGEGYRFALETQGSIAKDWFADLDHLVLSPKPPSSGMETDWQAFKDCLAAAGEGPQVALKIVVFDDADYAYAKAASARFPHLPVYLQPGNHTPPPPDDDDARVDIDGVMDRMLWLVDKVSEDRWFSARVLPQLHVLLWGNKRGV

SEQ ID NO: 27523 - protein, 251 aa, Agrobacterium tumefaciens
  misc_feature (1)..(251): tr|H0H3E8|H0H3E8_RHIRD 7-carboxy-7-deazaguanine synthas e OS=Agrobacterium tumefaciens 5A OX=1107544 GN=queE PE =3 SV=1
MTAVAQKVAAKETAIRISEIFGPTIQGEGLLIGLPTVFVRTGGCDYRCSWCDTLHAVDSEYRDTWKPMSVEAIWQEVRRLSGSVPLTVSLSGGNPAIQPLGQLIAKGQGEGYRFALETQGSIAKDWFGDLDHLVLSPKPPSSGMETDWRAFEDCLAAAGDGPQVALKIVVFDDADYAYAKAASARFPHLPIYLQPGNHTPPPPDDDDARVDIDGIMDRMLWLVDKVSEDRWFSARVLPQLHVLLWGNRRGV

SEQ ID NO: 27524 - protein, 251 aa, Agrobacterium tumefaciens
  misc_feature (1)..(251): tr|M8A3U9|M8A3U9_RHIRD 7-carboxy-7-deazaguanine synthas e OS=Agrobacterium tumefaciens str. Cherry 2E-2-2 OX=12 81779 GN=queE PE=3 SV=1
MTAAAQKIAAKETTIRISEIFGPTIQGEGVLIGLPTVFVRTGGCDYRCSWCDTLHAVDSEYRDTWKPMPVEAIWQEVRRLSGGVPLTVSLSGGNPAIQPLGALIAKGQGEGYRFALETQGSIAKDWFADLDYLVLSPKPPSSGMETDWQAFEDCLAAAGDGPQVALKIVVFDDADYAYAKAASARFPHLPVYLQPGNHTPPPPDDDDARVDIDGVMNRMLWLVDKVSEDRWFSARVLPQLHVLLWGNKRGV

SEQ ID NO: 27525 - protein, 255 aa, Agrobacterium vitis
  misc_feature (1)..(255): tr|B9JS44|B9JS44_AGRVS 7-carboxy-7-deazaguanine synthas e OS=Agrobacterium vitis (strain S4 / ATCC BAA-846) OX= 311402 GN=exsD PE=3 SV=1
MGGVSSLTASETVIRVSEIFGPTIQGEGVLIGQPTVFVRMGGCDYRCSWCDSLHAVESRFREEWLPMSVQAIWAEVESLSGGVPLMVSLSGGNPAIQPLGALIAHGHERGYRFALETQGSIARDWFADLDVLVVSPKPPSSGMETDWDALSLCLEKAAARGEQQSPLTVLKFIVFDEADYAYARDASARHPHLPVYLQPGNHTPPPPEDDDAVIDMDGIMTRMHWLVDRVVEDRWFAARVLPQLHVLLWGNKRGV

SEQ ID NO: 27526 - protein, 255 aa, Agrobacterium vitis
  misc_feature (1)..(255): tr|A0A202F0Q1|A0A202F0Q1_AGRVI 7-carboxy-7-deazaguanine synthase OS=Agrobacterium vitis OX=373 GN=queE PE=3 SV =1
MGGVSSLTASETVIRVSEIFGPTIQGEGVLIGQPTVFVRTGGCDYRCSWCDSLHAVESRFREEWLPMSVEAIWAEVESLSGGVPLMVSLSGGNPAIQPLGGLIAHGHERGYRFALETQGSIARDWFADLDVLVVSPKPPSSGMETDWDALSLCLEKAAARGKQQSPLTVLKFIVFDEADYAYARDASARHPHLPVYLQPGNHTPPPPEDDDAVIDMDGIMTRMHWLVDRVVEDRWFAARVLPQLHVLLWGNKRGV

SEQ ID NO: 27527 - protein, 211 aa, Agromyces ramosus
  misc_feature (1)..(211): tr|A0A4Q7M8U5|A0A4Q7M8U5_9MICO 7-carboxy-7-deazaguanine synthase OS=Agromyces ramosus OX=33879 GN=queE PE=3 SV =1
MSYKVKEIFYTLQGEGTHAGRPAVFCRFSLCNLWTGRERDRPRAICQFCDTDFVGTDGPGGGKFATADELADAVEAAWPVGWASNRMVVCTGGEPLLQLDEPAIEALHRRGFYVAVETNGTRIPPAGVDWLCVSPKIGADLVVTRGDELKFVYPQKGVDPSSFEHLDFGTYRVQPMDGPDISVNTALAVEYCLNHPTWQLSLQTHKYLGIA

SEQ ID NO: 27528 - protein, 226 aa, Agromyces sp.
  misc_feature (1)..(226): tr|A0A542JQZ9|A0A542JQZ9_9PSED 7-carboxy-7-deazaguanine synthase OS=Agromyces sp. SLBN-50 OX=744977 GN=queE PE =3 SV=1
MACFAVTPGALMQTNLRITEIFYSLQGETNTSGLPTVFVRLTGCPLRCQYCDTAYAFSGGEIMSLEAILERVAAFKPRYVCVTGGEPLAQPNCIPLLEQLCDAGYRVSLETSGAMDIAPTDRRVSRVVDLKTPGSQEVARNLYSNLDQLTGNDQVKFVICSREDYDWAVSKLIEYRLEQRAGEVLFSPSHGQVDARALADWIVADNLPVRFQLQLHKILWNDEPGH

SEQ ID NO: 27529 - protein, 230 aa, Ahniella affigens
  misc_feature (1)..(230): tr|A0A2P1PY91|A0A2P1PY91_9GAMM 7-carboxy-7-deazaguanine synthase OS=Ahniella affigens OX=2021234 GN=queE PE=3 SV=1
MTEALEASRLVVDDQPELERLKITEVFLSLQGEARDVGWPTTFIRLTGCPLRCTYCDTTYSFFGGTWRQIDDLVDEATQNGARHVCVTGGEPLSQKRCLILLKKLCDAGFLVSLETSGAIDISAVDSRVSRVLDLKTPSSGEMARNRLANLPLLTAHDQVKFVIGDRADYDWSVQMLKTHNLAQRAEVLFSPSHGQITATELADWIIADRLPVRFQWQLHKQLWGETPGK

SEQ ID NO: 27530 - protein, 214 aa, Aidingimonas halophila
  misc_feature (1)..(214): tr|A0A1H3B925|A0A1H3B925_9GAMM 7-carboxy-7-deazaguanine synthase OS=Aidingimonas halophila OX=574349 GN=queE P E=3 SV=1
MYHVKEAFYTLQGEGAQTGRASVFCRFSGCNLWSGRESDRTKSLCRFCDTDFVGTDGQNGGRFANAESLADHLHALWPTRAMRSSPYVVFTGGEPLLQLDDALITAMQARGFEVAVETNGTLPVPPGIDWLCVSPKGKSPLVIESGDELKLVYPQVDAPPERFDTLRFTYFFLQPMDTSPREQNSHTVPDTVAYCLRYPQWRLSLQTHKIIGID

SEQ ID NO: 27531 - protein, 234 aa, Akkermansia glycaniphila
  misc_feature (1)..(234): tr|A0A1C7PB06|A0A1C7PB06_9BACT 7-carboxy-7-deazaguanine synthase OS=Akkermansia glycaniphila OX=1679444 GN=que E PE=3 SV=1
MKLARLNSVPEIFYSVQGEGVSQGSPTVFLRLAGCNLACSWCDTAYSWKRQEAEEMTPHQVLRAIMDIVEAESPEDSPCRHIVITGGEPLLQQQELGELLGLLDGWRVEIETNGTQAPSGELAARVDQWNVSPKLSHSGNRTGRALVPDTLAAFAATGNAWFKFVIAHESDWEEIRQTAETAGIPRSRILLMPMATTRAELAAARAHVIGICLQHNVRYSDRLHIAVWDSRQGV

SEQ ID NO: 27532 - protein, 227 aa, Akkermansia muciniphila
  misc_feature (1)..(227): tr|A0A2N8IRL7|A0A2N8IRL7_9BACT 7-carboxy-7-deazaguanine synthase OS=Akkermansia muciniphila OX=239935 GN=queE PE=3 SV=1
MLTLAQIHGQPEIFHSIQGEGVSQGTPCVFLRLAGCNLACSWCDTAYSWNGTAPGVRLAPEKAAELVLHYPCRRLVLTGGEPLIQQKALPALLRLLPDHAVEMETNGTIMPDTELLKRVTQFNVSPKLPHSGNNDVKTWKPDILRCLAGTEKAWFKFVVACEDDVRAVLRRASEADIPPERILIMPLASTRDELNAMRAQAVEWCLRYGLRFSDRLHIAIWNSKKGV

SEQ ID NO: 27533 - protein, 227 aa, Akkermansia muciniphila
  misc_feature (1)..(227): tr|A0A2N8ILB7|A0A2N8ILB7_9BACT 7-carboxy-7-deazaguanine synthase OS=Akkermansia muciniphila OX=239935 GN=queE PE=3 SV=1
MLTLAQIHGQPEIFHSIQGEGVSQGTPCVFLRLAGCNLACSWCDTAYSWNGTVPGVRLAPEKAAELVLHYPCRRLVLTGGEPLIQQKALPALLRLLPDHAVEMETNGTIMPDTELLKRVTQFNVSPKLPHSGNNDVKTWKPDILRCLAGTEKAWFKFVVACEDDVRAVLRRASEADIPPERILIMPLASTRDELNAMRAQAVEWCLRYGFRFSDRLHIAIWNSKKGV

SEQ ID NO: 27534 - protein, 227 aa, Akkermansia sp.
  misc_feature (1)..(227): tr|A0A5B6D9P0|A0A5B6D9P0_9BACT 7-carboxy-7-deazaguanine synthase OS=Akkermansia sp. BIOML-A26 OX=2584582 GN=qu eE PE=3 SV=1
MLKLAQLHGEPEIFHSIQGEGASQGAPCVFLRLAGCNLACSWCDTAYSWDGTSPVVRLSPEEAAIAVLRYPCRRLVLTGGEPLIQQKALPGLFRLLPEHFVEMETNGTILPDEELLHHIGQFNVSPKLPHSGNDAARAWKPNILRRLAETEKAWFKFVASCEEDVAGVLRLAQQAGIPAERILIMPLAASREELDIMRPRVVAWCLRYGLRFSDRLHIAIWGSKKGV

SEQ ID NO: 27535 - protein, 227 aa, Akkermansia sp.; identical to SEQ ID NO: 27534
  misc_feature (1)..(227): tr|A0A5B6GYX9|A0A5B6GYX9_9BACT 7-carboxy-7-deazaguanine synthase OS=Akkermansia sp. BIOML-A8 OX=2584564 GN=que E PE=3 SV=1

SEQ ID NO: 27536 - protein, 212 aa, Albidiferax sp.
  misc_feature (1)..(212): tr|A0A1H0STE1|A0A1H0STE1_9BURK 7-carboxy-7-deazaguanine synthase OS=Albidiferax sp. OV413 OX=1855285 GN=queE P E=3 SV=1
MTYSVKEIFYTLQGEGAQTGSPAVFCRFAGCNLWTGRESDRATAVCRFCDTDFVGTDGTLGGKFATADALADLIEAQWPAGDTQNRLTVLTGGEPLLQVDAELVAALHARGFRIAVESNGTVRAPEGIDWLCISPKAGAPWIQQQGQELKVVWPQSGMDLGTLVSTGQFTHRFLQPMDGPEQAANMTLCIDTCMQHPAWRLSIQTHKISGIR

SEQ ID NO: 27537 - protein, 210 aa, Alcaligenaceae bacterium
  misc_feature (1)..(210): tr|A0A2G4J8J5|A0A2G4J8J5_9BURK 7-carboxy-7-deazaguanine synthase OS=Alcaligenaceae bacterium OX=2021368 GN=que E PE=3 SV=1
MTYSVKEIFYTLQGEGLRAGRPAVFCRFAGCNLWSGREEDRSTAVCQFCDTDFVGTNGTLGAKFVSPEQLAEQIAALWPEHKQQRYVVLTGGEPLLQVDAALIQALHHQDFEIALETNGTLAVPEGIDWICVSPKAGANWVQKTGNELKLVYPQPTLMPSALAATSFDHYLLQPMDGLFQKQNTLKAIDYCQQNPEWRLSVQTHKFLDIR

SEQ ID NO: 27538 - protein, 211 aa, Alcaligenaceae bacterium
  misc_feature (1)..(211): tr|A0A354K341|A0A354K341_9BURK 7-carboxy-7-deazaguanine synthase OS=Alcaligenaceae bacterium OX=2021368 GN=que E PE=3 SV=1
MTYSVKEIFYTLQGEGGQAGCAAVFLRFAGCNLWTGLEKDRAQAVCQFCDTDFVGTNGTLGGKYKTAIELVEVIDREWPAGYSESKLVVCTGGEPLLQLDDALIRELHDHGFRIAVETNGTITAPSGIDWICVSPKSDAPLNQDHGQEIKLVYPQKNVRPELFENLNFKHFFLQPMDGPDQATNIALTIQYCMNHPKWRLSLQSHKLTGIR

SEQ ID NO: 27539 - protein, 210 aa, Alcaligenes xylosoxydans
  misc_feature (1)..(210): tr|A0A424WH46|A0A424WH46_ALCXX 7-carboxy-7-deazaguanine synthase OS=Alcaligenes xylosoxydans xylosoxydans OX=8 5698 GN=queE PE=3 SV=1
MTYSAKEIFKTLQGEGAHAGRAAVFCRFAGCNLWTGRESDRASAACTFCDTDFIGTDGDGGGKFATPELLADAIAAAWGPGANDRYVVFTGGEPLLQLDAPLLTAVHARGFTVAIETNGTIKPPAGIDWICVSPKGTTPVVLERGDELKLVYPQANAQPEAFAHLDFDHFFLQPMDGPARAANTEQAVQYCMQHPQWRLSLQTHKYIGIP

SEQ ID NO: 27540 - protein, 210 aa, Alcaligenes xylosoxydans
  misc_feature (1)..(210): tr|A0A176XT76|A0A176XT76_ALCXX 7-carboxy-7-deazaguanine synthase OS=Alcaligenes xylosoxydans xylosoxydans OX=8 5698 GN=queE PE=3 SV=1
MTYSAKEIFKTLQGEGAHAGRAAVFCRFAGCNLWSGRESDRASAACTFCDTDFIGTDGDGGGKFASPDLLADAIAAAWGPGADNRYVVFTGGEPLLQLDAPLLDAIHARGFTVAIETNGTIKPPGGIDWICVSPKGTAPVVVERGNELKLVYPQGNALPDAFAHLDFEHFFLQPMDGPARAANTEQAVQYCMQHPQWRLSLQTHKYIGIP

SEQ ID NO: 27541 - protein, 214 aa, Alcanivoracaceae bacterium
  misc_feature (1)..(214): tr|A0A3L8B090|A0A3L8B090_9GAMM 7-carboxy-7-deazaguanine synthase OS=Alcanivoracaceae bacterium GenoA1_TS13_700 OX=2072747 GN=queE PE=3 SV=1
MSQLRITEIFYSLQGEARTIGLPTVFVRLTGCPLRCQYCDTAYAFSGGEMRSISEILDEVARYSPKYITVTGGEPLAQPACRVLLTELCDAGYDVSLETSGALDIRGIDPRVSIVLDLKTPDSAESHRNLMDNIPLLKSRDQVKFVICSRQDYQWARMKVDELGLTERVGDVLFSPSFQQIKAADLADWIVEDRLPVRFQLQLHKLLWSDEPGR

SEQ ID NO: 27542 - protein, 213 aa, Alcanivoracaceae bacterium
  misc_feature (1)..(213): tr|A0A2E2DHB3|A0A2E2DHB3_9GAMM 7-carboxy-7-deazaguanine synthase OS=Alcanivoracaceae bacterium OX=2024895 GN=q ueE PE=3 SV=1
MELRLTEIFHSLQGEARTVGRPTVFVRLTGCPQRCVWCDTEYAFSGGEKWTLEAILAEVARHGAGCVTVTGGEPLAQPNCLPLLTALCDQGYEVSLETGGAMDIAGVDERVSVVMDLKAPGSGEQHNNRLENIPHLRPNHQVKFVLADRRDYDWARFMLDQHQLHKRVSDVLFSPVQGTLAPGELADWIVADRLPVRFQLQLHKLLWNDARGR

SEQ ID NO: 27543 - protein, 213 aa, Alcanivorax borkumensis
  misc_feature (1)..(213): tr|Q0VRI9|Q0VRI9_ALCBS 7-carboxy-7-deazaguanine synthas e OS=Alcanivorax borkumensis (strain ATCC 700651 / DSM 11573 / NCIMB 13689 / SK2) OX=393595 GN=queE PE=3 SV=1
MELRLTEIFHSLQGESRTVGRPTVFVRLTGCPQRCVWCDTEYAFSGGEKWSLAAILEEVAALGAQYVTVTGGEPLAQPSCLPLLKTLCDEGYQVSLETGGAMDIAGVDERVSVVMDLKAPGSGEQHNNRLSNIALLKAHHQVKFVLADRKDYDWARFMLDQYQLHQRVSDVLFSPVQGTLAPGDLANWIVEDRLPVRFQLQLHKLLWNDARGR

SEQ ID NO: 27544 - protein, 252 aa, Alcanivorax dieselolei
  misc_feature (1)..(252): tr|K0CGH6|K0CGH6_ALCDB 7-carboxy-7-deazaguanine synthas e OS=Alcanivorax dieselolei (strain DSM 16502 / CGMCC 1 .3690 / B-5) OX=930169 GN=queE PE=3 SV=1
MLECTPFRGSIPTLNDSALFRAVIRIHHHIRIRRRSGATVELRITEIFHSLQGEARSVGRPTVFVRLTGCPQRCVWCDTEYAFQGGQKWSLDDILETVDGYGAGYVTVTGGEPLAQPNCLPLLTLLCDRGYEVSLETGGAMDIAAVDERVSVVMDLKAPGSGEQHNNRLENIPLLRPNHQVKFVLADRRDYDWARFMLDQHQLARRVSDVLFSPVQGQLAPTDLADWIVRDRLPVRFQIQLHKLLWNDAQGR

SEQ ID NO: 27545 - protein, 213 aa, Alcanivorax hongdengensis
  misc_feature (1)..(213): tr|L0WAH3|L0WAH3_9GAMM 7-carboxy-7-deazaguanine synthas e OS=Alcanivorax hongdengensis A-11-3 OX=1177179 GN=que E PE=3 SV=1
MELRLTEIFFSLQGEARTVGCPTVFVRLTGCPQRCVWCDTEYAFSGGEKWSLAAILEEVGRHGARYVTVTGGEPLAQPHCLTLLGALCDAGYQVSLETGGAMDIAGVDERVSVVMDLKAPGSAEQHNNRLENIPLLRPHHQVKFVLADRRDYDWARFMLDQHNLAERVSDVLFSPVQGQLAPGQLADWIIEDRLPVRFQLQLHKLLWDDARGR

SEQ ID NO: 27546 - protein, 213 aa, Alcanivorax jadensis
  misc_feature (1)..(213): tr|A0A095S864|A0A095S864_9GAMM 7-carboxy-7-deazaguanine synthase OS=Alcanivorax jadensis T9 OX=1177181 GN=queE PE=3 SV=1
MDLRLTEIFYSLQGEARTVGRPTVFVRLTGCPQRCVWCDTEYAFSGGEKWSLEAVLEKVASYGAHYVTVTGGEPLAQPNCLPLLTALCDRGLDVSLETGGAMDIAGVDPRVSVVMDLKAPGSGEQHNNRLENIPLLQPHHQVKFVLADRKDYDWARFMLDQHQLHQRVSDVLFSPVQGELPPGELADWIVADRLPVRFQLQLHKLLWNDARGR

SEQ ID NO: 27547 - protein, 213 aa, Alcanivorax nanhaiticus
  misc_feature (1)..(213): tr|A0A095TSB7|A0A095TSB7_9GAMM 7-carboxy-7-deazaguanine synthase OS=Alcanivorax nanhaiticus OX=1177154 GN=queE PE=3 SV=1
MELRLTEIFHSLQGEARTVGRPTVFVRLTGCPQRCVWCDTEYAFSGGEKWTLESILAEVAQYGAGYITVTGGEPLAQPNCLPLLTALCDEGYEVSLETGGAMDISQVDERVSVVMDLKAPGSAEQHNNRLENIPLLRPHHQVKFVLADRKDYDWARFMLDQHQLAERVADVLFSPVQGQLAPGDLADWIVADRLPVRFQLQLHKLLWNDARGR

SEQ ID NO: 27548 - protein, 213 aa, Alcanivorax pacificus
  misc_feature (1)..(213): tr|A0A0B4XKQ4|A0A0B4XKQ4_9GAMM 7-carboxy-7-deazaguanine synthase OS=Alcanivorax pacificus W11-5 OX=391936 GN=q ueE PE=3 SV=1
MELRITEIFHSLQGEARSVGRPTVFVRLTGCPQRCVWCDTEYAFQGGQRRDLADIVAEVGSYGAEYVTVTGGEPLAQPNCLPLLTQLCDAGFQVSLETGGAMDIAGVDPRVSVVMDLKAPDSGEMHNNRLANIALLKAADQVKFVLASRRDYDWARLQLDQHALPDKVADVLFSPVWGQLPPEQLAQWILEDRLPVRFQLQLHKILWADARGR

SEQ ID NO: 27549 - protein, 213 aa, Alcanivorax profundi; identical to SEQ ID NO: 27542
  misc_feature (1)..(213): tr|A0A418Y1E8|A0A418Y1E8_9GAMM 7-carboxy-7-deazaguanine synthase OS=Alcanivorax profundi OX=2338368 GN=queE PE =3 SV=1

SEQ ID NO: 27550 - protein, 213 aa, Alcanivorax sp.
  misc_feature (1)..(213): tr|B4WY37|B4WY37_9GAMM 7-carboxy-7-deazaguanine synthas e OS=Alcanivorax sp. DG881 OX=236097 GN=queE PE=3 SV=1
MELRLTEIFHSLQGESRTVGRPTVFVRLTGCPQRCVWCDTEYAFSGGEKWTLAAIREQVAAHGAQYVTVTGGEPLAQPNCLPLLTALCDDGYQVSLETGGAMDIAGVDERVSVVMDLKAPGSGEQHNNRLENIPLLKAHHQVKFVLADRKDYDWARFMLDQHQLHKRVSDVLFSPVQDGLAPGELADWIVADRLPVRFQLQLHKYLWNDARGR

SEQ ID NO: 27551 - protein, 213 aa, Alcanivorax sp.
  misc_feature (1)..(213): tr|A0A2E9TL93|A0A2E9TL93_9GAMM 7-carboxy-7-deazaguanine synthase OS=Alcanivorax sp. OX=1872427 GN=queE PE=3 SV =1
MDLRLTEIFYSLQGEARTVGRPTVFVRLTGCPQRCVWCDTEYAFSGGEKWSLEAILAQVAGYQAHYVTVTGGEPLAQPNCLGLLTALCDQGYEVSLETGGAMDIAEVDPRVSVVMDLKAPGSGEQHNNRLENIPLLRPHHQVKFVLADRKDYDWARFMLDQHQLPQRVGDVLFSPVQGQLAPGELADWIVADRLPVRFQLQLHKLLWNDARGR

SEQ ID NO: 27552 - protein, 215 aa, Algibacter alginicilyticus
  misc_feature (1)..(215): tr|A0A0N7HYU3|A0A0N7HYU3_9FLAO 7-carboxy-7-deazaguanine synthase OS=Algibacter alginicilyticus OX=1736674 GN=q ueE PE=3 SV=1
MYLCKLMKEEIQLLVDKGEMLPLMEEFYTIQGEGFHKGTAAYFVRIGGCDVGCHWCDVKESWNANLHPPTEISKIVNNAKKYSNTIVITGGEPLTWDMTALTTQLKAEGLQIHIETSGAYKLTGIWDWICLSPKKMKLPTAEVYDKAQELKMIIYNKDDFRFAEEQAAKVNKDCILYLQPEWSKREKVIPEIVEYVMKNPKWKVSLQTHKYLNIP

SEQ ID NO: 27553 - protein, 209 aa, Algibacter amylolyticus
  misc_feature (1)..(209): tr|A0A556R0R8|A0A556R0R8_9FLAO 7-carboxy-7-deazaguanine synthase OS=Algibacter amylolyticus OX=1608400 GN=queE PE=3 SV=1
MNEVVKQMVEKGEMLPLMEEFYTIQGEGFHKGTAAYFVRIGGCDVGCHWCDVKESWNANLHPPTETTKIVAAAKSYSNTIVVTGGEPLTWDMTALTTQLKAEGLQTHIETSGAYKLTGIWDWICLSPKKMKLPTKEVYDHAHELKMIIYNKDDFRFAEEQAAKVNDDCILYLQPEWSKRDKVVPEIVDYVMKHPKWKVSLQTHKYLNIP

SEQ ID NO: 27554 - protein, 209 aa, Algibacter aquaticus
  misc_feature (1)..(209): tr|A0A1E5T9I9|A0A1E5T9I9_9FLAO 7-carboxy-7-deazaguanine synthase OS=Algibacter aquaticus OX=1849968 GN=queE PE =3 SV=1
MNKETQLLIDKGEMLPLMEEFYTIQGEGYYKGTAAYFIRIGGCDVGCHWCDVKESWNANLHPPTETSKIVENAKKYSDTIVVTGGEPLTWDMTALTSQLKNEGLQVHIETSGAYKLTGTWDWICLSPKKMKRPTQEVYDSADELKVIIYNKDDFRFAEEQAAKVNANCILYMQPEWSKRDTVVPEIVDYVMKNPKWKVSLQTHKYLNIP

SEQ ID NO: 27555 - protein, 209 aa, Algibacter lectus
  misc_feature (1)..(209): tr|A0A090WZ74|A0A090WZ74_9FLAO 7-carboxy-7-deazaguanine synthase OS=Algibacter lectus OX=221126 GN=queE PE=3 S V=1
MKKEIQQLVDKGEMLPLMEEFYTIQGEGFHKGTAAYFIRVGGCDVGCHWCDVKESWNANLHPPTLITNIVENAKKHSDTIVITGGEPLTWDMTPLTTQLKAEGLQVHIETSGAYKLTGIWDWICLSPKKMKLPTKEVYDNAHELKVIIYNKDDFRFAEEQAEKVNNDCILYLQPEWSKRDKVVPEIVDYVMKNPRWKVSLQTHKYLNIP

SEQ ID NO: 27556 - protein, 209 aa, Algibacter pectinivorans
  misc_feature (1)..(209): tr|A0A1I1MIL8|A0A1I1MIL8_9FLAO 7-carboxy-7-deazaguanine synthase OS=Algibacter pectinivorans OX=870482 GN=queE PE=3 SV=1
MNEVVKQMVEKGEMLPLMEEFYTIQGEGFHKGTAAYFVRIGGCDVGCHWCDVKESWNANLHPPTETTKIVAAAKSYSSTIVVTGGEPLTWDMTPLTTQLKAEGLQTHIETSGAYKLTGIWDWICLSPKKMKLPTKEVYDHAHELKMIIYNKDDFRFAEEQAAKVNDNCILYLQPEWSKRDKVVPEIVDYVMKHPKWKVSLQTHKYLNIP

SEQ ID NO: 27557 - protein, 209 aa, Algibacter sp.
  misc_feature (1)..(209): tr|A0A2U2X6F4|A0A2U2X6F4_9FLAO 7-carboxy-7-deazaguanine synthase OS=Algibacter sp. ZY111 OX=2100723 GN=queE PE =3 SV=1
MDKEIQSLVDKGEMLPLMEEFYTIQGEGFYKGTAAYFVRIGGCDVGCHWCDVKESWNANLHPPTKTSQIVENAKKYSDTIVVTGGEPLTWDMTPLTKGLKAEGLQVHIETSGAYKLTGIWDWICLSPKKMKLPTQEVYEKADELKVIVYNKDDFRFAEEQATKVNDNCILYLQPEWSKRDKVVPEIVDYVMANPKWKVSLQTHKYLNIP

SEQ ID NO: 27558 - protein, 215 aa, Algibacter sp.
  misc_feature (1)..(215): tr|A0A2N0JHX4|A0A2N0JHX4_9FLAO 7-carboxy-7-deazaguanine synthase OS=Algibacter sp. RHA_19 OX=1798237 GN=queE P E=3 SV=1
MYLCIMVKNEVLALVDKGEMLPLMEEFYTIQGEGFHKGTAAYFIRVGGCDVGCHWCDVKESWNAATHPPTTIDAIVDNAAKYSNTIVVTGGEPLTWNMAPLTEALKAKNLQTHIETSGAYTLTGIWDWICLSPKKNKLPQGIIYDKADELKMIIYNKNDFKFAEEQAAKVNKDCILYLQPEWSVKDKMTPLIVDFVMKNPQWKVSLQTHKYLNIP

SEQ ID NO: 27559 - protein, 209 aa, Algibacter wandonensis
  misc_feature (1)..(209): tr|A0A4V6QD86|A0A4V6QD86_9FLAO 7-carboxy-7-deazaguanine synthase OS=Algibacter wandonensis OX=1343161 GN=queE PE=3 SV=1
MKKEIQQLVDKGEMLPLMEEFYTIQGEGFHKGTAAYFIRVGGCDVGCHWCDVKESWNANLHPPTLITNIVENAKKHSDTIVITGGEPLTWDMTPLTTQLKAEGLQVHIETSGAYKLTGIWDWICLSPKKMKLPTKEVYDNAHELKVIIYNKDDFRFAEEQAEKVNNDCILYLQPEWSKRDKVVPEIVDYVMKNPKWKVSLQTHKYLNIP

SEQ ID NO: 27560 - protein, 215 aa, Algoriella xinjiangensis
  misc_feature (1)..(215): tr|A0A1I4ZCB4|A0A1I4ZCB4_9FLAO 7-carboxy-7-deazaguanine synthase OS=Algoriella xinjiangensis OX=684065 GN=queE PE=3 SV=1
MINIASTTAEEQRLIEQGKLLPVMEHFYTIQGEGMYTGLASYFIRLGGCDVGCHWCDVKDSWDAEKHPLTNVDELVDLATSQAKTIIITGGEPLMWDLTYLTKKLHEKGARIHIETSGAYPLSGEIDWVCLSPKKMMLPLDDVCTAAHELKCIIFNNHDFEFAEEQAARVGKDCTLFLQTEWSKRDKNLPLIIDYVKENPKWRYSLQTHKYLDIP

SEQ ID NO: 27561 - protein, 216 aa, Algoriphagus alkaliphilus
  misc_feature (1)..(216): tr|A0A1G5ZHR8|A0A1G5ZHR8_9BACT 7-carboxy-7-deazaguanine synthase OS=Algoriphagus alkaliphilus OX=279824 GN=que E PE=3 SV=1
MNTLDLVAQTTQELVAAGLQLPIMEAFYTIQGEGRFTGHPAYFIRLGGCDVGCVWCDVKESWEAAKWPVLSIEKIVEDALAFPGRLVVITGGEPLMYNMDPLTKLLKEHGFTTNIETSGAHPFSGDFDWVCFSPKKFKKPHPSIFAEADELKVVIYNKSDYEFAEQYAGLVNESCELRLQPEWSKAVKITAEIIDFVKNHPKWNISLQTHKFMDIP

SEQ ID NO: 27562 - protein, 248 aa, Algoriphagus antarcticus
  misc_feature (1)..(248): tr|A0A3E0DFW8|A0A3E0DFW8_9BACT 7-carboxy-7-deazaguanine synthase OS=Algoriphagus antarcticus OX=238540 GN=queE PE=3 SV=1
MENSNVFLTVFQFVTFPILKYYLCGIIHPAVQSPALSKIQMNIDEAVAHGVQLPLMEAFYTIQGEGKFTGHPAYFIRLGGCDVGCVWCDVKESWDSGKWPVLSIERIVEDALAYPGRLVVITGGEPLMYDLGPLTALLKEKGFTTNIETSGAHPYSGDFDWVCFSPKKFKKPHPSIYAEADELKVVIFHQSDFSFAEEHAELVKSTCELRLQPEWSKAEKFTPVIIDYAKNHPKWKISLQTHKFMDIP

SEQ ID NO: 27563 - protein, 216 aa, Algoriphagus aquaeductus
  misc_feature (1)..(216): tr|A0A326RWJ5|A0A326RWJ5_9BACT 7-carboxy-7-deazaguanine synthase OS=Algoriphagus aquaeductus OX=475299 GN=queE PE=3 SV=1
MHTLDLVAPTTQELVSAGLQLPVMEAFYTIQGEGRFTGHPAYFIRLGGCDVGCVWCDVKESWEAAKWPVLSIEKIVEDALAFPGRLVVITGGEPLMYNLDPLTRLLKEKGFTTNIETSGAHPFSGNFDWVCFSPKKFKKPHPSIYAQADELKVVIYNKSDFAFAEEHANMVNADCELRLQPEWSKASKLTPEIIDYVKNHPTWKISLQTHKFMDIP

SEQ ID NO: 27564 - protein, 208 aa, Algoriphagus aquimarinus
  misc_feature (1)..(208): tr|A0A1I1C9X1|A0A1I1C9X1_9BACT 7-carboxy-7-deazaguanine synthase OS=Algoriphagus aquimarinus OX=237018 GN=queE PE=3 SV=1
MDTKELVEKGLELPLMEAFYTIQGEGRFTGYPAYFIRLGGCDVGCVWCDVKESWDSGKWPVFSIEQLVEDALAFPGRLAVITGGEPLMYDLGPLTALLKANGFTTNIETSGAHPFSGDFDWVCFSPKKFKKPHTSIYKEADELKVVVFHQSDFAFAEEHAALVNSSCELRLQPEWSKADKFTPIIIDFAKNRPKWKISLQTHKFMDIP

SEQ ID NO: 27565 - protein, 208 aa, Algoriphagus aquimarinus
  misc_feature (1)..(208): tr|A0A5C7AUR2|A0A5C7AUR2_9BACT 7-carboxy-7-deazaguanine synthase OS=Algoriphagus aquimarinus OX=237018 GN=queE PE=3 SV=1
MDTKELVAKGLELPLMEAFYTIQGEGRFTGHPAYFIRLGGCDVGCVWCDVKESWDSGKWPVHSIEKIVDEALVYPGRLVVVTGGEPLMYDLGPLTALLKANGFTTNIETSGAHPFSGDFDWVCFSPKKFKKPHDSIYKEADELKVVVFHQSDFAFAEEHARLVNSSCELRLQPEWSKADKFTPIIIDFAKNSPKWKISLQTHKFMDIP

SEQ ID NO: 27566 - protein, 216 aa, Algoriphagus boritolerans
  misc_feature (1)..(216): tr|A0A1H5Z6E3|A0A1H5Z6E3_9BACT 7-carboxy-7-deazaguanine synthase OS=Algoriphagus boritolerans DSM 17298 = JCM 18970 OX=1120964 GN=queE PE=3 SV=1
MNTLDPVVPTTQELVAAGLQLPIMEAFYTIQGEGRFTGHPAYFIRLGGCDVGCVWCDVKESWEAAKWPVLSIEKIVEEALAYPGRLVVITGGEPLLYNLDPLTKLLKEKGFTTNIETSGAHPFSGDFDWVCFSPKKFKKPHPSIFVEADELKVIIYNKSDFGFAEEHAKLVKSTCELRLQPEWSRAAKFTPEIIDYVKNRPKWNISLQTHKFMDIP

SEQ ID NO: 27567 - protein, 208 aa, Algoriphagus boseongensis
  misc_feature (1)..(208): tr|A0A4R6T2M4|A0A4R6T2M4_9BACT 7-carboxy-7-deazaguanine synthase OS=Algoriphagus boseongensis OX=1442587 GN=qu eE PE=3 SV=1
MSTQEQVAAGLQLPVMEAFYTIQGEGRFTGHPAYFIRLGGCDVGCVWCDVKESWEAGKWPVLSIEKIVDEALKFPGRLVVITGGEPLMYDLGPLTKLLKEKGFTLNIETSGAHPFSGNFDWVCFSPKKFKKPDPSIYAVADELKVVVYHHSDFAFAEEHAKLVRTTCELRLQPEWSKASKYTPEIIEYVKNRPNWKISLQTHKFMDIP

SEQ ID NO: 27568 - protein, 208 aa, Algoriphagus chordae
  misc_feature (1)..(208): tr|A0A2W7QLC8|A0A2W7QLC8_9BACT 7-carboxy-7-deazaguanine synthase OS=Algoriphagus chordae OX=237019 GN=queE PE= 3 SV=1
MDTKELVAKGLELPLMEAFYTIQGEGRFTGHPAYFIRLGGCDVGCVWCDVKESWEAGKWPVLPIEQLVEDALAYPGRLVVITGGEPLMYDLGPLTALLKAKGFTTNIETSGAHPYSGDFDWVCFSPKKFKKPHPSIYKEADELKVVVFHQSDFAFAEEHAALVDSSCELRLQPEWSKAEKFTPVIIDFAKNHPKWKISLQTHKFMDIP

SEQ ID NO: 27569 - protein, 216 aa, Algoriphagus faecimaris
  misc_feature (1)..(216): tr|A0A1G6M963|A0A1G6M963_9BACT 7-carboxy-7-deazaguanine synthase OS=Algoriphagus faecimaris OX=686796 GN=queE PE=3 SV=1
MDTLDQVASTTQELVAAGLQLPLMEAFYTIQGEGKFTGHPAYFIRLGGCDVGCVWCDVKESWEAGKWPIVSIEKIVDDACSHPGRLVVITGGEPLMYNLNPLTKLLKEKGFTTNIETSGAHPFSGDFDWVCFSPKKFKKPHPSIYDQADELKVVIFHDSDFKFAEEHAQSVRSSCELRLQPEWSKADIFTPKLIDYVKSHPSWKISLQTHKFMDIP

SEQ ID NO: 27570 - protein, 208 aa, Algoriphagus halophilus
  misc_feature (1)..(208): tr|A0A1N6HFM2|A0A1N6HFM2_9BACT 7-carboxy-7-deazaguanine synthase OS=Algoriphagus halophilus OX=226505 GN=queE PE=3 SV=1
MKTKELIAKGVSLPVMEAFYTIQGEGRFTGHPAYFIRLGGCDVGCVWCDVKESWEAGKWPVLSIEEIVAEVEKYPGKLVVITGGEPLMYDLGPLTALLKQKGFSTNIETSGAHPFSGDFDWVCFSPKKFKAPHPSIYDHADELKVVVFHASDFDFAENHALKVKKSCELRLQPEWSKAEKFTPLIINYSKNHPNWKISLQTHKFMDIP

SEQ ID NO: 27571 - protein, 208 aa, Algoriphagus hitonicola
  misc_feature (1)..(208): tr|A0A1I2NPD5|A0A1I2NPD5_9BACT 7-carboxy-7-deazaguanine synthase OS=Algoriphagus hitonicola OX=435880 GN=queE PE=3 SV=1
MTTREFVDAGLQLPLMEAFYTIQGEGKFTGHPAYFIRLGGCDVGCVWCDVKESWEAGKWPIVSIEEIVAGALAHPGRLVVITGGEPLMYNLDPLTKLLKEKGFTTNIETSGAHPFSGDFDWVCFSPKKFKKPHPSIYEQADELKVVIFHDSDFKFAEEHAQSVRSSCELRLQPEWSKADIFTPKLIDYVKSHPSWKVSLQTHKFMDIP

SEQ ID NO: 27572 - protein, 208 aa, Algoriphagus locisalis
  misc_feature (1)..(208): tr|A0A1I6ZPF9|A0A1I6ZPF9_9BACT 7-carboxy-7-deazaguanine synthase OS=Algoriphagus locisalis OX=305507 GN=queE P E=3 SV=1
MNTKELVAKGLELPLMEAFYTIQGEGRFTGYPAYFIRLGGCDVGCVWCDVKESWDSGKWPVLAIEKIVEDALAFPGRLVVITGGEPLMYDLGPLTALLKSKGFTTNIETSGAHPFSGDFDWVCFSPKKFKKPHPSIYQQADELKVVVFHQSDFAFAEEHAELVNSNCEQRLQPEWSKAEKFIPVIIDFAKNRPKWKISLQTHKFMDIP

SEQ ID NO: 27573 - protein, 208 aa, Algoriphagus machipongonensis
  misc_feature (1)..(208): tr|A3HZL5|A3HZL5_9BACT 7-carboxy-7-deazaguanine synthas e OS=Algoriphagus machipongonensis OX=388413 GN=queE PE =3 SV=1
MKTEELIAKGLSLPLMEAFYTIQGEGRFTGHPAYFIRLGGCDVGCVWCDVKESWEAGKWPILPIEEIVAEAVKYPGRLVVITGGEPLMYDLGPLTSLLKEKGFTTNIETSGAHPFSGDFDWVCFSPKKFKKPHPSIYKVANELKVVVFHNSDFAFAEEHALKVNENCELRLQPEWSKSEKFTPLIINYSKYHPNWKISLQTHKFMDIP

SEQ ID NO: 27574 - protein, 208 aa, Algoriphagus marincola
  misc_feature (1)..(208): tr|A0A0P7Y1X3|A0A0P7Y1X3_9BACT 7-carboxy-7-deazaguanine synthase OS=Algoriphagus marincola HL-49 OX=1305737 GN =queE PE=3 SV=1
MTTQELVAEGLQLPVMEAFYTIQGEGKFTGHPAYFIRLGGCDVGCVWCDVKESWEAGKWPVLSIEKIVEEACSFPGRLVVITGGEPLMYNLNPLTKLLKEKGFTTNMETSGAHPYSGDFDWVCFSPKKFKKPHPSIYAEADELKVVVFHQSDFAFAEKHAELVRKDCELRLQPEWSKAEKYTPEIINYVKNHPTWNISLQTHKFMDIP

SEQ ID NO: 27575 - protein, 208 aa, Algoriphagus ornithinivorans
  misc_feature (1)..(208): tr|A0A1I5ANR7|A0A1I5ANR7_9BACT 7-carboxy-7-deazaguanine synthase OS=Algoriphagus ornithinivorans OX=226506 GN= queE PE=3 SV=1
MTTQELVASGLQLPVMEAFYTIQGEGRFTGTPAYFIRLGGCDVGCVWCDVKESWEAGKWPILAIEEIVEEAVKYPGRLVVITGGEPLMYDLDPLTRLLKENGFTTNIETSGAHPFSGDFDWVCFSPKKFKKPHPSIYSEADELKVVIFHQSDFKFAEEHAALVNKSCELRLQPEWSKAEKFTSEIINYVKNHPTWNISLQTHKFMDIP

SEQ ID NO: 27576 - protein, 208 aa, Algoriphagus ratkowskyi
  misc_feature (1)..(208): tr|A0A2W7RCB4|A0A2W7RCB4_9BACT 7-carboxy-7-deazaguanine synthase OS=Algoriphagus ratkowskyi OX=57028 GN=queE P E=3 SV=1
MNTKELVAKGLELPLMEAFYTIQGEGRFTGHPAYFIRLGGCDVGCVWCDVKESWEAGKWPVISIEQLVEDAVAFPGRLVVITGGEPLMYNLGPLTALLKEKGFTTNIETSGAHPFSGDFDWVCFSPKKFKKPHPSIYDEADELKVVVFHQSDFEFAEEHARLVNSSCELRLQPEWSKADKFTPVIIDFAKNHPKWKISLQTHKFMDIP

SEQ ID NO: 27577 - protein, 216 aa, Algoriphagus sp.
  misc_feature (1)..(216): tr|A0A418PP78|A0A418PP78_9BACT 7-carboxy-7-deazaguanine synthase OS=Algoriphagus sp. N3 OX=2056311 GN=queE PE= 3 SV=1
MNTLELVAPTTQELIAAGLQLPIMEAFYTIQGEGRFTGHPAYFIRLGGCDVGCVWCDVKDSWEAAKWPVLSIEKIVEDALAFPGRLAVITGGEPLMYNLGPLTKLLKEKGFTTNIETSGAHPFSGDFDWVCFSPKKFKKPHPSIYVEADELKVVIYNKSDFDFAEDHAKLVNSDCELRLQPEWSKAAKFTPEIIEYVKNHPTWKISLQTHKFMDIP

SEQ ID NO: 27578 - protein, 216 aa, Algoriphagus sp.
  misc_feature (1)..(216): tr|A0A142EMI4|A0A142EMI4_9BACT 7-carboxy-7-deazaguanine synthase OS=Algoriphagus sp. M8-2 OX=1727163 GN=queE P E=3 SV=1
MQTLDLVAPTTQELVAAGLQLPIMEAFYTIQGEGRFTGHPAYFIRLGGCDVGCVWCDVKESWEAAKWPVLSVEQIVEDALVFPGRLVVITGGEPLMYNLDPLTKLLKEKGFTTNIETSGAHPFSGDFDWVCFSPKKFKKPHPSIYPKADELKVVIYNNRDFEFAEEHAKLVNPGCELRLQPEWSKASRFISEIIAYVKNHPTWKISLQTHKFMDIP

SEQ ID NO: 27579 - protein, 208 aa, Algoriphagus yeomjeoni
  misc_feature (1)..(208): tr|A0A327PGF0|A0A327PGF0_9BACT 7-carboxy-7-deazaguanine synthase OS=Algoriphagus yeomjeoni OX=291403 GN=queE P E=3 SV=1
MNIVEAVGKGVQLPLMEAFYTIQGEGRFTGYPAYFIRLGGCDVGCVWCDVKESWNSGKWPVLSIEKIVEDALAYPGRLVVITGGEPLMYDLGPLTALLKEKGFTTNIETSGAHPFSGDFDWVCFSPKKFKKPHPSIYKEADELKVVVFHQSDFDFAEDHASLVKSTCELRLQPEWSKAEKFTPEIIDFVKKRPKWKISLQTHKFMDIP

SEQ ID NO: 27580 - protein, 208 aa, Algoriphagus zhangzhouensis
  misc_feature (1)..(208): tr|A0A1M7ZEN3|A0A1M7ZEN3_9BACT 7-carboxy-7-deazaguanine synthase OS=Algoriphagus zhangzhouensis OX=1073327 GN= queE PE=3 SV=1
MNTKDQVAKGLMLPIMEAFYTIQGEGRFTGHPAYFIRLGGCDVGCVWCDVKESWEAGKWPVLSIEQIVKEGLNHPGRLVVITGGEPLMYDLGPLTKMLKEKGFTTNIETSGAHPFSGDFDWVCFSPKKFKKPHPSIYEQANELKVVVFHKSDFDFAEEHAALVNSSCEKRLQPEWSKAEKFTPIIIDYVKNHPTWNISLQTHKFMDIP

SEQ ID NO: 27581 - protein, 250 aa, Alicyclobacillus acidocaldarius
  misc_feature (1)..(250): tr|B7DN75|B7DN75_9BACL 7-carboxy-7-deazaguanine synthas e OS=Alicyclobacillus acidocaldarius LAA1 OX=543302 GN= queE PE=3 SV=1
MASTHAPWEDAYEEAKLGDPGRITLPMVEIFETVEGEGTKAGFPTTFVRVFHCNLRCTWCDTPYSYAPERPAFHATLREIAQQVEAFGWPNVCLTGGEPLIHRHKSQLLIEAIAGIEWVRDVHIETNGAIDVRPFVRFRDASTRLREVVRFIVDYKLPASGEESRMIGEHLTSLSERDEVKFVIADERDFARALEVMEAHPTRATILMSPVWETMPPRDLVALILKHRLRDVKLNLQLHKVIWDPNARGV

SEQ ID NO: 27582 - protein, 257 aa, Alicyclobacillus acidocaldarius
  misc_feature (1)..(257): tr|F8IES3|F8IES3_ALIAT 7-carboxy-7-deazaguanine synthas e OS=Alicyclobacillus acidocaldarius (strain Tc-4-1) OX =1048834 GN=queE PE=3 SV=1
MDVVKAAGASFRAPWEDAYEEAKRGDPGQLSLPMVEIFETVEGEGTRAGFPTTFVRVFHCNLRCTWCDTPYSYAPERPAFHATLREIAKQVEAFGWPNVCLTGGEPLIHRHKSQLLIEAIADIEWVRDVHIETNGAIDVRPYVRFRDASARLREVVRFIVDYKLPASGEDSRMIGEHLTSLSERDEVKFVIADERDFARALEVMEFYPTRATILMSPVWDTMPPRDLVALILKHRLRDVKLNLQLHKVIWDPNARGV

SEQ ID NO: 27583 - protein, 253 aa, Alicyclobacillus acidoterrestris
  misc_feature (1)..(253): tr|A0A512CT22|A0A512CT22_9BACL 7-carboxy-7-deazaguanine synthase OS=Alicyclobacillus acidoterrestris OX=1450 G N=queE PE=3 SV=1
MTTSTQRSYDWRPTYRQARDTNPLALTLPMVEIFQTVEGEGTRAGFPTVFVRVFHCNLRCTWCDTPYSYAPAKPEFEATIADIAQRAAAYGWENVCLTGGEPLIHRHKSQFLIEALAAVEHIQDIHIETNGAIDVRPFAELRASQAQLREKVRFIVDYKLPASGEMDKMVHHHLSALEPQDELKFVIANDDDFETAVDVLSRYRPRATALFSPVWETMPPDKLVEKILNAGLKRVKLNLQIHKVIWDPAARGV

SEQ ID NO: 27584 - protein, 253 aa, Alicyclobacillus acidoterrestris; identical to SEQ ID NO: 27583
  misc_feature (1)..(253): tr|T0BH24|T0BH24_ALIAG 7-carboxy-7-deazaguanine synthas e OS=Alicyclobacillus acidoterrestris (strain ATCC 4902 5 / DSM 3922 / CIP 106132 / NCIMB 13137 / GD3B) OX=1356 854 GN=queE PE=3 SV=1

SEQ ID NO: 27585 - protein, 240 aa, Alicyclobacillus ferrooxydans
  misc_feature (1)..(240): tr|A0A0P9CZ10|A0A0P9CZ10_9BACL 7-carboxy-7-deazaguanine synthase OS=Alicyclobacillus ferrooxydans OX=471514 GN =queE PE=3 SV=1
MSKIPVLETFGPTIQGEGMVVGRKTMFVRTAGCDYQCVWCDSAYTWNGSEKHRTRMLSPEEVMDELVALGGNRFNHVTITGGNPALIGDPMRRFINLCHQQGHKVGLETQGSRMQDWFFDIDDLTLSPKPPSSKMETNWDTLDRIVHELTGHSVNFSLKIVVFDNEDVEYAKSVFARYPDVAQKYVQPGNAHTDASGNISAYLLERLEWLFGVVISDAAFNSVRVLPQLHAMVWSNERER

SEQ ID NO: 27586 - protein, 258 aa, Alicyclobacillus hesperidum
  misc_feature (1)..(258): tr|A0A1H2U6Z4|A0A1H2U6Z4_9BACL 7-carboxy-7-deazaguanine synthase OS=Alicyclobacillus hesperidum OX=89784 GN=qu eE PE=3 SV=1
MTGSSAGTTVRRNVDWHVQYEQARRGDWRSSRLPMVEIFETVEGEGTRAGYPTVFVRVFHCNLRCTWCDTPYSYAPAKPEFEASIGEIVDRVDRFGWHQVCLTGGEPLIHRHKSQLLIDAIASLPQIEDLHVETNGAIDVRPFAALREQSPELAAKLRFIVDYKLPSSGEQAQMVNEHLAALSDRDEVKFVIADDHDFDTAASVLAAYPTKAQVLFSPVWESMPPRELVNRILQHRLSRVKLNLQIHKVIWDPNQRGV

SEQ ID NO: 27587 - protein, 237 aa, Alicyclobacillus macrosporangiidus
  misc_feature (1)..(237): tr|A0A1I7JNX8|A0A1I7JNX8_9BACL 7-carboxy-7-deazaguanine synthase OS=Alicyclobacillus macrosporangiidus OX=3920 15 GN=queE PE=3 SV=1
MSRIPVLEVFGPTIQGEGMVIGRKTMFVRTAGCDYRCAWCDSKFTWDGSERARMLTPDEVWAELVAAGGRRFNHVTISGGNPALIRDPMAELIALLHGHGIRVGLETQGSVWQDWFVEIDDLTISPKPPSSGMDTDWAGLDVMVRRLSDHGVHFSLKVPIFDDTDLDYARRVHRTWPEVPLYLSVGNPDPSAGGDVAAHLLARLAWLVDRVVQDEALNAVHVLPQLHTLLWGNRRGV

SEQ ID NO: 27588 - protein, 250 aa, Alicyclobacillus montanus
  misc_feature (1)..(250): tr|A0A1M6JRV9|A0A1M6JRV9_9BACL 7-carboxy-7-deazaguanine synthase OS=Alicyclobacillus montanus OX=1830138 GN=qu eE PE=3 SV=1
MNNQLTIDHQSDEQLRNSDLNDLQLPMVEIFETIQGEGTAAGERTTFVRVYNCNLRCQWCDTKYSYAPEKPVFFASIKEICHKAASFENRWLCLTGGEPLMHGRKSIALVEALAKIPHVTDVHIETNGAIDLSPFAQLRQEIQPLGQKIRFIMDYKLPGSGEEHRMLTSNFQYLTERDEIKFVIADDRDFERAVDIVENEIGDGKVLFSPVFSSMSAKRLVEKLLKTNLKQVRVSLQLHKWIWDPEARGV

SEQ ID NO: 27589 - protein, 258 aa, Alicyclobacillus sacchari
  misc_feature (1)..(258): tr|A0A4V3HEI9|A0A4V3HEI9_9BACL 7-carboxy-7-deazaguanine synthase OS=Alicyclobacillus sacchari OX=392010 GN=que E PE=3 SV=1
MTGRPAATSSRRTVDWLAQYEQARKGDWRSLRLPMVEIFETVEGEGTRAGYPTVFVRVFHCNLRCTWCDTPYSYAPAQPEFEATIGEIASRVNELGWHHVCLTGGEPLIHRHKSQLLVDAIARLPQVQDVHVETNGAIDVRPFAALRHQSRELTAKLRFIVDYKLPSSGEQAQMVHEHLAVLSEQDELKFVIADDHDFDTAIAILKSYPTKAQVLFSPVWESMPPHELVERMLKNRLAQVKLNLQIHKVIWDPNQRGV

SEQ ID NO: 27590 - protein, 239 aa, Alicyclobacillus sp.
  misc_feature (1)..(239): tr|A0A1F2YAB2|A0A1F2YAB2_9BACL 7-carboxy-7-deazaguanine synthase OS=Alicyclobacillus sp. RIFOXYA1_FULL_53_8 OX =1797236 GN=queE PE=3 SV=1
MAKIPVMEVFGPTIQGEGMVIGRKTMFVRTAGCDYQCLWCDSPFTWNGAEKDKTRWLEPAEIVSELRALGGNRFNHVTVSGGNPALIGQAMKEFIDLCHDEHWAVGLETQGSRKQTWFHDIDDLTLSPKPPSSGMKTDFSVLDDLVNDLMEHRVHFSLKIVIFDQLDLEYAKSVFQRYPGTQTYLQVGNDQIEHSGDLAQHLLQRLHWLFERAIEDPGFNDTRVLPQLHALIWGNERAR

SEQ ID NO: 27591 - protein, 224 aa, Alicyclobacillus tengchongensis
  misc_feature (1)..(224): tr|A0A0V0PPT4|A0A0V0PPT4_9BACL 7-carboxy-7-deazaguanine synthase OS=Alicyclobacillus tengchongensis OX=368812 GN=queE PE=3 SV=1
MVEIFETVEGEGTRAGYPTVFVRVFHCNLRCTWCDTPYSYAPAKPEFEASIGEIVDRVDRFGWHQVCLTGGEPLIHRHKSQLLIDAIASLPQIEDLHVETNGAIDVRPFAALREQSPELAAKLRFIVDYKLPSSGEQAQMVHEHLAALSDRDEVKFVIADDHDFDTAVSVLAAYPTKAQVLFSPVWESMPPHELVNRILQHRLSRVKLNLQIHKVIWDPNQRGV

SEQ ID NO: 27592 - protein, 250 aa, Alicyclobacillus vulcanalis
  misc_feature (1)..(250): tr|A0A1N7KWW3|A0A1N7KWW3_9BACL 7-carboxy-7-deazaguanine synthase OS=Alicyclobacillus vulcanalis OX=252246 GN=q ueE PE=3 SV=1
MSFARAPWEAAYEEAKRGDPGAITLPMVEIFETVEGEGTKAGLPTTFVRVFHCNLRCTWCDTPYSYAPERPAFEASLKQIAERVESFGWANVCLTGGEPLIHRHKSQLLIDTLAGIAGVEDVHIETNGAIDVRPFVQYRDASARLRQVVRFIVDYKLPGSGEEHRMVPDHLSALSERDEVKFVIADDRDFARALEVLQAHPTRATVLFSPVWETMPPRDLVSLMLKHRLRGVKLNLQLHKVIWDPSARGV

SEQ ID NO: 27593 - protein, 223 aa, Aliidiomarina haloalkalitolerans
  misc_feature (1)..(223): tr|A0A432VZ74|A0A432VZ74_9GAMM 7-carboxy-7-deazaguanine synthase OS=Aliidiomarina haloalkalitolerans OX=859059 GN=queE PE=3 SV=1
MIYPINELFETIQGEGVYTGVPAIFIRLQGCPVGCPWCDTQHTWDKSADDRIAITDVLAKQQASTQFAEVSPDDILAQIQALGFTAKHVVITGGEPCMYDLRPLAAVLEAAGYRLQIETSGTFEVLTSPQTWVTVSPKVDMPGGYAVRADAMLRANEVKYPVAMHKHIEQLDQLLLDCPVQPGTTICLQPISQRPHATELAMRICRQRNWRLSVQLHKYLAID

SEQ ID NO: 27594 - protein, 223 aa, Aliidiomarina iranensis
  misc_feature (1)..(223): tr|A0A432VX45|A0A432VX45_9GAMM 7-carboxy-7-deazaguanine synthase OS=Aliidiomarina iranensis OX=1434071 GN=queE PE=3 SV=1
MQYPVNELFETIQGEGLYTGVPAIFLRLQGCPVGCPWCDTQHTWSKMAENAVDFGQIITKTGPDERYSELSAEAILQRIQSLGFTAKHIVITGGEPCMYDLRPLAEVLEPLGYQLQIETSGTFPILASSSTWVTVSPKVDMPGGYPVLADAMQRADEIKYPIAMEKHISAFDALLAEKPARAGAVICLQPISQRPRATELAIKVCRERNWRLSVQLHKYLAIE

SEQ ID NO: 27595 - protein, 222 aa, Aliidiomarina maris
  misc_feature (1)..(222): tr|A0A327WND5|A0A327WND5_9GAMM 7-carboxy-7-deazaguanine synthase OS=Aliidiomarina maris OX=531312 GN=queE PE=3 SV=1
MLAINEIFETIQGEGVFTGVPAIFVRLQGCPVGCPWCDTQQTWALNDDDQIDPAQMILKTGDTPAWSSMTAQQVLQLFSQQQYTAKHVVITGGEPCMFDLREFTTLLHQQGYRTQIETSGTFEVRCDPATWVTVSPKLDMPGGYEVRADAMARANEIKHPIAMQKHVDALDALLSRCPVQEGTTICLQPISQRPRATQLAIDICRQRNWRLSVQLHKYLAIA

SEQ ID NO: 27596 - protein, 232 aa, Aliidiomarina minuta
  misc_feature (1)..(232): tr|A0A432W5M8|A0A432W5M8_9GAMM 7-carboxy-7-deazaguanine synthase OS=Aliidiomarina minuta OX=880057 GN=queE PE= 3 SV=1
MSFIEQTASNQLAVNELFETIQGEGVFTGVAAIFLRLQGCPVGCPWCDTQHTWDKKEADKIAATDLIMKTADTPQWSDLSGEDILALIKTQGYTAKHVVITGGEPCMYDLRELATVLESAGYRLQIETSGTFEILTSADTWVTVSPKLDMPGGFQVRCDAMTRANEIKHPVAMEKHIEALDELLARCPVQPGTTICLQPISQRPRATELAIRTCRLRNWRLSVQLHKYLSIE

SEQ ID NO: 27597 - protein, 251 aa, Aliidiomarina sanyensis
  misc_feature (1)..(251): tr|A0A432WEQ6|A0A432WEQ6_9GAMM 7-carboxy-7-deazaguanine synthase OS=Aliidiomarina sanyensis OX=1249555 GN=queE PE=3 SV=1
MTTTRPEAPEQNEPLKTILQKQVAGFAPGVYPVNELFETIQGEGVFTGQPAIFLRLQGCPVGCPWCDTQHTWTLQPSDQTSAGEILVKTSADTRYAVQSSNDIVNTFKQRGFTAKHVVITGGEPCMYDLRPLAEVLEEAGYRLQIETSGTFEIRTSDNTWVTVSPKLEMPGGLDVLASAMRRANEVKHPIAMEKHIEALDELLIRCPVKPETIIALQPISQRPRATELAIKTCIARNWRLSVQMHKYLAIE

SEQ ID NO: 27598 - protein, 223 aa, Aliidiomarina shirensis
  misc_feature (1)..(223): tr|A0A432WY15|A0A432WY15_9GAMM 7-carboxy-7-deazaguanine synthase OS=Aliidiomarina shirensis OX=1048642 GN=queE PE=3 SV=1
MLYPVNELFETIQGEGLYTGVPAIFLRLQGCPVGCPWCDTQHTWSKTAENAVDFGEVIAKTGPDERYGELSAAAILEQIQHLGFTAKHIVITGGEPCMYDLRPLAEVFEPLGYQLQIETSGTFEVLTSDATWVTVSPKVDMPGGYPVLASAMQRANELKYPIAMEKHIEAFDALLAEKPAKANAVICLQPISQRPRATELAIKVCRERNWRLSVQLHKYLAIE

SEQ ID NO: 27599 - protein, 222 aa, Aliidiomarina soli
  misc_feature (1)..(222): tr|A0A432WMW1|A0A432WMW1_9GAMM 7-carboxy-7-deazaguanine synthase OS=Aliidiomarina soli OX=1928574 GN=queE PE=3 SV=1
MLAVNELFETIQGEGVFTGVAAIFLRLQGCPVGCPWCDTQHTWDKNNQAQVKPEQLIMKTGDSPSWAGMSEQAVLELIEQQGFTAKHVVITGGEPCMYDLNALTELLHETGYQTQIETSGTFEIKTSAQTWVTVSPKLDMPGGYEVRADAMARANEIKHPIAMQKHIDALDALLERCPVAAGTTICLQPISQRPRATELAIETCRKRNWRLSVQLHKYLAIE

SEQ ID NO: 27600 - protein, 238 aa, Aliidiomarina sp.
  misc_feature (1)..(238): tr|A0A552X4E8|A0A552X4E8_9GAMM 7-carboxy-7-deazaguanine synthase OS=Aliidiomarina sp. IM1326 OX=2593535 GN=que E PE=3 SV=1
MTDLSLASAVASYAPGVYPVNELFETIQGEGIYTGQPSIFLRLQGCPVGCPWCDTQHTWALEQSDAAPYGEVIAKTEPSPRFVVLNAAQILAKFHERGFTAKHVVITGGEPCMYDLNPLAEVLEAAGYQLQIETSGTFPIQTSAKTWVTVSPKLDMPGGLHVLPEAMARANEIKHPIAMEKHIEALDALLARCPVAEHTVIALQPISQRPRATELAIKTCIERNWRLSVQMHKYLAIE

SEQ ID NO: 27601 - protein, 216 aa, Aliifodinibius roseus
  misc_feature (1)..(216): tr|A0A1M4SI31|A0A1M4SI31_9BACT 7-carboxy-7-deazaguanine synthase OS=Aliifodinibius roseus OX=1194090 GN=queE P E=3 SV=1
MFKSRDQLEALIVTDEMNAVEYPLMEDFYTIQGEGAHSGRPAYFIRTAGCDVNCWWCDVRESWDEDAHPRETVGNIVERAKDSGAEFAVITGGEPLLHDLDPMTFKLKQAGIQTHIETSGSSPLSGYLDWITLSPKRFKEPIDDIFPYVDELKVVVLTRKDLEWAEKNAEKCPESTQLLLQPEWEKEGAVELIIDYVKEHPEWGISLQTHKFMGVR

SEQ ID NO: 27602 - protein, 215 aa, Aliifodinibius sediminis
  misc_feature (1)..(215): tr|A0A521B096|A0A521B096_9BACT 7-carboxy-7-deazaguanine synthase OS=Aliifodinibius sediminis OX=1214077 GN=que E PE=3 SV=1
MFKSQVQQTLHMPEKAGAVEYPLMEDFYTIQGEGAHTGRPAYFIRTAGCDVNCWWCDVKESWEEGAHPSESVENIVSRARQSGAEFAVITGGEPLLHDLDALTFQLKKAGLQTHIETSGSSPLSGYLDWITLSPKRFKEPLDEIFPCVDELKVVVLTSKDLEWAEKNAERCPENTQLLLQPEWEKEGAVELIIDYVKANPQWGISLQTHKFMGVR

SEQ ID NO: 27603 - protein, 200 aa, Aliifodinibius sp.
  misc_feature (1)..(200): tr|A0A2A2GFD5|A0A2A2GFD5_9BACT 7-carboxy-7-deazaguanine synthase OS=Aliifodinibius sp. WN023 OX=2032627 GN=que E PE=3 SV=1
MCSVEYPLVEDFYTIQGEGAHSGRPAYFIRTAGCDVNCWWCDVKESWDEDQHPPKTVEEIVEGAKESGAEFAVITGGEPLLHDLDPLTFQLKQAGIQVHIETSGSSPISGYLDWITLSPKRFKEPLDDIFPYVDELKVVVLTNKDLEWAEKNAEKCPDSTQLLLQPEWEKEGAVDLIIDYVKENPQWGISLQTHKFMEVR

SEQ ID NO: 27604 - protein, 227 aa, Aliiglaciecola lipolytica
  misc_feature (1)..(227): tr|K6XQI6|K6XQI6_9ALTE 7-carboxy-7-deazaguanine synthas e OS=Aliiglaciecola lipolytica E3 OX=1127673 GN=queE PE =3 SV=1
MQTPTEYKINEVFESIQGEGALTGVPSIFVRLQGCPVGCAWCDTKHTWTLDEQFQVSSEQVMAESGESENWFATSIEQLLNLFDRHQYQAKNIILTGGEPCMYDLRPLCKALFDKGYTVSVETSGTYEIKVTPETWVTVSPKVDMKGGFKVREDAILRANEIKHPVAMEKHIEELENLLVWATQIPAPLVYLQPISQQKRATELAVKTCIAKNWRLSLQTHKFIGIE

SEQ ID NO: 27605 - protein, 227 aa, Aliiglaciecola sp.
  misc_feature (1)..(227): tr|A0A553L168|A0A553L168_9ALTE 7-carboxy-7-deazaguanine synthase OS=Aliiglaciecola sp. M165 OX=2593649 GN=queE PE=3 SV=1
MQSSIEYKINEVFESIQGEGALTGVPSIFVRLQGCPVGCPWCDTKHTWEIKEDLKTSAEEVMAEQSESERWFGHSVDQLLTLFKQHGYTAKNVILTGGEPCMYDLRPMCDALEQYGYSVSVETSGTFEILVSPNTWVTLSPKIDMKGGLEVRQDAVERANEIKHPVAMEKHVTELEKLLEWVPKDAKPLIYLQPISQQKRATDLAVKTCIAKNWRLSLQTHKFIGIE

SEQ ID NO: 27606 - protein, 214 aa, Aliikangiella marina
  misc_feature (1)..(214): tr|A0A545TD14|A0A545TD14_9GAMM 7-carboxy-7-deazaguanine synthase OS=Aliikangiella marina OX=1712262 GN=queE PE =3 SV=1
MSRLRITEIFYSLQGESSTIGKPTLFVRLTGCPLRCVWCDTEYAFTGGAYREIADLIKEIESFNPQNICITGGEPLAQKEPCEELMRILCDKGYSVSIETSGAIDVSGVDKRVTKVMDLKAPDSGELAKNRYENLAFLNKTDEVKFVIMSRKDYDWAKMQMDQYQLADKTNVIFSPCFGEINERELAEWIIADNLPVRFQLQMHKLLWDDAAGH

SEQ ID NO: 27607 - protein, 215 aa, Aliikangiella sp.
  misc_feature (1)..(215): tr|A0A545UBS2|A0A545UBS2_9GAMM 7-carboxy-7-deazaguanine synthase OS=Aliikangiella sp. M105 OX=2592383 GN=queE PE=3 SV=1
MLPRLRITEIFYSLQGESSTIGKPTLFVRLTGCPLRCVWCDTEYAFSGGEYWELEELVAKIESYQPQHICVTGGEPLAQRKPCEALMVALCDKGYSVSIETSGAIDVSDVDPRVTKVMDLKAPDSGEMGKNLYSNIQHLDKSDEVKFVIMSRKDYDWAKMQLSQYQLSEKTNVLFSPCFGEINEKELAEWIIADNLPVRFQIQMHKILWDDAAGH

SEQ ID NO: 27608 - protein, 226 aa, Aliivibrio finisterrensis
  misc_feature (1)..(226): tr|A0A4Q5KWN6|A0A4Q5KWN6_9GAMM 7-carboxy-7-deazaguanine synthase OS=Aliivibrio finisterrensis OX=511998 GN=que E PE=3 SV=1
MSSSTFKINELFETIQGEGTFTGVPSIFLRLQGCPVGCSWCDTKQTWDVELSVQTDLASILAKTEDSPSWTELTSTQIINMLKEQGYTAKHMVITGGEPCMYDLTPLTEELEQHGYRCQIETSGTYPILASENTWVTVSPKINMKGKLPVLENALMRANEIKHPVGTNKDIEQLEALLDGVKLLDDVTIALQPISQKPRATELCIETCIKRNWRLSIQTHKYLAIA

SEQ ID NO: 27609 - protein, 226 aa, Aliivibrio finisterrensis
  misc_feature (1)..(226): tr|A0A4Q5KK92|A0A4Q5KK92_9GAMM 7-carboxy-7-deazaguanine synthase OS=Aliivibrio finisterrensis OX=511998 GN=que E PE=3 SV=1
MSSSTFKINELFETIQGEGTFTGVPSIFLRLQGCPVGCSWCDTKQTWDVELSDQTDLASILAKTEDSPSWTELTSTQIINMLKEQGYTAKHMVITGGEPCMYDLTPLTEELEQHGYRCQIETSGTYPVLASENTWVTVSPKINMKGKLPVLENALMRANEIKHPVGTNKDIEQLEALLDGVKLLDDVTIALQPISQKPRATELCIETCIKRNWRLSIQTHKYLAIA

SEQ ID NO: 27610 - protein, 226 aa, Aliivibrio fischeri
  misc_feature (1)..(226): tr|Q5E081|Q5E081_ALIF1 7-carboxy-7-deazaguanine synthas e OS=Aliivibrio fischeri (strain ATCC 700601 / ES114) O X=312309 GN=ygcF PE=3 SV=1
MSAPLFKINELFETIQGEGTFTGVPSIFLRLQGCPVGCSWCDTKQTWDVELSDKTDLQTILAKTEDTPSWTELSSTQIIEMLENQGYTAKHMVITGGEPCMYDLTSLTQELEQHGYRCQIETSGTYPILASDDTWVTVSPKINMKGKLPVLPVALSRANEIKHPVGTTKDIEQLDALLEGVELLEDVTIALQPISQKPRATELCIETCIKRNWRLSIQTHKYLAIA

SEQ ID NO: 27611 - protein, 226 aa, Aliivibrio fischeri
  misc_feature (1)..(226): tr|A0A1E5AT46|A0A1E5AT46_ALIFS 7-carboxy-7-deazaguanine synthase OS=Aliivibrio fischeri OX=668 GN=queE PE=3 SV =1
MSAPLFKINELFETIQGEGTFTGVPSIFLRLQGCPVGCSWCDTKQTWDIELSDKTDLQTILAKTEDTPSWTELSSTQIIEMLENQGYTAKHMVITGGEPCMYDLTSLTQELELHGYRCQIETSGTYPILASENTWVTVSPKINMKGKLPVLPVALSRANEIKHPVGTTKDIEQLDALLEGVELLEDVTIALQPISQKPRATELCIETCIKRNWRLSIQTHKYLAIA

SEQ ID NO: 27612 - protein, 226 aa, Aliivibrio logei
  misc_feature (1)..(226): tr|A0A1B9NU00|A0A1B9NU00_ALILO 7-carboxy-7-deazaguanine synthase OS=Aliivibrio logei OX=688 GN=queE PE=3 SV=1
MSSALFKINELFETIQGEGTFTGVPSIFLRLQGCPVGCSWCDTKQTWDVELSDKTDLATILAKTEDAPSWTELTALQIIDMLVQQGYTAKHMVITGGEPCMYDLTSLTEELEKNGYRCQIETSGTYPILTSDNTWVTVSPKINMKGKLPVLDEALMRANEIKHPVGTTKDIEQLEALLDGVNLLTDVTIALQPISQKPRATELCIETCIQKNWRLSIQTHKYLAIA

SEQ ID NO: 27613 - protein, 226 aa, Aliivibrio salmonicida
  misc_feature (1)..(226): tr|B6ERK1|B6ERK1_ALISL 7-carboxy-7-deazaguanine synthas e OS=Aliivibrio salmonicida (strain LFI1238) OX=316275 GN=queE PE=3 SV=1
MSSALFKINELFETIQGEGTFTGVPSIFLRLQGCPVGCSWCDTKQTWDVELSDKTDLATILAKTEDAPSWTELTALQIIDMLVQQGYTAKHMVITGGEPCMYDLTSLTEELEKNGYRCQIETSGTYPILTSNNTWVTVSPKINMKGKLPVLDEALMRANEIKHPVGTTKDIEQLEALLDGVNLLTDVTIALQPISQKPRATELCIETCIKKNWRLSIQTHKYLAIA

SEQ ID NO: 27614 - protein, 226 aa, Aliivibrio sifiae
  misc_feature (1)..(226): tr|A0A2S7X7T4|A0A2S7X7T4_9GAMM 7-carboxy-7-deazaguanine synthase OS=Aliivibrio sifiae OX=566293 GN=queE PE=3 S V=1
MSAPSFKINELFETIQGEGTFTGVPSIFLRLQGCPVGCSWCDTKQTWDVELSDKTDLATILAKKEDAPSWTELTSTQIIGMLNEQGYTAKHMVITGGEPCMYDLTPLTKELEQHGYRCQIETSGTYPILTSDNTWVTVSPKINMKGKLPVLEEALMRANEIKHPVGTKKDIEQLEALLDGVQLLDDVTIALQPISQKPRATELCIETCIKRNWRLSIQTHKYLAIA

SEQ ID NO: 27615 - protein, 226 aa, Aliivibrio sifiae
  misc_feature (1)..(226): tr|A0A2S7X345|A0A2S7X345_9GAMM 7-carboxy-7-deazaguanine synthase OS=Aliivibrio sifiae OX=566293 GN=queE PE=3 S V=1
MSAPSFKINELFETIQGEGTFTGVPSIFLRLQGCPVGCSWCDTKQTWEVELSDKTDLATILAKKEDAPSWTELTSTQIINMLNEQGYTAKHIVITGGEPCMYNLTPLTEELEQHGYRCQIETSGTYPILTSVSTWVTVSPKINMKGKLPVLEQALMRANEIKHPVGTTKDIEQLDTLLENIKLLDDVTIALQPISQKPRATELCIETCIKRNWRLSIQTHKYLAIA

SEQ ID NO: 27616 - protein, 226 aa, Aliivibrio sp.
  misc_feature (1)..(226): tr|A0A1B9PNK0|A0A1B9PNK0_9GAMM 7-carboxy-7-deazaguanine synthase OS=Aliivibrio sp. 1S175 OX=1840087 GN=queE PE =3 SV=1
MSAPSFKINELFETIQGEGTFTGVPSIFLRLQGCPVGCSWCDTKQTWDVELSDKTDLATILAKTEDTPSWTELTSAQIINMLEQQGYTAKHVVITGGEPCMYDLTPLTVELEQHGYRCQIETSGTYPVLTSNDTWVTVSPKINMKGKLPVLEQALMRANEIKHPVGTNKDIEQLEALLDGVNLLSDVTIALQPISQKPRATELCIETCIKKNWRLSIQTHKYLAIA

SEQ ID NO: 27617 - protein, 226 aa, Aliivibrio wodanis
  misc_feature (1)..(226): tr|A0A090I9Y8|A0A090I9Y8_9GAMM 7-carboxy-7-deazaguanine synthase OS=Aliivibrio wodanis OX=80852 GN=queE PE=3 S V=1
MSASSFKINELFETIQGEGTFTGVPSIFLRLQGCPVGCSWCDTKQTWEVELTDQTDLATILSKTEDAPSWTELTSAQIIEMLKQQGYTAKHMVITGGEPCIYDLTALTEELEEHGYRCQIETSGTYPILTSENTWVTVSPKINMKGKLPVLEEALMRANEIKHPVGTTKDIEQLESLIDGVKLLDDVTIALQPISQKPRATELCIETCIKNNWRLSIQTHKYLAIA

SEQ ID NO: 27618 - protein, 237 aa, Alishewanella aestuarii
  misc_feature (1)..(237): tr|J2IAZ3|J2IAZ3_9ALTE 7-carboxy-7-deazaguanine synthas e OS=Alishewanella aestuarii B11 OX=1197174 GN=queE PE= 3 SV=1
MLWLHQLWRINTRLGRVYQVNEVFQTIQGEGRYTGKPSIFVRLQGCPVGCSWCDTKHTWTLDPELKTSPEAMLAKRSDTPAWAELSPAQLLALFAAEGYQARHVVITGGEPCLYDLYPLCEALHQAGYSTQIETSGTFEVKAPDSTWVTVSPKINMPGGYKVLASALARANEIKHPVAMQKHIEELQALLSEHQLQDKLVYLQPISQQKRATELAIASCIANNWQLSVQVHKYLGIE

SEQ ID NO: 27619 - protein, 221 aa, Alishewanella agri
  misc_feature (1)..(221): tr|I9P5J5|I9P5J5_9ALTE 7-carboxy-7-deazaguanine synthas e OS=Alishewanella agri BL06 OX=1195246 GN=queE PE=3 SV =1
MYQVNEVFQTIQGEGRYTGTPAIFVRLQGCPVGCSWCDTKHTWTLDPELAITPDQLLAKRGDSPSWTGITPAALLALFQQQGYQARHVVITGGEPCMFDLTSLCQTLHAAGYSTQIETSGTFEIKAPPDTWVTVSPKLNMPGGYPVLPSALKRADEIKHPVAMQKHVDELVALLDLHQLNGKLVYLQPISQQKRATELAIASCIKHNWRLSVQVHKYLGIE

SEQ ID NO: 27620 - protein, 221 aa, Alishewanella jeotgali
  misc_feature (1)..(221): tr|H3ZJE6|H3ZJE6_9ALTE 7-carboxy-7-deazaguanine synthas e OS=Alishewanella jeotgali KCTC 22429 OX=1129374 GN=qu eE PE=3 SV=1
MYQVNEVFQTIQGEGRYTGKPSIFVRLQGCPVGCSWCDTKHTWTLDPELKTSPEAILAKRSDTPAWAELSPAQLLALFAAEGYQARHVVITGGEPCLYDLYPLCEALHQAGYSTQIETSGTFEVKAPDSTWVTVSPKINMPGGYKVLASALARANEIKHPVAMQKHIEELQALLSEHQLQDKLVYLQPISQQKRATELAIASCIANNWQLSVQVHKYLGIE

SEQ ID NO: 27621 - protein, 221 aa, Alishewanella sp.
  misc_feature (1)..(221): tr|A0A1C2C2R5|A0A1C2C2R5_9ALTE 7-carboxy-7-deazaguanine synthase OS=Alishewanella sp. HH-ZS OX=1856684 GN=queE PE=3 SV=1
MYQVNEVFQTIQGEGRYTGKPSIFVRLQGCPVGCSWCDTKHTWTLDPELKTSPEAMLAKRSDTPAWAELSPAQLLALFAAEGYQARHVVITGGEPCLYDLYPLCEALHQAGYSTQIETSGTFEVKAPDSTWVTVSPKINMPGGYKVLASALARANEIKHPVAMQKHIEELQALLSEHQLQDKLVYLQPISQQKRATELAIASCIANNWQLSVQVHKYLGIE

SEQ ID NO: 27622 - protein, 221 aa, Alishewanella sp.
  misc_feature (1)..(221): tr|A0A258CJG6|A0A258CJG6_9ALTE 7-carboxy-7-deazaguanine synthase OS=Alishewanella sp. 32-51-5 OX=1970315 GN=qu eE PE=3 SV=1
MYQVNEVFQTIQGEGRYTGTPAIFVRLQGCPVGCSWCDTKHTWTLDPELAITPDQLLAKRGDSPSWTGLTPAALLALFQQQGYQARHVVITGGEPCMVDLTPLCQALHAAGYSTQIETSGTFEIKAPLATWVTVSPKLNMPGGYPVLPSALKRADEIKHPVAMQKHVDELVALLDLHQLNDKLVYLQPISQQKRATELAIASCIKHNWRLSVQVHKYLGIE

SEQ ID NO: 27623 - protein, 211 aa, Alistipes finegoldii
  misc_feature (1)..(211): tr|A0A174ESJ4|A0A174ESJ4_9BACT 7-carboxy-7-deazaguanine synthase OS=Alistipes finegoldii OX=214856 GN=queE PE= 3 SV=1
MALKTDIEQLDGGRKLPLVEDFYTIQGEGFHAGKPAYFIRLGGCDVGCRWCDAKYTWNPRLYPPTDVRTVIDRATACPAQAIVITGGEPLLYPLGVLTETLHAKGLEIFLETSGTHPFSGYFDWVCLSPKRQQPPLDEAFGKAHELKVIVGDEADFEWAERNAARVGAGCILYLQPEWSVAERMMPAIVEYAKAHPKWNISIQTHKYMHIP

SEQ ID NO: 27624 - protein, 211 aa, Alistipes finegoldii
  misc_feature (1)..(211): tr|I3YHS4|I3YHS4_ALIFI 7-carboxy-7-deazaguanine synthas e OS=Alistipes finegoldii (strain DSM 17242 / JCM 16770 / AHN 2437 / CCUG 46020 / CIP 107999) OX=679935 GN=que E PE=3 SV=1
MAFTTDTELLDGGRLLPLVEDFYTIQGEGFHAGKPAYFIRLGGCDVGCRWCDAKYTWNPKLYPPTDVRTVIDRALACPAQAIVITGGEPLLYPLGVLTETLHEKGLQIFLETSGTHPFSGYFDWVCLSPKRQQPPLDEALERAHELKVIVESESDFEWAERNAARVRPECMLYLQPEWSVAERVMPAMVEYAKAHPKWNISIQTHKYMHIP

SEQ ID NO: 27625 - protein, 212 aa, Alistipes indistinctus
  misc_feature (1)..(212): tr|A0A412SKQ5|A0A412SKQ5_9BACT 7-carboxy-7-deazaguanine synthase OS=Alistipes indistinctus OX=626932 GN=queE P E=3 SV=1
MNLQQNNEDLLDGGRRLPLVEDFYTIQGEGFHTGKPAYFIRLGGCDVGCRWCDAKMTWNPKLFPPTEVDTIVERACSYPAQAIVITGGEPSLYPLDYLTDALAKQGLQIFLETSGAHELSGHFDWICLSPKKQQPPVPSIFPKADELKVIIETPGDFAWAEENAAKVGERCRLYLQPEWSRYDGMIEAIVEYAKGNPQWNISVQTHKYMRIP

SEQ ID NO: 27626 - protein, 212 aa, Alistipes indistinctus
  misc_feature (1)..(212): tr|G5HB50|G5HB50_9BACT 7-carboxy-7-deazaguanine synthas e OS=Alistipes indistinctus YIT 12060 OX=742725 GN=queE PE=3 SV=1
MNLQQNNEDLLDGGRRLPLVEDFYTIQGEGFHTGKPAYFIRLGGCDVGCRWCDAKMTWNPKLFPPTEVDTIVERACSYPAQAIVITGGEPSLYPLDYLTDALAKKGLQIFLETSGAHELSGHFDWICLSPKKQQPPVPSVFPKADELKVIIETPGDFAWAEENAAKVGERCRLYLQPEWSRYDGMIEAIVEYAKGNPQWNISVQTHKYMRIP

SEQ ID NO: 27627 - protein, 212 aa, Alistipes inops
  misc_feature (1)..(212): tr|A0A0B0C049|A0A0B0C049_9BACT 7-carboxy-7-deazaguanine synthase OS=Alistipes inops OX=1501391 GN=queE PE=3 SV =1
MRSDRGKESSEKGGTALPLAEDFYTIQGEGYQTGTAAYFIRLAGCDVGCPWCDAKYTWNIHRYPVSAVEKVIGRAAASGAPCAVITGGEPLMHPLVPLTEGLKANGLQVFLETSGTHPLQGEFDWICLSPKRQAPPLEEVFQAADELKVVIGNAEDLLWAEQCAARAGKSCRLYLQPEWSRFAEAVRLITEYVKAHPQWKVSLQTHKFMEIP

SEQ ID NO: 27628 - protein, 210 aa, Alistipes obesi
  misc_feature (1)..(210): tr|A0A3D3YNN5|A0A3D3YNN5_9BACT 7-carboxy-7-deazaguanine synthase OS=Alistipes obesi OX=1118061 GN=queE PE=3 SV =1
MIDTDPALFDGGRRLPLVEDFYTIQGEGFHAGKPAYFIRLGGCDVGCRWCDAKYTWNPRRYPPVDVQVVIDRALACPARAIVITGGEPLLYPLDILTRTLHDRGLQIFLETSGTHPFSGRFDWVCLSPKRQQPPLDEAFRRAHELKVIVEREDDLQWAEQNAARVGDDCLLYLQPEWSVYERMMPLLVEYAKAHPQWNISIQTHKFMHIP

SEQ ID NO: 27629 - protein, 211 aa, Alistipes onderdonkii; identical to SEQ ID NO: 27623
  misc_feature (1)..(211): tr|A0A5B4NQ99|A0A5B4NQ99_9BACT 7-carboxy-7-deazaguanine synthase OS=Alistipes onderdonkii OX=328813 GN=queE PE =3 SV=1

SEQ ID NO: 27630 - protein, 194 aa, Alistipes onderdonkii
  misc_feature (1)..(194): tr|A0A4Q5IQH2|A0A4Q5IQH2_9BACT 7-carboxy-7-deazaguanine synthase OS=Alistipes onderdonkii OX=328813 GN=queE PE =3 SV=1
MRVNEIFYSIQGEGRYTGTPAIFIRLAGCNLRCDFCDTEHQPYQDLTEEEIMRQIADFPTSHVVITGGEPMLQITQSLIHRLRNGAGKFVQVETNGTIPIKCYLPVDWITCSPKFDFCPHAELRLQRIDELKVVYQGQDMTAYDGIEAKEYYLQPCDFKDEARNAENLAATINYIKSHPKWKLSLQTQKILSVR

SEQ ID NO: 27631 - protein, 211 aa, Alistipes putredinis
  misc_feature (1)..(211): tr|R7JNH9|R7JNH9_9BACT 7-carboxy-7-deazaguanine synthas e OS=Alistipes putredinis CAG:67 OX=1263036 GN=queE PE= 3 SV=1
MKEATNYDLLDGGRKLPLVEDFYTIQGEGFHTGKPAYFIRLGGCDVGCRWCDAKYTWNPKLYPPTDISEVVRRATSCQAQAIVITGGEPLLYPLGPLTSALKGHGLKIFLETSGSHPFSGYFDWVCLSPKRQQPPLPEAFWRAHELKVIVEREADLQWAERNAEQVGRECKLFLQPEWSVSEEIMPLLVEYVKAHPAWNISIQTHKYMHIP

SEQ ID NO: 27632 - protein, 194 aa, Alistipes putredinis; identical to SEQ ID NO: 27630
  misc_feature (1)..(194): tr|B0MZT8|B0MZT8_9BACT 7-carboxy-7-deazaguanine synthas e OS=Alistipes putredinis DSM 17216 OX=445970 GN=queE P E=3 SV=1

SEQ ID NO: 27633 - protein, 211 aa, Alistipes shahii
  misc_feature (1)..(211): tr|D4ILP1|D4ILP1_9BACT 7-carboxy-7-deazaguanine synthas e OS=Alistipes shahii WAL 8301 OX=717959 GN=queE PE=3 S V=1
MAAATDPAWLDGGRMLPLVEDFYTIQGEGFHAGKPAYFIRLGGCDVGCRWCDAKYTWNPKLYPPTDVQTVIDRAMSCPAQAIVITGGEPLLYPLGVLTETLRERGLQIFLETSGSHPFSGVFDWVCLSPKRRQPPLDEAFERADELKVIVESEEDFEWAERNAARVGGKCLLFLQPEWSVAEKVMPAIVEYAKAHPQWNISIQTHKYMHIP

SEQ ID NO: 27634 - protein, 211 aa, Alistipes shahii
  misc_feature (1)..(211): tr|A0A5B3GCM3|A0A5B3GCM3_9BACT 7-carboxy-7-deazaguanine synthase OS=Alistipes shahii OX=328814 GN=queE PE=3 SV =1
MAAATDPAWLDGGRMLPLVEDFYTIQGEGFHAGKPAYFIRLGGCDVGCRWCDAKYTWNPKLYPPTDVQTVIDRATSCPAQAIVITGGEPLLYPLGVLTQTLRERGLQIFLETSGSHPFSGVFDWVCLSPKRRQPPLDEAFERADELKVIVESEEDFEWAERNAARVGGKCLLFLQPEWSVAEKVMPAMVEYAKAHPRWNISIQTHKYMHIP

SEQ ID NO: 27635 - protein, 211 aa, Alistipes sp.
  misc_feature (1)..(211): tr|A0A4Y1WY50|A0A4Y1WY50_9BACT 7-carboxy-7-deazaguanine synthase OS=Alistipes sp. 5CPEGH6 OX=2585119 GN=queE P E=3 SV=1
MAAGTDNALLDGGRLLPLVEDFYTIQGEGYHAGKPAYFIRLGGCDVGCSWCDAKYTWNPKLYPPTDVGTVIDRATSCAARAIVITGGEPLIYPLGILTGELRRRGLEIFLETSGSHPFSGVFDWVCLSPKRRQPPLDDAYGRAHELKVIVESEADFEWAERNAARVGRHCRLYLQPEWSVSERVMPAIVEYVKARPEWNISIQTHKYMRIP

SEQ ID NO: 27636 - protein, 211 aa, Alistipes sp.; identical to SEQ ID NO: 27623
  misc_feature (1)..(211): tr|A0A4Y1WLK4|A0A4Y1WLK4_9BACT 7-carboxy-7-deazaguanine synthase OS=Alistipes sp. 3BBH6 OX=2585117 GN=queE PE= 3 SV=1

SEQ ID NO: 27637 - protein, 211 aa, Alistipes timonensis
  misc_feature (1)..(211): tr|A0A1H4F8B4|A0A1H4F8B4_9BACT 7-carboxy-7-deazaguanine synthase OS=Alistipes timonensis JC136 OX=1033731 GN=q ueE PE=3 SV=1
MAVTVDSELLDGGRLLPLVEDFYTIQGEGFHAGKPAYFIRLGGCDVGCRWCDAKYTWNPKLYPPTDVRTVIDRATACPAQAIVITGGEPLLYPLDVLTRALRAKGLEIFLETSGSHPFSGVFDWVCLSPKRQQPPLEEAYGRADELKVIVESEADFEWAERNAARVSAKCRLYLQPEWSVAERMMPAMVEYAKANPRWNISIQTHKYMHIP

SEQ ID NO: 27638 - protein, 263 aa, Aliterella atlantica
  misc_feature (1)..(263): tr|A0A0D8ZV87|A0A0D8ZV87_9CYAN 7-carboxy-7-deazaguanine synthase OS=Aliterella atlantica CENA595 OX=1618023 GN =queE PE=3 SV=1
MNINTDRTARLIEVFSAIQGEGLNVGTRQIFIRFAICDLRCSYCDSAHTWVASDECRVEMTPGLRDFAMHPNPVDTDTLLAWVERQNVPGLHDSISLTGGEPLLHAPFLKQFLPQVRLATGLPIYLETGGHRPAQLQTILPYLDSVGMDIKLPSVSGEEHWEEHAKFLQACVRSQVEVFIKIIVSQQTDTADLERAAQLVAAVSPEIPVFLQPVTPLDSESHPNKELILAPTPAQVLDWQAQMKRALKSVRAIPQTHKMLNQL

SEQ ID NO: 27639 - protein, 242 aa, Alkalibacillus haloalkaliphilus
  misc_feature (1)..(242): tr|A0A511W329|A0A511W329_9BACI 7-carboxy-7-deazaguanine synthase OS=Alkalibacillus haloalkaliphilus OX=94136 G N=queE PE=3 SV=1
MSKIPVLEIFGPTIQGEGMVIGKKTMFVRTAGCDYSCSWCDSAFTWDGSAKDEIVQMTAEDIWNRLKEIGGDLFNHVTISGGNPALLKNLNELINLLKQNEIEVALETQGSRWQDWFTQIDDLTISPKPPSSNMSTDFAILDRIIHNLTDHNRLEQTSLKVVIFDEADYQYAKGIGERYPQIPLYLQVGNRDVHGEDIDNLTSTLLNQYEQLIDRVVQDDELNNVRVLPQLHTLVWGNKRGV

SEQ ID NO: 27640 - protein, 244 aa, Alkalicoccus halolimnae
  misc_feature (1)..(244): tr|A0A5C7FCX3|A0A5C7FCX3_9BACI 7-carboxy-7-deazaguanine synthase OS=Alkalicoccus halolimnae OX=1667239 GN=queE PE=3 SV=1
MSKALPVLEVFGPTFQGEGMVIGKKTMFVRTAGCDYSCSWCDSAFTWDGSAKDEIRRLTPEEVWEELTNLAPNNFSHVTISGGNPALLKHMGSLIELLHENNVEAALETQGSRWQEWFLQVDDLTISPKPPSSLMKTNFTILDDIIDRLTKAGRDGFTSLKVVIFDKKDFDYAKQIHQRYPHIPFYLQVGNEDTGDEKKTEDLTSKLLTKYEELVDWTMDDPETVNVRVLPQLHTLVWGNKRGV

SEQ ID NO: 27641 - protein, 244 aa, Alkalicoccus saliphilus
  misc_feature (1)..(244): tr|A0A2T4U9Z5|A0A2T4U9Z5_9BACI 7-carboxy-7-deazaguanine synthase OS=Alkalicoccus saliphilus OX=200989 GN=queE PE=3 SV=1
MNKTLPVLEIFGPTFQGEGMVIGKKTMFVRTAGCDYSCSWCDSAFTWDGSAKEDIKKLTPDEIWDRLNEEAEGNFSHVTISGGNPALLKHMGAFIDILHTNEVEAALETQGSLWQDWFLKIDDLTISPKPPSSLMKTNFQVLDDIIHRLTEAGKTQQVSLKVVIFNEEDFDYAKNVHQRYPHIPFYLQVGNEDTGEDKNREDLVPRLLSRYESLVDWTMKDSAMNRARVLPQLHTLVWGNARGV

SEQ ID NO: 27642 - protein, 209 aa, Alkalilimnicola ehrlichii
  misc_feature (1)..(209): tr|Q0ACR1|Q0ACR1_ALKEH 7-carboxy-7-deazaguanine synthas e OS=Alkalilimnicola ehrlichii (strain ATCC BAA-1101 / DSM 17681 / MLHE-1) OX=187272 GN=queE PE=3 SV=1
MTYSVHEIHYTLQGEGAQTGRPAVFCRFAGCNLWSGREAHRASAICRFCDTAFVGTGGSGGGRFRSANELAERLAGYWPGGGRPLVVCTGGEPLLQLDSALIDALHRRGFEVAVETNGTRPAPAGLDWICVSPKAGAPLVLTTGDELKLVHPQPGAEPERFQHLAFRHFFLQPMDGPEREANTQACVDYCLAHPQWSLSLQTHKLLGIP

SEQ ID NO: 27643 - protein, 223 aa, Alkalilimnicola ehrlichii
  misc_feature (1)..(223): tr|A0A3E0X156|A0A3E0X156_9GAMM 7-carboxy-7-deazaguanine synthase OS=Alkalilimnicola ehrlichii OX=351052 GN=que E PE=3 SV=1
MYANSQTATADKPLRITEIFHSLQGESRTIGFPTVFVRLTGCPLRCGYCDSEYAFHGGERMTFEEIEAAVAVYRPRFVTVTGGEPLAQRGCLPLLSRLCDAGYEVSLETSGALDVSHVDPRVVKVVDIKTPGSGECERNRWQNLEHLQPHDQLKFVLCSREDYEWARRILDKHRLSERWEVLFSPSFNDLSATDLADWVVADRLPVRVQIQLHKFLWGDQPGR

SEQ ID NO: 27644 - protein, 221 aa, Alkalimonas amylolytica
  misc_feature (1)..(221): tr|A0A1H4B6W1|A0A1H4B6W1_ALKAM 7-carboxy-7-deazaguanine synthase OS=Alkalimonas amylolytica OX=152573 GN=queE PE=3 SV=1
MYKVNELFETIQGEGSYTGCPAIFIRLQGCPVGCSWCDTKHTWTVDPEQQIPLTDVLAKTTDTEGWCNLSAEQLLTEFQRQGFRARHVVITGGEPCLYDLNPLCELLHQQGYSTQIETSGTFEVLAPSETWVTVSPKVNMKGGYEVLDSALLRANEIKHPVARERDIEELQQLLQRVPASGRLVYLQPISQKAKATRLAIEQCKQHNWRLSVQVHKYLGIN

SEQ ID NO: 27645 - protein, 221 aa, Alkalinema sp.
  misc_feature (1)..(221): tr|A0A251WHL0|A0A251WHL0_9CYAN 7-carboxy-7-deazaguanine synthase OS=Alkalinema sp. CACIAM 70d OX=1934309 GN=qu eE PE=3 SV=1
MSSNPSNVVTDDRTVENNHPSELQKLLPIVETFHSVQGEGAWVGANAFFIRLALCDVGCPWCDTKISWSDKRHPRRCVADLVAEAQSCHPSFVVITGGEPLMHDLSELTEALRQAGLQVHLETSGAHPLTGQFDWITLSPKMFKPPVAEIYAHVHELKVVISQPEDFAWAEEQSAKTPESVVRYLQPEWTSAKGQKLVFDYVLAHPQWRISLQTHKLLGVR

SEQ ID NO: 27646 - protein, 210 aa, Alkaliphilus peptidifermentans
  misc_feature (1)..(210): tr|A0A1G5KLG3|A0A1G5KLG3_9CLOT 7-carboxy-7-deazaguanine synthase OS=Alkaliphilus peptidifermentans DSM 18978 O X=1120976 GN=queE PE=3 SV=1
MLKINEIFLSIQGEGISTGYPTIFVRLTGCNLSCSYCDTVYSHHEGSLMSVEEVVSQIKTYGYKRVCLTGGEPLLQDEVRVLLSRLEDYEVNIETNGSIDINKFPLNPKHRYTMDIKAPSSGASNSIFYENFTNLRKNDEIKIVIGSREDYLWMREIIKKFHQLGVITVSPVFGEIDPQKIINWILEDNLDLRFQLQIHKIIWNPDERGV

SEQ ID NO: 27647 - protein, 209 aa, Alkalispirillum mobile
  misc_feature (1)..(209): tr|A0A498BRE8|A0A498BRE8_9GAMM 7-carboxy-7-deazaguanine synthase OS=Alkalispirillum mobile OX=85925 GN=queE PE =3 SV=1
MTYSVHEIHYTLQGEGAQAGRPAVFCRFTGCNLWSGREAHRASAICRFCDTEFVGTDGPGGGRFRSPEALAETIAGYWPGGGRPLVVCTGGEPLLQLDEPLIKALQARGFEVAVETNGTRPAPQGLDWICVSPKAGAPLVLICGDELKLVHPQPGAEPERFQHLAFRHFYLQPMDSPEQEANTQACVSYCLAHPQWRLSLQTHKLLGIP

SEQ ID NO: 27648 - protein, 286 aa, Alkalitalea saponilacus
  misc_feature (1)..(286): tr|A0A1T5H8J6|A0A1T5H8J6_9BACT 7-carboxy-7-deazaguanine synthase OS=Alkalitalea saponilacus OX=889453 GN=queE PE=3 SV=1
MSTKIVLANEGVFPITRDVNGAALSQLPATAIPVAGTIQGEGKLAGVPSLFIRFSSCNLRCIWQLPDGSYSRCDTPYASFDTQQVLQLTVAEVIKLVKENLGSIRHVVITGGEPLMQKDALAELAYELKNELYVHLTIETNGSMFNIQAAENIDLFSISPKLANSEPNPEKLKALGLQPSGPLSYHTQRRYNIKALQSYIDICNESNKEMQLKFVIGKPEDEQEIINDFLNQLTGWQPSDIMLMPLGANEAELRQTTPLTLEMAIRNGWRFTPRVHIDIFGSKPGV

SEQ ID NO: 27649 - protein, 233 aa, Alkanindiges illinoisensis
  misc_feature (1)..(233): tr|A0A4Y7XG43|A0A4Y7XG43_9GAMM 7-carboxy-7-deazaguanine synthase OS=Alkanindiges illinoisensis OX=197183 GN=qu eE PE=3 SV=1
MRSAQIPVTDPAAGLRLTEIFYSLQGEANESGWPCVFVRLTGCPLRCTYCDTTYSFEGGERVSLQAIMDQVNEFGVRHVCVTGGEPLAQPNCIPLLKQLCDAGLHVSLETSGALSVQAVDPRVSKVMDLKTPSSGEQHRNLMDNLNFLTLHDQIKFVICNREDYDWAKQQLQQYQLDKLVSTVWFSPAFAIDKTKATLPAFARQLADWIVADRLPVRFQLQLHKLLWNDEKGR

SEQ ID NO: 27650 - protein, 233 aa, Alkanindiges sp.
  misc_feature (1)..(233): tr|A0A1S8CWF7|A0A1S8CWF7_9GAMM 7-carboxy-7-deazaguanine synthase OS=Alkanindiges sp. H1 OX=1907941 GN=queE PE= 3 SV=1
MRSAQIPVTDPAAGLRLTEIFYSLQGEANESGWPCVFVRLTGCPLRCTYCDTTYSFEGGERVSLQAIMDQVNEFGVRHVCVTGGEPLAQPNCIPLLQQLCDAGLQVSLETSGALSVQAVDSRVSKVMDLKTPSSGEQHRNMMENLDFLTQHDQIKFVICNREDYDWAKQQLQQYGLNERVSTVWFSPAFAIDKTRATLPAFARQLADWIVADRLPVRFQLQLHKLLWNDEKGR

SEQ ID NO: 27651 - protein, 222 aa, Allisonella histaminiformans
  misc_feature (1)..(222): tr|A0A1G5WDA5|A0A1G5WDA5_9FIRM 7-carboxy-7-deazaguanine synthase OS=Allisonella histaminiformans OX=209880 GN= queE PE=3 SV=1
MWPYMKNEFPVVELFDSIDGEGKRTGRMAIFVRFAGCNLRCTYCDTAYALKRSDALEVLTEEELLKRIHNYPWKRITFTGGEPMLQNLLPLCQTLSDEGYDINIETNGAVPLFAHRPEHVFYTMDYKCTDSGMKDHMLLSNFSQLDERDVLKFVVSSEQDLNDMRRIVTGWKGIAPDFYVSPVWGKITPAELVEYVRKYELSSVCVQVQLHKIIWGAERRGV

SEQ ID NO: 27652 - protein, 234 aa, Alloactinosynnema album
  misc_feature (1)..(234): tr|A0A1H0L9F2|A0A1H0L9F2_9PSEU 7-carboxy-7-deazaguanine synthase OS=Alloactinosynnema album OX=504798 GN=queE PE=3 SV=1
MSTPPLPPGRVEGSAILTEKFESFQGEGPWTGQRCVFVRFSRCNLRCGYCDTPESWDWNRFNPAEVSDRVPVTELVSWVRERGVDMMVITGGEPMLQQPAMTALASGLTNVRVQVETNGTIAPTPELASLVDLWVVSPKLANSGMTYSSRIKADALSTLVATDRAVFKFVVTEPDRDLDEIAQLVEEHRLAPVWVMPEGTTQEKVLAGMDALYGPATDRGWNVSTRLHILTGAR

SEQ ID NO: 27653 - protein, 234 aa, Alloactinosynnema iranicum
  misc_feature (1)..(234): tr|A0A1G6VXQ0|A0A1G6VXQ0_9PSEU 7-carboxy-7-deazaguanine synthase OS=Alloactinosynnema iranicum OX=1271860 GN=q ueE PE=3 SV=1
MTPLAFLPGRAEGTAVLTEKFESFQGEGPWTGQRCVFIRFSRCNLKCGFCDTPESWDWSRYNPTEVSERVPIADLVTWVRERDVDLVVITGGEPMLQQPAMTALARGLTGVRIQVETNGTMEPTPELASLIDLWVVSPKLANSGMDYSVRIKPPALTALAATGRAVFKFVVTDPGSDLDEIAQLAEECQLEPVWVMPEGTTRETVLAGMDALHGPAAERGWNVSTRLHILAGVR

SEQ ID NO: 27654 - protein, 241 aa, Alloactinosynnema sp.
  misc_feature (1)..(241): tr|A0A0H5CU39|A0A0H5CU39_9PSEU 7-carboxy-7-deazaguanine synthase OS=Alloactinosynnema sp. L-07 OX=1653480 GN=q ueE PE=3 SV=1
MERPVTITLADDELLVAETFGPTVQGEGPSMGRRAVFIRLMNCNLTCQDCDTPYTWDDTRFDLDAEGTVASISDLLAWATEQPVDLVVITGGEPLMQQGRLIALVQGLVDAGLQVEIETNGTIAPAPDLLASVTRFNVSPKLSSFGAGMPISKRIKGRVLGHFAASGRAVFKFVVSSTADLDEITELVADHDLAPVYVMPEGRTAEEVTRRLAEIADPAIERGFHLTTRLHVLAWGDQRGR

SEQ ID NO: 27655 - protein, 215 aa, Allochromatium vinosum
  misc_feature (1)..(215): tr|D3RQ59|D3RQ59_ALLVD 7-carboxy-7-deazaguanine synthas e OS=Allochromatium vinosum (strain ATCC 17899 / DSM 18 0 / NBRC 103801 / NCIMB 10441 / D) OX=572477 GN=queE PE =3 SV=1
MSYWVKESFYTLQGEGAQAGRAAVFCRFSGCNLWSGREQDRDRAICRFCDTDFRGTDGEGGGRYRDADVLAEHLRALWPTGAGADASDRPYVVCTGGEPLLQLDAPLIDALHGSGFEVAVETNGTRPAPPGLDWICVSPKAGATTVLIEGDELKLIYPQPGLEPERFEGLGFRHFFLQPMDGPQSNANTRLAVDYCKARPRWRLSLQTHKWLGIP

SEQ ID NO: 27656 - protein, 215 aa, Allochromatium warmingii
  misc_feature (1)..(215): tr|A0A1H3DAY2|A0A1H3DAY2_ALLWA 7-carboxy-7-deazaguanine synthase OS=Allochromatium warmingii OX=61595 GN=queE PE=3 SV=1
MAYWIKECFYSLQGEGAQSGRAAVFCRFSGCNLWSGREQDRARARCPFCDTDFRGTDGSDGGRYASAAALADRLWALWTAGADTSGQPYVVCTGGEPLLQLDAPLIDALHRHGFTVAVETNGTRPIRSDLQLDWICVSPKAGAPLRVTAGDELKLVYPQAGLDPTSFAALDFRQFWLQPCDGPQHAAHTQLALDYCLAHPRWRLSLQTHKLLGIR

SEQ ID NO: 27657 - protein, 212 aa, Allonocardiopsis opalescens
  misc_feature (1)..(212): tr|A0A2T0Q2J1|A0A2T0Q2J1_9ACTN 7-carboxy-7-deazaguanine synthase OS=Allonocardiopsis opalescens OX=1144618 GN= queE PE=3 SV=1
MYRVKEIFYTLQGEGSHTGRPSVFCRFTSCNLWTGREKDRHRAICKFCDTDFVGTDGPGGGRFRTAEDLAAAVAKTWQGRSHPRSRPYVVCTGGEPLLQLDNEAVNALHTEGLEVAIETNGTRPAPDGIDWICVSPKAGTELVLRSGHDLKLVYPQVGAEPERFEDLDFRRFMLQPMDGPDLAANTQAAIEYCLEHPQWHLSAQTHKTLGIR

SEQ ID NO: 27658 - protein, 193 aa, Alloprevotella rava
  misc_feature (1)..(193): tr|G5GDG5|G5GDG5_9BACT 7-carboxy-7-deazaguanine synthas e OS=Alloprevotella rava F0323 OX=679199 GN=queE PE=3 S V=1
MTYKINEIFYSLQGEGFWTGTPSIFIRFSGCNLQCAFCDTRHKEGNMMSEEEILNSTKKFPAKHVVLTGGEPSLFVKETLLEKLHAQGKFIAIETNGTHELPKGIDWVTLSPKNNFQQKADLILKHCDELKIVYTKAEFNPYLDIKAKHRYLQPCDTGNLAENKKILQATINFIKANPIWRLSLQTHKIIGVQ

SEQ ID NO: 27659 - protein, 200 aa, Alloprevotella sp.
  misc_feature (1)..(200): tr|A0A328PUM6|A0A328PUM6_9BACT 7-carboxy-7-deazaguanine synthase OS=Alloprevotella sp. E39 OX=2133944 GN=queE PE=3 SV=1
MLKINEIFYSLQGEGYFSGVPAVFVRFSGCNLKCPFCDTLHEEGKEMSVEEIVSVVCQYPALHVVLTGGEPSLFIDSHLIKALHDKQRFVAIETNGTRLVEEKVDWITLSPKLGQAQNAQIQQNKCDELKLVYQNDEQIKRLIKTLEESNFTFPKHLFLQPCDTGISAKNQKIIEDCVSFCKSNPLWRLSLQMHKLIDIK

SEQ ID NO: 27660 - protein, 191 aa, Alloprevotella sp.
  misc_feature (1)..(191): tr|A0A496KW52|A0A496KW52_9BACT 7-carboxy-7-deazaguanine synthase OS=Alloprevotella sp. OX=1872471 GN=queE PE=3 SV=1
MKVNEIFYSLQGEGYWTGTPAVFVRLSGCNLKCFFCDTAHETGVQQKEADIVSEVLKYPAHHVVITGGEPSLFLTHSLVEALHQVGKFVAVETNGTHPLPDNVDWITLSPKDAFVPNATPTLTRCNELKVVCDGTPPPTYPNITADHRFLQPCDVGNQQENQRIMAATVNFCLENPEWRLSLQTHKIAGIQ

SEQ ID NO: 27661 - protein, 189 aa, Alloprevotella tannerae
  misc_feature (1)..(189): tr|C9LE55|C9LE55_9BACT 7-carboxy-7-deazaguanine synthas e OS=Alloprevotella tannerae ATCC 51259 OX=626522 GN=qu eE PE=3 SV=1
MTRFKINEIFYSLQGEGFYSGIASIFIRFSGCNLSCSFCDTQHETGELMTQEQILDQVTRFPAKHVVLTGGEPSLFVTKELIDGLHAAGKYVCIETNGLHALPEGIDWVTLSPKTAQTILKTCNELKVVFTDDTFNPHDEIKAAHYFIQPCDMGNSIKNNRILASCISYVKENPRWRLSLQTHKMIGIH

SEQ ID NO: 27662 - protein, 209 aa, Unknown
  misc_feature (1)..(209): tr|A0A1V1PN69|A0A1V1PN69_9PROT 7-carboxy-7-deazaguanine synthase OS=alpha proteobacterium U9-1i OX=1605283 GN= queE PE=3 SV=1
MTYSVKEMFYTLQGEGARAGRPAVFVRFAGCNLWSGREQDRAEAICQFCDTEFVGTDGDGGGKFKTADGLADAAIAKWPGGGAPYVVCTGGEPLLQLDAPLINALHARGFEIAVETNGTIEAPAGIDWICVSPKAHADLVQRVGHELKLVYPQESAAPERYAALAFQHFYLQPMDNAARDANTSAATNYCLDHPQWRLSLQTHKLLGIR

SEQ ID NO: 27663 - protein, 215 aa, Unknown
  misc_feature (1)..(215): tr|J9DJB1|J9DJB1_9PROT 7-carboxy-7-deazaguanine synthas e OS=alpha proteobacterium IMCC14465 OX=1220535 GN=queE PE=3 SV=1
MTYSVKEIYYTLQGEGAQSGRPAVFCRFAGCNLWSGLEADRADAACTFCDTDFIGTDGENGGKFTTAEELADKIATLWPDKDALADAYVVFTGGEPLLQLDTTLLEACKAHGFETGVETNGTQIAPANLDWICVSPKPNSPLAQDRGHELKFVYPQDTLSPYEFADYDFEHFFIQPMEVADEEAYHHNIQASIVFCLQNPQWRLSLQTHKIIGIS

SEQ ID NO: 27664 - protein, 211 aa, Alphaproteobacteria bacterium
  misc_feature (1)..(211): tr|A0A2S6RQK8|A0A2S6RQK8_9PROT 7-carboxy-7-deazaguanine synthase OS=Alphaproteobacteria bacterium MarineAlpha6 _Bin5 OX=2013092 GN=queE_1 PE=3 SV=1
MYNVKEIYYTLQGEGAFSGRPSVFCRFSGCNLWSGKEKDRKLAKCNFCDTDFVGVNGINGGKFISELELGKKIISLWKSKNINNKPYVVFTGGEPLLQLDKKLINFLKNYNFEIGIETNGTLKLPCEIDWVCVSPKHKDNFILKKGDELKLVFPQKKINPKNLENLKFKYFFLQPMDGPNLKENIKKTYEYCNKNKKWNVSLQLHKMIGIR

SEQ ID NO: 27665 - protein, 213 aa, Alphaproteobacteria bacterium
  misc_feature (1)..(213): tr|A0A1Z8VWC4|A0A1Z8VWC4_9PROT 7-carboxy-7-deazaguanine synthase OS=Alphaproteobacteria bacterium TMED62 OX=19 86642 GN=queE PE=3 SV=1
MNNYKTYSIKEIFLTLQGEGHNAGKTAVFCRFSGCNLWNGNEKDRKNAVCSFCDTDFKGVNGINGGKYHLQPLVEKITSLWPKLKRNKFIVFTGGEPLLQLDNKLIKKVKDKGFKVAVETNGTLPVSKLIDWVCVSPKIESKLVVTKGDEIKVVYPQDGINLSVFEKYNFEHFYLQPLDNKNFILNNKKTIEYILKNPKWKLSVQTHKYLKIK

SEQ ID NO: 27666 - protein, 244 aa, Altererythrobacter aquimixticola
  misc_feature (1)..(244): tr|A0A4T3F3G0|A0A4T3F3G0_9SPHN 7-carboxy-7-deazaguanine synthase OS=Altererythrobacter aquimixticola OX=248917 3 GN=queE PE=3 SV=1
MPLTLATQAPGEPEIFASVQGEGPSVGRPVAFLRLSRCNLACVWCDTAYTWHFEGDNRPHRDGETYERKANQLTMEVEDVAARIAALGQDRLVITGGEPLLQAGKLADMLAHLPDVSVEIETNGTVKPPARLDVLVDQYNVSPKLAHSGNPPELALIPEMLDHWASEPRAFLKFVIAEPGDVDEVLALRERHHIPSSRIYLMPEGTDSETLRTREAWLAPLCMEHGLRLSDRLHIHLFGDTRGT

SEQ ID NO: 27667 - protein, 245 aa, Altererythrobacter atlanticus
  misc_feature (1)..(245): tr|A0A0F7KPN2|A0A0F7KPN2_9SPHN 7-carboxy-7-deazaguanine synthase OS=Altererythrobacter atlanticus OX=1267766 G N=queE PE=3 SV=1
MPLTLATQAPGEAEIFASIQGEGPSTGKPTAFIRLSRCNLACRWCDTAYTWHFTGDNRPHRNEETFDRKANQLVMEEEEAARRIAELAMPRLVITGGEPLLQAPALSRMIEALPADMAVEIETNGTIAPPERLAGLVDQFNVSPKLAHSGNPADLALIPERLREWAANPRAFFKFVIATPEDVEEVLSLAEIHAIPRNRIWLMAEGTDIATLEAREAWLAEKCIANKLTLSKRLHIQLFGDTRGT

SEQ ID NO: 27668 - protein, 244 aa, Altererythrobacter dongtanensis
  misc_feature (1)..(244): tr|A0A1B2ACS1|A0A1B2ACS1_9SPHN 7-carboxy-7-deazaguanine synthase OS=Altererythrobacter dongtanensis OX=692370 GN=queE PE=3 SV=1
MNLVLATDDTGGPEIFASLQGEGPSAGKPCSFIRLSRCNLACVWCDTAYTWRFAGDNRPHRDGVAYDRKANQVSLSPLEAARAIDRLAPRRLVITGGEPLLQAAALAEMALLLPDHAIEVETNGTVEPSAKFDAFVEQYTVSPKLAHSGNPADLALPPERLAAWAADTRAWFKFVIAAPEDVAEVRALCDVHHIPAYRVFLMPEGTDSATLRAREQWLAPLCVEHGYRLSDRLHIHLYGDTRGT

SEQ ID NO: 27669 - protein, 244 aa, Altererythrobacter epoxidivorans
  misc_feature (1)..(244): tr|A0A0M3TAK6|A0A0M3TAK6_9SPHN 7-carboxy-7-deazaguanine synthase OS=Altererythrobacter epoxidivorans OX=361183 GN=queE PE=3 SV=1
MALVLATDDTGGPEIFASLQGEGPSAGMPVAFVRLSRCNLACVWCDTAYTWHFEGDNRPHRSDETYDRKANQVTLEVGEVAQRIAALGQDRLVITGGEPLMQGAALAELAEALPDMAIEIETNGTTKAPVRLDIRVDQFNVSPKLSHSGNPAELALIPERLDAYATDPRAFFKFVIADPSDVDEVLSLHERYRLRPGHVFLMPEGTDSATLREREAWLSELCVQHGFRMSDRLHIHLYGDTRGT

SEQ ID NO: 27670 - protein, 244 aa, Altererythrobacter ishigakiensis
  misc_feature (1)..(244): tr|A0A562UV19|A0A562UV19_9SPHN 7-carboxy-7-deazaguanine synthase OS=Altererythrobacter ishigakiensis OX=476157 GN=queE PE=3 SV=1
MSLVLATDDTGGPEIFASLQGEGPSTGMPVAFMRLSRCNLACTWCDTAYTWRFEGDNRPHRDGETFERKANQITLELSDAAERIAALGQKRLVITGGEPLLQAGKLAELLELLPDISVEIETNGTVTAPARLDIRVDQYNVSPKLAHSGNDPKLALIPERLDAYATDPRAYFKFVIAEPEDVDEVLALQRRYRFKPGHVFLMPEGADSNTIGSRARWLADLCLQHGFRMSDRLHIHLYGDTRGT

SEQ ID NO: 27671 - protein, 235 aa, Altererythrobacter marensis
  misc_feature (1)..(235): tr|A0A2W4YQY9|A0A2W4YQY9_9SPHN 7-carboxy-7-deazaguanine synthase OS=Altererythrobacter marensis OX=543877 GN=q ueE PE=3 SV=1
MAEPEIFASLQGEGPSAGYPCAFIRLSRCNLACHWCDTAYTWHFTGDNRPHRDGLAFERRANQLVLSEEEAAARILALGQNRLVITGGEPLLQGAALARLAALLPDMRIEIETNGTVAPHPALDGQVAQYNISPKLAHSGNPADLALPPERLTAWAAEPRATFKFVIATPDDLAEALALAENYAIPRERIMLMPEGTDSTTLRERERWLAPLALEHGLRLSDRLHIHLYGDTRAT

SEQ ID NO: 27672 - protein, 244 aa, Altererythrobacter marensis
  misc_feature (1)..(244): tr|A0A0G3X7Q7|A0A0G3X7Q7_9SPHN 7-carboxy-7-deazaguanine synthase OS=Altererythrobacter marensis OX=543877 GN=q ueE PE=3 SV=1
MPLTLATQSPGEPEIFASLQGEGPSAGMPVAFLRLSRCNLACQWCDTAYTWHFAGDERPHRSGETFDRKTNQIVMGEEDVARRIAALGQNRLVITGGEPLLQAGALATLLEHLPDMAVEVETNGTVAAPPRLDVRIDQYNVSPKLAHSGNPADLALLPERLDAYAADPRAWFKFVIAAPGDVDEVLALKARYRFRPGHVFLMPEGTDSATLRAREEWLAPLCLEHGFRMSDRLHIHLYGDTRGT

SEQ ID NO: 27673 - protein, 248 aa, Altererythrobacter namhicola
  misc_feature (1)..(248): tr|A0A1C7DB06|A0A1C7DB06_9SPHN 7-carboxy-7-deazaguanine synthase OS=Altererythrobacter namhicola OX=645517 GN= queE PE=3 SV=1
MALTLATITPGDPEIFASIQGEGPSCGAEVAFIRLSRCNLACVWCDTAYTWHWEGDAKKFRRPHRSGETFARAANQVKLDEAEAARLVAATGRKRLVITGGEPLLQGAALARMLQHLPDVEVEIETNGTTTAPPALDVRVTQYNVSPKLAHSGNAPELALLPERLRAYAVDPRAFFKFVVAQPDDVAEVLALSDLYALPKERTYLMPEGTDSAALSARMDWIEPLAAEYGLQVTDRAHIHLFGDTRGT

SEQ ID NO: 27674 - protein, 244 aa, Altererythrobacter sp.
  misc_feature (1)..(244): tr|A0A420EK93|A0A420EK93_9SPHN 7-carboxy-7-deazaguanine synthase OS=Altererythrobacter sp. HN-Y73 OX=2320269 G N=queE PE=3 SV=1
MPLTLATTTPGEPEIFASLQGEGPSMGKPCTFIRLSRCNLACEWCDTAYTWHFEGDNRPHRRDPTYPRAANQLTLSEEDAARQIAAFGQDRLIITGGEPLLQGAALARMLGHLPGMIVEIETNGSVAPHPALDPLVSQYNVSPKLAHSGNPADLALNPERLAHWTQEPRATFKFVIAEPADVDEVLALQKAHTIPSAKIMLMAEGTEADVLEQRESWLAEICIAQKLTLSKRLHIRLFGDTRGT

SEQ ID NO: 27675 - protein, 244 aa, Altererythrobacter sp.
  misc_feature (1)..(244): tr|A0A2E1Y802|A0A2E1Y802_9SPHN 7-carboxy-7-deazaguanine synthase OS=Altererythrobacter sp. OX=1872480 GN=queE PE=3 SV=1
MALVLATDDTGGPEIFASVQGEGPSAGMPVAFMRLSRCNLACVWCDTAYTWHFEGDERPHSGGVTYARKPNQVTLPEDEVAAIIQSLGQSRLVITGGEPLLQAPALAKLMELLPDISVEIETNGTTKAPPPLDIRIDQFNVSPKLAHSGNPAELALLPERLDAYATDPRAWFKFVIAEPSDVDEVLALRDRYRFRPGHVFLMPEGTDSETLRAREKWLAGLCVEHGFRMSDRLHIHLFGDTRGT

SEQ ID NO: 27676 - protein, 244 aa, Altererythrobacter xiamenensis
  misc_feature (1)..(244): tr|A0A1Y6EIE7|A0A1Y6EIE7_9SPHN 7-carboxy-7-deazaguanine synthase OS=Altererythrobacter xiamenensis OX=1316679 GN=queE PE=3 SV=1
MPLVLATDDAGGPEIFASLQGEGPSAGTPVAFVRLSRCNLACVWCDTAYTWHFEGDDRPHRDETTFDRKANQVTLDVADVAERIAALGQKRLVITGGEPLLQGPALAELVDALPDMAIEIETNGTTTAPVRLDIRVDQYNVSPKLAHSGNPAELALIDERLDAYATDPRAFFKFVVASPEDVEEVLALHSRYRFRPGHVFLMPEGTDSATLRSREEWLSEICVKKGFRMSDRLHIHLYGDTRGT

SEQ ID NO: 27677 - protein, 239 aa, Alteribacillus bidgolensis
  misc_feature (1)..(239): tr|A0A1G8MK26|A0A1G8MK26_9BACI 7-carboxy-7-deazaguanine synthase OS=Alteribacillus bidgolensis OX=930129 GN=qu eE PE=3 SV=1
MKKVPVLEIFGPTIQGEGMVIGQKTMFIRTGGCDYRCSWCDSAFTWDGSQQAELLNVDEIIEKLETIGGAAFNHVTISGGNPALHSGLGEVVKMLQEKGIKTAVETQGTIWQHWMKDIDEVTISPKPPSSGMDTNWEQLDEYIRQLNDREDKEVSLKIVIFDDKDLEYAVDVHQRYPHIAMFLQTGNEHLETADNSWLLSHLLNRYEELVEKVIASERLNEVKVLPQLHTLLWGNKQGV

SEQ ID NO: 27678 - protein, 239 aa, Alteribacillus iranensis
  misc_feature (1)..(239): tr|A0A1I2CVZ8|A0A1I2CVZ8_9BACI 7-carboxy-7-deazaguanine synthase OS=Alteribacillus iranensis OX=930128 GN=queE PE=3 SV=1
MKKIPVLEIFGPTIQGEGMVIGQKTMFVRTGGCDYRCSWCDSAFTWDGSQKAELLTAEEIVNRLRETGGTSFNHVTLSGGNPALHQGIEEVIAMLKDEGVRTAVETQGSIWQDWMIDIDDVTISPKPPSSRMKTDWEKLDHYINHLKDRPGKRTSIKVVIFDESDLRYAEAVHSRYPDVPMYLQTGNPHLDAAEGEWLLKQLLLNYEWLVNQVIASDRLNEVKVLPQLHTLLWGNKQGV

SEQ ID NO: 27679 - protein, 239 aa, Alteribacillus persepolensis
  misc_feature (1)..(239): tr|A0A1G8GIT6|A0A1G8GIT6_9BACI 7-carboxy-7-deazaguanine synthase OS=Alteribacillus persepolensis OX=568899 GN= queE PE=3 SV=1
MNKVPVLEIFGPTIQGEGMVVGQKTMFIRTAGCDYRCSWCDSAFTWDGSQKPTLMDADDIVQQLEAIGGRRFNHVTISGGNPALQRGLASVVQALMEKGIKTAVETQGTMWQEWMRDVDDVTVSPKPPSSGMKTNWDQLDYYIQQLRGRSHKQVSLKIVIFNEEDLRYAENVHARYSDIPMFLQTGNDDIETDDNNWLLSHLLKRYEWLVENVIDSETLNEVKVLPQLHTLLWGNKQGV

SEQ ID NO: 27680 - protein, 213 aa, Alteromonadaceae bacterium
  misc_feature (1)..(213): tr|A0A3R8B9K0|A0A3R8B9K0_9ALTE 7-carboxy-7-deazaguanine synthase OS=Alteromonadaceae bacterium TMED101 OX=1986 649 GN=queE PE=3 SV=1
MTYSVKEIFYTLQGEGAQAGRPAVFCRFTGCNLWSGLERDRQTATCNFCDTDFVGTDGEGGGKFATPAALVESIVACWPARLNTSAAPYVVFTGGEPLLQLDTRLIEALHEKGFEIAVETNGTLEAPPGIDWICVSPKATAPVTLSSGNELKLVYPQPSAMPDRFSHLQFDYYFLQPMDGPAVRENTQATIDYCKSNPQWRLSIQMHKLVGLP

SEQ ID NO: 27681 - protein, 215 aa, Alteromonadaceae bacterium
  misc_feature (1)..(215): tr|A0A2D9KE80|A0A2D9KE80_9ALTE 7-carboxy-7-deazaguanine synthase OS=Alteromonadaceae bacterium OX=1916082 GN=q ueE PE=3 SV=1
MFETIQGEGVYTGVPAIFVRLQGCPVGCPWCDTKHTWTLDENLIDSVDAVVNKSEESERFFGISDLGLLALFEQQGYNAKHVVITGGEPCMYDLRGLTELLHERGFTSQIETSGTFEVKCAQQTWVTVSPKVNMKGGYDVLTSALQRANEIKHPIAMQKHVDELDALLAGIDLTDKVVCLQPISQQARATELAIKTCIDRNWRLSLQTHKYVGIA

SEQ ID NO: 27682 - protein, 221 aa, Alteromonadales bacterium
  misc_feature (1)..(221): tr|A0Y004|A0Y004_9GAMM 7-carboxy-7-deazaguanine synthas e OS=Alteromonadales bacterium TW-7 OX=156578 GN=queE P E=3 SV=1
MYKINEVFETIQGEASFTGTPSIFLRLQGCPVGCSWCDTKQTWDVDNVYKVSLDETVEKKADSDHWADASAEQVLELFKSRGYTAKHVVITGGEPCMYDLNQVCKLLHDNGFTTQIETSGTFEILAPEQTWVTVSPKINMRGGYEVLTSAMKRANEIKHPVAMQKHVEELEELFAKTGVNPKLVYLQPISQKVSATKLAIDTCIAKNWRLSIQVHKYLGIS

SEQ ID NO: 27683 - protein, 226 aa, Alteromonadales bacterium
  misc_feature (1)..(226): tr|A0A2N0WLI4|A0A2N0WLI4_9GAMM 7-carboxy-7-deazaguanine synthase OS=Alteromonadales bacterium alter-6D02 OX=20 58087 GN=queE PE=3 SV=1
MSMIKLPLNEIFESIQGEGSFTGAPSIFVRLQGCPVGCAWCDTKHSWYLNEEDKTSFEQVLAKTGDGDSWCDVEVDQLIAHLLTYKARHIVISGGEPCMYDLVLLTTELEANGFSCQIETSGTFDVKVSDSTHVTVSPKVAMKGGYEILDQALVRANEIKHPVAMSRHIDELDALLARLTPEQLAQKKIYLQPISQQKRATQLAIDTCIERNWWLSIQTHKYLAIQ

SEQ ID NO: 27684 - protein, 214 aa, Alteromonas aestuariivivens
  misc_feature (1)..(214): tr|A0A3D8M621|A0A3D8M621_9ALTE 7-carboxy-7-deazaguanine synthase OS=Alteromonas aestuariivivens OX=1938339 GN= queE PE=3 SV=1
MFETIQGEGVFTGVPSVFVRLQGCPVGCPWCDTKHTWVVNEALATTPTAVLNKSQESEAFFNTSEANLLAEFSRQGYRARHVVITGGEPCMYDLTPLTTLLHQQGFTSQIETSGTFEVLCHPDTWVTVSPKVNMKGGYEVLVSALKRANEIKHPVAMQKHIDELDTLLAQLDTLPVVCLQPISQQQRATDLAIKTCIERNWRLSLQTHKYIGIE

SEQ ID NO: 27685 - protein, 216 aa, Alteromonas australica
  misc_feature (1)..(216): tr|A0A350P5V9|A0A350P5V9_9ALTE 7-carboxy-7-deazaguanine synthase OS=Alteromonas australica OX=589873 GN=queE P E=3 SV=1
MFETIQGEGAHTGIPSIFVRLQGCPVGCPWCDTKHTWTLDDALVTTAQAVIAKNEESEHYFDVNENELLALFEAQGYVAKHVVITGGEPCMYDLIPLTELLHNRGYTTQIETSGTFEVRCDPRTYVTVSPKINMKGGMEVLVSALERANEIKHPIAMQKHIDELDILLEKVSSLDDKQVCLQPISQQARATELAVKTCISRNWRLSLQTHKYIGIE

SEQ ID NO: 27686 - protein, 216 aa, Alteromonas australica
  misc_feature (1)..(216): tr|A0A075NY48|A0A075NY48_9ALTE 7-carboxy-7-deazaguanine synthase OS=Alteromonas australica OX=589873 GN=queE P E=3 SV=1
MFETIQGEGAHTGIPSIFVRLQGCPVGCPWCDTKHTWTLDDALVTTAQAVIAKNEESEHYFDVNENELLALFAAQGYVAKHVVITGGEPCMYDLIPLTELLHNRGYTTQIETSGTFEVRCDPRTYVTVSPKINMKGGMEVLVSALERANEIKHPIAMQKHIDELDILLEKVSSLDGKQVCLQPISQQARATELAVKTCISRNWRLSLQTHKYIGIE

SEQ ID NO: 27687 - protein, 216 aa, Alteromonas confluentis
  misc_feature (1)..(216): tr|A0A1E7ZFH6|A0A1E7ZFH6_9ALTE 7-carboxy-7-deazaguanine synthase OS=Alteromonas confluentis OX=1656094 GN=queE PE=3 SV=1
MFETIQGEGVQTGLPSIFVRLQGCPVGCPWCDTKHTWTLDDAFLTSADAVLDKTQESEAFFACTDGALLEIFAKRGYKARHVVITGGEPCMYDLTSVTSLLHARGFTTQIETSGTFEVLCHEDTWVTVSPKVDMKGGMPILTSALQRANEIKHPVAMQKHVDELDALLARLGDAQPAHICLQPISQQQRATDLAIATCIARNWRLSLQTHKYIGIE

SEQ ID NO: 27688 - protein, 215 aa, Alteromonas lipolytica
  misc_feature (1)..(215): tr|A0A1E8FKZ2|A0A1E8FKZ2_9ALTE 7-carboxy-7-deazaguanine synthase OS=Alteromonas lipolytica OX=1856405 GN=queE PE=3 SV=1
MFETIQGEGVYTGVPAIFVRLQGCPVGCPWCDTKHTWELDENMIDSVEAVITKSGESERYFGISELGLLALFEQQRYQAKHVVLTGGEPCMYDLTDLTRLLHEHGYTTQIETSGTFAVRCAPETWVTVSPKINMKGGYDVLVSALERANEIKHPIAMQKHIDELDELLARASKLPDIICLQPISQQPRATELAIKTCIERNWRLSLQTHKYVGIA

SEQ ID NO: 27689 - protein, 224 aa, Alteromonas macleodii
  misc_feature (1)..(224): tr|K0EDN8|K0EDN8_ALTMB 7-carboxy-7-deazaguanine synthas e OS=Alteromonas macleodii (strain Balearic Sea AD45) O X=1004787 GN=queE PE=3 SV=1
MSTLNINEMFETIQGEGAHTGIPSIFVRLQGCPVGCPWCDTKHTWEIKPDLSVSPQAVITKGEESETYFISSEEALLAEFGKQGYVAKHVVITGGEPCMYDLRPLTSLLHNNGYTTQIETSGTFEVLCDTRTYVTVSPKINMKGGYDVLVSALERANEIKHPIAMQKHIDELDALLASVSSLDGKQVCLQPISQQKRATELAVRTCIERNWRLSLQTHKYIGIE

SEQ ID NO: 27690 - protein, 224 aa, Alteromonas macleodii
  misc_feature (1)..(224): tr|A0A1E7DIW4|A0A1E7DIW4_ALTMA 7-carboxy-7-deazaguanine synthase OS=Alteromonas macleodii OX=28108 GN=queE PE= 3 SV=1
MSTLNINEMFETIQGEGAHTGIPSIFVRLQGCPVGCPWCDTKHTWEIKPDLSVSPQAVITKGEESETYFISSEEALLAEFGKQGYVAKHVVITGGEPCMYDLRPLTSLLHDNGYTTQIETSGTFEVLCDTRTYVTVSPKINMKGGYDVLVSALERANEIKHPIAMQKHIDELDALLANVSSLDGKQVCLQPISQQKRATELAVRTCIERNWRLSLQTHKYIGIE

SEQ ID NO: 27691 - protein, 224 aa, Alteromonas marina
  misc_feature (1)..(224): tr|A0A0B3YFJ7|A0A0B3YFJ7_9ALTE 7-carboxy-7-deazaguanine synthase OS=Alteromonas marina OX=203795 GN=queE PE=3 SV=1
MSTLNINEMFETIQGEGAHTGIPSIFVRLQGCPVGCPWCDTKHTWEIKPDLSVSPQAVITKGEESETYFISSEEALLAEFGKQGYVAKHVVITGGEPCMYDLRPLTSLLHDNGYTTQIETSGTFEVLCDTRTYVTVSPKINMKGGYDVLVSALERANEIKHPIAMQKHINELDALLANVSSLDGKQVCLQPISQQKRATELAVRTCIERNWRLSLQTHKYIGIE

SEQ ID NO: 27692 - protein, 224 aa, Alteromonas mediterranea
  misc_feature (1)..(224): tr|S5C043|S5C043_9ALTE 7-carboxy-7-deazaguanine synthas e OS=Alteromonas mediterranea UM7 OX=1300258 GN=queE PE =3 SV=1
MSTLNINEMFETIQGEGAHTGVPSIFVRLQGCPVGCPWCDTKHTWEIKPDLSVTPEAVITKGQESETYFISNESDLLTQFGHEGYVAKHVVITGGEPCMYDLRPLTTLLHDKGYTTQIETSGTFEVLCDERTYVTVSPKINMKGGYDVLISALERANEIKHPIAMQKHIDELDALLANVSSLKGKQVCLQPISQQKRATELAVRTCIERNWRLSLQTHKYIGIE

SEQ ID NO: 27693 - protein, 224 aa, Alteromonas mediterranea; identical to SEQ ID NO: 27692
  misc_feature (1)..(224): tr|A0A1J0S2H1|A0A1J0S2H1_9ALTE 7-carboxy-7-deazaguanine synthase OS=Alteromonas mediterranea OX=314275 GN=queE PE=3 SV=1

SEQ ID NO: 27694 - protein, 227 aa, Alteromonas naphthalenivorans
  misc_feature (1)..(227): tr|F5ZDQ3|F5ZDQ3_ALTNA 7-carboxy-7-deazaguanine synthas e OS=Alteromonas naphthalenivorans OX=715451 GN=queE PE =3 SV=1
MSKLITLNINEMFETIQGEGAHTGIPSIFVRLQGCPVGCPWCDTKHTWTLDNALVTTAQQVIDKTNESEHFFEIDENKLLSLFSEQGYVAKHVVITGGEPCMYDLRPLTTLLHNNGFSTQIETSGTYEVLCDDRTYVTVSPKINMKGGMPVLLSALERANEIKHPIAMQKHIDELDALLADVSSLAGKQVCLQPISQQPRATELAVQTCIARNWRLSLQTHKYIGIE

SEQ ID NO: 27695 - protein, 216 aa, Alteromonas pelagimontana
  misc_feature (1)..(216): tr|A0A2A6AWJ4|A0A2A6AWJ4_9ALTE 7-carboxy-7-deazaguanine synthase OS=Alteromonas pelagimontana OX=1858656 GN=qu eE PE=3 SV=1
MFETIQGEGVYTGVPSVFLRLQGCPVGCSWCDTKHTWTLDDAFLTTSDQVIDKKQENEAFFEADAEALLELFAKQGYHAKHVVITGGEPCIYDLSPLTNYLHQHGFTTQIETSGTYEIKCDPATWVTVSPKVNMKGGLPVLESALRRANEIKHPVAMQKHIEELDALLAKIKDDLPAHICLQPISQQERATDLAIRTCIARNWRLSLQTHKYIGIE

SEQ ID NO: 27696 - protein, 221 aa, Alteromonas sp.
  misc_feature (1)..(221): tr|A0A3N5ZB24|A0A3N5ZB24_9ALTE 7-carboxy-7-deazaguanine synthase OS=Alteromonas sp. U0105 OX=2259342 GN=queE P E=3 SV=1
MLPINEMFETIQGEGVYTGMPAVFIRLQGCPVGCPWCDTKHTWEVSAENQVSYEDVIVKTTDLPTYFSASETELMGIMKAQGYSARHVVITGGEPCMYDLKVLTKILHDQGYSVQIETSGTFEAKCDERTWVTLSPKVNMKGGYEVLKQVIERADEIKHPVAMEKHIDELDALLAQRSTAIKEVCLQPISQQKRATDLAIRTCIARNWRLSLQTHKYLGIA

SEQ ID NO: 27697 - protein, 227 aa, Alteromonas sp.
  misc_feature (1)..(227): tr|A0A3S5AUN1|A0A3S5AUN1_9ALTE 7-carboxy-7-deazaguanine synthase OS=Alteromonas sp. 76-1 OX=2358187 GN=queE PE =3 SV=1
MSKLITLNINEMFETIQGEGAHTGIPSIFVRLQGCPVGCPWCDTKHTWTLDNALVTTAQQVIDKTNESEHFFGIDENKLLSLFSEQGYVAKHVVITGGEPCMYDLRPLTNLLHENGYSTQIETSGTYEVLCDDRTYVTVSPKINMKGGMPVLLSALERANEIKHPIAMQKHIDELDALLADVSSLAGKQVCLQPISQQPRATQLAVQTCIARNWRLSLQTHKYIGIE

SEQ ID NO: 27698 - protein, 191 aa, Alteromonas stellipolaris
  misc_feature (1)..(191): tr|A0A0S1YLJ8|A0A0S1YLJ8_9ALTE 7-carboxy-7-deazaguanine synthase OS=Alteromonas stellipolaris LMG 21856 OX=116 0720 GN=queE PE=3 SV=1
MGCPWCDTKHTWTLDNALVTTAQQVIDKTNESEHFFEIDENKLLSLFSEQGYVAKHVVITGGEPCMYDLRPLTTLLHDSGFSTQIETSGTYEVLCDDRTYVTVSPKINMKGGMPVLLSALERANEIKHPIAMQKHIDELDALLADVSSLAGKQVCLQPISQQPRATELAVQTCIARNWRLSLQTHKYIGIE

SEQ ID NO: 27699 - protein, 209 aa, Altibacter sp.
  misc_feature (1)..(209): tr|A0A2D9N7S7|A0A2D9N7S7_9FLAO 7-carboxy-7-deazaguanine synthase OS=Altibacter sp. OX=2024823 GN=queE PE=3 SV= 1
MQNEIQVQVEQGVMLPLMEEFYTIQGEGFHKGTAAYFIRIGGCDVGCHWCDVKESWNAAIHPPTSIDAIVKNAELHSNTVVVTGGEPLTWNMGPLTQSLKNKGLQTHIETSGAYPLTGQWDWICLSPKKIKLPKDEIYKAADELKVIVYNKDDFRFAEAQAAQVSSTCILYLQPEWSKRDTVIPLIVDYVMANPKWKVSLQTHKYLNIP

SEQ ID NO: 27700 - protein, 206 aa, Alysiella crassa
  misc_feature (1)..(206): tr|A0A376BSA5|A0A376BSA5_9NEIS 7-carboxy-7-deazaguanine synthase OS=Alysiella crassa OX=153491 GN=queE PE=3 SV =1
MSSEPIYRIVEIFETLQGEGYNTGMPSVFIRFGKCNLACYWCDTNYNEFGAMSLTQIMTKVHEYSAKNIIITGGEPTIQPQIELLLNQLKSEGYFLAIETNGLKDVPPQIDYIATSPKRLYAEAYEKRCLKQADEVRIVVDNDEILAFCEHIEQKIAAKRYYLSPCEINGEMNILATITALGQLNARVGKPHWQLSIQTHKLCGIE

SEQ ID NO: 27701 - protein, 205 aa, Alysiella filiformis
  misc_feature (1)..(205): tr|A0A286ED90|A0A286ED90_9NEIS 7-carboxy-7-deazaguanine synthase OS=Alysiella filiformis DSM 16848 OX=1120981 GN=queE PE=3 SV=1
MSEPTYRIVEIFETLQGEGYNTGMPSVFIRFGKCNLACHWCDTNYNEFGFMSLSQIMQKVHQFAARNIIITGGEPTIQPQIEILLNQLKSESYFIAIETNGLKDVPAQIDYVATSPKRLYAQAYEKRCLKRADEVRIVVDGDDVFDFCEQIEQKIQSPRYYLSPCEHHGEMNVLQTIALLGKLNARVAKPHWQLSIQTHKLCGID

SEQ ID NO: 27702 - protein, 223 aa, Amantichitinum ursilacus
  misc_feature (1)..(223): tr|A0A0N0GN47|A0A0N0GN47_9NEIS 7-carboxy-7-deazaguanine synthase OS=Amantichitinum ursilacus OX=857265 GN=queE PE=3 SV=1
MTTIMTQTPLPPSVRITEIFFSLQGETSRMGLPTVFVRLTGCPLRCGYCDSAYAFHGGQTLSFDAILEQVASYGARTVCVTGGEPLAQKHSLALLRALCDAGYDVSLETSGALAIDDVDARVSRIVDIKTPGSGELDKMRWENLDVIKPGDEIKFVLVDRADYEWARDLLQTRQLAAKAPVLFSPVWETLKPTDLADWVIQDKLPVRMQVQLHKILWGDRPGV

SEQ ID NO: 27703 - protein, 251 aa, Ammonifex degensii
  misc_feature (1)..(251): tr|C9RBW4|C9RBW4_AMMDK 7-carboxy-7-deazaguanine synthas e OS=Ammonifex degensii (strain DSM 10501 / KC4) OX=429 009 GN=queE PE=3 SV=1
MQGEGSAVALAPLREIFSSVQGEGPYVGVRHLFVRFAGCNLTCRYCDTPRDIPATCRVEVVAGRQHFFHLPNPLTPEEVVLLVSNLLRQLRHGAVALTGGEPLLYPAFLRELLPALRQIGCRVYLETNGTLPYALEEVADLVDVVAMDLKLPSSTGLKPYWSEHEEFLAKLKGKEVILKAVVSRQATREEVERAGELAEKAGAVLVLQPVTTKNPNFRPSGMRLLEMQEWALGKTSDVRLIPQVHKFCGWL

SEQ ID NO: 27704 - protein, 244 aa, Ammonifex sp.
  misc_feature (1)..(244): tr|A0A3A6MTR8|A0A3A6MTR8_9THEO 7-carboxy-7-deazaguanine synthase OS=Ammonifex sp. OX=1872493 GN=queE PE=3 SV=1
MVAPVILREIFSSIQGEGPYVGCRHLFVRFVGCNLACAYCDTPREVPMKCRVEMKPGTGNFVTIPNPLTPEEVGVLISGLNVARHHAVSLTGGEPLLNPDFIRELIPLLHGAHRGIYLETNGTLVEELEAVVDLVDVISMDIKLPTATGMEALWEVHRRFLQIARTKEVILKAVVAAETPPEEVLAAAELARTAGSVLVLQPVTGRAPEESPAPAELLKLQARALEITGDVRVIPQVHRLCGML

SEQ ID NO: 27705 - protein, 251 aa, Ammonifex thiophilus
  misc_feature (1)..(251): tr|A0A3D8P464|A0A3D8P464_9THEO 7-carboxy-7-deazaguanine synthase OS=Ammonifex thiophilus OX=444093 GN=queE PE= 3 SV=1
MQGEGSAVALAPLREIFSSVQGEGPYVGTRHLFVRFAGCNLACRYCDTPRDTPATCRVELVAGRQRFFHLPNPLTPEEVVLLVVNLLRQLRHGAVALTGGEPLLYPTFLRELLPALRQVGCRIYLETNGTLPHALEEVVDLVDIVAMDLKLPSSTGLRSYWSEHEEFLARLEGKEVILKAVVSRQTSKEEVERAGELAEKARAVLVLQPVTTRDPNSRPSGMRLLEMQEWALRKTSDVRLIPQVHKICGWL

SEQ ID NO: 27706 - protein, 238 aa, Ammoniphilus oxalaticus
  misc_feature (1)..(238): tr|A0A419SLY1|A0A419SLY1_9BACL 7-carboxy-7-deazaguanine synthase OS=Ammoniphilus oxalaticus OX=66863 GN=queE P E=3 SV=1
MDGRIMTKQSRVLPMVEIFQTVEGEGLKAGFPTTFVRLYNCNLRCKWCDTTYSYAPHQPEFYATIEEIVEQVVQLENPSICLTGGEPLMHGDKSAALIQALAEQPVIEEIHIETNGAIDLTPFCALRATNTDVREKVRFIMDVKLRSSGEKEAMVWENFPLLSGQDEIKFVIGDEREFKEAVEVIESYYEQGQLLFSPVWEQLAPAALVEMILASPYKRAKLSLQTHKYIWHPEQKGV

SEQ ID NO: 27707 - protein, 237 aa, Ammoniphilus sp.
  misc_feature (1)..(237): tr|A0A4Q1SS95|A0A4Q1SS95_9BACL 7-carboxy-7-deazaguanine synthase OS=Ammoniphilus sp. CFH 90114 OX=2493665 GN=q ueE PE=3 SV=1
MDGRLMEMTMKLPMVEIFETVEGEGLKAGFLTTFVRLYNCNLRCTWCDTKYSYAPHSPEFFATIEEITEQVRKFGNPSICLTGGEPLMHGSKSLALIAALAELPHVEDIHIETNGAILLRPFHELRESHHLVKEKVRFVLDYKLTSSGETQSMIMENFHYLGSRDEIKFVVGNAAEFAEASRIIEEFYQQGQILFSPVWDQLAPAELVKLMLQSPFKQAKLSLQTHKYIWHPDTKGV

SEQ ID NO: 27708 - protein, 242 aa, Amphibacillus marinus
  misc_feature (1)..(242): tr|A0A1H8H7Y4|A0A1H8H7Y4_9BACI 7-carboxy-7-deazaguanine synthase OS=Amphibacillus marinus OX=872970 GN=queE PE =3 SV=1
MAQFPVLEIFGPTIQGEGMVAGRKTMFIRTAGCDYSCSWCDSAFTWDGSAKDDIEMLSSETIIERLEALGGDQFNHVTVSGGNPALLKHLDELIEQLHKRGIQVALETQGSRWQPWFGKLDDLTISPKPPSSNMQTNWETLDTIIDNLIEQERLHHISLKVVIFNDGDFSYAEQVHKRYPQVPFYLQVGNDDLTETDDSQLALKLLSQYEWLINKTLASATLNSARVLPQLHALIWGNKRGV

SEQ ID NO: 27709 - protein, 212 aa, Amphiplicatus metriothermophilus
  misc_feature (1)..(212): tr|A0A239PPR8|A0A239PPR8_9PROT 7-carboxy-7-deazaguanine synthase OS=Amphiplicatus metriothermophilus OX=151937 4 GN=queE PE=3 SV=1
MTTYSVKERYYTLQGEGAQAGRAAVFLRFAGCNLWTGLEKDRDSADCRFCDTDFVGTDGPGGGRFRSADALADHVAAAWPAGAGGRPLVVCTGGEPLLQLDAPLIDALHARGFEVAVETNGTIAAPAGLDWICVSPKAGAPLVQTEGDELKLVFPQDGAPPAAFERLRFKRFFLQPMDGPEVSRHTAAAVEYCKAHPQWRLSLQTHKLIGIP

SEQ ID NO: 27710 - protein, 216 aa, Amphritea atlantica
  misc_feature (1)..(216): tr|A0A1H9FLI3|A0A1H9FLI3_9GAMM 7-carboxy-7-deazaguanine synthase OS=Amphritea atlantica OX=355243 GN=queE PE=3 SV=1
MSKIYSVKEMFYTLQGEGAQAGRPAVFCRFTGCNLWSGREQDRSKAVCDFCDTDFIGTDGQNGGKFQSAEALVAAIRGFWPTGKETTQGRPYVVCTGGEPLLQLDQPLIDALHQQGFEVAVETNGTLPVPEAVDWICVSPKADAALIQQSGDELKLVYPQPLAQPEQFIHLPFKHFYLQPMDGPMQRIHTQDCIRYCLANPQWKLSLQTHKLLGID

SEQ ID NO: 27711 - protein, 209 aa, Amphritea balenae
  misc_feature (1)..(209): tr|A0A3P1SLG2|A0A3P1SLG2_9GAMM 7-carboxy-7-deazaguanine synthase OS=Amphritea balenae OX=452629 GN=queE PE=3 S V=1
MYSVKEMFYTLQGEGAQAGRPAVFCRFTGCNLWSGREQDRSKAVCDFCDTDFIGTDGQNGGKFHSAESLAKAVRQLWPGDKGQPYVVCTGGEPLLQLDPQLITAFHSEGLEIAIETNGTLPLPEGIDWVCVSPKADSKIVVTDGDELKLVYPQPLALPETFDKLNFKHFYLQPMDGPMQSMNSSDCIQYCLNNPQWKLSLQTHKLLGID

SEQ ID NO: 27712 - protein, 207 aa, Amphritea sp.
  misc_feature (1)..(207): tr|A0A430KWB9|A0A430KWB9_9GAMM 7-carboxy-7-deazaguanine synthase OS=Amphritea sp. MCCC 1K03512 OX=2490544 GN=q ueE PE=3 SV=1
MFYTLQGEGAQAGRPAVFCRFSGCNLWSGREQDRHKAVCDFCDTDFVGTDGQNGGKFNSAEALAKAVRSFWPELPDTQQGKPYVVCTGGEPLLQLDTALIDALHQEDFEIAVETNGTLAVPASIDWICVSPKADAELVQLSGDELKLVYPQPLAQPEQFQSLAFSHFYLQPMDGPMQPMNTRDTIQFCLQHPQWKLSLQTHKLLGID

SEQ ID NO: 27713 - protein, 242 aa, Amycolatopsis alba
  misc_feature (1)..(242): tr|A0A229RBY5|A0A229RBY5_9PSEU 7-carboxy-7-deazaguanine synthase OS=Amycolatopsis alba DSM 44262 OX=1125972 GN =queE PE=3 SV=1
MKPPTVPAPDRDLVVNETFGPTFQGEGPSTGRYAHFIRLFGCHLSCTWCDTPHTHDPTRYDLTAEQRILSIDDILSWLAAAPVDLLVITGGEPMLQPRVLERLLLAIRDRSLATDIEIEIETSGTIPPTDLLTAAATRFNVSPKLAHSGLRRHQRIRPAVLRHLAGTGKAVWKFVVQEIDDLDEVQELTEAYDLHPVWIMPEGTDSSTVLTRMRLLAEPVLSRRWHLSPRLHTLLWENDRGR

SEQ ID NO: 27714 - protein, 231 aa, Amycolatopsis albispora
  misc_feature (1)..(231): tr|A0A344LLH1|A0A344LLH1_9PSEU 7-carboxy-7-deazaguanine synthase OS=Amycolatopsis albispora OX=1804986 GN=queE PE=3 SV=1
MTLAPERVEGSAILTEKFESFQGEGPWTGQRCVFVRFSRCNLRCGYCDTPESWDWSRYNPVEVSDRVPVAELVSWVRERGVDMMVITGGEPMLQQPAMTALARGLADIRVQVETNGTVAPTPELTSLVDLWVVSPKLANSGMTYSTRIKPEALSALVATDRAVFKFVVTEPDRDLDEIAQLVEEHHLAPVWVMPEGTTQEKVLAGMDALYGRATERGWNVSTRLHILTGAR

SEQ ID NO: 27715 - protein, 219 aa, Amycolatopsis antarctica
  misc_feature (1)..(219): tr|A0A263CXY0|A0A263CXY0_9PSEU 7-carboxy-7-deazaguanine synthase OS=Amycolatopsis antarctica OX=1854586 GN=que E PE=3 SV=1
MLTEKFESFQGEGPWTGQRCVFVRFSRCNLRCGFCDTPESWDWSRYNPAEVSDRVPISELVSWVRERGVDMMVITGGEPMLQQPAMTALARGLAKVRVQVETNGTVAPTPELAALVDLWGVSPKLANSGMTYSTRIKPEALSALVATDRAVFKFVVTEPERDLDEIARLVEEHRLAPVWVMPEGTTQEKVLAGMNALYGPATDRGWNVSTRLHILTGAR

SEQ ID NO: 27716 - protein, 239 aa, Amycolatopsis cihanbeyliensis
  misc_feature (1)..(239): tr|A0A542DPP9|A0A542DPP9_9PSEU 7-carboxy-7-deazaguanine synthase OS=Amycolatopsis cihanbeyliensis OX=1128664 G N=queE PE=3 SV=1
MTTTLLPLRDALLITETFGPTFQGEGPSCGQPAIFIRTSRCNLTCDWCDEPRTWDHSRFNLAEHTSWQSIADLTDWVLSYDTDLVVITGGEPLLQQYRLVPLVAALLEAGRRVEFETNGTIVPVQDVRLDQVQFNVSPKLASSGIPAQRRIVPEALNALPQTNTVFKFVITAEHREADLAEADHLVDTYGLRRVWLMPEGTTRDAVTSGLQALAEPALKRGWGLTTRLHVQLWENAHGR

SEQ ID NO: 27717 - protein, 240 aa, Amycolatopsis coloradensis
  misc_feature (1)..(240): tr|A0A1R0L074|A0A1R0L074_9PSEU 7-carboxy-7-deazaguanine synthase OS=Amycolatopsis coloradensis OX=76021 GN=que E PE=3 SV=1
MKPPVVSDVDRDLVVNEAFGPTFQGEGPSTGRYAHFIRLFGCHLSCTWCDTPQTHDPARHDLAAEQRILSIEDILSWLASTPADLLVITGGEPLLQPRALERLLCAIRERELATDVEIETSGTIAPTDVLISAVTRFNVSPKLAHSGLRRRQRIRPAVLRDLAGSGKAVWKFVVQQVDDLDEVQELVGTYGLHPVWIMPEGTDSSTVLARMRLLADPVLARRWHLSTRLHTLLWENSRGR

SEQ ID NO: 27718 - protein, 244 aa, Amycolatopsis decaplanina
  misc_feature (1)..(244): tr|M2Y0E8|M2Y0E8_9PSEU 7-carboxy-7-deazaguanine synthas e OS=Amycolatopsis decaplanina DSM 44594 OX=1284240 GN= queE PE=3 SV=1
MVPMIPKQATGVESLVVSEIFGPTFQGEGVSTGRHASFVRLGGCDLHCSWCDSPYTWDSSRFDLRAELARRPVADILQDVDERGAALTVLTGGEPLLHQRQRGWGTLLRGLTTRGRELEIETNGTKAPDPETVENTHRFTVSPKLAHSGDPQEMRVRPNALKAFVDSGKASFKFVVASVHDLPEVDLLVTTVGIPPERVWIMPEGTGSDVILARSQELADSILQRGYNFSSRLHVLLWADERKR

SEQ ID NO: 27719 - protein, 240 aa, Amycolatopsis japonica
  misc_feature (1)..(240): tr|A0A075UH28|A0A075UH28_9PSEU 7-carboxy-7-deazaguanine synthase OS=Amycolatopsis japonica OX=208439 GN=queE P E=3 SV=1
MKPPAVSDVARDLVVNETFGPTFQGEGPSTGRYAHFIRLFGCHLSCAWCDTPQTHDPARYDLAAEQQVLSIDDILSWLASTPAELLVITGGEPLLQPRALERLLCTIRERALAADIEIETSGTIPPTDLLTSAVTRFNVSPKLAHSGLRRHQRVRPAVLRHFAGTGKAIWKFVVQETGDLDEVQELVGTYDLKPVWIMPEGTDSATVLARMRLLAEPVLARRWHLSTRLHTLLWENDRGH

SEQ ID NO: 27720 - protein, 240 aa, Amycolatopsis keratiniphila
  misc_feature (1)..(240): tr|A0A1H2JC14|A0A1H2JC14_9PSEU 7-carboxy-7-deazaguanine synthase OS=Amycolatopsis keratiniphila OX=129921 GN=q ueE PE=3 SV=1
MKPPAVSDVARDLVVNETFGPTFQGEGPSTGRYAHFIRLFGCHLSCAWCDTPQTHDPARYDLAAEQQVLSIDDILSWLASTPAELLVITGGEPLLQPRALERLLCTIREHVLAADIEIETSGTIPPTDLLTSAVTRFNVSPKLAHSGLHRHQRVRPAALRHFASTGKAIWKFVVQETGDLDEVQELVGTYDLKPVWIMPEGADSATVLARMRLLAEPVLARRWHLSTRLHTLLWENDRGR

SEQ ID NO: 27721 - protein, 213 aa, Amycolatopsis marina
  misc_feature (1)..(213): tr|A0A1I1BX63|A0A1I1BX63_9PSEU 7-carboxy-7-deazaguanine synthase OS=Amycolatopsis marina OX=490629 GN=queE PE= 3 SV=1
MTYQVKEIFYTLQGEGSHAGRPAVFCRFAACNLWSGRESSRASAICQFCDTDFVGTDGPGGGAFRTSADLVQAITTTWQGDAHPRAKPFVVCTGGEPLLQVDGELVNGLHDAGFEVAVETNGTKPAPKGLDWICVSPKANTELVLTAGDELKLVFPQEGADPAGYEELDFPSLLLQPMDGPHLEEYTKRAIEYCLEHPQWRLSVQNHKFIGIR

SEQ ID NO: 27722 - protein, 240 aa, Amycolatopsis marina
  misc_feature (1)..(240): tr|A0A1I1BLR7|A0A1I1BLR7_9PSEU 7-carboxy-7-deazaguanine synthase OS=Amycolatopsis marina OX=490629 GN=queE PE= 3 SV=1
MKPPLVSDVDRDLVVNETFGPTFQGEGPSTGRYAHFIRLFGCHLSCDWSDSPETHDPNRYDLNAEQQILSIEDILSWLAAGPADLLVITGGEPLLQPHVLGRLVCAIRQRALAADIEIETSGTIAPTDMITSAVTRFNVSPKLAHSGLRRHQRIRPAVLRDLADSGKAIWKFVVQEIDDLDEIQELVGTYGLHPVWVMPEGTDSATVLARMRMLADPVLARRWHLSTRLHTLLWENDRGR

SEQ ID NO: 27723 - protein, 240 aa, Amycolatopsis orientalis
  misc_feature (1)..(240): tr|A0A193C9Y7|A0A193C9Y7_AMYOR 7-carboxy-7-deazaguanine synthase OS=Amycolatopsis orientalis OX=31958 GN=queE PE=3 SV=1
MKLPAVSDVDRDLVVNETFGPTFQGEGPSTGRYAHFIRLFGCHLSCAWCDTPQTHDAIRYDLAAEQRTLSIEDMLSWLAADPADLLVITGGEPLLQARAIERLLRAIRERSLATDIEIETSGTIAPTDLLTSAVTRFNVSPKLAHSGLRRRQRIRPAVLRDLAGTGKAVWKFVVQQVDDLDEVQELVGTYGLHPVWIMPEGTDRSTVLARMRLLADPVLARRWHLSTRLHTLLWENDRGR

SEQ ID NO: 27724 - protein, 237 aa, Amycolatopsis rubida
  misc_feature (1)..(237): tr|A0A1I5WK30|A0A1I5WK30_9PSEU 7-carboxy-7-deazaguanine synthase OS=Amycolatopsis rubida OX=112413 GN=queE PE= 3 SV=1
MTITLADDELLVAERFGPTVQGEGPSTGRRAVFVRLMNCNLTCKTCDTPYTWDDSRFDLDAEATVTSVSDLLAWATAQPVDLVVITGGEPLIQQRRLIALAQGLVDAGLRVEIETNGTIAPAPDLLAWVSQFNVSPKLSTFGAGMPASKRIKRRVLGHFAVSGRAVFKFVVSSIADLDEITELVSSHDLAPVYVMPEGRTAEEVTRRLAEIADPAIERGFHLSTRLHLLTWGDQRGR

SEQ ID NO: 27725 - protein, 234 aa, Amycolatopsis saalfeldensis
  misc_feature (1)..(234): tr|A0A1H8YMG8|A0A1H8YMG8_9PSEU 7-carboxy-7-deazaguanine synthase OS=Amycolatopsis saalfeldensis OX=394193 GN=q ueE PE=3 SV=1
MNTLALAPERVEGSAILTEKFESFQGEGPWTGQRCVFVRFSRCNLKCGFCDTPESWDWSRYNPSEASEKVPVTELVSWVRDRAVDMMVITGGEPMLQQPAMAALARGAKGIRVQVETNGTLAPTPELASRVDLWVVSPKLANSGMNYSARIKPDALAALVTTGRAAFKFVVSDPDRDLDEIAQLVTEYGLGPVWVMPEGTTREKVLAGMDALYTPATERGWNVSTRLHILTGAR

SEQ ID NO: 27726 - protein, 221 aa, Amycolatopsis sp.
  misc_feature (1)..(221): tr|A0A229TFX7|A0A229TFX7_9PSEU 7-carboxy-7-deazaguanine synthase OS=Amycolatopsis sp. H5 OX=1905142 GN=queE PE =3 SV=1
MQGEGPSAGRRASFVRLGGCNLACGWCDTPYTWDGNRFDLRAELARQPVEAIVDRALAGSPELVVISGGEPLLHQLQPAWTRMLTMLRAAGADIEVETNGTIVPTAATLEPDLAVRFNVSPKLAHSGDPAARRIRPDVLAAFVASGRANFKFVCATPDDVDEAAELADRYHLDAPVWISPEGTTVEAVLIHTKLIADRVIERGFNLGTRLHVLAWGNERGR

SEQ ID NO: 27727 - protein, 249 aa, Amycolatopsis sp.
  misc_feature (1)..(249): tr|A0A2K8MCF1|A0A2K8MCF1_9PSEU 7-carboxy-7-deazaguanine synthase OS=Amycolatopsis sp. AA4 OX=1896961 GN=queE P E=3 SV=1
MGRVRPGRAERSMTITLADDELLVAERFGPTVQGEGPSIGRRAVFIRLMNCNLTCKNCDTPYTWDRTRFDLDAEGTVASISDLLAWVTVQSVDLVVITGGEPLMQQRSLTALAQGLADAGLEVEVETNGTIVPAPDLLAWVTRFNVSPKLSSFGAGMPISKRIKGRVLGHFAASGLAVFKFVVSSIADLDEITELVADHDLAPVYVMPEGRTAEEVTRRLAEIAEPAIERGFHLTTRLHVLVWGDQRGR

SEQ ID NO: 27728 - protein, 239 aa, Amycolatopsis sulphurea
  misc_feature (1)..(239): tr|A0A2A9FH04|A0A2A9FH04_9PSEU 7-carboxy-7-deazaguanine synthase OS=Amycolatopsis sulphurea OX=76022 GN=queE P E=3 SV=1
MKLPDVSDADGGLVVNETFGPTFQGEGPSTGRYAHFIRLFGCHLSCAWCDSPHTHDTRYDLDAEQRVLSIEDILSWLAADPADLLVITGGEPLLQAHLLGRLLCAIRERALATEIEIETSGTIAPTNMITSAVKRFNVSPKLAHSGLRRHQRIRPTVLRDFAEGGKAIWKFVVQELADLAEIQELADTYGLHPVWIMPEGTDSTTVLARMRMLADPVLARRWRLSTRLHTLLWENDRGR

SEQ ID NO: 27729 - protein, 248 aa, Amycolatopsis thailandensis
  misc_feature (1)..(248): tr|A0A229RUW3|A0A229RUW3_9PSEU 7-carboxy-7-deazaguanine synthase OS=Amycolatopsis thailandensis OX=589330 GN=q ueE PE=3 SV=1
MTTPRTLPLAPAHPGDRARLIVAECFGIQTPTFQGEGPSCGQPALFIRLSRCNLTCARCDTKYTWDWTTYDPRAESTRRSGADLADWATTSPVDLVVITGGEPLIQQRGLIPVVHRLLESGKRIEVETNGTLPPDPALLVEGVTFNVSPKLASFGVDERRSIIPHALDAFAASGRAVFKFVASTRPDLDRIADLADTHHLAPIWVMPEGASDTEIAARTRDLAGAVAARRWNFTTRLHIHAFDGARGR

SEQ ID NO: 27730 - protein, 211 aa, Amycolatopsis xylanica
  misc_feature (1)..(211): tr|A0A1H3PBT9|A0A1H3PBT9_9PSEU 7-carboxy-7-deazaguanine synthase OS=Amycolatopsis xylanica OX=589385 GN=queE P E=3 SV=1
MTYHIKEIFYTLQGEGRHAGRPAVFCRFSRCNLWTGLEKDRHRAICQFCDTDFVGTDGENGGKFRTPEALAEAVESLWPSESHEQRFVVCTGGEPLLQLDTAAIDALHAKGFEISVETNGTQAPPDGIDWLCVSPKLGSRLLVERGDELKLVYPQENGEPEQFEHLKFDSFRLQPMDGPDAEANTRAAVRYCLEHPLWHLSLQTHKYLGIA

SEQ ID NO: 27731 - protein, 265 aa, Anabaena cylindrica
  misc_feature (1)..(265): tr|K9ZKW7|K9ZKW7_ANACC 7-carboxy-7-deazaguanine synthas e OS=Anabaena cylindrica (strain ATCC 27899 / PCC 7122) OX=272123 GN=queE PE=3 SV=1
MIAKTIVKPTARLVEVFSAIQGEGLNVGTRQIFIRFGLCDLRCHFCDSAQTWDAPSVCKIERSPGLRDFEMHSNPVPLPILLQWVERQNLPSLHDSISLTGGEPLLHAPFLEQFLPEVRSLTNLPIYLETGGHRPEQLAMILPYLDSVGMDLKLPSVSGETHWTEHEKFLQLCFDANLEVFVKIIVSQRTDPGELKRSGMLVGGVHQDIPIFLQPVTPLADSEQFSQVPVLAPSPDQILEWQALMKQFVKQVRVIPQTHKMLKQM

SEQ ID NO: 27732 - protein, 208 aa, Anabaena sp.
  misc_feature (1)..(208): tr|A0A1B7VQG1|A0A1B7VQG1_9NOST 7-carboxy-7-deazaguanine synthase OS=Anabaena sp. WA113 OX=1710889 GN=queE PE=3 SV=1
MSLLKIKLPIHETFQSTVQGEGYWTGSLVDFIRLSGCPVRCPWCDTGYADGGANLPRLERSIGELLAEIKSPRVVITGGEPFIHKHLPALVQVLSTADKQVNIETSGSFWQEISPAAWITLSPKEHINSKYPVQSQFWSRANEVKIVIETGTEIDFYEKYLSTHPNLLVYLQPEWYSFSKSLPLIFQILQKKPDYKLSLQTHKYIGVQ

SEQ ID NO: 27733 - protein, 208 aa, Anabaena sp.
  misc_feature (1)..(208): tr|A0A1B7V031|A0A1B7V031_9NOST 7-carboxy-7-deazaguanine synthase OS=Anabaena sp. AL09 OX=1710891 GN=queE PE=3 SV=1
MSLLKIKLPIHETFQSTVQGEGFWTGCLVDFIRLSGCPVGCPWCDTGYADPGANLPRVERPIAELLAEIKSPRVVISGGEPFIHKHLPDLVQALLAADKRVNIETSGSFWQEVSPAAWITLSPKEHINPKYPVKSQFWSRANEVKIVIETGGEIDFYQEHLSTHPNLLVYLQPEWNSSSKSIPLILQILQQKPDYKLSLQTHKYIGVQ

SEQ ID NO: 27734 - protein, 266 aa, Anabaenopsis circularis
  misc_feature (1)..(266): tr|A0A1Z4GM05|A0A1Z4GM05_9CYAN 7-carboxy-7-deazaguanine synthase OS=Anabaenopsis circularis NIES-21 OX=1085406 GN=queE PE=3 SV=1
MTANTTVEPTARLIEVFSAIQGEGLNVGTRQIFIRFALCDLRCHFCDSSHTWNAPTTCKVERSPGLRDFEIHSNPVPLTILLEWIKRQNLPLLHDSISVTGGEPLLHAPFLHEFLPQVRSLTGLPIYLETGGHRPDQLAMILPYLDSVGMDWKLPSVSGETYWQAHAKFLQLCHNNPSVDVFIKIIISQSTNPDELKQAALLIADINPNIPVFLQPVTPLPVAEQFTPTPILAPNPDQVLMWQVLMKKFVPHVRVVPQTHKMLNQL

SEQ ID NO: 27735 - protein, 241 aa, Anaerobacillus alkalidiazotrophicus
  misc_feature (1)..(241): tr|A0A1S2MAY1|A0A1S2MAY1_9BACI 7-carboxy-7-deazaguanine synthase OS=Anaerobacillus alkalidiazotrophicus OX=472 963 GN=queE PE=3 SV=1
MKIPVIEIFGPTIQGEGAVIGKKTIFIRTAGCDYQCSWCDSAFTWDGSGKEDITMMNAEEIFRELEKIGLDNFEHVTISGGNPALIKSLSTLIRLLKEKNFKVGLETQGSVWQDWMVEIDDLTISPKPPSSGMKTDFDRLEDILQLLTKRIDNGHVSIKVVIFNDKDLQYAKNVHKKFPAVPFYLQVGNEDLSDESNERLALMLIQKLEWLVSKVVVDPEFNNVRVLPQLHTLLWGNKKGV

SEQ ID NO: 27736 - protein, 241 aa, Anaerobacillus alkalilacustris
  misc_feature (1)..(241): tr|A0A1S2LXV6|A0A1S2LXV6_9BACI 7-carboxy-7-deazaguanine synthase OS=Anaerobacillus alkalilacustris OX=393763 G N=queE PE=3 SV=1
MKIPVIEIFGPTIQGEGAVIGKKTVFIRTAGCDYQCSWCDSAFTWDGSGKEDIAMMNAEEIFGELEKIGLDNFEHVTISGGNPALIKSLGTLIRLLKEKKIKVGLETQGSVWQDWMLEIDDLTVSPKPPSSGMETDFNRLEDIVQLLTKRIDNGHVSIKVVIFNDNDLQYAKDVHKKFPTVPFYLQVGNEDLSDESNERLALILIQKLEWLISKVVVDPELNNVRVLPQLHTLLWGNKKGV

SEQ ID NO: 27737 - protein, 241 aa, Anaerobacillus isosaccharinicus
  misc_feature (1)..(241): tr|A0A1S2MFH8|A0A1S2MFH8_9BACI 7-carboxy-7-deazaguanine synthase OS=Anaerobacillus isosaccharinicus OX=1532552 GN=queE PE=3 SV=1
MKIPVLEIFGPTIQGEGAVIGKKTVFIRTAGCDYQCSWCDSAFTWDGSGKDDIKMMTANEIVTELKAIGLENFQHVTISGGNPALLKQLGELIDILKELNLRIGLETQGTVWQDWMLNIDDLTISPKPPSSGMETNYSKLNEMIEQLTERVTNGHVSLKVVIFDDKDLNYAKKIHTKYSSVPFYLSVGNEDLTMENDVELAQKLLQKLDWLVGKVINDPEFNDARVLPQLHALLWGNKKGV

SEQ ID NO: 27738 - protein, 242 aa, Anaerobacillus macyae
  misc_feature (1)..(242): tr|A0A0J6CTA4|A0A0J6CTA4_9BACI 7-carboxy-7-deazaguanine synthase OS=Anaerobacillus macyae OX=157733 GN=queE PE =3 SV=1
MNKWLLPERSEYMKWELPMVEVFETVEGEGTRAGFPTVFVRVFHCNLRCSWCDTPYSYAPDKAEYTGSIEAIVDQISQYKSRQICFTGGEPLIHREKSMALLQAMVDLPHIEDIHIETNGAIDLTPYEAVRLEDKKWQEKVRFVMDYKLPDSGEQHRMLHENFNLLDTQDEIKFVIGSDEDFTVATDVVAKHHDKGQVLYSPVWETMPPHKLVEKILEAGLSKVKLSMQLHKIIWDPNKRGV

SEQ ID NO: 27739 - protein, 209 aa, Anaerobacterium chartisolvens
  misc_feature (1)..(209): tr|A0A369BI20|A0A369BI20_9FIRM 7-carboxy-7-deazaguanine synthase OS=Anaerobacterium chartisolvens OX=1297424 G N=queE PE=3 SV=1
MKVNEIFLSIQGEGLSSGFPTVFVRFAGCNLRCRYCDTVYAYYEGEEMTCPEIFNIIQKYGYKRVCLTGGEPLLQDGLDELLGLLKGYAVTIETNGSVRINKITMIEGHSFVMDMKAPSSGHDNDMLMENFDCLRENDEIKFVIGSRQDYEWAKSIIDSYHSKGSITFSPVYGTVSYQIIVDWILKDRLDVRFQLQLHKLIWDPSVRGV

SEQ ID NO: 27740 - protein, 222 aa, Anaerobium acetethylicum
  misc_feature (1)..(222): tr|A0A1D3TN71|A0A1D3TN71_9FIRM 7-carboxy-7-deazaguanine synthase OS=Anaerobium acetethylicum OX=1619234 GN=que E PE=3 SV=1
MAEYRVVEKFVSINGEGILAGQLAVFVRFQGCNLDCSFCDTAWANRENAPYTLMTEKEIYDYIKETGVRNVTLTGGEPLLQKDVRVLLELLASDPSIRIEIETNGSIDLTPFKDIGDSIAFTMDYKLPGSLMESRMDECNFDRLSAGDTVKFVAGSQEDLERARDIIEKHGLSEKCHVYISPVFGKIELESIVDYMKENRMNGVNMQLQMHKVIWNPESRGV

SEQ ID NO: 27741 - protein, 221 aa, Anaerobutyricum hallii
  misc_feature (1)..(221): tr|C0ERV4|C0ERV4_9FIRM 7-carboxy-7-deazaguanine synthas e OS=Anaerobutyricum hallii DSM 3353 OX=411469 GN=queE PE=3 SV=1
MITYPVVEKFVSINGEGQKAGKIAAFIRMRGCNLACNYCDTSWANTKDCPCEFLSAEELITWLKEHSIENVTLTGGEPLLTEEIAPLIEALGTAGFSVEIETNGSVSLNTFDTLAHRPAFTMDYKCPDSGMENAMNTDNFSLLIPKDTVKFVVSSISDLDKAREICIQYKVAEHCPIFLSPVFGRIEPKEIVEYMIEHHWNEARLQLQMHKFIWPPEQRGV

SEQ ID NO: 27742 - protein, 221 aa, Anaerobutyricum hallii
  misc_feature (1)..(221): tr|A0A174IXM9|A0A174IXM9_9FIRM 7-carboxy-7-deazaguanine synthase OS=Anaerobutyricum hallii OX=39488 GN=queE PE =3 SV=1
MITYPVVEKFVSINGEGQKAGEIAAFIRMRGCNLACNYCDTSWANTKDCPCEFLSAEELITWLKEHSIENVTLTGGEPLLTEEIAPLIEALGTAGFSVEIETNGSVSLNTFDTLAHRPAFTMDYKCPDSGMENAMNTDNFSLLIPKDTVKFVVSSISDLDKARKICIQYKVAEHCPIFLSPVFGRIEPKEIVEYMIEHHWNEARLQLQMHKFIWPPEQRGV

SEQ ID NO: 27743 - protein, 218 aa, Anaerococcus nagyae
  misc_feature (1)..(218): tr|A0A3E2TI01|A0A3E2TI01_9FIRM 7-carboxy-7-deazaguanine synthase OS=Anaerococcus nagyae OX=1755241 GN=queE PE= 3 SV=1
MKDKKLDINEIFYSIDGEGITAGQIAIFIRLNSCNLRCSYCDTSYALEAKNNYIDFDHIFDIINQYPSKNITITGGEPLYQQGIIDFIEQLSKRGYRVNIETNGSISVKGLIHIDKTIITLDIKTPYSNMDQENLYENLNYLRGNDVCKFVVGSIEDLEFTYKIIDKYKPKSQIFLSPVYNSIDTADIVEFMKIKGYDNVKLQLQIHKYIWDPDKRGV

SEQ ID NO: 27744 - protein, 217 aa, Anaeroglobus geminatus
  misc_feature (1)..(217): tr|G9YHC9|G9YHC9_9FIRM 7-carboxy-7-deazaguanine synthas e OS=Anaeroglobus geminatus F0357 OX=861450 GN=queE PE= 3 SV=1
MKVAEKFVSINGEGCRAGELALFIRFQGCNLSCSYCDTAWANEATCPYEDLSPAELRDYAVREGIKNITLTGGEPLLPEGLKELIGLFLAEGFHVEIETNGAVSLAPFCGASRPTFTVDYKLPDSGCEEAMVHANFDLLQRTDTVKFVVSSRRDLERAREVVDTYGLLFTCGVYVSPVFGSIEAEEIVEFMKARRLNGWRLQIQMHKVIWEPEKRGV

SEQ ID NO: 27745 - protein, 198 aa, Anaerolineaceae bacterium
  misc_feature (1)..(198): tr|A0A2E9ABE5|A0A2E9ABE5_9CHLR 7-carboxy-7-deazaguanine synthase OS=Anaerolineaceae bacterium OX=2024896 GN=qu eE PE=3 SV=1
MLKYPIVEIFHSVQGEGFHTGLPHVFVRFGNCNLRCEWCDTEFMTFEELGINEIVDKVLSYDCDRVIFTGGEPALQDLSSIGRRLKQHGISLSIETNGTIPIDPIIDWICVSPKDQIYPNVAIKQRSGDELKVVYCGQDLSIYDGLRLGFEHHYIQPCYMENESIEENGASFKIVEKLVKNNPGWRLSLQTQKWMGIL

SEQ ID NO: 27746 - protein, 221 aa, Anaeromicrobium sediminis
  misc_feature (1)..(221): tr|A0A267MD49|A0A267MD49_9CLOT 7-carboxy-7-deazaguanine synthase OS=Anaeromicrobium sediminis OX=1478221 GN=qu eE PE=3 SV=1
MMYKVVEHFISINGEGKRAGELALFIRFKGCNLTCSYCDTMWANREHTKFTFMNKEEIHNLIKESKVKNVTLTGGEPLLQDNMYELLEFISQDKSVNIEIETNGSVDIGTFSKLDNPPSFTLDYKLPSSNMEDLMYTNNYNYLKNSDVVKFVAGTKSDLDRAKEIIKKYDLTNKCHVYLSPSFEEITPAQIVEYMKENRLNDVKLQLQMHKFIWDPEERGV

SEQ ID NO: 27747 - protein, 210 aa, Anaeromyxobacter dehalogenans
  misc_feature (1)..(210): tr|B8JDE6|B8JDE6_ANAD2 7-carboxy-7-deazaguanine synthas e OS=Anaeromyxobacter dehalogenans (strain 2CP-1 / ATCC BAA-258) OX=455488 GN=queE PE=3 SV=1
MRVTEIFFSIQGEGSRAGRPCVFVRFTGCDLRCGYCDTAYAFHGGADMDRAAILAEVARHPARFVCLTGGEPMLQRELPDLARELLARGYEVAVETHGQRPLDALPAEAIRVVDVKTPGSGEVATDLAYLDRLQPHDEVKFVVCSEDDFRWSREVVRRHALEGRVQVLFSPAWGQVAPRDLVRWMLESGLDARLSLQVHKVVWGPDVHGV

SEQ ID NO: 27748 - protein, 210 aa, Anaeromyxobacter dehalogenans
  misc_feature (1)..(210): tr|Q2IQJ3|Q2IQJ3_ANADE 7-carboxy-7-deazaguanine synthas e OS=Anaeromyxobacter dehalogenans (strain 2CP-C) OX=29 0397 GN=queE PE=3 SV=1
MRVTEIFFSIQGEGSRAGRPCVFVRFTGCDLRCGYCDTAYAFHGGVDMDRAAVLAEVARHPARFVCLTGGEPMLQRELPDLARDLVARGYEVAVETHGQRPLDALPAEAIRVVDVKTPGSGEVTTDFAYLDRLQPHDEVKFVVCSEDDFRWSREVVRRHALEGRVQVLFSPAWGQVAPRDLVRWMLESGLDARLSLQVHKVIWGPDVHGV

SEQ ID NO: 27749 - protein, 210 aa, Anaeromyxobacter sp.
  misc_feature (1)..(210): tr|A7HD72|A7HD72_ANADF 7-carboxy-7-deazaguanine synthas e OS=Anaeromyxobacter sp. (strain Fw109-5) OX=404589 GN =queE PE=3 SV=1
MRVTEIFFSLQGEGTRAGRPCVFVRFTGCDLRCGYCDSAYAFHGGRELTRAEILAEIARHPAKLVCLTGGEPMLQRELPELARELVARGHEVTVETHGQRPLDALPPETIRIVDVKTPGSREEAKDLAYLDGLRPQDEVKFVVCSEPDYRWSVDVVRRHRLEGRAHLLFSPAWGEVEPRELARWILRDGLDARLSLQIHKVIWGPDARGV

SEQ ID NO: 27750 - protein, 210 aa, Anaeromyxobacter sp.
  misc_feature (1)..(210): tr|A0A0D6QGS9|A0A0D6QGS9_9DELT 7-carboxy-7-deazaguanine synthase OS=Anaeromyxobacter sp. PSR-1 OX=1300915 GN=q ueE PE=3 SV=1
MRVTEIFFSIQGEGSRAGRPCVFVRFTGCDLRCGYCDTAYAFHGGVDMDRAAILAEVARHPARFVCLTGGEPMLQRELPDLARDLVARGYEVAVETHGQRPLDALPAEAIRVVDVKTPGSGEVTTDFAYLDRLQPHDEVKFVVCSEEDFRWSREVVRRHALEGRVQVLFSPAWGQVAPRDLVRWMLESGLDARLSLQVHKVIWGPDVHGV

SEQ ID NO: 27751 - protein, 198 aa, Anaerosporomusa subterranea
  misc_feature (1)..(198): tr|A0A154BMD0|A0A154BMD0_ANASB 7-carboxy-7-deazaguanine synthase OS=Anaerosporomusa subterranea OX=1794912 GN= queE PE=3 SV=1
MTIVRYPIVEVFESLQGEGTHSGIGATFVRLAGCNLRCSWCDTTHSFAVDKATTYTTGELIEAFSFKQPLVVITGGEPTLHDLGPLVRELHNRKKYVCIETNGTNPIPIEWGINWITVSPKPQSGYTITCPADELKYVVDDEFKLEFIRFDLVKQGRVFLQIESGRLESAKKAYDMIIRNPDLHLRLGVQLHKVVGFE

SEQ ID NO: 27752 - protein, 222 aa, Anaerostipes caccae
  misc_feature (1)..(222): tr|B0ME52|B0ME52_ANACD 7-carboxy-7-deazaguanine synthas e OS=Anaerostipes caccae (strain DSM 14662 / NCIMB 1381 1 / L1-92) OX=411490 GN=queE PE=3 SV=1
MEVFKIAESFVSINGEGKKAGRLSMFIRLRGCNLNCSYCDTKWAISKKGEAELMTAAEVSQMVKESGVDLVTLTGGEPLLDENISGLIGSILSLPKMELEIETNGSIPIRPWRERDARLSMTMDYKLPSSGMEESMCLENMEELKPWDVVKFVIGTREDLEKAKEVIERFSLCEKAIVYFSPVFGAIPPDEIVEFMKEHRMNKVRFQIQIHKVVWDPERKGV

SEQ ID NO: 27753 - protein, 222 aa, Anaerostipes hadrus
  misc_feature (1)..(222): tr|A0A174LQ35|A0A174LQ35_ANAHA 7-carboxy-7-deazaguanine synthase OS=Anaerostipes hadrus OX=649756 GN=queE PE=3 SV=1
METFKVVETFVSINGEGKKAGRLAMFIRLKGCNLNCSYCDTTWANKRDARCELLTAPQIIERIKEAGVELVTLTGGEPLLDENVSELIGSILMMPKVEIEIETNGSVPIKYYKDRDNRLTMTMDYKLPSSNMEESMCLENMEYLKPWDVVKFVIGSREDLNRAKEIIERFSLCEKAIVYFSPVFGKIEPEEIVEFMKENKLNKVRFQIQIHKVVWDPDKTGV

SEQ ID NO: 27754 - protein, 222 aa, Anaerostipes hadrus
  misc_feature (1)..(222): tr|D4MWU1|D4MWU1_ANAHA 7-carboxy-7-deazaguanine synthas e OS=Anaerostipes hadrus OX=649756 GN=queE PE=3 SV=1
METFKVVETFVSINGEGKKAGRLAMFIRLKGCNLNCSYCDTTWANKRDARCELLTAPQIVERIKEAGVELVTLTGGEPLLDENVSELIGSILMMPKVEIEIETNGSVPIRYYKERDNRLTMTMDYKLPSSNMEENMCLENMEYLKPWDVVKFVIGSREDLNRAKEIIERFRLCEKAIVYFSPVFGKIEPEEIVEFMKENKLNKVRFQIQIHKVVWDPDKTGV

SEQ ID NO: 27755 - protein, 222 aa, Anaerostipes rhamnosivorans
  misc_feature (1)..(222): tr|A0A4P8IDL1|A0A4P8IDL1_9FIRM 7-carboxy-7-deazaguanine synthase OS=Anaerostipes rhamnosivorans OX=1229621 GN= queE PE=3 SV=1
METFKIAESFVSINGEGKKAGRLAMFIRLRGCNLNCSYCDTKWAISKKGDAELMTAPETAQMVKEAGVELVTLTGGEPLLDENISGLIGSILALPKVELEIETNGSIPIRPWRERDARLSMTMDYKLPSSGMEESMCLENMEELKPWDVVKFVIGTREDLERAKEITDRFSLCERAIVYFSPVFGALLPEEIVEFMKEHKLNKVRFQIQIHKVVWDPEQKGV

SEQ ID NO: 27756 - protein, 222 aa, Anaerostipes sp.
  misc_feature (1)..(222): tr|R6QNP5|R6QNP5_9FIRM 7-carboxy-7-deazaguanine synthas e OS=Anaerostipes sp. CAG:276 OX=1262699 GN=queE PE=3 S V=1
MEVFKIAESFVSINGEGKKAGRLSMFIRLRGCNLNCSYCDTKWAISKKGEAELMTAAEVSQMVKESGVDLVTLTGGEPLLDENISELIGGILSLPKMELEIETNGSIPIRPWRERDARLSMTMDYKLPSSGMEESMCLENMEELKPWDVVKFVIGTREDLEKAKEVIERFSLCEKAIVYFSPVFGAIPPDEIVEFMKEHRMNKVRFQIQIHKVVWDPERKGV

SEQ ID NO: 27757 - protein, 222 aa, Anaerostipes sp.
  misc_feature (1)..(222): tr|A0A1Q9JQ24|A0A1Q9JQ24_9FIRM 7-carboxy-7-deazaguanine synthase OS=Anaerostipes sp. 494a OX=1261636 GN=queE P E=3 SV=1
MEEYQVVETFISINGEGKKAGRLAMFIRLKGCNLDCSYCDTKWANERKAPFEWMTSKQITDRIVESGVQLVTLTGGEPLMNDNIGELIGSILMIPQVELEIETNGSMPIRFYKERDARLSMTMDYKLPSSFMEESMCLENMEYLKPWDVVKFVIGSREDLERAKEIIERFSLCEKAIVYFSPVFGQIEPVEIVEFMKEEHLNKVRFQIQIHKVVWDPEKTGV

SEQ ID NO: 27758 - protein, 243 aa, Anaerovibrio lipolyticus
  misc_feature (1)..(243): tr|A0A1M6E6T8|A0A1M6E6T8_9FIRM 7-carboxy-7-deazaguanine synthase OS=Anaerovibrio lipolyticus DSM 3074 OX=11209 97 GN=queE PE=3 SV=1
MNANLIEIFSSVQGEGRYVGCRQLFVRFEGCNLNCKYCDTENQAGTHPLCGVETFPGSRKFHDAINPLETTEVAAYINRFVMELPHQAISFTGGEPLLHTAFLQELLPMVTTKVMLETNGTLPDKLVQVIDRVDIISMDIKLPQATGEEHWEEHRRFLEIAKEKDVYVKLVVSGDINMDDYQKAIDLVAGVDPNILLILQPVTPLNGVEAALPEQMLELQQQALESLKDVRIIPQTHRMMDQL

SEQ ID NO: 27759 - protein, 243 aa, Anaerovibrio lipolyticus
  misc_feature (1)..(243): tr|A0A0B2K1S3|A0A0B2K1S3_9FIRM 7-carboxy-7-deazaguanine synthase OS=Anaerovibrio lipolyticus OX=82374 GN=queE PE=3 SV=1
MNANLIEIFSSVQGEGRYVGCRQLFVRFEGCNLNCKYCDTENQAGTHPLCGVETFPGSRKFHDAINPLETTEVAAYINRFVMELPHQAISFTGGEPLLHTAFLQELLPMVNTKVMLETNGTLPEKLARIIDIVDIISMDIKLPQATGEEHWDEHRRFLEIAKKKDVYVKLVVSGDINMDDYQRAVDLVAGVDPNILLILQPVTPLNGVEAARPEQMLELQQQALESLKDVRIIPQTHRMMDQL

SEQ ID NO: 27760 - protein, 243 aa, Anaerovibrio sp.
  misc_feature (1)..(243): tr|A0A3D4ALK6|A0A3D4ALK6_9FIRM 7-carboxy-7-deazaguanine synthase OS=Anaerovibrio sp. OX=1872532 GN=queE PE=3 S V=1
MNANLIEIFSSVQGEGRYVGCRQLFVRFEGCNLNCKYCDTENQAGTHPLCGVETFPGSRKFHDAINPLEPTEVAAYINRFVMELPHQAISFTGGEPLLHTVFLQELLPMVTTKVMLETNGTLPDKLVQIIDRVDIISMDIKLPQATGEEHWEEHRRFLEIAKKKDVYVKLVVSGDINMDDYQKAIDLVAGVDPNILLILQPVTPLNGVEAALPEQMLELQQQALESLKDVRIIPQTHRMMDQL

SEQ ID NO: 27761 - protein, 243 aa, Anaerovibrio sp.
  misc_feature (1)..(243): tr|A0A1X1Q644|A0A1X1Q644_9FIRM 7-carboxy-7-deazaguanine synthase OS=Anaerovibrio sp. JC8 OX=1240085 GN=queE PE =3 SV=1
MNANLIEIFSSVQGEGRYVGCRQLFVRFEGCNLNCKYCDTENQAGTHPICGVETFPGSRKFHDAINPLEPTEVAAYINRFTMELPHQAISFTGGEPLLHSAFLQELLPMVNTKVMLETNGTLPDRLARVIDMVDIISMDIKLPQATGEDHWDDHRRFLEIARAKDVYVKLVVSGDINMDDFQKAVDLVAGVDPDILLILQPVTPLNGVEAALPEQMLELQQQALESLHDVRIIPQTHRMMDQL

SEQ ID NO: 27762 - protein, 212 aa, Ancylomarina sp.
  misc_feature (1)..(212): tr|A0A425XWU7|A0A425XWU7_9BACT 7-carboxy-7-deazaguanine synthase OS=Ancylomarina sp. M1P OX=2283627 GN=queE PE =3 SV=1
MMRDKYKDIFEAGTDLPLVEDFYTIQGEGYHTGKPAYFIRIGGCDIGCRWCDSKISWNPKEHRLISVEEVVRKAVESPAKSVVVTGGEPSLYNLEPLCSELKKHNIENFLETSGAYEITGEWDWICLSPKANKAPVESSYKKANELKFIIFDLEKDFALAEEHAKLVGDDCLLYLQSEWSQYVHNIKAIVEYVKNNPKWNISLQSHKFMRIP

SEQ ID NO: 27763 - protein, 212 aa, Ancylomarina sp.
  misc_feature (1)..(212): tr|A0A4Q1JKX0|A0A4Q1JKX0_9BACT 7-carboxy-7-deazaguanine synthase OS=Ancylomarina sp. SHSM-M15 OX=2501299 GN=qu eE PE=3 SV=1
MMRDKYKEIFEAGTDLPLVEDFYTIQGEGYHTGKPAYFIRIGGCDIGCRWCDSKISWNPKEHRLISVEEVVRKAVESPAKSVVVTGGEPSLYNLEPLCTELKKHNIENFLETSGAYEITGEWDWICLSPKANKAPVASSYKKANELKFIIFDLEKDFALAEEHAKLVGDDCLLYLQSEWSQYVHNIKAIVEYVKNNPKWNISLQSHKFMRIP

SEQ ID NO: 27764 - protein, 211 aa, Ancylomarina subtilis
  misc_feature (1)..(211): tr|A0A4V2FT33|A0A4V2FT33_9BACT 7-carboxy-7-deazaguanine synthase OS=Ancylomarina subtilis OX=1639035 GN=queE P E=3 SV=1
MRDKYKEIFEAGTDLPLVEDFYTIQGEGYHTGKPAYFIRIGGCDIGCRWCDSKISWNPKEHRLISVEEVVRKAVESPAKSVVVTGGEPSLYNLEPLCTELKKHNIENFLETSGAYEITGEWDWICLSPKANKAPVESSYKKANELKFIIFDLEKDFALAEEHAKLVGDDCLLYLQSEWSQYVHNIKAIVEYVKNNPKWNISLQSHKFMRIP

SEQ ID NO: 27765 - protein, 208 aa, Anditalea andensis
  misc_feature (1)..(208): tr|A0A074KWY4|A0A074KWY4_9BACT 7-carboxy-7-deazaguanine synthase OS=Anditalea andensis OX=1048983 GN=queE PE=3 SV=1
MQVREEVAKGNMLPLMEAFYTIQGEGTFTGHPAYFIRLGGCDVGCVWCDVKDSWEGEKWPVKPIEEIVAEAERFPGRLVVITGGEPLMYNLGPITSLLKDRGFTINIETSGAHPFSGSFDWVCFSPKKFKAPHPSIYEKADELKVIVFHKSDIGFAEKHAAQVQSHCTLLLQPEWSKAREVSSLIVDYVKDHPNWKISLQTHKFMDIP

SEQ ID NO: 27766 - protein, 212 aa, Andreesenia angusta
  misc_feature (1)..(212): tr|A0A1S1V9A1|A0A1S1V9A1_9FIRM 7-carboxy-7-deazaguanine synthase OS=Andreesenia angusta OX=39480 GN=queE_1 PE= 3 SV=1
MLLKVNEIFLSIQGEGISAGYPTIFVRLTGCNLRCSYCDTTHAYNEGSDMAVEKVLEEIESLGYKRVCITGGEPLLQEKGLLKLLEGLSDYEVSIETNGSVDLSAFPLRENHRFTMDIKTPSSEESEQNRLENLKLLRDQDELKAVIGSRKDYLWALGVIDAHYIKGNITFSPIFGMIEPEEIINWILEDKRDIRFQIQIHKFIWNPDRRGV

SEQ ID NO: 27767 - protein, 227 aa, Andreesenia angusta
  misc_feature (1)..(227): tr|A0A1S1V5F6|A0A1S1V5F6_9FIRM 7-carboxy-7-deazaguanine synthase OS=Andreesenia angusta OX=39480 GN=queE_2 PE= 4 SV=1
MKVKGIQKSSFIDYPDKIVAVVFTGGCNFRCPYCHNRELVYNMGENIDEEELFSELEKRKKYLDGVCITGGEPTLQQGLDEFILKLKGMGYLIKLDTNGTSPKALRDLLERNLLDYIAMDIKAPIQNYRSVAIEKVDIETIEESIELIRESGVDYEFRTTICKELLSTADILKIAKRIKGSMKYTLQNYRDSGNILSGKSYTPYKKEELELLREEIKGYFGKFHIRY

SEQ ID NO: 27768 - protein, 214 aa, Andreprevotia lacus
  misc_feature (1)..(214): tr|A0A1W1X9W6|A0A1W1X9W6_9NEIS 7-carboxy-7-deazaguanine synthase OS=Andreprevotia lacus DSM 23236 OX=1121001 G N=queE PE=3 SV=1
MNDTLRITEIFFSLQGETSRMGRPTVFVRLTGCPLRCGYCDSAYAFHGGKTVSFDEIIAEIRKHPTNTVCVTGGEPLAQKYSLAFLKRLADEGFDVSLETSGAIAIDEVDPRISRIVDIKTPGSGELAKMRWENLAAIRPGDEIKFVLCDRADYEWARDLLRDKALTELAPVLFSPVWETLPPAELAQWVLADGLPVRMQVQLHKILWGEKPGV

SEQ ID NO: 27769 - protein, 240 aa, Aneurinibacillus aneurinilyticus
  misc_feature (1)..(240): tr|U1Y7V1|U1Y7V1_ANEAE 7-carboxy-7-deazaguanine synthas e OS=Aneurinibacillus aneurinilyticus ATCC 12856 OX=649 747 GN=queE PE=3 SV=1
MIDIEKLRRDLKLPMVELFETVEGEGRMAGYPTTFVRVFNCNLRCTWCDTPYSYAPEKAAFITSIAEIVERTVSYGHGVICLTGGEPLMHGVKSQSLIYHLSQLPTVWDIHIETNGAIDLMPFSSLREQDRSMGSKVRFVMDYKLPTSGETAKMHLENFFILGPQDEVKFVVGDEADFFHALNILGQHPTQATALFSPVWETMPPADLAALILRYRPQEGRARLNMQIHKVIWDPETRGV

SEQ ID NO: 27770 - protein, 241 aa, Aneurinibacillus danicus
  misc_feature (1)..(241): tr|A0A511V7U6|A0A511V7U6_9BACL 7-carboxy-7-deazaguanine synthase OS=Aneurinibacillus danicus OX=267746 GN=queE PE=3 SV=1
MSSITELYNKEWKLPMVELFETVEGEGKMTGYPTTFVRVFNCNLRCTWCDTPYSYAPEKPEFTATIDEISRRVESYGHGVVCLTGGEPLMHGDKSLALVYHLAHLSSVWDIHIETNGAVDLFPFVALREKDEAASDKVRFVMDYKLPISGETARMHLPNFSLLGAQDEVKFVVGDEADFFHALDILERYPTRATALFSPVWETMPPAELVQLLLRYRPQEGRARLNIQIHKVIWDPETRGV

SEQ ID NO: 27771 - protein, 240 aa, Aneurinibacillus migulanus
  misc_feature (1)..(240): tr|A0A0K2WK55|A0A0K2WK55_ANEMI 7-carboxy-7-deazaguanine synthase OS=Aneurinibacillus migulanus OX=47500 GN=que E PE=3 SV=1
MIDMKELRRDFKLPMVELFETVEGEGRMAGYPTTFVRVFNCNLRCTWCDTPYSYAPEKAAFTASIEEIVEQTASYGHGVICLTGGEPLMHGLKSQALVYHLSQLPTVWDIHIETNGAINLMPFSLLRERDGSMGRKVRFVMDYKLPASGETAKMYLSNFSILEPQDEVKFVVGDEADFFHALDILKRYPTRATALFSPVWETMPPADLVSLILRHRPQEGKARLNMQIHKVIWDPEARGV

SEQ ID NO: 27772 - protein, 240 aa, Aneurinibacillus migulanus
  misc_feature (1)..(240): tr|A0A0D1Y434|A0A0D1Y434_ANEMI 7-carboxy-7-deazaguanine synthase OS=Aneurinibacillus migulanus OX=47500 GN=que E PE=3 SV=1
MIDMKELRRDFKLPMVELFETVEGEGRMAGYPTTFVRVFNCNLRCTWCDTPYSYAPEKAAFTASIEEIVEQTASYGHGVICLTGGEPLMHGLKSQALVYHLSQLPTVWDIHIETNGAINLMPFSLLRERDGSMGRKVRFVMDYKLPASGETAKMHLSNFSILEPQDEVKFVVGDEADFFHALDILTRYPTRATALFSPVWETMPPADLVTLILRHRPQEGKARLNMQIHKVIWDPEARGV

SEQ ID NO: 27773 - protein, 241 aa, Aneurinibacillus soli
  misc_feature (1)..(241): tr|A0A0U5B088|A0A0U5B088_9BACL 7-carboxy-7-deazaguanine synthase OS=Aneurinibacillus soli OX=1500254 GN=queE P E=3 SV=1
MTDSAISFPDTWELPFVEVFETVEGEGMMAGYPTTFVRVFHCNLRCTWCDTPYSYAPAQPEFVASIKEIVARVQEYGHGVICLTGGEPLMHGEKSQALLYHLARQPYVRDVHVETNGAIDLEPFVRLRQEMRESGTPIRFIMDYKLPDSGETARMHLPNMALLAERDELKFVVASEEDFSHALTVLTDYPTEAVVSFSPVWESMPPARLVELLLVHRPNEGRARLSLQLHKIIWDPQQRGV

SEQ ID NO: 27774 - protein, 238 aa, Aneurinibacillus sp.
  misc_feature (1)..(238): tr|A0A0X8D9F0|A0A0X8D9F0_9BACL 7-carboxy-7-deazaguanine synthase OS=Aneurinibacillus sp. XH2 OX=1450761 GN=que E PE=3 SV=1
MLGTSGIQYDMKIPMVEIFQTVEGEGTRAGFPTTFVRVFNCNLRCTWCDTKYSYAPYKPEFTATIGEIVEQVKRFPNKHICLTGGEPLIHGERSLMLLKALAEIDYIEDIHIETNGAINISEVCRFRESHPNFKKKIRFILDYKLPSSGEMKKMILENFDYSQDNDEVKFVISDSNDFEVATRILKKLYKKGTVLFSPVWETMPPDKLVNLVLSNQLVNVKVSLQLHKIIWDPNKRGV

SEQ ID NO: 27775 - protein, 242 aa, Aneurinibacillus sp.
  misc_feature (1)..(242): tr|A0A120HSN6|A0A120HSN6_9BACL 7-carboxy-7-deazaguanine synthase OS=Aneurinibacillus sp. XH2 OX=1450761 GN=que E PE=3 SV=1
MHNLAWEELHTDLKVPMVELFETVEGEGRMAGYPTVFIRIFHCNLRCTWCDTTYSYAPEKPAFTASICEIVDRVSAYGHGVVCLTGGEPLMHGVKSLALVYHLARIPHVWDIHIETNGAIDLQPFQALREREKEVREKVRFVMDYKLPASGETERMHVPNLALLEERDEVKFVVGNEADFMYALDVLKRHPTRATALFSPVWETMPPADLVSFLLKYRPQEGRARLNMQIHKVIWDPEARGV

SEQ ID NO: 27776 - protein, 238 aa, Aneurinibacillus thermoaerophilus
  misc_feature (1)..(238): tr|A0A1G8BMK2|A0A1G8BMK2_ANETH 7-carboxy-7-deazaguanine synthase OS=Aneurinibacillus thermoaerophilus OX=14349 5 GN=queE PE=3 SV=1
MLGTSGIQYDMKIPMVEIFQTVEGEGTRAGFPTTFVRVFNCNLRCTWCDTKYSYAPYKPEFTATIGEIVEQVKRFPNKHICLTGGEPLIHEERSLMLLKALAEIDYIEDIHIETNGAINISEVCRFRESHPNFKKKIRFILDYKLPSSGEMKKMILENFYYLQDNDEVKFVISDSNDFEVATRILKKLYKKGTVLFSPVWETMPPDKLVNLVLSNQLVNVKVSLQLHKIIWDPNKRGV

SEQ ID NO: 27777 - protein, 242 aa, Aneurinibacillus thermoaerophilus; identical to SEQ ID NO: 27775
  misc_feature (1)..(242): tr|A0A1G7WYH3|A0A1G7WYH3_ANETH 7-carboxy-7-deazaguanine synthase OS=Aneurinibacillus thermoaerophilus OX=14349 5 GN=queE PE=3 SV=1

SEQ ID NO: 27778 - protein, 244 aa, Anoxybacillus amylolyticus
  misc_feature (1)..(244): tr|A0A4R1GCL5|A0A4R1GCL5_9BACI 7-carboxy-7-deazaguanine synthase OS=Anoxybacillus amylolyticus OX=294699 GN=qu eE PE=3 SV=1
MARTIPVLEIFGPTIQGEGMVIGQKTMFVRTAGCDYRCRWCDSAFTWDGSAKDEIEQLTADEIWRRLEAIGGRRFRHVTISGGNPLLIAALGELIALLHEKGMRVAVETQGSRWQDWLLDIDDVTLSPKPPSSGMDTDWAALDQIIERLQADQSRVRRISLKVVVFDDADLAYAKEVHCRYPSVPFYLQAGNADVADSDVDALRAKLFSRLEWLVEQAADSEELADVHILPQLHALLWGNKRGV

SEQ ID NO: 27779 - protein, 242 aa, Anoxybacillus amylolyticus
  misc_feature (1)..(242): tr|A0A160F3N8|A0A160F3N8_9BACI 7-carboxy-7-deazaguanine synthase OS=Anoxybacillus amylolyticus OX=294699 GN=qu eE PE=3 SV=1
MMKIPVLEIFGPTIQGEGMVIGQKTMFVRTAGCDYRCHWCDSAFTWDGSAKAEIMQMTAEDIWRELTVLGGNRFSHVTISGGNPALLKGLDELITLLKGKGIRIALETQGSCWQEWFYAIDDLTISPKPPSSGMETDFAVLDDIIEKLVKAGRKENVSLKVVVFDDADFAYATYVHKRYPLIPFYLQVGNEGVRETDDGTLRAKLLHQLEWLVEKVVQSSDMNDVRVLPQLHTLLWGNKRGV

SEQ ID NO: 27780 - protein, 240 aa, Anoxybacillus ayderensis
  misc_feature (1)..(240): tr|A0A0D0G4L1|A0A0D0G4L1_9BACI 7-carboxy-7-deazaguanine synthase OS=Anoxybacillus ayderensis OX=265546 GN=queE PE=3 SV=1
MERIPVIEIFGPTIQGEGMVIGQKTMFVRTAGCDYRCRWCDSSFTWDGSAKDEIKQMTAEDIWQQLKQLGGDRFNHVTISGGNPALLKSLHALISLLKQHRMRIGLETQGSVWQDWFYDIDDFTISPKPPSSNMETNFAMLDTIMDRLASHRGQVSIKVVVFNDEDFAYAKHVHQRYPTVPFYVQVGNDDIHEGDDVTLRLKLLQKLEWLVEQVVQSNEMNDVRVLPQLHTLLWGNRRGV

SEQ ID NO: 27781 - protein, 240 aa, Anoxybacillus ayderensis
  misc_feature (1)..(240): tr|A0A1X6MC72|A0A1X6MC72_9BACI 7-carboxy-7-deazaguanine synthase OS=Anoxybacillus ayderensis OX=265546 GN=queE PE=3 SV=1
MERIPVIEIFGPTIQGEGMVIGQKTMFVRTAGCDYRCRWCDSSFTWDGSAKDEIKQMTAEDIWQQLKQLGGDRFNHVTISGGNPALLKSLHALISLLKQHRMRIGLETQGSVWQDWFYDIDDFTISPKPPSSNMETNFAMLDTIMDRLASHRGQVSIKVVVFNDEDFAYAKHVHQRYPAVPFYVQVGNDDIHEGDDVTLRLKLLQKLEWLVEQVVQSNEMNDVRVLPQLHTLLWGNRRGV

SEQ ID NO: 27782 - protein, 240 aa, Anoxybacillus flavithermus
  misc_feature (1)..(240): tr|B7GLA2|B7GLA2_ANOFW 7-carboxy-7-deazaguanine synthas e OS=Anoxybacillus flavithermus (strain DSM 21510 / WK1 ) OX=491915 GN=queE PE=3 SV=1
MEHIPVIEMFGPTIQGEGMVIGQKTMFVRTAGCDYRCRWCDSSFTWDGSAKNEVKQMTAEDIWQQLKQLGGDRFNHVTISGGNPALLKGLRALISLLKEHNIRIGLETQGSVWQDWFYDIDDLTISPKPPSSNMKTNFTMLDTIMERLTAHRGHVSLKVVVFDDEDFAYAKHVHQRYPTVPFYVQVGNDHIHEADDVTLRLQLLQKLEWLVEQVVQSNEMNDVRVLPQLHALLWGNRRGV

SEQ ID NO: 27783 - protein, 240 aa, Anoxybacillus flavithermus
  misc_feature (1)..(240): tr|R4G0Y6|R4G0Y6_9BACI 7-carboxy-7-deazaguanine synthas e OS=Anoxybacillus flavithermus NBRC 109594 OX=1315967 GN=queE PE=3 SV=1
MERIPVIEMFGPTIQGEGMVIGQKTMFVRTAGCDYRCRWCDSSFTWDGSAKDEVKQMTAEDIWQQLKQLGGDRFNHVTISGGNPALLKGLRALISLLKEHNIRIGLETQGSVWQDWFYDIDDLTISPKPPSSNMKTNFTMLDMIMERLTAHRGHVSLKVVVFDDEDFAYAKHVHQRYPTVPFYVQVGNDHIHEADDVTLRLQLLQKLEWLVDKVVQSKEMNNVRVLPQLHTLLWGNRRGV

SEQ ID NO: 27784 - protein, 240 aa, Anoxybacillus gonensis
  misc_feature (1)..(240): tr|M5R5F7|M5R5F7_9BACI 7-carboxy-7-deazaguanine synthas e OS=Anoxybacillus gonensis OX=198467 GN=queE PE=3 SV=1
MERIPVIEIFGPTIQGEGMVIGQKTMFVRTAGCDYRCRWCDSSFTWDGSAKDEIKQMTPEHIWQQLKQLGGDRFNHVTISGGNPALLKSLHALISLLKQHRMRIGLETQGSVWQDWFYDIDDLTISPKPPSSNMETNFAMLDTIMDRLAMHRGQVSLKVVVFNDEDFAYAKHVHQRYPTVPFYVQVGNDDIHEADDMTLRLKLLQKLEWLVEQVVQSNEMNDVRVLPQLHTLLWGNRRGV

SEQ ID NO: 27785 - protein, 240 aa, Anoxybacillus gonensis
  misc_feature (1)..(240): tr|A0A0A2SR73|A0A0A2SR73_9BACI 7-carboxy-7-deazaguanine synthase OS=Anoxybacillus gonensis OX=198467 GN=queE P E=3 SV=1
MERIPVIEIFGPTIQGEGRVIGQKTMFVRTAGCDYRCRWCDSSFTWDGSAKDEIKQMTPEHIWQQLKQLGGDRFNHVTISGGNPALLKSLHALISLLKQHRMRIGLETQGSVWQDWFYDIDDLTISPKPPSSNMETNFAMLDTIMDRLAMHRGQVSLKVVVFNDEDFAYAKHVHQRYPTVPFYVQVGNDDIHEADDITLRLKLLQKLEWLVEQVVQSNEMNDVRVLPQLHTLLWGNRRGV

SEQ ID NO: 27786 - protein, 240 aa, Anoxybacillus kamchatkensis
  misc_feature (1)..(240): tr|A0A4S3L1U3|A0A4S3L1U3_9BACI 7-carboxy-7-deazaguanine synthase OS=Anoxybacillus kamchatkensis OX=196180 GN=q ueE PE=3 SV=1
MERIPVIEIFGPTIQGEGMVIGQKTMFVRTAGCDYRCRWCDSSFTWDGSAKDEIKQMTPEHIWQQLKQLGGDRFNHVTISGGNPALLKSLHALISLLKQHRMRIGLETQGSVWQDWFYDIDDLTISPKPPSSSMETNFAMLDTIMDRLAMHRGQVSLKVVVFNDEDFAYAKHVHQRYPTVPFYVQVGNDDIHEADDMTLRLKLLQKLEWLVEQVVQSNEMNDVRVLPQLHTLLWGNRRGV

SEQ ID NO: 27787 - protein, 240 aa, Anoxybacillus kamchatkensis
  misc_feature (1)..(240): tr|A0A346DDC5|A0A346DDC5_9BACI 7-carboxy-7-deazaguanine synthase OS=Anoxybacillus kamchatkensis G10 OX=1212546 GN=queE PE=3 SV=1
MERIPVIEIFGPTIQGEGMVIGQKTMFVRTAGCDYRCRWCDSSFTWDGSAKDEIKQMTPEHIWQQLKQLGGDRFNHVTISGGNPALLKSLHALISLLKQHRMRIGLETQGSVWQDWFYDIDDLTISPKPPSSNMETNFAMLDTIMDRLAMHRGQVSLKVVVFNDEDFAYAKHVHQRYPTVPFYVQVGNDDIHEADDITLRLKLLQKLEWLVEQVVQSNEMNDVRVLPQLHTLLWGNRRGV

SEQ ID NO: 27788 - protein, 240 aa, Anoxybacillus pushchinoensis
  misc_feature (1)..(240): tr|A0A1I0U0I8|A0A1I0U0I8_9BACI 7-carboxy-7-deazaguanine synthase OS=Anoxybacillus pushchinoensis OX=150248 GN= queE PE=3 SV=1
MERIPVIEIFGPTIQGEGMVIGQKTMFVRTAGCDYRCRWCDSSFTWDGSAKHEVEWLTPEQIWQQLKQLGDDRFGHVTISGGNPALLKGLSALVTHLKEKGVRIGLETQGSVWHDSFDDIDDLTISPKPPSSNMETNFATLDMIMDRLATHRGRVSLKVVVFNDQDFSYATYVHQRYPSVPFYVQVGNDHIHEADDVTLRLNLLQKLEWLVEQVIQSKHMNDVCVLPQLHTLLWGNRRGV

SEQ ID NO: 27789 - protein, 243 aa, Anoxybacillus sp.
  misc_feature (1)..(243): tr|A0A160FA63|A0A160FA63_9BACI 7-carboxy-7-deazaguanine synthase OS=Anoxybacillus sp. B7M1 OX=1490057 GN=queE PE=3 SV=1
MGKTIPVLEIFGPTIQGEGMVIGQKTMFVRTAGCDYSCRWCDSAFTWDGTAKEEIQQMTAEEIWQRLAEIGRDCFSHVTISGGNPALLKSLGELVRLLKAKGIRVALETQGSRWQDWFYEIDDLTISPKPPSSGMKTHFAILDEIMDKLTANGRTVHMSLKVVVFDERDFAYAKHVHQRYRHIPFYLQVGNDDVAGMDEAMLRTKLLNQLRWLVERVAYDPEMNDVRVLPQLHTLLWGNKRGV

SEQ ID NO: 27790 - protein, 240 aa, Anoxybacillus sp.
  misc_feature (1)..(240): tr|A0A094JUW6|A0A094JUW6_9BACI 7-carboxy-7-deazaguanine synthase OS=Anoxybacillus sp. KU2-6(11) OX=1535751 GN= queE PE=3 SV=1
MERIPVIEIFGPTIQGEGMVIGQKTMFVRTAGCDYRCRWCDSSFTWDGSAKDDIQQMTAEDVWQQLKQLGGDRFNHVTISGGNPALLKGLRALISLLKEHNIRIGLETQGSVWQDWFYDIDDLTISPKPPSSNMKTNFATLDTIMEQLTAHRGHVSLKVVVFDDEDFAYAKHVHERYPTVPFYVQVGNDELQEADDVTLRLKLLQKLEWLVEQVVQSNEMNDVRVLPQLHTLLWGNRRGV

SEQ ID NO: 27791 - protein, 240 aa, Anoxybacillus suryakundensis
  misc_feature (1)..(240): tr|A0A0K6GKJ1|A0A0K6GKJ1_9BACI 7-carboxy-7-deazaguanine synthase OS=Anoxybacillus suryakundensis OX=1325335 GN =queE PE=3 SV=1
MERIPVIEIFGPTIQGEGMVIGQKTMFVRTAGCDYRCRWCDSSFTWDGSAKHEIKQMTAEAIWQQMKQLGGDRFNHVTISGGNPALLKGLRALISLLKEHNMRIGLETQGSVWQDWFYDIDDLTISPKPPSSNMETNFATLDTMMERLTAHRGHVSLKVVVFDDEDFVYAQHVHERYPTVPFYVQVGNDDIHEADDVALRLKLLQKLEWLVDKVVQSKEMNNVRVLPQLHTLLWGNRRGV

SEQ ID NO: 27792 - protein, 240 aa, Anoxybacillus thermarum
  misc_feature (1)..(240): tr|A0A0D0S081|A0A0D0S081_9BACI 7-carboxy-7-deazaguanine synthase OS=Anoxybacillus thermarum OX=404937 GN=queE PE=3 SV=1
MERIPVIEIFGPTIQGEGMVIGQKTMFVRTAGCDYRCRWCDSSFTWDGSAKDEIKQMTAEHIWQQLKQLGGDRFNHVTISGGNPALLKSLRALISLLKQHRMRIGLETQGSVWQDWFYDIDDLTISPKPPSSNMETNFVMLDTIMNRLAMHRGQVSIKVVVFNDEDFAYAKHVHQRYPTVPFYVQVGNDDIHEGDDITLRLKLLQKLEWLVEQVVQSNEMNDVRVLPQLHTLLWGNRRGV

SEQ ID NO: 27793 - protein, 243 aa, Anoxybacillus vitaminiphilus
  misc_feature (1)..(243): tr|A0A327YSS9|A0A327YSS9_9BACI 7-carboxy-7-deazaguanine synthase OS=Anoxybacillus vitaminiphilus OX=581036 GN= queE PE=3 SV=1
MAKTIPVLEIFGPTIQGEGMVIGQKTMFVRTAGCDYSCRWCDSAFTWDGSAKEEIRQMTAEEVWHRLVELGGDRFSHVTISGGNPALIKALDELISLLKENKIRVALETQGSRWQDWFYDIDDLTISPKPPSSEMNTDFAVLDDIIERLNKRGRVANVSLKVVVFDEKDFAYAKFVHARYPNIPFYLQVGNDDVTELDDLTLRTKLLEKLEWLIEKTVQTKEMNDARVLPQLHALVWGNKRGV

SEQ ID NO: 27794 - protein, 224 aa, Anseongella ginsenosidimutans
  misc_feature (1)..(224): tr|A0A4R3KSE1|A0A4R3KSE1_9SPHI 7-carboxy-7-deazaguanine synthase OS=Anseongella ginsenosidimutans OX=496056 GN =queE PE=3 SV=1
MLNVDLERTSINQQVTAPPKEVPADGSFLPLMEEFYTIQGEGYNTGKAAYFIRLGGCDVGCHWCDVKESWDAALHPLTAADTIVANAARHPARAVVITGGEPLLYNLDYLCNELRKKGIKTFIETSGAYPLSGSWDWICLSPKKFKKPVPEILSLANELKVIVFNKSDFGWAEEHASHVSSLCKLYLQPEWSKAEETTPLIIDYVKENPRWQISLQTHKFMNIP

SEQ ID NO: 27795 - protein, 210 aa, Antarcticibacterium flavum
  misc_feature (1)..(210): tr|A0A5B7X3C4|A0A5B7X3C4_9FLAO 7-carboxy-7-deazaguanine synthase OS=Antarcticibacterium flavum OX=2058175 GN=q ueE PE=3 SV=1
MIKEETQELVDQGKMLPLMEAFYTIQGEGYHKGTAAYFIRIGGCDVGCHWCDVKESWNADLHPPTAVDTMVEEAVKYSKTIVITGGEPLTWDMGPLTSSLKEKGCAIHIETSGAYELTGHWDWICLSPKKIKLPTEEIYAVANELKVIVFNAHDLKFAEEQAAKVNNDCILYLQPEWSKREKMIPLIVDYVMKNPKWKVSLQTHKYLNIP

SEQ ID NO: 27796 - protein, 210 aa, Antarcticibacterium sp.
  misc_feature (1)..(210): tr|A0A5B8YPF0|A0A5B8YPF0_9FLAO 7-carboxy-7-deazaguanine synthase OS=Antarcticibacterium sp. PAMC 28998 OX=2585 771 GN=queE PE=3 SV=1
MIKEEINAQVEQGTMLPLMEAFYTIQGEGFHKGTAAYFIRIGGCDVGCHWCDVKESWNAELHPPTGVEAMVEEATKYSKTVVITGGEPLTWNMKPLTDKLKERGCKIHIETSGAYKLTGQWDWICLSPKKLKLPTEEIYKVANELKVIVFNAHDLKFAEEQAARVNSECILYLQPEWSKREKMIPLIVDFVMQNPKWKVSLQTHKYLNIP

SEQ ID NO: 27797 - protein, 208 aa, Aphanizomenon flosaquae
  misc_feature (1)..(208): tr|A0A1B7VYL4|A0A1B7VYL4_APHFL 7-carboxy-7-deazaguanine synthase OS=Aphanizomenon flos-aquae LD13 OX=1710894 G N=queE PE=3 SV=1
MSLLKIKLPIHETFQSTVQGEGYWTGSLVDFIRLSGCPVRCPWCDTGYADGGANLPRLERSIGELLAEIISPRVVITGGEPFIHKHLPALVQVLSTADKQVNIETSGSFWQEISPAAWITLSPKEHINSKYPVQSQFWSRANEVKIVIETGTEIDFYQKYLSTHPNLLVYLQPEWYSFSKSLPLIFQILQKKPDYKLSLQTHKYIGVQ

SEQ ID NO: 27798 - protein, 208 aa, Aphanizomenon flosaquae
  misc_feature (1)..(208): tr|A0A0B0QWN9|A0A0B0QWN9_APHFL 7-carboxy-7-deazaguanine synthase OS=Aphanizomenon flos-aquae 2012/KM1/D3 OX=15 32906 GN=queE PE=3 SV=1
MSFSEIKLPIHETFQSTVQGEGYWTGCLVDFIRLSGCPVACPWCDTGYADPRANLPRIERPIAELLGEIKSPRVVITGGEPFIHKHLPELVQALLVADKLVSIETSGSFWQEVSPAAWITLSPKEHLNAKYPVQSQFWSRANEVKIIIETGRELDFYEKYLSTHPNLLVYLQPEWNSSSKSLPLIFQILQQKPDYRLSLQTHKYIGVQ

SEQ ID NO: 27799 - protein, 205 aa, Aphanocapsa feldmannii
  misc_feature (1)..(205): tr|A0A524RMX9|A0A524RMX9_9CYAN 7-carboxy-7-deazaguanine synthase OS=Aphanocapsa feldmannii 277cV OX=2507553 GN =queE PE=3 SV=1
MAGSAVTSPSLPVLETFHSIQGEGTQTGFSAFFIRLGGCTVACPWCDTKHSWPMAGHPRRTLEELAAEARAHRPAFVLITGGEPLHHDLTELCAVLQQAGLAIHLETSGVDPLSGQFDWITLSPKAHRPPRPELLTACHALKVVVHSEDDLAFAVAMAARVAETTALLLQPGAGSETGQRLAIAFIKQHPRWRLSLQTHKWLGLR

SEQ ID NO: 27800 - protein, 205 aa, Aphanocapsa feldmannii; identical to SEQ ID NO: 27799
  misc_feature (1)..(205): tr|A0A524RKB1|A0A524RKB1_9CYAN 7-carboxy-7-deazaguanine synthase OS=Aphanocapsa feldmannii 288cV OX=2507555 GN =queE PE=3 SV=1

SEQ ID NO: 27801 - protein, 203 aa, Aphanothece cf.
  misc_feature (1)..(203): tr|A0A2T1F3A3|A0A2T1F3A3_9CHRO 7-carboxy-7-deazaguanine synthase OS=Aphanothece cf. minutissima CCALA 015 OX=2 107695 GN=queE PE=3 SV=1
MVETFHSLQGEGLHAGRSAFFIRLAGCDVGCPWCDTKHSWPQAAHPTRPLADLAAEASAAAVAGAAFVVITGGEPLQQPMDGLCKALAATGLPLHLETSGVGQLSGRFDWITLSPKPHRPPAADLLARCDELKVVVTSPADLAFAEAMAAEAARLRPPAAPGPALLLQPAWDEPAGRELAVAYVRAHPDWRLSLQSHKWLGVR

SEQ ID NO: 27802 - protein, 204 aa, Aphanothece hegewaldii
  misc_feature (1)..(204): tr|A0A2T1M289|A0A2T1M289_9CHRO 7-carboxy-7-deazaguanine synthase OS=Aphanothece hegewaldii CCALA 016 OX=210769 4 GN=queE PE=3 SV=1
MKTINRTLTYPIVETFHSVQGEGFWTGVNAYFIRLGGCDVYCPWCDQKESWNAKRHPQQSVNDLVQQAKNANPAIVIITGGEPLLHDLTPLTRQLKEYGLRTHLETSGSHPFSGVFDWVTFSPKQYKSPDESIYPQVQELKVVIANEDDLRWAQEQALLVPSHALKYLQSEWNTPSSQQLIFDYVLKHPEWRISLQSHKFLGVR

SEQ ID NO: 27803 - protein, 217 aa, Aphanothece sacrum
  misc_feature (1)..(217): tr|A0A401IN15|A0A401IN15_APHSA 7-carboxy-7-deazaguanine synthase OS=Aphanothece sacrum FPU1 OX=1920663 GN=queE PE=3 SV=1
MINNGYSLTLLAMKTIAPLIKTYPIVETFHSIQGEGAYMGVSAFFIRLAGCDVYCPWCDQKETWSVKPYAQQSIETLGNMAKNAKAAIIIITGGEPLMHDLNPLTKELQDLGLKVHLETSGSHPFTGEFDWVTFSPKPFKSPHDTIYPHVNELKIVIAQEKDLQWAQQQGQKVPVETLKYLQPEWNSPISQSLVFDYVLQHPEWRVSLQIHKFLGVQ

SEQ ID NO: 27804 - protein, 208 aa, Apibacter adventoris
  misc_feature (1)..(208): tr|A0A2S8ACW1|A0A2S8ACW1_9FLAO 7-carboxy-7-deazaguanine synthase OS=Apibacter adventoris OX=1679466 GN=queE PE =3 SV=1
MTGNDINLEMGLSLPIMEHFYTIQGEGRYTGTAAYFIRIGGCDVGCHWCDVKESWNANIHPIKKIDDIVKTAISFSKTIVLTGGEPLMWNLVPLTQKLKESGCNIHIETSGAYSINGQIDWICLSPKKTSLPKEDVYASAHELKVIVYNQHDFKFAEEQALKINKNALLYLQPEWSNREKMTPKIIDYVMKNPQWHISLQTHKYLNIP

SEQ ID NO: 27805 - protein, 209 aa, Apibacter mensalis
  misc_feature (1)..(209): tr|A0A0X3APU6|A0A0X3APU6_9FLAO 7-carboxy-7-deazaguanine synthase OS=Apibacter mensalis OX=1586267 GN=queE PE=3 SV=1
MKDIINRNLESGLSLPIMEHFYTIQGEGRYTGTAAYFIRIGGCDVECHWCDVKESWNPAIHPVSSVDKIAEIAASKCKTIVLTGGEPLMWNLEPLTIRLKNLGCRIHIETSGAYPLSGHIDWICLSPKKTALPLKSVYAKANELKVIIYNDHDFIFAEEQASNVNQNTILYLQPEWSKRNKVTTKIIDYVMKEPKWHISLQTHKYLNIP

SEQ ID NO: 27806 - protein, 207 aa, Apibacter sp.
  misc_feature (1)..(207): tr|A0A563DIU1|A0A563DIU1_9FLAO 7-carboxy-7-deazaguanine synthase OS=Apibacter sp. AL1 OX=2509005 GN=queE PE=3 SV=1
MNEQSDLDLGLSLPIMEHFYTIQGEGRHTGTSAYFIRIGGCDVGCHWCDVKESWNPDLHPVSSAEEIAKMAVKHSKTIVLTGGEPLMWNLSPLTSILKELGCTIHIETSGAYPMSGTIDWICLSPKKNSLPLKEIYEKTHELKMIIYNQHDFIFAEEQAEKVNNEALLYLQPEWSNREKMTPKIIDYVMKNPKWKISLQTHKYLNIP

SEQ ID NO: 27807 - protein, 209 aa, Apibacter sp.
  misc_feature (1)..(209): tr|A0A2S8ADH3|A0A2S8ADH3_9FLAO 7-carboxy-7-deazaguanine synthase OS=Apibacter sp. wkB309 OX=1679467 GN=queE PE =3 SV=1
MEDSITMDLESGLSLPIMEHFYTIQGEGRYTGTAAYFIRIGGCDVGCHWCDVKESWNPSIHPVSSVDKIAETAASQSKTIVLTGGEPLMWNLEPLTSRLKNLGCRIHIETSGSYPLSGHIDWICLSPKKTALPLESVYAKANELKVIVYNNHDFIFAEEQASKVNDNAILYLQPEWSNRNKVTPKIIDYVMKNSKWHVSLQTHKYLNIP

SEQ ID NO: 27808 - protein, 210 aa, Aquabacter spiritensis
  misc_feature (1)..(210): tr|A0A4R3M4F0|A0A4R3M4F0_9RHIZ 7-carboxy-7-deazaguanine synthase OS=Aquabacter spiritensis OX=933073 GN=queE P E=3 SV=1
MTYAVKEMFKTLQGEGAQAGRAAVFCRFAGCNLWSGREADRAQAVCRFCDTDFVGLDGEGGGRFADAAELSEALARVWGADRERRFVVFTGGEPLLQIDAPLIAAAHEAGFEIAIETNGTLPAPDGIDWICVSPKEGAALVQRRGHELKLVYPQPGLLPDQLAGLDFAHFFLQPMDGPARRENTAAAVAFCLDHPKWRLSLQTHKMIGIP

SEQ ID NO: 27809 - protein, 220 aa, Aquabacterium commune
  misc_feature (1)..(220): tr|A0A4R6RHZ6|A0A4R6RHZ6_9BURK 7-carboxy-7-deazaguanine synthase OS=Aquabacterium commune OX=70586 GN=queE PE= 3 SV=1
MSYSVKEMFYTLQGEGTHAGRPAVFCRFAGCNLWSGREADRATAVCRFCDTDFVGTDGLGGGKFEHAEALAVRIASFWPDTGAGRKGQRFVVLTGGEPLLQVDADLIDALHAEGFLIAVETNGTIAAPAGLDWVCVSPKAGSTVVQTSGHELKVVVPQAGFSEADLQAMSSWQFGQRRVQAMDSADAAARQHAAAWAVQWCLDHPDWLLSVQTHKSLGIR

SEQ ID NO: 27810 - protein, 220 aa, Aquabacterium olei
  misc_feature (1)..(220): tr|A0A2U8FNI4|A0A2U8FNI4_9BURK 7-carboxy-7-deazaguanine synthase OS=Aquabacterium olei OX=1296669 GN=queE PE=3 SV=1
MTYSVKEIFYTLQGEGTHAGRPAVFCRFAGCNLWTGREADRAEAVCRFCDTDFVGTDGLGGGKFATPAELAARIASFWPDTPAGSQGQRFVVLTGGEPLLQVDDALVLALHAQGFEIAVETNGTVAAPAGLDWICVSPKAGSTLVQTRGHELKVVVPQAGFTEDDLRAFEKLDFQQFRVQAMDSALPGARDQAMNWAVQWCLDHPRWLLSVQTHKTLGIR

SEQ ID NO: 27811 - protein, 220 aa, Aquabacterium sp.
  misc_feature (1)..(220): tr|A0A426VCC8|A0A426VCC8_9BURK 7-carboxy-7-deazaguanine synthase OS=Aquabacterium sp. SJQ9 OX=2493092 GN=queE PE=3 SV=1
MTYSVKEIFYTLQGEGTHAGRPAVFCRFAGCNLWTGREEDRPKAICQFCDTDFVGTDGLGGGKFGTAQDLAARIASFWPDTAQGRDGRRFVVLTGGEPLLQVDVELIEALHAQGFEIAVETNGTVAAPPGLDWICVSPKAGSTLVQTSGHELKLVVPQAGFDDAKLAEFEAMDFVQRRVQPMDSASPEARRHATEWAVQWCLDHPRWMLSVQTHKTLGIR

SEQ ID NO: 27812 - protein, 220 aa, Aquabacterium sp.
  misc_feature (1)..(220): tr|A0A0A0DML4|A0A0A0DML4_9BURK 7-carboxy-7-deazaguanine synthase OS=Aquabacterium sp. NJ1 OX=1538295 GN=queE P E=3 SV=1
MTYSVKEIFYTLQGEGTHAGRPAVFCRFAGCNLWTGREADRASAVCQFCDTDFVGTDGLGGGKFDTAQALAERIASFWPVTEAGAQGQRFVVMTGGEPLLQVDTALIEALHAKGFELAVETNGTIAAPAGLDWICVSPKAGSTLVQRSGHELKVVVPQAGFTEADLLAFEQLDFKQMRVQAMDSAQPQDRKKAMEWAVQWCLDHPRWLLSVQTHKTLGIR

SEQ ID NO: 27813 - protein, 242 aa, Aquamicrobium sp.
  misc_feature (1)..(242): tr|A0A4U6BZV7|A0A4U6BZV7_9RHIZ 7-carboxy-7-deazaguanine synthase OS=Aquamicrobium sp. LC103 OX=1120658 GN=queE PE=3 SV=1
MANVRIRVAEIFGPTIQGEGILIGLPTVFVRTGGCDYRCAWCDSLHAVDPAYRNDWSTMTTDAVWAKVKALSGGEPVMVSLSGGNPAIQPFGDLIRLGHEARYRFALETQGSVARDWFVDLDVLVLSPKPPSSGMDTDWHAFEDCLRAAGEGPQTALKIVVFDETDYAYARKAAARYPQLPLYLQPGNHTPPPADAQDAPIDITGVMKRMHWLVDRVARDRWFEARVLPQLHILLWGNRRGV

SEQ ID NO: 27814 - protein, 209 aa, Aquaspirillum sp.
  misc_feature (1)..(209): tr|A0A1U9JIN8|A0A1U9JIN8_9NEIS 7-carboxy-7-deazaguanine synthase OS=Aquaspirillum sp. LM1 OX=1938604 GN=queE P E=3 SV=1
MYTVKELFYSLQGEGHHTGRPAVFCRFSGCNLWSGREADRAKAQCRFCDTDFVGTGPDGGKFAQAEALAERIAALWPANCGGQRYVVCTGGEPLLQLDSPLVDALHAQGFEVAVETNGTLPAPRALDWICVSPKGTARLAQTWGHELKLVYPQADCQPEQLAHLDFRHFYLQALDDPAHPEHQQAALDYCLQHPRWKLSVQTHKWLNIR

SEQ ID NO: 27815 - protein, 213 aa, Aquicella lusitana
  misc_feature (1)..(213): tr|A0A370GF47|A0A370GF47_9COXI 7-carboxy-7-deazaguanine synthase OS=Aquicella lusitana OX=254246 GN=queE PE=3 SV=1
MDRLRISEIFFSLQGETRTVGLPTVFVRLTGCPLRCQYCDTAYAFQGGTWYNLEAILAEVRQYNARYVTVTGGEPLAQKPCLKLLQCLCDDGYEVSLETSGALDVSLVDPRVIKVVDIKTPGSGEVEKNNWQNIRSLLPHDQIKFVICNEADYEWAKSIIAQYDLNSVCQILFSPSYQQVLPGDLADWILRDRLAVRFQIQLHKYLWGDVAGR

SEQ ID NO: 27816 - protein, 213 aa, Aquicella siphonis
  misc_feature (1)..(213): tr|A0A5E4PEP2|A0A5E4PEP2_9COXI 7-carboxy-7-deazaguanine synthase OS=Aquicella siphonis OX=254247 GN=queE PE=3 SV=1
MDRLRISEIFYSLQGETRTVGLPTVFVRLTGCPLRCQYCDTAYAFQGGQWMEKEAVLAEVRKYTVRYVTVTGGEPLAQKSCLSLLTRLCDEGYEVSLETSGALSVAQVDPRVIKVVDVKTPGSSESEKNDWANFAHLLPHDQIKFVICDQADYEWAKQIMDQYRLASRCHVLFSPSYHQLKAGELADWILHDQLPVRLQIQLHKYLWGDVAGK

SEQ ID NO: 27817 - protein, 219 aa, Aquifex aeolicus
  misc_feature (1)..(219): sp|O67826|QUEE_AQUAE 7-carboxy-7-deazaguanine synthase OS=Aquifex aeolicus (strain VF5) OX=224324 GN=queE PE=3 SV=1
MLRNKVRKTDTLIALNEVYESIQGEGLLVGLPSVFIRLQGCNLRCPWCDQPEALSFSGRKVKLSSLINELKKFTAKHIVITGGEPFAHRELPFIVEFLLSEGYSVQIETNGTLWVEEMEKFAEGIHITCSPKGVAKYYVHPKILKYAKELKFVVDKEFSKEVLKKEEFERFLREGKVVLQPESNRKEMMEKALKIQKELLKECYTVRVIPQVHKCFDLK

SEQ ID NO: 27818 - protein, 219 aa, Aquifex sp.
  misc_feature (1)..(219): tr|A0A432PZT6|A0A432PZT6_9AQUI 7-carboxy-7-deazaguanine synthase OS=Aquifex sp. OX=313370 GN=queE PE=3 SV=1
MLRDKVRKTNTLIAINEIYESIQGEGLLVGLPSVFIRLQGCNLRCPWCDQPEALSFKKNYRKLSDLMKELTSFSAKHVVITGGEPFAHKELPSLVETLLDEGYSVQIETNGTLWIEDIDRLASRIHITCSPKAVARFFVHPKILLYAKELKFVVDEELNKEVLLRDEFKEFLRKGKVVLQPESNRKDMLEKAMSLQKELLMENFTVRVIPQVHKCFQIK

SEQ ID NO: 27819 - protein, 219 aa, Aquifex sp.
  misc_feature (1)..(219): tr|A0A432Q1Y1|A0A432Q1Y1_9AQUI 7-carboxy-7-deazaguanine synthase OS=Aquifex sp. OX=313370 GN=queE PE=3 SV=1
MLRDKVRKTNTLIALNEVYESIQGEGLLVGLPSIFIRLQGCNLRCPWCDQPEALTFSVKSTKLSVLIEEIKKFTAKHVVITGGEPFAHKELPYIVEALLSEGYSIQIETNGTLWVEGMEKFAKEIHITCSPKGVAKFFVHPQILNYARELKFVVDEELSKEILKRKEFERFLKEGKVVLQPESNRKEMMKKALKIQKELAKEGFTVRVIPQVHKCFDLK

SEQ ID NO: 27820 - protein, 213 aa, Aquificaceae bacterium
  misc_feature (1)..(213): tr|A0A432EXT3|A0A432EXT3_9AQUI 7-carboxy-7-deazaguanine synthase OS=Aquificaceae bacterium OX=2053503 GN=queE PE=3 SV=1
MPSLQITEIFYSLQGETKTSGLPTVFIRLTGCPLRCHYCDTEYAFTGGEAIKLARILTLVKSYKTHYVTVTGGEPLAQKECLNLLKMLCDEGYEVSLETSGAISLVGVDERVCQVMDLKTPASGEADKNLWGNLQYLKPSDQIKFVICDRDDYNWMKTIADAHDLYRRCEILVSPSFGEVDHRELADWILEDKLAVRYQLQLHKLLWDDEAGR

SEQ ID NO: 27821 - protein, 215 aa, Aquificaceae bacterium
  misc_feature (1)..(215): tr|A0A350CZE0|A0A350CZE0_9AQUI 7-carboxy-7-deazaguanine synthase OS=Aquificaceae bacterium OX=2053503 GN=queE PE=3 SV=1
MLRSEVRKASISINEVYPSIQGEGLLVGLPSLFIRVQGCNLRCPWCDQPSALPFKNPSTSLEDLISLVETYPHKHIVITGGEPFTEVSLPDLVKELLKMGKSVQIETNGTLWQEELEDVAENIHITCSPKAVAGWYVHQKIRKYAKELKFVVDENLNLDVLLAFEDFLKRSCVVLQPESNKAQFLEKALDLQNKLLHLGYEVRVLPQVHKLLGLK

SEQ ID NO: 27822 - protein, 214 aa, Aquificae bacterium
  misc_feature (1)..(214): tr|A0A3M0WEF0|A0A3M0WEF0_9BACT 7-carboxy-7-deazaguanine synthase OS=Aquificae bacterium OX=2202151 GN=queE PE= 3 SV=1
MVKTKKIKVVEIFKTVEGEGSWVGLPVSFIRLEGCNLRCPWCDTPYSYDGKSYKEYTIEEIFSSVEKFGLKRLCITGGEPFLTEELPDILEIFLKNGYKVLVETNGTLWNERIKDIFTENLFIVCSPKPPSYYIHPELIPYISELKFVVDSFITFENIYRKEILEKVRNKMIILQPESNLKDMVFKALDLQEKLLKKEIESRIIPQCHKVLGLP

SEQ ID NO: 27823 - protein, 218 aa, Aquificae bacterium
  misc_feature (1)..(218): tr|A0A3M2B0H5|A0A3M2B0H5_9BACT 7-carboxy-7-deazaguanine synthase OS=Aquificae bacterium OX=2202151 GN=queE PE= 3 SV=1
MLRDKAVRTATISLNEVYTSIQGEGLLVGTPCIFVRLQGCNLRCPWCDQPSALSFSQKGVEIGKVIDLVESFPHRHVVITGGEPFAHRNLHILVRELLSLGRSVQIETNGTLWQEEIDELASLLHITCSPKGEVNWYAHPKILEHAKELKFVVDEKLSPRVLLRGEFSKFLEKGLVVLQPEGNKKEFFTKALAIQEELLRLGLSVRVIPQVHKFLGLR

SEQ ID NO: 27824 - protein, 209 aa, Aquiflexum balticum
  misc_feature (1)..(209): tr|A0A1W2H227|A0A1W2H227_9BACT 7-carboxy-7-deazaguanine synthase OS=Aquiflexum balticum DSM 16537 OX=758820 GN =queE PE=3 SV=1
MENIIKEVKSGIKLPLMEAFYTIQGEGMHSGTAAYFIRLGGCDVGCVWCDVKESWDVSKWPEVDIEDIVDSALEYPGRLVVITGGEPLMHDLGPLTKLLKEKGFVTNIETSGVYPVTGEFDWICFSPKKFKKPHPSIYELADELKVVIYHQSDFAFAEKHAEKVKESCKKLLQPEWSKKDRMTEHIINYVKSSPNWKISLQTHKFMDIP

SEQ ID NO: 27825 - protein, 209 aa, Aquimarina aggregata
  misc_feature (1)..(209): tr|A0A163BC46|A0A163BC46_9FLAO 7-carboxy-7-deazaguanine synthase OS=Aquimarina aggregata OX=1642818 GN=queE PE =3 SV=1
MQESVQKLVNIGEMLPLMEEFYTIQGEGYHKGTAAYFIRIGGCDVGCHWCDVKESWNADLHPPTLTEKIVDNALKYSNVVVVTGGEPLTWDMTLLTQGLKSKGAQTHIETSGAYPLTGDWDWICLSPKKVKRPTKQIYGVANELKCIIYNKSDFAFAEEQAAKVSEDCILYLQPEWSVRDKMIPLMVDFVMKNPKWRVSLQTHKYLNIP

SEQ ID NO: 27826 - protein, 209 aa, Aquimarina algiphila
  misc_feature (1)..(209): tr|A0A554VLC3|A0A554VLC3_9FLAO 7-carboxy-7-deazaguanine synthase OS=Aquimarina algiphila OX=2047982 GN=queE PE =3 SV=1
MQESVQKLVNDGKMLPLMEEFYTIQGEGFHKGTAAYFVRIGGCDVGCHWCDVKESWNADLHPPTDTGLIIENSLKYSDVVVVTGGEPLTWDMSLLTQGLRDRGAKTHIETSGAYALTGEWDWICLSPKKVKLPKEEIYQKAHELKCIVYNKSDFAFAEEQAAKVSDHCILYLQPEWSVREKMIPMIVDYVMKNPKWKVSLQTHKYLNIP

SEQ ID NO: 27827 - protein, 209 aa, Aquimarina amphilecti
  misc_feature (1)..(209): tr|A0A1H7WEP0|A0A1H7WEP0_9FLAO 7-carboxy-7-deazaguanine synthase OS=Aquimarina amphilecti OX=1038014 GN=queE P E=3 SV=1
MQESTEKLVNEGRMLPLMEEFYTIQGEGYHKGTAAYFVRIGGCDVGCHWCDVKESWNAALHPPTSTRVIVDNAVKYSNVVVVTGGEPLTWDMSELTKGLKSKGAKTHIETSGAYTLTGNWDWICLSPKKVKLPTKEIYSKAHELKCIVYNKSDFDFAEEQASQVSKDCVLYLQPEWSVREKMIPLIVDYVMKNPKWKVSLQTHKYLNIP

SEQ ID NO: 27828 - protein, 209 aa, Aquimarina atlantica
  misc_feature (1)..(209): tr|A0A023BSL5|A0A023BSL5_9FLAO 7-carboxy-7-deazaguanine synthase OS=Aquimarina atlantica OX=1317122 GN=queE PE =3 SV=1
MQKSIQKLVNDGKMLPLMEEFYTIQGEGYHKGTAAYFVRIGGCDVGCHWCDVKESWNADLHPPTDTNVIVENALQYSDVIVVTGGEPLTWDMTMLTQGLKSKGAKTHIETSGAYPLTGEWDWICLSPKKVKLPKEEVYKKADELKCIVYNKSDFEFAERQADKVSDHCVLYLQPEWSVREKVIPLIVDYVMKNPKWKVSLQTHKYLNIP

SEQ ID NO: 27829 - protein, 209 aa, Aquimarina brevivitae
  misc_feature (1)..(209): tr|A0A4Q7NY32|A0A4Q7NY32_9FLAO 7-carboxy-7-deazaguanine synthase OS=Aquimarina brevivitae OX=323412 GN=queE PE =3 SV=1
MEKSINDLVAAGKMLPLMEEFYTIQGEGYHKGTAAYFIRVGGCDVGCHWCDVKESWNADVHPPTDVDKIIESASVFSDTIVVTGGEPLTWDMTYLTNGLKRKGMKTHIETSGAYKLTGQWDWICLSPKKMKPPTEEVYQKADELKCIVYNKSDFAFAEHQASKVGKDCLLYLQPEWSKRDKIIPLIVDYVMENPKWKVSLQTHKYLNIP

SEQ ID NO: 27830 - protein, 209 aa, Aquimarina sp.
  misc_feature (1)..(209): tr|A0A3A9W125|A0A3A9W125_9FLAO 7-carboxy-7-deazaguanine synthase OS=Aquimarina sp. AD10 OX=1714849 GN=queE PE= 3 SV=1
MQESVQKLVNIGEMLPLMEEFYTIQGEGYHKGTAAYFIRIGGCDVGCHWCDVKESWNADLHPPTLTEKIVDNALKYSNVVVVTGGEPLTWDMTLLTQGLKSKGAQTHIETSGAYPLTGDWDWICLSPKKVKLPTKQIYGVANELKCIIYNKSDFAFAEEQAAKVSEDCILYLQPEWSVRDKMIPLMVDFVMKNPKWRVSLQTHKYLNIP

SEQ ID NO: 27831 - protein, 209 aa, Aquimarina sp.
  misc_feature (1)..(209): tr|A0A3A9VK86|A0A3A9VK86_9FLAO 7-carboxy-7-deazaguanine synthase OS=Aquimarina sp. BL5 OX=1714860 GN=queE PE=3 SV=1
MQKSTEKLVNEGKMLPLMEEFYTIQGEGYHKGTAAYFVRIGGCDVGCHWCDVKESWNADLHPPTATDVIVENAVKYSNVVVVTGGEPLTWDMTELTKGLKNKGAQTHIETSGAYPLTGHWDWICLSPKKVKLPKQEIYSEAHELKCIIYNKNDFDFAEEQAAQVSENCVLYLQPEWSVRDKVIPLIVDYVMKNPKWKVSLQTHKYLNIP

SEQ ID NO: 27832 - protein, 209 aa, Aquimarina spongiae
  misc_feature (1)..(209): tr|A0A1M6KJF3|A0A1M6KJF3_9FLAO 7-carboxy-7-deazaguanine synthase OS=Aquimarina spongiae OX=570521 GN=queE PE=3 SV=1
MQKSTQELVNLGEMLPLMEEFYTIQGEGYHKGTAAYFIRIGGCDVGCHWCDVKESWNAELHPPTHTDFIVNTALKYSDVVVVTGGEPLTWDMTLLTKGLREGGAKTHIETSGAYSLSGEWDWICLSPKKVKLPVAEIYPMADELKCIVYNKSDFAFAEEQASKVSEDCILYLQPEWSVREKMIPLIVDYVMKNPKWKVSLQTHKYLNIP

SEQ ID NO: 27833 - protein, 245 aa, Aquimonas voraii
  misc_feature (1)..(245): tr|A0A1G6ZAH7|A0A1G6ZAH7_9GAMM 7-carboxy-7-deazaguanine synthase OS=Aquimonas voraii OX=265719 GN=queE PE=3 SV =1
MSTERRATNPPPSRASDSAVNPESPIPNPIAQSDRLRLTEIFLSLQGESRSVGWPTVFVRLTGCPLRCGYCDTAYAFHGGEWWEIEDILAEVARHGAHHVCVTGGEPLAQKRCLLLLERLCDAGYSVSLETSGAIDIAPVDLRVQRVIDLKTPGSGELAKNRWQNLDHLQPSDQIKFVVCDRADFDWAMQVTREHRLHERCEVLVSPSFGQVQAAELADWLLAEKLPIRFQMQLHKQLWGEAQGR

SEQ ID NO: 27834 - protein, 220 aa, Aquisalimonas asiatica
  misc_feature (1)..(220): tr|A0A1H8U1C5|A0A1H8U1C5_9GAMM 7-carboxy-7-deazaguanine synthase OS=Aquisalimonas asiatica OX=406100 GN=queE P E=3 SV=1
MNETTETARLRITEIFHSLQGEARSVGWPTVFVRLTGCPLRCHYCDTAYAFHGGDTRSLPEIMAEVQRHGSRHVTVTGGEPLAQRKGCHALLQALVDAGHEVSIETSGAMDIDGIDSRVSRVVDLKTPASGESSRNLWSNIELLEPNDQVKFVICDRADYEWACAVLADYALADRCEVLFSPSFGQLSGRDLADWVVADALPVRFQLQLHKLLWGDVPGR

SEQ ID NO: 27835 - protein, 366 aa, Aquisphaera giovannonii
  misc_feature (1)..(366): tr|A0A5B9W631|A0A5B9W631_9BACT 7-carboxy-7-deazaguanine synthase OS=Aquisphaera giovannonii OX=406548 GN=queE_ 2 PE=4 SV=1
MAVQLESIPSTVPTRYWHALEDGRVQCDLCPRLCKLHEGQRGFCFVRAREGDRIVLTTYGRSSGFCVDPIEKKPLYHFLPGTPVLSFGTAGCNLACKFCQNWDISKSRETDTLADSASPDVIANAAERLGCRSVAFTYNDPVIFHEYAIDVAEACRARGIKAVAVTAGEVCAEPRAEFYRVMDAANVDLKGFTERFYRDVCASSLRPVLETLKYLKHETPVWFELTTLLIPGENDSDGELDDLTRWVAEELGPDVPIHFSAFHPDYRMQDKPRTPAATLRRARSIAIGNGLRYAYVGNVHDPEADSTRCHACGHLLIGRDWYTLTGWDLTPDGRCPGCQAPCAGLFEAEPGTWGPRRQPVRLADFR

SEQ ID NO: 27836 - protein, 241 aa, Aquisphaera giovannonii
  misc_feature (1)..(241): tr|A0A5B9VYM6|A0A5B9VYM6_9BACT 7-carboxy-7-deazaguanine synthase OS=Aquisphaera giovannonii OX=406548 GN=queE_ 1 PE=3 SV=1
MISAASNSVDHPADALARRLKALRSKPPGSLVIHEIYRSLQGESTFMGLPCVFIRLTACHLRCVYCDTRHAFHEGGPMTLDEVVERALGFGDDLVEITGGEPLLQPEVLPLMSRLADLGKTVLLETSGAVDTSAVDPRVRVILDLKTPGSGEVAANIWRNLDHLRPTDELKLVLCDRRDFDWAVEIVRELRLLERCPVLFSAAAGRLNATELAGWILETRLPIRLQIQQHKVLWDPNARGV

SEQ ID NO: 27837 - protein, 209 aa, Aquitalea magnusonii
  misc_feature (1)..(209): tr|A0A318J672|A0A318J672_9NEIS 7-carboxy-7-deazaguanine synthase OS=Aquitalea magnusonii OX=332411 GN=queE PE= 3 SV=1
MYTVKEIFYTLQGEGRQAGRAAVFCRFAGCNLWSGREEDRSKAVCQFCDTDFVGTGPDGGKFASAAELAARIASEWPAGSGGTPYVVCTGGEPLLQLDAELIAALHAEGFEIAVETNGTIAAPAGIDWICVSPKAGAPLLQTSGNELKLVYPQATQLPETVAHLQFDTFYLQPMDGPELAANTRAAIAYCMAHPRWRLSVQTHKVVNIR

SEQ ID NO: 27838 - protein, 209 aa, Aquitalea magnusonii
  misc_feature (1)..(209): tr|A0A0F3K8X4|A0A0F3K8X4_9NEIS 7-carboxy-7-deazaguanine synthase OS=Aquitalea magnusonii OX=332411 GN=queE PE= 3 SV=1
MYTVKEIFYTLQGEGRQAGRAAVFCRFSGCNLWSGREEDRSKAVCQFCDTDFVGTGPDGGKFATAAELAARIASEWPAGSGGTPYVVCTGGEPLLQLDAALIEALHAEGFEIAVETNGTIAAPAGIDWICVSPKAGAPLLQTSGNELKLVYPQATQLPETVAHLQFDTFYLQPMDGPELAANTRAAIAYCMAHPRWRLSVQTHKVVNIR

SEQ ID NO: 27839 - protein, 209 aa, Aquitalea sp.
  misc_feature (1)..(209): tr|A0A454JMI9|A0A454JMI9_9NEIS 7-carboxy-7-deazaguanine synthase OS=Aquitalea sp. MWU14-2217 OX=2480983 GN=que E PE=3 SV=1
MYTVKEIFYTLQGEGRQAGRAAVFCRFAGCNLWSGREEDRSKAVCQFCDTDFVGTGPDGGKFATATELAAHIASQWPAGSGGTPYVVCTGGEPLLQLDAELIAALHAVGFEIAVETNGTIAAPDGLDWICVSPKAGAPLLQTSGNELKLVYPQATQLPETVAHLQFDTFYLQPMDGPELAANTRAAIAYCMAHPRWRLSVQTHKVVNIR

SEQ ID NO: 27840 - protein, 209 aa, Aquitalea sp.
  misc_feature (1)..(209): tr|A0A3N7CVS8|A0A3N7CVS8_9NEIS 7-carboxy-7-deazaguanine synthase OS=Aquitalea sp. FJL05 OX=2153366 GN=queE PE= 3 SV=1
MYTVKEIFYTLQGEGRQAGRAAVFCRFAGCNLWSGREEDRSKAVCQFCDTDFVGTGPDGGKFATAAALAARIASQWPAGSGGTPYVVCTGGEPLLQLDTELIAALHAEGFEIAVETNGTIAAPAGIDWICVSPKAGAPLLQTSGNELKLVYPQATQLPETVAHLQFDTFYLQPMDGPELAANTRAAIAYCMAHPRWRLSVQTHKVVNIR

SEQ ID NO: 27841 - protein, 247 aa, Arachidicoccus rhizosphaerae
  misc_feature (1)..(247): tr|A0A1H3X926|A0A1H3X926_9BACT 7-carboxy-7-deazaguanine synthase OS=Arachidicoccus rhizosphaerae OX=551991 GN= queE PE=3 SV=1
MSEVAMERAELQIQIDAGKSLPVMEAFYTLQGEGNYQGRAAYFIRLGGCDVGCVWCDVKESWDAELHPVKTVEQIVQDAIQEILSDIKAAEIASGAESMEALGDAAGTDMIRGCIVVVTGGEPLMYELGPLTKALHAAGFRVHIETSGAYPLSGEIDWVCVSPKKFKAPLPEVISRAQELKVVVFNKSDFLWAEQHAAQVSPDCKLYLQPEWSKEKQMLPLMIDYVKTHPLSTWSLCVQVHKYINVP

SEQ ID NO: 27842 - protein, 198 aa, Arachidicoccus sp.
  misc_feature (1)..(198): tr|A0A386HTK5|A0A386HTK5_9BACT 7-carboxy-7-deazaguanine synthase OS=Arachidicoccus sp. KIS59-12 OX=2341117 GN= queE PE=3 SV=1
MESFYTIQGEGFYQGRAAYFIRLGGCDVGCVWCDVKDSWDAAAHPSYSVEEIISKALNEVGGNAKNIIAVITGGEPLMYNLDALTNGLHKAGFQINIETSGAYTLSGNIDWICLSPKKFKEPLPEVIAKAQELKIIIYNKSDFAWAEKYAAQTPSECKLYLQPEWSKEKQMLPLMIDYIKQHPKWELSVQIHKYINVP

SEQ ID NO: 27843 - protein, 213 aa, Arachidicoccus sp.
  misc_feature (1)..(213): tr|A0A191TNL0|A0A191TNL0_9BACT 7-carboxy-7-deazaguanine synthase OS=Arachidicoccus sp. BS20 OX=1850526 GN=queE PE=3 SV=1
MEIINQTSQIKHTLPVMEAFYTIQGEGFYQGRAAYFIRLGGCDVGCVWCDVKESWDANLHPQQTVTKIVTDALQETNKAKNVIAVITGGEPLMYNLDELTNALQEVGFQTNIETSGAYSLSGNLDWICLSPKKFKAPLPEVIAKANELKIIIYNKSDFAWAEKYAAQTKPDCKLYLQPEWSKEKEMLPLIVDYIKQNPKWELSLQIHKYINVP

SEQ ID NO: 27844 - protein, 210 aa, Arboricoccus pini
  misc_feature (1)..(210): tr|A0A212RN74|A0A212RN74_9PROT 7-carboxy-7-deazaguanine synthase OS=Arboricoccus pini OX=1963835 GN=queE PE=3 SV=1
MTYAVKELFKTLQGEGARTGRAAVFCRFAGCNLWSGRERDRAEAVCRFCDTDFVGLDGEGGGRFADAASLASAIVDTWDGEEQLRYVVFTGGEPLLQLDQALVDAVRAAGFEVAVETNGTLLPPVPLDWVCVSPKARAELALASGDELKLVYPQDGLDPANFTGLDFRHFFLQPLDGPTREQNVQAAIAYCLAHPRWRLSLQTHKMIGIP

SEQ ID NO: 27845 - protein, 230 aa, Archangium gephyra
  misc_feature (1)..(230): tr|A0A2W5TLU0|A0A2W5TLU0_9DELT 7-carboxy-7-deazaguanine synthase OS=Archangium gephyra OX=48 GN=queE PE=3 SV=1
MLALRPHIEPRRIASADSVMVKEIYLSLQGESTHQGLLCAFVRLTGCHLRCTYCDSEFAFRGGTRMKNRDVVKEIVALNTPMVEVTGGEPLLQPGVYPLMEQLLDAGLTVLLETSGAIDVREVPDAVHAIVDMKTPSSGEVDRNDYKNFTSMDARDELKFVIGSREDFEWSVKLIREHQLTKKPFGMLFSSVFEKLHPQQLAQWIIDERLPVRFQLQQHKYVWEPNARGV

SEQ ID NO: 27846 - protein, 230 aa, Archangium gephyra
  misc_feature (1)..(230): tr|A0A0G2ZM07|A0A0G2ZM07_9DELT 7-carboxy-7-deazaguanine synthase OS=Archangium gephyra OX=48 GN=queE PE=3 SV=1
MPVARPHIEPRRVPTADSVVVKEFYLSVQGESSHAGLLCSFVRLTGCHLRCTYCDSEFAFHGGTRMKIPEVVARVKELGSPRVEVTGGEPLLQPGVYPLMEELLAAGLIVLLETSGAIDVRLVPPAVHKIVDMKTPSSGECDRNDYRNLTSMNANDELKFVIGSREDYEWSKKLIAEHRLLEKPYGLLFSTIFGKLTTKELAEWIIADRLPVRFQLQMHKYIWEPNERGV

SEQ ID NO: 27847 - protein, 230 aa, Archangium sp.
  misc_feature (1)..(230): tr|A0A1Q3H5B0|A0A1Q3H5B0_9DELT 7-carboxy-7-deazaguanine synthase OS=Archangium sp. Cb G35 OX=1920190 GN=queE P E=3 SV=1
MPVARPHIEPRRVPTADSVVVKEFYLSVQGESSHAGLLCSFVRLTGCHLRCTYCDSEFAFHGGTRMKIPEVVARVKELGAPRVEVTGGEPLLQPGVYPLMEELLASGLTVLLETSGAIDVRLVPPAVHKIVDMKTPSSGECERNDYRNLTSMNANDELKFVIGSREDYEWSKKLIAEHRLLEKPYGLLFSTIFGKLTTKELAEWIIADRLPVRFQLQMHKYIWEPNERGV

SEQ ID NO: 27848 - protein, 230 aa, Archangium violaceum
  misc_feature (1)..(230): tr|A0A084SRJ5|A0A084SRJ5_9DELT 7-carboxy-7-deazaguanine synthase OS=Archangium violaceum Cb vi76 OX=1406225 GN =queE PE=3 SV=1
MPVARPHIEPRRVPTADSVVVKEFYLSVQGESSHAGLLCSFVRLTGCHLRCTYCDSEFAFHGGTRMKIPEVVARVKELGAPRVEVTGGEPLLQPGVYPLMEELLAAGLIVLLETSGAIDVRLVPPAVHKIVDMKTPSSGECDRNDYRNLTSMNAQDELKFVIGSREDYEWSKKLITEHRLLEKPYGLLFSTIFGKLTTKELAEWIIEDRLPVRFQLQMHKYIWDPNERGV

SEQ ID NO: 27849 - protein, 209 aa, Arcicella aurantiaca
  misc_feature (1)..(209): tr|A0A316ED38|A0A316ED38_9BACT 7-carboxy-7-deazaguanine synthase OS=Arcicella aurantiaca OX=591202 GN=queE PE= 3 SV=1
MVTENIQSTTQALPVMEAFYTLQGEGFHQGRAAYFIRLGGCDVGCHWCDVKESWDINAHPKLSLEQIVEEASQHQGRLAVVTGGEPLMHNLEELTTALHQAGFETNIETSGVCEQVTGDWDWICFSPKKFKKPNPEIYPRANELKVIIYNQSDFEWAESFADVISSNCMLYLQPEWSRMETMLPEIIEYIKNNPKWRISLQVHKFMDIP

SEQ ID NO: 27850 - protein, 249 aa, Arcobacter anaerophilus
  misc_feature (1)..(249): tr|A0A4Q0XYF8|A0A4Q0XYF8_9PROT 7-carboxy-7-deazaguanine synthase OS=Arcobacter anaerophilus OX=877500 GN=queE PE=3 SV=1
MLEINEIFGPTIQGEGKLIGTPSIFIRVGKCNMKCVGFNVEYETPSGIKKCSCDSYYAVDTAFKEQWHKMLCEDIIKKVEELKPAYKVDIVITGGEPLLYWSNVEFQKLLKYYIENGYKVTIETNASLNIDFKEQYQKNILFSMSVKLSNSLEPLKKRVNTDTLTKILTNTKESYLKFVIDKKFIDTANKEIDSILEQIPKCDVYLMPMGDTADEINKNSEAVINMAIKNGFRYCDRLHIRVWDNKRGV

SEQ ID NO: 27851 - protein, 254 aa, Arcobacter aquimarinus
  misc_feature (1)..(254): tr|A0A4Q0UST3|A0A4Q0UST3_9PROT 7-carboxy-7-deazaguanine synthase OS=Arcobacter aquimarinus OX=1315211 GN=queE PE=3 SV=1
MLEINEIFGPTIQGEGKLVGTPSIFIRFGKCNFSCVGFAVEYETPSGIKKCACDSYYAVDTEFKDTWTKYKSYEEIVDEVNKLINIFQYNYKIDIVITGGEPLLYWNKKEFQKLLEHYINDGHNVTIETNASLNLNFEHEYQKKLLFSMSVKLSNSLEPIKKRINKETLTKILSNTKDSYLKFVIGKDFLTQAKKEIIEIIKEIPKCEVYLMPLGDTAEEINKNCEEVINMAIQNGFKYCDRLHIRVWDNKRGV

SEQ ID NO: 27852 - protein, 251 aa, Arcobacter bivalviorum
  misc_feature (1)..(251): tr|A0A345J048|A0A345J048_9PROT 7-carboxy-7-deazaguanine synthase OS=Arcobacter bivalviorum OX=663364 GN=queE P E=3 SV=1
MSLLEVNEIFGPTIQGEGKLVGTPSIFIRLGKCNFKCEGFNVEYETPSGIKKCSCDSYYAVDMAFKEQWQQMNAQQIIKEVLLLEPNYKIDIVITGGEPLLYWKNEEFQKLLKHYIENNYKVTIETNGSLNIDLTETYQKQILFSMSVKLSNSLEPLKKRVNVNTLTKIITETEGSYLKFVIDEGFKEEANIEIQNILSSIPKVDVFLMPMGDTAEQINKNSEAVINLAIENGYKYCDRLHIRVWDNKRGV

SEQ ID NO: 27853 - protein, 254 aa, Arcobacter butzleri
  misc_feature (1)..(254): tr|A0A2W5JSC4|A0A2W5JSC4_9PROT 7-carboxy-7-deazaguanine synthase OS=Arcobacter butzleri OX=28197 GN=queE PE=3 SV=1
MLEINEIFGPTIQGEGKLVGTPSIFIRFGKCNFSCTGFGVIYETPSGIKKCACDSYYAVDKEFKDTWTKYQSYNDIVAEVDNLISTYNYNYKIDIVITGGEPLLYWNKKEFQKLLKHYIENGHKVTIETNASLNINFEFDYQKEILFSMSVKLSNSLEPLNKRINKNTLVKILENTKDSYMKFVIGKDFLNKAKAEIIEILKDIPKCEVYLMPLGDTADEINKNCEDVINMAIENGFKYCDRLHIRVWNNKRGV

SEQ ID NO: 27854 - protein, 254 aa, Arcobacter butzleri
  misc_feature (1)..(254): tr|A8EWF3|A8EWF3_ARCB4 7-carboxy-7-deazaguanine synthas e OS=Arcobacter butzleri (strain RM4018) OX=367737 GN=q ueE PE=3 SV=1
MLEINEIFGPTIQGEGKLVGTPSIFIRFGKCNFSCTGFGVVYETPSGIKKYACDSYYAVDKEFKDTWTKYQSYNDIVAEVDNLISTYNYNYKIDIVITGGEPLLYWNKKEFQKLLKHYIENGHKVTIETNASLNINFEFDYQKEILFSMSVKLSNSLEPLNKRINKNTLVKILENTKDSYMKFVIGKDFLNKAKTEIIEILKDIPKCEVYLMPLGDTADEINKNCEDVINMAIENGFKYCDRLHIRVWNNKRGV

SEQ ID NO: 27855 - protein, 250 aa, Arcobacter canalis
  misc_feature (1)..(250): tr|A0A2G1CVX0|A0A2G1CVX0_9PROT 7-carboxy-7-deazaguanine synthase OS=Arcobacter canalis OX=1912871 GN=queE PE=3 SV=1
MLEVNEIFGPTIQGEGKRVGTASVFIRFGKCNFKCEGFAVEYETPSGIKKCACDSYYAVDPAFKDQWHTFSNANDLIEEVNKILPSYKCDIVITGGEPLLYWKNKEFQKLLKYYVTNDYKVTIETNASLNIYITEKYQEDILFSMSVKLSNSLEPLKKRVNIKTLTSIINKCKDKYLKFVVNKDFLTQANNEIQDILKQLPYVETYLMPMGDNTQEMNKNSEAVINLALENGFKYCDRLHIRVWDNKRGV

SEQ ID NO: 27856 - protein, 254 aa, Arcobacter cibarius
  misc_feature (1)..(254): tr|A0A5J6RF66|A0A5J6RF66_9PROT 7-carboxy-7-deazaguanine synthase OS=Arcobacter cibarius OX=255507 GN=queE PE=4 SV=1
MLEVNEIFGPTIQGEGKLIGTPSIFIRFGKCNFKCVGFNVEYETPSGIKKCACDSYYAVDMEFKDSWKKYKSHADIVDEVENLLSSFEYDFKIDIVITGGEPLLYWNNDEFQKLLEYYINRNHKVTIETNGSLNIDFTKEYQNKILFSMSVKLSNSLEPLKKRVNKLTLTKILTNTKESYLKFVIGDDFLTNAIVEIKEIIKDIPSCEIFLMPLGDTAENIDRNSLNVVNLAIKYGFKYSDRLHIRLWDNKRGV

SEQ ID NO: 27857 - protein, 254 aa, Arcobacter cloacae
  misc_feature (1)..(254): tr|A0A4Q0V9F6|A0A4Q0V9F6_9PROT 7-carboxy-7-deazaguanine synthase OS=Arcobacter cloacae OX=1054034 GN=queE PE=3 SV=1
MLEINEIFGPTIQGEGKLVGTPSIFIRFGKCNFSCVGFAVEYETPSGIKKCACDSYYAVDTEFKDTWTKYKSYEEIVNEVNKLMNLFPYNYKIDIVITGGEPLLYWNKKEFQKLLEHYINDGHNVTIETNASLNLNFEYEYQKKLLFSMSVKLSNSLEPIKKRVNKETLTKILSNTKDSYLKFVIGKDFLTQAKKEIMEIINNIPKCEVYLMPLGDTAEEINKNCEEVINMAIQNGFKYCDRLHIRVWDNKRGV

SEQ ID NO: 27858 - protein, 254 aa, Arcobacter cloacae
  misc_feature (1)..(254): tr|A0A4Q0ZAA7|A0A4Q0ZAA7_9PROT 7-carboxy-7-deazaguanine synthase OS=Arcobacter cloacae OX=1054034 GN=queE PE=3 SV=1
MLEINEIFGPTIQGEGKLVGTPSIFIRFGKCNFSCVGFAVEYETPSGIKKCACDSYYAVDTEFKDTWTKYKSYEEIVNEVNKLMNLFPYNYKIDIVITGGEPLLYWNKKEFQKLLEHYINDGHNVTIETNASLNLNFEYEYQKKLLFSMSVKLSNSLEPIKKRVNKDTLTKILSNTKDSYLKFVIGKDFLNQAKKEIIEIINDIPKCEVYLMPLGDTAEEINKNCEEVINMAIQNGFKYCDRLHIRVWDNKRGV

SEQ ID NO: 27859 - protein, 254 aa, Arcobacter cryaerophilus
  misc_feature (1)..(254): tr|A0A494T0T9|A0A494T0T9_9PROT 7-carboxy-7-deazaguanine synthase OS=Arcobacter cryaerophilus D2610 OX=1032071 GN=queE PE=3 SV=1
MLEVNEIFGPTIQGEGKLVGNLSIFIRFGKCNFKCVGFNVEYETPSGVKKCACDSYYAVDMEFKNSWKSYENYLDIVNEVDKLLENCNYKNRVDIVITGGEPLLYWNNQEFQNLIKHYINKNHKLTIETNASLNIDFQDEYQKNILFSMSVKLSNSLEPLKKRVNKSTLTKILENTKESYLKFVIGNDFLENAIIEIEDILKNIPQCEVYLMPLGDSSETIDINSEKVVNLAIKYGFKYSDRLHIRIWNNKRGV

SEQ ID NO: 27860 - protein, 254 aa, Arcobacter cryaerophilus
  misc_feature (1)..(254): tr|A0A5B7XCP0|A0A5B7XCP0_9PROT 7-carboxy-7-deazaguanine synthase OS=Arcobacter cryaerophilus ATCC 43158 OX=103 2070 GN=queE PE=3 SV=1
MLEINEIFGPTIQGEGKLIGSPSIFIRFGKCNFKCVGFNVEYETPSGKKKCACDSYYAVDIEFKDSWKSYDNHLDIVNEVDKLLENYSYKNIVDIVITGGEPLLYWNNKEFQNLIKHYINKNHKLTIETNASLNIDFQEEYQKNILFSMSVKLSNSLEPLKKRVNKISLTKILKNSKESYLKFVIGDDFLENAINEIEDILKDIPKCEVYLMPLGDNSKTIDDNSKEVVNLAIKYGFKYSDRLHIRLWDNKRGV

SEQ ID NO: 27861 - protein, 254 aa, Arcobacter defluvii
  misc_feature (1)..(254): tr|A0A4Q0UN41|A0A4Q0UN41_9PROT 7-carboxy-7-deazaguanine synthase OS=Arcobacter defluvii OX=873191 GN=queE PE=3 SV=1
MLEINEIFGPTIQGEGKLVGTPSIFIRFGKCNFKCEGFAVEYETPSGIKKCACDSYFAVDTEFKDTWTKYKTYEEIVKEVNKLINKFPYNYKIDIVITGGEPLLYWNKEEFQKLIKHYINEGHKVTIETNASLNLNFEYDYQRNILFSMSVKLSNSLEPLKKRINKETLTKILTNSNDSYLKFVIGKDFLNNAKNEIKDILNGIPKCEVYLMPLGDTADEINKNCEDVINMAIENGYKYCDRLHIRVWNNKRGV

SEQ ID NO: 27862 - protein, 249 aa, Arcobacter ebronensis
  misc_feature (1)..(249): tr|A0A4V1M0J6|A0A4V1M0J6_9PROT 7-carboxy-7-deazaguanine synthase OS=Arcobacter ebronensis OX=1462615 GN=queE P E=3 SV=1
MLEINEIFGPTIQGEGKLIGTPSIFIRVGKCNMKCEGFNVEYETPSGVKKCSCDTYYAVDPAFKDQWQQLSSKEIIEKVNELKPDYNVDIVITGGEPLLYWFNEEFQELLKYYVTNAYKVTIETNASLNIDLQQEYQKKILFSMSVKLSNSLEPLKKRVNIATLTTIINGTKESYLKFVVDKKFIAQAAKEIEEILKEIPEVEVYLMPMGDTAEEINQNSEAVINMAIKKGFKYCDRLHIRVWDNKRGV

SEQ ID NO: 27863 - protein, 249 aa, Arcobacter ebronensis
  misc_feature (1)..(249): tr|A0A4Q0YJ10|A0A4Q0YJ10_9PROT 7-carboxy-7-deazaguanine synthase OS=Arcobacter ebronensis OX=1462615 GN=queE P E=3 SV=1
MLEINEIFGPTIQGEGKLIGTPSIFIRVGKCNMKCEGFNVEYETPSGVKKCSCDTYYAVDPAFKDQWQQLSSKEIIEKVNELKPDYKVDIVITGGEPLLYWFNEEFQELLKYYVTNGYKVTIETNASLNIDLQQEYQKKILFSMSVKLSNSLEPLKKRLNIATLTTIINGTEESYLKFVVDKKFIAQATKEIDEILKEIPEVEVYLMPMGDTAEEINQNSEDVINMAIKKGFKYCDRLHIRVWDNKRGV

SEQ ID NO: 27864 - protein, 254 aa, Arcobacter ellisii
  misc_feature (1)..(254): tr|A0A347UBB2|A0A347UBB2_9PROT 7-carboxy-7-deazaguanine synthase OS=Arcobacter ellisii OX=913109 GN=queE PE=3 SV=1
MLEINEIFGPTIQGEGKLVGTPSIFIRFGKCNFKCEGFQVEYETPSGIKKCACDSYFAVDTEFKDTWTKYKSYDEIVKEVDDLLSSYPNNYKIDIVITGGEPLLYWNKIEFQKLLEHYINDGHKVTIETNASLNLNFEFDYQKNILFSMSVKLSNSLEPSKKRINKETLTKILTNTKESYLKFVIGKDFLENANEEINEILKDIPKSEVYLMPLGDTADEINKNCEDVINMAIKNGFKYCDRLHIRVWNNKRGV

SEQ ID NO: 27865 - protein, 250 aa, Arcobacter halophilus
  misc_feature (1)..(250): tr|A0A2N1J3Y4|A0A2N1J3Y4_9PROT 7-carboxy-7-deazaguanine synthase OS=Arcobacter halophilus OX=197482 GN=queE PE =3 SV=1
MLEVNEIFGPTIQGEGKRVGTSSVFIRFGKCNFRCEGFAVEYETPSGIKKCACDSYYAVDLAFKDQWHTFSTSKELIEEVNNFLPSYKCDIVITGGEPLLYWKNEEFQKTLEYYISNNYHVTIETNASLNIDITKDYQKKILFSMSVKLSNSLEPLKKRVNIKTLSNIINKCEDKYLKFVVNKDFLSQANSEIEEILKQLPKVEVYLMPMGDNAQQMNENSESVINLALEKGFKYCDRLHIRVWDNKRGV

SEQ ID NO: 27866 - protein, 250 aa, Arcobacter marinus
  misc_feature (1)..(250): tr|A0A347THS4|A0A347THS4_9PROT 7-carboxy-7-deazaguanine synthase OS=Arcobacter marinus OX=505249 GN=queE PE=3 SV=1
MLEVNEIFGPTIQGEGKRVGTASVFIRFGKCNFKCEGFAVEYETPSGIKKCACDSYYAVDPAFKDQWHTFSNANDLIEEVNKILPSYKCDIVITGGEPLLYWKNKEFQKLLKYYITNDYKVTIETNASLNIDITEKYQEDILFSMSVKLSNSLEPLKKRVNIKTLTSIINKCKDKYLKFVVNKDFLTQANNEIQDILKQLPNVETYLMPMGDNTQEMNKNSEAVINLALENGFKYCDRLHIRVWDNKRGV

SEQ ID NO: 27867 - protein, 250 aa, Arcobacter molluscorum
  misc_feature (1)..(250): tr|A0A2G1DKP8|A0A2G1DKP8_9PROT 7-carboxy-7-deazaguanine synthase OS=Arcobacter molluscorum LMG 25693 OX=870501 GN=queE PE=3 SV=1
MLEVNEIFGPTIQGEGKRVGTSSVFIRFGKCNFRCEGFAIEYETPSGVKKCACDSYYAVDPAFKDQWLTFSSSNDLIKEVEKYLPSYKCDIVITGGEPLLYWKNKEFQRLLKYYVENEYKVTIETNASLNIDITQNYQKKILFSMSVKLSNSLEPLRKRVNIKTLTNIITKSDDKYLKFVINKDFLNDAKKEIFDILKQIPEVEVYLMPMGDNAISMQENSESVINLALETGFKYCDRLHIRVWDNKRGV

SEQ ID NO: 27868 - protein, 250 aa, Arcobacter mytili
  misc_feature (1)..(250): tr|A0A345J2E0|A0A345J2E0_9PROT 7-carboxy-7-deazaguanine synthase OS=Arcobacter mytili LMG 24559 OX=1032238 GN= queE PE=3 SV=1
MLEVNEIFGPTIQGEGKRVGSPSVFIRFGKCNFRCEGFAVEYETPSGVKKCSCDSYYAVDPAFKDQWHTFSSAKELILKVNTFLPSYKCDIVITGGEPLLYWKNEEFQKVLKYYIENEYTVTLETNASLNMQITQEYQKKILFSMSVKLSNSLEPLKKRVNIKTLTQIINNCEDKYLKFVINKDFLVKAKEEIDEILKQIPKVEVYLMPMGDTALQMNENSEAVINLALESGFKYCDRLHIRVWDNKRGV

SEQ ID NO: 27869 - protein, 249 aa, Arcobacter nitrofigilis
  misc_feature (1)..(249): tr|D5UZC6|D5UZC6_ARCNC 7-carboxy-7-deazaguanine synthas e OS=Arcobacter nitrofigilis (strain ATCC 33309 / DSM 7 299 / LMG 7604 / NCTC 12251 / CI) OX=572480 GN=queE PE= 3 SV=1
MLEVNEIFGPTIQGEGKYVGNPSIFIRFGKCNFRCEGFAVEYETPSGVKKCSCDSFYAVDPAFKDQWHKMNKNEIINQVKKLEPSYKVDIVITGGEPLLYWKDEEFQEILKYYISNGYKVTIETNGSLNIDFTKEYQKELIFSMSVKLSNSLEPLKKRVNEETLKKIITNTKESYLKFVISKEFITKAKEEIELISSIIPNCDIYLMPMGDSAYEINKHSESVINMAINSGYKYCDRLHIRVWDNKRGV

SEQ ID NO: 27870 - protein, 254 aa, Arcobacter pacificus
  misc_feature (1)..(254): tr|A0A5C2H3Z1|A0A5C2H3Z1_9PROT 7-carboxy-7-deazaguanine synthase OS=Arcobacter pacificus OX=1080223 GN=queE PE =3 SV=1
MLEVNEIFGPTIQGEGKLVGTPSVFIRFGKCNFTCEGFMVEYETPSGIKKCACDSYFAVDKEFKDTWTKYKSYEDIVSEVDKLTNIYTYDYKMDIVITGGEPLLYWNKEEFQKLLEHYINDGHKVTIETNASLNLNFTKEYQKKILFSMSVKLSNSLEPLKKRVNKETLTKVLTNTNESYLKFVIGKDFKNDAKEEIREILKDIPKCEVFLMPMGDTAQQISENSEDVINMAIQNGYKYCDRLHIRVWDNKRGV

SEQ ID NO: 27871 - protein, 254 aa, Arcobacter skirrowii
  misc_feature (1)..(254): tr|A0A2U2C2V7|A0A2U2C2V7_9PROT 7-carboxy-7-deazaguanine synthase OS=Arcobacter skirrowii OX=28200 GN=queE PE=3 SV=1
MLEVNEIFGPTIQGEGKLIGSPSIFIRFGKCNFKCVGFNVLYETPSGVKKCACDSYYAVDMEFKDSWKSYENHLDIVNITNKLLENYSYKNSVDVVITGGEPLLYWNNQEFQNLIKHYINKNQRVTIETNGSLNIDFKENYQKKIIFSMSVKLSNSLEPLKKRVNKSTLTKILTNTKESYLKFVIGDDFLEKAIDEIEDILKDIPKCEVYLMPLGDSSKAIDKNSKDVVNLAIKYGFKYSDRLHIRLWDNKRGV

SEQ ID NO: 27872 - protein, 254 aa, Arcobacter skirrowii
  misc_feature (1)..(254): tr|A0A4Q0UG17|A0A4Q0UG17_9PROT 7-carboxy-7-deazaguanine synthase OS=Arcobacter skirrowii CCUG 10374 OX=1032239 GN=queE PE=3 SV=1
MLEVNEIFGPTIQGEGKLIGSPSIFIRFGKCNFKCVGFNVLYETPSGVKKCACDSYYAVDMEFKDSWKSYENHLDIVNVTNKLLENYSYKNSVDVVITGGEPLLYWNNQEFQNLIKHYINKNQRVTIETNGSLNIDFKEDYQKKIIFSMSVKLSNSLEPLKKRVNKSTLTKILTNTKESYLKFVIGDDFLEKAIDEIEDILKDIPKCEVYLMPLGDSSKAIDKNSKNVVNLAIKYGFKYSDRLHIRLWDNKRGV

SEQ ID NO: 27873 - protein, 252 aa, Arcobacter sp.
  misc_feature (1)..(252): tr|A0A2G2G5R1|A0A2G2G5R1_9PROT 7-carboxy-7-deazaguanine synthase OS=Arcobacter sp. OX=1872629 GN=queE PE=3 SV= 1
MIYLVEHFYSIQGEGKYLGTPSLFFRFGGCNMKCEGFGCSETSPNGVQIVGCDTVYAVDKKHFGSTWLGLESLDELIKIYNSYTLPIKADIVMTGGEPLIYANDELFVSFVEFLQGKGHRVTFETNGAINVDFEKFRAYQSCVFALSVKLSNSGEPKSKRINPEAIQNIATYSKDAFFKFTVDKESIQRDVDEEINEIIKYAPSISVCCMPKGGSKEELEYHSEAVIDYCKTKGYVYSDRLHIRLWDMNKGV

SEQ ID NO: 27874 - protein, 251 aa, Arcobacter sp.
  misc_feature (1)..(251): tr|A0A1Y5E1D5|A0A1Y5E1D5_9PROT 7-carboxy-7-deazaguanine synthase OS=Arcobacter sp. 31_11_sub10_T18 OX=1856277 GN=queE PE=3 SV=1
MLEITEIFGPTIQGEGKKLGSPSIFIRFGKCNLSCKGFEVEYTTPSGEKKYSCDSYYAADSQFKEYWTKYENFEEIINEVKKFEPKNYKPDIVITGGEPLLYWRDDEFQKLLEYYINNFYNVTIETNATINIDINKEYQKKILFSMSVKLSNSAESLKKRVNPKALTNIIQNIDDKYLKFVLSKECIDTSKDEIESILKQIPHVNVYLMPMGDTIETLNLNSEAVIDFAVENGYLYSDRLHIRIWNDKRGV

SEQ ID NO: 27875 - protein, 254 aa, Arcobacter suis
  misc_feature (1)..(254): tr|A0A443TJS7|A0A443TJS7_9PROT 7-carboxy-7-deazaguanine synthase OS=Arcobacter suis OX=1278212 GN=queE PE=3 SV =1
MLEINEIFGPTIQGEGKLVGTPSIFIRFGKCNFKCEGFQVEYETPSGVKKCACDSYYAVDTEFKDTWTKYKSYDEIVNEVDILLSKYPNNYKIDIVITGGEPLLYWNKEEFQKLLKHYIENGHKVTIETNASLNLNFEFDYQKKILFSMSVKLSNSLEPLKKRINKETLTKILTNTKESYLKFVIGKDFLNDAKTEINSILEDIPKCEVYLMPLGDTADEINKNCEEVINMAIENGFKYCDRLHIRVWNNKRGV

SEQ ID NO: 27876 - protein, 254 aa, Arcobacter trophiarum
  misc_feature (1)..(254): tr|A0A4Q1A6W1|A0A4Q1A6W1_9PROT 7-carboxy-7-deazaguanine synthase OS=Arcobacter trophiarum LMG 25534 OX=1032241 GN=queE PE=3 SV=1
MLEINEIFGPTIQGEGKLVGNLSIFIRFGKCNFKCVGFNVFYETPSGKKKCACDSYYAVDMEFKDSWRSYENHLEIIHEVDKLLENYSYKNRVDIVITGGEPLLYWNNKEFQNLIKYYIEKNHKLTIETNASLNIDFKEEYQKNILFSMSVKLSNSLEPLKKRVNKTTLTKILENTKESYLKFVIGDDFLENAISEIEDILKDIPKSEVYLMPLGDSSKTIDTNSEKVVNLAIKHGFKYSDRLHIRIWNNKRGV

SEQ ID NO: 27877 - protein, 254 aa, Arcobacter venerupis
  misc_feature (1)..(254): tr|A0A443TSQ6|A0A443TSQ6_9PROT 7-carboxy-7-deazaguanine synthase OS=Arcobacter venerupis OX=1054033 GN=queE PE =3 SV=1
MLEINEIFGPTIQGEGKLVGTPSIFIRFGKCNFKCEGFQVEYETPSGIKKCACDSYYAVDTEFKDTWTKYKSYEEIVSEVNELLSKYPNNYKIDIVITGGEPLLYWNKIEFQKLIKHYINDGHKVTIETNASLNLNFEFDYQKEILFSMSVKLSNSLEPLKKRINKETLTKILTNTKKSYLKFVIGKDFLQDANKEIHAILEDIPKCEVYLMPLGDTADEINKNCEDVINMAIENGFRYCDRLHIRVWNNKRGV

SEQ ID NO: 27878 - protein, 207 aa, Arcticibacter pallidicorallinus
  misc_feature (1)..(207): tr|A0A2T0U2W2|A0A2T0U2W2_9SPHI 7-carboxy-7-deazaguanine synthase OS=Arcticibacter pallidicorallinus OX=1259464 GN=queE PE=3 SV=1
MSLQVPEDGTLLPLMEEFYTIQGEGYHSGKAAYFIRLGGCDVGCHWCDVKESWDASLHPLTHADQIVANAEQYPGKAVVITGGEPLIYNLDYLTSELQKRGIKTFIETSGAYPLSGQWDWICLSPKKFKSPVPSIGQHAGELKVIVFNKSDFAWAESHAQLVSPGCKLYLQPEWSKSQEMIPLIIDYVKENPKWEISLQTHKFLNIP

SEQ ID NO: 27879 - protein, 207 aa, Arcticibacter svalbardensis
  misc_feature (1)..(207): tr|R9H2E1|R9H2E1_9SPHI 7-carboxy-7-deazaguanine synthas e OS=Arcticibacter svalbardensis MN12-7 OX=1150600 GN=q ueE PE=3 SV=1
MIQKVPEDGTLLPLMEEFYTIQGEGYHSGKAAYFIRLGGCDVGCHWCDVKESWDASIHPLTPVDQIVANAEKYPGKAVVITGGEPLMYNLDYLTTELQNKGIKTFVETSGAYPLSGFWDWICLSPKKFKSPDPSIYPHAGELKVIVFNKSDFAWAENHADLVSEGCKLYLQPEWSKSQEIIPLIIDYVKANPRWEISLQTHKFLNIP

SEQ ID NO: 27880 - protein, 193 aa, Arcticibacterium luteifluviistationis
  misc_feature (1)..(193): tr|A0A2Z4GI82|A0A2Z4GI82_9BACT 7-carboxy-7-deazaguanine synthase OS=Arcticibacterium luteifluviistationis OX=1 784714 GN=queE PE=3 SV=1
MESFYTIQGEGVHNGKAAYFIRLGGCDVGCVWCDVKESWDAEKHPLTSIETLVIEAKEHPGRLVVITGGEPLMYDMLPLTEALRAEGFETNIETSGAYEMSGAWDWVCFSPKKFKEPHESIFPVANELKAIIFNKSDFAFAEKYAELVNDDCQLLLQPEWDKQEQMLPLIIDYVKANPKWKISLQTHKFMDIP

SEQ ID NO: 27881 - protein, 221 aa, Arenibacter algicola
  misc_feature (1)..(221): tr|A0A221URJ9|A0A221URJ9_9FLAO 7-carboxy-7-deazaguanine synthase OS=Arenibacter algicola OX=616991 GN=queE PE= 3 SV=1
MPERGIFYLCAMVKEDVLALVDQGLMLPLMEEFYTIQGEGFHKGTAAYFIRVGGCDVGCHWCDVKESWNAETHPPTGIDHIVTNAAKYSDTIVITGGEPLTWDMGPLTEALKAKNLKTHIETSGAYPLTGTWDWICLSPKKNKLPEGIIYDKAHELKMIVYNKHDFIFAEEQAAKTNKDCILYLQPEWSVRDKVVPWIVEYVMQNPKWKVSLQTHKYLNIP

SEQ ID NO: 27882 - protein, 221 aa, Arenibacter echinorum
  misc_feature (1)..(221): tr|A0A327R1A8|A0A327R1A8_9FLAO 7-carboxy-7-deazaguanine synthase OS=Arenibacter echinorum OX=440515 GN=queE PE =3 SV=1
MPERGIFYLCAMVKEDVLALVDQGLMLPLMEEFYTIQGEGFHKGTAAYFIRVGGCDVGCHWCDVKESWNAETHPPTGIDHIVTNAAKYSDTIVITGGEPLTWDMGPLTEALKAKNLKTHIETSGAYPLSGTWDWICLSPKKNKLPEGIIYDKAHELKMIVYNKHDFIFAEEQAAKTNKDCILYLQPEWSVRDKVVPWIVEYVMQNPKWKVSLQTHKYLNIP

SEQ ID NO: 27883 - protein, 210 aa, Arenibacter nanhaiticus
  misc_feature (1)..(210): tr|A0A1M6LH76|A0A1M6LH76_9FLAO 7-carboxy-7-deazaguanine synthase OS=Arenibacter nanhaiticus OX=558155 GN=queE PE=3 SV=1
MVKDEILGLVDKGLMLPLMEEFYTIQGEGFHKGTAAYFIRVGGCDVGCHWCDVKESWNAETHPPTGIEHIVNNAAKYSDTIVITGGEPLTWDMGPLTTALKEKNLKTHIETSGAYPLSGQWDWICLSPKKNKLPEGIIYEKAHELKMIVYNKHDFIFAEEQAAKTNKDCILYLQPEWSVKDKVTPWIVDYVMKNPKWKVSLQTHKYLNIP

SEQ ID NO: 27884 - protein, 221 aa, Arenibacter palladensis
  misc_feature (1)..(221): tr|A0A1M5DT06|A0A1M5DT06_9FLAO 7-carboxy-7-deazaguanine synthase OS=Arenibacter palladensis OX=237373 GN=queE PE=3 SV=1
MPERGIFYLCAMVKEDVLALVDQGLMLPLMEEFYTIQGEGFHKGTAAYFIRVGGCDVGCHWCDVKESWNAETHPPTGIDHIVTNAAKYSDTIVITGGEPLTWDMGPLTDALKAKNLKTHIETSGAYPLSGTWDWICLSPKKNKLPEGIIYEKAHELKMIVYNKHDFIFAEEQAAKTNKDCILYLQPEWSVRDKVVPWIVEYVMQNPKWKVSLQTHKYLNIP

SEQ ID NO: 27885 - protein, 221 aa, Arenibacter palladensis; identical to SEQ ID NO: 27881
  misc_feature (1)..(221): tr|A0A543W1U6|A0A543W1U6_9FLAO 7-carboxy-7-deazaguanine synthase OS=Arenibacter palladensis OX=237373 GN=queE PE=3 SV=1

SEQ ID NO: 27886 - protein, 221 aa, Arenibacter sp.
  misc_feature (1)..(221): tr|A0A318I2P1|A0A318I2P1_9FLAO 7-carboxy-7-deazaguanine synthase OS=Arenibacter sp. ARW7G5Y1 OX=2135619 GN=que E PE=3 SV=1
MVERGIFYLCAMVKEDVLALVDQGLMLPLMEEFYTIQGEGFHKGTAAYFIRVGGCDVGCHWCDVKESWNAETHPPTGIDHIVTNAAKYSDTIVITGGEPLTWDMGPLTAALRAKNLKTHIETSGAYPLSGTWDWICLSPKKNKLPEGIIYDKAHELKMIVYNKHDFIFAEEQAAKTNKDCILYLQPEWSVRDKVTPWIVDYVMQNPKWKVSLQTHKYLNIP

SEQ ID NO: 27887 - protein, 210 aa, Arenibacter sp.
  misc_feature (1)..(210): tr|A0A372GVM7|A0A372GVM7_9FLAO 7-carboxy-7-deazaguanine synthase OS=Arenibacter sp. P308M17 OX=2303391 GN=queE PE=3 SV=1
MVKEDVLALVDQGQMLPLMEEFYTIQGEGFHKGTAAYFIRVGGCDVGCHWCDVKESWNAETHPPTGIAHIVTNAAKYSDTIVITGGEPLTWDMGPLTEALKAKNLKTHIETSGAYPLSGTWDWICLSPKKNKLPEGIIYDRAHELKMIVYNKHDFIFAEEQAAKTNKDCILYLQPEWSVRDKVVPMIVEYVMQNPKWKVSLQTHKYLNIP

SEQ ID NO: 27888 - protein, 221 aa, Arenibacter troitsensis; identical to SEQ ID NO: 27882
  misc_feature (1)..(221): tr|A0A1X7K9C9|A0A1X7K9C9_9FLAO 7-carboxy-7-deazaguanine synthase OS=Arenibacter troitsensis OX=188872 GN=queE PE=3 SV=1

SEQ ID NO: 27889 - protein, 212 aa, Arenicella xantha
  misc_feature (1)..(212): tr|A0A395JS01|A0A395JS01_9GAMM 7-carboxy-7-deazaguanine synthase OS=Arenicella xantha OX=644221 GN=queE PE=3 S V=1
MTIRITEIFYSIQGESGTIGYPTVFVRLTGCPMRCSYCDTAYAFHGGNKMELADIVVEVGKYQVKHVCVTGGEPLAQPECHDLMRTLCDAGYKVSVETGGAIDISQVDKRVYIVLDIKTPASNEEPNNKYGNLDHIKASDCLKFVICDDNDYQWAKDFVDQRGLTEKCDVFFSPSADQLSATQLADWIIRDQLAVRMQVQLHKILWNNEAGR

SEQ ID NO: 27890 - protein, 218 aa, Arenimonas caeni
  misc_feature (1)..(218): tr|A0A2P6MBW2|A0A2P6MBW2_9GAMM 7-carboxy-7-deazaguanine synthase OS=Arenimonas caeni OX=2058085 GN=queE PE=3 S V=1
MDTPAADRLRLTEIFLSVQGESRSVGWPTVFVRLTGCPLRCQYCDTAYAFHGGEWWEIDAILAEVARHGARHVCVTGGEPLAQKRCLALLEKLCDAGYEVSLETSGALDISGVDPRVSRVVDLKTPGSKEMQRNRLENIALLTPRDQLKFVICDRADYEWARAMVAEHQLANRCEVLFSPSQGQLEPRQLAEWLLADKLPVRFQLQLHKVLWGDVAGK

SEQ ID NO: 27891 - protein, 233 aa, Arenimonas composti
  misc_feature (1)..(233): tr|A0A091BK91|A0A091BK91_9GAMM 7-carboxy-7-deazaguanine synthase OS=Arenimonas composti TR7-09 = DSM 18010 OX= 1121013 GN=queE PE=3 SV=1
MNTEATSTAVPSGDTAGTPGGDRLRLTEIFLSVQGEARHVGWPTVFVRLTGCPLRCTYCDTAYAFHGGAWWDIDAILAEVARHGVRHVCVTGGEPLAQKRVLGLLARLCDAGYEVSLETSGALDIAGVDPRVSRVVDLKTPASAEMHRNRLENLPLLTAHDQLKFVICDRADYEWARGMLAEHRLAGRCEVLFSPGMGLVAPGELAEWILADRLPVRFQLQLHKVLWGDAPGR

SEQ ID NO: 27892 - protein, 218 aa, Arenimonas donghaensis
  misc_feature (1)..(218): tr|A0A087MG50|A0A087MG50_9GAMM 7-carboxy-7-deazaguanine synthase OS=Arenimonas donghaensis DSM 18148 = HO3-R19 OX=1121014 GN=queE PE=3 SV=1
MDTPAAERLRLTEIFLSVQGESRSVGWPTVFVRLTGCPLRCQYCDTAYAFHGGEWWEIDTILAEVARHGARHVCVTGGEPLAQKRCLLLLEKLCDAGYEVSLETSGAIDIADVDPRVSRVVDLKTPGSKEMHRNLLENIPLLTARDQVKFVVCDRADYDWAKTMLAEHALADRCEVLFSPSQGQQSPAELAEWLLADKLPVRFQLQLHKVLWGDVAGK

SEQ ID NO: 27893 - protein, 218 aa, Arenimonas malthae
  misc_feature (1)..(218): tr|A0A091BAB5|A0A091BAB5_9GAMM 7-carboxy-7-deazaguanine synthase OS=Arenimonas malthae CC-JY-1 OX=1384054 GN=q ueE PE=3 SV=1
MDTPAAERLRLTEIFLSVQGESRTVGWPTVFVRLTGCPLRCQYCDTAYAFHGGDWWDIDAILAEVAKHGVRHVCVTGGEPLAQKRCLALLERLCDAGYEVSLETSGALDIAGVDPRVSRVMDLKTPGSKEAHRNRLENLPLLTAHDQIKFVICDRADYDWAKDMLATHALEKRCEVLFSPSQGQLAPRELAEWIIADRLPVRFQLQLHKVLWGDQPGR

SEQ ID NO: 27894 - protein, 218 aa, Arenimonas metalli
  misc_feature (1)..(218): tr|A0A091B3X3|A0A091B3X3_9GAMM 7-carboxy-7-deazaguanine synthase OS=Arenimonas metalli CF5-1 OX=1384056 GN=que E PE=3 SV=1
METPAAERLRLTEIFLSVQGEARAVGWPTVFVRLTGCPLRCQYCDTAYAFHGGEWWEIDTILAEVARHGVRHVCVTGGEPLAQKRCLKLLEALCDAGYEVSLETSGALDIAGVDPRVSRVVDLKTPGSKEMHRNLLSNLPLLTAHDQVKFVICDRADYEWARAMVAEHAIAGRCDVLFSPSQSELAPRDLADWIIADRLPVRFQLQLHKVLWGDTPGK

SEQ ID NO: 27895 - protein, 218 aa, Arenimonas oryziterrae
  misc_feature (1)..(218): tr|A0A091AUJ1|A0A091AUJ1_9GAMM 7-carboxy-7-deazaguanine synthase OS=Arenimonas oryziterrae DSM 21050 = YC6267 OX=1121015 GN=queE PE=3 SV=1
MQVPVADRLRLTEIFLSLQGESRSAGWPTVFVRLTGCPLRCQYCDTAYAFHGGDWWEIDAILAEVARHGVRHVCVTGGEPLAQKRCLVLLQRLCDAGYEVSLETSGAIDVADVDPRVVRVVDLKTPGSLEQHRNRLENIPLLTPRDQVKFVICSREDYDWAKGMLVEHRLDSRCEVLFSPSFTEVAPRDLAEWIIADRLPVRFQTQLHKQLWGEEKGR

SEQ ID NO: 27896 - protein, 218 aa, Arenimonas sp.
  misc_feature (1)..(218): tr|A0A352QR22|A0A352QR22_9GAMM 7-carboxy-7-deazaguanine synthase OS=Arenimonas sp. OX=1872635 GN=queE PE=3 SV= 1
MDTPAAERLRLTEIFLSVQGESRTVGWPTVFVRLTGCPLRCQYCDTAYAFHGGDWWDIDAILAEVAKHGVRHVCVTGGEPLAQKRCLALLERLCDAGYEVSLETSGALDIAGVDPRVSRVMDLKTPGSKEAHRNRLENLLLLTAHDQLKFVICDRADYDWAKDMLATHALDKRCEVLFSPSQGQLAPRELAEWIIADRLPVRFQLQLHKVLWGDQPGR

SEQ ID NO: 27897 - protein, 223 aa, Arenimonas sp.
  misc_feature (1)..(223): tr|A0A5B2ZAD8|A0A5B2ZAD8_9GAMM 7-carboxy-7-deazaguanine synthase OS=Arenimonas sp. 3729k OX=2608255 GN=queE PE =3 SV=1
METQVTDSPAAERLRLTEIFLSVQGESRSVGWPTVFVRLTGCPLRCQYCDTAYAFHGGHWWDMDAILAEVAQHGVRHVCVTGGEPLAQKRCLLLLQKLCDAGYEVSLETSGALDISGVDPRVSRVVDLKTPGSKEMARNRLENIPLLTPRDQVKFVICDRTDYDWARAMLAEHRLAERCEVLFSPSHGQVRPHELAEWILADKLPVRYQLQLHKVLWGDTPGR

SEQ ID NO: 27898 - protein, 209 aa, Arenitalea lutea
  misc_feature (1)..(209): tr|A0A1M6ABH3|A0A1M6ABH3_9FLAO 7-carboxy-7-deazaguanine synthase OS=Arenitalea lutea OX=1178825 GN=queE PE=3 S V=1
MNLEIQELVNKGEMLPLMEEFYTIQGEGYFKGTAAYFVRIGGCDVGCHWCDVKESWNANLHPPTETDKIVANAKKYSDTIVVTGGEPLTWDMTLLTTKLKAEGLQTHIETSGAYKLTGVWDWICLSPKKMKLPTEEVYAEADELKMIIYNKDDFRFAEEQAAKVNKDCILYLQPEWSKRDKVVPEIVDYVMKNPKWKVSLQTHKYLNIP

SEQ ID NO: 27899 - protein, 230 aa, Armatimonadetes bacterium
  misc_feature (1)..(230): tr|A0A1Y0HCR1|A0A1Y0HCR1_9BACT 7-carboxy-7-deazaguanine synthase OS=Armatimonadetes bacterium Uphvl-Ar2 OX=200 4468 GN=queE PE=3 SV=1
MAKLRISEIFTSVQGEGQWIGVPSVFVRVSGCNLRCVWCDTPYASWHPEGPVREVDDVVAEVQAQGVRHVVVTGGEPMLFEPTVDLVNALQAAGHVITIETAGTVDLPLTPQLFSISPKLSHSAPEGEWHDRHEAARWRPEIIKAMMQRAPVQFKFVVNPDHPSDDWAEIDAMLAQLPPVAPDSVFLMAEGRDTAVLHDRERRLVPEAIRRGWRIAPRLQIDLFGDTKGT

SEQ ID NO: 27900 - protein, 234 aa, Armatimonadetes bacterium
  misc_feature (1)..(234): tr|A0A1Y0H2L4|A0A1Y0H2L4_9BACT 7-carboxy-7-deazaguanine synthase OS=Armatimonadetes bacterium Uphvl-Ar1 OX=200 4467 GN=queE PE=3 SV=1
MSNLRISEIFSSVQGEGQFLGVPSTFVRTSGCNLRCVWCDTPYASWSPEGPMMSIDQIVSECQDLKNQHVVLTGGEPMLFDPIEELAKHLQAKGHFITIETAGTISRTLPGCFMSISPKPAHSAPPKDTPGDWYQRHESTRFQPETIRHLVAHHDYQFKFVVKPEEPGSIEEIQSMLTAIDHTIPPEKIFLMPEGRDQATLNERLKLLVPICHKTGYRLAPRLQIDLFGDTRGT

SEQ ID NO: 27901 - protein, 221 aa, Aromatoleum aromaticum
  misc_feature (1)..(221): tr|Q5P4Z3|Q5P4Z3_AROAE 7-carboxy-7-deazaguanine synthas e OS=Aromatoleum aromaticum (strain EbN1) OX=76114 GN=q ueE PE=3 SV=1
MQQASDRHDVKVRLTEIFASLQGESTRVGLPTVFVRLTGCPLRCVWCDTEYAFQGGESRSIASIVEEVLGHGIEHVCVTGGEPLAQKSCLALLAALCDAGLSVSLETSGALDIAAVDPRVSRVMDLKAPGSGEVARNRWDNLARLNERDEVKIVLADRLDYEWAVQCLAEHRLAQRCTVLLSPVQGKLDPAQLAEWIVRDRLPVRFQLQLHKILWNDARGR

SEQ ID NO: 27902 - protein, 207 aa, Arsenicibacter rosenii
  misc_feature (1)..(207): tr|A0A1S2VLN8|A0A1S2VLN8_9BACT 7-carboxy-7-deazaguanine synthase OS=Arsenicibacter rosenii OX=1750698 GN=queE PE=3 SV=1
MVTEQQTTTHTLPVMEAFYTLQGEGAHTGRAAYFIRLGGCDVGCHWCDVKESWDAGLHPQLSIDTILDGALQYSGRMAVITGGEPLMHDLTGLTNALQTAGFRTNIETSGVYPVTGSWDWICFSPKKFKEPHPGIYAQANELKVIIYNKSDFAFAESFVPHLRPDCRLFLQPEWSRTNEMLPLIVEYVKSNPQWQVSLQTHKYMDIP

SEQ ID NO: 27903 - protein, 224 aa, Arsenophonus endosymbiont
  misc_feature (1)..(224): tr|A0A4Q1B9B0|A0A4Q1B9B0_9GAMM 7-carboxy-7-deazaguanine synthase OS=Arsenophonus endosymbiont of Bemisia tabac i Asia II 3 OX=1868623 GN=queE PE=3 SV=1
MDYPINQIFQTIQGEGYFTGVAAIFTRLQGCPVGCSWCDTKHTWAKNKQQQGPLSIILAKKIESDEWAACSSEQIIDLFEQNNYTARHIVITGGEPCLYDLTELTDNLEKNGYQCQIETSGTHNIYCSEKTWVTVSPKVAMRGGFSILPAALNRANEIKHPVGRQKDIDALESLINQLEPNHPAPHICLQPISQNANATQLCIETCIKRNWRLSVQMHKYLDIA

SEQ ID NO: 27904 - protein, 224 aa, Arsenophonus nasoniae
  misc_feature (1)..(224): tr|D2U3T2|D2U3T2_9GAMM 7-carboxy-7-deazaguanine synthas e OS=Arsenophonus nasoniae OX=638 GN=queE PE=3 SV=1
MDYPINQIFQTIQGEGYFTGVAAIFVRLQGCPVGCSWCDTKHTWAKNKQQQRPLSIILAKKSDNEEWATCSSEQIIDLFEQNHYTARHIVITGGEPCLYDLTELTTNLEKKGYQCQIETSGTHNIYCSEKTWVTVSPKVAMRGGYKILPAALNRANEIKHPVGRQRDIDALEYLINQLAPNHPAPHICLQPISQNANATNLCIETCIKRNWRLSVQMHKYLDIA

SEQ ID NO: 27905 - protein, 224 aa, Arsenophonus sp.
  misc_feature (1)..(224): tr|A0A2A2GZJ3|A0A2A2GZJ3_9GAMM 7-carboxy-7-deazaguanine synthase OS=Arsenophonus sp. ENCA OX=1987579 GN=queE P E=3 SV=1
MDYPINQIFQTIQGEGYFTGVAAIFIRLQGCPVGCSWCDTKHTWAKNKQQQRSLSIILAKKIESDEWAACSSKQIIDLFEQNNYTARHIVITGGEPCLYNLTELTDNLEKKGYQCQIETSGTHNIYCSEKTWVTVSPKVAMRVGFSILPAALNRANEIKHPVGRQKDIDALESLINQLEPNHPAPHICLQPISQNANATQLCIETCIKRNWRLSVQMHKYLDIA

SEQ ID NO: 27906 - protein, 221 aa, Arsukibacterium ikkense
  misc_feature (1)..(221): tr|A0A0M2V722|A0A0M2V722_9GAMM 7-carboxy-7-deazaguanine synthase OS=Arsukibacterium ikkense OX=336831 GN=queE PE=3 SV=1
MYKVNEIFETIQGEGSFTGVPAIFIRLQGCPVGCSWCDTKHTWAVNPDLQVKLDSVMAKSAETEQWAAITAEQLLALFQEKGYQARHVVITGGEPCMYDLNPLCNTLHAAGYQTQIETSGTFAVQVPAKSWVTVSPKVNMKGGYKVLQSALDRADEIKHPVAMDKHIEQLLQLLQQTDISNKLIYLQPISQQAKATALAISYCKKYNWRLSVQVHKYIGIA

SEQ ID NO: 27907 - protein, 222 aa, Arsukibacterium sp.
  misc_feature (1)..(222): tr|A0A0M2VHA6|A0A0M2VHA6_9GAMM 7-carboxy-7-deazaguanine synthase OS=Arsukibacterium sp. MJ3 OX=1632859 GN=queE PE=3 SV=1
MLYKVNEVFETIQGEGSFTGVPAIFVRLQGCPVGCSWCDTKHTWSINPDLNITLDAVMVKSAETEQWAAVSAEQILALFKAKGYQARHVVITGGEPCMYDLHPLCDLLHDAGYQSQIETSGTFEILAPLQSWVTVSPKVNMKGGYKVLQSALDRANEIKHPVAMDKHIEQLLQLLHRTDTSAKLIYLQPISQQTKATALAIAYCKKHNWRLSVQVHKYLGIE

SEQ ID NO: 27908 - protein, 211 aa, Arthrobacter sp.
  misc_feature (1)..(211): tr|A0A2V5DV04|A0A2V5DV04_9MICC 7-carboxy-7-deazaguanine synthase OS=Arthrobacter sp. RC1.1 241 OX=2183924 GN=q ueE PE=3 SV=1
MNYKVKEIFYTLQGEGTHAGRPAVFCRFSLCNLWTGREADRARAICKFCDTDFVGTDGEGGGKFATPEDLADAVEAAWPSGWTENRMVVCTGGEPLLQLDAAAVAELKRRGFYVAVETNGTQLPPSGVDWLCVSPKIGADLVVAGGQELKFVYPQAGVDPRVFEELDFDTFRVQPMDGPDVVENTRLAVEFCLEHPNWQLSMQTHKYLGIP

SEQ ID NO: 27909 - protein, 211 aa, Arthrobacter sp.
  misc_feature (1)..(211): tr|A0A4V1E9J4|A0A4V1E9J4_9MICC 7-carboxy-7-deazaguanine synthase OS=Arthrobacter sp. 24S4-2 OX=2575374 GN=queE PE=3 SV=1
MNYKVKEIFYTLQGEGTHAGRPAVFCRFSLCNLWTGREADRARAVCKFCDTDFVGTDGEGGGKFATPEDLADAVEAAWPSGWEGNRMVVCTGGEPLLQLDNEAVAALKRRGFYVAVETNGTQVPPEGVDWLCVSPKIGADLVVSGGNELKFVYPQAGVNPTTFEQLDFDAFRVQPMDGPDIVENTRLAVEFCLEHPNWQLSMQTHKYLGIP

SEQ ID NO: 27910 - protein, 204 aa, Arthrospira maxima
  misc_feature (1)..(204): tr|B5W3G9|B5W3G9_LIMMA 7-carboxy-7-deazaguanine synthas e OS=Arthrospira maxima CS-328 OX=513049 GN=queE PE=3 S V=1
MITIPVHETFQQTIQGEGYWAGTPVDFIRLAGCPVGCPWCDTGYADGGKGLPRNMRSFDELLAELVSPRVVISGGEPFIYPQLPDLVRVLEETGRQVSIETSGAFWQDVSDLCWITLSPKEHISPRYPVVSQMWRRASEIKLVIDVGDELEFYRSRLAENSTIPVFLQPQWTDIDRTLPLVLAKLKQFPGYRLSVQLHKYIGVE

SEQ ID NO: 27911 - protein, 204 aa, Arthrospira platensis
  misc_feature (1)..(204): tr|K1WC27|K1WC27_ARTPT 7-carboxy-7-deazaguanine synthas e OS=Arthrospira platensis C1 OX=459495 GN=queE PE=3 SV =1
MITIPVHETFQQTIQGEGYWAGTPVDFIRLAGCPVGCPWCDTGYADGGKGLARNMRSFDELLAELVSPRVVNSGGEPFIYPQLPDLVRVLEETGRQVSIETSGAFWQDVSDLCWITLSPKEHISPRYPVVSQMWRRASEIKLVIDVGDELEFYRSRLAENSTIPVFLQPQWTDIDRTLPLVLAKLKQFPGYRLSVQLHKYIGVE

SEQ ID NO: 27912 - protein, 204 aa, Arthrospira platensis
  misc_feature (1)..(204): tr|D5A347|D5A347_ARTPN 7-carboxy-7-deazaguanine synthas e OS=Arthrospira platensis (strain NIES-39 / IAM M-135) OX=696747 GN=queE PE=3 SV=1
MITIPVHETFQQTIQGEGYWAGTPVDFIRLAGCPVGCPWCDTGYADGGKGLPRNVRSFDQLLAELVSPRVVISGGEPFIYPQLPDLVRVLEDSGRQVSIETSGAFWQDVSDLCWITLSPKEHISPGYPVVSPMWRRASEIKLVIDVGDELEFYGCRLAENSTIPVFLQPQWTDIERTLPLVLEKLKQFPGYRLSVQLHKYIGVQ

SEQ ID NO: 27913 - protein, 261 aa, Asaccharobacter celatus
  misc_feature (1)..(261): tr|A0A369NWT4|A0A369NWT4_9ACTN 7-carboxy-7-deazaguanine synthase OS=Asaccharobacter celatus OX=394340 GN=queE PE=3 SV=1
MVPEEENDGLLDAERHQARHTIAPRAQLFPVAEKFVSVNGEGLAAGRPAAFIRFAGCNMWCTYCDTRWANHPLVEVEGWSVPDLAAWVAETGVSCVTLTGGEPLLQPYLPDLVQTLLAVDDPRPLRVEIETNGSRDLSPMAHLREACVEAGLLGSLHFTVDWKTPTAGEAVSAAMRRENYELLDTRDAVKFVVGTEDDLAFMECCADEAGLWDRCAVLVSPVWGAIEPAEIAAYLIDHGLDRARLQLQLHKIIWPDETRGV

SEQ ID NO: 27914 - protein, 261 aa, Asaccharobacter celatus
  misc_feature (1)..(261): tr|A0A369P1D6|A0A369P1D6_9ACTN 7-carboxy-7-deazaguanine synthase OS=Asaccharobacter celatus OX=394340 GN=queE PE=3 SV=1
MVPEEENDGLLDAERHQARHTIAPRAQLFPVAEKFVSVNGEGLAAGRPAAFIRFAGCNMWCTYCDTRWANHPLVEVEGWSVPDLVAWVAETGVSCVTLTGGEPLLQPYLPDLVQTLLAVDDPRPLRVEIETNGSRDLSPMAHLREACAEAGLPGSLHFTVDWKTPTAGEAVSAAMRRENYDLLDTRDAVKFVVGTEDDLAFMERCADEAGLWDRCSVLASPVWGAIEPAEIAAYLIDHGLDRARLQLQLHKIIWPDETRGV

SEQ ID NO: 27915 - protein, 224 aa, Asaccharospora irregularis
  misc_feature (1)..(224): tr|A0A1M5QME9|A0A1M5QME9_9FIRM 7-carboxy-7-deazaguanine synthase OS=Asaccharospora irregularis DSM 2635 OX=112 1321 GN=queE PE=3 SV=1
MRKFNIVEKFVSIDGEGPMAGSLATFIRFKGCNLRCSWCDTSYSWEATEKSEEMSADEIYSYIKEKKINHVTLTGGEPLIQEGIMDLIKLLSEDKSLLVHIETNGTVDITPFKTVYTSSNLRYIIDYKLPSSTMTKYMEPRNLDVVGENDVYKFVIGSKDDLNKAYEVIKKHDLEKKCQVYLSPVTDYIDPSVIVDFMKENLLKNVKLQLQLHKIIWDKNRRGV

SEQ ID NO: 27916 - protein, 209 aa, Asaia bogorensis
  misc_feature (1)..(209): tr|A0A0P0YEG4|A0A0P0YEG4_9PROT 7-carboxy-7-deazaguanine synthase OS=Asaia bogorensis NBRC 16594 OX=1231624 GN= queE PE=3 SV=1
MKEMFATLQGEGAHTGRASVFCRFTGCNLWSGREEDRHKAACQFCDTDFIGTDGEGGGRFATADALAEALVQCWKSEAGDQAGRYVVFTGGEPLLQIDPALIAAVKAADFEIAIESNGTINAPQGIDWICVSPKPSSVVTQQTGQELKLVFPQESLPPELFEGWDFEHFWLQPMDGPDRIANTAKAVAYCLKHPRWRLSLQTHKLIGIP

SEQ ID NO: 27917 - protein, 209 aa, Asaia platycodi
  misc_feature (1)..(209): tr|A0A060QJ28|A0A060QJ28_9PROT 7-carboxy-7-deazaguanine synthase OS=Asaia platycodi SF2.1 OX=1382230 GN=queE P E=3 SV=1
MKEMFATLQGEGAHTGRASVFCRFTGCNLWSGREEDRHKAACQFCDTDFIGTDGEGGGRFATADALAEALVRCWQSEASDQAGRYVVFTGGEPLLQIDPALIAAVKAADFEIAIESNGTINAPKGIDWICVSPKPSSTVTQQTGQELKLVFPQESLPPELFEGWDFEHFWLQPMDGPDRIANTARAVAYCLKHPRWRLSLQTHKLIGIP

SEQ ID NO: 27918 - protein, 213 aa, Asaia sp.
  misc_feature (1)..(213): tr|A0A433WSJ9|A0A433WSJ9_9PROT 7-carboxy-7-deazaguanine synthase OS=Asaia sp. W19 OX=2067395 GN=queE PE=3 SV=1
MSYAVKEIFATLQGEGAHAGRASVFCRFAGCNLWSGREEDRHRAACQFCDTDFVGTDGIGGGRFADAAALTARLLACWKEQAGEAAGRYVVFTGGEPLLQIDPPLITAMHEAGFEIAIESNGTIAVPEGIDWICVSPKPQSRLIQCRGQELKLVYPQEALPPALFESWDFDHFWLQPMDGPDRIANTEKAVAYCLSHPRWRLSLQTHKLIGIP

SEQ ID NO: 27919 - protein, 212 aa, Asanoa ishikariensis
  misc_feature (1)..(212): tr|A0A1H3UB67|A0A1H3UB67_9ACTN 7-carboxy-7-deazaguanine synthase OS=Asanoa ishikariensis OX=137265 GN=queE PE= 3 SV=1
MYRVKEIFYTLQGEGTHAGRPAVFCRFTSCNLWTGREQDRHRALCQFCDTDFVGTDGPGGGRFRSAADLAAAVARTWEGEPHPRSRPYVVCTGGEPLLQLDDEAVHALHNLGFEVAVETNGTRPAPAGLDWICVSPKAGAPVVLTAGHDLKLVFPQAGAEPELFEDLEFEHFMLQPMDGPDRVANTEAAVRYCMKHPQWRLSLQTHKYIGIA

SEQ ID NO: 27920 - protein, 210 aa, Asticcacaulis benevestitus
  misc_feature (1)..(210): tr|V4PN57|V4PN57_9CAUL 7-carboxy-7-deazaguanine synthas e OS=Asticcacaulis benevestitus DSM 16100 = ATCC BAA-89 6 OX=1121022 GN=queE PE=3 SV=1
MYSFKEIFLTLQGEGGQAGRVNVFARFAGCNLWSGREQDRAMAACTFCDTDFVGIDGENGGKFPKPVDVVAALDAVWGMADPSQKAVVFTGGEPLLQLDPALIEAVKAAGYFIAVETNGTIKAPEGIDWICVSPKADNRLHQTFGQELKLVWPQAEVDPAEFLAFDFERYYLQPMDSDRQAANTQAVIDYCLQHPQWRMSVQTHKLVGLK

SEQ ID NO: 27921 - protein, 210 aa, Asticcacaulis biprosthecum
  misc_feature (1)..(210): tr|F4QT10|F4QT10_9CAUL 7-carboxy-7-deazaguanine synthas e OS=Asticcacaulis biprosthecum C19 OX=715226 GN=queE P E=3 SV=1
MYSFKEIFLTLQGEGGQAGRVNVFARFAGCNLWSGREQDRATAACDFCDTDFVGTDGENGGRFPTPADVVAALDAVWGEGRAAGKAVVFTGGEPLLQLDSDLIAAVKAAGYFIAVETNGTLKAPAGIDWVCVSPKGQNRLHQTSGQELKLVWPQENVDPSDFLEMQFERFYLQPKDNPRQAANTQAVIDYCLLHPQWRMSVQTHKLVGLK

SEQ ID NO: 27922 - protein, 215 aa, Asticcacaulis excentricus
  misc_feature (1)..(215): tr|A0A3G9G5R5|A0A3G9G5R5_9CAUL 7-carboxy-7-deazaguanine synthase OS=Asticcacaulis excentricus OX=78587 GN=queE PE=3 SV=1
MYSFKEIFLTLQGEGGQAGRVAVFARFAGCNLWSGREQDRATAACTFCDTDFVGTDGEGGGKFDTPEAVAAALDAHWGQIDPAHKSVVFTGGEPLLQLDAPLIAAVKAAGYFIAVESNGTLRAPEGIDWLCISPKGENRLHQTSGQELKLVWPQERVDPAEFAAMDFERFYLQPKDPLDQNLLTRAAHTQAVIDYCLAHPQWRMSVQTHKVVGIR

SEQ ID NO: 27923 - protein, 216 aa, Asticcacaulis excentricus
  misc_feature (1)..(216): tr|E8RV80|E8RV80_ASTEC 7-carboxy-7-deazaguanine synthas e OS=Asticcacaulis excentricus (strain ATCC 15261 / DSM 4724 / VKM B-1370 / CB 48) OX=573065 GN=queE PE=3 SV=1
MVYSFKEIFLTLQGEGGQAGRVAVFARFAGCNLWSGREQDRATAACTFCDTDFVGTDGEGGGKFDTPEAAVAALDAHWGQIDPAHKSVVFTGGEPLLQLDAPLIAAVKSAGYFIAVESNGTLRAPIGIDWLCISPKGENRLHQTSGQELKLVWPQDRVDPAEFARMDFERFYLQPKDPLDQNPAMRAAHTQAVIDYCLAHPQWRMSVQTHKVVGVR

SEQ ID NO: 27924 - protein, 210 aa, Asticcacaulis sp.
  misc_feature (1)..(210): tr|V4QWZ5|V4QWZ5_9CAUL 7-carboxy-7-deazaguanine synthas e OS=Asticcacaulis sp. AC466 OX=1282362 GN=queE PE=3 SV =1
MYSFKEIFLTLQGEGGQAGRVNVFARFAGCNLWSGREQDRATAACTFCDTDFVGTDGENGGKFAAPADVVSALDRVWGEGRSQDKAVVFTGGEPLLQLDAALITAVKDAGYFIAVETNGTLHAPDGIDWVCVSPKADNRLHQTRGQELKLVWPQAGVDPAEFAGLNFERFYLQPKDDPNQAANTQAVINYCLAHPQWRMSVQTHKLVGLK

SEQ ID NO: 27925 - protein, 221 aa, Asticcacaulis sp.
  misc_feature (1)..(221): tr|V4NS68|V4NS68_9CAUL 7-carboxy-7-deazaguanine synthas e OS=Asticcacaulis sp. YBE204 OX=1282363 GN=queE PE=3 S V=1
MARRQMTYSFKEIFLTLQGEGGQAGRVAVFARFAGCNLWSGREQDRVTAACTFCDTDFVGTDGENGGKFTTPDAVVAALDAQWGSIDTTEKSVVFTGGEPLLQLDAPLIAAVKAAGYFIAVESNGTVRAPAGIDWLCISPKGENRVHQTSGQELKLVWPQDNVDPAEFTDMAFERFYLQAKDPLDQDPAVRALHTQKVIDYCLTHPQWRMSVQTHKMVGLK

SEQ ID NO: 27926 - protein, 210 aa, Asticcacaulis taihuensis
  misc_feature (1)..(210): tr|A0A1G4PXP1|A0A1G4PXP1_9CAUL 7-carboxy-7-deazaguanine synthase OS=Asticcacaulis taihuensis OX=260084 GN=queE PE=3 SV=1
MYSFKEIFLTLQGEGGQAGRVNVFARFAGCNLWSGREQDRATAACTFCDTDFVGTDGENGGRFRTASETVTALDAVWGGADPSQKAVVFTGGEPLLQLDADLIAAVKAAGYFIAVETNGTLKVPVGIDWICVSPKADNRLHQTHGQELKLVWPQEGVNPAEFLALNFERYYLQPKDDPQQAANTQAVIDYCLKHPQWRMSVQTHKLVGLK

SEQ ID NO: 27927 - protein, 208 aa, Atelocyanobacterium thalassa
  misc_feature (1)..(208): tr|D3EPE5|D3EPE5_ATETH 7-carboxy-7-deazaguanine synthas e OS=Atelocyanobacterium thalassa (isolate ALOHA) OX=14 53429 GN=queE PE=3 SV=1
MEKLTELNSDLTTYPIAETFHSIQGEGAWTGVSAFFIRLAGCNVGCPWCDQKESWTDKTFPKYSSEMLSTKAQQANASIVVITGGEPLMYNLFPLTDKLRKLGMKIHLETSGSYPFSGNFNWVTFSPKPFKAPHESIYVKASELKIIIADQKDFEWAEKQKSKTNSQSINFLQPEWNSRTSSSLIYKYICKHPEWRMSLQTHKFLGVR

SEQ ID NO: 27928 - protein, 223 aa, Atlantibacter hermannii
  misc_feature (1)..(223): tr|H5V0G2|H5V0G2_ATLHE 7-carboxy-7-deazaguanine synthas e OS=Atlantibacter hermannii NBRC 105704 OX=1115512 GN= ygcF PE=3 SV=1
MQYPINEMFQTLQGEGYFTGVPAIFIRLQGCPVGCAWCDTKHTWDKLADREVSLYSILAKTKESDKWGSASPEELLAVIERQGWTARHVVITGGEPCIHDLIPLTHLLEKSGFSCQIETSGTHEVRAIATTWVTVSPKVNMRGGYDVLHQALERADEIKHPVGRVRDIEALDELLATLNDQKQRVIALQPISQKEDATRLCIETCIARNWRLSMQTHKYLNIA

SEQ ID NO: 27929 - protein, 223 aa, Atlantibacter hermannii; identical to SEQ ID NO: 27928
  misc_feature (1)..(223): tr|A0A447LSR6|A0A447LSR6_ATLHE 7-carboxy-7-deazaguanine synthase OS=Atlantibacter hermannii OX=565 GN=queE PE= 3 SV=1

SEQ ID NO: 27930 - protein, 223 aa, Atlantibacter subterranea
  misc_feature (1)..(223): tr|A0A427UNQ7|A0A427UNQ7_9ENTR 7-carboxy-7-deazaguanine synthase OS=Atlantibacter subterranea OX=255519 GN=que E PE=3 SV=1
MQYPINEMFQTLQGEGYFTGVPAIFIRLQGCPVGCAWCDTKHTWDKLADREVSLYSILAKTKESDKWGAASPEELLAVIERQGWTARHVVITGGEPCIHDLIPLTHLLEKSGFSCQIETSGTHEIRAVATTWVTVSPKVNMRGGYDVLHQALERADEIKHPVGRMRDIEALDELLATLNDQKQRVIALQPISQKEDATRLCIETCIARNWRFSMQTHKYLNIA

SEQ ID NO: 27931 - protein, 265 aa, Aulosira laxa
  misc_feature (1)..(265): tr|A0A1Z4TXP9|A0A1Z4TXP9_9CYAN 7-carboxy-7-deazaguanine synthase OS=Aulosira laxa NIES-50 OX=1541988 GN=queE P E=3 SV=1
MTAKTTVKPTARLIEVFSAIQGEGLNVGTRQIFIRFALCDLRCHFCDSAHTWNAPSTCKIERTPGLRDFEEHSNPIPLPILLEWVERQNQPSIHDSISLTGGEPLLHAPFLELFLPQVRSLTNLPIYLETGGHRPEQLAMILPYLDSVGMDLKLPSVSGESYWQEHAQCLKLSYDSHLNVFVKIIISQQTDPTELERSALLVAAVSPDIPVFLQPVTPLPVSEKSTAKTILAPTPDQVLHWQAFMKRWLKRVLVVPQTHKMLNQL

SEQ ID NO: 27932 - protein, 241 aa, Aureibacillus halotolerans
  misc_feature (1)..(241): tr|A0A4R6U3K6|A0A4R6U3K6_9BACI 7-carboxy-7-deazaguanine synthase OS=Aureibacillus halotolerans OX=1508390 GN=q ueE PE=3 SV=1
MIPVLEIFGPTIQGEGMVVGRKTMFVRTAGCDYRCTWCDSAFTWDGSAKEDIRQLSVEDVWHELKQAGGENFDHVTISGGNPALLRHLGDLIDLLHNNGCQVALETQGSVWQDWFLNIDDLTISPKPPSSGMETDFSKLDDILSKVEEADRTTTHTSLKVVVFDKADFAYAEHVHQRYPQVPFYVQVGNPDPLTDEQTNLVSGLLDDYEALVDRVVASSAMNNVRVLPQLHVLIWGNKRGV

SEQ ID NO: 27933 - protein, 234 aa, Aureimonas altamirensis
  misc_feature (1)..(234): tr|A0A1M6K2L2|A0A1M6K2L2_9RHIZ 7-carboxy-7-deazaguanine synthase OS=Aureimonas altamirensis DSM 21988 OX=11210 26 GN=queE PE=3 SV=1
MIRVSEIFGPTIQGEGALIGQPTVFVRSGGCDYRCAWCDTLHAVDSEYRHEWLPMTAETIFARIVQLSGGRPLTVSLSGGNPAIQPFGPLIALGRAAGYGFALETQGSVAKDWFRQLDTLVLSPKPPSSGMATDWSAFDACLHAAGDGPRVVLKMVVFDDADYAYARAASARYPHLPVFLQPGNPIGNEAAAADIDGLMAAMRNLVARVVEDGWFSACVLPQLHVLMWGNRKGV

SEQ ID NO: 27934 - protein, 210 aa, Aureimonas flava
  misc_feature (1)..(210): tr|A0A3A1WEU3|A0A3A1WEU3_9RHIZ 7-carboxy-7-deazaguanine synthase OS=Aureimonas flava OX=2320271 GN=queE PE=3 S V=1
MSYAVKEIFYTLQGEGRNAGRAAVFCRFAGCNLWSGREEDRETAVCRFCDTDFVGMDGTGGGRFRSAEALAGAVAASWGEHEGERLVVLTGGEPLLQVDEALTGALHDHGFEIAVETNGTVLPPAGIDWLCVSPKAGAELAVTAGDELKLVYPQAGAEPERFAALRFRHHLLQPMDGPRQAENTRDAVAYCMANPRWRLTLQTHKMLGIR

SEQ ID NO: 27935 - protein, 242 aa, Aureimonas sp.
  misc_feature (1)..(242): tr|A0A0S2EUA3|A0A0S2EUA3_9RHIZ 7-carboxy-7-deazaguanine synthase OS=Aureimonas sp. AU20 OX=1349819 GN=queE PE= 3 SV=1
MSGEAPIRISEIFGPTIQGEGVLIGEPTVFVRSGGCDYRCVWCDTLHAVDASFRDEWRPLSPEAIWQEVERLSGGRPLTVSLSGGNPAIQPFGPLIARGRAAGYGFALETQGSVARDWFAELETLVLSPKPPSSGMATDWSALDACLAAAGAKPRVVLKFVVFDEADYAFAKAAAARHPALPVFLQPGNPVEAARSGSESADLPAMMDRMRWLVEQTLAEGWFAPRILPQLHALIWGHRKGV

SEQ ID NO: 27936 - protein, 242 aa, Aureimonas ureilytica
  misc_feature (1)..(242): tr|A0A175RKX3|A0A175RKX3_9RHIZ 7-carboxy-7-deazaguanine synthase OS=Aureimonas ureilytica OX=401562 GN=queE PE =3 SV=1
MNGEAVIRVSEIFGPTIQGEGVLIGEPTVFVRSGGCDYRCVWCDTLHAVDPAYREEWRPLGTDEIWRYVEALSGGQPLTVSLSGGNPAIQPFGPLIGRGRAAGYRFALETQGSVAKPWFADLSTLILSPKPPSSQMETDWAAFDACLAAAGSAPRTVLKIVVFDEADYAYAKDAGARYPHLSLFLQPGNPVGPAQTESSEVDLEANLGRMRWLVERTLEDGWFAPRILPQLHVLLWGNRKGV

SEQ ID NO: 27937 - protein, 242 aa, Aureimonas ureilytica
  misc_feature (1)..(242): tr|A0A175RF33|A0A175RF33_9RHIZ 7-carboxy-7-deazaguanine synthase OS=Aureimonas ureilytica OX=401562 GN=queE PE =3 SV=1
MSAEAVIRVSEIFGPTIQGEGVLIGEPTVFVRSGGCDYRCVWCDTLHAVDPAYREEWRPLGTDEIWRYVEALSGGQPLTVSLSGGNPAIQPFGPLIGRGRAAGYRFALETQGSVAKPWFADLSTLILSPKPPSSQMETDWAAFDACLSAAGSAPRTVLKIVVFDEADYAYARNAGARYPHLSLFLQPGNPVGPAQTESSEVDLEANLGRMRWLVERTLEDGWFAPRILPQLHVLLWGNRKGV

SEQ ID NO: 27938 - protein, 209 aa, Aureitalea marina
  misc_feature (1)..(209): tr|A0A2S7KQK3|A0A2S7KQK3_9FLAO 7-carboxy-7-deazaguanine synthase OS=Aureitalea marina OX=930804 GN=queE PE=3 S V=1
MDKAVSNLVSKGMMLPLMEAFYTIQGEGYHKGRAAYFVRIGGCDVGCHWCDVKESWNAKLHPPTAIDQIAEDAAHYSNTVVVTGGEPLMWDMGPLTAAFKEKGMQVHIETSGAYTLTGNWDWICLSPKKNKLPLEQVYIEADELKVIIYNRDDLRFAEEQAERVGPSCKLFLQPEWSKREKVMPMIVDYAMANPKWIVSLQTHKYLNIP

SEQ ID NO: 27939 - protein, 209 aa, Aureitalea sp.
  misc_feature (1)..(209): tr|A0A2S0HTR8|A0A2S0HTR8_9FLAO 7-carboxy-7-deazaguanine synthase OS=Aureitalea sp. RR4-38 OX=2094025 GN=queE P E=3 SV=1
MQEEIQIQVEKGLMLPLMEEFYTIQGEGYHKGTAAYFIRIGGCDVGCHWCDVKESWNPAIHPPTGVGQIADNAEKFSKTIVVTGGEPLTWDMGPLTRLLKDKGLDVHIETSGAYPLTGKWDWICLSPKKIKLPVDEIYPLANELKVIVYNRDDLRFAEEQALKVSEKCLLYLQPEWSKRDTVMPLIVDYVMANPKWKVSLQTHKYLNIP

SEQ ID NO: 27940 - protein, 236 aa, Auricoccus indicus
  misc_feature (1)..(236): tr|A0A1Q1G3B5|A0A1Q1G3B5_9STAP 7-carboxy-7-deazaguanine synthase OS=Auricoccus indicus OX=1849491 GN=queE PE=3 SV=1
MIPVLEIFGPTIQGEGAVIGKKTMFVRTAGCDFRCSWCDSSFTWDGSQKHLIQRMTAEEVYNELNKLAPNNFNHVTISGGNPALIKSLDSLVRLLKNQHIEIAVETQGTVFHSWLNQVDDLTISPKPRSSGMNQSLEQLDQFIDSTKAVRRRSLKVVIFDEDDILDALIYHKRYPDIPFYIQVGNPFLDESVENHRDYLLSRYEWLIDSVMNDERFLNVHILPQLHTILWSNKQKV

SEQ ID NO: 27941 - protein, 208 aa, Avibacterium avium
  misc_feature (1)..(208): tr|A0A379AQ99|A0A379AQ99_AVIAV 7-carboxy-7-deazaguanine synthase OS=Avibacterium avium OX=751 GN=queE PE=3 SV= 1
MSELISNPSYPIVEIFQSLQGEGANTGMPSIFIRFGKCNLACPWCDTPYNDFEPWSLQQILAKVRSFSAKNIIITGGEPTIQPQLGLLLDQLKAEGYFLAIETNGLKPVPAQIDYIATSPKREYAQKYRQRCITQANEVRIVADADVQEFCALIESQIQAQHYYLSPCESNGEMNLLHTITQLGLLNQRPNKPKWQLSIQTHKLIGIE

SEQ ID NO: 27942 - protein, 208 aa, Avibacterium endocarditidis
  misc_feature (1)..(208): tr|A0A2S5AI11|A0A2S5AI11_9PAST 7-carboxy-7-deazaguanine synthase OS=Avibacterium endocarditidis OX=380674 GN=q ueE PE=3 SV=1
MAELISNPSYPIVEIFQSLQGEGANTGMPSIFIRFGKCNLACPWCDTPYNDFEPWSLQQILAKVRSFSAKNIIITGGEPTIQPQLSLLLDQLKAEGYFLAIETNGLKPVPAQIDYIATSPKREYAQKYRQRCIVQANEVRIVADADVQEFCALIESQIQAQHYYLSPCESNGEMNLLHTITQLGLLNQRPNKPKWQLSIQTHKLIGIE

SEQ ID NO: 27943 - protein, 213 aa, Avibacterium gallinarum
  misc_feature (1)..(213): tr|A0A379AYS4|A0A379AYS4_AVIGA 7-carboxy-7-deazaguanine synthase OS=Avibacterium gallinarum OX=755 GN=queE PE= 3 SV=1
MAGKLMAELISNPSYPIVEIFQSLQGEGANTGMPSIFIRFGKCNLACPWCDTPYNDFEPWSLQQILAKVRSFSAKNIIITGGEPTIQPQLSLLLDQLKTEGYFLAIETNGLKPVPAQIDYIATSPKREYAQKYRQRCITQANEVRIVADADVQEFCALIENQIQAQHYYLSPCENNGEMNLLHTITQLGLLNQRPNKPKWQLSIQTHKLIGIE

SEQ ID NO: 27944 - protein, 208 aa, Avibacterium paragallinarum
  misc_feature (1)..(208): tr|A0A0F5EXU8|A0A0F5EXU8_AVIPA 7-carboxy-7-deazaguanine synthase OS=Avibacterium paragallinarum OX=728 GN=queE PE=3 SV=1
MAALISNPHYPIVEIFESLQGEGANTGMPSIFVRFGKCNLACPWCDTPYNQFSQWSLQAILQKVRSFSAKNIIITGGEPTIQPQLALLLDQLKAEGYFLAIETNGLKTIPTQIDYIATSPKREYEAKYRQRCISHADEVRIVADGDVQDFCALIESKIQATHYYLSPCEINGEMNLLHTITQLGLLNQRLNKPKWQLSIQTHKLIGIE

SEQ ID NO: 27945 - protein, 208 aa, Avibacterium paragallinarum
  misc_feature (1)..(208): tr|A0A377IB35|A0A377IB35_AVIPA 7-carboxy-7-deazaguanine synthase OS=Avibacterium paragallinarum OX=728 GN=queE PE=3 SV=1
MAALISNPHYPIVEIFESLQGEGANTGMPSIFVRFGKCNLACPWCDTSYNQFSQWSLQAILQKVRSFSAKNIIITGGEPTIQPQLALLLDQLKAEGYFLAIETNGLKTIPTQIDYIATSPKREYEAKYRQRCISHADEVRIVADGDVQDFCALIESKIQATHYYLSPCEINGEMNLLHTITQLGLLNQRLNKPKWQLSIQTHKLIGIE

SEQ ID NO: 27946 - protein, 208 aa, Avibacterium volantium
  misc_feature (1)..(208): tr|A0A3S4KY50|A0A3S4KY50_AVIVO 7-carboxy-7-deazaguanine synthase OS=Avibacterium volantium OX=762 GN=queE PE=3 SV=1
MAELISNPSYPIVEIFQSLQGEGANTGMPSIFIRFGKCNLACPWCDTPYNDFEPWSLQQILAKVRSFSAKNIIITGGEPTIQPQLGLLLDQLKAEGYFLAIETNGLKPVPAQIDYIATSPKREYAQKYRQRCITQANEVRIVADADVQEFCALIESQIQAQHYYLSPCENNGEMNLLHTITQLGLLNQRPNKPKWQLSIQTHKLIGIE

SEQ ID NO: 27947 - protein, 222 aa, Azoarcus communis
  misc_feature (1)..(222): tr|A0A2U8H498|A0A2U8H498_9RHOO 7-carboxy-7-deazaguanine synthase OS=Azoarcus communis OX=41977 GN=queE PE=3 SV =1
MADQENVSRSTTLRLSEIFASLQGESTRVGLPTVFVRLTGCPLRCTWCDTAYAFKGGETVSLESVLEDVASHGLHSVCVTGGEPLAQTACLALLTALCDAGHSVSLETSGALDISAVDPRVSRIMDLKAPGSGESARNRFENIALLNAHDEIKIVLADEADYEWAKGRIAEYDLAARCTVLLSPVAGKLDPARLAEWIVRDRLPVRFQLQLHKVLWQDARGR

SEQ ID NO: 27948 - protein, 221 aa, Azoarcus communis
  misc_feature (1)..(221): tr|A0A323V2X1|A0A323V2X1_9RHOO 7-carboxy-7-deazaguanine synthase OS=Azoarcus communis SWub3 = DSM 12120 OX=112 1029 GN=queE PE=3 SV=1
MAVSLADRAAKLRLTEIFASLQGESTRVGLPTVFVRLTGCPLRCTWCDTAYAFQGGEASTVQTVIDEVARHGLQHVCVTGGEPLAQKSCLPLLSALCDDGYSVSLETSGALDIAGVDPRVSRIMDLKAPGSGEVDKNRFENIACLRPSDEVKIVLADEADYQWACARIAEYDLARRCTVLLSPVAGDLAPSTLADWIVRDRLPVRFQLQLHKVLWNDARGR

SEQ ID NO: 27949 - protein, 222 aa, Azoarcus indigens
  misc_feature (1)..(222): tr|A0A4R6E162|A0A4R6E162_9RHOO 7-carboxy-7-deazaguanine synthase OS=Azoarcus indigens OX=29545 GN=queE PE=3 SV =1
MAVSTAAPAAAKLRITEIFASVQGESTRVGLPTVFVRLTGCPLRCVWCDTAYAFQGGEGRDVASVLEEVASHGLRHVCVTGGEPLSQKSCPALLTALCDAGHSVSLETSGALDISAVDPRVSRIMDLKAPGSGEEARNRYENIPFLNAADEVKIVLADATDYEWAKACIAEHALTRRCAVLLSPVAGNLEPADLAEWIVRDRLPVRFQLQLHKILWNDARGR

SEQ ID NO: 27950 - protein, 220 aa, Azoarcus sp.
  misc_feature (1)..(220): tr|A1K2H6|A1K2H6_AZOSB 7-carboxy-7-deazaguanine synthas e OS=Azoarcus sp. (strain BH72) OX=62928 GN=queE PE=3 S V=1
MTEVVRQPVKLRLTEIFASIQGESTRVGLPTTFVRLTGCPLRCSWCDTAYAFTGGEARALSDVLDDVAALGLRHVCVTGGEPLAQKYCLALLTALCDAGYSVSLETSGALDIGGVDPRVSRVMDLKAPGSAEVTRNRLENIPLLRARDELKIVLADQADYDWARAMIADHDLAARCPVLLSPVAGTLDPAQLAEWIVRDRLPVRFQLQLHKILWNDARGR

SEQ ID NO: 27951 - protein, 222 aa, Azoarcus sp.
  misc_feature (1)..(222): tr|A0A558DI36|A0A558DI36_9RHOO 7-carboxy-7-deazaguanine synthase OS=Azoarcus sp. PHD OX=1628740 GN=queE PE=3 S V=1
MADQENVSRSTTLRLSEIFASLQGESTRVGLPTVFVRLTGCPLRCTWCDTAYAFKGGETVSLESVLEDVSSHGLNSVCVTGGEPLAQTACLPLLTALCDAGHSVSLETSGALDISAVDPRVSRIMDLKAPGSGESARNRFENIALLNARDEIKMVLADEADYGWAKARIAEYDLAARCTVLLSPVAGKLDPTRLAEWIVRDRLPVRFQLQLHKVLWQDARGR

SEQ ID NO: 27952 - protein, 220 aa, Azoarcus tolulyticus
  misc_feature (1)..(220): tr|A0A1N6N935|A0A1N6N935_9RHOO 7-carboxy-7-deazaguanine synthase OS=Azoarcus tolulyticus OX=34027 GN=queE PE=3 SV=1
MTLPETAGPRLRITEIFASIQGESTRVGLPTVFVRLTGCPLRCSWCDTEYAFQGGENRSIAEVRDAVAAHGIRHVCVTGGEPLAQKSCLALLAALCDAGFSVSLETSGALDIAAVDPRVSRIMDLKAPGSGEVSRNRWENLAHLTAHDEIKIVLADEADYAWAKAQIALHGLGGRCTVLLSPVQGSLDPTLLAEWIVRDRLPVRFQLQLHKILWNDARGR

SEQ ID NO: 27953 - protein, 226 aa, Azomonas agilis
  misc_feature (1)..(226): tr|A0A562I147|A0A562I147_9GAMM 7-carboxy-7-deazaguanine synthase OS=Azomonas agilis OX=116849 GN=queE PE=3 SV= 1
MACFAVAPVADMHSKLRITEIFYSLQGESRTCGLPTVFIRLTGCPLRCHYCDTSYAFSGGVQRTLEDILTEVASFGASHVCVTGGEPLAQPDCLHLLRHLADAGYQVSLETSGALDVSAVDARISRVLDLKTPDSGEMTRNRYDNLRHLTLQDQIKFVICSRADYEWAVGCIHQYRLSELVGELLFSPAYGLIEPSLLADWILADRLPVRFQLQLHKLLWQDARGR

SEQ ID NO: 27954 - protein, 212 aa, Azonexus fungiphilus
  misc_feature (1)..(212): tr|A0A495VPI2|A0A495VPI2_9RHOO 7-carboxy-7-deazaguanine synthase OS=Azonexus fungiphilus OX=146940 GN=queE PE= 3 SV=1
MTLRLTEIFYSLQGEASRVGLPTVFVRLTGCPLRCTWCDTTYSFTGGETSTVSDVLAEVARHPVRQVCVTGGEPLAQKACLDLLVALCDAGYDVSLETSGALDIAPVDPRVSCIMDLKAPDSGESGRNLWANLQHLKPRDEIKIVIASREDYEWACEVLQVHALDSRCPVLFSPAQGSIEPAALASWILEDGLPVRFQLQLHKLLWGNMQGK

SEQ ID NO: 27955 - protein, 212 aa, Azonexus hydrophilus
  misc_feature (1)..(212): tr|A0A1R1I3L4|A0A1R1I3L4_9RHOO 7-carboxy-7-deazaguanine synthase OS=Azonexus hydrophilus OX=418702 GN=queE PE= 3 SV=1
MTLRITEIFYSLQGEASRVGLPTVFVRLTGCPLRCTWCDTTYSFTGGETSTVAAVLAEVGKYPARQVCVTGGEPLAQKACLTLLSALCDAGYDVSLETSGALDIAPVDPRVSCIMDLKAPDSGESAKNLWANLTHLKPRDEIKIVIASREDYEWAREVLLAHRLDARCPVLFSPAQGSIEPAELASWILEDGLPVRFQLQLHKLLWGNMQGK

SEQ ID NO: 27956 - protein, 212 aa, Azorhizobium caulinodans
  misc_feature (1)..(212): tr|A8HQX3|A8HQX3_AZOC5 7-carboxy-7-deazaguanine synthas e OS=Azorhizobium caulinodans (strain ATCC 43989 / DSM 5975 / JCM 20966 / NBRC 14845 / NCIMB 13405 / ORS 571) OX=438753 GN=queE PE=3 SV=1
MSYAVKEIFKTLQGEGAQAGRAAVFCRFAGCNLWSGREEDRASAICRFCDTDFVGMDGEGGGRFADAPSLAATIARTWGEKGAGGRPYVVFTGGEPLLQLDAALIEAVHAEGFEIAIETNGTLPAPAGIDWICVSPKAGAEIVQRTGSELKLVYPQPEVPPEAVAGLTFEHYFLQPMDGPARIENTQAVIAYCLAHPQWRLSLQTHKITGIP

SEQ ID NO: 27957 - protein, 210 aa, Azorhizobium sp.
  misc_feature (1)..(210): tr|A0A258K0V4|A0A258K0V4_9RHIZ 7-carboxy-7-deazaguanine synthase OS=Azorhizobium sp. 32-67-21 OX=1970319 GN=qu eE PE=3 SV=1
MTYSVKEMFKTLQGEGAQAGRAAVFCRFSGCNLWTGREEDREKAVCRFCDTDFIGMDGEGGGRFADALALADALVRVWDGAPARRFVVFTGGEPLLQVDADLVAAVHARGFEIAIETNGTRLPPDGIDWICVSPKAGADLVLTRGHELKLVYPQPELRPETVAELDFAHFFLQPMDGPDRSANTQAAVAYCLDHPQWRLSVQTHKMIGIP

SEQ ID NO: 27958 - protein, 215 aa, Azospira oryzae
  misc_feature (1)..(215): tr|G8QPN4|G8QPN4_AZOOP 7-carboxy-7-deazaguanine synthas e OS=Azospira oryzae (strain ATCC BAA-33 / DSM 13638 / PS) OX=640081 GN=queE PE=3 SV=1
MTAPTLKISEIFYSLQGETSRTGLPTVFVRLTGCPLRCVWCDTAYSFSGGTLMSLPAILAEVARHPTQRVCVSGGEPLAQKNCLPLLTALCDAGCDVSLETSGALDVSGVDPRVSKIVDLKAPGSGEVERNLWSNLEYLTPHDELKLVLADRADYDWAVAQLRQHGLIGRCPILMAPVQGSLEPGTLADWILADGLPVRLQVQLHKLLWGNMRGK

SEQ ID NO: 27959 - protein, 215 aa, Azospira oryzae
  misc_feature (1)..(215): tr|A0A2W5HQT6|A0A2W5HQT6_9RHOO 7-carboxy-7-deazaguanine synthase OS=Azospira oryzae OX=146939 GN=queE PE=3 SV= 1
MNPVRLRVTEIFHSLQGETSRVGLPTVFVRLTGCPLRCVWCDTEYAFHGGALKTIPQILEAVSAYGTRRVCVTGGEPLAQRACLALLTALCDAGFEVSLETSGALDVSAVDPRVAKVMDLKAPGSGEEAENRWENLAYLTPRDELKIVLADEADYEWARRVLAERRLAEICPVLLSPVYGRLDPARLAEWILRDRLPVRLQIQLHKVLWGEAPGH

SEQ ID NO: 27960 - protein, 215 aa, Azospira sp.
  misc_feature (1)..(215): tr|A0A2R5EAT8|A0A2R5EAT8_9RHOO 7-carboxy-7-deazaguanine synthase OS=Azospira sp. I13 OX=1765050 GN=queE PE=3 S V=1
MSTTTLKISEIFYSLQGETSRTGLPTVFVRLTGCPLRCTWCDTEYSFSGGTVMALDDILAEVARHPTRRVCVTGGEPLAQKNCLPLLAALCDAGCDVSLETSGALDVSGVDVRISKIVDLKAPGSGEVERNLWSNLQYLTPHDELKLVLADRADYDWAVARIAEHGLAGHCPILMAPVQGRLEPGQLADWILADGLEVRLQVQLHKLLWGNMRGK

SEQ ID NO: 27961 - protein, 215 aa, Azospira sp.
  misc_feature (1)..(215): tr|A0A5H2Y7L4|A0A5H2Y7L4_9RHOO 7-carboxy-7-deazaguanine synthase OS=Azospira sp. I09 OX=1765049 GN=queE PE=4 S V=1
MTAPTLKISEIFYSLQGETSRTGLPTVFVRLTGCPLRCVWCDTAYSFSGGTLMSLPAILAEVARHPTKRVCVSGGEPLAQKNCLPLLTALCDAGCDVSLETSGALDVSGVDPRVSKIVDLKAPGSGEVERNLWSNLEYLTPHDELKLVLADRADYDWAVAQLRQHGLIGRCPILMAPVQGSLEPGTLADWILADGLPVRLQVQLHKLLWGNMRGK

SEQ ID NO: 27962 - protein, 210 aa, Azospirillum brasilense
  misc_feature (1)..(210): tr|A0A2W5GEY9|A0A2W5GEY9_AZOBR 7-carboxy-7-deazaguanine synthase OS=Azospirillum brasilense OX=192 GN=queE PE= 3 SV=1
MSYAVKEIFATLQGEGAQAGRPSVFCRFAGCNLWSGREEDRAGAVCQFCDTDFVGMDGEGGGRFADAEALAAAIEAAWPGGPSHRYVVFTGGEPLLQLDAALIAAVHARGFEIAVESNGTVEPPEGIDWLCISPKAGAPLKVRRGSELKLVFPQHRLMPDSLPPLEFRHFYLQPMDGPDRLAHTEAAVRYCLEHPQWRLSLQTHKLIGIP

SEQ ID NO: 27963 - protein, 231 aa, Azospirillum brasilense
  misc_feature (1)..(231): tr|G8AIV5|G8AIV5_AZOBR 7-carboxy-7-deazaguanine synthas e OS=Azospirillum brasilense Sp245 OX=1064539 GN=queE P E=3 SV=1
MRGANPVRPQEGGDGQSLWIQEVFYTLQGEGPFVGEPSVFVRTGGCNLRCHWCDTDFESSPWRPSLDELLARIGELRPAVCDLIVLTGGEPLRQNVVPLIRALLERGLRVQIETNGTLWLDGMPDDPRLTIVCSPKTPGLHPDLVPRVSVYKYVLAAGESDSGDGLPTLSTQLPGQGARLFRPPPGAAVTVMPRDDDDAERNFANRQACTAVALAHGYRMSVQLHKLLGIA

SEQ ID NO: 27964 - protein, 210 aa, Azospirillum sp.
  misc_feature (1)..(210): tr|A0A2U1YLN9|A0A2U1YLN9_9PROT 7-carboxy-7-deazaguanine synthase OS=Azospirillum sp. TSO5 OX=716760 GN=queE PE =3 SV=1
MSYAVKELFKTLQGEGAQAGRAAVFCRFAGCNLWSGREQDRHSAICRFCDTDFVGIDGEGGGRFSDGRALAAVIAQAWGPSRSHRYVVFTGGEPLLQLDAALLEAVHAEGFEAAVETNGTLEPPLGLDWVCVSPKAGSEWVLRRGHELKLVYPQPELPPEGLEGLDFQHFWLQPMDGPERNHNIEAAVAYCQKNPKWRLSLQTHKFIGIP

SEQ ID NO: 27965 - protein, 226 aa, Azotobacter beijerinckii
  misc_feature (1)..(226): tr|A0A1H6WFB0|A0A1H6WFB0_9GAMM 7-carboxy-7-deazaguanine synthase OS=Azotobacter beijerinckii OX=170623 GN=queE PE=3 SV=1
MACFAVTPVADMQETLRITEIFHSLQGETRTAGLPTVFVRLTGCPLRCQYCDTAYAFSGGENLPLSEILERVAGYQSRRVCVTGGEPLAQPNSVALLRRFCEAGYEVSLETSGAFDVSDVDARVSRVLDLKTPGSGEVARNRYENIALLTRHDQMKFVLCSREDYDWAVSKLIEYRLDSRVGEVLFSPSHGQLEGRELADWIVADNLPVRLQLQLHKILWNDARGR

SEQ ID NO: 27966 - protein, 226 aa, Azotobacter beijerinckii
  misc_feature (1)..(226): tr|A0A1I4D4P8|A0A1I4D4P8_9GAMM 7-carboxy-7-deazaguanine synthase OS=Azotobacter beijerinckii OX=170623 GN=queE PE=3 SV=1
MACFAVTPVADMQETLRITEIFHSLQGETRTAGLPTVFVRLTGCPLRCQYCDTAYAFSGGENLPLSEILERVAGYQSRRVCVTGGEPLAQSNSVALLRRLCEAGYEVSLETSGAFDVSDVDARVSRVLDLKTPGSGEVARNRYENIALLTRHDQMKFVLCSREDYDWAVSKLIEYRLDSRVGEVLFSPSHGQLEGRELADWIVADNLPVRLQLQLHKILWNDARGR

SEQ ID NO: 27967 - protein, 226 aa, Azotobacter chroococcum
  misc_feature (1)..(226): tr|A0A0C4WKY0|A0A0C4WKY0_9GAMM 7-carboxy-7-deazaguanine synthase OS=Azotobacter chroococcum NCIMB 8003 OX=1328 314 GN=queE PE=3 SV=1
MACFAVTPVADMQETLRITEIFHSLQGETRTAGLPTVFVRLTGCPLRCHYCDTAYAFSGGEILSLSAILERVAGYKPRYVCVTGGEPLAQPNGIALLRRLCDAGYEVSLETSGAFDVSAVDGRVSRVLDLKTPGSGEVARNRYENLALLTRNDQVKFVLCSRQDYDWAVSKLIEYRLDERAGEVLFSPSHGQLDGRELADWIVADNLPVRLQLQLHKILWNDAQGR

SEQ ID NO: 27968 - protein, 215 aa, Azotobacter chroococcum
  misc_feature (1)..(215): tr|A0A4Q9VQ59|A0A4Q9VQ59_9GAMM 7-carboxy-7-deazaguanine synthase OS=Azotobacter chroococcum OX=353 GN=queE PE= 3 SV=1
MQETLRITEIFYSLQGETRTAGLPTVFVRLTGCPLRCHYCDTTYAFSGGEILSLSAILERVAGYKPRYVCVTGGEPLAQPNGIALLRRLCDAGYEVSLETSGAFDVSAVDGRVSRVLDLKTPGSGEVARNRYENLALLTRNDQVKFVLCSRQDYDWAVSKLIEYRLDERAGEVLFSPSHGQLDGRELADWIVADNLPVRLQLQLHKILWNDAQGR

SEQ ID NO: 27969 - protein, 193 aa, Azotobacter vinelandii
  misc_feature (1)..(193): tr|C1DRF0|C1DRF0_AZOVD 7-carboxy-7-deazaguanine synthas e OS=Azotobacter vinelandii (strain DJ / ATCC BAA-1303) OX=322710 GN=queE PE=3 SV=1
MPTVFVRLTGCPLRCGYCDTAYAFSGGAVLPLSVILERVASYGPRYVCVTGGEPLAQPNSIELLRLLCDAGYEVSLETSGAFDISAVDCRVSRVLDLKTPDSGEVARNRYANMTLLTRNDQMKFVLCSRQDYEWAVSKLIEYRLDERVGEVLFSPSHGQLEGRELADWIVADNLPVRLQLQLHKILWNDARGR

SEQ ID NO: 27970 - protein, 193 aa, Azotobacter vinelandii; identical to SEQ ID NO: 27969
  misc_feature (1)..(193): tr|M9YHZ2|M9YHZ2_AZOVI 7-carboxy-7-deazaguanine synthas e OS=Azotobacter vinelandii CA6 OX=1283331 GN=queE PE=3 SV=1

SEQ ID NO: 27971 - protein, 243 aa, Bacillaceae bacterium
  misc_feature (1)..(243): tr|A0A3E0JRK4|A0A3E0JRK4_9BACI 7-carboxy-7-deazaguanine synthase OS=Bacillaceae bacterium OX=1889774 GN=queE P E=3 SV=1
MMKKIPVIEIFGPTIQGEGMVIGQKTMFVRTAGCDYSCSWCDSAFTWNGSAKDEIKQMTAAEILDDLIELGGDRFNHVTISGGNPALIRGLDELIILLREQGFRTALETQGSRYQDWFLLIDDLTLSPKPPSSGMKTNFTVLDDIMKRLIDGGRKDNVSLKVVVFNEEDFDYAKNVHLRYPNISFYLQPGNDQVNEQNDHLLRNQLLEKLEWLIELTVQSKEMNDARVLPQLHALVWGNKRGV

SEQ ID NO: 27972 - protein, 241 aa, Bacillaceae bacterium
  misc_feature (1)..(241): tr|A0A271M0E5|A0A271M0E5_9BACI 7-carboxy-7-deazaguanine synthase OS=Bacillaceae bacterium SAOS 7 OX=2015052 GN =queE PE=3 SV=1
MNRKIPVLEIFGPTVQGEGMVIGRKTMFVRTAGCDYSCSWCDSAFTWDGSAKEDIRLLTAEEIWSELEQLGGQTFDHVTISGGNPALFPQIAGLVSELHQHGVQTALETQGSRWQDWFYDIDELTISPKPPSSGMTTDFKQLAMIIQRLEEKEKLISLKVVVFDEADLAYAKIVHQQFPQVPFFLQTGNDRLEEINDAELLSYLVKKYEWLIEQTMPDADWKNVRVLPQLHTFVWGNKKGV

SEQ ID NO: 27973 - protein, 241 aa, Bacilli bacterium
  misc_feature (1)..(241): tr|A0A0K0GE39|A0A0K0GE39_9FIRM 7-carboxy-7-deazaguanine synthase OS=Bacilli bacterium VT-13-104 OX=1637974 GN= queE PE=3 SV=1
MRKIPVLEIFGPTIQGEGMVIGQKTMFVRTAGCDYSCSWCDSKFTWDGSEKESIQMMEPQEIVEALYEKGGGRFQHVTISGGNPGLLAQLNALVDLLHENQVKVALETQGSRWQEWFTKIDDLTISPKPPSSGMTTNFETLDFIIRSLKEKQQGDFSLKVVVFGKKDLQYAINIHKRYPDVKLFLQVGNDDLETGEQEKLLAYLLEKYERLVDLVMNSSELNDVRVLPQLHTYLWGNKRGV

SEQ ID NO: 27974 - protein, 243 aa, Bacillus aerius
  misc_feature (1)..(243): tr|A0A3A9DHY8|A0A3A9DHY8_9BACI 7-carboxy-7-deazaguanine synthase OS=Bacillus aerius OX=293388 GN=queE PE=3 SV= 1
MAKPIPVLEIFGPTVQGEGMVIGQKTMFVRTAGCDYSCSWCDSAFTWDGSAKKDIKWMTAEEVYESLKDIGGNAFSHVTISGGNPALLKQLDGLISLLKENGIRTALETQGTFYQDWFAGIDDLTISPKPPSSNMKTDFNKLDHIVEKLKEHGRAAAASLKVVIFTGEDLQFAKQVHQRYPDVPFFLQVGNDDVHTEDQERLVERLLQKYEQLVEAVTRDPELNRVRVLPQLHTLIWGNKRGV

SEQ ID NO: 27975 - protein, 243 aa, Bacillus aerophilus
  misc_feature (1)..(243): tr|A0A410KUE5|A0A410KUE5_9BACI 7-carboxy-7-deazaguanine synthase OS=Bacillus aerophilus OX=293389 GN=queE PE=3 SV=1
MTKAIPVLEIFGPTIQGEGMVIGQKTMFVRTAGCDYSCSWCDSSFTWDGSAKHDIQWLQAEDIVKELKRIGGKAFSHVTISGGNPALLKQMESLIDLLHEEGIDTALETQGTMYQDWFLKIDDLTISPKPPSSNMKTDFTKLTRIIDELKNGNRLQHASLKVVIFDDLDLAYAKDVHAKYPELPFYLQVGNDDTTTADDAYLLTHLLKKYEMLVDQVAQDPDLNRVRVLPQLHTLLWGNKRGV

SEQ ID NO: 27976 - protein, 235 aa, Bacillus akibai
  misc_feature (1)..(235): tr|W4QX81|W4QX81_BACA3 7-carboxy-7-deazaguanine synthas e OS=Bacillus akibai (strain ATCC 43226 / DSM 21942 / J CM 9157 / 1139) OX=1236973 GN=queE PE=3 SV=1
MKIPVMEIFGPTIQGEGMVIGQKTMFVRTGGCDYSCSWCDSSFTWDGSTRSHLMQAADIVEELIQIGGNRFSHVTISGGNPALHKGIEELIGLCHSNGWKVAVETQGSIWQEWMKQIDDVTISPKPPSSGMNTDYQRLDFYMEELQGHHVSLKVVVFNDEDFEFAEEVHKRYPNVPFYLQIGNENVASTNNAELLSMLLERYEWLIEKATQSSAMNDAKVLPQLHTLIWGNKRGV

SEQ ID NO: 27977 - protein, 238 aa, Bacillus albus
  misc_feature (1)..(238): tr|A0A1J9SXU6|A0A1J9SXU6_9BACI 7-carboxy-7-deazaguanine synthase OS=Bacillus albus OX=2026189 GN=queE PE=3 SV= 1
MSKIPVLEIFGPTIQGEGMVVGQKTMFIRTAGCDYSCAWCDSAFTWDGSAKDQIRQMTAEDVWNELVEIGGENFSHVTISGGNPALLKNIEFLLSILKENGMRTAIETQGSKWQDWLLQIDEITISPKPPSSAMNTDFQKLDDVIQKLAGKDISLKVVVFDDYDFEYAVKMHERYPDVPFFLQVGNDDTKTVDDAMLIKKLLDKYEWLIEKAVNCKEMNNAKVLPQLHALVWGNKRGV

SEQ ID NO: 27978 - protein, 236 aa, Bacillus alcalophilus
  misc_feature (1)..(236): tr|A0A094WRV4|A0A094WRV4_BACAO 7-carboxy-7-deazaguanine synthase OS=Bacillus alcalophilus ATCC 27647 = CGMCC 1 .3604 OX=1218173 GN=queE PE=3 SV=1
MKKIPVMEIFGPTIQGEGMVIGQKTMFVRTSGCDYSCSWCDSAFTWDGTGKSTLMTAEAIVEQLQQIGGDNFSHVTISGGNPALHKGIAALVDLLKEKQIQTAIETQGSIWQDWLLDIDEVTISPKPPSSKMETNLEKLDEIIHKLSDRNISLKVVIFDDVDFDYAETIHKRYPDVPFYLQVGNEDAKTEENHNLLQQLLNRYEWLIERTIDSQVMNDAKVLPQLHTLLWGNKRGV

SEQ ID NO: 27979 - protein, 243 aa, Bacillus altitudinis
  misc_feature (1)..(243): tr|A0A5D4PW56|A0A5D4PW56_9BACI 7-carboxy-7-deazaguanine synthase OS=Bacillus altitudinis OX=293387 GN=queE PE= 3 SV=1
MTKAIPVLEIFGPTIQGEGMVIGQKTMFVRTAGCDYSCSWCDSSFTWDGSAKHDIQWLQAEDIVKELKRIGGKAFSHVTISGGNPALLKQMESLIDLLHEEGIDTALETQGTMYQDWFLKIDDLTISPKPPSSNMKTDFTKLTRIIDELKNGNRLHHASLKVVIFDDLDLAYAKDVHAKYPELPFYLQVGNDDTTTADDAYLLTHLLKKYEMLVDQVAQDPDLNRVRVLPQLHTLLWGNKRGV

SEQ ID NO: 27980 - protein, 243 aa, Bacillus altitudinis; identical to SEQ ID NO: 27975
  misc_feature (1)..(243): tr|A0A5C2C9W5|A0A5C2C9W5_9BACI 7-carboxy-7-deazaguanine synthase QueE OS=Bacillus altitudinis OX=293387 GN=que E PE=4 SV=1

SEQ ID NO: 27981 - protein, 243 aa, Bacillus amyloliquefaciens
  misc_feature (1)..(243): tr|A0A5C8IUJ2|A0A5C8IUJ2_BACAM 7-carboxy-7-deazaguanine synthase OS=Bacillus amyloliquefaciens OX=1390 GN=queE PE=3 SV=1
MAKGIPVLEIFGPTIQGEGMVIGQKTMFVRTAGCDYSCSWCDSAFTWDGSAKKDIRWMTAEDIYRELREIGGDAFSHVTISGGNPALLKQLDALILLLKDHGVRAALETQGTVYQDWFTMINDLTISPKPPSSGMTTDFAKLDHIVSSLDAAERLSAVSLKVVIFNDEDLQFAKTVHKRYPNIPFYLQVGNDNVHTTDDQALIAHLLGKYEKLVDKVSADADLNLVRVLPQLHTLLWGNKRGV

SEQ ID NO: 27982 - protein, 243 aa, Bacillus amyloliquefaciens
  misc_feature (1)..(243): tr|A0A5C0ZC15|A0A5C0ZC15_BACAM 7-carboxy-7-deazaguanine synthase OS=Bacillus amyloliquefaciens OX=1390 GN=queE PE=3 SV=1
MAKGIPVLEIFGPTIQGEGMVIGQKTMFVRTAGCDYSCSWCDSAFTWDGSAKKDIRWMTAEDIYRELREIGGDAFSHVTISGGNPALLKQLDALILLLKEHGVRAALETQGTVYQDWFTMINDLTISPKPPSSGMTTDFAKLDYIVSSLDAAERLNAVSLKVVIFSDEDLQFAKTVHKRYPNIPFYLQVGNDNVHTTDDRALIAHLLGKYETLVDKVSADSDLNLVRVLPQLHTLLWGNKRGV

SEQ ID NO: 27983 - protein, 238 aa, Bacillus anthracis
  misc_feature (1)..(238): tr|A0A2C3GQL6|A0A2C3GQL6_BACAN 7-carboxy-7-deazaguanine synthase OS=Bacillus anthracis OX=1392 GN=queE PE=3 SV =1
MSKIPVLEIFGPTIQGEGMVVGQKTMFIRTAGCDYSCAWCDSAFTWDGSAKDQIRQMTAEDVWNELVEIGGENFSHVTISGGNPALLKNIEFLLSILKENGMRTAIETQGSKWQDWLLEIDEITISPKPPSSTMNTDFQKLDDVIQKLAGKDISLKVVVFDDYDFEYAVKMHERYPDVPFFLQVGNDDTKTVDDAMLIKKLLDKYEWLIEKAVNCKEMNNAKVLPQLHALVWGNKRGV

SEQ ID NO: 27984 - protein, 238 aa, Bacillus anthracis
  misc_feature (1)..(238): tr|A0A3P1UCK3|A0A3P1UCK3_BACAN 7-carboxy-7-deazaguanine synthase OS=Bacillus anthracis OX=1392 GN=queE PE=3 SV =1
MSKIPVLEIFGPTIQGEGMVVGQKTMFIRTAGCDYSCAWCDSAFTWDGSAKDQIRQMTAEDVWNELVEIGGENFSHVTISGGNPVLLKNIEFLLSILKENGMRTAIETQGSKWQDWLLQIDEITISPKPPSSTMNTDFQKLDDVIQKLAGKDISLKVVVFDDYDFEYAVKMHERYPDVPFFLQVGNDDTKTVDDAMLIKKLLDKYEWLIEKAVNRKEMNNAKVLPQLHALVWGNKRGV

SEQ ID NO: 27985 - protein, 240 aa, Bacillus aquimaris
  misc_feature (1)..(240): tr|A0A366EZ69|A0A366EZ69_9BACI 7-carboxy-7-deazaguanine synthase OS=Bacillus aquimaris OX=189382 GN=queE PE=3 SV=1
MKKIPVLEVFGPTIQGEGMVIGQKTMFVRTAGCDYSCSWCDSAFTWDGSAKEDIQLMTAEEVWNRLKEVGGNKFSHVTISGGNPALLAHLKELIDLLKENGIASALETQGSRWQDWFYDIDDLTLSPKPPSSNMETDFEKLDFIVQRLIENGSQFSLKVVVFDDEDLEYATKIHKLYPDVPFYIQTGNPSVSEGDTPKLVSNLLLDYEALIEKVCEKEELNHVRVLPQLHTLVWGNKRGV

SEQ ID NO: 27986 - protein, 240 aa, Bacillus aquimaris
  misc_feature (1)..(240): tr|A0A5D4UUW5|A0A5D4UUW5_9BACI 7-carboxy-7-deazaguanine synthase OS=Bacillus aquimaris OX=189382 GN=queE PE=3 SV=1
MKKIPVLEVFGPTIQGEGMVIGQKTMFVRTAGCDYSCSWCDSAFSWDGSAKEDIQLMTAEEVWNRLKEVGGNKFSHVTISGGNPALLAHLKEFIEILKENGIGSALETQGSRWQDWFYDIDDLTLSPKPPSSKMETDFEKLDFIVHRLIQNGSQFSLKVVVFDDKDLEYATKIHKHYPDVPFYIQTGNPSVSEEDTPKLLSNLLLDYEALIEKICEKEELNHVRVLPQLHTLVWGNKRGV

SEQ ID NO: 27987 - protein, 243 aa, Bacillus aryabhattai
  misc_feature (1)..(243): tr|A0A1G6Q5B5|A0A1G6Q5B5_9BACI 7-carboxy-7-deazaguanine synthase OS=Bacillus aryabhattai B8W22 OX=1358420 GN=q ueE PE=3 SV=1
MANTIPVLEIFGPTIQGEGMVVGRKTMFVRTAGCDYSCSWCDSAFTWDGSAKNDIRQLTAEQIWTELKEIGGECFDHVTISGGNPALIKAIDSLVELLHSHGVKAALETQGSRYQDWFLKIDDLTISPKPPSSLMKTNFSVLDDIIETLIKEKRMAHISIKVVVFNDEDFEYAASVHERYLEVPFFVQVGNEDLTTIDNASLTQELLKKYEWLIDKAVAAKNMNDVRVLPQVHALVWGNKRGV

SEQ ID NO: 27988 - protein, 224 aa, Bacillus aryabhattai
  misc_feature (1)..(224): tr|A0A1S2CBT4|A0A1S2CBT4_9BACI 7-carboxy-7-deazaguanine synthase OS=Bacillus aryabhattai OX=412384 GN=queE PE= 3 SV=1
MVVGRKTMFVRTAGCDYSCSWCDSAFTWDGSAKNDIRQLTAEQIWMELKEIGGECFDHVTISGGNPALIKAIGSLVELLHSHGVKAALETQGSRYQDWFLKIDDLTISPKPPSSLMKTNFSVLDDIIETLIKEKRMGHISIKVVIFNDEDFEYAASVHERYPEVPFFVQVGNEDLTTIDNASLTQELLKKYEWLIDKAVAAKNMNDVRVLPQVHALVWGNKRGV

SEQ ID NO: 27989 - protein, 240 aa, Bacillus asahii
  misc_feature (1)..(240): tr|A0A398BAW9|A0A398BAW9_9BACI 7-carboxy-7-deazaguanine synthase OS=Bacillus asahii OX=228899 GN=queE PE=3 SV= 1
MSKIPVMEIFGPTIQGEGSMIGQKTMFVRTAGCDYSCSWCDSAFTWDGSGKEYITQLTAEEIWAELKRIGGDGFSFVTISGGNPALLKNLDSLVALLKEQGIKMGVETQGSRWQDWFYEINELTISPKPPSSGMKTDFGILDEIFTKLQNNQHHVSLKVVIFNDEDYEYGKAIHHRYPDIPFFFQVGNDDSTTTDDSKLISRLLQKYEWLIDKVVQDQDVTNVKVLPQLHTYVWGNKRGV

SEQ ID NO: 27990 - protein, 240 aa, Bacillus asahii
  misc_feature (1)..(240): tr|A0A3T0KQ68|A0A3T0KQ68_9BACI 7-carboxy-7-deazaguanine synthase OS=Bacillus asahii OX=228899 GN=queE PE=3 SV= 1
MSKIPVMEIFGPTIQGEGSMIGQKTMFVRTAGCDYSCSWCDSAFTWDGSGKEYITQMTAEEIWDELKRIGGDGFSFVTISGGNPALLKNLGSLVALLKEQGIKMGVETQGSRWQDWFYEINELTISPKPPSSGMKTDFGILDEIFTKLQNNQHHVSLKVVIFNDEDYEYGKAMHHRYPDIPFFFQVGNDDSTTTDDSRLISRLLQKYDWLIDKVVQDQTVTNVKVLPQLHTYIWGNKRGV

SEQ ID NO: 27991 - protein, 243 aa, Bacillus atrophaeus
  misc_feature (1)..(243): tr|A0A0H3DXZ2|A0A0H3DXZ2_BACA1 7-carboxy-7-deazaguanine synthase OS=Bacillus atrophaeus (strain 1942) OX=72055 5 GN=queE PE=3 SV=1
MAKGIPVLEIFGPTIQGEGMVIGQKTMFVRTAGCDYSCSWCDSAFTWDGSAKKDIRWMTAEDIYSELKEIGGDAFSHVTISGGNPALLKQLDSFITLLKEQNIRTALETQGTVYQEWFTLIDDLTISPKPPSSGMTTDFKKLDHILTSLKDENRLRAVSLKVVIFNDRDLEYAKTVHKRYSDIPLYLQVGNDNVHTTDDQSLITHLLGKYETLVDKVAADAELNLVRVLPQLHTLLWGNKRGV

SEQ ID NO: 27992 - protein, 243 aa, Bacillus atrophaeus
  misc_feature (1)..(243): tr|A0A384IJR8|A0A384IJR8_BACAT 7-carboxy-7-deazaguanine synthase OS=Bacillus atrophaeus OX=1452 GN=queE PE=3 S V=1
MAKGIPVLEIFGPTIQGEGMVIGQKTMFVRTAGCDYSCSWCDSAFTWDGSAKKDIRWMAADDIYSELKEIGGDAFSHVTISGGNPALLKQLDTFITLLKEQNIRTALETQGTVYQEWFTLIDDLTISPKPPSSGMTTDFKKLDHILTSLTAENRLHAVSLKVVIFNDGDLEYAKTVHKRYPDIPLYLQVGNDNVHTTDDQSLIAHLLGKYEKLVDKVAADAELNLVRVLPQLHTLLWGNKRGV

SEQ ID NO: 27993 - protein, 243 aa, Bacillus australimaris
  misc_feature (1)..(243): tr|A0A0P7G909|A0A0P7G909_9BACI 7-carboxy-7-deazaguanine synthase OS=Bacillus australimaris OX=1326968 GN=queE PE=3 SV=1
MAKAIPVLEIFGPTIQGEGMVIGQKTMFVRTAGCDYSCSWCDSSFTWDGSAKHDIQWLQAEDIVQELKRIGGQAFSHVTISGGNPALLKQMESLIDLLHEEGIDTALETQGTMYQDWFLKIDDLTISPKPPSSNMKTDFTKLTRIIDELKSGNRLQHASLKVVIFDERDLAYAKDVHAKYPELTFYLQVGNDDTTTSDDAYLLTHLLKKYEALVDQVAQDPDLNRVRVLPQLHTLLWGNKRGV

SEQ ID NO: 27994 - protein, 239 aa, Bacillus azotoformans
  misc_feature (1)..(239): tr|A0A072NJ26|A0A072NJ26_BACAZ 7-carboxy-7-deazaguanine synthase OS=Bacillus azotoformans MEV2011 OX=1348973 G N=queE PE=3 SV=1
MSRIPVLEIFGPTIQGEGAVIGRKTMFVRTAGCDYHCNWCDSAFTWDGSAKDEIEQMTPEEIWNELFELGGNRFDHVTISGGNPALITAIGELVSLLNEKGIQTALETQGSKWQDWMKNIDDLTLSPKPPSSGMETNFEILDSIVATLSEVGNATIKVVVFDDVDFEYAIKIRERYRDVPFYLQVGNDDITTVDNDLLTKKLLQKYEWLMNKVMESPQMNDVRVLPQLHALVWGNKRGV

SEQ ID NO: 27995 - protein, 239 aa, Bacillus azotoformans
  misc_feature (1)..(239): tr|K6D701|K6D701_BACAZ 7-carboxy-7-deazaguanine synthas e OS=Bacillus azotoformans LMG 9581 OX=1131731 GN=queE PE=3 SV=1
MSRIPVLEIFGPTIQGEGAVIGRKTMFVRTAGCDYHCNWCDSAFTWDGSAKDEIKQMTPEKIWDELFELGGNRFDHVTISGGNPALITAIGELVSLLNEKGIQTALETQGSKWQDWMKNIDDLTLSPKPPSSGMETNFEILDSIVATLLEVGNETIKVVVFDDVDFEYAIKIRERYRDVPFYLQVGNDDITTVDNDLLTKKLLQKYEWLINKVMESPQMNDVRVLPQLHALVWGNKRGV

SEQ ID NO: 27996 - protein, 238 aa, Bacillus bacterium
  misc_feature (1)..(238): tr|A0A506QML7|A0A506QML7_9BACI 7-carboxy-7-deazaguanine synthase OS=Bacillus bacterium OX=2053512 GN=queE PE=3 SV=1
MSKIPVLEIFGPTIQGEGMVVGQKTMFIRTAGCDYSCAWCDSAFTWDGSAKDQIRQMTAEEIWNELVEIGGENFSHVTISGGNPALLKNIEFLLSILKENGMRTAIETQGSKWQDWLLQIDEITISPKPPSSTMNTDFQKLDTIIQKLAGKDISLKVVVFDDYDFEYAVKMHERYPDVPFFLQVGNDDTKTVDDAMLIKKLLDKYEWLIEKAVNCKEMNNAKVLPQLHALVWGNKRGV

SEQ ID NO: 27997 - protein, 241 aa, Bacillus bacterium
  misc_feature (1)..(241): tr|A0A3D0E4B6|A0A3D0E4B6_9BACI 7-carboxy-7-deazaguanine synthase OS=Bacillus bacterium OX=2053512 GN=queE PE=3 SV=1
MSKIPVMEIFGPTIQGEGMVIGQKTMFVRTAGCDYSCSWCDSSFTWDGSGKDSIKQMDAEEIWQELKLLGGDGFSFVTISGGNPALLKNLGSLTQLLKKNDIQIGLETQGSKWQDWFLEIDELTVSPKPPSSGMVTNFDILDTILEKLKGVDSTHSSLKVVIFDDQDFDYAKKVHLRYPGIPFYLQVGNDDYQTTDNQQLVRHLLQKYGWLVDKVIADHELRNVKVLPQLHTLVWGNKRGV

SEQ ID NO: 27998 - protein, 240 aa, Bacillus badius
  misc_feature (1)..(240): tr|A0A0C2YDD0|A0A0C2YDD0_BACBA 7-carboxy-7-deazaguanine synthase OS=Bacillus badius OX=1455 GN=queE PE=3 SV=1
MRKIPVLEIFGPTVQGEGAVIGRKTMFVRTAGCDYRCSWCDSAFTWDGSAKEQIRLLTAEEIWEELIQTGGQTFDHVTISGGNPALLPQIADLLAKLAEKGVSTALETQGSRWQEWFYQIDELTISPKPPSSGMETDFEQLSLIVERLTAKGRAASLKVVVFDENDLAFAKKVHQLYPTLPFFLQVGNDRLQEQKQGDLLPYLVSRYEWLINKVMPDKEWKSVRVLPQLHTFVWGNKQGV

SEQ ID NO: 27999 - protein, 240 aa, Bacillus badius
  misc_feature (1)..(240): tr|A0A162YV46|A0A162YV46_BACBA 7-carboxy-7-deazaguanine synthase OS=Bacillus badius OX=1455 GN=queE PE=3 SV=1
MRKIPVLEIFGPTVQGEGAVIGRKTMFVRTAGCDYRCSWCDSAFTWDGSAKEQIRLLTAEEIWEELIQTGGQTFDHVTISGGNPALLPQIADLLAKLAEKGVSTALETQGSRWQEWFYQIDELTISPKPPSSGMETDFEQLSLIVERLTAKGRAASLKVVVFDENDLAFAKKVHQLYPALPFFLQVGNDRLQEQKQGDLLPYLVSRYEWLINKVMPDKEWKSVRVLPQLHTFVWGNKQGV

SEQ ID NO: 28000 - protein, 238 aa, Bacillus bataviensis
  misc_feature (1)..(238): tr|A0A561DEG3|A0A561DEG3_9BACI 7-carboxy-7-deazaguanine synthase OS=Bacillus bataviensis OX=220685 GN=queE PE= 3 SV=1
MSKIPVMEVFGPTIQGEGMVIGQKTMFVRTAGCDYSCSWCDSAFTWDGSGKDDIRMMEAEEIWTELKQIGGDNFSFVTISGGNPALLKNLDTLIDILKDHHIKIGLETQGSKWQDWFYKIDELTISPKPPSSNMVTDFQVLDMIVDNLKESNVSLKVVVFDDQDYEYARNIHLRYPGVPFFVQVGNNDITTPDNKELLLHLLNQYERLIDKVMLDSDLNDVKVLPQLHTFLWGNKRGV

SEQ ID NO: 28001 - protein, 238 aa, Bacillus bombysepticus
  misc_feature (1)..(238): tr|A0A023P305|A0A023P305_9BACI 7-carboxy-7-deazaguanine synthase OS=Bacillus bombysepticus str. Wang OX=133004 3 GN=queE PE=3 SV=1
MSKIPVLEIFGPTIQGEGMVVGQKTMFIRTAGCDYSCAWCDSAFTWDGSAKDQIRQMTPEDIWDELVAIGGENFSHVTISGGNPALLKNIEFLLSILKENGMRTAIETQGSKWQDWLLQIDEVTISPKPPSSTMKTDFHKLDAIIQKLAGKDISLKVVVFDDHDFEYAVKMHERYPKVPFFLQVGNDDTKTVDDAMLIKNLLDKYEWLIDKAVNCKEMNDAKVLPQLHALVWGNKRGV

SEQ ID NO: 28002 - protein, 236 aa, Bacillus boroniphilus
  misc_feature (1)..(236): tr|W4RUD6|W4RUD6_9BACI 7-carboxy-7-deazaguanine synthas e OS=Bacillus boroniphilus JCM 21738 OX=1294265 GN=queE PE=3 SV=1
MEIFGPTIQGEGMVIGQKTMFVRTAGCDYSCAWCDSSFTWDGSGKDLVRQMDADEIWSEMRALGGDGFSYVTISGGNPALLKNLSGLVELLKENEVSVCLETQGSKWQDWFLKIDVLTLSPKPPSSGMKTNFEVLDQIVYGLKENGSLKNASLKIVVFDEVDYEYAKLVHQRYPELPFFLQVGNDDIETEDQMNLMSSLVDKYEWLINKVMCDVEMNNVRVLPQLHVYVWGNKRGV

SEQ ID NO: 28003 - protein, 242 aa, Bacillus butanolivorans
  misc_feature (1)..(242): tr|A0A0M0EZD9|A0A0M0EZD9_9BACI 7-carboxy-7-deazaguanine synthase OS=Bacillus butanolivorans OX=421767 GN=queE PE=3 SV=1
MSKLPVMEIFGPTIQGEGMVIGQKTMFVRTAGCDYSCAWCDSAFTWDGTGKEDTDQMTAEEIWNELKRIGGEGFSFVTISGGNPALLKNLDGLIAILKDNGMKIGVETQGSRWQDWFLDIDELTISPKPPSSRMNTDFEVLDRIISNLANRNPDNHVSLKVVVFDDEDYQYAKNVHFRYPDIPFYLQVGNDDSRTANDQQLISGLLKKYEELIDKVIADDELRNVKVLPQLHTYIWGNKRGV

SEQ ID NO: 28004 - protein, 242 aa, Bacillus butanolivorans
  misc_feature (1)..(242): tr|A0A2A7WHL7|A0A2A7WHL7_9BACI 7-carboxy-7-deazaguanine synthase OS=Bacillus butanolivorans OX=421767 GN=queE PE=3 SV=1
MSKLPVMEIFGPTIQGEGMVIGQKTMFVRTAGCDYSCAWCDSAFTWDGTGKEDTVQMTAEEILDELKRIGGEGFSFVTISGGNPALLKNLDGLIAILKDNGMKIGVETQGSRWQDWFLDIDELTISPKPPSSRMNTDFEVLDRIISNLANRNPDNHVSLKVVVFDDEDYQYAKNIHFRYPDIPFYLQVGNDDSRTANDQQLISGLLKKYEELIDKVIADDELRNVKVLPQLHTYIWGNKRGV

SEQ ID NO: 28005 - protein, 244 aa, Bacillus caldolyticus
  misc_feature (1)..(244): tr|A0A2H5KFW7|A0A2H5KFW7_BACCL 7-carboxy-7-deazaguanine synthase OS=Bacillus caldolyticus OX=1394 GN=queE PE=3 SV=1
MARTIPVLEIFGPTIQGEGMVIGQKTMFVRTAGCDYRCRWCDSAFTWDGSAKDEIEQLTADEIWRRLEAIGGRRFRHVTISGGNPLLIAALGELIALLHEKGMRVAVETQGSRWQDWLLDIDDVTLSPKPPSSGMDTDWAALDQIIERLQADQSRVRRISLKVVVFDDADLAYAKEVHCRYPSVPFYLQAGNADVADSDVDALRAKLFSRLEWLVEQAADSEELADVHILPQLHTLLWGNKRGV

SEQ ID NO: 28006 - protein, 237 aa, Bacillus camelliae
  misc_feature (1)..(237): tr|A0A2N3LMB3|A0A2N3LMB3_9BACI 7-carboxy-7-deazaguanine synthase OS=Bacillus camelliae OX=1707093 GN=queE PE=3 SV=1
MSKIPVIEIFGPTIQGEGMVIGRKTMFVRTAGCDYRCAWCDSAFTWDGSEKDNIRLLTPSEVFQELKLLGSHNFNHVTISGGNPALIGKPMMELIKIFHEHDIRVGLETQGSRWQEWFTLVDDLTISPKPPSSGMKTDFDVLDRIIENLDENRMSLKVVVFNDEDFDYSRMVHKRYPSIDFYVSVGNKDPYETGDISSRLLNSLDWLWSKVIEDPEMNNVRALPQLHALVWANKRGV

SEQ ID NO: 28007 - protein, 242 aa, Bacillus campisalis
  misc_feature (1)..(242): tr|A0A0M2SV64|A0A0M2SV64_9BACI 7-carboxy-7-deazaguanine synthase OS=Bacillus campisalis OX=1408103 GN=queE PE= 3 SV=1
MSKIPVMEIFGPTIQGEGMVIGQKTMFVRTAGCDYSCSWCDSSFTWDGTGKHLIRQMEPAQIWEELKSLGGAKFSHVTISGGNPALLKNLDGLVTVLKENNIKLCLETQGSKWQEWMTRIDELTLSPKPPSSGMITNYEKLDDIVGRLRSSDFTGNISLKVVVFTDEDYEFAREIHNRYPGVPFFVQVGNEDPVTTDNGTLIASLLQKYETLIDKVASDQELNDVKVLPQLHTLLWGNKRGV

SEQ ID NO: 28008 - protein, 242 aa, Bacillus canaveralius
  misc_feature (1)..(242): tr|A0A3R9NAZ7|A0A3R9NAZ7_9BACI 7-carboxy-7-deazaguanine synthase OS=Bacillus canaveralius OX=1403243 GN=queE P E=3 SV=1
MSEIPVMEVFGPTIQGEGMVIGQKTMFVRTAGCDYSCSWCDSSFTWDGTGKELIKQMSAEEILAELRRIGGDGFSFVTISGGNPALLKNMGSLIELLQQNQIKVCLETQGSRWQDWFYEIDELTLSPKPPSSGMVTDFGALDMIITNLEQRPPNKNISLKVVVFTDDDYDYARSLHFRYPEVPFFLQVGNEDTTTKDDGKLILNLLEKYQLLIDKVMNDQDLKNVKVLPQLHTYIWGNKRGV

SEQ ID NO: 28009 - protein, 242 aa, Bacillus canaveralius
  misc_feature (1)..(242): tr|A0A2N5GG47|A0A2N5GG47_9BACI 7-carboxy-7-deazaguanine synthase OS=Bacillus canaveralius OX=1403243 GN=queE P E=3 SV=1
MSKIPVMEVFGPTIQGEGMVIGQKTMFVRTAGCDYSCSWCDSSFTWDGTGKELIKQMSAEEILAELRRIGGDGFSFVTISGGNPALLKNMGSLIELLQQNQIKVCLETQGSRWQDWFYEIDELTLSPKPPSSGMVTDFGALDMIITNLEQRPLNKNISLKVVVFTDDDYDYARSLHFRYPEVPFFLQVGNEDTTTKDDGKLILNLLEKYQLLIDKVMNDQDLKNVKVLPQLHTYIWGNKRGV

SEQ ID NO: 28010 - protein, 242 aa, Bacillus caseinilyticus
  misc_feature (1)..(242): tr|A0A1H3IJ46|A0A1H3IJ46_9BACI 7-carboxy-7-deazaguanine synthase OS=Bacillus caseinilyticus OX=1503961 GN=queE PE=3 SV=1
MSSIPVMEIFGPTIQGEGMVIGQKTMFVRTAGCDYSCVWCDSAFTWDGSAKEEIVPMSAAEIWKKLNELAAENFSHVTISGGNPGLLRNLAELIGLLKENGVAVAIETQGSCWQDWFLLVDNLTISPKPPSSKMNTNDQVLDNIIARLTAENRQDHISLKVVVFDEDDFQYAKSIANRYPEVPFFLQAGNDDITSKDHAALTGKLLKKYAWLTERAMADKQLTNVRVLPQLHAFVWGNKRGV

SEQ ID NO: 28011 - protein, 242 aa, Bacillus cavernae
  misc_feature (1)..(242): tr|A0A433HRP6|A0A433HRP6_9BACI 7-carboxy-7-deazaguanine synthase OS=Bacillus cavernae OX=1674310 GN=queE PE=3 SV=1
MSRIPVMEIFGPTIQGEGMVIGQKTMFVRTAGCDYSCAWCDSAFTWDGTGKQDIIQMEAEEIWEELKRLGGSGFSFVTISGGNPALLKNLSGLIDLLQKNNIKVCLETQGSKWQDWFLRINELTISPKPPSSKMKTDFVMLDSILEKLKNREPDNSVSMKIVVFDDDDFQYAKKVYLRYPNTPFFLQVGNDDSKTNNDQELIGRLLNKYEWLIEKVMADNELTNIKVLPQLHTYIWGNKRGV

SEQ ID NO: 28012 - protein, 242 aa, Bacillus cellulosilyticus
  misc_feature (1)..(242): tr|E6TRC0|E6TRC0_BACCJ 7-carboxy-7-deazaguanine synthas e OS=Bacillus cellulosilyticus (strain ATCC 21833 / DSM 2522 / FERM P-1141 / JCM 9156 / N-4) OX=649639 GN=queE PE=3 SV=1
MYKFPVLEIFGPTIQGEGMVVGRKTMFVRTAGCDYSCSWCDSAFTWDGSSKEDIKQLTADEILCRLKKDGGKSFDYVTISGGNPALFSHLDELINLLHSENVKVALETQGSRWQEWFLKIDDLTLSPKPPSSQMITNWKILDEIIGHLSSNNRLQYTSLKIVIFTNEDLTYAKKIHERFPHIPLYLQVGNEDLDEDNEERLMKKLLEKYKWLVNEVMVSSTLNSVHVLPQLHTLLWGNRRGV

SEQ ID NO: 28013 - protein, 238 aa, Bacillus cereus
  misc_feature (1)..(238): sp|Q81G67|QUEE_BACCR 7-carboxy-7-deazaguanine synthase OS=Bacillus cereus (strain ATCC 14579 / DSM 31 / JCM 21 52 / NBRC 15305 / NCIMB 9373 / NRRL B-3711) OX=226900 G N=queE PE=3 SV=1
MSKIPVLEIFGPTIQGEGMVVGQKTMFIRTAGCDYSCAWCDSAFTWDGSAKDQIRQMTPEDIWDELVAIGGENFSHVTISGGNPALLKNIEFLLSILKENGMRTAIETQGSKWQDWLLQIDEITISPKPPSSTMKTDFQRLDAIIQKLAGKDISLKVVVFDDHDFEYAVKMHERYPKVPFFLQVGNDDTKTVDDAMLIKKLLDKYEWLIDKAVNCKEMNDAKVLPQLHALVWGNKRGV

SEQ ID NO: 28014 - protein, 238 aa, Bacillus cereus
  misc_feature (1)..(238): tr|J8J9I3|J8J9I3_BACCE 7-carboxy-7-deazaguanine synthas e OS=Bacillus cereus VD102 OX=1053228 GN=queE PE=3 SV=1
MSKIPVLEIFGPTIQGEGMVVGQKTMFIRTAGCDYSCAWCDSAFTWDGSAKDQIRQMTAEDVWNELVEIGGENFSHVTISGGNPVLLKNIEFLLSILKENGMRTAIETQGSKWQDWLLEIDEITISPKPPSSTMNTDFQKLDDVIQKLAGKDISLKVVVFDDYDFEYAVKMHERYPDVPFFLQVGNDDTKTVDDAMLIKKLLDKYEWLIEKAVNCKEMNNAKVLPQLHALVWGNKRGV

SEQ ID NO: 28015 - protein, 240 aa, Bacillus circulans
  misc_feature (1)..(240): tr|A0A553SMI2|A0A553SMI2_BACCI 7-carboxy-7-deazaguanine synthase OS=Bacillus circulans OX=1397 GN=queE PE=3 SV =1
MSKIPVLEIFGPTIQGEGMVVGRKTMFIRTAGCDYRCSWCDSAFTWDGTGKDDIVLMTAEEIWDRLYEIGGDCFDHVTISGGNPALLTNLIHFIELAKKKNIQLALETQGSKWQDWFEHIDDLTISPKPPSSGMNTNFAILDDIIEKLSELNNIFSLKVVVFNEADYEYAKQVHKRYPQVPFYLQVGNDDITNGNNEELLHKLLAKYEWLIDLTMNTKEMNAVRVLPQLHALVWGNKRGV

SEQ ID NO: 28016 - protein, 242 aa, Bacillus circulans
  misc_feature (1)..(242): tr|A0A0J1IM12|A0A0J1IM12_BACCI 7-carboxy-7-deazaguanine synthase OS=Bacillus circulans OX=1397 GN=queE PE=3 SV =1
MSKVPVMEIFGPTIQGEGMVIGQKTMFVRTAGCDYSCAWCDSAFTWDGSGKELIKQMQAEEIWEELVRLGGDGFSFVTLSGGNPALLKNLSFLVNLLKEKEIKIGLETQGSKWQDWFIDIDELTISPKPPSSKMNTDFDMLDSIVQRLRDANRSTHISLKVVVFSDEDYNYAKKVHLRYPDIPFFLQVGNEDNKTTDDTKLVEHLLAKYEWLIDKTMLDHQFKNVKVLPQLHTYIWGNKRGV

SEQ ID NO: 28017 - protein, 237 aa, Bacillus clausii
  misc_feature (1)..(237): tr|A0A268RVK4|A0A268RVK4_BACCS 7-carboxy-7-deazaguanine synthase OS=Bacillus clausii OX=79880 GN=queE PE=3 SV= 1
MAKLIPVVELFGPTIQGEGMVIGQKTMFVRTGGCDYRCHWCDSAFTWDGSEKSEPLSAEGIIERLNSLSENGYSHVTISGGNPALHKGIGELVALLNEKGVATAIETQGTIFQCWINRVDEVTVSPKPPSSGMETDWTKLDLFLQQLQAPAVSLKVVVFDDADYQYAKRVHKRYPTVPFYLQTGNEDFAKKEDPRFLEKRMGAYEALVEKALADKEMINVRVLPQLHTWLWGNKRGV

SEQ ID NO: 28018 - protein, 217 aa, Bacillus clausii
  misc_feature (1)..(217): tr|Q5WG43|Q5WG43_BACSK 7-carboxy-7-deazaguanine synthas e OS=Bacillus clausii (strain KSM-K16) OX=66692 GN=queE PE=3 SV=1
MIGQKTMFVRTGGCDYRCRWCDSAFTWDGSEKSEPLSAEEIIERLDSLCENGYSHVTISGGNPAIHKGIGELVALLNEKGVATAIETQGSIFQCWINRVDEVTVSPKPPSSGMETDWTKLDLFLQQLQAPAVSLKVVVFDDADYQYAKHVHKRYPTVPFYLQTGNEDFAEKEDPRFLEKRMGAYEALVEKALADKEMNNVRVLPQLHTWLWGNKRGV

SEQ ID NO: 28019 - protein, 241 aa, Bacillus coagulans
  misc_feature (1)..(241): tr|A0A150JRD8|A0A150JRD8_BACCO 7-carboxy-7-deazaguanine synthase OS=Bacillus coagulans OX=1398 GN=queE PE=3 SV =1
MASKIPVLEIFGPTIQGEGMVIGKKTMFVRTAGCDYACSWCDSAFTWNGKEKERIVLMTAEEIFQKLKETGGENFSHVTISGGNPLLLKGLGELVDLLKSHQIRTAVETQGSRWQNWLPDVDDVTISPKPPSSGMDTDFEALDWMIGQLTMAGSHCCLKIVVFDEEDFDYAKKIHKRYPPVPFYLQVGNPDVTLPDRDALAKMLTGRYEWLINLALQAEEMNDAYVLPQLHALVWGNKRGV

SEQ ID NO: 28020 - protein, 241 aa, Bacillus coagulans
  misc_feature (1)..(241): tr|A0A0C5CCX6|A0A0C5CCX6_BACCO 7-carboxy-7-deazaguanine synthase OS=Bacillus coagulans OX=1398 GN=queE PE=3 SV =1
MVSKIPVIEIFGPTIQGEGMVIGKKTMFVRTAGCDYACSWCDSAFTWNGEEKGRIVLMTAEEIFQKLKETGGENFSHVTISGGNPLLLKGLGELVDLLKTHQIRTAVETQGSRWQNWLPDVNDVTISPKPPSSGMHTDFETLDRMIEQLTLAGSHFCLKVVVFDEKDFDYAKKIHKRYPAVPFYLQVGNPDIALPDRDALAKMLIGRYEWLVNLTLQAEEMNDAYVLPQLHALVWGNKRGV

SEQ ID NO: 28021 - protein, 240 aa, Bacillus coahuilensis
  misc_feature (1)..(240): tr|A0A147K8T1|A0A147K8T1_9BACI 7-carboxy-7-deazaguanine synthase OS=Bacillus coahuilensis p1.1.43 OX=1150625 G N=queE PE=3 SV=1
MNKFPVLEIFGPTVQGEGMVIGQKTMFIRTAGCDYSCSWCDSSFTWDGSAKEDIRLLSADEIWSELVQVGGDCFNHVTISGGNPALLKHLNELLDVFHNHGIQSALETQGSRWQDWFLDIDDLTLSPKPPSSGMTTDFSLLDSIIQKLLVNNKAFSLKVVIFDELDLSYATLVHKRYPQVDLYLQTGNPEITEGDDNKLLSILIERYAWLINEVMKSSILKNVRVLPQLHTYVWGNKRGV

SEQ ID NO: 28022 - protein, 239 aa, Bacillus cohnii
  misc_feature (1)..(239): tr|A0A223KPP2|A0A223KPP2_9BACI 7-carboxy-7-deazaguanine synthase OS=Bacillus cohnii OX=33932 GN=queE PE=3 SV=1
MNKKIPVLEIFGPTIQGEGMVIGQKTMFVRTSGCDYRCVWCDSAFTWDGSAKDDIRMLTAEQIWSELLELGGNSFKHVTISGGNPALLQSISYLVELLHDNGVKVALETQGSKWKDWMKAIDDLTLSPKPPSSTMKTDFAMLDSIISKLEMNKISLKVVVFNDEDLLYAKKVHQRYPNVPFFVQVGNDDIETTSTADLREHLFVKYEWLIEKVMKDEEMNFVRVLPQLHTYIWGNKRGV

SEQ ID NO: 28023 - protein, 238 aa, Bacillus cucumis
  misc_feature (1)..(238): tr|A0A2N5HSM1|A0A2N5HSM1_9BACI 7-carboxy-7-deazaguanine synthase OS=Bacillus cucumis OX=1740721 GN=queE PE=3 S V=1
MSKIPVMEVFGPTIQGEGMVIGQKTMFVRTAGCDYSCSWCDSSFTWDGTGKDNIRMMEAEEIWAELKQIGGENFSFVTISGGNPALLKNLDALIDILKAHDIKIGLETQGSKWQDWFYKIDELTISPKPPSSTMVTDFNILDMILNHLNENNVSLKVVVFDDQDYEYAKKVHLRYPDVPFFVQVGNNDLTTTDNQKLLLHLLNQYEHLIDKVMVDPELNNVKVLPQLHTFLWGNKRGV

SEQ ID NO: 28024 - protein, 238 aa, Bacillus cytotoxicus
  misc_feature (1)..(238): tr|A7GMN4|A7GMN4_BACCN 7-carboxy-7-deazaguanine synthas e OS=Bacillus cytotoxicus (strain DSM 22905 / CIP 11004 1 / 391-98 / NVH 391-98) OX=315749 GN=queE PE=3 SV=1
MSKIPVLEIFGPTIQGEGMVVGQKTMFIRTAGCDYSCAWCDSAFTWDGSAKDQIRQMTPEEIWKELIEIGGENFSHVTISGGNPVLLKHMKELLERLKENNIRTAIETQGSKWQEWLLDIDEITISPKPPSSKMKTNFTMLDLVVERLVDKNMSLKVVIFDDDDFEYAKNVHERYPHVPFFLQVGNDDTKTAEDAVLIPKLLQKYEWLIEKAVHSKEMNDVKVLPQLHALVWGNKRGV

SEQ ID NO: 28025 - protein, 238 aa, Bacillus cytotoxicus; identical to SEQ ID NO: 28024
  misc_feature (1)..(238): tr|A0A2S1AA25|A0A2S1AA25_9BACI 7-carboxy-7-deazaguanine synthase OS=Bacillus cytotoxicus OX=580165 GN=queE PE= 3 SV=1

SEQ ID NO: 28026 - protein, 246 aa, Bacillus daliensis
  misc_feature (1)..(246): tr|A0A1G9ZJ87|A0A1G9ZJ87_9BACI 7-carboxy-7-deazaguanine synthase OS=Bacillus daliensis OX=745820 GN=queE PE=3 SV=1
MSNTKTLPVLEIFGPTFQGEGMVIGKKTMFVRTAGCDYSCSWCDSAFTWDGSAKDDIRKMTAEEVLERLNFLAPHNFSHVTISGGNPALLKHMGSLVELLHAQNVEVALETQGSRWQDWFLHIDDLTISPKPPSSLMKTNFEVLDSIIEQLMEAGRTAHVSLKVVVFNEEDFLYAKLIHARYPQISFFLQVGNEDTGDEKETDDLVPKLLEEYEKLVDRTMQDRDMNQVRVLPQLHTLVWGNKRGV

SEQ ID NO: 28027 - protein, 242 aa, Bacillus deserti
  misc_feature (1)..(242): tr|A0A2N5M814|A0A2N5M814_9BACI 7-carboxy-7-deazaguanine synthase OS=Bacillus deserti OX=673318 GN=queE PE=3 SV =1
MGKIPVMEIFGPTIQGEGMVVGQKTMFVRTAGCDYSCSWCDSSFTWDGTGRHLITQMEPQEIWEKLKELSGEGFSFVTISGGNPALLKNMEDVITLFKQNQIQIGLETQGSKWQDWMMEIDELTISPKPPSSKMITNFSILDDVIARLSSHDFSGNVSLKVVVFNQEDYEYAKGIHQRYPQIPFFMQVGNDETATEDNSLLITHLLNKYERLIDAVMNDNELKNVKVLPQLHALVWGNKRGV

SEQ ID NO: 28028 - protein, 240 aa, Bacillus enclensis
  misc_feature (1)..(240): tr|A0A0V8HI46|A0A0V8HI46_9BACI 7-carboxy-7-deazaguanine synthase OS=Bacillus enclensis OX=1402860 GN=queE PE=3 SV=1
MKKFPVLEIFGPTIQGEGMVIGRKTMFVRTAGCDYSCSWCDSAFTWDGSAKDDIRLLNAEEIWNELSEIGGKRFSHVTISGGNPALLSNLGELLDIFKENGIESALETQGSRWQDWFYDIDDLTISPKPPSSNMITDFNKLDEIIQKLNDNDSAFSLKVVVFNDGDMQYAKKVHKRYPSVPFYLQTGNPETAEENTEKLVSDLLNDFEILIDKVSMDDELNNVRVLPQLHTLVWGNKRGV

SEQ ID NO: 28029 - protein, 243 aa, Bacillus endophyticus
  misc_feature (1)..(243): tr|A0A329EPQ6|A0A329EPQ6_9BACI 7-carboxy-7-deazaguanine synthase OS=Bacillus endophyticus OX=135735 GN=queE PE =3 SV=1
MSHKIPVLEIFGPTIQGEGMVIGRKTMFVRTAGCDYSCAWCDSSFTWDGSAKEDIKMMEASEILQKLFDIGGEHFNHVTISGGNPALLKHLDELIDLLSQKGIETGLETQGSRYQDWFLKINDLTISPKPPSSKMKPNLEVLDEVMERLKQGERLNHVSLKVVVFNDEDFEFAEAIHSRYPDVSFYLQVGNDDVTTANDEDLLKNLLVKYEWLIDKAVQSKTMNHARVLPQLHTLVWGNKRGV

SEQ ID NO: 28030 - protein, 243 aa, Bacillus endophyticus
  misc_feature (1)..(243): tr|A0A3N6B0B8|A0A3N6B0B8_9BACI 7-carboxy-7-deazaguanine synthase OS=Bacillus endophyticus OX=135735 GN=queE PE =3 SV=1
MSHKIPVLEIFGPTIQGEGMVVGRKTMFVRTAGCDYSCAWCDSSFTWDGSAKEDIKMMEASEILQKLFHIGGEHFNHVTISGGNPALLKHLDELIDLLSQKGIETGLETQGSRYQDWFLKINDLTISPKPPSSKMKPNLEVLDEVMERLKQGERLNHVSLKVVVFNDEDFEFAEAIHSRYPDVSFYLQVGNDDVTTANDEDLLKNLLVKYEWLIDKAVQSKTMNHARVLPQLHTLVWGNKRGV

SEQ ID NO: 28031 - protein, 242 aa, Bacillus endozanthoxylicus
  misc_feature (1)..(242): tr|A0A5J5HV64|A0A5J5HV64_9BACI 7-carboxy-7-deazaguanine synthase QueE OS=Bacillus endozanthoxylicus OX=2036016 GN=queE PE=4 SV=1
MSKIPVLEIFGPTIQGEGMVIGQKTMFVRTAGCDYSCAWCDSSFTWDGTGKEDIRQMSANEIWEELKALGGDGFSFVTISGGNPALLKNISTFINILQKNQIKICLETQGSLWQEWFYKIDELTLSPKPPSSGMTTDFDRLDTIIGNLEQSERKQNISLKVVIFNDEDYQYAKKVHFRYPAIPFFFQIGNDDSKTSDDNQLLEKLLQKYEWLINKVMFDDSLKDVKVLPQLHTYIWGNKRAV

SEQ ID NO: 28032 - protein, 243 aa, Bacillus filamentosus
  misc_feature (1)..(243): tr|A0A1X7EZ31|A0A1X7EZ31_9BACI 7-carboxy-7-deazaguanine synthase OS=Bacillus filamentosus OX=1402861 GN=queE P E=3 SV=1
MSHKIPVLEIFGPTIQGEGMVVGRKTMFVRTAGCDYSCAWCDSSFTWDGSAKEDIKMMEASEILQKLFDIGGEHFNHVTISGGNPALLKHLDELIDLLSQKGIETGLETQGSRYQDWFLKINDLTISPKPPSSKMKPNLEVLDEVMERLKQGERLNHVSLKVVVFNDEDFEFAEAIHSRYPDVSFYLQVGNDDVTTANDEDLLNNLLVKYEWLIDKAVGSKKMNHARVLPQLHTLVWGNKRGV

SEQ ID NO: 28033 - protein, 243 aa, Bacillus firmus
  misc_feature (1)..(243): tr|W7L4U4|W7L4U4_BACFI 7-carboxy-7-deazaguanine synthas e OS=Bacillus firmus DS1 OX=1307436 GN=queE PE=3 SV=1
MSKIPVLEIFGPTIQGEGMVIGQKTMFVRTAGCDYSCSWCDSSFTWDGSAKDSIRQMEPDEIWKELKELGGDGFSFVTISGGNPALLKNLGEFISLLKAERIKLCLETQGSRWQDWFYEIDELTLSPKPPSSGMNTDFDVLDLIVNKLQTGRREDQQFSLKIVVFDDEDYEYAKNVYQRYPGVPFYLQVGNDDTVTADDRNLLQRLLDKYDWLIEKTIHDSELTNIKVLPQLHTYVWGNKRGV

SEQ ID NO: 28034 - protein, 243 aa, Bacillus firmus
  misc_feature (1)..(243): tr|A0A0J5VJB1|A0A0J5VJB1_BACFI 7-carboxy-7-deazaguanine synthase OS=Bacillus firmus OX=1399 GN=queE PE=3 SV=1
MSKIPVLEIFGPTIQGEGMVIGQKTMFVRTAGCDYSCSWCDSSFTWDGSAKDSIRQMEPDEIWKELKELGGDGFSFVTISGGNPALLKNLGEFISLLKAERIKLCLETQGSRWQDWFYEIDELTLSPKPPSSGMNTDFEVLDLIVNKLQAGRREDQQFSLKIVVFDDADYEYAKDVHKRYPGVPFYLQVGNDDTVTADDRNLLQRLLDKYDWLIEKTIHDNELTDVKVLPQLHTYVWGNKRGV

SEQ ID NO: 28035 - protein, 243 aa, Bacillus flexus
  misc_feature (1)..(243): tr|A0A4P8XCW7|A0A4P8XCW7_9BACI 7-carboxy-7-deazaguanine synthase OS=Bacillus flexus OX=86664 GN=queE PE=3 SV=1
MNNKVPVLEIFGPTIQGEGMVVGRKTMFVRTAGCDYSCSWCDSAFTWDGSAKSDIRQLTDEEVWHELQTLGGDRFDHVTISGGNPALLKSLDKLIDRLHDHQKQVALETQGSRFQEWFYKIDDLTLSPKPPSSGMKTNYEVLDDIVERLQNNGRSQHISIKVVVFDETDFDYAKHIHQRYPSVPFFVQVGNDDLTTTDDEALTRKLLGKYEWLIDLVVATTDMNNVRVLPQVHALVWGNKRGV

SEQ ID NO: 28036 - protein, 242 aa, Bacillus foraminis
  misc_feature (1)..(242): tr|A0A4R2BJS0|A0A4R2BJS0_9BACI 7-carboxy-7-deazaguanine synthase OS=Bacillus foraminis OX=279826 GN=queE PE=3 SV=1
MSKIPVMEIFGPTIQGEGMVIGQKTMFVRTAGCDYSCSWCDSAFTWDGSGKHLIRQMEPEEIWKQLQELGGVGFSHVTISGGNPALLKNMDGLVELLKGNGIKLCLETQGSKWQDWMMEIDELTISPKPPSSGMITNYEALDGIIERLSTPSFKGNVSIKVVIFNDDDFEYARNIHKRYPHLPFFMQVGNEDTVTMDRSELVSCLLAQYESLIEKVIADPELKEVKVLPQLHALVWGNKRGV

SEQ ID NO: 28037 - protein, 242 aa, Bacillus freudenreichii
  misc_feature (1)..(242): tr|A0A448FGD3|A0A448FGD3_9BACI 7-carboxy-7-deazaguanine synthase OS=Bacillus freudenreichii OX=1783501 GN=queE PE=3 SV=1
MSKVPVIEIFGPTIQGEGMVIGQKTMFVRTAGCDYSCTWCDSSFTWDGSGKDSIKQMDAEEIWQELKLLGGDGFSFVTISGGNPALLKNLSYLIDLLKKNEIQVGLETQGSKWQDWFLDIDELTISPKPPSSGMVTDFDTLDMIIEKLKGANSTHSCSLKVVIFDDQDFDYAKKVHFRYPEITFYLQVGNDDHRTSENKRLINQLLHKYEWLVNKVVEDNDLRNVKVLPQLHTLIWGNKRGV

SEQ ID NO: 28038 - protein, 238 aa, Bacillus gaemokensis
  misc_feature (1)..(238): tr|A0A073KML7|A0A073KML7_9BACI 7-carboxy-7-deazaguanine synthase OS=Bacillus gaemokensis OX=574375 GN=queE PE= 3 SV=1
MSKLPVLEIFGPTIQGEGMVVGQKTMFIRTAGCDYSCAWCDSSFTWDGSAKEQIRQMTPEEIWDELFEIGGENFSHVTISGGNPVLLKNIEGFLDLLKEKQIRTAIETQGSKWQEWLLHIDEVTISPKPPSSQMKTDFLMLDSVIERLVGKDFSLKVVVFDDHDFEYAVKVHERYPHVPFFLQVGNDDTKTIDDAMLIKKLLEKYEWLIEKAVHCKEMNDAKVLPQLHALVWGNKRGV

SEQ ID NO: 28039 - protein, 240 aa, Bacillus galactosidilyticus
  misc_feature (1)..(240): tr|A0A177ZHM4|A0A177ZHM4_9BACI 7-carboxy-7-deazaguanine synthase OS=Bacillus galactosidilyticus OX=217031 GN=q ueE PE=3 SV=1
MKIPVLEIFGPTIQGEGMVIGQKTMFVRTAGCDYSCSWCDSAFTWNGSEKENIRRLEPEEIWQALKEQGGQTFSHVTISGGNPALLKQMGELVNLLHSHDVQVALETQGSRWQSWFTEIDELTLSPKPPSSGMKTNFAILDQIIHSLQDKQKGSFSLKIVVFDEQDLHYAIDLYKRYPGVTFFLQVGNNDLANFDDQQLLAHLLERYHWLIEKVMESEELRNVRVLPQLHTYLWGNKRGV

SEQ ID NO: 28040 - protein, 239 aa, Bacillus ginsengihumi
  misc_feature (1)..(239): tr|A0A0A6VF88|A0A0A6VF88_9BACI 7-carboxy-7-deazaguanine synthase OS=Bacillus ginsengihumi OX=363870 GN=queE PE =3 SV=1
MSRGKIPVIETFGPTIQGEGMVIGRKTMFVRTAGCDYRCKWCDSAFTWDGSEKHRIRMMEPAELFEELIQLAGNNFDHVTISGGNPALIGEAMNDFIMLLQEHGMKIGLETQGSKWQDWFLLVDDLTISPKPPSSGMETNFEILDEIIARLNPAAFSLKVVVFDDHDFAYAKKVHKRYPAANFYLSVGNANPNEKGDISSRLLKSLDWLWGKVIEDPEMNNVKALPQLHALVWANKRGV

SEQ ID NO: 28041 - protein, 243 aa, Bacillus glycinifermentans
  misc_feature (1)..(243): tr|A0A0J6EN99|A0A0J6EN99_9BACI 7-carboxy-7-deazaguanine synthase OS=Bacillus glycinifermentans OX=1664069 GN=q ueE PE=3 SV=1
MAKPIPVLEIFGPTIQGEGMVIGRKTMFVRTAGCDYSCSWCDSAFTWDGSAKKDIKWMTAEEVYRSLKEIGGDSFSHVTISGGNPALLKQLDGLISLLKEKNIRTALETQGTFYQDWFAKIDDLTISPKPPSSNMKTDFQKLDHIIGKLKGHGRLAAASLKVVIFTPEDLQFAKNVHQRYPEIPFYLQVGNEDVHTEEQERLVEKLLRKYEELVDAVTRDPELNRVRVLPQLHTLIWGNKRGV

SEQ ID NO: 28042 - protein, 243 aa, Bacillus glycinifermentans
  misc_feature (1)..(243): tr|A0A1C3SBR1|A0A1C3SBR1_9BACI 7-carboxy-7-deazaguanine synthase OS=Bacillus glycinifermentans OX=1664069 GN=q ueE PE=3 SV=1
MAKPIPVLEIFGPTIQGEGMVIGQKTMFVRTAGCDYSCSWCDSAFTWDGSAKKDIKWMTAEEVYGSLKEIGGDSFSHVTISGGNPALLKQLDELISLLKENDIRTALETQGTFYQDWFAKIDDLTISPKPPSSNMKTDFQKLDHIIGKLKEQGRLAAASLKVVIFSPEDLQFAKNVHQRYPEIPFYLQVGNEDVHTEEQDRLVEKLLRKYEELVDAVTRDPELNRVRVLPQLHTLIWGNKRGV

SEQ ID NO: 28043 - protein, 243 aa, Bacillus gobiensis
  misc_feature (1)..(243): tr|A0A0M4FPK2|A0A0M4FPK2_9BACI 7-carboxy-7-deazaguanine synthase OS=Bacillus gobiensis OX=1441095 GN=queE PE=3 SV=1
MNKPIPVLEIFGPTVQGEGSVIGQKTMFVRTAGCDYSCSWCDSAFTWDGSAKGDIKWLEPNEVLDSLRETGGGCFSHVTISGGNPALLKPLGGLTALLKEKGYRIALETQGSIFQEWFADIDDLTISPKPPSSGMVCDFTKLTAIFESLEKMNRLQSVTLKIVIFSDEDLEFAKGVHQKYPGLPLFLQVGNDDLNSRDTNDLAQKLLEKYEGLVEKVCADEDLTNVRVLPQLHTLIWGNKRGV

SEQ ID NO: 28044 - protein, 236 aa, Bacillus halodurans
  misc_feature (1)..(236): tr|A0A4Y7X1D0|A0A4Y7X1D0_BACHO 7-carboxy-7-deazaguanine synthase OS=Bacillus halodurans OX=86665 GN=queE PE=3 SV=1
MKRIPVMEIFGPTVQGEGMVIGQKTMFVRTGGCDYSCSWCDSAFTWDGSLKATLRTADEIIAKLEEIGGERFSHVTISGGNPALHKGIGELVDKLHDKGIRVALETQGSLWQDWFLKIDDLTISPKPPSSQMKTDFTKLDQIIERLDTKQMSLKVVVFNDEDFRYAEYVHERYPHVPFFLQVGNEDTVTGDNALLIRTLLDRYEWLINKATDSTIMNDAKILPQLHTLVWGNKRGV

SEQ ID NO: 28045 - protein, 236 aa, Bacillus halodurans
  misc_feature (1)..(236): tr|Q9KAP5|Q9KAP5_BACHD 7-carboxy-7-deazaguanine synthas e OS=Bacillus halodurans (strain ATCC BAA-125 / DSM 181 97 / FERM 7344 / JCM 9153 / C-125) OX=272558 GN=queE PE =3 SV=1
MKRIPVMEIFGPTVQGEGMVIGQKTMFVRTGGCDYSCSWCDSAFTWDGSLKATLRTADEIIAKLEEIGGERFSHVSISGGNPALHKGIGELVDKLHDKGIRVALETQGSLWQDWFLKIDDLTISPKPPSSQMKTDFTKLDQIIERLDTKQMSLKVVVFNDEDFRYAEYVHERYPHVPFFLQVGNEDTVTGDNDLLIRTLLDRYEWLIAKATDSTIMNDAKILPQLHTLVWGNKRGV

SEQ ID NO: 28046 - protein, 243 aa, Bacillus halotolerans
  misc_feature (1)..(243): tr|A0A3Q9RSD3|A0A3Q9RSD3_9BACI 7-carboxy-7-deazaguanine synthase OS=Bacillus halotolerans OX=260554 GN=queE PE =3 SV=1
MAKGIPVLEIFGPTIQGEGMVIGQKTMFVRTAGCDYSCSWCDSAFTWDGSAKKDIRWMTAEEIFSELKEIGGDAFSHVTISGGNPALLKQLDALIELLKENNIRAALETQGTVYQDWFTLIDDLTISPKPPSSKMVTNFDKLDHILTSLKENNRQHAVSLKVVIFNDEDLEFAKTVHKRYPGIPFYLQVGNDDVHTADDKSLIAHLLGKYEALVDQVAADAELNLVRVLPQLHTLLWGNKRGV

SEQ ID NO: 28047 - protein, 243 aa, Bacillus halotolerans
  misc_feature (1)..(243): tr|A0A2S9WEQ3|A0A2S9WEQ3_9BACI 7-carboxy-7-deazaguanine synthase OS=Bacillus halotolerans OX=260554 GN=queE PE =3 SV=1
MAKGIPVLEIFGPTIQGEGMVIGQKTMFVRTAGCDYSCSWCDSAFTWDGSAKKDIRWMTAEEIFSELKEIGGDAFSHVTISGGNPALLKQLDALIELLKENNIRTALETQGTVYQDWFTLIDDLTISPKPPSSKMVTNFNKLDHILTSLKENNRQHAVSLKVVIFNDEDLEFAKTVHKRYPGIPFYLQVGNDDVHTADDKSLIAHLLGKYEALVDQVAADAELNLVRVLPQLHTLLWGNKRGV

SEQ ID NO: 28048 - protein, 243 aa, Bacillus haynesii
  misc_feature (1)..(243): tr|W7RPD5|W7RPD5_9BACI 7-carboxy-7-deazaguanine synthas e OS=Bacillus haynesii OX=1925021 GN=queE PE=3 SV=1
MAKPIPVLEIFGPTVQGEGMVIGQKTMFVRTAGCDYSCSWCDSAFTWDGSAKKDIKWMTAEEVYESLKDIGENAFSHVTISGGNPALLKQLDGLISLLKENGIRTALETQGTFYQDWFTEIDDLTISPKPPSSNMKTDFNKLDHIIEKLKEHGRAAAASLKVVIFTADDLQFAKQVHQRYPDIPFFLQVGNDDVHTEDQERLVERLLQKYEQLVEAVTRDPELNRVRVLPQLHTLIWGNKRGV

SEQ ID NO: 28049 - protein, 243 aa, Bacillus haynesii
  misc_feature (1)..(243): tr|A0A1R1RRG7|A0A1R1RRG7_9BACI 7-carboxy-7-deazaguanine synthase OS=Bacillus haynesii OX=1925021 GN=queE PE=3 SV=1
MAKPIPVLEIFGPTVQGEGMVIGQKTMFVRTAGCDYSCSWCDSAFTWDGSAKKDIKWMTAEEVYESLKDIGENAFSHVTISGGNPALLKQLDRLISLLKENGIRTALETQGTFYQDWFTGIDDLTISPKPPSSNMKTDFNKLDHIVEKLKEHGRAAAASLKVVIFTADDLQFAKQVHQRYPDIPFFLQVGNDDVHTEDQERLVERLLQKYEQLVEAVTRDPELNRVRVLPQLHTLIWGNKRGV

SEQ ID NO: 28050 - protein, 52 aa, Bacillus hemicellulosilyticus
  misc_feature (1)..(52): tr|W4QH36|W4QH36_9BACI Queuosine Biosynthesis QueE Radi cal SAM OS=Bacillus hemicellulosilyticus JCM 9152 OX=12 36971 GN=JCM9152_2376 PE=4 SV=1
MKIPVMEVFGPTIQGEGRVIGQKTMFVRTAGCDYRCSWCDSSFTWMVQEKVC

SEQ ID NO: 28051 - protein, 182 aa, Bacillus hemicellulosilyticus
  misc_feature (1)..(182): tr|W4QI10|W4QI10_9BACI Queuosine Biosynthesis QueE Radi cal SAM OS=Bacillus hemicellulosilyticus JCM 9152 OX=12 36971 GN=JCM9152_2377 PE=4 SV=1
MDASAIVTALKEQGDNRFSHVTISGGNPALHKGLAEFVELCHGEKWTVALETQGSYWQDWLTMVDEVTISPKPPSSKMKTDLNRLDDVMSRLSVEQVNLKVVIFDQDDFQYAKVIHQRYPDVAMFLQVGNDQVTSTKKDELVSQLLIRYEWLIELTLSSVEMNDVRVLPQLHTFVWGNKRGV

SEQ ID NO: 28052 - protein, 239 aa, Bacillus horikoshii
  misc_feature (1)..(239): tr|A0A1Y0CM45|A0A1Y0CM45_9BACI 7-carboxy-7-deazaguanine synthase OS=Bacillus horikoshii OX=79883 GN=queE PE=3 SV=1
MSSLIPVLEIFGPTIQGEGMVIGQKTMFVRTAGCDYRCSWCDSAFTWDGSAKDDIVMMSPEEIYEQLVEIGGKAFNHVTISGGNPALLKNIGELVQLLHENDIKVALETQGSKWQDWLTEIDDLTISPKPPSSEMDTNFSILGDLLERVKNSSVSLKVVVFDEDDLTYAKKIHKLYPDVAFYVQVGNDDTTTEDDQMLISKLLAKYEWLIDQVMNDDEMNNVRVLPQLHTLVWGNKRGV

SEQ ID NO: 28053 - protein, 239 aa, Bacillus horikoshii
  misc_feature (1)..(239): tr|A0A5D4SD14|A0A5D4SD14_9BACI 7-carboxy-7-deazaguanine synthase OS=Bacillus horikoshii OX=79883 GN=queE PE=3 SV=1
MSSLIPVLEIFGPTIQGEGMVIGQKTMFVRTAGCDYRCSWCDSAFTWDGSAKDDIVMMSPEEIYEQLVEIGGKAFNHVTISGGNPALLKNIRVLVQLLHENDIKVALETQGSKWQDWLTEIDDLTISPKPPSSGMDTNFSILSDLLERVKNSSVSLKVVVFDEDDLTYAKKVHKLYPDVAFYVQVGNDDTTTEDDQMLISKLLAKYEWLIDQVMVDDEMNNVRVLPQLHTLVWGNKRGV

SEQ ID NO: 28054 - protein, 238 aa, Bacillus horneckiae
  misc_feature (1)..(238): tr|A0A2N0ZEY3|A0A2N0ZEY3_9BACI 7-carboxy-7-deazaguanine synthase OS=Bacillus horneckiae OX=549687 GN=queE PE=3 SV=1
MSKIPVMEIFGPTIQGEGMVIGQKTMFVRTAGCDYSCAWCDSSFTWDGTGKHLITQMEPEDIWTKLKQLGGSGFRFVTISGGNPALIKNIDGLVDILKKNGIQIGLETQGSKWQDWFYKIDELTISPKPPSSRMITDFDRLDEIILRISRQNISLKVVVFNDEDYDYAKKIHQRYSEIPFFLQVGNDDCSTTDDDQLMMTLLNKYSWLIDKTMVDDEFQNVKVLPQLHTYIWGNKRGV

SEQ ID NO: 28055 - protein, 242 aa, Bacillus hwajinpoensis
  misc_feature (1)..(242): tr|A0A4U1MNY7|A0A4U1MNY7_9BACI 7-carboxy-7-deazaguanine synthase OS=Bacillus hwajinpoensis OX=208199 GN=queE P E=3 SV=1
MNKWVLPERSEYMKWELPMVEVFETVEGEGTRAGFPTVFVRVFHCNLRCSWCDTPYSYAPDKAEYTGSIEAIVNQINQYKSRHICFTGGEPLIHREKSMALLQAMVDLPHIEDIHIETNGAIDLTPYEAVRNEDDEWQKKVRFVMDYKLPDSGEQHRMLHENFNLLDTQDEIKFVIGSDEDFTVASDVVAQHHDKGQVLYSPVWETMPPHKLVEKILEAGLSKVKLSMQLHKIIWDPNKRGV

SEQ ID NO: 28056 - protein, 242 aa, Bacillus indicus
  misc_feature (1)..(242): tr|A0A084H2U2|A0A084H2U2_BACID 7-carboxy-7-deazaguanine synthase OS=Bacillus indicus OX=246786 GN=queE PE=3 SV =1
MKKFPVLEIFGPTIQGEGMVIGQKTMFVRTAGCDYSCSWCDSAFTWDGSAKDDIRQLTAEQIWNELSELGGDLFSHVTISGGNPALLVHLSELVDLLHEKEIKVAIETQGSRLQPWFSKIDDLTISPKPPSSGMSTDFDKLKEIIDYLDIENRLGHASLKVVVFDEADLEFAKKVHITYPELPFYIQVGNDLVQETSDDKLIGHLLSRYEWLIERSAKEKELNSARILPQLHTLVWGNKRGV

SEQ ID NO: 28057 - protein, 241 aa, Bacillus infantis
  misc_feature (1)..(241): tr|U5L426|U5L426_9BACI 7-carboxy-7-deazaguanine synthas e OS=Bacillus infantis NRRL B-14911 OX=1367477 GN=queE PE=3 SV=1
MSKIPVMEIFGPTIQGEGMVIGQKTMFVRTAGCDYSCSWCDSSFTWDGTGKELIRQMDAEEIWNELKAIGGEGFSFVTISGGNPALLKNLDKLISLLKKENIQLCLETQGSRWQDWFYSIDQLTISPKPPSSGMITDFEILDDIFERLADRFTHQVSLKVVIFDENDFEYSKKVMKRYPGIPLYLQAGNEHLSAANNDEFLSQQLKKYSWLIEKAMLEEEMKEVRVLPQLHTFVWGNMRGV

SEQ ID NO: 28058 - protein, 241 aa, Bacillus infantis
  misc_feature (1)..(241): tr|A0A5D4RDH1|A0A5D4RDH1_9BACI 7-carboxy-7-deazaguanine synthase OS=Bacillus infantis OX=324767 GN=queE PE=3 S V=1
MSKIPVMEIFGPTIQGEGMVIGQKTMFVRTAGCDYSCSWCDSSFTWDGTGKELIRQMDAEEIWNELKAIGGEGFSFVTISGGNPALLKNLDKLISLLKKENIKLCLETQGSRWQDWFYSIDQLTISPKPPSSGMITDFEILDDIFKRLADRFTHQVSFKVVIFDENDFEYSKKVMKRYPGIPLYLQAGNENLSAANNGEFLSEQLKKYSWLIEKAMLDDEMKEVRVLPQLHTFVWGNMRGV

SEQ ID NO: 28059 - protein, 243 aa, Bacillus intestinalis
  misc_feature (1)..(243): tr|A0A136G6C2|A0A136G6C2_9BACI 7-carboxy-7-deazaguanine synthase OS=Bacillus intestinalis OX=1963032 GN=queE P E=3 SV=1
MAKGIPVLEIFGPTIQGEGMVIGQKTMFVRTAGCDYSCSWCDSAFTWDGSAKKDIRWVTAEEIFAELKDIGGDAFSHVTISGGNPALLKQLDAFIELLKENNIRAALETQGTVYQDWFTLIDDLTISPKPPSSKMVTNFQKLDHILTSLKENNRQHACSLKVVIFNDEDLEFAKTVHKRYPGIPFYLQVGNDDVHTTDDQSLIAHLLGKYEALVDKVAVDAELNLVRVLPQLHTLLWGNKRGV

SEQ ID NO: 28060 - protein, 238 aa, Bacillus kochii
  misc_feature (1)..(238): tr|A0A248TER1|A0A248TER1_9BACI 7-carboxy-7-deazaguanine synthase OS=Bacillus kochii OX=859143 GN=queE PE=3 SV= 1
MSKIPVMEIFGPTIQGEGIVIGQKTMFVRTAGCDYACTWCDSSFTWDGSSKHLIKQMTATEIWHELKNIGGDYFDFVTISGGNPALLKNLGELVTLLKDKKVQTALETQGSKWQDWFKDIDFLTLSPKPPSSQMETDFNKLDEIIAQLEEKQPNLKVVVFNEEDLAYAKKVHLRYPKLSFCLQVGNDDSMTTNNDVLRSNLLAKYEWLLEKTMHDSEFKNIRVLPQLHTYIWGNKRGV

SEQ ID NO: 28061 - protein, 242 aa, Bacillus koreensis
  misc_feature (1)..(242): tr|A0A0M0LHR6|A0A0M0LHR6_9BACI 7-carboxy-7-deazaguanine synthase OS=Bacillus koreensis OX=284581 GN=queE PE=3 SV=1
MANIPVLEIFGPTIQGEGMVVGRKTMFVRTAGCDYSCAWCDSAFTWDGSAKDDIRQLSAHEIWSELTQIGGKKFDHVTISGGNPALIRAIGELVELLHENGVKVALETQGSRWQDWFEQIDDLTISPKPPSSRMETNFDVLDDIITRLSSKAREMAPSLKVVVFNEEDFHYAKEVHARYPDIPFFVQVGNEDVHTSDDGELISTLLRKYEDLIDRVVEDEMMNDVRVLPQLHALVWGNKRGV

SEQ ID NO: 28062 - protein, 235 aa, Bacillus krulwichiae
  misc_feature (1)..(235): tr|A0A1X9MFC0|A0A1X9MFC0_9BACI 7-carboxy-7-deazaguanine synthase OS=Bacillus krulwichiae OX=199441 GN=queE_2 P E=3 SV=1
MKVPVMEVFGPTIQGEGMVIGQKTMFVRTGGCDYSCSWCDSSFTWDGTLRSQLMNVNEIIRKLEEVGGERFSHVTISGGNPALHKGIGELVEACHQKGWKVAIETQGSIWQNWMMLVDDVTISPKPPSSNMETDFEKLDYYIEQLTGHNVSLKVVVFNDQDFTYAKMIHKRYPSVPFFLQIGNNSVETDDNETLLSNLLNRYEWLIEKTTESVSMNNARVLPQLHTLLWGNKRGV

SEQ ID NO: 28063 - protein, 370 aa, Bacillus krulwichiae
  misc_feature (1)..(370): tr|A0A1X9M6C8|A0A1X9M6C8_9BACI 7-carboxy-7-deazaguanine synthase OS=Bacillus krulwichiae OX=199441 GN=queE_1 P E=4 SV=1
MIETFPQITPANDPWEAYQDIDEFGKLTLTNVEFTTTTLCNMRCEHCAVGYTLQPKDPTPLPLDLLIQRLEEIPNLKAFSITGGEPMLSMKSVDHYVVPLLKYAHERGVRTQINSNLTLDLKRYEKIIPYLDVLHISHNYGSVHDFAEIGFAVMKRKPSFEQRSALFHRMVENAKALTSQGVLVSAETMINKRTLPHLESIHEQIVEMGCQRHEIHPMYPSDFASTLEVATLEEIRNGINRLLDVKKDDYWMLFGTLPFYPCSQNEEDLRLQKRLLTEKNVTVRNDPDGRSRLNVNIFDGNIIVTDFGDTPPLGNIKNTSLPEAYSKWIKSDLANSLNCHCPSVKCLGPNVLVKDAYYPTVDFTKKSSNI

SEQ ID NO: 28064 - protein, 238 aa, Bacillus kyonggiensis
  misc_feature (1)..(238): tr|A0A4U1DAL7|A0A4U1DAL7_9BACI 7-carboxy-7-deazaguanine synthase OS=Bacillus kyonggiensis OX=1037680 GN=queE P E=3 SV=1
MSKIPVMEIFGPTIQGEGMVIGQKTMFVRTAGCDYSCSWCDSSFTWDGSGKDLIKQMEAEEIWEELKRLGGDGFSFVTISGGNPALLKNLSYFVTLLKENNIQIGLETQGSKWQDWFLDIDQLTISPKPPSSGMDTNFEVLDRIIGRLSPSKTSLKVVVFDDKDYVYAKQVHLRYPDILFYLQVGNDDSKTINTASLVHHLLKKYEWLIDKTIEDPELKNIRVLPQLHTLIWGNKRGV

SEQ ID NO: 28065 - protein, 237 aa, Bacillus lehensis
  misc_feature (1)..(237): tr|A0A4Y7WPV5|A0A4Y7WPV5_9BACI 7-carboxy-7-deazaguanine synthase OS=Bacillus lehensis OX=300825 GN=queE PE=3 S V=1
MSSVIPVLEVFGPTIQGEGAVIGQKTMFVRTGGCDYRCSWCDSAFTWDGTGKSEALTAEEIIERLDTLAPASYGHVTISGGNPLLHKGIGQLVNLLQARGIQTAVETQGTFWQDWLKQIDAVTISPKPPSSGMKTNWETLNKCLTQLDTRQVSLKVVVFNKTDYRFAKEVHHRFPAYEFYLQVGNEDPTTADQQKLMQDLLQQYEQLIDWTMNDKEMNRVRVLPQLHTLLWGNKRGV

SEQ ID NO: 28066 - protein, 237 aa, Bacillus lehensis; identical to SEQ ID NO: 28065
  misc_feature (1)..(237): tr|A0A060M3M6|A0A060M3M6_9BACI 7-carboxy-7-deazaguanine synthase OS=Bacillus lehensis G1 OX=1246626 GN=queE PE =3 SV=1

SEQ ID NO: 28067 - protein, 242 aa, Bacillus lentus
  misc_feature (1)..(242): tr|A0A2X4W0W6|A0A2X4W0W6_BACLE 7-carboxy-7-deazaguanine synthase OS=Bacillus lentus OX=1467 GN=queE PE=3 SV=1
MSKIPVMEIFGPTIQGEGMVIGQKTMFVRTAGCDYSCAWCDSAFTWDGSGKDMIKQMDAKTIWEELKSIGGDGFSFVTISGGNPALLKNLAYLVQLLKQNNIKTGLETQGSRWQDWFLDIDELTISPKPPSSKMITDFDILDTIIEKLEQQSTSQNTSLKVVVFDDQDFQYAKQVHQRYPNIPFFLQVGNDDSSTIDHAKLISALLEKYEWLINKVIADPEMNQVKALPQLHTYIWGNKRGV

SEQ ID NO: 28068 - protein, 243 aa, Bacillus licheniformis
  misc_feature (1)..(243): tr|Q65KI4|Q65KI4_BACLD 7-carboxy-7-deazaguanine synthas e OS=Bacillus licheniformis (strain ATCC 14580 / DSM 13 / JCM 2505 / NBRC 12200 / NCIMB 9375 / NRRL NRS-1264 / Gibson 46) OX=279010 GN=queE PE=3 SV=1
MAKPIPVLEIFGPTVQGEGMVIGQKTMFVRTAGCDYSCSWCDSAFTWDGSAKKDIKWMTAEEVYESLKDIGGNAFSHVTISGGNPALLKQLDGLISLLKENGIRTALETQGTFYQDWFTGIDDLTISPKPPSSNMKTDFNRLDHIVDRLKEHGRAAAASLKVVIFTADDLQFAKQVHQRYPDIPFFLQVGNDDVHTEDQERLVERLLQKYEQLVEAVTRDPELNRVRVLPQLHTLIWGNKRGV

SEQ ID NO: 28069 - protein, 243 aa, Bacillus licheniformis
  misc_feature (1)..(243): tr|A0A1Q9G2E9|A0A1Q9G2E9_BACLI 7-carboxy-7-deazaguanine synthase OS=Bacillus licheniformis OX=1402 GN=queE PE= 3 SV=1
MAKGIPVLEIFGPTIQGEGMVIGQKTMFVRTAGCDYSCSWCDSAFTWDGSAKKDIRWMTAEEILTELKAIGGDAFSHVTISGGNPALLKQLDAFIELLKENNIRAALETQGTVYQDWFTLIDDLTISPKPPSSKMVTNFQKLDHILTSLKENNRQHAVSLKVVIFNDEDLEFAKTVHKRYPGIPFYLQVGNDDVHTTDDQTLIAHLLGKYEALVDKVAADAELNLVRVLPQLHTLLWGNKRGV

SEQ ID NO: 28070 - protein, 224 aa, Bacillus litoralis
  misc_feature (1)..(224): tr|A0A179T1C8|A0A179T1C8_9BACI 7-carboxy-7-deazaguanine synthase OS=Bacillus litoralis OX=152268 GN=queE PE=3 SV=1
MVIGQKTMFVRTAGCDYSCSWCDSAFTWDGSAKNDIRQMTAEEIWSELTELGGNRFSHVTISGGNPALLANLDVFVHLLKEKGKKIAIETQGSKYQAWLKSIDDLTISPKPPSSGMKTDFTKLDEIINTLTNSNKHNSLSLKVVVFHTEDLSFAKCVHLRYPEIPFYLQVGNENVHTAETDRLVQTLLEKYEWLIDQVIEDSQLNNVRVLPQLHTLVWGNKRGV

SEQ ID NO: 28071 - protein, 242 aa, Bacillus litoralis
  misc_feature (1)..(242): tr|A0A5C6W2I1|A0A5C6W2I1_9BACI 7-carboxy-7-deazaguanine synthase OS=Bacillus litoralis OX=152268 GN=queE PE=3 SV=1
MKKIPVLEVFGPTIQGEGMVIGQKTMFVRTAGCDYSCSWCDSAFTWDGSAKDDIRQLTADDIWSELIQLGGDRFSHVTISGGNPALLTNLFELVSLLKQNGKKIAIETQGSKYQEWLNDIDDLTISPKPPSSGMKTDFDKLDEIIEKVSLHNQENLISLKVVVFDLNDLAYAKKVHLRYPSIPFYLQVGNEDVSKSDTTELAQTLLTKYEWLIEQVIEDSDLNDVRVLPQLHTLVWGNKRGV

SEQ ID NO: 28072 - protein, 242 aa, Bacillus loiseleuriae
  misc_feature (1)..(242): tr|A0A0K9GQ24|A0A0K9GQ24_9BACI 7-carboxy-7-deazaguanine synthase OS=Bacillus loiseleuriae OX=1679170 GN=queE P E=3 SV=1
MSKIPVMEIFGPTIQGEGMVIGQKTMFVRTAGCDYACSWCDSSFTWDGSGKHLIKQMEPDEIWCQLKELGGDGFSHVTISGGNPALLKNLTGLVQLLKQENMKTCLETQGSKWQDWMLSINELTISPKPPSSGMITNFDSLDMILNKLMSDDFSGNVSLKVVVFNDADFNYAKAIHRRYPGIPFYMQVGNDDTKTVNDAVLITHLLQKYEELIDRVIQDEELKEIKVLPQLHALVWGNKRGV

SEQ ID NO: 28073 - protein, 239 aa, Bacillus lonarensis
  misc_feature (1)..(239): tr|A0A1G6H6Z4|A0A1G6H6Z4_9BACI 7-carboxy-7-deazaguanine synthase OS=Bacillus lonarensis OX=1464122 GN=queE PE= 3 SV=1
MTGQKPIPVMEIFGPTIQGEGMVIGRKTMFVRTGGCDYRCRWCDSAFTWDGTGKSKPMVAEDIISKLDTLAAGRFDHVTLSGGNPALHAGIGDLIHKLHAKNIQAAVETQGTIWQDWLTHVDDVTISPKPPSSGMETDWKKLDTFMTKLSPQKTSLKVVIFNEEDYAFAKLVHMRYPHISFFLQVGNDDIHTTDDTTLLTQLRYHYEQLIEKVMLDSTLTNVRVLPQLHTWMWGNKRGV

SEQ ID NO: 28074 - protein, 238 aa, Bacillus luciferensis
  misc_feature (1)..(238): tr|A0A1E2W0E2|A0A1E2W0E2_9BACI 7-carboxy-7-deazaguanine synthase OS=Bacillus luciferensis OX=178774 GN=queE PE =3 SV=1
MSKIPVLEIFGPTVQGEGMAIGQKTMFIRTAGCDYSCSWCDSSFTWDGSEKENIKWMTAEEVWKNLTNIGGDTFSHITISGGNPALLPSLGPVVEFLKEKNMTLALETQGSKWQPWLPSIDEVTLSPKPPSSGMNTDFDMLGSIIQNLENHPKFCLKVVIFDEKDLAYAETVHQKFPHVPFFLQVGNSWLNADDSTLLQYMLKRYEWLIDEAMKSNVFKNVKVLPQLHAFVWGNKRGV

SEQ ID NO: 28075 - protein, 238 aa, Bacillus luti
  misc_feature (1)..(238): tr|A0A1K0AM30|A0A1K0AM30_9BACI 7-carboxy-7-deazaguanine synthase OS=Bacillus luti OX=2026191 GN=queE PE=3 SV=1
MSKIPVLEIFGPTIQGEGMVVGQKTMFIRTAGCDYSCAWCDSAFTWDGSAKDQIRQMTAEDIWNELVAIGGENFSHVTISGGNPALLKNIEFLLSILKENGMRTAIETQGSKWQDWLLQIDEVTISPKPPSSTMHTDFQKLDAVIQKLAGKDISLKVVVFDDSDFEYAVKMHERYPDVPFFLQVGNDDTKTVDDAMLIKKLLDKYEWLIDKAINCKAMNDAKVLPQLHALVWGNKRGV

SEQ ID NO: 28076 - protein, 238 aa, Bacillus manliponensis
  misc_feature (1)..(238): tr|A0A073JZB1|A0A073JZB1_9BACI 7-carboxy-7-deazaguanine synthase OS=Bacillus manliponensis OX=574376 GN=queE P E=3 SV=1
MSNIPVLEVFGPTIQGEGMVVGQKTMFVRTAGCDYSCTWCDSAFTWDGSAKEQIRQMGPEEIWNELVELGGGNFSHVTISGGNPVLLKKLDAFLTLLQEKGIRTAIETQGSKWQDWLLQVDEVTISPKPPSSTMKTNFEMLDTVIHKLAGKDFSLKVVVFDEVDFEYAKEIHERYPHVPFFLQVGNDDTVTTDDTALVSRLLQKYEWLIEKAVHCKEMNDAKVLPQLHALVWGNKRGV

SEQ ID NO: 28077 - protein, 240 aa, Bacillus marisflavi
  misc_feature (1)..(240): tr|A0A0M0GR15|A0A0M0GR15_9BACI 7-carboxy-7-deazaguanine synthase OS=Bacillus marisflavi OX=189381 GN=queE PE=3 SV=1
MRKIPVLEVFGPTIQGEGMVIGQKTMFVRTAGCDYSCAWCDSAFTWDGSAKDDIRLMAATEVWDKLKEIGGDRFSHVTISGGNPALLPQIGDLLEILKANGIGSALETQGSRWQDWFYDINDLTISPKPPSSTMETDYDRLDLIVSRLKENGSNFSLKVVVFDEKDLEYAKGIHMRYEGVPFYIQTGNPEVSMEDTPRLVSNLLLDYERLIDVVCEQKELNDVRVLPQLHTLVWGNKRGV

SEQ ID NO: 28078 - protein, 240 aa, Bacillus marisflavi
  misc_feature (1)..(240): tr|A0A5D4RWD9|A0A5D4RWD9_9BACI 7-carboxy-7-deazaguanine synthase OS=Bacillus marisflavi OX=189381 GN=queE PE=3 SV=1
MRKIPVLEVFGPTIQGEGMVIGQKTMFVRTAGCDYSCAWCDSAFTWDGSAKDDIRLMAATEVWDKLKEIGGDRFSHVTISGGNPALLPQIGDLLEILKANGIGSALETQGSRWQDWFYDINDLTISPKPPSSTMETDYDRLDLIVSRLKENGSNFSLKVVVFDEKDLEYAKGIHRRYEGVPFYIQTGNPEVSMEDTPRLVSNLLLDYERLIDVVCEQKELNDVRVLPQLHTLVWGNKRGV

SEQ ID NO: 28079 - protein, 236 aa, Bacillus marmarensis
  misc_feature (1)..(236): tr|U6SS25|U6SS25_9BACI 7-carboxy-7-deazaguanine synthas e OS=Bacillus marmarensis DSM 21297 OX=1188261 GN=queE PE=3 SV=1
MKKIPVMEIFGPTIQGEGMVIGQKTMFVRTGGCDYRCSWCDSAFTWDGTGKSNLMTAEDIIKQLKEIGGDRFSHVTISGGNPAIHQGIGKLVSSLKSLGIKTAVETQGSLWQEWMMEVSDVTISPKPPSSKMETDYDKLDYYIDRLKDQHVSLKVVVFNEGDLEYAKHIHERYPEIPMYLQVGNDEVESVENDSLISHLLDRYEWLIDQAVASETLNDVKVLPQLHTLVWGNKRGV

SEQ ID NO: 28080 - protein, 243 aa, Bacillus megaterium
  misc_feature (1)..(243): tr|D5DZE5|D5DZE5_BACMQ 7-carboxy-7-deazaguanine synthas e OS=Bacillus megaterium (strain ATCC 12872 / QMB1551) OX=545693 GN=queE PE=3 SV=1
MANTIPVLEIFGPTIQGEGMVVGRKTMFVRTAGCDYSCSWCDSAFTWDGSAKNDIRQLTAEQIWTELKEIGGECFDHVTISGGNPALIKAIGSLVELLHSHGVKAALETQGSRYQDWFLKIDDLTISPKPPSSLMKTNFSVLDDIIETLIKEKRMAHISIKVVVFNDDDFEYAASVHERYPEVPFFVQVGNEDLTTIDNASLTQELLKKYEWLIDKAVAAKNMNDVRVLPQVHALVWGNKRGV

SEQ ID NO: 28081 - protein, 243 aa, Bacillus megaterium
  misc_feature (1)..(243): tr|A0A2A8VW76|A0A2A8VW76_BACME 7-carboxy-7-deazaguanine synthase OS=Bacillus megaterium OX=1404 GN=queE PE=3 S V=1
MANTIPVLEIFGPTIQGEGMVVGRKTMFVRTAGCDYSCSWCDSAFTWDGSAKNDIRQLTAEQIWTELKEIGGECFDHVTISGGNPALIKAIGSLVELLHSHGVKAALETQGSRYQDWFLKIDDLTISPKPPSSLMKTNFSVLDDIIETLIKEKRMAHISIKVVVFNDEDFEYAASVHERYPEVPFFVQVGNEDLTTIDNASLTQELLKKYEWLIDKAVAAKNMNDVRVLPQVHALVWGNKRGV

SEQ ID NO: 28082 - protein, 240 aa, Bacillus mesonae
  misc_feature (1)..(240): tr|A0A3T0HZY3|A0A3T0HZY3_9BACI 7-carboxy-7-deazaguanine synthase OS=Bacillus mesonae OX=1193713 GN=queE PE=3 S V=1
MSKLPVIEIFGPTIQGEGMVIGQKTMFVRTAGCDYSCSWCDSAFTWDGSAKDEIRLMDAEEIWQELTEIGGDRFSFVTISGGNPALLKNMDALIELLKANGIKCGLETQGSKWQDWFLNVDELTISPKPPSSKMNTNFEILDMIFSRLKDFKNHVSLKVVIFDEADLEYAKMVHQRYEHIPFYLQVGNNDLTNLNDHELIDKLLQKYEWLVNCVAADAQLNNVRVLPQLHTLLWGNKRGV

SEQ ID NO: 28083 - protein, 224 aa, Bacillus methanolicus
  misc_feature (1)..(224): tr|A0A068LR60|A0A068LR60_BACMM 7-carboxy-7-deazaguanine synthase OS=Bacillus methanolicus (strain MGA3 / ATCC 53907) OX=796606 GN=queE PE=3 SV=1
MVIGQKTMFVRTAGCDYSCSWCDSSFTWDGTGKDFVRQMEAEEIWSELKKLGGDGFSFVTISGGNPALIKNLQYLIQLLKENNIKICLETQGSKWQDWFFDIDELTLSPKPPSSNMVTDFDVLDTIIKNLDKNNSSQHISLKVVVFDDQDYEYAKKVHQRYPDIPFFLQVGNDDITTTENHQLISSLLGKYEWLINKVLKDSDLKNVKVLPQLHTYIWGNKRGV

SEQ ID NO: 28084 - protein, 242 aa, Bacillus methanolicus
  misc_feature (1)..(242): tr|I3DVL3|I3DVL3_BACMT 7-carboxy-7-deazaguanine synthas e OS=Bacillus methanolicus PB1 OX=997296 GN=queE PE=3 S V=1
MSKIPVMEIFGPTIQGEGMVIGQKTMFVRTAGCDYSCSWCDSSFTWDGTGKDLVRQMEAEEIWSELKKLGGDGFSFVTISGGNPALLKNLRYLIQLLKENNIKICLETQGSKWQDWFFEIDELTLSPKPPSSNMVTDFDVLDAIIKNFNQKNSAQNISLKIVVFDDQDYEYAKKVHQRYPDVPFFLQVGNEDITSTEKEKLISQLLGKYEWLINKVMKDSDLKNVKVLPQLHTYIWGNKRGV

SEQ ID NO: 28085 - protein, 238 aa, Bacillus mobilis
  misc_feature (1)..(238): tr|A0A386UXL6|A0A386UXL6_9BACI 7-carboxy-7-deazaguanine synthase OS=Bacillus mobilis OX=2026190 GN=queE PE=3 S V=1
MSKIPVLEIFGPTIQGEGMVVGQKTMFIRTAGCDYSCAWCDSAFTWDGSAKDQIRQMTAEDVWNELVEIGGENFSHVTISGGNPALLKNIEFLLSILKENGMRTAIETQGSKWQDWLLQIDEITISPKPPSSAMNTDFQKLDAVIQKLAGKDISLKVVVFDDQDFEYAVKMHERYPNVPFFLQVGNDDTKTVDDAMLIKKLLDKYEWLIDKAVNCKEMNDAKVLPQLHALVWGNKRGV

SEQ ID NO: 28086 - protein, 238 aa, Bacillus mobilis
  misc_feature (1)..(238): tr|A0A1K0AUE7|A0A1K0AUE7_9BACI 7-carboxy-7-deazaguanine synthase OS=Bacillus mobilis OX=2026190 GN=queE PE=3 S V=1
MSKIPVLEIFGPTIQGEGMVVGQKTMFIRTAGCDYSCAWCDSAFTWDGSAKDQIRQMTAEDVWNELVEIGGENFSHVTISGGNPALLKNIEFLLSILKENGMRTAIETQGSKWQDWLLQIDEITISPKPPSSTMNTDFQKLDAVIQKLAGKDISLKVVVFDDYDFEYAVKMHERYPDVPFFLQVGNDDTKTVDDAMLIKKLLDKYEWLIEKAVNCKEMNNAKVLPQLHALVWGNKRGV

SEQ ID NO: 28087 - protein, 242 aa, Bacillus muralis
  misc_feature (1)..(242): tr|A0A1B3XSM7|A0A1B3XSM7_9BACI 7-carboxy-7-deazaguanine synthase OS=Bacillus muralis OX=264697 GN=queE PE=3 SV =1
MSKLPVMEIFGPTIQGEGMVIGQKTMFVRTAGCDYSCSWCDSAFTWDGSGKEDTVQMTAEEIWDELKRIGGSAFSFVTISGGNPALLKNLNGLIALLHEHEMKIGVETQGSRWQDWFLDIDELTLSPKPPSSGMNTDFTVLDRIMENLADGNPNNHVSLKIVVFNEEDYQYAKRIHGRYPGIPFYLQVGNDDSRTADDQQLIGRLLKKYEELIDKVIADDELNDVKVLPQLHTYIWGNKRGV

SEQ ID NO: 28088 - protein, 238 aa, Bacillus mycoides
  misc_feature (1)..(238): tr|A0A1E8AYJ8|A0A1E8AYJ8_BACMY 7-carboxy-7-deazaguanine synthase OS=Bacillus mycoides OX=1405 GN=queE PE=3 SV= 1
MSKIPVLEIFGPTIQGEGMVIGQKTMFIRTAGCDYSCSWCDSAFTWDGSAKEQVRQMAPEEIWNELVEIGGENFSHVTISGGNPVLLKNIQFLLTVLKENGIRTAIETQGSKWQEWLLQIEEVTISPKPPSSKMKTDFTMLDSVIHKLERKDFSLKVVVFEDYDFEYAVKVHKRYPQVPFFLQVGNDDTKTVDDAVLIKNLLQKYERLIEKAVRCKEMNDAKVLPQLHALVWGNKRGV

SEQ ID NO: 28089 - protein, 238 aa, Bacillus mycoides
  misc_feature (1)..(238): tr|A0A1S9Y0N9|A0A1S9Y0N9_BACMY 7-carboxy-7-deazaguanine synthase OS=Bacillus mycoides OX=1405 GN=queE PE=3 SV= 1
MSKIPVLEIFGPTIQGEGMVVGQKTMFIRTAGCDYSCAWCDSAFTWDGSAKEQIKQMTPEDIWNELVEIGGENFSHVTISGGNPVLLKNMQFLLSILKENGMRTAVETQGSKWQDWLLQIDEVTISPKPPSSTMKTDFQMLDSVIHKLAGKDFSLKVVVFDDQDFEYAVKMHERYPNVPFFLQVGNDDTKTVDDAVLIKKLLEKYEWLIEKAVNCKEMNDAKVLPQLHALVWGNKRGV

SEQ ID NO: 28090 - protein, 243 aa, Bacillus nakamurai
  misc_feature (1)..(243): tr|A0A150F1Y7|A0A150F1Y7_9BACI 7-carboxy-7-deazaguanine synthase OS=Bacillus nakamurai OX=1793963 GN=queE PE=3 SV=1
MAKGIPVLEIFGPTIQGEGMVIGQKTMFVRTAGCDYSCSWCDSAFTWDGSAKKDIRWMTAEDIYHELREIGGNAFSHVTISGGNPALLKQLDAFILLLKQHDVRAALETQGTVYQDWFTLIDDLTISPKPPSSGMTTDFNKLDYILSSLEAANRRHAVSLKVVIFNDEDLAFAKTVHKRYPGIPFYLQVGNDNVHTTDDQALITHLLGKYEKLVDMVSADSELNLVRVLPQLHTLLWGNKRGV

SEQ ID NO: 28091 - protein, 237 aa, Bacillus nanhaiisediminis
  misc_feature (1)..(237): tr|A0A562QT18|A0A562QT18_9BACI 7-carboxy-7-deazaguanine synthase OS=Bacillus nanhaiisediminis OX=688079 GN=que E PE=3 SV=1
MKIPVMEVFGPTIQGEGMVIGQKTMFVRTGGCDYSCSWCDSSFTWDGSARSTAMEASEIVAKLKEIGGDAFSHVTISGGNPALHKGIDQLVDLCHENGWKVAIETQGSIWQEWMTKIDDVTISPKPPSSKMKTNVKQLDYYIEELTNANSYFSLKVVIFNEEDFLYAEMIHERYPEVPFFLQIGNEDISSTDDASLVSKLLKRYEWLIEQATKSVIMNDAKVLPQLHTLIWGNKRGV

SEQ ID NO: 28092 - protein, 240 aa, Bacillus nealsonii
  misc_feature (1)..(240): tr|A0A2N0Z308|A0A2N0Z308_9BACI 7-carboxy-7-deazaguanine synthase OS=Bacillus nealsonii OX=115979 GN=queE PE=3 SV=1
MNKIPVLEIFGPTIQGEGMVIGRKTMFVRTAGCDYKCAWCDSAFTWDGSAKHEIKQMTAEDIWEQLYALGSDRFDHVTISGGNPALLASLASFISLCKEKNIQVALETQGSKWQDWFDEIDDLTISPKPPSSRMETNFSILDEIVAKLQANHTNFSLKVVVFDDKDLEYAQKVYARYSNAPFFLQVGNDDTTNGNNDELVTKLLTKYEWLIDQVMESNEWTNVRVLPQLHAYVWGNKRGV

SEQ ID NO: 28093 - protein, 242 aa, Bacillus nealsonii
  misc_feature (1)..(242): tr|R9CD54|R9CD54_9BACI 7-carboxy-7-deazaguanine synthas e OS=Bacillus nealsonii AAU1 OX=1202533 GN=queE PE=3 SV =1
MSKIPVMEIFGPTIQGEGMVIGQKTMFVRTAGCDYSCAWCDSAFTWDGSGKGLIKQMQAEEIWQELVQLGGDGFSHVTLSGGNPALLKNLSHLVDFLKEKEIKIGLETQGSKWQDWFVDIDELTISPKPPSSKMNTDFDILDSIMQRLRDANQSNHISLKVVVFSDEDYDYAKKVHLRYSDIPFFLQVGNEDNKTTDNTQLVEQLLTKYEWLIDKTMLDHEFKNVKVLPQLHTYIWGNKRGV

SEQ ID NO: 28094 - protein, 241 aa, Bacillus notoginsengisoli
  misc_feature (1)..(241): tr|A0A417YWL4|A0A417YWL4_9BACI 7-carboxy-7-deazaguanine synthase OS=Bacillus notoginsengisoli OX=1578198 GN=qu eE PE=3 SV=1
MNKIPVMEIFGPTIQGEGMVMGRKSMFVRTAGCDYKCSWCDSAFTWDGSEKEKVRMMTPMEVFQELKALGGNNFDHVTITGGNPALIGDAMKEFIELLHQSAIEVGLETQGSKWQDWFYLVNDLTISPKPPSSGMNPNLELLDDIIFKLRDFKSNFSLKIVVFDDEDFDYAKMLNNRYKESSIPFFLSVGNSNPGEDGDISGRLLDSLDWLWGKVLGGPEMNNVRPLPQLHALVWSNKRGV

SEQ ID NO: 28095 - protein, 243 aa, Bacillus oceanisediminis
  misc_feature (1)..(243): tr|A0A4R8GJF6|A0A4R8GJF6_9BACI 7-carboxy-7-deazaguanine synthase OS=Bacillus oceanisediminis OX=665099 GN=queE PE=3 SV=1
MSKIPVLEIFGPTIQGEGMVIGQKTMFVRTAGCDYSCSWCDSSFTWDGSAKDSIRQMEPEDIWNELKELGGDGFSFVTISGGNPALLKNLSDLISLLKAEKIKICLETQGSRWQDWFYEIDELTLSPKPPSSGMNTDFDVLNYIVNNLQTQSKADQQFSLKVVVFDDKDYEYAKNVHKRYPGVPFYLQVGNDDTVTADDRNLLQRLLDKYDWLIEKTIHDSDLTDVKVLPQLHTYVWGNKRGV

SEQ ID NO: 28096 - protein, 243 aa, Bacillus oceanisediminis
  misc_feature (1)..(243): tr|A0A160MB51|A0A160MB51_9BACI 7-carboxy-7-deazaguanine synthase OS=Bacillus oceanisediminis 2691 OX=1196031 G N=queE PE=3 SV=1
MSKIPVLEIFGPTIQGEGMVIGQKTMFVRTAGCDYSCSWCDSSFTWDGSAKDSIRQMEPDEIWKELKELGGDGFSFVTISGGNPALLKNLSELISLLKAEKIKICLETQGSRWQDWFYEIDELTLSPKPPSSGMKTDFDVLGYIVNNLQTKRKAEQQVSLKIVVFDDKDYEYAKNIHKRYPGVPFYLQVGNDDTVTADDRNLLQKLLDKYDWLIEKTIHDNDLTDVKVLPQLHTYVWGNKRGV

SEQ ID NO: 28097 - protein, 235 aa, Bacillus okhensis
  misc_feature (1)..(235): tr|A0A0B0ID18|A0A0B0ID18_9BACI 7-carboxy-7-deazaguanine synthase OS=Bacillus okhensis OX=333138 GN=queE PE=3 S V=1
MKIPVMEVFGPTIQGEGMVIGQKTMFVRTGGCDYSCSWCDSRFTWDGSARSELLEAEAIVEQLKQIGGDLFSHVTISGGNPALHKGIANLVTLCHEQGWKVAVETQGSIWQNWMREIDDVTISPKPPSSLMETDYEKLDFYIKQLEERNVSLKVVVFDDEDFRFAELIHSRYPHIPFYLQIGNEDVATTDDHALLSTLLKRYEWLIEKATKSHVMNDAKVLPQLHTLIWGNKRGV

SEQ ID NO: 28098 - protein, 236 aa, Bacillus okuhidensis
  misc_feature (1)..(236): tr|A0A0M0KJZ3|A0A0M0KJZ3_9BACI 7-carboxy-7-deazaguanine synthase OS=Bacillus okuhidensis OX=136160 GN=queE PE= 3 SV=1
MKRIPVMEIFGPTVQGEGMVIGQKTMFVRTGGCDYSCSWCDSAFTWDGSLKATLRTADEIIAKLEEIGGERFSHVTISGGNPALHKGIGELVDKLHDKGIRVALETQGSLWQDWFLKIDDLTISPKPPSSQMKTDFTKLDQIIERLDTKQMSLKVVVFNDEDFRYAEYVHERYPHVPFFLQVGNEDTVTGDNDLLIRTLLDRYEWLIAKATDSTIMNDAKILPQLHTLVWGNKRGV

SEQ ID NO: 28099 - protein, 243 aa, Bacillus oleivorans
  misc_feature (1)..(243): tr|A0A285CMP0|A0A285CMP0_9BACI 7-carboxy-7-deazaguanine synthase OS=Bacillus oleivorans OX=1448271 GN=queE PE= 3 SV=1
MAKKFPVLEIFGPTIQGEGSVIGVQTMFVRTAGCDYSCSWCDSAFTWDGSAKDEIKMITAEEIMAELQELGGNRFSHVTISGGNPALLSGLDELIDMLHKHNIKVGLETQGSRWQDWFEKIDDLTISPKPPSSEMKTNFDILDSIIEKLIAAERNGHFSLKVVVFDNQDFDYAKDLYNRYPDVPFYLQVGNDQYNSADNSGLVKHLLRRYEWLIEKVTATGKMNQARVLPQLHTLVWGNKRGV

SEQ ID NO: 28100 - protein, 238 aa, Bacillus pacificus
  misc_feature (1)..(238): tr|A0A3P1BXU8|A0A3P1BXU8_9BACI 7-carboxy-7-deazaguanine synthase OS=Bacillus pacificus OX=2026187 GN=queE PE=3 SV=1
MSKIPVLEIFGPTIQGEGMVVGQKTMFIRTAGCDYSCAWCDSAFTWDGSAKDQIRQMTAEDVWNELVEVGGENFSHVTISGGNPALLKNIEFLLSILKENGMRTAIETQGSKWQDWLLQIDEITISPKPPSSTMKTDFQKLDAMIQKLSGKDISLKVVVFDDYDFEYAVKMHERYPDVPFFLQVGNDDTKTVDDTMLIKKLLDKYEWLIEKAVNRKEMNNAKVLPQLHALVWGNKRGV

SEQ ID NO: 28101 - protein, 238 aa, Bacillus pacificus
  misc_feature (1)..(238): tr|A0A1J9Y814|A0A1J9Y814_9BACI 7-carboxy-7-deazaguanine synthase OS=Bacillus pacificus OX=2026187 GN=queE PE=3 SV=1
MSKIPVLEIFGPTIQGEGMVVGQKTMFIRTAGCDYSCAWCDSAFTWDGSAKDQIRQMTAEDVWNELVEIGGENFSHVTISGGNPALLKNIEFLLSILKENGMRTAIETQGSKWQDWLLQIDEITISPKPPSSTMKTDFQKLDAMIQKLAGKDISLKVVVFDDYDFEYAVKMHERYPHVPFFLQVGNDDTKTVDDAMLIKKLLDKYEWLIEKAVNRKEMNNAKVLPQLHALVWGNKRGV

SEQ ID NO: 28102 - protein, 243 aa, Bacillus paralicheniformis
  misc_feature (1)..(243): tr|A0A1Q8GGI3|A0A1Q8GGI3_9BACI 7-carboxy-7-deazaguanine synthase OS=Bacillus paralicheniformis OX=1648923 GN=q ueE PE=3 SV=1
MAKPIPVLEIFGPTVQGEGMVIGQKTMFVRTAGCDYSCSWCDSAFTWDGSAKKDIKWMTAEEVYESLKDIGGNAFSHVTISGGNPALLKQLDGLISLLKENGIRTALETQGTFYQDWFAGIDDLTISPKPPSSNMKTDFNKLDHIVEKLKEHGRAAAASLKVVIFTAEDLQFAKQVHQRYPDVPFFLQVGNDDVHTEDQVRLVERLLQKYEQLVEAVTRDPELNRVRVLPQLHTLIWGNKRGV

SEQ ID NO: 28103 - protein, 243 aa, Bacillus paralicheniformis
  misc_feature (1)..(243): tr|A0A5A9TA87|A0A5A9TA87_9BACI 7-carboxy-7-deazaguanine synthase OS=Bacillus paralicheniformis OX=1648923 GN=q ueE PE=3 SV=1
MAKPIPVLEIFGPTVQGEGMVIGQKTMFVRTAGCDYSCSWCDSAFTWDGSAKKDIKWMTAEEVYESLKDIGGNAFSHVTISGGNPALLKQLDGLISLLKENGIRTALETQGTFYQDWFAGIDDLTISPKPPSSNMKTDFNKLDHIVEKLKEHGRAEAASLKVVIFTAEDLQFAKQVHQRYPDVPFFLQVGNDDVHTEDQERLVERLLQKYEQLVEAVTRDPELNRVRVLPQLHTLIWGNKRGV

SEQ ID NO: 28104 - protein, 238 aa, Bacillus paramycoides
  misc_feature (1)..(238): tr|A0A1J9VF24|A0A1J9VF24_9BACI 7-carboxy-7-deazaguanine synthase OS=Bacillus paramycoides OX=2026194 GN=queE P E=3 SV=1
MSKIPVLEIFGPTIQGEGMVVGQKTMFIRTAGCDYSCAWCDSAFTWDGSAKEQIRQMTPEDIWSELVAIGGENFSHVTISGGNPVLLKNMQFLLSILKENGMRTAIETQGSKWQDWLLQIDEVTISPKPPSSTMKTDFQMLDSIIHKLAGKDFSLKVVVFDDQDFEYAVKMHERYPNVPFFLQVGNDDTKTVDDAMLIKNLLEKYEWLIEKAVHCKEMNDAKVLPQLHALVWGNKRGV

SEQ ID NO: 28105 - protein, 238 aa, Bacillus paranthracis
  misc_feature (1)..(238): tr|A0A4U1DRU7|A0A4U1DRU7_9BACI 7-carboxy-7-deazaguanine synthase OS=Bacillus paranthracis OX=2026186 GN=queE P E=3 SV=1
MSKIPVLEIFGPTIQGEGMVVGQKTMFIRTAGCDYSCAWCDSAFTWDGSAKDQIRQMTAEDVWNELVEIGGENFSHVTISGGNPVLLKNIEFLLSILKENGMRTAIETQGSKWQDWLLEIDEITISPKPPSSTMNTDFQKLDDVIQKLAGKDISLKVVVFDDYDFEYAVKMHERYPEVPFFLQVGNDDTKTVDDAMLIKKLLDKYEWLIEKAVNCKEMNNAKVLPQLHALVWGNKRGV

SEQ ID NO: 28106 - protein, 238 aa, Bacillus paranthracis; identical to SEQ ID NO: 28014
  misc_feature (1)..(238): tr|A0A1J9YNF3|A0A1J9YNF3_9BACI 7-carboxy-7-deazaguanine synthase OS=Bacillus paranthracis OX=2026186 GN=queE P E=3 SV=1

SEQ ID NO: 28107 - protein, 241 aa, Bacillus persicus
  misc_feature (1)..(241): tr|A0A1H8AIZ0|A0A1H8AIZ0_9BACI 7-carboxy-7-deazaguanine synthase OS=Bacillus persicus OX=930146 GN=queE PE=3 S V=1
MSKIPVIEIFGPTIQGEGMVIGQKTMFVRTSGCDYSCDWCDSAFTWDGSGKHLVQQMDAEEIWEELKAVGGDRFSFVTISGGNPALLKNLNHLIQLLKTNHIKIGLETQGSKWQDWFLEIDDLTLSPKPPSSKMTTDFEILDDIIAQLQQTNNQSFSLKIVVFNEQDFDYAKAIHKRYPGVPFYLQVGNEDIANSDNEKLLSELIGRYEWLIDQVVGDSELNDVKVLPQLHTYVWGNKRGV

SEQ ID NO: 28108 - protein, 236 aa, Bacillus pseudofirmus
  misc_feature (1)..(236): tr|A0A1Q9PTH7|A0A1Q9PTH7_BACPF 7-carboxy-7-deazaguanine synthase OS=Bacillus pseudofirmus OX=79885 GN=queE PE= 3 SV=1
MKKIPVMEIFGPTIQGEGMVIGQKTMFVRTGGCDYRCSWCDSAFTWDGTGKSNLMTAEEIIKQLKEIGGDRFSHVTISGGNPAIHQGIGKLVSSLKSLGIKTAVETQGSLWQEWMMEVSDVTISPKPPSSKMETDYDKLDYYIDRLKDQHVSLKVVVFTEEDLEYAKHIHERYPEIPMYLQVGNDEVESVENDSLISHLLDRYEWLIDQAVASETLNDVKVLPQLHTLVWGNKRGV

SEQ ID NO: 28109 - protein, 236 aa, Bacillus pseudofirmus
  misc_feature (1)..(236): tr|D3FSX5|D3FSX5_BACPE 7-carboxy-7-deazaguanine synthas e OS=Bacillus pseudofirmus (strain OF4) OX=398511 GN=qu eE PE=3 SV=1
MKKIPVMEIFGPTIQGEGMVIGQKTMFVRTGGCDYRCSWCDSAFTWDGTGKSNLMTAEEIIKQLKEIGGDRFSHVTISGGNPAIHQGIGKLVSFLKSLGIKTAVETQGSLWQEWMMEVSDVTISPKPPSSKMETDFDKLDYYIDRLKDQHVSLKVVVFTEEDLEYAKHIHERYPEIPMYLQVGNDEVESVENDSLISHLLDRYEWLIDQAVASETLNDVKVLPQLHTLVWGNKRGV

SEQ ID NO: 28110 - protein, 232 aa, Bacillus pseudomycoides
  misc_feature (1)..(232): tr|C3BW11|C3BW11_9BACI 7-carboxy-7-deazaguanine synthas e OS=Bacillus pseudomycoides DSM 12442 OX=527000 GN=que E PE=3 SV=1
MEIFGPTIQGEGMVIGQKTMFIRTAGCDYSCSWCDSAFTWDGSTKEQIRQMAPEEIWNELVGIGGENFSHVTISGGNPVLLKNIQFLLTVLKENGIRTAIETQGSKWQEWLLQIDEVTISPKPPSSKMKTDFTMLDSVIHKLERKDFSLKVVVFEDYDFEYAVKVHKRYPQVPFFLQVGNDDTKTVDDAALIKNLLQKYERLIEKAVQCKEMNDAKVLPQLHALVWGNKRGV

SEQ ID NO: 28111 - protein, 238 aa, Bacillus pseudomycoides
  misc_feature (1)..(238): tr|A0A2B6Y0B5|A0A2B6Y0B5_9BACI 7-carboxy-7-deazaguanine synthase OS=Bacillus pseudomycoides OX=64104 GN=queE P E=3 SV=1
MSKIPVLEIFGPTIQGEGMVIGQKTMFIRTAGCDYSCSWCDSAFTWDGSTKEQIRQMAPEEIWNELVEIGGENFSHVTISGGNPVLLKNIQFLLTVLKENGIRTAIETQGSKWQEWLLQIDEVTISPKPPSSKMKTDFTMLDSIIHKLVRKDFSLKVVVFEDYDFEYAVKVHKRYPQVPFFLQVGNDDTKTVDDAALIKNLLQKYERLIEKAVQCKEMNDAKVLPQLHALVWGNKRGV

SEQ ID NO: 28112 - protein, 243 aa, Bacillus pumilus
  misc_feature (1)..(243): tr|A0A498TWW7|A0A498TWW7_BACPU 7-carboxy-7-deazaguanine synthase OS=Bacillus pumilus OX=1408 GN=queE_1 PE=3 SV =1
MAKAIPVLEIFGPTIQGEGMVIGQKTMFVRTAGCDYSCSWCDSSFTWDGSAKHGIQWLEAEDIVKELKRIGGQAFSHVTISGGNPALLKQMESLIDLLHEEGIDTALETQGTMYQEWFLKIDDLTISPKPPSSNMKTDFTKLTRIIDELKSGNRLQHASLKVVIFDDRDLAYAKDVHAKYPELPFYLQVGNDDTTTGDDAYLLTHLLKKYEALVNQVAQDPDLNRVRVLPQLHTLLWGNKRGV

SEQ ID NO: 28113 - protein, 243 aa, Bacillus pumilus
  misc_feature (1)..(243): tr|A0A3T0LHV2|A0A3T0LHV2_BACPU 7-carboxy-7-deazaguanine synthase OS=Bacillus pumilus OX=1408 GN=queE PE=3 SV=1
MAKAIPVLEIFGPTIQGEGMVIGQKTMFVRTAGCDYSCSWCDSAFTWDGSAKHDIQWLHAEDIVKELKRIGGQAFSHVTISGGNPALLKQMESLIDLLHEEGIDTALETQGTMYQDWFLKIDDLTISPKPPSSNMKTDFTKLTRIIDELKSGNRLQHASLKVVIFDDHDLAYAKDVHAKYPELPFYLQVGNDDTTTGDDAYLLTHLLKRYEALVDQVAQDPDLNRVRVLPQLHTLLWGNKRGV

SEQ ID NO: 28114 - protein, 243 aa, Bacillus safensis
  misc_feature (1)..(243): tr|A0A5C0WCY3|A0A5C0WCY3_9BACI 7-carboxy-7-deazaguanine synthase OS=Bacillus safensis OX=561879 GN=queE_1 PE=3 SV=1
MAKAIPVLEIFGPTIQGEGMVIGQKTMFVRTAGCDYSCSWCDSSFTWDGSAKHDIQWLEAEDIVKELKRIGGQAFSHVTISGGNPALLKQMESLIDLLHEEGIDTALETQGTMYQEWFLKIDDLTISPKPPSSNMKTDFTKLTRIIDELKSGNRLQHASLKVVIFDDRDLAYAKDVHAKYPELPFYLQVGNDDTTTGDDAYLLTHLLKKYEALVDQVAQDPDLNRVRVLPQLHTLLWGNKRGV

SEQ ID NO: 28115 - protein, 243 aa, Bacillus safensis
  misc_feature (1)..(243): tr|A0A494TS40|A0A494TS40_9BACI 7-carboxy-7-deazaguanine synthase OS=Bacillus safensis OX=561879 GN=queE PE=3 S V=1
MAKAIPVLEIFGPTIQGEGMVIGQKTMFVRTAGCDYSCSWCDSSFTWDGSAKHDIQWLEAEDIVKELKRIGGQAFSHVTISGGNPALLKQMESLIDLLHEEGIDTALETQGTMYQEWFLKIDDLTISPKPPSSNMKTDFTKLTRIIDELKSGNRLQHASLKVVIFDDRDLAYAKDVHAKYPELPFYLQVGNDDTTTGDDAYLLTHLLKKYEALVNQVAQDPDLNRVRVLPQLHTLLWGNKRGV

SEQ ID NO: 28116 - protein, 239 aa, Bacillus salacetis
  misc_feature (1)..(239): tr|A0A3A1R067|A0A3A1R067_9BACI 7-carboxy-7-deazaguanine synthase OS=Bacillus salacetis OX=2315464 GN=queE PE=3 SV=1
MRKIPVLEIFGPTIQGEGMVIGQKTMFVRTAGCDYSCSWCDSAFTWDGSAKDDIRMMTAIEVWEELKTIGGTRFSHVTISGGNPALIGAIEELLVIFNDNEIQSALETQGSRWQDWFMDIDDLTLSPKPPSSGMNTDFDKLDFIMGKLRGQKDCSLKVVIFDERDLEYAAALHERYPGVPFFLQVGNSNLAESDEGRLVRGLIAEYEKLIDAVIQSERLNNVRVLPQLHTFVWGNKRGV

SEQ ID NO: 28117 - protein, 239 aa, Bacillus salarius
  misc_feature (1)..(239): tr|A0A428MYF0|A0A428MYF0_9BACI 7-carboxy-7-deazaguanine synthase OS=Bacillus salarius OX=284579 GN=queE PE=3 S V=1
MKKVPVLETFGPTIQGEGMVIGQKTMFLRTGGCDYRCSWCDSAFTWDGSQKPDLMEAEEIIEQLKKQGGDVFNHVTISGGNPALHSGLAEVISQLQSLGIKTAVETQGTMWQDWMREIDDVTISPKPPSSGMETNWDQLDMYVNELLERPGKDISLKVVIFDEADLAYAANVHERYPQVEMFLQTGNDQLETSNNGWLLSHLLEKYEWLVEKVLRSERLNEVKVLPQLHTLLWGNKQGV

SEQ ID NO: 28118 - protein, 239 aa, Bacillus salarius
  misc_feature (1)..(239): tr|A0A428MTB1|A0A428MTB1_9BACI 7-carboxy-7-deazaguanine synthase OS=Bacillus salarius OX=284579 GN=queE PE=3 S V=1
MKKVPVLEIFGPTIQGEGMVIGQKTMFVRTGGCDYRCSWCDSAFTWDGSQKPDLMQADEIVEKLEKQGGDVFNHVTISGGNPALHSGLAEVISLLQNKGIKTAVETQGTIWQDWMLEIDDVTISPKPPSSGMETNWNKLDMYMRELLNHSNNDLSLKVVIFDEDDLTYAATVHERYPEVDMFLQTGNDELETSDNSWLLSHLLEKYEWLVDKVLQSERLNEVKVLPQLHTLLWGNKQGV

SEQ ID NO: 28119 - protein, 242 aa, Bacillus salsus
  misc_feature (1)..(242): tr|A0A1H0Q6M3|A0A1H0Q6M3_9BACI 7-carboxy-7-deazaguanine synthase OS=Bacillus salsus OX=930152 GN=queE PE=3 SV= 1
MSKVPVMEVFGPTIQGEGMVIGQKTMFVRTAGCDYSCSWCDSSFTWDGTGIDLIKQMDAEEIWAELVSHGGEGFSFVTISGGNPALLKNLSYLINLLKEKKIKIGLETQGSKWQDWFLNIDELTISPKPPSSGMETDFNALDMILGKMKATDNRNQTSLKVVVFNDEDYNYAKMVHLRYPEIPFFLQVGNEDNKTTDDQMLINELLKKYEWLINKVMADDELKDVKVLPQLHTYIWGNKRGV

SEQ ID NO: 28120 - protein, 236 aa, Bacillus selenatarsenatis
  misc_feature (1)..(236): tr|A0A0A8X5V7|A0A0A8X5V7_9BACI 7-carboxy-7-deazaguanine synthase OS=Bacillus selenatarsenatis SF-1 OX=1321606 GN=queE PE=3 SV=1
MEIFGPTIQGEGMVIGQKTMFVRTAGCDYSCDWCDSSYTWDGSGKDLIRQMDAEEIWSEMRALGGDGFSYVTISGGNPALLKNLSGLVELLKENHINICLETQGSKWQDWFLKIDALTLSPKPPSSGMKTNFEVLDQIVYGLKENASLKNASLKIVVFDEVDYEYAKLFHQRYPELPFFLQVGNDDIETEDQMNLMSSLVDKYEWLINKVMCDVEMNNVRVLPQLHVYVWGNKRGV

SEQ ID NO: 28121 - protein, 243 aa, Bacillus selenitireducens
  misc_feature (1)..(243): tr|D6XXU2|D6XXU2_BACIE 7-carboxy-7-deazaguanine synthas e OS=Bacillus selenitireducens (strain ATCC 700615 / DS M 15326 / MLS10) OX=439292 GN=queE PE=3 SV=1
MTETIPVLEIFGPTIQGEGMVAGRKTMFVRTAGCDYACSWCDSAFTWDGSAKDEIVQMNKDAIWQALNEEAEGLFSHVTISGGNPALLKNLGSFITLLKEKAIDVALETQGSVWQDWFTTIDDLTISPKPPSSRMETDFGVLDDIMTRLREAGRSSQVSLKVVIFDEEDLAYARRVKTRYPDVPFYLQVGNDDTVTDEDKTLRDHLMDRYEWLINETMGDAAFNDAYVLPQIHALLWGNRRGV

SEQ ID NO: 28122 - protein, 239 aa, Bacillus shackletonii
  misc_feature (1)..(239): tr|A0A0Q3TJK1|A0A0Q3TJK1_9BACI 7-carboxy-7-deazaguanine synthase OS=Bacillus shackletonii OX=157838 GN=queE PE =3 SV=1
MSSSKIPVIEIFGPTIQGEGMVIGRKTMFVRTAGCDFRCVWCDSAFTWDGSEKDNIRLLTPSEIFHELKQLGNQNFNHVTISGGNPALIGKPMMEFIELLHEHDIKVGLETQGSRWQDWFRSVDDLTISPKPPSSGMNTDFDVLDSIIENLAGKRISLKVVVFNDEDFDYARMVHKRYDAIDFYLSVGNKDPYESGDISSRLLMSLDWLWSKVMEDPEMNGVRALPQLHALVWANKRGV

SEQ ID NO: 28123 - protein, 243 aa, Bacillus siamensis
  misc_feature (1)..(243): tr|A0A268DY98|A0A268DY98_9BACI 7-carboxy-7-deazaguanine synthase OS=Bacillus siamensis OX=659243 GN=queE PE=3 SV=1
MAKGIPVLEIFGPTIQGEGMVIGQKTMFVRTAGCDYSCSWCDSAFTWDGSAKKDIRWMTAEDIYRELREIGGDAFSHVTISGGNPALLKQLDALILLLKEHGVRAALETQGTVYQDWFTMINDLTISPKPPSSGMTTDFAKLDHIVSSLDAAERLSAVSLKVVIFNDEDLQFAKTVHKRYPNIPFYLQVGNDNVHTTDDRALIAHLLEKYEKLVDKVSADSDLNLVRVLPQLHTLLWGNKRGV

SEQ ID NO: 28124 - protein, 243 aa, Bacillus siamensis
  misc_feature (1)..(243): tr|A0A2K9KCP1|A0A2K9KCP1_9BACI 7-carboxy-7-deazaguanine synthase OS=Bacillus siamensis OX=659243 GN=queE PE=3 SV=1
MAKGIPVLEIFGPTIQGEGMVIGQKTMFVRTAGCDYSCSWCDSAFTWDGSAKKDIRWMTAEDIYRELREIGGDAFSHVTISGGNPALLKQLDALILLLKEHGVRAALETQGTVYQDWFTMINDLTISPKPPSSGMTTDFAKLDHIVSSLDAAERLSAVSLKVVIFNDEDLQFAKTVHKRYPNIPFYLQVGNDNVHTTDDQALIAHLLEKYEKLVDKVSADSDLNLVRVLPQLHTLLWGNKRGV

SEQ ID NO: 28125 - protein, 242 aa, Bacillus simplex
  misc_feature (1)..(242): tr|A0A109MWS4|A0A109MWS4_9BACI 7-carboxy-7-deazaguanine synthase OS=Bacillus simplex OX=1478 GN=queE PE=3 SV=1
MSKLPVMEIFGPTIQGEGMVIGQKTMFVRTAGCDYSCSWCDSAFTWDGSGKEDTVHMTAEEIWGELKRIGGSGFSFVTISGGNPALLKNLNGLIALLHEHNIKIGVETQGSRWQDWFLDIDELTLSPKPPSSGMSTDFTVLDQILEKLAGRNPNNHVSLKIVVFNEEDYQYAKHVHERYPGIPFYLQVGNDDSRTADDQHLISGLLKKYEELIDKVIADDELNDVKVLPQLHTYIWGNKRGV

SEQ ID NO: 28126 - protein, 242 aa, Bacillus simplex
  misc_feature (1)..(242): tr|A0A4V5SGD9|A0A4V5SGD9_9BACI 7-carboxy-7-deazaguanine synthase OS=Bacillus simplex OX=1478 GN=queE PE=3 SV=1
MSKLPVMEIFGPTIQGEGMVIGQKTMFVRTAGCDYSCAWCDSAFTWDGTGKEDTVQMTAEEIWDELKRIGGSGFSFVTISGGNPALLKNLNGLIAILHENKMKIGVETQGSRWQDWFLDIDELTISPKPPSSGMKTDFTVLDQIISNLANRNPENHVSLKIVVFNEEDYQYAKHVHGRYPEIPFYLQVGNDDSRTADDRQLISGLLKKYEELIDKVIADDELNDVKVLPQLHTYIWGNKRGV

SEQ ID NO: 28127 - protein, 242 aa, Bacillus smithii
  misc_feature (1)..(242): tr|G9QLM1|G9QLM1_9BACI 7-carboxy-7-deazaguanine synthas e OS=Bacillus smithii 7_3_47FAA OX=665952 GN=queE PE=3 SV=1
MAKKVPVLEIFGPTIQGEGSVIGQKTMFVRTAGCDYSCSWCDSAFTWDGSAKADIRQMTAEEIWKELKQLGGDCFSHVTISGGNPALISGLSEFIDLLKEEGIRIGLETQGSRWQDWFWQIDDLTISPKPPSSGMKNNFFVLDDIVKKLQAKNHQTFSLKVVIFDDRDFDYAVSVHQRYPSVPFFVQVGNDDPATTDDDQLIKHLLTKMKWLVEKISASAEMNDVRALPQLHTLLWGNKRGV

SEQ ID NO: 28128 - protein, 242 aa, Bacillus smithii
  misc_feature (1)..(242): tr|A0A0H4PF96|A0A0H4PF96_9BACI 7-carboxy-7-deazaguanine synthase OS=Bacillus smithii OX=1479 GN=queE PE=3 SV=1
MAKKVPVLEIFGPTIQGEGSVIGQKTMFVRTAGCDYSCSWCDSAFTWDGSAKADIRQMTAEEIWKELKQLGGDCFSHVTISGGNPALISGLSEFIDLLKEEGIRIGLETQGSRWQDWFWQIDDLTISPKPPSSGMKTNFFVLDDIVKKLQAKNHQTFSLKVVIFDDRDFDYAVSVHQRYPSVPFFVQVGNDDPATADDDQLIKHLLTKMKWLVEKISASAEMNDVRALPQLHTLLWGNKRGV

SEQ ID NO: 28129 - protein, 225 aa, Bacillus solimangrovi
  misc_feature (1)..(225): tr|A0A1E5LFM5|A0A1E5LFM5_9BACI 7-carboxy-7-deazaguanine synthase OS=Bacillus solimangrovi OX=1305675 GN=queE P E=3 SV=1
MSAGRKTMFVRTAGCDYHCSWCDSAFTWDGSAKEDIRQMNASDIVSELKQIGRDQFDHVTISGGNPALLKEIQLLIDILKEEGFNTALETQGSKWQDWFVKIDDLTLSPKPPSSEMKTDFLMLDQIIDNLEKDNRINEHVSLKVVVFNDDDFEYAKDIHLRYPNVPFYLQVGNDNLISESNNELALHLIKSYEWLVNKVIDCKEMNDVRVLPQLHALLWGNKRGV

SEQ ID NO: 28130 - protein, 234 aa, Bacillus sonorensis
  misc_feature (1)..(234): tr|M5P8J2|M5P8J2_9BACI 7-carboxy-7-deazaguanine synthas e OS=Bacillus sonorensis L12 OX=1274524 GN=queE PE=3 SV =1
MNFDTNASLPLVEMFETIEGEGSAAGKQTTFIRLFHCNLRCVWCDTTYSYAPSKPEFEATIEEIAEKVRCLGNHYVCLTGGEPLIHGEKSMALIDRLAKIDCIQDIHVETNGAILLKPFINMRRLSTIISNKVRFIMDFKLPDSGEMKKMVYENFDLLDEQDEIKFVIGTEHDFNIAMEIIDKHYKKGRLLMSPVWETMTPADLVKKVLNSRRKDIQVNLQIHKIIWDPQTRGV

SEQ ID NO: 28131 - protein, 243 aa, Bacillus sonorensis
  misc_feature (1)..(243): tr|M5PDB2|M5PDB2_9BACI 7-carboxy-7-deazaguanine synthas e OS=Bacillus sonorensis L12 OX=1274524 GN=queE PE=3 SV =1
MAKPIPVLEIFGPTIQGEGMVIGQKTMFVRTAGCDYSCSWCDSAFTWDGSAKKDIKWMSAEEIYESLREIGGNAFSHVTISGGNPALLKQLDGLISLLQENGIRTALETQGTFYQDWFTKIDDLTISPKPPSSNMKTDLTKLDHIVGMLKDHGRLSAASLKVVIFTPSDLQFAKSIHHRYPDIPFYLQIGNDDVHTEDQGRLVEKLLRKYEELVKAVTHDPELNRVRVLPQLHTLIWGNKRGV

SEQ ID NO: 28132 - protein, 238 aa, Bacillus sp.; identical to SEQ ID NO: 27984
  misc_feature (1)..(238): tr|A0A2S9Y8Y7|A0A2S9Y8Y7_9BACI 7-carboxy-7-deazaguanine synthase OS=Bacillus sp. M21 OX=1155617 GN=queE_1 PE=3 SV=1

SEQ ID NO: 28133 - protein, 238 aa, Bacillus sp.; identical to SEQ ID NO: 28001
  misc_feature (1)..(238): tr|A0A371VF70|A0A371VF70_9BACI 7-carboxy-7-deazaguanine synthase OS=Bacillus sp. dmp5 OX=2293328 GN=queE PE=3 SV=1

SEQ ID NO: 28134 - protein, 243 aa, Bacillus stratosphericus; identical to SEQ ID NO: 28114
  misc_feature (1)..(243): tr|A0A4Y9K0V2|A0A4Y9K0V2_9BACI 7-carboxy-7-deazaguanine synthase OS=Bacillus stratosphericus OX=293386 GN=queE PE=3 SV=1

SEQ ID NO: 28135 - protein, 262 aa, Bacillus stratosphericus
  misc_feature (1)..(262): tr|M5RE83|M5RE83_9BACI 7-carboxy-7-deazaguanine synthas e OS=Bacillus stratosphericus LAMA 585 OX=1236481 GN=qu eE PE=3 SV=1
MSERHQQATAFTVRNELSSMTKAIPVLEIFGPTIQGEGMVIGQKTMFVRTAGCDYSCSWCDSSFTWDGSAKHDIQWLQAEDIVKELKRIGGKAFSHVTISGGNPALLKQMESLIDLLYEEGIDTALETQGTMYQDWFLKIDDLTISPKPPSSNMKTDFSKLTRIIDELKNGNRLHHASLKVVIFDDLDLAYAKDVHAKYPELPFYLQVGNDDTTTADDAYLLTHLLKKYEMLVDQVAQDPDLNRVRVLPQLHTLLWGNKRGV

SEQ ID NO: 28136 - protein, 241 aa, Bacillus subterraneus
  misc_feature (1)..(241): tr|A0A3R9DR66|A0A3R9DR66_9BACI 7-carboxy-7-deazaguanine synthase OS=Bacillus subterraneus OX=285983 GN=queE PE =3 SV=1
MTKIPVLEIFGPTIQGEGMVVGQKTMFVRTAGCDYSCAWCDSSFTWDGSGKDLIMQMDAEEIWRELERLGGDRFSHVTISGGNPALLKSLSSLVTLLKAYQIKICLETQGSRWQDWFLQIDALTLSPKPPSSGMKTDFKILDSIIANLQGKASNEVSLKVVVFDDADMQYAKMVHHRYPGLPFYLQVGNEEINMTDQPRFVSLLLDKYEWLINRVIEDSELKDVRVLPQLHSLVWGNKRGV

SEQ ID NO: 28137 - protein, 243 aa, Bacillus subtilis
  misc_feature (1)..(243): sp|O31677|QUEE_BACSU 7-carboxy-7-deazaguanine synthase OS=Bacillus subtilis (strain 168) OX=224308 GN=queE PE= 1 SV=1
MAKGIPVLEIFGPTIQGEGMVIGQKTMFVRTAGCDYSCSWCDSAFTWDGSAKKDIRWMTAEEIFAELKDIGGDAFSHVTISGGNPALLKQLDAFIELLKENNIRAALETQGTVYQDWFTLIDDLTISPKPPSSKMVTNFQKLDHILTSLQENDRQHAVSLKVVIFNDEDLEFAKTVHKRYPGIPFYLQVGNDDVHTTDDQSLIAHLLGKYEALVDKVAVDAELNLVRVLPQLHTLLWGNKRGV

SEQ ID NO: 28138 - protein, 243 aa, Bacillus subtilis
  misc_feature (1)..(243): tr|A0A164YHR4|A0A164YHR4_BACIU 7-carboxy-7-deazaguanine synthase OS=Bacillus subtilis OX=1423 GN=queE PE=3 SV= 1
MAKGIPVLEIFGPTIQGEGMVIGQKTMFVRTAGCDYSCSWCDSAFTWDGSAKKDIRWMTAEEIFAELKDIGGDAFSHVTISGGNPALLKQLDAFIELLKENNIRAALETQGTVYQDWFTLIDDLTISPKPPSSKMVTNFQKLDHILTLLQENDRQHAVSLKVVIFNDEDLEFAKTVHKRYPGIPFYLQVGNDDVHTTDDQSLIAHLLGKYEALVDKVAVDAELNLVRVLPQLHTLLWGNKRGV

SEQ ID NO: 28139 - protein, 243 aa, Bacillus swezeyi
  misc_feature (1)..(243): tr|A0A5D4QMC6|A0A5D4QMC6_9BACI 7-carboxy-7-deazaguanine synthase OS=Bacillus swezeyi OX=1925020 GN=queE PE=3 S V=1
MAKPIPVLEIFGPTVQGEGMVIGQKTMFVRTAGCDYSCSWCDSAFTWDGSAKKDIKWMTAEEVYESLKEIGGNAFSHVTISGGNPALLKQLDGLISLLKENDIRTALETQGTFYQDWFMNIDDLTISPKPPSSNMNTDFKKLDHIVGKLDEHGRLDAASLKVVIFNPLDLQFAKKVHHRYPDIPFYLQVGNDDVQTEDQGRLVERLLQKYEELVEAVTCDPELNRVRVLPQLHTLIWGNKRGV

SEQ ID NO: 28140 - protein, 243 aa, Bacillus swezeyi
  misc_feature (1)..(243): tr|A0A1R1RGR8|A0A1R1RGR8_9BACI 7-carboxy-7-deazaguanine synthase OS=Bacillus swezeyi OX=1925020 GN=queE PE=3 S V=1
MAKPIPVLEIFGPTVQGEGMVIGQKTMFVRTAGCDYSCSWCDSAFTWDGSAKKDINWMTAEEVYESLKEIGGNAFSHVTISGGNPALLKQLDGLISLLKENDIRTALETQGTFYQDWFVNIDDLTISPKPPSSNMNTDFKKLDYIVGKLDEHGRLDAASLKVIIFNPLDLQFAKKVHHRYPDTPFYLQVGNDDVHTEDQGRLVERLLQKYEELVEAVTRDPQLNRVRVLPQLHTLIWGNKRGV

SEQ ID NO: 28141 - protein, 242 aa, Bacillus taeanensis
  misc_feature (1)..(242): tr|A0A366XYD9|A0A366XYD9_9BACI 7-carboxy-7-deazaguanine synthase OS=Bacillus taeanensis OX=273032 GN=queE PE=3 SV=1
MSRWNLPSRAEYLNWKLPMVEIFETVEGEGMMAGFPTVFVRIFHCNLRCTWCDTPYSYAPAKPEFEATIAEIIGKIQTFPSKNICFTGGEPLIHREKSAALLIEMANLAHINDIHIETNGAIDLAPFAAVRNEEKNVQQKARFVMDYKLPDSNEMAKMIHENFHVLEEQDEIKFVIGSDEDFNIARDLIQNDIQKGQVLFSPVWETMKPSKLVEKVLNEPLPNVKVSMQLHKVIWDPNKRGV

SEQ ID NO: 28142 - protein, 243 aa, Bacillus tequilensis
  misc_feature (1)..(243): tr|A0A2X0X4P2|A0A2X0X4P2_9BACI 7-carboxy-7-deazaguanine synthase OS=Bacillus tequilensis OX=227866 GN=queE PE= 3 SV=1
MAKGIPVLEIFGPTIQGEGMVIGQKTMFVRTAGCDYSCSWCDSAFTWDGSAKKDIRWMTAEEIFTELKEIGGDAFSHVTISGGNPALLKQLDAFIELLKENNIRAALETQGTVYQEWFTLIDDLTISPKPPSSKMVTDFQKLDHILTSLKENNRQHAVSLKVVIFNDEDLAFAKTVHKRYPGIPFYLQVGNDDVHTTDDQTLIAHLLGKYEALVDKVAADAELNLVRVLPQLHTLLWGNKRGV

SEQ ID NO: 28143 - protein, 242 aa, Bacillus terrae
  misc_feature (1)..(242): tr|A0A429X5A5|A0A429X5A5_9BACI 7-carboxy-7-deazaguanine synthase OS=Bacillus terrae OX=1914933 GN=queE PE=3 SV =1
MSRVPVIEIFGPTIQGEGMVIGQKTMFVRTAGCDYSCTWCDSAFTWDGSGKDSIKQMDAEEIWHELKLLGGDGFSFVTISGGNPALLKNLSYLINLLKKNKIQVGLETQGSKWQDWFLDIDELTISPKPPSSGMVTDFDTLDMIFEKLKGTNSTHRCSVKVVIFDDQDFVYAKKLHFRYPEIPFYLQVGNTDHRTSDNERLIDQLLQKYEWLVNKVVADNELRNVKVLPQLHTLIWGNRRGV

SEQ ID NO: 28144 - protein, 240 aa, Bacillus thermocopriae
  misc_feature (1)..(240): tr|A0A410XI71|A0A410XI71_9BACI 7-carboxy-7-deazaguanine synthase OS=Bacillus thermocopriae OX=1215031 GN=queE PE=3 SV=1
MERIPVIEIFGPTIQGEGMVIGQKTMFVRTAGCDYRCRWCDSSFTWDGSAKHEVEWLTPEQIWQQLKQLGDDRFSHVTISGGNPALLKGLSALVTHLKEKGVRIGLETQGSVWQDWFYDIDDLTISPKPPSSNMKTNFTMLDMIMERLTAHRGHVSLKVVVFDDEDFAYAKHVHQRYPTVPFYVQVGNDHIHEADDVTLRLQLLQKLEWLVDKVVQSKEMNNVRVLPQLHTLLWGNRRGV

SEQ ID NO: 28145 - protein, 238 aa, Bacillus thuringiensis
  misc_feature (1)..(238): tr|A0A1E8A927|A0A1E8A927_BACTU 7-carboxy-7-deazaguanine synthase OS=Bacillus thuringiensis OX=1428 GN=queE_2 P E=3 SV=1
MSKIPVLEIFGPTIQGEGMVIGQKTMFIRTAGCDYSCSWCDSAFTWDGSAKEQVRQMAPEEIWNELVEIGGENFSHVTISGGNPVLLKNIQFLLTVLKENGIRTAIETQGSKWQEWLLQIEEVTISPKPPSSKMKTDFTMLDSIIHKLERKDFSLKVVVFEDYDFEYAVKVHKRYPQVPFFLQVGNDDTKTVDDAALIKNLLQKYERLIEKVVQCKEMNDAKVLPQLHALVWGNKRGV

SEQ ID NO: 28146 - protein, 238 aa, Bacillus thuringiensis
  misc_feature (1)..(238): tr|J3UNQ3|J3UNQ3_BACTU 7-carboxy-7-deazaguanine synthas e OS=Bacillus thuringiensis HD-771 OX=1218175 GN=queE P E=3 SV=1
MSKIPVLEIFGPTIQGEGMVVGQKTMFIRTAGCDYSCAWCDSAFTWDGSAKNQIRQMTAEDIWDELVAIGGEKFSHVTISGGNPALLKNIEFLLSILKENGMRTAIETQGSKWQDWLLQIDEVTISPKPPSSTMKTDFQKLDAIIQKLAGKDISLKVVVFDDHDFEYAVKMHERYPDVPFFLQVGNDDTKTVDDAMLIKKLLDKYEWLIDKAVNCKEMNDAKVLPQLHALVWGNKRGV

SEQ ID NO: 28147 - protein, 242 aa, Bacillus timonensis
  misc_feature (1)..(242): tr|A0A4S3PJN2|A0A4S3PJN2_9BACI 7-carboxy-7-deazaguanine synthase OS=Bacillus timonensis OX=1033734 GN=queE PE= 3 SV=1
MSEIPVIEIFGPTIQGEGMVIGQKTMFVRTAGCDYSCSWCDSAFTWDGSGKDLIRQMDAEEIWQELKSIGGEGFSFVTISGGNPALLKNLDYLICLLKENNIKVVLETQGSKWQEWFLKIDELTISPKPPSSEMVTNFDALDMIIHKLNEIPTVQNTSLKVVVFDDQDYDYAKKVHYRYPEIPFFLQVGNDNNHTTDNQKLLSQLLQKYEWLINKTMLDKELKNVKVLPQLHTYIWGNKRGV

SEQ ID NO: 28148 - protein, 238 aa, Bacillus toyonensis; identical to SEQ ID NO: 28145
  misc_feature (1)..(238): tr|A0A4Q9YB14|A0A4Q9YB14_9BACI 7-carboxy-7-deazaguanine synthase OS=Bacillus toyonensis OX=155322 GN=queE PE=3 SV=1

SEQ ID NO: 28149 - protein, 238 aa, Bacillus toyonensis
  misc_feature (1)..(238): tr|A0A2C4E1Q9|A0A2C4E1Q9_9BACI 7-carboxy-7-deazaguanine synthase OS=Bacillus toyonensis OX=155322 GN=queE PE=3 SV=1
MSKIPVLEIFGPTIQGEGMVVGQKTMFIRTAGCDYSCSWCDSAFTWDGSAKDQIRQMPAEDIWNELVEIGGENFSHVTISGGNPVLLKNIESLLSILKENGMRTAIETQGSKWQDWLLQIDEITISPKPPSSGMKTAYQKLDAVIQKLAGKDISLKVVVFDDRDFEYAVKMHERYPSVPFFLQVGNDDTKTVDDAMLIKKLLDKYEWLIEKAVNCKKMNDAKVLPQLHALVWGNKRGV

SEQ ID NO: 28150 - protein, 238 aa, Bacillus tropicus; identical to SEQ ID NO: 28101
  misc_feature (1)..(238): tr|A0A4Y6F878|A0A4Y6F878_9BACI 7-carboxy-7-deazaguanine synthase OS=Bacillus tropicus OX=2026188 GN=queE PE=3 SV=1

SEQ ID NO: 28151 - protein, 238 aa, Bacillus tropicus
  misc_feature (1)..(238): tr|A0A5C5A562|A0A5C5A562_9BACI 7-carboxy-7-deazaguanine synthase OS=Bacillus tropicus OX=2026188 GN=queE PE=3 SV=1
MSKIPVLEIFGPTIQGEGMVVGQKTMFIRTAGCDYSCAWCDSAFTWDGSAKDQIRQMTAEDVWNELVEIGGENFSHVTISGGNPALLKNIEFLLSILKENGMRTAIETQGSKWQDWLLQIDEVTISPKPPSSTMKTDFQKLDAIIQKLSGKDISLKVVVFDDYDFEYAVKMHERYPDVPFFLQVGNDDTKTVDDAMLIKKLLDKYEWLIEKAVNRKEMNNAKVLPQLHALVWGNKRGV

SEQ ID NO: 28152 - protein, 245 aa, Bacillus urumqiensis
  misc_feature (1)..(245): tr|A0A2P6MEX1|A0A2P6MEX1_9BACI 7-carboxy-7-deazaguanine synthase OS=Bacillus urumqiensis OX=1548213 GN=queE PE =3 SV=1
MSKSKLPVLEIFGPTFQGEGMVIGQKTMFVRTAGCDYSCSWCDSAFTWDGSAKEDIRMLTPEEVVDELDQCAPDNYQHVTISGGNPALLASVGPLCAILRDRGIKTALETQGSRWQDWFLNIDDLTISPKPPSSLMKPSLSMLDDIVEKLRNGGRLQHTSLKVVVFNEEDFQFAKSIHHRYPDLAFYLQTGNEDTGESQETGRLVEKLLDRYHQLVERTMEDNEMTAVHVLPQLHTLVWGNQRGV

SEQ ID NO: 28153 - protein, 243 aa, Bacillus vallismortis
  misc_feature (1)..(243): tr|A0A410WI34|A0A410WI34_BACVA 7-carboxy-7-deazaguanine synthase OS=Bacillus vallismortis OX=72361 GN=queE PE= 3 SV=1
MAKGIPVLEIFGPTIQGEGMVIGQKTMFVRTAGCDYSCSWCDSAFTWDGSAKKDIRWMTAEEIFAELKDIGGDAFSHVTISGGNPALLKQLDAFIELLKENNIRAALETQGTVYQDWFTLIDDLTISPKPPSSKMVTNFQKLDHILTSLKENNRQHAVSLKVVIFNDEDLAFAKTVHKRYPGIPFYLQVGNDDVHTTDDQSLIAHLLGKYEALVDKVAADAELNLVRVLPQLHTLLWGNKRGV

SEQ ID NO: 28154 - protein, 243 aa, Bacillus vallismortis
  misc_feature (1)..(243): tr|A0A1W6HH91|A0A1W6HH91_BACVA 7-carboxy-7-deazaguanine synthase OS=Bacillus vallismortis OX=72361 GN=queE PE= 3 SV=1
MAKGIPVLEIFGPTIQGEGMVIGQKTMFVRTAGCDYSCSWCDSAFTWDGSAKKDIRWMTAEDIYRELREIGGDAFSHVTISGGNPALLKQLDALILLLKEHGVRAALETQGTVYQDWFTMINDLTISPKPPSSGMTTDFAKLDHIVSSLDAAERLNAVSLKVVIFNDEDLQFAKTVHKRYPNIPFYLQVGNDNVHTTDDRALIAHLLGKYETLVDKVSADSDLNLVRVLPQLHTLLWGNKRGV

SEQ ID NO: 28155 - protein, 239 aa, Bacillus velezensis
  misc_feature (1)..(239): tr|A0A2I5JYF7|A0A2I5JYF7_9BACI 7-carboxy-7-deazaguanine synthase OS=Bacillus velezensis OX=492670 GN=queE PE=3 SV=1
MAKGIPVLEIFGPTIQGEGMVIGQKTMFVRTAGCDYSCSWCDSAFTWDGSAKKDIRWMTAEDIYRELREIGGDAFSHVTISGGNPALLKQLDALILLLKEHGVRAALETQGTVYQDWFTMINDLTISPKPPSSGMTTDFAKLDHIVSSLDAAERLNAVSLKVVIFNDEDLQFAKTVHKRYPNITFYLQVGNDNVHTTDDRALIAHLLGKYETLVDKVSADSDLNLVRVLPQLHTLLWGQ

SEQ ID NO: 28156 - protein, 243 aa, Bacillus velezensis; identical to SEQ ID NO: 28154
  misc_feature (1)..(243): tr|A7Z3Y8|A7Z3Y8_BACVZ 7-carboxy-7-deazaguanine synthas e OS=Bacillus velezensis (strain DSM 23117 / BGSC 10A6 / FZB42) OX=326423 GN=queE PE=3 SV=1

SEQ ID NO: 28157 - protein, 240 aa, Bacillus vietnamensis
  misc_feature (1)..(240): tr|A0A0P6W8K4|A0A0P6W8K4_9BACI 7-carboxy-7-deazaguanine synthase OS=Bacillus vietnamensis OX=218284 GN=queE PE =3 SV=1
MKKIPVLEVFGPTIQGEGMVIGQKTMFVRTAGCDYSCAWCDSAFTWDGSAKEDIVLMTAQDIWHRLLEIGGDRFSHVTISGGNPALLASLKELIDIFKENGIDSALETQGSRWQDWFYDISDLTISPKPPSSGMVTEFEKLDEIVHRLKENRSQFSLKVVVFDDFDLEYATRIHHRYPGVPFYIQTGNPAVTEGDTAKLVSDLLLDYETLIDKVCERADLNNVRVLPQLHTLVWGNKRGV

SEQ ID NO: 28158 - protein, 239 aa, Bacillus vietnamensis
  misc_feature (1)..(239): tr|A0A5D4KAB1|A0A5D4KAB1_9BACI 7-carboxy-7-deazaguanine synthase OS=Bacillus vietnamensis OX=218284 GN=queE PE =3 SV=1
MRKIPVLEVFGPTIQGEGMVIGQKTMFVRTAGCDYSCSWCDSAFTWDGSAKEDIRLLTAAEIWQELHEIGGRRFNHVTISGGNPALITAIEELLDVFKKNGISSALETQGSRWQDWFMDIDELTLSPKPPSSGMKTDFDKLDYIIERLKNHTSRSLKVVIFNAADLEYAANLHERYPGVPFFLQVGNGNLAAEEGEGFLSQLITDYENLIDAVTDSERLNDVRVLPQLHTYVWGNKRGV

SEQ ID NO: 28159 - protein, 235 aa, Bacillus wakoensis
  misc_feature (1)..(235): tr|W4PXR9|W4PXR9_9BACI 7-carboxy-7-deazaguanine synthas e OS=Bacillus wakoensis JCM 9140 OX=1236970 GN=queE PE= 3 SV=1
MKIPVMEVFGPTIQGEGMVIGQKTMFVRTGGCDYSCSWCDSSFTWDGTARSELLEVEAIIKKIKETGGEYFSHVTISGGNPALHKGIGELVDRCHEEGWKVAIETQGSIWQEWMKEIDDVTISPKPPSSNMKTDFEKLDFYVEQLKDRKFSLKVVVFTEEDFRYAEQIHVRYPKVPFYLQIGNEDISTTDDEALLSKLLHAYEWLIDRATKSTIMNDAKVLPQLHTLIWGNKRGV

SEQ ID NO: 28160 - protein, 224 aa, Bacillus weihaiensis
  misc_feature (1)..(224): tr|A0A1L3MXN6|A0A1L3MXN6_9BACI 7-carboxy-7-deazaguanine synthase OS=Bacillus weihaiensis OX=1547283 GN=queE PE =3 SV=1
MVIGQKTMFVRTAGCDYSCSWCDSAFTWDGSAKDDIRQLSAEEIWEELVQLGEDRFSHVTISGGNPALLANLQEFITLLKEKGKKIAIETQGSKYQEWLKEIDDLTISPKPPSSGMRTDFMKLDEIISRVKVEGDKHSISLKVVIFNLEDLEYAKNVHLRYPDIPFYLQVGNEDIYQAETKQLVEKLLTRYEWLIDQVIADKELNAVRVLPQLHTLIWGNKRGV

SEQ ID NO: 28161 - protein, 220 aa, Bacillus wiedmannii
  misc_feature (1)..(220): tr|C2PC63|C2PC63_9BACI 7-carboxy-7-deazaguanine synthas e OS=Bacillus wiedmannii OX=1890302 GN=queE PE=3 SV=1
MVVGQKTMFIRTAGCDYSCAWCDSAFTWDGSAKDQIRQMTAEDVWNELVEIGGENFSHVTISGGNPALLKNIEFLLSILKENGMRTAIETQGSKWQDWLLQIDEITISPKPPSSAMNTDFQKLDAVIQKLAGKDISLKVVVFDDYDFEYAVNMHERYPDVPFFLQVGNDDTKTVDDTMLIKKLLDKYEWLIDKAVNCKEMNNAKVLPQLHALVWGNKRGV

SEQ ID NO: 28162 - protein, 238 aa, Bacillus wiedmannii; identical to SEQ ID NO: 28086
  misc_feature (1)..(238): tr|A0A2B5P897|A0A2B5P897_9BACI 7-carboxy-7-deazaguanine synthase OS=Bacillus wiedmannii OX=1890302 GN=queE PE= 3 SV=1

SEQ ID NO: 28163 - protein, 240 aa, Bacillus wudalianchiensis
  misc_feature (1)..(240): tr|A0A1B9AC36|A0A1B9AC36_9BACI 7-carboxy-7-deazaguanine synthase OS=Bacillus wudalianchiensis OX=1743143 GN=qu eE PE=3 SV=1
MKKIPVLEIFGPTVQGEGAVIGRKTMFVRTAGCDYRCAWCDSAFTWDGSAKERIQLLTAEEIWEELIKIGGDTFDHVTISGGNPALLPQIDDLLAKLTEKGIKTALETQGSRWQEWFYKIDELTISPKPPSSGMETDFEQLSLIVERLIKQEKAVSLKIVIFDDQDLAFAKKVHQLYPDLTFFLQVGNDKLQEQNPTNLLSYLVSRYEWLINKVMPDSDWKDVRVLPQLHTFVWGNKQGV

SEQ ID NO: 28164 - protein, 243 aa, Bacillus xiamenensis
  misc_feature (1)..(243): tr|K2N305|K2N305_9BACI 7-carboxy-7-deazaguanine synthas e OS=Bacillus xiamenensis OX=1178537 GN=queE PE=3 SV=1
MTKAIPVLEIFGPTIQGEGMVIGQKTMFVRTAGCDYSCSWCDSSFTWDGSAKHDIQWLQAEDIVKELKKIGGEAFSHVTISGGNPALLKQMETLIDLLHEEGIDTALETQGTMYQDWFLKIDDLTISPKPPSSKMKTDFTKLTRIIDELKNGNRLQHASLKVVIFDDQDLAYAKDVHAKYPELPFYLQVGNDDTTTADDAYLLTHLLKKYEALVDQVAQDPDLNRVRVLPQLHTLLWGNKRGV

SEQ ID NO: 28165 - protein, 239 aa, Bacillus zeae
  misc_feature (1)..(239): tr|A0A398AX00|A0A398AX00_9BACI 7-carboxy-7-deazaguanine synthase OS=Bacillus zeae OX=1917180 GN=queE PE=3 SV=1
MSKIPVIEIFGPTIQGEGMVIGQKTMFVRTAGCDYSCSWCDSSFTWDGSGNHLVRQMGAEEIWNELEGYGGDCFSFVTISGGNPALLKNLGSLIALLKQKGIKIGLETQGSKWQDWFYDIDELTISPKPPSSKMETDFEKLDTIVSRLDGSGRISLKVVVFDEQDYSYAKKVHQRYHHVPFFLQVGNADITTEDRSSLVKELLLQYEQLINNVVKDPGLNEVKVLPQLHTLLWGNKRGV

SEQ ID NO: 28166 - protein, 243 aa, Bacillus zhangzhouensis
  misc_feature (1)..(243): tr|A0A081L6Z6|A0A081L6Z6_9BACI 7-carboxy-7-deazaguanine synthase OS=Bacillus zhangzhouensis OX=1178540 GN=queE PE=3 SV=1
MAKAIPVLEIFGPTIQGEGMVIGQKTMFVRTAGCDYSCSWCDSSFTWDGSAKHDIQWLQAEDIVQELKRIGGQAFSHVTISGGNPALLKQMESLIDLLHEEGIDTALETQGTMYQDWFLKIDDLTISPKPPSSNMKTDFTKLTRIIDELKNGNRLQHASLKVVIFDDRDLAYAKDVHAKYPELPFYLQVGNDDTTTGDDAYLLTHLLKKYEALVDQVAQDSDLNRVRVLPQLHTLLWGNKRGV

SEQ ID NO: 28167 - protein, 223 aa, Unknown
  misc_feature (1)..(223): tr|A0A0J8YR51|A0A0J8YR51_9GAMM 7-carboxy-7-deazaguanine synthase OS=bacteria symbiont BFo2 of Frankliniella oc cidentalis OX=1628856 GN=queE PE=3 SV=1
MLYPINEMFQTLQGEGFYTGAPAIFIRLQGCPVGCSWCDTKHTWEKYADQQQPLTNIVHKSAESEAWADASVEQLLAVIAEQGWTAKHIVITGGEPALYDLTPLTEQFEQQGFQCQIETSGTHPIQCSAATWVTVSPKVNMRGGYDVLNSALLRANEVKHPVGRQRDIDALDLLLSQVPPSTERIIALQPISCKKAATELCIATCIARNWRFSMQTHKYLNIA

SEQ ID NO: 28168 - protein, 223 aa, Unknown
  misc_feature (1)..(223): tr|A0A0J8YGZ9|A0A0J8YGZ9_9GAMM 7-carboxy-7-deazaguanine synthase OS=bacteria symbiont BFo1 of Frankliniella oc cidentalis OX=1628855 GN=queE PE=3 SV=1
MQYPINEMFQTLQGEGVYTGVPAIFIRLQGCPVGCSWCDTKHTWDKLADRETSLGDILLKTVETDAWGAADAAALLEVIRQHGWTAKHVVITGGEPCIHDLTPLTAALQENGFSCQIETSGTHEVLCTPETWVTVSPKVNMRGGYDVLNQALIRADEVKHPVARQRDVDALDDLLATLSDDKTRIIALQPISQKDDATRLCIETCIARNWRLSMQTHKYLNIA

SEQ ID NO: 28169 - protein, 224 aa, Bacteriodetes bacterium
  misc_feature (1)..(224): tr|A0A522FV00|A0A522FV00_9BACT 7-carboxy-7-deazaguanine synthase OS=Bacteriodetes bacterium OX=2507565 GN=queE PE=3 SV=1
MKILSNDIKLNVSEIFYSIQGEGTRAGLPCVFIRLQGCKLRCKWCDTPYALKFNGDSSKMTFSEIIESVKKFGCKFIQITGGEPLNQENVIPFMKLLCDKKLTVSLETSGAFDVSEVDKRVIKIMDIKCPASGMVKLNKFENINYINKKDEIKFVIADRKDFDWAMEIIKQYKLTKKTTNILFSPAFDIIEPVTLANWLLESNIKARLQLQIHKYIWEPNTRGV

SEQ ID NO: 28170 - protein, 219 aa, Bacteriodetes bacterium
  misc_feature (1)..(219): tr|A0A521WPB4|A0A521WPB4_9BACT 7-carboxy-7-deazaguanine synthase OS=Bacteriodetes bacterium OX=2507565 GN=queE PE=3 SV=1
MITNNPNTLVINEIFHSIQGESCHAGLPCVFVRLTYCNIRCSYCDSEYAFYEGKEMTMDEILERVQHYGCKLVEVTGGEPLFQSNVHELMKRLCDNGYEVLLETGGSLSLEHVDRRVKCVVDFKCPSSNMVKKNLWLIIEQLKPVDEVKFVIGDRNDYDWAKQKIAEYKIGERCRILMSVVFGKLEPVELAEWILTDRLDVRFQLQMHKFIWEPEKRGV

SEQ ID NO: 28171 - protein, 231 aa, Bacterioplanes sanyensis
  misc_feature (1)..(231): tr|A0A222FND9|A0A222FND9_9GAMM 7-carboxy-7-deazaguanine synthase OS=Bacterioplanes sanyensis OX=1249553 GN=que E PE=3 SV=1
MAAQYRIKEIFYTLQGEGAQAGRPAVFCRFSKCNLWNGRESGRTAAVCNFCDTDFIGTDGHLGGVYDLEQLVVVIQQQWPGSTANGQGKPYVVCTGGEPALQLDDELVSALQHAGFEVAIETNGTLPLANGIDWVCLSPKGESELVVIECDELKLVYPQADAPPERFDYIQADHYYLQPMADYQPVVISSDKLQGAADSLSTSNTHKALSYCLKHPRWKLSLQTHKMIRIE

SEQ ID NO: 28172 - protein, 234 aa, Bacteriovorax sp.
  misc_feature (1)..(234): tr|T0CCW7|T0CCW7_9PROT 7-carboxy-7-deazaguanine synthas e OS=Bacteriovorax sp. BAL6_X OX=1201290 GN=queE PE=3 S V=1
MQQYLINDIYRATEGEGVFIGRSQVFVRFQGCAVGCINCDSMDTWSFEIEPTSIESIFEKVLEESYQGKINWISITGGDPLHPKHVPSVVALSKFLKEKGFKLNIEAAGTRVVDEVFENLDYISFDLKTPSTGVQTRLALIEKLAQNYDGKFQLKAVIADRKDFDYTLGAYRKLEESLGPVDFPWVLTPCFEPSEEFPMQRFIDIQEWNQLEGGPFRVIGQQHKWIYGADKKSV

SEQ ID NO: 28173 - protein, 235 aa, Bacteriovorax sp.
  misc_feature (1)..(235): tr|T0RAI7|T0RAI7_9PROT 7-carboxy-7-deazaguanine synthas e OS=Bacteriovorax sp. Seq25_V OX=1201288 GN=queE PE=3 SV=1
MDKKYLINSIYRATEGEGVHLGTPQVFVRFQGCAIGCINCDSMDTWEFAGDMLSLEDIWEKLVEETYNLKIKRVSITGGDPLHPKHEPQVLELAGFLKEKGFFVNIEAAGSRVVHTIFDLIDFISFDFKTPSTGVKTRVSNIVTLNKQYPGKFQIKAVIADERDFLATYDAYNEVLAQSESMDFPWVLTPCYEPEEEFPMERFQNILAMNEKYGSLFRVIGQQHKWVFGADKKQV

SEQ ID NO: 28174 - protein, 236 aa, Bacteriovorax stolpii
  misc_feature (1)..(236): tr|A0A2K9NR80|A0A2K9NR80_9PROT 7-carboxy-7-deazaguanine synthase OS=Bacteriovorax stolpii OX=960 GN=queE PE=3 SV=1
MNGNHLINSIYRATEGEGVFLGRPQIFVRYQGCTVGCLNCDSKDTWDFDKEAGIDLEEILARVHAEGFNGTIKNVSITGGDPLHPSHVPHVLALVKALKERKYYVNIEAAGTRVVDEIFDLVDYISFDYKTPSTGVKTPLKNIQKMNAQYGAKFQLKSVIADRVDFESTLDAFKSLATTESSLSFPWVLTPCYNLGEKFPMERFQNVLSWNEENGGFFRVIGQQHKWVFGPDQKLV

SEQ ID NO: 28175 - protein, 251 aa, Unknown
  misc_feature (1)..(251): tr|A0A2E5IRV1|A0A2E5IRV1_9BACT 7-carboxy-7-deazaguanine synthase OS=bacterium OX=1869227 GN=queE PE=3 SV=1
MTKPTLRVSEMFYSIQGEGPFCGQPSVFLRLQGCNLTCGGKTTLKSKQCEEGATWRCDSIEVWTKGKQWGFDEICKEWEDQHWIQKLKNGAHLIITGGEPLLQIQALELFLTYYLERYKQLPFIEIETNGTIEPSSLLRTYINHYNVSFKLTNSGLKKQQYYLKKAIQYFAKLENAIFKFVVSSKEDVKELELLYISPFQLKQSKIILMPSADNRQALKALEPSIIEFCKEKSWRYSTRLHIEVWDKKTGV

SEQ ID NO: 28176 - protein, 214 aa, Unknown
  misc_feature (1)..(214): tr|A0A2E3WK25|A0A2E3WK25_9BACT 7-carboxy-7-deazaguanine synthase OS=bacterium OX=1869227 GN=queE PE=3 SV=1
MKIKINEIFFSLQGEGLQVGVPTIFIRLFGCSLRCSWCDSMYSVEGDDYKELNTNELLNIIEKIECKNICITGGEPLEQKLQLEHLTDILLDRNYKILLETAGHIKPIEIFKNPNVIISMDCKCPSSNMQKKTNLKYLKALESKDQIKFVINDIVDYEYAKDVVTSNNLRAKIVFQPVFGSDLKDLANLVLRDKLLVRVVPQLHKIIWGDIRGV

SEQ ID NO: 28177 - protein, 193 aa, Unknown
  misc_feature (1)..(193): tr|A0A532U229|A0A532U229_9BACT 7-carboxy-7-deazaguanine synthase OS=bacterium (candidate division B38) B3_B38 OX=2012999 GN=queE PE=3 SV=1
MVCTFIRLTGCNLRCSYCDTTYAYYQGEEMTPEEVLRRVEDFAASLVMITGGEPLLSPELNQLVNSLTRHNYQIMVETNGSLDIGKIEGEVVRIVDIKCPGSGMSEHIYWDNLNQLTPNDQVKFVIGDREDYQWAKGVMARHKLAEKLPVLFSPVFGKMAPRLLAGWIVEDNLKVRFQLQLHKYIWGPDRRGV

SEQ ID NO: 28178 - protein, 265 aa, Unknown
  misc_feature (1)..(265): tr|A0A2M7G709|A0A2M7G709_9BACT 7-carboxy-7-deazaguanine synthase OS=bacterium (Candidatus Blackallbacteria) CG 17_big_fil_post_rev_8_21_14_2_50_48_46 OX=2014261 GN=qu eE PE=3 SV=1
MQTLTPAENIARKEHPKQEAYLVEVFSAIQGEGPIVGTRQIFIRFLGCHIQCAYCDTPATHTKQRQCRVERTPGLRDFESIANPVPISDLLQIVESLERFPGLHDSISLTGGEPLQHLRSLKALIPVLKPRFPLYLETDGILWQALEACIQDLEMIGMDMKLPSATGLQAFWEDHARFLTIAARQNVFVKLVFSRNSTLEELDQALEIISGTDRQIPLILQPVTPYGIVRHPPTPEQVLIWQERAKQALKQVRVIPQTHKMIGQI

SEQ ID NO: 28179 - protein, 234 aa, Unknown
  misc_feature (1)..(234): tr|A0A2G9YAZ0|A0A2G9YAZ0_9BACT 7-carboxy-7-deazaguanine synthase OS=bacterium (Candidatus Ratteibacteria) CG23 _combo_of_CG06-09_8_20_14_all_48_7 OX=2014292 GN=queE P E=3 SV=1
MPIAKINQVFVSIQGEGVFIGVPQIFVRFSGCNLTCKYCDVPRELPEKEFTVQELCHVIATLNKKDGPVHSLSLTGGEPLIQADFLRNLLPYLKRKGFKVYLETNGTLPAKLKKVGRWCDFIAMDIKLPSATGGKPLWEVHKNFLKESLTFCPAPKTFVKVVVTGGTIPGDIKYAARFVHGVNSEVTLVIQPVVNRRGKITVSAKKLLEFLRLTQKFLPSVRLIPPVHQFLGLP

SEQ ID NO: 28180 - protein, 220 aa, Unknown
  misc_feature (1)..(220): tr|A0A3A8YE14|A0A3A8YE14_9BACT 7-carboxy-7-deazaguanine synthase OS=bacterium 1xD8-6 OX=2320116 GN=queE PE=3 S V=1
MKYEIAEIFESINGEGMKAGELAVFIRFSGCNLNCRYCDTKWANDANASYTEMDEEEIIREVKQYHVKNITVTGGEPLFRKGMGKLLKRLLKEGFSVEIETNGSVSIREFTLISPNISYTMDYKLPGSGMEESMCVSNFSLLDKKDTIKFVVSSKEDLEHAYKITEQFSLAERCHVLLSPAFGEIEPKEIVDFMKERHWTEVRMQIQMHKVIWDVNQRGV

SEQ ID NO: 28181 - protein, 212 aa, Unknown
  misc_feature (1)..(212): tr|A0A0S4M426|A0A0S4M426_9BACT 7-carboxy-7-deazaguanine synthase OS=bacterium 2013Arg42i OX=1561003 GN=queE PE =3 SV=1
MGYQVKEIFYTLQGEGFHAGRPAVFCRFVGCNLWSGKEKNRKEAICQFCDTDFVLPYGDGGGRFSSGRELALHISSFWPDSDAKRNFFVVLTGGEPLLQVDQELIDSLHEEQAVVAVETNGTIVPECVFDWICVSPKSCAPLNLLRGNELKVVVPQCGQDFFYYETLGFDYFFVQPMYGPDLEENTRLAVSHCKLNPKWRVSLQLHKVLGIA

SEQ ID NO: 28182 - protein, 211 aa, Unknown
  misc_feature (1)..(211): tr|A0A0N0CXI1|A0A0N0CXI1_9BACT 7-carboxy-7-deazaguanine synthase OS=bacterium 336/3 OX=1664068 GN=queE PE=3 SV =1
MKVLIKDDIRLLTHELPLMEAFYTIQGEGFHQGKAAYFIRLGGCDVGCVWCDVKESWDAEAHPIISVENIIKEALKYKGRLAVITGGEPLIYNLDYLTKKLKEAGFQINIETSGAYPLSGHWDWICFSPKKFKPALDEFTEVAHELKVVLYNKKDFEWAESFAKKMNKSAKLFLQPEWSKQNELMPLIVEYVKENPHWQISLQTHKFMDIP

SEQ ID NO: 28183 - protein, 207 aa, Unknown
  misc_feature (1)..(207): tr|A0A1H8G0V4|A0A1H8G0V4_9BACT 7-carboxy-7-deazaguanine synthase OS=bacterium A37T11 OX=1855384 GN=queE PE=3 S V=1
MTQQVPDDGSLLPLMEEFYTIQGEGYHTGKAAYFIRLGGCDVGCHWCDVKESWDASIHPLTPADTIIAHAARHPAKTVVVTGGEPLIYNLDYLTRGLQQQGIKTFMETSGAYPLSGYWDWICLSPKKFKAPRPDVIAAAGELKVIVFNKSDFAWAESFAAEVPQTCRLYLQPEWSKAAEMTPFIIDYVMNNPKWEISLQTHKYLNIP

SEQ ID NO: 28184 - protein, 255 aa, Unknown
  misc_feature (1)..(255): tr|A0A1H9P8H2|A0A1H9P8H2_9BACT 7-carboxy-7-deazaguanine synthase OS=bacterium A52C2 OX=1855383 GN=queE PE=3 SV =1
MNAPSAISARIRGAAEAVVRVSEIFGPTIQGEGALIGLPTVFVRTGGCDYRCSWCDSLHAVDSRYRADWKPMTSGAILDEVRRLSGDRPLTVTISGGNPAIQPLGDLIRQGHERGYRFALETQGSVSQDWFAELDMLVLSPKPPSSGMVTDWQALANCVAEASAGPRTVLKFVVFDEADYAFARDAASRFPALAVYLQPGNPIPEGAEAEHEAVDPDALMRRMEWLIDRVTADRWFEAHVLPQLHVLIWGNRRGV

SEQ ID NO: 28185 - protein, 233 aa, Unknown
  misc_feature (1)..(233): tr|A0A1V5UNG9|A0A1V5UNG9_9BACT 7-carboxy-7-deazaguanine synthase OS=bacterium ADurb.Bin243 OX=1866936 GN=queE_ 2 PE=3 SV=1
MPNDSSILKFKVNEIFKSVQGESSYAGLACAFVRLSGCNLRCAYCDTVYAYKYGRYLTAGEIISKVDALDPHIIELTGGEPLMQKGAPQLVDLLVEYLNNKKKGRRADAIEPRLLIETSGSISIKGLNDQAVIIMDVKTPSSGSSGMMIFDNFNHLKSVDEIKFVIGDRADYEYCKNIIFEYSLAEKCGVLFSAVYGKIRPEKIIKWMLQDGVKARFQLQMHKYIWPADKKGV

SEQ ID NO: 28186 - protein, 347 aa, Unknown
  misc_feature (1)..(347): tr|A0A1V5UPW2|A0A1V5UPW2_9BACT 7-carboxy-7-deazaguanine synthase OS=bacterium ADurb.Bin243 OX=1866936 GN=queE_ 1 PE=4 SV=1
MGFNINLNNEFNYREKIKLPELSGGGIVLSYKCTNRCRHCLVAGSPERENKWLGRGEAEEIFKYIKRTGPGAEIHIGGGEPFLNTQCLIDAVELAVAEGIKLSYVETNGFWGNNFNKYEPVLKELYKIGLRSVLISVSPFHAEFIKPQITINAIKSVRNVFGFHGAFVWIPEFLNMLNKNDITKTIDWNTINPDIIKRAGDMYYLIPGGRCGYSKTPVADKKPAADFFITSCERELLSTSHFHIDAYGNYMPGGLCGGIKMCSYKEAGTEINLNDKPLIKLLFNEGIRGLFDYAQKMGYIEKSDGYCGKCHLCVDIRTFLFNKFGAEKYLELAPAEFYETLIKESSL

SEQ ID NO: 28187 - protein, 251 aa, Unknown
  misc_feature (1)..(251): tr|A0A1V5T3B8|A0A1V5T3B8_9BACT 7-carboxy-7-deazaguanine synthase OS=bacterium ADurb.Bin270 OX=1866926 GN=queE PE=3 SV=1
MRESNSHTASLVEIFSSLQGEGAYVGRKMTFVRFGSCNLKCRFCDTPQGMCTRDHCLIEKVPGSAKFDKISNPVSAAQLCEMMSRFDDSILSITGGEPLKQAAFLEQWLPSQRPNRTILLETNGVLHEELKILLPNIDIISMDFKLPSSTGEKEFWEEHSIFLQNSVASGKEIYIKIVVTPETTDHDIEKVIRIITSINKYIPTFIQPASPTLRFHKEIQHGRIKSLQRLCSAYLRDVRVQPQMHKHWGIL

SEQ ID NO: 28188 - protein, 211 aa, Unknown
  misc_feature (1)..(211): tr|A0A1V5PMT6|A0A1V5PMT6_9BACT 7-carboxy-7-deazaguanine synthase OS=bacterium ADurb.Bin363 OX=1866927 GN=queE PE=3 SV=1
MLINEIFKSIQGESSYIGMPCTFIRTAMCNLACSYCDTMYARQKGEEISIPSIILKVKEFNIPLVEITGGEPLLQKDIPLLIENLLERDFKVLVETNGSIDIGLIPTRAVRIMDLKCPGSGMSNKMLWGNIDKLIPSDEVKFVIRDRRDYLWSVEKIKEYSLIEKVQVLFSCVYGMLEAKTLIEWILKDNLNVRFQLQLHKYIWPHDMRGV

SEQ ID NO: 28189 - protein, 249 aa, Unknown
  misc_feature (1)..(249): tr|A0A1V5NTL8|A0A1V5NTL8_9BACT 7-carboxy-7-deazaguanine synthase OS=bacterium ADurb.Bin374 OX=1866937 GN=queE PE=3 SV=1
MVETGAKLIEVFPSIQGEGMQVGLMQLFVRFAGCNLLCRNCDTRRSWDVGPGFTLSPWPGRRSQQIANPVAAADLYDTLSNEYPLGDFHSISLTGGEPLLQAEFIKAFARLCRRDGLKIFLETNGSLAAKAAEVAEFVDFWSVDLKLSKNWGLNGRMGEKHRRFLKTVPPERSYLKLVIDAIDDPDEIIRQLEKIDTHRYVAVVQPFSASASSISDWDSRLILEWLQMLRPHFREVRWIPQVHKLLRIP

SEQ ID NO: 28190 - protein, 229 aa, Unknown
  misc_feature (1)..(229): tr|A0A1V5MBM5|A0A1V5MBM5_9BACT 7-carboxy-7-deazaguanine synthase OS=bacterium ADurb.Bin425 OX=1866929 GN=queE PE=3 SV=1
MFGTNPVRGQEAGDGNSLWVQEIFYTLQGEGPFTGEPSVFIRLGGCNLACYFCDTDFESSTWRPTLAEIFDKVAALQAKAKLVVITGGEPFRQNIAPLVGGLLERDFTVQLETNGTLYQDLPWCSDLFVVCSPKTPLLNEKLALHIDAYKYLIKEGETDERDGLPSFSTRQSGTPGAIARPLPGKSVFVMPLDEQDEERNVLNIKASMNAALKFGYRLTLQTHKYLGLR

SEQ ID NO: 28191 - protein, 264 aa, Unknown
  misc_feature (1)..(264): tr|A0A1V5LWM4|A0A1V5LWM4_9BACT 7-carboxy-7-deazaguanine synthase OS=bacterium ADurb.Bin429 OX=1866930 GN=queE PE=3 SV=1
MIGGASTGRLMVTLHELFSGIQGEGVLVGVRQLFVRFHGCQLICAYCDTPASRRAFPAACLVERAPGARHFDEVPNPLDVEDLLGLIRARYAGYPHHSVAFTGGEPLLHGEALNALLLALHREGIATYLETNGTLTDALRRLDEPPTYLAMDIKLPSATGGLALWDDHATFLDAALACMDPRPCGALQVKLVFAAGCLEEVARAAALIADRRRDLPTVLQPVTAHPGGPVTPSPAETLDAQRLASERLSDVRVIPQTHVMLGQR

SEQ ID NO: 28192 - protein, 223 aa, Unknown
  misc_feature (1)..(223): tr|A0A1V5JH81|A0A1V5JH81_9BACT 7-carboxy-7-deazaguanine synthase OS=bacterium ADurb.BinA028 OX=1866933 GN=queE PE=3 SV=1
MMPLLPVSEIFGPTIQGEGEHIGRRAVFVRLAGCDSRCSWCDTKYAWGTEGATHMSEDEIVDAVSGLGPCRLVVITGGNPAMYDLERLVTLLALRGKTVHVETQGTIRQGWLRLADLVTISPKADLPMNALSDLVCDLLGCTSVQIKVVIHSRADFDRAVEIGRRLPAVPLILQAGYNPASRAGSVEPATLASWFARDGGDLPPSARLLPQLHRVLWGDARGV

SEQ ID NO: 28193 - protein, 212 aa, Unknown
  misc_feature (1)..(212): tr|A0A2H6EC10|A0A2H6EC10_9BACT 7-carboxy-7-deazaguanine synthase OS=bacterium BMS3Abin03 OX=2005711 GN=queE_1 PE=3 SV=1
MLKVNEIYHSIQGESSKAGLPCVFVRLTYCNLRCTYCDTVYAFYDGKEISEEEIIEKVKNYGCKLVEVTGGEPLVQDETLELMKRLCDEGFDVMLETGGSLPVKDVDKRVKIIMDLKCPSSGMEKKNLYGNINYLKNTDELKFVIGNREDYDWTKLKIEEYDLFNKCEILFSVVFNELEPLTLVNWILEDKLDVRFQIQMHKYIWHPETNGV

SEQ ID NO: 28194 - protein, 345 aa, Unknown
  misc_feature (1)..(345): tr|A0A2H6ED86|A0A2H6ED86_9BACT 7-carboxy-7-deazaguanine synthase OS=bacterium BMS3Abin03 OX=2005711 GN=queE_2 PE=4 SV=1
MEILKKRNDLVEAKWWEPADKEKLLCTLCPRYCKIGKGQPGFCFIRQNIDGKLYTLGYARPTGFAVDPIEKKPLNHFLPGTTVLSFGTAGCNLGCKFCQNWTMSKAKLDELNSLKASPEDVVALAKKYGTPSIAYTYNDPTIFGEYVIDISKIAREAGIRSVMVTAGYIDKQARKDVYKYIDAANVDLKGFTENFYWKNTYSHLNDVLDTLVWLKNETDVWIEITTLLIPGENDNIEEIKEEVDWILNNLGDSVPLHFTAFHPDFKMRDKPPTPAQTLTSARTVAMEMGIKYCYVGNVHNVEGQTTFCPGCGSVLIKRDWHTVISDKLKDGKCRNCGIKIDGVFS

SEQ ID NO: 28195 - protein, 212 aa, Unknown
  misc_feature (1)..(212): tr|A0A2H6EQS3|A0A2H6EQS3_9BACT 7-carboxy-7-deazaguanine synthase OS=bacterium BMS3Abin04 OX=2005712 GN=queE PE =3 SV=1
MLKVNEIFFSIQGESSYAGLSCVFVRLTYCNLRCSYCDTEYAFYEGEDKSIDEIISEVKKYGCKLIEVTGGEPLVQNESLELMKKLCDEGFEVMLETSGSLPIKDVDKRVKIIMDLKCPSSKMEKKNLYENINFLKPNDEVKFVIGDREDYNWSKEIIKKYKLNDKFEILFSVVFDKLEPVTLVNWILNDKLNVRYQLQMHKYIWKPETKGV

SEQ ID NO: 28196 - protein, 214 aa, Unknown
  misc_feature (1)..(214): tr|A0A2H6F7Y1|A0A2H6F7Y1_9BACT 7-carboxy-7-deazaguanine synthase OS=bacterium BMS3Abin06 OX=2005714 GN=queE PE =3 SV=1
MLKINEIFKSIQGESTYAGLPCTFVRLAGCNLRCTYCDTNYAYYDGKELSDDEIVSKIEEYDVRCVEFTGGEPLLQEETPKLLKILLDKGYDVLVETNGSICIGCLDKRLNIIMDYKTPKSGMSERMRPKNLDFLKPTDQIKFVLMDESDYKWAKDVISTNNLLDRFENILMSPAYGELPPKSLVSWVLQDNLRVRVQLQIHKYIWAPDEREGV

SEQ ID NO: 28197 - protein, 211 aa, Unknown
  misc_feature (1)..(211): tr|A0A2H6FFE5|A0A2H6FFE5_9BACT 7-carboxy-7-deazaguanine synthase OS=bacterium BMS3Abin07 OX=2005715 GN=queE PE =3 SV=1
MKVCEIFASIQGESSFAGYPCVFVRLTGCNLRCSYCDTAYAYNEGTDIELSEILEKVKPYGIKLIEVTGGEPLLQKESYGLIERLLEEGFQVLLETNGSISVENVDQRVSVILDIKTPSSSMSNRMFMKNLDLVSKKDDVKFVLGSREDYEWVKDVMEKHGFSERTNILLSPVFGSLDPAMLARWMVKDGIQARLNLQLHRYIFGSNRRGV

SEQ ID NO: 28198 - protein, 215 aa, Unknown
  misc_feature (1)..(215): tr|A0A2H6FID4|A0A2H6FID4_9BACT 7-carboxy-7-deazaguanine synthase OS=bacterium BMS3Abin08 OX=2005716 GN=queE PE =3 SV=1
MKNNGRLLVCETFRSIQGESSYAGYPCFFIRLTGCNLRCTYCDTVYAYEGGQETEIEALIDDATGSGLGLVEVTGGEPLLQENAFILISGLADEGFKVLVETNGSRDISKLDKRCVAIIDIKTPGSGMAGRMDFSILKRLRKQDEIKFVITSPDDYEWSKGVMKEYGLEEERVLFSPSTGAVKPEDLAGWMLDDGLSVRLNLQIHKYIFSDRRGV

SEQ ID NO: 28199 - protein, 214 aa, Unknown
  misc_feature (1)..(214): tr|A0A2H6FTF3|A0A2H6FTF3_9BACT 7-carboxy-7-deazaguanine synthase OS=bacterium BMS3Abin10 OX=2005718 GN=queE PE =3 SV=1
MFKVNEIFKSIQGESTYAGLPCTFIRLAGCNLRCAYCDTNYAYYHGKELADEEIMAKIEEYGVNCVEFTGGEPLLQEETPPLLKTLLDRGYNVLVETNGSICIGCLDKRLTIIMDIKTPRSGMSERMNLKNLTLIKNNDQLKFVILDESDYVWAKNMINEHMLFDKTKNILMSPAYGILPPKDLASWILKDNLPVRIQLQIHKYIWGPDEREGA

SEQ ID NO: 28200 - protein, 163 aa, Unknown
  misc_feature (1)..(163): tr|A0A2H6G161|A0A2H6G161_9BACT 7-carboxy-7-deazaguanine synthase OS=bacterium BMS3Abin11 OX=2005719 GN=queE PE =4 SV=1
MSLSGILQQVKSYSTRYVTVTGGEPLAQRDCWLLLKMLCDAGYTTSLETSGAIDISQVDKRVSTIMDIKTPGSGESDRNRFQNIELLKSSDQVKFVITDRVDYDWSRQFIEENELTGKCEILFSPVHGELDPVDMAEWILNDNLLVRMQIQLHKYLWGDERGR

SEQ ID NO: 28201 - protein, 215 aa, Unknown
  misc_feature (1)..(215): tr|A0A2H6IFU3|A0A2H6IFU3_9BACT 7-carboxy-7-deazaguanine synthase OS=bacterium BMS3Bbin07 OX=2005730 GN=queE PE =3 SV=1
MTDGVRLKICETFVSIQGESSYAGQPCFFVRLTGCNLRCHCCDTTYAYSDGKEMAMGEILSGARDSGVGLVEVTGGEPLLQKGTPALIESLCDEGFSVLVETNGSMKIDIIDSRAVVILDIKTPGSGMAAEMFYGNLEILRPHDEIKFVIADRADYVWTKGVIEKFGLAGRNILLSPSFGLLSPEVLVGWIIEDRLNVRLNLQIHKYVFGDRRGV

SEQ ID NO: 28202 - protein, 214 aa, Unknown
  misc_feature (1)..(214): tr|A0A2H6IQ40|A0A2H6IQ40_9BACT 7-carboxy-7-deazaguanine synthase OS=bacterium BMS3Bbin09 OX=2005732 GN=queE PE =3 SV=1
MLKINEIFKSIQGESTYAGLPCTFVRLAGCNLRCTYCDTNYAYYDGKEITDEDIVAKIDEYGVKCVEFTGGEPMLQEETPKLIKTLLDKGYNVLIETNGSICIGCLDKRLNIIMDYKTPGSNMSERMRPKNFEFLKPTDQIKFVLMNESDYIWAKNIIIENKLTDKFENILMSPAYGELSPKSLVEWILKDGLQVRVQLQIHKYIWAPDEREGV

SEQ ID NO: 28203 - protein, 210 aa, Unknown
  misc_feature (1)..(210): tr|A0A2H6IXH2|A0A2H6IXH2_9BACT 7-carboxy-7-deazaguanine synthase OS=bacterium BMS3Bbin10 OX=2005733 GN=queE PE =3 SV=1
MYTIKEIYLTLQGEGVQTGRRAVFCRFTGCNLWSGLERDRAAAICRFCDTDFLGADGPGGGKFRAGEDVARACMDQWRGANGEQPLVVLTGGEPMLQVDEALIAALHASGFEIAIETNGTLPVPRSIDWICVSPKAGAELVQKSGDELKLVYPQDGIAPGDVAGLDFGNFLLQPMDGGAARENTQAALAHCVKNPQWRLSLQTHKLMGIA

SEQ ID NO: 28204 - protein, 226 aa, Unknown
  misc_feature (1)..(226): tr|A0A2H6J8V5|A0A2H6J8V5_9BACT 7-carboxy-7-deazaguanine synthase OS=bacterium BMS3Bbin12 OX=2005735 GN=queE PE =3 SV=1
MDTAPPPRGTARVMPGLRITEIFLSLQGETRTAGWPSVFVRLTGCPLRCRYCDTAYAFRGGRWMAIDQILDEVAAYRPRHVTVTGGEPLSQRDCLALLGRLCDAGYEVSLETGGALAVEAVDPRVVRVLDLKTPGSGECRRNRYENLAVLGPQDQVKFVCCDRRDYEWAREQIERYGLPDRCEVLFSPGHGMLAPGLLADWILEDRLDVRLQIQLHKYLWGDVPGR

SEQ ID NO: 28205 - protein, 229 aa, Unknown
  misc_feature (1)..(229): tr|A0A2H6JP25|A0A2H6JP25_9BACT 7-carboxy-7-deazaguanine synthase OS=bacterium BMS3Bbin14 OX=2005737 GN=queE PE =3 SV=1
MNEKHVTKTHLSISELFYSLQGESTRAGLPCAFIRLAGCNLRCRYCDSKYTWENQGEPRTLTEIGNWLDRYPGVMVELTGGEPLLQEGIYPLLDALLDRGRTVLLETNGSLGIERVPAGVSVILDIKCPDSGMHERTDWQNIALLAARKRKGSGDEIKFVLSSVRDFEWAKAVIDRYQLDRLAVPLLFSPVPELLAATTLAGLILQHRLPVRLQLQLHRLLWPDRDRGV

SEQ ID NO: 28206 - protein, 212 aa, Unknown
  misc_feature (1)..(212): tr|A0A124IKT2|A0A124IKT2_9BACT 7-carboxy-7-deazaguanine synthase OS=bacterium BRH_c32 OX=1734400 GN=queE PE=3 SV=1
MLKINEIYYSLQGESTKAGLPCVFIRLTYCNLRCTYCDTEYAFYEGSDKSIEGIIEEVAKFNCRLVEVTGGEPLVQSEVHTLMEKLCNLGYEVLIETGGSLSIEKIDKRVKVIMDLKCPSSKMMKKNRYENIEFLKPNDEVKFVIGSREDYDWSKSIIEKYNLIGKCELLFSIVFGELIPLTMADWIIEDNLQVRFQLQMHKYIWKPDERGV

SEQ ID NO: 28207 - protein, 218 aa, Unknown
  misc_feature (1)..(218): tr|A0A2M7YWA5|A0A2M7YWA5_9BACT 7-carboxy-7-deazaguanine synthase OS=bacterium CG_4_9_14_3_um_filter_65_15 OX=1 975567 GN=queE PE=3 SV=1
MLMINEIYAAICGESRFSGFPCTLVRLSGCHLRCAWCDSPHSFNGGEPMSAEAILDRVRANGFRTVLVTGGEPLLQKNVVEFLRLLVEDGRTVVLETSGADPSKLVPLAEVPQGVHRIVDVKAPGSGIDPDLIDWEGIALLGAGDEVKIVVAGREDFAWVKQLLQSGRLPATVRVSLSPAAALVDPARLAEWILADGLDVALQIQLHKALWPDRERGV

SEQ ID NO: 28208 - protein, 245 aa, Unknown
  misc_feature (1)..(245): tr|A0A3A9B6J1|A0A3A9B6J1_9BACT 7-carboxy-7-deazaguanine synthase OS=bacterium D16-34 OX=2320120 GN=queE PE=3 S V=1
MNLAVAERFVSINGEGLQAGRLATFIRFCGCNLHCAYCDTRWACEPCFKGEHIDIDCLVDYVVDAGCVCVTLTGGEPLLQPALPQFVKRLLGMKTTDNRAFEIEIETNGALSLETLAHLRQSVPKPCQTPDDQTSNDARGYVSFTMDWKCPSSGMTDYMLHENLAYLTKRDTIKFVVGTQDDLECARRLVQDNNLTVQTNVLLSPVFGGIEPKEIVEYMKRYDLVDVRFQLQLHKFIWPPTQRGV

SEQ ID NO: 28209 - protein, 220 aa, Unknown
  misc_feature (1)..(220): tr|A0A3A8WDH5|A0A3A8WDH5_9BACT 7-carboxy-7-deazaguanine synthase OS=bacterium D16-59 OX=2320098 GN=queE PE=3 S V=1
MKYKVVEIFESINGEGMKAGELSLFIRFAGCNLCCSYCDTKWANGQDASYTEMGLDEIIEKVQGCQVKNITVTGGEPLLQNGVGTLLQALSDKGFYVEIETNGSIPLQEFAKELPDVVFTMDYKLPGSGMEQQMDTGNFAVLQKKDTVKFVVSDRADLKRAFAVSQEYSLGCKCNILLSPVFGAIEPEEIVTFMKENHWTDARLQVQMHKVIWDPQKRGV

SEQ ID NO: 28210 - protein, 261 aa, Unknown
  misc_feature (1)..(261): tr|A0A3A9BBF4|A0A3A9BBF4_9BACT 7-carboxy-7-deazaguanine synthase OS=bacterium D16-63 OX=2320119 GN=queE PE=3 S V=1
MGGARGEDGLLDAERHQARHAIAPRAQLFPVVERFVSVNGEGLAAGRPAAFIRFAGCNLWCTYCDTCWANHPLVEVEGWSVEQLVRWVAETGVSAVTLTGGEPLLQPYLPDLVQALLSVSDPRPLRVEVETNGSRDLGPMAHLREAAAEEGLPGTLAFTVDWKTPTAGEAVSAAMERANYELLDGRDAVKFVVGTEEDLAFAEAMADEAGLWDRCAVLVSPVWGMLEPAAIADYLLRRGLDRARLQVQLHKVIWPDADRGV

SEQ ID NO: 28211 - protein, 187 aa, Bathymodiolus sp.
  misc_feature (1)..(187): tr|A0A482Z5T5|A0A482Z5T5_9BACT 7-carboxy-7-deazaguanine synthase OS=bacterium endosymbiont of Bathymodiolus sp . 5 South OX=1181670 GN=queE PE=3 SV=1
MFVRLTGCPLRCSYCDTEYAFKGNNLLSIDVILTEIKKYNTKFVCVTGGEPLAQINCHILLDRLVKENYQVSLETSGSIDIADINPGVSIVMDVKTPSSNESDKNLYDNIEKLELKDQLKFVIGSKADFDWSVALLSKHPTPAEVLFSPVFEAVKPMQLAQWILDGQLNVRLQVQLHKLLWGDEKGK

SEQ ID NO: 28212 - protein, 218 aa, Escarpia laminata
  misc_feature (1)..(218): tr|A0A497TKB1|A0A497TKB1_9BACT 7-carboxy-7-deazaguanine synthase OS=bacterium endosymbiont of Escarpia laminat a OX=1221601 GN=queE PE=3 SV=1
MATAAPLRLRITEIFHSLQGESRSSGFPTVFVRLTGCPLRCSYCDTEYAFTGGEWWDLPAILSEVEAYQPHYVCVTGGEPLSQKGTFLLLTALCDAGYRVSLETSGALDISQVDRRVSRIVDLKTPGSAESAKNNYANIDLLTANDQMKFVICDEADYLWSCEQLVKYALTERCEVLFSPVHGRQDAAALAEWILRDRLTVRFQLQLHKILWGKQPGC

SEQ ID NO: 28213 - protein, 191 aa, Unknown
  misc_feature (1)..(191): tr|A0A132HTJ8|A0A132HTJ8_9BACT 7-carboxy-7-deazaguanine synthase OS=bacterium F083 OX=1768114 GN=queE PE=3 SV= 1
MRRYRINEIFYSLQGEGAHTGRPAAFVRFSGCNLHCPFCDTDFRLRATLTADEILRQLQPHPARFVVLTGGEPALQADGALVDALHRAGYTIAIETNGTRPLPDGIDWVTLSPKEEGEVVLTRADELKVVYVGQDVERYADAIHAPVYYLQPCAREENGLAVDNREAVVDYCLHHPRWRLSLQTHKILHIR

SEQ ID NO: 28214 - protein, 231 aa, Unknown
  misc_feature (1)..(231): tr|A0A202DQL9|A0A202DQL9_9BACT 7-carboxy-7-deazaguanine synthase OS=bacterium F11 OX=1932698 GN=queE PE=3 SV=1
MNTAYISEIYPTHQGEGPFTGERQLFVRLAGCPLRCRYCDTPGSLVAKAHEAVDGQKACERILQICCDEMIRTVSLTGGEPLAQVDFLKRLFPFLKRNQLRIYLETAGIHYEALSKVIEYCDVVAMDIKLPSATGQIFWNEHREFLKIGKEKIFVKIVIEKHSPELELKQALSLLKTLDSPPLLVLQQVTPQSSGIEPPSEDQMEEFVRFARALIPRVHVMSQQQKIWAIR

SEQ ID NO: 28215 - protein, 216 aa, Unknown
  misc_feature (1)..(216): tr|A0A2H5VQB7|A0A2H5VQB7_9BACT 7-carboxy-7-deazaguanine synthase OS=bacterium HR08 OX=2035403 GN=queE PE=3 SV= 1
MWVTEIFHSIQGESSYAGLPCTFVRLTGCHLRCVYCDTTYAFFGGERMSVEEVLARVGAFWEEVEGMRLVEVTGGEPLLQKDVYPLTERLCDLGYTVLIETSGSLPIWHLDPRVIRIMDLKTPGSGHAHANLWENIEHLRPRDEVKFVLMDRRDFEWACDIIHRYDLTRRAHVLLSPAHGVLDPKTLAEWILHSRLPVRLQIQLHKYIWGANARGV

SEQ ID NO: 28216 - protein, 210 aa, Unknown
  misc_feature (1)..(210): tr|A0A2H5VTW6|A0A2H5VTW6_9BACT 7-carboxy-7-deazaguanine synthase OS=bacterium HR09 OX=2035404 GN=queE PE=3 SV= 1
MLAGTPSFFIRTSGCNLRCRWCDTPYTSWQPEGRRVSVAELVAAARASGLRHVVITGGEPLLQRELPALCAALKAQGHHITVETAGTLAPEFACDLLSVSPKTANSDPEGVWRERHRRLRENLAPLRLLLQQHPNFQLKFVVQGEQDMPEIVALVERLGVSGERVLLMPEGKTAQEVAQVAPAVARLCLRFGFRFSPRLHLELFGAGRGV

SEQ ID NO: 28217 - protein, 216 aa, Unknown
  misc_feature (1)..(216): tr|A0A2H5W2S7|A0A2H5W2S7_9BACT 7-carboxy-7-deazaguanine synthase OS=bacterium HR10 OX=2035405 GN=queE PE=3 SV= 1
MWVTEIFHSIQGESSYAGLPCTFVRLTGCHLRCVYCDTTYAFFGGERMSVEEVLARVGAFWEEAEGMRLVEVTGGEPLLQKDVYPLTKRLCDLGYTVLIETSGSLPIWHLDPRVIRIMDLKTPGSGHAHANLWENIEHLRPRDEVKFVLMDRRDFEWACDIIRRYDLTRRAHVLMSPAHGVLDPKTLAEWILRSRLPVRLQIQLHKYIWGPDARGV

SEQ ID NO: 28218 - protein, 244 aa, Unknown
  misc_feature (1)..(244): tr|A0A2H5W7C4|A0A2H5W7C4_9BACT 7-carboxy-7-deazaguanine synthase OS=bacterium HR11 OX=2035406 GN=queE_2 PE=3 S V=1
MRLGYLQVTEIFYSIQGESTWMGLPCIFIRLTGCHLRCVYCDSEHAFYGGVPMSYDEILEAIRRYPCRTVEITGGEPLLQKNVIPLMELLLRQGYRVLLETSGALSIEDVPPPVIKVVDVKCPDSGAFPTFYFPNFRWLAPWDQLKFVIRSWRDFAWAVDFVREMDLIGRWEVLFSPAHEEFPAKALARAILATGLPIRLQVQLHKYIHLAEDERMDPAVWDVLRSRGVVREPISDTRDPVPGT

SEQ ID NO: 28219 - protein, 411 aa, Unknown
  misc_feature (1)..(411): tr|A0A2H5W6K0|A0A2H5W6K0_9BACT 7-carboxy-7-deazaguanine synthase OS=bacterium HR11 OX=2035406 GN=queE_1 PE=4 S V=1
MTSVTLDHRRLYRLPWTLPDNGISWLEPTSACNIVCVGCYRENLPSSHKPLEVVREEIDTFQRLRKSDCISIAGGEPLLHPQIVEIVREIAARGFKPIINTNGVALTPELLRELKKAGVRGFTFHIDSQQFRAKWRGKNEIELNELRLHYAQMLAEVGGLSCAFNATVYEDNLPYVPDIVEWAARHIDIVHVVVFIAYRQIVPRLMENFEFYAGGRKVDLNPLPYVADGEQNVGIRSTDILAVIRQRFPDFMPCAYLNGTERPDSFKWLLTVRVGARGGKVLGYVGPKFMEFVQTQHHLWRDRYLAYAHPRMLRFGRSGCLLLSPLDRGARSVVTRYLAWALRNPLRLFRPLHFQSVMIIQPVDILEDGRQDMCDGCPDVTVWKGNLVWSCRLEEPKQYGAFVRTVPKCML

SEQ ID NO: 28220 - protein, 218 aa, Unknown
  misc_feature (1)..(218): tr|A0A2H5WJH1|A0A2H5WJH1_9BACT 7-carboxy-7-deazaguanine synthase OS=bacterium HR13 OX=2035408 GN=queE PE=3 SV= 1
MLRSEVRTSTALSINQVYPSVQGEGLLMGKPCLFVRFQGCNLRCPWCDEPSALSFKRANTNLKELLQELQKYPQKHVVLTGGEPFAQPNLHLLVQELLLRGYSVQIETNGTLWNENLREVVSQVHITCSPKGVADWYVHPAVLENAKELKFVVDHEFSYNVIKRREFMPFLEKTLVVLQPEGNKTKFLQKALELQALLLEEGYTVRVIPQMHKLIGLK

SEQ ID NO: 28221 - protein, 235 aa, Unknown
  misc_feature (1)..(235): tr|A0A2H5WWW8|A0A2H5WWW8_9BACT 7-carboxy-7-deazaguanine synthase OS=bacterium HR15 OX=2035410 GN=queE PE=3 SV= 1
MRERRLPIAEIFGPTVQGEGLLAGSLSLFIRFGGCDYRCDWCDTLYAVLPEHRHEWRWLNESEIVHEVQQLAPPPILITLTGGNPAIHRLEQLIERLKIEGYRLACETQGSIACKWFRQLDILVLSPKPPSAGGSTSVAEVQACLQYAPTDTTLKIVVFNREDYLYARALFEAFPQLPAVLQIGTPPTLQTPQELVAHYREQTVCLLRWLHEDRLYRVRLLPQLHRILFEATRGV

SEQ ID NO: 28222 - protein, 272 aa, Unknown
  misc_feature (1)..(272): tr|A0A2H5XG40|A0A2H5XG40_9BACT 7-carboxy-7-deazaguanine synthase OS=bacterium HR17 OX=2035412 GN=queE PE=3 SV= 1
MKTITARLSASTTERQKGNLSELYLSLQGEGLWVGIPMVFVRTTGCHRRCKYCDTEYALVAERTARIWLGWRSGAPHLVVDNPVLVSQVVAWVPQAAGGVTDWVTFTGGEPLLQAEFLAASAAVLKAQGFRILLETEGGLPDRLAKVLPHLDAVAADIKLPSTTGEPLDWDATEHFFRLIAAAPVTACAKIVVTPDIDESEFRCAVDLLTRLHAAADRERLPIALILQPVTPARFVTEPPSRALLLRLAAIARSRLPDIRIVPQVHKLIHLA

SEQ ID NO: 28223 - protein, 233 aa, Unknown
  misc_feature (1)..(233): tr|A0A2H5XGK6|A0A2H5XGK6_9BACT 7-carboxy-7-deazaguanine synthase OS=bacterium HR18 OX=2035413 GN=queE PE=3 SV= 1
MRSYRVKEIWKTLQGEGFFAGRPAVFVRFVGCNLWSGYEQDRERDARRTGADCPRWCDTDFRKEGSRAYTADELVAAMQEVGGPIRFCVLTGGEPLLQLDAALMRALKATGYFVAIETNGTISLRQACTDPKSDQVVPPDWIVCSPKLPEDRLALEYFDELKLVVPDYQPEQYARFARRARPHRVGGHRIPLLWLQPEDGPRLAEARRCAVELALAHPDWRVSVQTHKILGVP

SEQ ID NO: 28224 - protein, 238 aa, Unknown
  misc_feature (1)..(238): tr|A0A2H5XWB2|A0A2H5XWB2_9BACT 7-carboxy-7-deazaguanine synthase OS=bacterium HR20 OX=2035415 GN=queE PE=3 SV= 1
MAKFTQPTSEALEALPRDPSALSLRLSEIFHSIQGEGTRAGMPCTFIRLQGCSLRCAWCDTPYALDHRTPELVLTAAEVLERVEQIGTSFVELTGGEPLEQLGSFRLVQWLCDRGYTVAIETGGHISIEHVDHRAICIVDFKCPDSRMAPLNYVPNFSLLRPQDEVKFVIASRRDYEWARALIEEYKLTEKVVAVLFSPAFGLLEPRVLAEWILADRAQVRLQLQLHKFIWEPSMRGV

SEQ ID NO: 28225 - protein, 234 aa, Unknown
  misc_feature (1)..(234): tr|A0A2H5Y0H1|A0A2H5Y0H1_9BACT 7-carboxy-7-deazaguanine synthase OS=bacterium HR21 OX=2035416 GN=queE PE=3 SV= 1
MVVQPTQEALAAIDPLAERFHVSEIFYSIQGEGSRAGMPCVFVRLQGCKLRCSWCDTPYALDRRRGGQWLCGAEIVQRVRSYGCSFVEFTGGEPLEQWGSFGLMRLLCNEGYTVAVETGGHVSIELLDERVVCIVDVKCPSSRMTPLMYWRNLELVRQHDEVKFVIADRRDYEFACRVVEQYRLAERVAVVLFSPAFGLLAPQQLAEWILHDRLPVRLQLQLHKYIWDPDRRGV

SEQ ID NO: 28226 - protein, 374 aa, Unknown
  misc_feature (1)..(374): tr|A0A2H5Y6K6|A0A2H5Y6K6_9BACT 7-carboxy-7-deazaguanine synthase OS=bacterium HR22 OX=2035417 GN=queE PE=4 SV= 1
MNMVQKRFSKIQRDPQKLACSLCGSSALPVSEVIGVCLRCIRERPQEALPRAREAHSRARQAFGLPADAPHTPGGIRCGLCAWDCTLGEGERGYCGLRMVQNGRLVHLAGTPEKGLLHWYRDPLPTNCVADWVCEGHHRRGDHNLAVFYGSCTFNCLFCQNWHYRELSPQRNPLISAQALADAANQRTFCVCFFGGDPSSQMPHALAAGRLLARKGVRICWETNGTMHPKLLDQAVQLSLETGGCIKFDLKAFDENLHIALTGMSNRRTLENFQRAAGRISERPHPPLVVASTLLIPGYVDAEEVSRIARFIAAIDPEIPYTLLAFAPHFLMSDLPCTSSAQAREAVEAARAAGLTRIRVGNAFLLDMPALWIV

SEQ ID NO: 28227 - protein, 376 aa, Unknown
  misc_feature (1)..(376): tr|A0A2H5YDZ6|A0A2H5YDZ6_9BACT 7-carboxy-7-deazaguanine synthase OS=bacterium HR23 OX=2035418 GN=queE PE=4 SV= 1
MTITVRPAPAKPTPKVNTAEEALRLFRPARPVRPKRPAELGTRLFAYIITQRLKGRRRFPLVTMLEPLEACNLTCEGCGRIREYEPVLHRMLSLEECLQAVEASGAPIVSIAGGEPTMYPHLPELLGELVRRKYFVFCCTNGLLLEKVMQKVPPSKYLCWVLHLDGMEEQHDRSVARRGVWRIAMRAAKTALERGYRVCSNTTLFKGSNAEDLYELFETVTQMGFEGIMLSAGYDFQMVPNQEVFLKRQESIEVFKRILAPDKVRRFRFYNNPLYLSFLRGERWYQCTAWSNPTYTILGWRKPCYPLADSHTQDVNELFSDALWEKYGVGKDPRCANCMMHCGFESATIFGALRNPRDMAAMLYGMLVNRSGIGAS

SEQ ID NO: 28228 - protein, 337 aa, Unknown
  misc_feature (1)..(337): tr|A0A2H5YJW1|A0A2H5YJW1_9BACT 7-carboxy-7-deazaguanine synthase OS=bacterium HR24 OX=2035419 GN=queE PE=4 SV= 1
MPGQPLGLTIKLALYLVKQKLRGRKYFPLTMILEPLEACNLTCTGCGRIREYEPVLDKFMTVEEALRAVEECDPPVVSIAGGEPLMHPQIGEIINALVKQKRYVYLCTNTLLYKRAFKVIPPSKYFAFVVHLDGLRETHDIAVERKGVYDVAIRMIYEARKRGYRVCTNTTLYNGTPPEEYKHLFEMLTDMGVEGMMISPGFAYKEVAHHPIFMQRQEAQNFFRRVFEQCRRGLRFYNNPLYRDFLQGKRHYQCSQWTTPTYTVMGWRKPCYLIADGHAATYQELMTTVQWDRYGWGKDPRCDTCMMHCGFEGSAILQAMERPKEMLELALRSMRGD

SEQ ID NO: 28229 - protein, 246 aa, Unknown
  misc_feature (1)..(246): tr|A0A2H5ZN68|A0A2H5ZN68_9BACT 7-carboxy-7-deazaguanine synthase OS=bacterium HR30 OX=2035425 GN=queE PE=3 SV= 1
MDGYLSEIFVSFQGEGARVGERHLFVRLAGCNLRCRYCDTPDSLERRPLWYYHDPATGQTSVRPNPVSAGELLRLVADLCEQDPSLQMIALTGGEPLLQAKFLREFLVGTKLSLPVLLETNGVLPQQLALVLPSVHVISMDIKLPSNAGERAFWDEHRAFLELAKSRECYVKVLIDWNTSVADVEQAARIVSQVAPQVPLFLQPIVDGEGRFCADSGTLSALFGIARRHHESVRVLPQVHKVLGIP

SEQ ID NO: 28230 - protein, 213 aa, Unknown
  misc_feature (1)..(213): tr|A0A2H6A4L9|A0A2H6A4L9_9BACT 7-carboxy-7-deazaguanine synthase OS=bacterium HR33 OX=2035428 GN=queE PE=3 SV= 1
MSYAVKEIYYTLQGEGAQTGRPAVFLRFAGCNLWSGREEDRESAACRFCDTDFVGTDGPGGGRFATAAELARAVARLWPRAERSPGRPFVVVTGGEPLLQLDGALLDALHGEGFEVAVETNGTLPPPAGIDWLCVSPKAGAPLVVTRGDELKLVYPQEGMDPAQFEGLDFRHFFLQPMDGPDRQRNTELAVRYCLEHPRWRLSLQTHKLLGIP

SEQ ID NO: 28231 - protein, 230 aa, Unknown
  misc_feature (1)..(230): tr|A0A2H6AGJ8|A0A2H6AGJ8_9BACT 7-carboxy-7-deazaguanine synthase OS=bacterium HR36 OX=2035431 GN=queE PE=3 SV= 1
MIRIAEIFHSIQGEGILAGTPSVFVRVSGCNLRCRWCDTEYASWQPEGESRSVAELLREVLGYNCPYVVITGGEPFLFAELTELCQSLHQAGRHITIETAGTIYREVVCDLLSLSPKLSNSTPWYREAGRFAQQHEQRRIQPEVLRRLLARYTEVQLKFVIEEPRDLQEVQELLAQLPPVPRERILLMPQGVTSEELRERGSWLVEACKQHGYRYCPRLHIELFGNRRGV

SEQ ID NO: 28232 - protein, 213 aa, Unknown
  misc_feature (1)..(213): tr|A0A2H6ALR2|A0A2H6ALR2_9BACT 7-carboxy-7-deazaguanine synthase OS=bacterium HR37 OX=2035432 GN=queE PE=3 SV= 1
MKVSEIFFSIQGEGVEIGLPTVFLRLFACDLRCSWCDSMYAVEGRDFKEMTLSDVKRELERFGCKRVCITGGEPLIQKKELEVLVRDLLGEGYSIVLETGGHKEPPPVFWHESCIISMDCKCPSSGMEKKMRFDLFERLRPKDQLKFVIKDEVDYAYAKEVLNRYSIKANIVFQPVYGTSLRWLAEKVINDRLVGVRVLPQLHKVIWGDVRGV

SEQ ID NO: 28233 - protein, 421 aa, Unknown
  misc_feature (1)..(421): tr|A0A2H6ASS8|A0A2H6ASS8_9BACT 7-carboxy-7-deazaguanine synthase OS=bacterium HR39 OX=2035434 GN=queE PE=4 SV= 1
MSPHAAFDRLWIWQEPRIARALAWYRAVATDRLPAKFVIAASVPVDLDPAGADAEALRAALLAGTAALERLRAELRSGRRDDLPPPARPSLLDVAAALAERLASPCLLCRWHCGVERARPDAKPGACRLRWPARVSVAFHHLGEELPIRGVAGSGTVFFASCNMRCAFCQNGDISADCEAGREVGARELATLAFRLRREGCHNVNWVGGEPTLHLHHIAGALRLLGHGFVPDARDLTGVRDLDGDRWSYWEVQPEVGFWRGRFNVPVLWNSNMYLDRRVLDLLRVLVDIWLPDFKFGPGRCAVELARTPRYWETVTGALGTLAEWGEDVLVRHLVMPEHVECCTFPVLDWLAEHMPEVPVNVMDQYHPDMFALPGSPHFLERHRPIARRPWESEIAAAFDHARARGLCWAEVSLEKRRLYA

SEQ ID NO: 28234 - protein, 193 aa, Unknown
  misc_feature (1)..(193): tr|A0A3L8A157|A0A3L8A157_9BACT 7-carboxy-7-deazaguanine synthase OS=bacterium J10(2018) OX=2320122 GN=queE PE= 3 SV=1
MYKINEIFYSIQGEGINAGVPAVFIRFSGCNLSCPFCDTEHGEGNMMTADDIVAEVKKYPARLAVVTGGEPSLFIDDRLVDALHAIGCIIAIETNGTCRLPSGIDHVTLSPKDAFCDGAQPVIDSCDELKVVYCGSNDPSRYDGIKARVRVLQPCDTGDAIRNAELTAAALDYCLKYPMWRLSLQLHKLLDVR

SEQ ID NO: 28235 - protein, 215 aa, Unknown
  misc_feature (1)..(215): tr|A0A202DZD0|A0A202DZD0_9BACT 7-carboxy-7-deazaguanine synthase OS=bacterium K02(2017) OX=1932696 GN=queE PE= 3 SV=1
MTKEQLKINEIFYSIQGESYLSGLPCIFIRLTGCDLRCTYCDTKYAYYDGQFMEFSEIIIKIKEYPCYNVLLTGGEPLLQKNTSKLAQKLIDLGYKVAIETSGNHDISVLPNEVVKIMDLKTPGSGEDKKNDYKNISKLTSKDEIKFVVVNNEDTHWAIKQIKENNLDQRCHVSISPTDHKLHPSIADEVLNSGRKIRHQFQMHKVIWPNREKGY

SEQ ID NO: 28236 - protein, 233 aa, Unknown
  misc_feature (1)..(233): tr|A0A4S1I0V1|A0A4S1I0V1_9BACT 7-carboxy-7-deazaguanine synthase OS=bacterium M00.F.Ca.ET.141.01.1.1 OX=256389 8 GN=queE PE=3 SV=1
MTAVTPSNAVATPSDIVQSPLPRLKITEIFTSLQGEADTAGWPTVFVRLTGCPLRCQYCDTAYAFHGGTWWDIDDIVAEVLAQGVRHVCVTGGEPLAQKRCLVLLQKLCDAGMDVSLETSGALDVSAVDPRVSRVVDIKTPGSAEVARNRWENLPLLTARDQIKFVICSREDYDWAKALLAEHDLVKRCTVFFSPSKSEITARQLADWIVEDRLPVRFQMQLHKILWNDEPGR

SEQ ID NO: 28237 - protein, 244 aa, Unknown
  misc_feature (1)..(244): tr|A0A4S1HSN7|A0A4S1HSN7_9BACT 7-carboxy-7-deazaguanine synthase OS=bacterium M00.F.Ca.ET.141.01.1.1 OX=256389 8 GN=queE PE=3 SV=1
MTDMHPAIRVSEIFGPTIQGEGVLIGLPTVFIRTGGCDYRCSWCDSLHAVDNQYRHEWLPMPIDAVWQTVHALSGGRPVMVSLSGGNPAIQPFGPLIERGHREGYRFALETQGSVVREWFADLDVLTLSPKPPSSEMTTRWAAFDACLEAAQEKPQIVLKLVVFDESDYAYAKEVAARYPHLPIYLQPGNHTPPRPGSEDASVDLDGIMMRMEWLVERVTSDRWFEARVLPQLHVLLWGNKRAV

SEQ ID NO: 28238 - protein, 244 aa, Unknown
  misc_feature (1)..(244): tr|A0A4S1AP97|A0A4S1AP97_9BACT 7-carboxy-7-deazaguanine synthase OS=bacterium M00.F.Ca.ET.146.01.1.1 OX=256389 9 GN=queE PE=3 SV=1
MTDMHPAIRVSEIFGPTIQGEGVLIGLPTVFIRTGGCDYRCSWCDSLHAVDNQYRHEWLPMPIDAVWQTVHALSGGRPVMVSLSGGNPAIQPFGPLIERGHREGYRFALETQGSVVREWFADLDVLTLSPKPPSSEMTTRWTAFDACLEAAQEKPQIVLKLVVFDESDYAYAKEVAARYPHLPIYLQPGNHTPPRPGSEDASVDLDGIMMRMEWLVERVTSDRWFEARVLPQLHVLLWGNKRAV

SEQ ID NO: 28239 - protein, 244 aa, Unknown; identical to SEQ ID NO: 28237
  misc_feature (1)..(244): tr|A0A4S1AYB6|A0A4S1AYB6_9BACT 7-carboxy-7-deazaguanine synthase OS=bacterium M00.F.Ca.ET.152.01.1.1 OX=256390 0 GN=queE PE=3 SV=1

SEQ ID NO: 28240 - protein, 210 aa, Unknown
  misc_feature (1)..(210): tr|A0A4S0YPW0|A0A4S0YPW0_9BACT 7-carboxy-7-deazaguanine synthase OS=bacterium M00.F.Ca.ET.155.01.1.1 OX=256390 1 GN=queE PE=3 SV=1
MTYAVKEIFYTLQGEGANAGRPAVFCRFAGCNLWSGREEDRAEAVCRFCDTDFVGTDGENGGKYRSAEELVQMIASQWPQGEGQRFVVCTGGEPMLQIDQPLVDALHAAGFEIAIETNGSLPVLETIDWICVSPKADAPLVVTKGNELKVVIPQDNQRLSDYAKLDFQYFLVQPMDGPSRDINTRLATDWCKRHPQWRLSMQTHKYLNIP

SEQ ID NO: 28241 - protein, 244 aa, Unknown; identical to SEQ ID NO: 28237
  misc_feature (1)..(244): tr|A0A4V3NNJ7|A0A4V3NNJ7_9BACT 7-carboxy-7-deazaguanine synthase OS=bacterium M00.F.Ca.ET.156.01.1.1 OX=256390 2 GN=queE PE=3 SV=1

SEQ ID NO: 28242 - protein, 244 aa, Unknown
  misc_feature (1)..(244): tr|A0A4S0WN93|A0A4S0WN93_9BACT 7-carboxy-7-deazaguanine synthase OS=bacterium M00.F.Ca.ET.157.01.1.1 OX=256390 3 GN=queE PE=3 SV=1
MTDMHPAIRVSEIFGPTIQGECVLIGLPTVFIRTGGCDYRCSWCDSLHAVDNQYRHEWLPMPIDAVWQTVHALSGGRPVMVSLSGGNPAIQPFGPLIERGHREGYRFALETQGSVVREWFADLDVLTLSPKPPSSEMTTRWAAFDACLEAAQEKPQIVLKLVVFDESDYAYAKEVAARYPHLPIYLQPGNHTPPRPGSEDASVDLDGIMMRMEWLVERVTSDRWFEARVLPQLHVLLWGNKRAV

SEQ ID NO: 28243 - protein, 244 aa, Unknown; identical to SEQ ID NO: 28242
  misc_feature (1)..(244): tr|A0A4S0VLM4|A0A4S0VLM4_9BACT 7-carboxy-7-deazaguanine synthase OS=bacterium M00.F.Ca.ET.159.01.1.1 OX=256390 4 GN=queE PE=3 SV=1

SEQ ID NO: 28244 - protein, 244 aa, Unknown; identical to SEQ ID NO: 28237
  misc_feature (1)..(244): tr|A0A4S2JRA6|A0A4S2JRA6_9BACT 7-carboxy-7-deazaguanine synthase OS=bacterium M00.F.Ca.ET.162.01.1.1 OX=256390 5 GN=queE PE=3 SV=1

SEQ ID NO: 28245 - protein, 233 aa, Unknown; identical to SEQ ID NO: 28236
  misc_feature (1)..(233): tr|A0A4S0ZD08|A0A4S0ZD08_9BACT 7-carboxy-7-deazaguanine synthase OS=bacterium M00.F.Ca.ET.163.01.1.1 OX=256390 6 GN=queE PE=3 SV=1

SEQ ID NO: 28246 - protein, 244 aa, Unknown; identical to SEQ ID NO: 28238
  misc_feature (1)..(244): tr|A0A4S0YHG2|A0A4S0YHG2_9BACT 7-carboxy-7-deazaguanine synthase OS=bacterium M00.F.Ca.ET.163.01.1.1 OX=256390 6 GN=queE PE=3 SV=1

SEQ ID NO: 28247 - protein, 210 aa, Unknown
  misc_feature (1)..(210): tr|A0A4S1HCU6|A0A4S1HCU6_9BACT 7-carboxy-7-deazaguanine synthase OS=bacterium M00.F.Ca.ET.168.01.1.1 OX=256390 7 GN=queE PE=3 SV=1
MGYAVKEMFKTLQGEGAQAGRAAVFCRFAGCNLWSGREEDRDQAVCQFCDTDFVGTDGLGGAKFKDAETLAIAIASTWGDTTHRRYVVFTGGEPLLQFDDELVAAVHEQGFEIAIETNGTLEPPAGIDWICVSPKAGAPLKLREGSELKLVYPQPDLLPEALPDLHFQHYFLQPMDGPKRAENTIAVTEYCLEHPKWRLSLQTHKMIGIP

SEQ ID NO: 28248 - protein, 251 aa, Unknown
  misc_feature (1)..(251): tr|A0A4S1HC08|A0A4S1HC08_9BACT 7-carboxy-7-deazaguanine synthase OS=bacterium M00.F.Ca.ET.168.01.1.1 OX=256390 7 GN=queE PE=3 SV=1
MTAARQKSAAKDTTIRISEIFGPTIQGEGLLIGLPTVFVRTGGCDYRCSWCDTLHAVDSDYRDTWKPMPVDAIWQEVRRLSGGVPLTVSLSGGNPAIQPLGSLIAKGHGEGYRFALETQGSIAKDWFADLDHLVLSPKPPSSGMGTDWHAFEDCLAAAGEGPQVALKIVVFDDADYAYAKAASARFPYLPVYLQPGNHTPPPPDDDDARVDIDGVMERMLWLVDKVSEDRWFSARVLPQLHVLLWGNKRGV

SEQ ID NO: 28249 - protein, 244 aa, Unknown; identical to SEQ ID NO: 28237
  misc_feature (1)..(244): tr|A0A4V3MRR8|A0A4V3MRR8_9BACT 7-carboxy-7-deazaguanine synthase OS=bacterium M00.F.Ca.ET.177.01.1.1 OX=256390 8 GN=queE PE=3 SV=1

SEQ ID NO: 28250 - protein, 233 aa, Unknown; identical to SEQ ID NO: 28236
  misc_feature (1)..(233): tr|A0A4S0R9N6|A0A4S0R9N6_9BACT 7-carboxy-7-deazaguanine synthase OS=bacterium M00.F.Ca.ET.177.01.1.1 OX=256390 8 GN=queE PE=3 SV=1

SEQ ID NO: 28251 - protein, 251 aa, Unknown; identical to SEQ ID NO: 28248
  misc_feature (1)..(251): tr|A0A4V3MIK5|A0A4V3MIK5_9BACT 7-carboxy-7-deazaguanine synthase OS=bacterium M00.F.Ca.ET.179.01.1.1 OX=256390 9 GN=queE PE=3 SV=1

SEQ ID NO: 28252 - protein, 210 aa, Unknown; identical to SEQ ID NO: 28247
  misc_feature (1)..(210): tr|A0A4V3MJD1|A0A4V3MJD1_9BACT 7-carboxy-7-deazaguanine synthase OS=bacterium M00.F.Ca.ET.179.01.1.1 OX=256390 9 GN=queE PE=3 SV=1

SEQ ID NO: 28253 - protein, 117 aa, Unknown
  misc_feature (1)..(117): tr|A0A4V3ME80|A0A4V3ME80_9BACT 7-carboxy-7-deazaguanine synthase QueE (Fragment) OS=bacterium M00.F.Ca.ET.180. 01.1.1 OX=2563910 GN=EN823_14165 PE=4 SV=1
WCDSLHAVDNQYRHEWLPMPIDAVWQTVHALSGGRPVMVSLSGGNPAIQPFGPLIERGHREGYRFALETQGSVVREWFADLDVLTLSPKPPSSEMTTRWAAFDACLEAAQEKPQIVL

SEQ ID NO: 28254 - protein, 238 aa, Unknown
  misc_feature (1)..(238): tr|A0A4S0LPW2|A0A4S0LPW2_9BACT 7-carboxy-7-deazaguanine synthase OS=bacterium M00.F.Ca.ET.180.01.1.1 OX=256391 0 GN=queE PE=3 SV=1
MSKIPVLEIFGPTIQGEGRVIGRKTMFVRTAGCDYRCSWCDSSFTWDGSAKEDIRMMDATEIYEKLYDIAGESFNHVTISGGNPALIKGIQGLVDLFEEKGIQSALETQGSKFQPWMTQIDDLTISPKPPSSMMKPNLPILDDVIAKCKPETLNLKVVIFDDDDFEFAKMIHHRYPNVPFYLQVGNPYLDGEYVESHTEKLLSLYEALVNRVMDSSDMNNVYVLPQLHTLLWSNKKGV

SEQ ID NO: 28255 - protein, 100 aa, Unknown
  misc_feature (1)..(100): tr|A0A4V3M3D4|A0A4V3M3D4_9BACT 7-carboxy-7-deazaguanine synthase QueE (Fragment) OS=bacterium M00.F.Ca.ET.191. 01.1.1 OX=2563911 GN=EN834_33395 PE=4 SV=1
MTDMHPAIRVSEIFGPTIQGEGVLIGLTTVFIRTGGCDYRCSWCDSLHAVDNQYRHEWLPMPIDAVWQTVHALSGGRPVMVSLSGGNPAIQPFGPLIERG

SEQ ID NO: 28256 - protein, 210 aa, Unknown; identical to SEQ ID NO: 28240
  misc_feature (1)..(210): tr|A0A4V3M5E2|A0A4V3M5E2_9BACT 7-carboxy-7-deazaguanine synthase OS=bacterium M00.F.Ca.ET.191.01.1.1 OX=256391 1 GN=queE PE=3 SV=1

SEQ ID NO: 28257 - protein, 210 aa, Unknown; identical to SEQ ID NO: 28247
  misc_feature (1)..(210): tr|A0A4S0GTS9|A0A4S0GTS9_9BACT 7-carboxy-7-deazaguanine synthase OS=bacterium M00.F.Ca.ET.194.01.1.1 OX=256391 2 GN=queE PE=3 SV=1

SEQ ID NO: 28258 - protein, 251 aa, Unknown; identical to SEQ ID NO: 28248
  misc_feature (1)..(251): tr|A0A4S0GJM4|A0A4S0GJM4_9BACT 7-carboxy-7-deazaguanine synthase OS=bacterium M00.F.Ca.ET.194.01.1.1 OX=256391 2 GN=queE PE=3 SV=1

SEQ ID NO: 28259 - protein, 244 aa, Unknown; identical to SEQ ID NO: 28237
  misc_feature (1)..(244): tr|A0A4S0E8N6|A0A4S0E8N6_9BACT 7-carboxy-7-deazaguanine synthase OS=bacterium M00.F.Ca.ET.199.01.1.1 OX=256391 3 GN=queE PE=3 SV=1

SEQ ID NO: 28260 - protein, 233 aa, Unknown; identical to SEQ ID NO: 28236
  misc_feature (1)..(233): tr|A0A4S0FI04|A0A4S0FI04_9BACT 7-carboxy-7-deazaguanine synthase OS=bacterium M00.F.Ca.ET.199.01.1.1 OX=256391 3 GN=queE PE=3 SV=1

SEQ ID NO: 28261 - protein, 244 aa, Unknown; identical to SEQ ID NO: 28237
  misc_feature (1)..(244): tr|A0A4R9YVF1|A0A4R9YVF1_9BACT 7-carboxy-7-deazaguanine synthase OS=bacterium M00.F.Ca.ET.205.01.1.1 OX=256391 4 GN=queE PE=3 SV=1

SEQ ID NO: 28262 - protein, 244 aa, Unknown; identical to SEQ ID NO: 28242
  misc_feature (1)..(244): tr|A0A4R9TZ36|A0A4R9TZ36_9BACT 7-carboxy-7-deazaguanine synthase OS=bacterium M00.F.Ca.ET.221.01.1.1 OX=256391 5 GN=queE PE=3 SV=1

SEQ ID NO: 28263 - protein, 244 aa, Unknown; identical to SEQ ID NO: 28242
  misc_feature (1)..(244): tr|A0A4R9U392|A0A4R9U392_9BACT 7-carboxy-7-deazaguanine synthase OS=bacterium M00.F.Ca.ET.222.01.1.1 OX=256391 6 GN=queE PE=3 SV=1

SEQ ID NO: 28264 - protein, 244 aa, Unknown; identical to SEQ ID NO: 28238
  misc_feature (1)..(244): tr|A0A4V3KJH0|A0A4V3KJH0_9BACT 7-carboxy-7-deazaguanine synthase OS=bacterium M00.F.Ca.ET.227.01.1.1 OX=256391 7 GN=queE PE=3 SV=1

SEQ ID NO: 28265 - protein, 210 aa, Unknown; identical to SEQ ID NO: 28240
  misc_feature (1)..(210): tr|A0A4R9RI26|A0A4R9RI26_9BACT 7-carboxy-7-deazaguanine synthase OS=bacterium M00.F.Ca.ET.228.01.1.1 OX=256391 8 GN=queE PE=3 SV=1

SEQ ID NO: 28266 - protein, 238 aa, Unknown; identical to SEQ ID NO: 28254
  misc_feature (1)..(238): tr|A0A4R9SCT9|A0A4R9SCT9_9BACT 7-carboxy-7-deazaguanine synthase OS=bacterium M00.F.Ca.ET.229.01.1.1 OX=256391 9 GN=queE PE=3 SV=1

SEQ ID NO: 28267 - protein, 240 aa, Unknown
  misc_feature (1)..(240): tr|A0A4V3KEL9|A0A4V3KEL9_9BACT 7-carboxy-7-deazaguanine synthase OS=bacterium M00.F.Ca.ET.230.01.1.1 OX=256392 0 GN=queE PE=3 SV=1
MPNSTLPIRNTAIPTTDPEAGLKVTEIFYSLQGEALTAGLPTIFIRLTGCPLRCVYCDTEYAFVGGERMSLAGILAVCQSFPCQRICLTGGEPLAQPNAIALMNLLLAHGYEISLETSGALSVAEVPTAVSKVMDIKTPSSQEADKNLWQNLPYLTAHDQIKFVIMNRDDYDWSKQILADYQLDKKVATVWFSPMFNVEERQTNIPTLATDLAEWILADALPVRFQLQLHKIIWADAKGK

SEQ ID NO: 28268 - protein, 244 aa, Unknown; identical to SEQ ID NO: 28242
  misc_feature (1)..(244): tr|A0A4R9RN72|A0A4R9RN72_9BACT 7-carboxy-7-deazaguanine synthase OS=bacterium M00.F.Ca.ET.230.01.1.1 OX=256392 0 GN=queE PE=3 SV=1

SEQ ID NO: 28269 - protein, 208 aa, Unknown
  misc_feature (1)..(208): tr|A0A5J4E217|A0A5J4E217_9BACT 7-carboxy-7-deazaguanine synthase OS=bacterium MnTg02 OX=2080452 GN=queE PE=4 S V=1
MYFVKEIYRTLQGEGANTGRAAVFCRFAGCNLWSGVEADREKAVCQFCDTDFVGTDGPGGGRFESAEALAEACTKVWGANDNPFIVLTGGEPMLQVDLSLIDALHNQDFEIAIESNGTLPVPRTIDWICVSPKAGAQLVQTSGDELKLVYPQAGAEPDRFRDLDFRHFFLQPMDCAERDRNTKSVIAYCQTHPQWRLSLQTHKLIGIP

SEQ ID NO: 28270 - protein, 224 aa, Unknown
  misc_feature (1)..(224): tr|A0A5J4EB78|A0A5J4EB78_9BACT 7-carboxy-7-deazaguanine synthase OS=bacterium MnTg04 OX=2080454 GN=queE PE=4 S V=1
MADPARDDLAPDSRLRITEIFYSLQGEADTTGAPTVFIRLTGCPLRCQYCDTAYAFHGGRWMDFAAVSEKVREYRCRHVCVTGGEPLAQKNCAGLLRDLCDSGYRVSLETSGAADLSVVDPRVVKVMDLKTPGSGEVDRNLWQNLDLLSTDDQIKFVICSRADFEWAGEQVRQRQLDGICTVWFSPSYEQIKPVDIADWILQDKLPVRLQLQLHKYLWGTGPGH

SEQ ID NO: 28271 - protein, 196 aa, Unknown
  misc_feature (1)..(196): tr|A0A132GU66|A0A132GU66_9BACT 7-carboxy-7-deazaguanine synthase OS=bacterium P201 OX=1768112 GN=queE PE=3 SV= 1
MYKINEIFYSLQGEGFYTGTPAVFVRFSGCNLHCAFCDTQHQEGEMMSLQEIVDKVNKYPIAPLIVLTGGEPSLFIDEAFVAELKQKTKKKITIETNGTRPLPTNLDWVTLSPKTAFEGGDLEPCVLKQCDELKVVYLGQDLAQYDDIEAKHRFLQPCFCEDEMLCKANMKACVEAVMQNPGWRLSLQIHRILNIR

SEQ ID NO: 28272 - protein, 210 aa, Unknown
  misc_feature (1)..(210): tr|A0A4V1RJA7|A0A4V1RJA7_9BACT 7-carboxy-7-deazaguanine synthase OS=bacterium RmlP001 OX=2316527 GN=queE PE=3 SV=1
MSYAVKEIFYTLQGEGRQAGRAAVFCRFAGCNLWSGREADRATAACSFCDTDFVGLDGPGGGRFASAAALADAVAAAWTGAPEKRLTVLTGGEPLLQVDEALVAALQARGFEVAVETNGTLAPPPGLDWICVSPKGAAPLTLDAGDELKLVYPQPAAMPERFEDLPFANFILQPMDGPDQAANTAAAVRYCMAHPRWRLGLQTHKVLGIA

SEQ ID NO: 28273 - protein, 210 aa, Unknown
  misc_feature (1)..(210): tr|A0A4Q2U435|A0A4Q2U435_9BACT 7-carboxy-7-deazaguanine synthase OS=bacterium RmlP026 OX=2316528 GN=queE PE=3 SV=1
MSYAVKEIFYTLQGEGRQAGRAAVFCRFAGCNLWSGREADRASAACTFCDTDFVGLDGPGGGRFADADALASAVAAAWTGAPDNRLTVLTGGEPLLQVDEALTAALHARGFEIAVETNGTIAPPPGLDWLCVSPKGDAPLAVERGDELKLVFPQPRALPERFAHLGFGHFILQPMDGPEAAANTEAAVRYCMANPRWRLGLQTHKFLGIA

SEQ ID NO: 28274 - protein, 236 aa, Unknown
  misc_feature (1)..(236): tr|A0A177Q227|A0A177Q227_9BACT 7-carboxy-7-deazaguanine synthase OS=bacterium SCGC AG-212-C10 OX=1799370 GN=qu eE PE=3 SV=1
MNTLLLSRMADGEPEIFASVQGEGLSAGLPSTFVRTAICNLRCSWCDTAYTWDWSRYDRAEQVLAIDPDEVLRRVRALPPRNVVITGGEPLIQRRQLAALVSALKDDGYRVEFETNGTIAPGELTPLADQWNVSAKLAHSGNEGLQRRRPGALAAFAALSHANFKFVVRAMGDLEELEALAVEYQIQADRIVLMPEGRTAAELREKSTWLAETCTQRGYRFSSRLHILIWGDKRGV

SEQ ID NO: 28275 - protein, 210 aa, Unknown
  misc_feature (1)..(210): tr|A0A3R7WMW9|A0A3R7WMW9_9BACT 7-carboxy-7-deazaguanine synthase OS=bacterium TMED144 OX=1986778 GN=queE PE=3 SV=1
  misc_feature (56)..(56): Xaa can be any naturally occurring amino acid
  misc_feature (65)..(65): Xaa can be any naturally occurring amino acid
  misc_feature (71)..(71): Xaa can be any naturally occurring amino acid
  misc_feature (175)..(175): Xaa can be any naturally occurring amino acid
MYLVKEIYYTIQGEGYHVGRPAVFLRFSGCNLWSGHEKDRKNAICKFCDTDFIGTXGDGGGKFEXPKKLAXSIKKFWPKNSKTRPFVVCTGGEPLLQLNNELIMEIRKVGFEIAIETNGTISLPNNLDWVCVSPKANTKLIVTEGDELKLVYPQIGSTPEDYKQLKFDHFYLQPXDNVNKVENIKKTLRYCFKNPHWKISIQTHKFLNIP

SEQ ID NO: 28276 - protein, 226 aa, Unknown
  misc_feature (1)..(226): tr|A0A1Z8MJM1|A0A1Z8MJM1_9BACT 7-carboxy-7-deazaguanine synthase OS=bacterium TMED15 OX=1986651 GN=queE PE=3 S V=1
  misc_feature (8)..(8): Xaa can be any naturally occurring amino acid
  misc_feature (16)..(16): Xaa can be any naturally occurring amino acid
  misc_feature (137)..(137): Xaa can be any naturally occurring amino acid
  misc_feature (195)..(195): Xaa can be any naturally occurring amino acid
  misc_feature (207)..(207): Xaa can be any naturally occurring amino acid
MKYSEIFXSIQGEGQXIGYPSVFFRTSYCNLRCIWCDTPYTSWEPEDKDISVEDAVDAILAHNCKQVVITGGEPFMQPKDLTILCHRLRQNGKHITIETNGTLFERVEADLLSISPKLENSNPSEFNHHFKQHQRNXINQEVLRQFLDYYNCQLKFVVETERDLFEIHQLETEMQIPTSIIVLMPQGITNDQIQXRQNWVVETCKKXGYRYSPRLHVDIWGDTRGT

SEQ ID NO: 28277 - protein, 212 aa, Unknown
  misc_feature (1)..(212): tr|A0A1Z9IPV7|A0A1Z9IPV7_9BACT 7-carboxy-7-deazaguanine synthase OS=bacterium TMED161 OX=1986652 GN=queE PE=3 SV=1
MLRINEIFKSIQGESTAMGMPCAFVRLTYCNLRCSYCDTEYSFHEGNDMKIIDIIEEVKSMNTNLVEITGGEPMLQKNVIPLMKEFLNNDFEVMLETCGAISLKDVPKKVKKIVDFKCPSSNMKDKNLWSIIDELSPHDEIKFVIGDRADYKWTLNKINQYNLDSKWTILFSPVFDKLKLDQLANWILEDNLNVRLQLQMHKYIWDPEMRAV

SEQ ID NO: 28278 - protein, 209 aa, Unknown
  misc_feature (1)..(209): tr|A0A1Z9KS43|A0A1Z9KS43_9BACT 7-carboxy-7-deazaguanine synthase OS=bacterium TMED181 OX=1986654 GN=queE PE=3 SV=1
MRVVEIYPSIQGESTRAGIPCVFIRLAGCPLRCRWCDTVYSFKGGDEMSLEEICNAAAAPGIGLVELTGGEPLAHAEAPELLKMLCDRFEEVLLETSGAYPVEDLDPRIGVIMDMKAPGSGEESRNLLKNIDHLKAGDELKLVLADREDYLWAKKLIESHPIEVPILFSPVHGELDAALLSEWILEDRLQVRLHLQQHKFIWDPQERGR

SEQ ID NO: 28279 - protein, 213 aa, Unknown
  misc_feature (1)..(213): tr|A0A1Z9LY58|A0A1Z9LY58_9BACT 7-carboxy-7-deazaguanine synthase OS=bacterium TMED198 OX=1986779 GN=queE PE=3 SV=1
MSLKVNEIFYSIQGESTYSGMPCVFVRLTYCNLRCSYCDTEYAFYEGSNFTVEQILEKVSKYGCDLVEVTGGEPLLQNESIDLMNELLSNGYKVLLETGGSLPLNKVPKQVIKIVDFKTPGSLMSKKNLWSIIDDLQPWDEIKFVITNKDDYLWAKMKIKDLNLTNSWTVLLSPTHGTLELEKLSKWVLEDQLKVKVQVQLHKYIWHPDKKGV

SEQ ID NO: 28280 - protein, 210 aa, Unknown
  misc_feature (1)..(210): tr|A0A1Z9RV78|A0A1Z9RV78_9BACT 7-carboxy-7-deazaguanine synthase OS=bacterium TMED250 OX=1986657 GN=queE PE=3 SV=1
MYTIKEIYYTIQGEGFHTGRSAVFVRFTGCNLWTGHEKDRENAICNFCDTDFIGTDGPGGGRFQTPDDLVENILSKWPSRSIEQRFVVFTGGEPLLQMNEELINVLHFNKFEIAIETNGTVNAPKNIDWVCVSPKAGSDLIITKGNELKLVYPQHGIDPSQYENLNFDHFSLQPMDNESLNENIQKTIKYCHEHPLWRLSLQTHKFVGIP

SEQ ID NO: 28281 - protein, 210 aa, Unknown
  misc_feature (1)..(210): tr|A0A424SHH1|A0A424SHH1_9BACT 7-carboxy-7-deazaguanine synthase OS=bacterium TMED46 OX=1986782 GN=queE PE=3 S V=1
MNYSVKEIYYTLQGEGYHTGRPAVFIRFSGCNLWTGHEKDRSGAICNWCDTDFVGTNGINGGKFSAEEITNIINSLWKGNVQTEPYVICTGGEPLLQMDESLIKAIHKAGFEIGLETNGTMIPPDGIDWICVSPKANADLVLKNGNELKVVYPQCGMNPRMHEKLKFDHFYIQPMDGVDQKINIKRSEKFVLDHPKWKLSLQTHKILGIP

SEQ ID NO: 28282 - protein, 210 aa, Unknown
  misc_feature (1)..(210): tr|A0A1Z8KNS0|A0A1Z8KNS0_9BACT 7-carboxy-7-deazaguanine synthase OS=bacterium TMED6 OX=1986783 GN=queE PE=3 SV =1
MKINEIFYSIQGESSMSGMPCIFIRLTYCNLRCSYCDTEYSFHEGKDMSIDDILKKIKNYNCKLVEVTGGEPLLQKESIDLMTILLNDNYKVMLETGGSLPIKNVPKDVIKIVDFKCPSSNMHKKNDWNILKDLQKHDEIKFVIGNYEDYEWTKNKINSYNLNTKRILLSPVHDVLKSKDLSEWILKDGINARLQLQLHKYIWSPDTKGV

SEQ ID NO: 28283 - protein, 211 aa, Unknown
  misc_feature (1)..(211): tr|A0A1Z8YZK2|A0A1Z8YZK2_9BACT 7-carboxy-7-deazaguanine synthase OS=bacterium TMED80 OX=1986784 GN=queE PE=3 S V=1
MTRYSIKEIYLTKQGEGHHTGRPAIFIRFSGCNLWSGLEKDRKKAICNWCDTDFVGTNGINGGHYDIEKIINIILKLWEPTIKEEPYIVCTGGEPLLQLDQDFVDKVHLAGFKIGIETNGTKIPPRNIDWICVSPKKNSKIILIKGDELKFVYPQSGFDPLQFENLNFNFFFIQPMDNNNYDENKMMSENFVKNNPFWKLSLQTHKILGFP

SEQ ID NO: 28284 - protein, 257 aa, Unknown
  misc_feature (1)..(257): tr|A0A1Z9BBI4|A0A1Z9BBI4_9BACT 7-carboxy-7-deazaguanine synthase OS=bacterium TMED88 OX=1986661 GN=queE PE=3 S V=1
MSVPAGNVVEVFWSAQGEGPFVGSPTVFVRFGGCDLRCRWCDTPHTWTPADQCRFQDPTGGPDQVEQNPVSFERVLTAISDLSPQAGDFVSLTGGEPLLQVDWVSALARAVRGDGLRAHLETHGLAVDGLKRLGSRLDVISMDWKSPADVRSAVPDRYPHFAQAHRDFLRSAKDVADSVYVKWVISDRTSVSDLEQVCEMIDEVDPETPLILQPVTPAGGVRAGLEAPVVLNWLRSARERLCDVRLIPQTHPLIGVR

SEQ ID NO: 28285 - protein, 207 aa, Bacteroidales bacterium
  misc_feature (1)..(207): tr|U5Q5K4|U5Q5K4_9BACT 7-carboxy-7-deazaguanine synthas e OS=Bacteroidales bacterium CF OX=1400053 GN=queE PE=3 SV=1
MKFPELKEGELLPLAEAFYTIQGEGYHSGKPAYFIRLGGCDVGCSWCDAKETWNPRLYPPTPVSEIVNEALKYPAKAIVITGGEPLTYPLDRLCILLKNEGFEIFLETSGSKSISGRFDWICLSPKKKKPPVNGMHQLASELKVIIETEDDLLWAEQNRLLVRNNCFLYLQPEWSKSKLILPVIIDYVKRNPIWNISLQTHKYMNIP

SEQ ID NO: 28286 - protein, 199 aa, Bacteroidales bacterium
  misc_feature (1)..(199): tr|A0A4S4H5U8|A0A4S4H5U8_9BACT 7-carboxy-7-deazaguanine synthase OS=Bacteroidales bacterium OX=2030927 GN=queE PE=3 SV=1
MRKINEIFYSLQGEGAHTGKAAVFVRFSGCNLRCSFCDTEHQSGVEMTDEAIAEEVACYPGEWIILTGGEPSLWIDSEFVSMLKRVTGKRVAIETNGSREVPDEIDWVTVSPKTGMSGAGEYEMRVSRADELKVVDVGQDLEPYFSLPFVTPATEMYLQPCYVGDEEKSLRLREATVRRVMHDPRWTLSLQTHRFLGIR

SEQ ID NO: 28287 - protein, 181 aa, Bacteroides acidifaciens
  misc_feature (1)..(181): tr|A0A3L7Z0I2|A0A3L7Z0I2_9BACE 7-carboxy-7-deazaguanine synthase OS=Bacteroides acidifaciens OX=85831 GN=queE PE=3 SV=1
MRKINEIFYSLQGEGYHTGTPAIFVRFSGCNLKCDFCDTQHEEGKMMTDDEIIAEVKKYPAVTVVLTGGEPSLWIDDELIDRLHRAGKYVTIETNGTRPLPAAIDWVTCSPKQGAKLAIDRMDEVKVVYEGQDISIFEQLPAEHFFLQPCSCNNTASTVDCVMRHPKWRLSLQTHKLIDIR

SEQ ID NO: 28288 - protein, 181 aa, Bacteroides acidifaciens
  misc_feature (1)..(181): tr|A0A4Y9GVF7|A0A4Y9GVF7_9BACE 7-carboxy-7-deazaguanine synthase OS=Bacteroides acidifaciens OX=85831 GN=queE PE=3 SV=1
MRKINEIFYSLQGEGYHTGTPAIFVRFSGCNLKCDFCDTQHEEGKMMTDDEIIAEVKKYPAVTVVLTGGEPSLWIDDELIDRLHQAGKYVTIETNGTRPLPAAIDWVTCSPKQGAKLAIDRMDEVKVVYEGQDISIFEQLPAEHFFLQPCSCNNTASTVDCVMRHPKWRLSLQTHKLIDIR

SEQ ID NO: 28289 - protein, 181 aa, Bacteroides caccae
  misc_feature (1)..(181): tr|R5U2G2|R5U2G2_9BACE 7-carboxy-7-deazaguanine synthas e OS=Bacteroides caccae CAG:21 OX=1263037 GN=queE PE=3 SV=1
MRKINEIFYSLQGEGYYTGTPAIFIRFSGCNLKCSFCDTQHEEGTMMTDDEIIAEVKKYPAVTVVLTGGEPSLWIDDTLIDRLHEAGKYVTVETNGTNPLPESVDWVTCSPKQGVELKINRIDEVKVVYEGQDISIFELLPAEHFFLQPCSCINTADTVDCVMRHPKWRLSLQTHKLIDIR

SEQ ID NO: 28290 - protein, 181 aa, Bacteroides caccae; identical to SEQ ID NO: 28289
  misc_feature (1)..(181): tr|A0A174RB10|A0A174RB10_9BACE 7-carboxy-7-deazaguanine synthase OS=Bacteroides caccae OX=47678 GN=queE PE=3 S V=1

SEQ ID NO: 28291 - protein, 181 aa, Bacteroides caecimuri
  misc_feature (1)..(181): tr|A0A4S2D4N6|A0A4S2D4N6_9BACE 7-carboxy-7-deazaguanine synthase OS=Bacteroides caecimuri OX=2516958 GN=queE P E=3 SV=1
MRKINEIFYSLQGEGYHTGTPAIFVRFSGCNLKCDFCDTQHEEGKMMTDDEIIAEVKKYPAVTVVLTGGEPSLWIDDELIDRLHQAGKYVAIETNGTRPLPAAIDWVTCSPKQGAKLAIDRMDEVKVVYEGQDISIFEQLPAEHFFLQPCSCNNTASTVDCVMRHPKWRLSLQTHKLIDIR

SEQ ID NO: 28292 - protein, 245 aa, Bacteroides caecimuris; identical to SEQ ID NO: 28208
  misc_feature (1)..(245): tr|A0A3A9BJ06|A0A3A9BJ06_9BACE 7-carboxy-7-deazaguanine synthase OS=Bacteroides caecimuris OX=1796613 GN=queE PE=3 SV=1

SEQ ID NO: 28293 - protein, 181 aa, Bacteroides caecimuris; identical to SEQ ID NO: 28288
  misc_feature (1)..(181): tr|A0A1C7GWW0|A0A1C7GWW0_9BACE 7-carboxy-7-deazaguanine synthase OS=Bacteroides caecimuris OX=1796613 GN=queE PE=3 SV=1

SEQ ID NO: 28294 - protein, 181 aa, Bacteroides cellulosilyticus
  misc_feature (1)..(181): tr|E2NHD0|E2NHD0_9BACE 7-carboxy-7-deazaguanine synthas e OS=Bacteroides cellulosilyticus DSM 14838 OX=537012 G N=queE PE=3 SV=1
MRKINEIFYSLQGEGYHTGTPAVFIRFSGCNLKCSFCDTRHEEGVLMSDDEIIAEVGKYPAVTVILTGGEPSLWIDEVFIDRLHQAGKYVCIETNGTNPLPQNIDWVTCSPKQGVKLGITRMDEVKVVYEGQDIEVYELLPAEYFFLQPCSCSNTAETVACVMQHPKWRLSLQTHKLIDIR

SEQ ID NO: 28295 - protein, 181 aa, Bacteroides cellulosilyticus
  misc_feature (1)..(181): tr|A0A4Q5JFH1|A0A4Q5JFH1_9BACE 7-carboxy-7-deazaguanine synthase OS=Bacteroides cellulosilyticus OX=246787 GN= queE PE=3 SV=1
MRKINEIFYSLQGEGYYTGTPAVFIRFSGCNLKCSFCDTRHEEGVLMSDDEIIAEVGKYPAVTVILTGGEPSLWVDEAFIDRLHQAGKYVCIETNGTNPLPQNIDWVTCSPKQGVKLGITRMDEVKVVYEGQDIEVYELLPAEYFFLQPCSCSNTAETVACVMQHPKWRLSLQTHKLIDIR

SEQ ID NO: 28296 - protein, 181 aa, Bacteroides clarus
  misc_feature (1)..(181): tr|R6L9Z6|R6L9Z6_9BACE 7-carboxy-7-deazaguanine synthas e OS=Bacteroides clarus CAG:160 OX=1263039 GN=queE PE=3 SV=1
MRKINEIFYSLQGEGFHTGTPAVFIRLSGCNLKCPFCDTQHEEGVLMTDEEIMAEVGKYPAMMVILTGGEPSLWIDREFVDRLHRMGKYVCIETNGTHELPDNIDWVTCSPKRGAKLSISRMDEVKVVYESQDITVYEQLPAKHFFLQPCSCSNTVETVARVMQHPKWRLSLQTHKLINIS

SEQ ID NO: 28297 - protein, 181 aa, Bacteroides clarus
  misc_feature (1)..(181): tr|A0A1Y4JTH1|A0A1Y4JTH1_9BACE 7-carboxy-7-deazaguanine synthase OS=Bacteroides clarus OX=626929 GN=queE PE=3 SV=1
MRKINEIFYSLQGEGFHTGTPAVFIRLSGCNLKCPFCDTQHEEGVLMTDEEVMAEVGKYPAMMVILTGGEPSLWIDREFVDRLHRMGKYVCIETNGTHELPDNIDWVTCSPKRGAKLSISRMDEVKVVYESQDITVYEQLPAKHFFLQPCSCSNTVETVACVMQHPKWRLSLQTHKLINIS

SEQ ID NO: 28298 - protein, 181 aa, Bacteroides coprocola
  misc_feature (1)..(181): tr|A0A412GAL8|A0A412GAL8_9BACE 7-carboxy-7-deazaguanine synthase OS=Bacteroides coprocola OX=310298 GN=queE PE =3 SV=1
MRKINEIFYSLQGEGFHTGTPAVFVRFSGCNLKCSFCDTQHEEFRMMTDDEIIAEVCTYPCQMVILTGGEPGLSIDSQLTKALHAAGKYIAIETNGTCVLPEDIDWVTCSPKEGTTLKLHHIDEVKVVYVGQDVSPYLKLPAKHHFLQPCSGQNTNDVIAYIKEHPQWRLSLQTHKLIDIP

SEQ ID NO: 28299 - protein, 181 aa, Bacteroides coprocola; identical to SEQ ID NO: 28298
  misc_feature (1)..(181): tr|B3JGJ7|B3JGJ7_9BACE 7-carboxy-7-deazaguanine synthas e OS=Bacteroides coprocola DSM 17136 OX=470145 GN=queE PE=3 SV=1

SEQ ID NO: 28300 - protein, 181 aa, Bacteroides coprophilus
  misc_feature (1)..(181): tr|A0A413T243|A0A413T243_9BACE 7-carboxy-7-deazaguanine synthase OS=Bacteroides coprophilus OX=387090 GN=queE PE=3 SV=1
MKKINEIFYSLQGEGYHAGTPAVFVRFSGCNLKCDFCDTRHEEGTEMENGDIVKAVEQYPCRMVILTGGEPGLWIDSALVDALHASGRYVCIETNGTCLLPENIDWVTCSPKQGTSLKVAHVDEVKVVYLGQDVSACLDIPARHYFLQPCSCQNTDEVIAYIKQHPVWRLSLQTHKLINIP

SEQ ID NO: 28301 - protein, 181 aa, Bacteroides coprophilus
  misc_feature (1)..(181): tr|R6T5S4|R6T5S4_9BACE 7-carboxy-7-deazaguanine synthas e OS=Bacteroides coprophilus CAG:333 OX=1263041 GN=queE PE=3 SV=1
MKKINEIFYSLQGEGYHAGTPAVFVRFSGCNLKCDFCDTRHEEGTEMENGEIVKAVEQYPCRMVILTGGEPGLWIDSALVDALHASGRYVCIETNGTCRLPENIDWVTCSPKQGTSLKVAHVDEVKVVYLGQDVSACLDIPARHYFLQPCSCQNTDEVIAYIKQHPVWRLSLQTHKLINIP

SEQ ID NO: 28302 - protein, 181 aa, Bacteroides dorei
  misc_feature (1)..(181): tr|A0A4R4GR33|A0A4R4GR33_9BACE 7-carboxy-7-deazaguanine synthase OS=Bacteroides dorei OX=357276 GN=queE PE=3 S V=1
MRRINEIFYSLQGEGYHTGIPAVFVRFSGCNLRCPFCDTQHEEGTLMSDEDIAMEVAKYSTQVVILTGGEPGLWIDEKLVDALHHEGKYVCIETNGTCLLPENIDWVTCSPKEGAKINLDRIDEVKVVYVGQDVSAYLDLSASHYFLQPCSCANTEEVIAYILQHPEWRLSLQTHKLLQIP

SEQ ID NO: 28303 - protein, 181 aa, Bacteroides dorei
  misc_feature (1)..(181): tr|A0A5C6KEM7|A0A5C6KEM7_9BACE 7-carboxy-7-deazaguanine synthase OS=Bacteroides dorei OX=357276 GN=queE PE=3 S V=1
MRRINEIFYSLQGEGYHTGIPAVFVRFSGCNLRCPFCDTQHEEGTLMSDEDIVMEVAKYSTQVVILTGGEPGLWIDEKLVDALHHEGKYVCIETNGTCLLPENIDWVTCSPKEGAKINLDRIDEVKVVYVGQDVSAYLDLSASHYFLQPCSCANTEEVIAYILQHPEWRLSLQTHKLLQIP

SEQ ID NO: 28304 - protein, 181 aa, Bacteroides eggerthii
  misc_feature (1)..(181): tr|R5JWJ2|R5JWJ2_9BACE 7-carboxy-7-deazaguanine synthas e OS=Bacteroides eggerthii CAG:109 OX=1263043 GN=queE P E=3 SV=1
MRKINEIFYSLQGEGFHTGTPAVFIRFSGCNLKCSFCDTQHEEGVLMSDEEILDAVGEYPATTVILTGGEPSLWIDREFVDRLHRIGKYVCIETNGTRSLPDNIDWVTCSPKQGAKPVISRMDEVKVVYEGQDITVYELLPAGHFFLQPCSCSNVAETVACVMQHPKWRLSLQTHKLIDIR

SEQ ID NO: 28305 - protein, 181 aa, Bacteroides eggerthii
  misc_feature (1)..(181): tr|A0A380YKC5|A0A380YKC5_9BACE 7-carboxy-7-deazaguanine synthase OS=Bacteroides eggerthii OX=28111 GN=queE PE= 3 SV=1
MRKINEIFYSLQGEGFHTGTPAVFIRFSGCNLKCSFCDTQHEEGVLMSDEEILDAVGEYPATTVILTGGEPSLWIDREFVDRLHRIGKYVCIETNGTRALPDNIDWVTCSPKQGAKPVISRMDEVKVVYEGQDITVYELLPAGHFFLQPCSCSNVAETVACVMQHPKWRLSLQTHKLIDIR

SEQ ID NO: 28306 - protein, 181 aa, Bacteroides faecichinchillae
  misc_feature (1)..(181): tr|A0A1M4VJ64|A0A1M4VJ64_9BACE 7-carboxy-7-deazaguanine synthase OS=Bacteroides faecichinchillae OX=871325 GN= queE PE=3 SV=1
MRKINEIFYSLQGEGYHTGTPAIFVRFSGCNLNCDFCDTQHEEGIMMTDEEIIAEVRKYPAVTVVLTGGEPSLWIDNDFIDRLHEAGKYICIETNGTHPLPESIDWITCSPKQGAKLEITRMDEVKVVYEGQDISIYESLFAEHFYLQPCSCSNTAETVDCVMRHPKWRLSLQTHKLIDIR

SEQ ID NO: 28307 - protein, 181 aa, Bacteroides faecis
  misc_feature (1)..(181): tr|A0A1H3EUP3|A0A1H3EUP3_9BACE 7-carboxy-7-deazaguanine synthase OS=Bacteroides faecis MAJ27 OX=1077285 GN=que E PE=3 SV=1
MRKINEIFYSLQGEGYHTGTPAVFVRFSGCNLKCSFCDTQHEEGTLMTDDEIIAEVSKYPAATVILTGGEPSLWIDDALVDRLHEAGKYVCIETNGTRPLPASIDWVTCSPKQGARLAITRMDEVKVVYEGQDISIYERLSAEHFFLQPCSCYNTALTVDCVMRHPKWRLSLQTHKLIDIR

SEQ ID NO: 28308 - protein, 181 aa, Bacteroides faecis; identical to SEQ ID NO: 28307
  misc_feature (1)..(181): tr|R6UUC8|R6UUC8_9BACE 7-carboxy-7-deazaguanine synthas e OS=Bacteroides faecis CAG:32 OX=1263044 GN=queE PE=3 SV=1

SEQ ID NO: 28309 - protein, 181 aa, Bacteroides fluxus
  misc_feature (1)..(181): tr|F3PS44|F3PS44_9BACE 7-carboxy-7-deazaguanine synthas e OS=Bacteroides fluxus YIT 12057 OX=763034 GN=queE PE= 3 SV=1
MRKINEIFYSLQGEGFHTGTPAVFIRFSGCNLKCSFCDTQHEEGCLMSDDEIMEEVGKYPAATVILTGGEPSLWIDGEFVDRLHRAGKYVCIETNGTRLLPGNIDWVTCSPKQGTRLGIARMDEVKVVYEGQDITGYEQLPAAHFFLQPCSCNNIGETVDCVMRHPKWRLSLQTHKLIDIR

SEQ ID NO: 28310 - protein, 181 aa, Bacteroides fragilis
  misc_feature (1)..(181): tr|I9B834|I9B834_BACFG 7-carboxy-7-deazaguanine synthas e OS=Bacteroides fragilis CL05T12C13 OX=997881 GN=queE PE=3 SV=1
MRKINEIFYSLQGEGYHTGTPAVFIRFSGCNLKCDFCDTRHEEGEMMTDEDIVNEIGKYPAVMVILTGGEPSLWIDDAFIDLLHRAGKYVCIETNGTKPLPVAIDWVTCSPKQGVNLALNRMDEVKVVYEGQNIDVYEQLPAEHFFLQPCSCNNTAETVDCVMRHPKWRLSLQTHKLINIL

SEQ ID NO: 28311 - protein, 181 aa, Bacteroides fragilis
  misc_feature (1)..(181): tr|A0A4V3UJF5|A0A4V3UJF5_BACFG 7-carboxy-7-deazaguanine synthase OS=Bacteroides fragilis OX=817 GN=queE PE=3 S V=1
MRKINEIFYSLQGEGYHTGTPAVFIRFSGCNLKCDFCDTRHEEGEMMTDEDIVNEIGKYPAVMVILTGGEPSLWIDDAFIDLLHRAGKYVCIETNGTKPLPVAIDWVTCSPKQGVNLALNRMDEVKVVYEGQNIDVYEQLPAEHFFLQPCSCNNTAETVDCVMRHPKWRLSLQTHKLIHIL

SEQ ID NO: 28312 - protein, 181 aa, Bacteroides helcogenes
  misc_feature (1)..(181): tr|E6SWA8|E6SWA8_BACT6 7-carboxy-7-deazaguanine synthas e OS=Bacteroides helcogenes (strain ATCC 35417 / DSM 20 613 / JCM 6297 / P 36-108) OX=693979 GN=queE PE=3 SV=1
MRKINEIFYSLQGEGYHTGIPAVFIRFSGCNLKCSFCDTHHEEGRLMSDDEIMEEVRKYPAATVILTGGEPSLWIDSEFVDRLHRAGKYVCIETNGTHPLPDNIDWVTCSPKLGGNLRITGMDEVKVVYEGQDITVYEQLPAGHFFLQPCSCNNIGETVDCVMHHPKWRLSLQTHKLIDIR

SEQ ID NO: 28313 - protein, 181 aa, Bacteroides intestinalis
  misc_feature (1)..(181): tr|A0A412YID7|A0A412YID7_9BACE 7-carboxy-7-deazaguanine synthase OS=Bacteroides intestinalis OX=329854 GN=queE PE=3 SV=1
MRKINEIFYSLQGEGYHTGTPAVFIRFSGCNLKCSFCDTRHEEGVLMSDDEIIAEVGKYPAVTVILTGGEPSLWIDEVFIDRLHQAGKYVCIETNGTNPLPQNIDWVTCSPKQGVKLGITRMDEVKVVYEGQDIGVYELLPAEYFFLQPCSCSNTAETVACVMQHPKWRLSLQTHKLIDIR

SEQ ID NO: 28314 - protein, 181 aa, Bacteroides intestinalis
  misc_feature (1)..(181): tr|A0A139KXV4|A0A139KXV4_9BACE 7-carboxy-7-deazaguanine synthase OS=Bacteroides intestinalis OX=329854 GN=queE PE=3 SV=1
MRKINEIFYSLQGEGYHTGTPAVFIRFSGCNLKCSFCDTRHEEGVLMSDDEIIAEVGKYPAVTVILTGGEPSLWIDEAFIDRLHQAGKYVCIETNGTNPLPKNIDWVTCSPKQGVKLGITRMDEVKVVYEGQDIEVYELLPAEYFFLQPCSCSNTAETVACVMQHPKWRLSLQTHKLIDIR

SEQ ID NO: 28315 - protein, 181 aa, Bacteroides massiliensis
  misc_feature (1)..(181): tr|U6RP86|U6RP86_9BACE 7-carboxy-7-deazaguanine synthas e OS=Bacteroides massiliensis B84634 = Timone 84634 = D SM 17679 = JCM 13223 OX=1121098 GN=queE PE=3 SV=1
MKKINEIFYSLQGEGYHTGIPAIFVRFSGCNMKCSFCDTLHEDGIMMSDEEIISEVVKYPASMVVLTGGEPGLWIDESLVDALHNEGKYVCVETNGTCVLPGNVDWVTCSPKEGGEVRLNHIDEVKIVYVGQDVSVYLDLPARYYFIQPCSCSNTEAVIAYILKYPKWRLSLQTHKLLQIP

SEQ ID NO: 28316 - protein, 181 aa, Bacteroides nordii
  misc_feature (1)..(181): tr|A0A413VQP0|A0A413VQP0_9BACE 7-carboxy-7-deazaguanine synthase OS=Bacteroides nordii OX=291645 GN=queE PE=3 SV=1
MRKINEIFYSLQGEGYHTGTPAVFVRFSGCNLKCSFCDTRHEEGTMMTDEEIIAEVKKYPAVMVILTGGEPSLWIDDNFIDLLHQAGKYVCIETNGTRPLPASIDWITCSPKQGVKLSLNKIDEVKVVYEGQNIDVYELLPAEHFFLQPCSCSNTALTVDCVMRHPKWRLSLQTHKLIDIQ

SEQ ID NO: 28317 - protein, 181 aa, Bacteroides nordii; identical to SEQ ID NO: 28316
  misc_feature (1)..(181): tr|I9GXT0|I9GXT0_9BACE 7-carboxy-7-deazaguanine synthas e OS=Bacteroides nordii CL02T12C05 OX=997884 GN=queE PE =3 SV=1

SEQ ID NO: 28318 - protein, 181 aa, Bacteroides oleiciplenus
  misc_feature (1)..(181): tr|A0A3E5BKF3|A0A3E5BKF3_9BACE 7-carboxy-7-deazaguanine synthase OS=Bacteroides oleiciplenus OX=626931 GN=queE PE=3 SV=1
MRKINEIFYSLQGEGYHTGTPAVFIRFSGCNLKCSFCDTQHEEGTLMTDEDIIAEVQKYPAATVILTGGEPSIWIDEEFIDRLHQAGKYVCIETNGTRPLPENIDWVTCSPKQGVKLGITRMDEVKVVYEGQDIEVYELLPAEHFFLQPCSCANIAEAVACVMQHPKWRLSLQTHKLIDIR

SEQ ID NO: 28319 - protein, 181 aa, Bacteroides oleiciplenus; identical to SEQ ID NO: 28318
  misc_feature (1)..(181): tr|K9E6R3|K9E6R3_9BACE 7-carboxy-7-deazaguanine synthas e OS=Bacteroides oleiciplenus YIT 12058 OX=742727 GN=qu eE PE=3 SV=1

SEQ ID NO: 28320 - protein, 183 aa, Bacteroides ovatus
  misc_feature (1)..(183): tr|A7M567|A7M567_BACO1 7-carboxy-7-deazaguanine synthas e OS=Bacteroides ovatus (strain ATCC 8483 / DSM 1896 / JCM 5824 / NCTC 11153) OX=411476 GN=queE PE=3 SV=1
MTMRKINEIFYSLQGEGYHTGTPAIFVRFSGCNLKCDFCDTQHEEGTMMTDEEIITKVKKYPAVTVVLTGGEPSLWIDDQLIDLLHQAGKYVTIETNGTHPLPASIDWVTCSPKQGAKLAIDRMNEVKVVYEGQDISIFELLPAEHFFLQPCSCNNTALTVDCVMRHPKWRLSLQTHKLIDIR

SEQ ID NO: 28321 - protein, 181 aa, Bacteroides ovatus
  misc_feature (1)..(181): tr|A0A515IZV1|A0A515IZV1_BACOV 7-carboxy-7-deazaguanine synthase OS=Bacteroides ovatus OX=28116 GN=queE PE=3 S V=1
MRKINEIFYSLQGEGYHTGTPAIFVRFSGCNLKCDFCDTQHEEGKMMTDDEIIAEVKKYPAVTVVLTGGEPSLWIDDELIDRLHEAGKYVTIETNGTRPLPAAIDWVTCSPKQGAKLAIDRMDEVKVVYEGQDISIFELLPAEHFFLQPCSCNNTASTVDCVMRHPKWRLSLQTHKLIDIR

SEQ ID NO: 28322 - protein, 181 aa, Bacteroides plebeius
  misc_feature (1)..(181): tr|A0A3E4N4X0|A0A3E4N4X0_9BACE 7-carboxy-7-deazaguanine synthase OS=Bacteroides plebeius OX=310297 GN=queE PE= 3 SV=1
MKKINEIFYSLQGEGFHVGTPAVFVRFSGCNLKCEFCDTRHKEGVMMSDEEILEQVCQYPCKTVILTGGEPGLWVDEDLVAALHKAGKYVCIETNGTCVLPESIDWVTCSPKLGASLRVRRMDEVKVVFLGQDVSPYLQLKASSYFLQPCSCRNTAEVIEYIKSHPQWRLSLQIHKLIDIP

SEQ ID NO: 28323 - protein, 181 aa, Bacteroides plebeius
  misc_feature (1)..(181): tr|A0A414FQ56|A0A414FQ56_9BACE 7-carboxy-7-deazaguanine synthase OS=Bacteroides plebeius OX=310297 GN=queE PE= 3 SV=1
MKKINEIFYSLQGEGFHVGTPAVFVRFSGCNLKCEFCDTRHEEGVMMSDEEIVEKVCQYPCKTVILTGGEPGLWVDEDLIAALHKAGKFICIETNGTCVLPESIDWVTCSPKLGAPLRVNRIDEVKVVFLGQDVSPYLELKASFYFLQPCSCRNTAEVVEYIKSHPQWRLSLQTHKLIDIP

SEQ ID NO: 28324 - protein, 181 aa, Bacteroides salanitronis
  misc_feature (1)..(181): tr|F0R8U1|F0R8U1_BACSH 7-carboxy-7-deazaguanine synthas e OS=Bacteroides salanitronis (strain DSM 18170 / JCM 1 3567 / BL78) OX=667015 GN=queE PE=3 SV=1
MRKINEIFYSLQGEGAHAGTPAVFVRFSGCNLKCIFCDTSHESGTEMGDEEIIEEVCKYPCRMVIMTGGEPGLWIDDALVDLLHKAGKYVAVETNGTQVLPEAVDWVTCSPKEGTVLRVRHIDEVKVVYIGQDVSPYLLIEAKEHFLQPCSCQNTEEVIEYIKKHPQWRLSLQTHKLINIP

SEQ ID NO: 28325 - protein, 181 aa, Bacteroides salyersiae
  misc_feature (1)..(181): tr|I9TNA3|I9TNA3_9BACE 7-carboxy-7-deazaguanine synthas e OS=Bacteroides salyersiae CL02T12C01 OX=997887 GN=que E PE=3 SV=1
MRKINEIFYSLQGEGYHTGTPAVFVRFSGCNLKCGFCDTRHEEGVMMTDEEIIAEVKKYPAVMVILTGGEPSLWIDDHLIGLLHQAGKYVCIETNGTRPLPAAIDWITCSPKQGVKLGLNRMDEVKVVYEGQNIDVYELLPAEHFFLQPCSCNNTAATVDCVMRHPKWRLSLQTHKLINIL

SEQ ID NO: 28326 - protein, 181 aa, Bacteroides salyersiae
  misc_feature (1)..(181): tr|A0A4Q5FHN0|A0A4Q5FHN0_9BACE 7-carboxy-7-deazaguanine synthase OS=Bacteroides salyersiae OX=291644 GN=queE P E=3 SV=1
MRKINEIFYSLQGEGYHTGTPAVFVRFSGCNLKCGFCDTRHEEGVMMTDEEIIAEVKKYPAVMVILTGGEPSLWIDDHLIGLLHQAGKYVCIETNGTRPLPAAIDWITCSPKQGVKLGLDRMDEVKVVYEGQNIDVYELLPAEHFFLQPCSCNNTAATVDCVMRHPKWRLSLQTHKLINIL

SEQ ID NO: 28327 - protein, 181 aa, Bacteroides sartorii
  misc_feature (1)..(181): tr|R9HXW8|R9HXW8_9BACE 7-carboxy-7-deazaguanine synthas e OS=Bacteroides sartorii OX=671267 GN=queE PE=3 SV=1
MRKINEIFYSLQGEGYHTGMPAVFVRFSGCNLKCSFCDTRHEEGTWMSDEDIVREVIKYPARVVILTGGEPGLWIDERLVDALHQEGKYVCIETNGTCLLPENIDWVTCSPKEGAELKLDRMDEVKVVYVGQDVSPYLDLPAGHYFLQPCSCSNTGEVIAYILQHPEWRLSLQTHKLLQIP

SEQ ID NO: 28328 - protein, 181 aa, Bacteroides sp.
  misc_feature (1)..(181): tr|A0A285T9S2|A0A285T9S2_9BACE 7-carboxy-7-deazaguanine synthase OS=Bacteroides sp. AR29 OX=93975 GN=queE PE=3 SV=1
MRKINEIFYSLQGEGYHTGTPAVFIRFSGCNLKCPFCDTQHEDGILMSDEDIVTEVSRYPAATVILTGGEPSLWIDREFVDCLHQAGKYVCIETNGTRPLPDNIDWVTCSPKQGVKLEITRMNEVKVVYEGQDITVYEQLPAGHFFLQPCSCSNTAETVDCVMKHPKWRLSLQTHKLIDIR

SEQ ID NO: 28329 - protein, 183 aa, Bacteroides sp.
  misc_feature (1)..(183): tr|D7K6Y0|D7K6Y0_9BACE 7-carboxy-7-deazaguanine synthas e OS=Bacteroides sp. 3_1_23 OX=457390 GN=queE PE=3 SV=1
MMMRKINEIFYSLQGEGYHTGTPAIFVRFSGCNLKCDFCDTQHEEGKMMTDDEIIAEVKKYPAVTVVLTGGEPSLWVDDELIDRLHQAGKYVTIETNGTRPLPVAIDWVTCSPKQGVKLAIDRMDEVKVVYEGQDISIFELLPAEHFFLQPCSCNNTASTVDCVMRHPKWRLSLQTHKLIDIR

SEQ ID NO: 28330 - protein, 181 aa, Bacteroides stercorirosoris
  misc_feature (1)..(181): tr|A0A1M6IVS7|A0A1M6IVS7_9BACE 7-carboxy-7-deazaguanine synthase OS=Bacteroides stercorirosoris OX=871324 GN=q ueE PE=3 SV=1
MRKINEIFYSLQGEGYHTGTPAVFVRFSGCNLKCSFCDTQHEEGTFMSDEEIVAEIRKYPAVTVILTGGEPSLWIDEAFIDCLHQAGKYVCIETNGTRSLPENIDWVTCSPKQGVKLGITRIDEVKVVYEGQDIGVYELLPAEHFFLQPCSCANTAETVACVMQHPKWRLSLQTHKLIDIR

SEQ ID NO: 28331 - protein, 181 aa, Bacteroides stercoris
  misc_feature (1)..(181): tr|A0A413E5W8|A0A413E5W8_BACSE 7-carboxy-7-deazaguanine synthase OS=Bacteroides stercoris OX=46506 GN=queE PE= 3 SV=1
MRKINEIFYSLQGEGFHTGTPAVFVRFSGCNLKCSFCDTQHEEGVLMSDEEILAEVGKYPAVTVILTGGEPSLWIDREFVDCLHRMGKYVCIETNGTHPLPDNIDWVTCSPKQGAKLCISRMDEVKVVYEGQDIAVYESLPAGHFFLQPCSCSNTAETVACVMQHPKWRLSLQTHKLIEIK

SEQ ID NO: 28332 - protein, 181 aa, Bacteroides stercoris
  misc_feature (1)..(181): tr|A0A413UXE7|A0A413UXE7_BACSE 7-carboxy-7-deazaguanine synthase OS=Bacteroides stercoris OX=46506 GN=queE PE= 3 SV=1
MRKINEIFYSLQGEGFHTGTPAVFVRFSGCNLKCSFCDTQHEEGVLMSDEEILAEVGKYPAVTVILTGGEPSLWIDREFVDCLHRMGKYVCIETNGTHFLPDNIDWVTCSPKQGAKLCISRMDEVKVVYEGQDIAVYESLPAGHFFLQPCSCSNTAETVACVMQHPKWRLSLQTHKLIEIK

SEQ ID NO: 28333 - protein, 182 aa, Bacteroides thetaiotaomicron
  misc_feature (1)..(182): sp|Q89ZC3|QUEE_BACTN 7-carboxy-7-deazaguanine synthase OS=Bacteroides thetaiotaomicron (strain ATCC 29148 / DS M 2079 / NCTC 10582 / E50 / VPI-5482) OX=226186 GN=queE PE=3 SV=1
MMRKINEIFYSLQGEGYHTGTPAVFIRFSGCNLKCSFCDTQHEAGTLMTDDEIIAEVSKYPAVTVILTGGEPSLWIDDALIDRLHEAGKYVCIETNGTRPLPESIDWVTCSPKQGVKLGITRMDEVKVVYEGQDISIYELLPAEHFFLQPCSCNNTALTVDCVMRHPKWRLSLQTHKLIDIR

SEQ ID NO: 28334 - protein, 182 aa, Bacteroides thetaiotaomicron
  misc_feature (1)..(182): tr|R9HGS5|R9HGS5_BACT4 7-carboxy-7-deazaguanine synthas e OS=Bacteroides thetaiotaomicron dnLKV9 OX=1235785 GN= queE PE=3 SV=1
MMRKINEIFYSLQGEGYHTGTPAVFIRFSGCNLKCSFCDTQHEAGTLMTDDEIIAEVSKYPAVTVILTGGEPSLWIDDALIDRLHEAGKYVCIETNGTRPLPESVDWVTCSPKQGVKLGITRMDEVKVVYEGQDISIYELLPAEHFFLQPCSCNNTALTVDCVMRHPKWRLSLQTHKLIDIR

SEQ ID NO: 28335 - protein, 181 aa, Bacteroides uniformis
  misc_feature (1)..(181): tr|A0A174SRK5|A0A174SRK5_BACUN 7-carboxy-7-deazaguanine synthase OS=Bacteroides uniformis OX=820 GN=queE_2 PE= 3 SV=1
MRKINEIFYSLQGEGYHTGTPAVFIRFSGCNLKCPFCDTQHEDGILMSDEDIVTEVSKYPAATVILTGGEPSLWIDREFVDCLHQAGKYVCIETNGTRPLPDNIDWVTCSPKQGVKLEITRMNEVKVVYEGQDITVYEQLPAGHFFLQPCSCSNTAETVDCVMKHPKWRLSLQTHKLIDIR

SEQ ID NO: 28336 - protein, 181 aa, Bacteroides uniformis
  misc_feature (1)..(181): tr|A0A174KEX1|A0A174KEX1_BACUN 7-carboxy-7-deazaguanine synthase OS=Bacteroides uniformis OX=820 GN=queE PE=3 SV=1
MRKINEIFYSLQGEGYHTGTPAVFIRFSGCNLKCPFCDTQHEDGILMSDEDIVTEVSKYPAATVILTGGEPSLWIDREFVDCLHQAGKYVCIETNGTRLLPDNIDWVTCSPKQGVKLEITRMNEVKVVYEGQDITVYEQLPAGHFFLQPCSCSNTAETVDCVMKHPKWRLSLQTHKLIDIR

SEQ ID NO: 28337 - protein, 193 aa, Bacteroides vulgatus
  misc_feature (1)..(193): tr|D4V3T8|D4V3T8_BACVU 7-carboxy-7-deazaguanine synthas e OS=Bacteroides vulgatus PC510 OX=702446 GN=queE PE=3 SV=1
MKFASQKEIPLSMRRINEIFYSLQGEGYHTGIPAVFVRFSGCNLRCPFCDTQHEEGTLMSDEDIVMEVAKYSTQVVILTGGEPGLWIDEKLVDALHHEGKYVCIETNGTCLLPENIDWVTCSPKEGAKINLDRIDEVKVVYVGQDVSAYLDLSASHYFLQPCSCANTEEVIAYILQHPEWRLSLQTHKLLQIP

SEQ ID NO: 28338 - protein, 181 aa, Bacteroides vulgatus
  misc_feature (1)..(181): tr|A0A174TG35|A0A174TG35_BACVU 7-carboxy-7-deazaguanine synthase OS=Bacteroides vulgatus OX=821 GN=queE PE=3 S V=1
MRRINEIFYSLQGEGYHTGIPAVFVRFSGCNLRCPFCDTQHEEGTLMSDEDIVMEVAKYSTQIVILTGGEPGLWIDEKLVDALHHEGKYVCIETNGTCLLPENIDWVTCSPKEGAKINLDRIDEVKVVYVGQDVSAYLDLSASHYFLQPCSCANTEEVIAYILQHPEWRLSLQTHKLLQIP

SEQ ID NO: 28339 - protein, 182 aa, Bacteroides xylanisolvens
  misc_feature (1)..(182): tr|D4VIV1|D4VIV1_9BACE 7-carboxy-7-deazaguanine synthas e OS=Bacteroides xylanisolvens SD CC 1b OX=702447 GN=qu eE PE=3 SV=1
MMRKINEIFYSLQGEGYHTGTPAIFVRFSGCNLKCDFCDTQHEEGKMMTDDEIIAEVKKYPAVTVVLTGGEPSLWIDDELIDRLHQAGKYVTIETNGTRPLPAAIDWVTCSPKQGVKLAIDRMDEVKVVYEGQDISIFELLPAEHFFLQPCSCNNTASTVDCVMRHPKWRLSLQTHKLIDIR

SEQ ID NO: 28340 - protein, 181 aa, Bacteroides xylanisolvens
  misc_feature (1)..(181): tr|I9AL90|I9AL90_9BACE 7-carboxy-7-deazaguanine synthas e OS=Bacteroides xylanisolvens CL03T12C04 OX=997892 GN= queE PE=3 SV=1
MRKINEIFYSLQGEGYHTGTPAIFVRFSGCNLKCDFCDTQHEEGKMMTDDEIIAEVKKYPAVTVVLTGGEPSLWIDDELIDRLHQAGKYVTIETNGTRPLPAAIDWVTCSPKQGAKLAIDRMDEVKVVYEGQDISIFELLPAEHFFLQPCSCNNTASTVDCVMRHPKWRLSLQTHKLIDIR

SEQ ID NO: 28341 - protein, 222 aa, Bacteroides xylanolyticus
  misc_feature (1)..(222): tr|A0A2S6HNC9|A0A2S6HNC9_9BACE 7-carboxy-7-deazaguanine synthase OS=Bacteroides xylanolyticus OX=384636 GN=que E PE=3 SV=1
MADYNVAETFVSINGEGAYAGQLAVFIRFYGCNLSCSYCDTAWAKEAMTPGKIMSELDIYEYIKETGIKNVTLTGGEPLIQPGIGDLLSLLLLDEKLRVEVETNGSTDLSTCQRETNALTFTMDYKLPGSEMETAMKLSNFNYLKQKDTVKFVAGSITDLRRAVEVIDRYQLSGRCHLYFSTVFGSLSLTDVVEFMKQNRLNDVTLQLQMHKIIWGSDAVGV

SEQ ID NO: 28342 - protein, 225 aa, Bacteroidetes bacterium
  misc_feature (1)..(225): tr|A0A351ZVS6|A0A351ZVS6_9BACT 7-carboxy-7-deazaguanine synthase OS=Bacteroidetes bacterium OX=1898104 GN=queE PE=3 SV=1
MSSSPLNSDHLNVNEIFTSVQGEGTRAGMPCLFIRLQGCRLRCVWCDTPYALDHRQQERLMTPEDVYAEVEKAGIRFVEFTGGEPLEQPAVLPVMQQLCDRGYTVAVETGGHVDVSSVDPRVICIVDVKCPDSKMSSLNRLENLDALRPHDEVKFVIASRADYEYAREVVQRYDLERRVAAVLMSCVFDALAFVTLVEWILEDKLDVRFQLQMHKFIWSPQTRGV

SEQ ID NO: 28343 - protein, 207 aa, Bacteroidetes bacterium
  misc_feature (1)..(207): tr|A0A2N2W881|A0A2N2W881_9BACT 7-carboxy-7-deazaguanine synthase OS=Bacteroidetes bacterium HGW-Bacteroidetes- 8 OX=2013698 GN=queE PE=3 SV=1
MRIPELNNGDLLPLAESFYTIQGEGYNTGKAAFFIRLGGCDVGCSWCDAKETWNPALYPPTPIENIVNEAVKYKAKSIVITGGEPLTYPLDKLCKLLKKERMQIFLETSGSYPLSGIFDWICLSPKKRKPPVGDIHQIASELKVIIEKEEDLIWAEENRAKAAKSTLLYLQPEWSRRAEMVPLIVEYVKNNPAWSISLQTHKYMNIP

SEQ ID NO: 28344 - protein, 226 aa, Bacteroidetes sp.
  misc_feature (1)..(226): tr|A0A3N0ZJU5|A0A3N0ZJU5_9BACT 7-carboxy-7-deazaguanine synthase OS=Bacteroidetes/Chlorobi group bacterium MS- B_bin-24 OX=2382228 GN=queE PE=3 SV=1
MGAYETLMKLKFNVSEVFTSIQGEGSRAGFPSVFIRLQGCELRCKWCDTPYALDLKERATMLSGEDLLNKIYSSGIKFVTITGGEPLNQKAILPFMSFLCDKDYTVVLETNGHLDIAEVDRRVVKVMDLKCPGSGMEKFNNYRNLEALEQKDEIKFVILDRNDYEWAKAKIKEYDLNKKVGTILFSPVWGKLEPKYLSEWILKDALPVRLNLQIHKYIWGPETRGV

SEQ ID NO: 28345 - protein, 226 aa, Bacteroidetes sp.
  misc_feature (1)..(226): tr|A0A3N0ZBG6|A0A3N0ZBG6_9BACT 7-carboxy-7-deazaguanine synthase OS=Bacteroidetes/Chlorobi group bacterium Nak a2016 OX=2382229 GN=queE PE=3 SV=1
MGIFETILKFKYNVSEVFASVQGEGTRAGKPCFFIRLQGCELRCKWCDTPYALDLKERATILSGEDLLNKLYSSGIKFVTITGGEPLNQKAIIPLMTFLCDKEYEVLLETNGHLDISEVDKRVIKVMDLKCPGSGMEKFNNYKNIEYLDQKDEIKFVIKDKKDYEWAKEKIREYELGKRVGAILFSPVWGDLEPKYLAEWILQDNLKVRLNLQIHKYIWGPNVRGV

SEQ ID NO: 28346 - protein, 193 aa, Bacteroidia bacterium
  misc_feature (1)..(193): tr|A0A1M3FF70|A0A1M3FF70_9BACT 7-carboxy-7-deazaguanine synthase OS=Bacteroidia bacterium 44-10 OX=1895721 GN= queE PE=3 SV=1
MNLNVNEIFYSLQGEGGRSGQPSIFIRLAKCNLTCSFCDTDFERGVKMTTDEVLREIEPYRCKWIIWTGGEPTLQLNDAIVSLFKGKGYLQAIETNGTRRVPRGIDYITCSPKQHFEKVRELIPEVDELRFPIQKGDPVPDATILPKAKHYFLSPIFDNQQIIPENINYCVSLVKENPMWALSLQIHKLIGIR

SEQ ID NO: 28347 - protein, 193 aa, Bacteroidia bacterium
  misc_feature (1)..(193): tr|A0A1Q3QCL9|A0A1Q3QCL9_9BACT 7-carboxy-7-deazaguanine synthase OS=Bacteroidia bacterium 43-41 OX=1895720 GN= queE PE=3 SV=1
MSLTVNEIFYSLQGEGGRTGEASIFIRLSKCNLACSFCDTDFEFGKKMTLDEIFGEISQYPCRWIIWTGGEPTLQLKDEDVAFFKEKGYRQAIETNGTRRVPAGIDYITCSPKQQFGKIRTLIPEVDELRFPIATGDPLPDISILPKTKRYLLSPVFDNMNVVQDNVDYCVELIKKNPQWVLSLQVHKLIGIR

SEQ ID NO: 28348 - protein, 233 aa, Baia soyae
  misc_feature (1)..(233): tr|A0A4R2RTE4|A0A4R2RTE4_9BACL 7-carboxy-7-deazaguanine synthase OS=Baia soyae OX=1544746 GN=queE PE=3 SV=1
MDRDEIRLPMVEIFSTVEGEGAAAGFPTTFIRLFHCNLRCVWCDTPYSYAPAKPVFEATIAEIVQEVRKYPNEYICLTGGEPLIHGEKSRQLISALAEIDYIKDIHIETNGAIDLQPFQDLRETNPFVKAKTRFVLDFKLPTSGELDKMIHSNFALLEKQDEIKFVIGNDVDFEVAKEMVEKKVDQGTPLFSPVFETMQPAQLVEKMLEHKLSSVKLSLQTHKFIWHPEKRGV

SEQ ID NO: 28349 - protein, 234 aa, Baia soyae
  misc_feature (1)..(234): tr|A0A4R2SBG4|A0A4R2SBG4_9BACL 7-carboxy-7-deazaguanine synthase OS=Baia soyae OX=1544746 GN=queE PE=3 SV=1
MQAVYESTKLPMVEVFQTVEGEGMRAGFPTVFVRVFNCNLRCTWCDTPYSYAPSTPEYLATISEILTQVKQYPAKHICLTGGEPLMHGQKSLLLLQALAELDHIVDVHIETNGAIDLTPFQEWRQIHPQGHKVRFVMDYKLPASGESEKMNLLNFDLLQADDEIKFVIGNEVDFHSALIIAKQYVKQGIPMFSPVWESMPPHRLVELMLEHQLTDIKLNLQIHKVIWDPNQRGV

SEQ ID NO: 28350 - protein, 219 aa, Balnearium lithotrophicum
  misc_feature (1)..(219): tr|A0A521BYP3|A0A521BYP3_9BACT 7-carboxy-7-deazaguanine synthase OS=Balnearium lithotrophicum OX=223788 GN=que E PE=3 SV=1
MIRVCEIFESIQGEGLTLGAPSIFIRTGKCSVGCKFCDTKYSWDSGRDYTLNEISKIVQESRIPEVVITGGEPLEEEDLPELLKELSSFSQVRRITLETCGHMFRELPKEKLHLVVSPKPPTMGVKFPLSELQMFLKFYTDLELKFTLFSEEDFSVIKDFLNKSKKVPEPIVLQPLNVPTENYSETCKRVISLIFSNRDFINRYRIRIIPQVHKFIGVK

SEQ ID NO: 28351 - protein, 60 aa, Balneola sp.
  misc_feature (1)..(60): tr|A0A350PLI9|A0A350PLI9_9BACT 7-carboxy-7-deazaguanine synthase QueE (Fragment) OS=Balneola sp. OX=2024824 GN =DCX27_22100 PE=4 SV=1
MIKQPVALMNDEKEILDVEYPIVEHFYTIQGEGAHSGRASYFIRTAGCDVNCWWCDVKES

SEQ ID NO: 28352 - protein, 192 aa, Balneola sp.
  misc_feature (1)..(192): tr|A0A3M8G7D7|A0A3M8G7D7_9BACT 7-carboxy-7-deazaguanine synthase OS=Balneola sp. OX=2024824 GN=queE PE=3 SV=1
MEHFYTIQGEGIHTGKAAYFIRTGGCDVECWWCDVKDSWDESIHPRVSVKELVGHVKESGAPMVVITGGEPLLHKLGALTSAIKELGVATHIETSGSSPISGYFDWITLSPKRFKKPLDDIFPYVDELKVVVLTKKDLAWAEENAAKCPENTKLLLQPEWDTPASIPLIVEYVKEHPKWGISLQTHKFLQVP

SEQ ID NO: 28353 - protein, 37 aa, Balneolaceae bacterium
  misc_feature (1)..(37): tr|A0A356X4T4|A0A356X4T4_9BACT 7-carboxy-7-deazaguanine synthase QueE (Fragment) OS=Balneolaceae bacterium OX= 2053516 GN=DD671_15405 PE=4 SV=1
MEHFYTIQGEGAHTGRSSYFIRTAGCDVNCWWCDVKD

SEQ ID NO: 28354 - protein, 193 aa, Barnesiella intestinihominis
  misc_feature (1)..(193): tr|K0WWZ8|K0WWZ8_9BACT 7-carboxy-7-deazaguanine synthas e OS=Barnesiella intestinihominis YIT 11860 OX=742726 G N=queE PE=3 SV=1
MKVNEIFYSLQGEGVFTGTAAIFVRLAGCNLHCDFCDTKHEDYTIFTEEEIVKAISDYPAKHVVITGGEPTLQLTHSLVDRLHEVGKFVQIETNGSIALDTDLERSINWITCSPKTIPVKIQRMNEIKVVYQGQDMEPYEKIATAYECFCSLQPCDVNDEIKNENNLTAAIGYIKSHPRWRLSLQTHKIINIR

SEQ ID NO: 28355 - protein, 196 aa, Barnesiella sp.
  misc_feature (1)..(196): tr|A0A4Y9J2C9|A0A4Y9J2C9_9BACT 7-carboxy-7-deazaguanine synthase OS=Barnesiella sp. WM24 OX=2558278 GN=queE PE =3 SV=1
MAETYRINEIFYSIQGEGIHAGVPAVFVRFSGCNLKCPFCDTDHSSFLEMSRDEIVSEVKRHKGVIVVLTGGEPGLFIDARLVSELKDTGKKVCIETNGTCALPDNIDFVTMSPKDAFCSNAMPVLRRCDELKIVYSGDNNPADYDYIEATFRVLQPCDTGDSLKNEKLTAAAFEYCLDHPQWRLGLQMHKLLNVR

SEQ ID NO: 28356 - protein, 193 aa, Barnesiella sp.
  misc_feature (1)..(193): tr|A0A1Y4GZT5|A0A1Y4GZT5_9BACT 7-carboxy-7-deazaguanine synthase OS=Barnesiella sp. An22 OX=1965590 GN=queE PE =3 SV=1
MRVNEIFYSLQGEGRFTGTAAIFIRLSGCNLRCSFCDTRHDDYTLYTENDIVAAIASYPARHVVITGGEPTLQLTRLLVDKLHEAGKFVQIETNGSIALEPDVVAAIDWITCSPKALPVKIGRVDELKVVYEGQDMAPYEAMACSYGACRSLQPCDTGDADRNASLLDGAVAYIKEHPEWRLSLQTHKLIHIP

SEQ ID NO: 28357 - protein, 193 aa, Barnesiella viscericola
  misc_feature (1)..(193): tr|W0ELD4|W0ELD4_9BACT 7-carboxy-7-deazaguanine synthas e OS=Barnesiella viscericola DSM 18177 OX=880074 GN=que E PE=3 SV=1
MRVNEIFYTLQGEGRFTGTAAIFVRLSGCNLRCSFCDTRHDTYTEMSEAEIVRAIAAYPARHVVITGGEPTLQLTRSLVDALHEAGKFVQIETNGSMELEAQLVQAIDWITCSPKSLPVKIGRVDELKVVYEGQDLVPYEAMARSYGAVLELQPCDTGDPVKNTRLLGAAIDYIKAHPEWHLSLQTHKLIHIP

SEQ ID NO: 28358 - protein, 215 aa, Basilea psittacipulmonis
  misc_feature (1)..(215): tr|A0A077DJQ1|A0A077DJQ1_9BURK 7-carboxy-7-deazaguanine synthase OS=Basilea psittacipulmonis DSM 24701 OX=1072 685 GN=queE PE=3 SV=1
MVINVHAESAVSHQYRIVEIFESLQGEGYFTGTSCIFLRFGKCNLRCSWCDTNYEAFQIYCTEDILQRISIYQSRTIIITGGEPTIQPYISDLLQILKARGYRLHIETNGLKPVPKEIDYIAVSPKALYAKRYQKSCITQADEVRIVVDQVDILPFCKWVEHRIKAEHYYLSPCEVNGQMNIYETIRQIGLLNARGSDYPHWQLSIQTHKLAGIE

SEQ ID NO: 28359 - protein, 212 aa, Bathymodiolus azoricus
  misc_feature (1)..(212): tr|A0A1H6JMS4|A0A1H6JMS4_9GAMM 7-carboxy-7-deazaguanine synthase OS=Bathymodiolus azoricus thioautotrophic gil l symbiont OX=235205 GN=queE PE=3 SV=1
MNTELNINEIFYSLQGEAREVGLPTVFVRLTGCPLRCSYCDTEYAFKGNNPLSIDTILTEVKKYNTKFVCVTGGEPLAQINCYVLLDRLVKENYQVSLETSGSIDIADINPDVSIVMDIKTPSSNESDKNLYDNIEKLETKDQLKLVIGSKADFDWSVKLLSKYPTQAEVLFSSVFDAIEPAQLAQWILDGQLNVRLQVQLHKLLWGDEKGK

SEQ ID NO: 28360 - protein, 213 aa, Bathymodiolus brooksi
  misc_feature (1)..(213): tr|A0A482YV12|A0A482YV12_9BACT 7-carboxy-7-deazaguanine synthase OS=Bathymodiolus brooksi thiotrophic gill sym biont OX=1052209 GN=queE PE=3 SV=1
MENTKLNINEIFYSLQGEAREVGLPTVFIRLTGCPLRCVYCDTEYAFKGNNLLSIDDIITKIKPYQTKLICVTGGEPLAQINCHILLDRLVKENYQISLETSGSIDITQVNPSVSIVMDVKTPDSGEADKNRYENIEKLQTKDQLKFVISSKSDFDWSVNILNKYPSLAGVLFSPTFDLITPTQLANWILEQQLNVRLQLQLHKILWGDQQGK

SEQ ID NO: 28361 - protein, 209 aa, Bathymodiolus heckerae
  misc_feature (1)..(209): tr|A0A483A982|A0A483A982_9BACT 7-carboxy-7-deazaguanine synthase OS=Bathymodiolus heckerae thiotrophic gill sy mbiont OX=1052212 GN=queE PE=3 SV=1
MLNINEIFYSLQGEAREVGLPTVFIRLTGCPLRCSYCDTEYAFKGNNLLSIESILNEIKKYNTQYVCVTGGEPLAQIDCHILLDRLIKDKYQVSLETSGSIDIMGVNPGVSIVMDIKTPDSGEADKNRYANIEKLQTKDQLKFVIGSKSDFDWSVGILNKYPTQASVLLSPVFDKIEPVQLADWILDKQLNVRLQVQLHKLLWGDQQGK

SEQ ID NO: 28362 - protein, 212 aa, Bathymodiolus heckerae
  misc_feature (1)..(212): tr|A0A482YUD1|A0A482YUD1_9BACT 7-carboxy-7-deazaguanine synthase OS=Bathymodiolus heckerae thiotrophic gill sy mbiont OX=1052212 GN=queE PE=3 SV=1
MTTDLNIIEIFYSLQGEAREVGLPTTFIRLTGCPLRCSYCDTEYAFKGNNLVSINEIIGEIKQYNTRYICVTGGEPLAQINCHILLDTLVKNNYLVSLETSGSIDISEINPGVSIVMDVKTPSSNESSQNLYSNIEKLQEKDQLKFVIGSRTDFDWSVDILGEYSTDAGVLFSPVFDQITPTQLADWIIEAQLNVRMQVQMHKLLWGDEKGR

SEQ ID NO: 28363 - protein, 215 aa, Bathymodiolus platifrons
  misc_feature (1)..(215): tr|A0A1Z5H8A1|A0A1Z5H8A1_9GAMM 7-carboxy-7-deazaguanine synthase OS=Bathymodiolus platifrons methanotrophic gi ll symbiont OX=113268 GN=queE PE=3 SV=1
MKSDNLRISEIFYSLQGESRTVGLPTIFIRLTGCPLRCQYCDTSYAFSGGETRSIADILEQLSQYKTHYITVTGGEPLAQPACLELLRQLADKDYCVSLETSGAIDISSVDARVVKVMDLKTPASAEEQRNLYSNLQYLTVTDQLKFVICNAEDYAWSKAKIAEYQLERQCEILFSPSMGEQDPAELAEWILRDQLAVRFQLQLHKILWGNIAGK

SEQ ID NO: 28364 - protein, 213 aa, Bathymodiolus thermophilus
  misc_feature (1)..(213): tr|A0A3G3IME9|A0A3G3IME9_9GAMM 7-carboxy-7-deazaguanine synthase OS=Bathymodiolus thermophilus thioautotrophic gill symbiont OX=2360 GN=queE PE=3 SV=1
MNNSELNINEIFYSLQGEAREVGLPTVFVRLTGCPLRCTYCDTEYAFKGNNLLRIDDIIAKIKSYQTKLVCVTGGEPLAQINCHILLDRLVKENYQISLETSGSIDITEVNPRVSIVMDVKTPDSGEADKNRYKNIEKLQAKDQLKFVIGSKSDFDWSVNILNKYPTPAGVLFSPTFGIVTPTQLADWILERQLNVRLQLQLHKILWGDQQGK

SEQ ID NO: 28365 - protein, 213 aa, Bathymodiolus thermophilus
  misc_feature (1)..(213): tr|A0A1J5TWR0|A0A1J5TWR0_9GAMM 7-carboxy-7-deazaguanine synthase OS=Bathymodiolus thermophilus thioautotrophic gill symbiont OX=2360 GN=queE PE=3 SV=1
MNNSELNINEIFYSLQGEAREVGLPTVFVRLTGCPLRCTYCDTEYAFKGNNLLRIDDIIAKIKSYQTKLVCVTGGEPLAQINCHILLDRLVKENYQISLETSGSIDIKEVNPRVSIVMDVKTPDSGEADKNRYKNIEKLQAKDQLKFVIGSKSDFDWSVNILNKYPTPAGVLFSPTFGIVAPTQLADWILERQLNVRLQLQLHKILWGDQQGK

SEQ ID NO: 28366 - protein, 223 aa, Baumannia cicadellinicola
  misc_feature (1)..(223): tr|Q1LTN9|Q1LTN9_BAUCH 7-carboxy-7-deazaguanine synthas e OS=Baumannia cicadellinicola subsp. Homalodisca coagu lata OX=374463 GN=queE PE=3 SV=1
MQYPINSICQTLQGEGYFSGIPAIFIRLQGCMVGCNWCDTKYTWHKNKIEQGIAKDIMLKKANSSVWSNLSEEDILALIVQQSWIAKHVVITGGEPCMYDLLPLTYLLEQYKFSCQIETSGTQSIKCTSNTWVTVSPKINKHYDVQILAQALSRSNEIKHVVSRQRDIKYLDELLLTLKDSKQRVICLQPLSQKKLATKLCIDTCIMRNWRLSMQIHKYLNIA

SEQ ID NO: 28367 - protein, 212 aa, Bdellovibrio bacteriovorus
  misc_feature (1)..(212): tr|Q6MRN5|Q6MRN5_BDEBA 7-carboxy-7-deazaguanine synthas e OS=Bdellovibrio bacteriovorus (strain ATCC 15356 / DS M 50701 / NCIB 9529 / HD100) OX=264462 GN=queE PE=3 SV= 1
MLKINEIFYSIQGETTYVGCPTVFVRLTACNLRCTYCDTKYSYYEGEMQTLEAIIAEIDSHKAPNVCITGGEPLLQKEVHTLMKTLCDKGYLVSLETSGSKSVEMVDPRVKIILDVKTPDSGAADSFVMENIGFSTPSTEYKFVICSEKDFEWSEEFCRQHNLFEKFVVLYSPSYGQVSERWLAEKILQKNSSARLQLQLHKYIWNPETRGV

SEQ ID NO: 28368 - protein, 212 aa, Bdellovibrio bacteriovorus
  misc_feature (1)..(212): tr|A0A150WCV4|A0A150WCV4_BDEBC 7-carboxy-7-deazaguanine synthase OS=Bdellovibrio bacteriovorus OX=959 GN=queE PE=3 SV=1
MLKINEIFYSVQGETTYVGLPTVFVRLTACNLRCTYCDTKYSYYEGELQSLETILKEIESHKTPYVCITGGEPLLQKEVHTLMNTLCERGYKVSLETSGSKSIEQVDPRVKIILDVKTPDSGAADSFLMNNISFSTPSTEYKFVICSEKDFEWSEEFCRQHNLFEKFVVLYSPSYGQVSERWLAEKILHQNSSARLQLQLHKYIWSPETRGV

SEQ ID NO: 28369 - protein, 216 aa, Bdellovibrio exovorus
  misc_feature (1)..(216): tr|M4V8E1|M4V8E1_9PROT 7-carboxy-7-deazaguanine synthas e OS=Bdellovibrio exovorus JSS OX=1184267 GN=queE PE=3 SV=1
MIKINEIFYSIQGESTYAGNRTVFIRTTGCNLRCTYCDTKYSYHEGEFLSLEKILDVVKSHDAEYICITGGEPLLQPEIHKLINILCDQGHKVSLETSGSKSVKHVDPRVKIILDVKTPDSGAADSFLLENIDFSSEKHRIPTEYKFVISSEKDLEWSEQFCRQYDLFKNFTVLFSPSHGQVSEKWLAERILQKKLKVMLHLQQHKYIWLPTQRGV

SEQ ID NO: 28370 - protein, 212 aa, Bdellovibrio sp.
  misc_feature (1)..(212): tr|A0A514XNF0|A0A514XNF0_9PROT 7-carboxy-7-deazaguanine synthase OS=Bdellovibrio sp. ZAP7 OX=2231053 GN=queE P E=3 SV=1
MLKINEIFYSIQGETTYVGNPTVFVRTTACNLRCTYCDTKYSYYEGEMQSLDAIIKEIDSHQAPYVCITGGEPLLQKEVHTLMKELCDKGYKVSLETSGSKNIAAVDPRVKIILDVKTPDSGAADSFLMENIAHSTPSTEYKFVICSEEDFSWSENFCRQHNLFEKFVVLYSPSYTQVSERWLAEKILQQKSSARLQLQLHKYIWSPETRGV

SEQ ID NO: 28371 - protein, 59 aa, Bdellovibrio sp.
  misc_feature (1)..(59): tr|A0A3M1C811|A0A3M1C811_9PROT 7-carboxy-7-deazaguanine synthase QueE (Fragment) OS=Bdellovibrio sp. OX=28201 GN=D6797_04370 PE=4 SV=1
MNKIKINEIFFSIQGESSLTGYPTIFIRTSGCPLRCHYCDTQYAYFEGSPMSFSEILSS

SEQ ID NO: 28372 - protein, 243 aa, Bdellovibrionaceae bacterium
  misc_feature (1)..(243): tr|A0A2D6JLW6|A0A2D6JLW6_9PROT 7-carboxy-7-deazaguanine synthase OS=Bdellovibrionaceae bacterium OX=2026715 GN =queE PE=3 SV=1
MQKLNFTKDYHFFTVQGEGLHTGRPAIFLRLSGCNLRCEWVNSDGTTSLCDTPYSSHQPEKLLKSIDEVVEDIKSYPCKYVVITGGEPYLQKAIAPFISELKNLGYYVCIETNASIYFETEADFISMSPKLSTSCVDKSENYESHQKRRKNIEALASFTKQHDYQFKFVINTKDDLLEAKELIAEIEAKTSAIAKDKILLMPQAVTKKQLEEKSEQVIEWAMEFGYSFCDRMHIRIWNDKRGV

SEQ ID NO: 28373 - protein, 219 aa, Bdellovibrionaceae bacterium
  misc_feature (1)..(219): tr|A0A2E1Q3N8|A0A2E1Q3N8_9PROT 7-carboxy-7-deazaguanine synthase OS=Bdellovibrionaceae bacterium OX=2026715 GN =queE PE=3 SV=1
MEKANPQTLKINEIFHSIQGESSLAGYPTTFVRTSGCHLRCTYCDTTYAYNEGRMMDFQEILATVKKNGAPYVCVTGGEPLLQKNILPFLSLLSNEGFQVSLETSGDLDCTQVDERVLKVIDVKTPDSGEPNKFNFKNIDLAGPKTEFKFVICSEGDFEWAENFSKENKLYEKSIVLYSPSFNKIDEKWLAKKILSEKSSARLQLQLHKYIWSFHARGV

SEQ ID NO: 28374 - protein, 232 aa, Bdellovibrionales bacterium
  misc_feature (1)..(232): tr|A0A1F3VEF0|A0A1F3VEF0_9PROT 7-carboxy-7-deazaguanine synthase OS=Bdellovibrionales bacterium RIFOXYC1_FULL_ 37_79 OX=1797395 GN=queE PE=3 SV=1
MRINSIYLATEGEGVWIGTVQIFVRFNGCGIGCDNCDSSYTWSFNGGLEMSLLEVLAEIDKVGHNGLIRRVSITGGDPLNCKNIDAALALAQSLKEKNYYLNIEASGDRVAHDLFTLADFISIDYKTPSSGVTTPLNVLTQMIDQFSGKFQVKSVIENIQDFNYVKNAYAEIKKDQGGSHFAWVLTPSYNTNETFPKERFKNILNWNESHGGFFRVVGQQHKWVYGPKKTNV

SEQ ID NO: 28375 - protein, 212 aa, Bdellovibrionales bacterium
  misc_feature (1)..(212): tr|A0A1F3SHL4|A0A1F3SHL4_9PROT 7-carboxy-7-deazaguanine synthase OS=Bdellovibrionales bacterium RBG_16_40_8 OX =1797388 GN=queE PE=3 SV=1
MLKINEIFFSIQGESTLAGLPTVFVRTSGCHLRCNYCDTKYAYVEGKNLSIAEIITEVKKYLSKHVCITGGEPLLQKNSLLLMKDLCTLGYNVSLETSGDISCKDVDPRVRKIIDVKTPDSGEQNKFFLENLNLPEVNCEFKFVICSENDFFWAEDFSKKYLLNEKYAVLYSPSFEKIEARWLAEKILKNNSSARLQLQQHKYIWSCNTRGV

SEQ ID NO: 28376 - protein, 213 aa, Beggiatoa alba
  misc_feature (1)..(213): tr|I3CGI8|I3CGI8_9GAMM 7-carboxy-7-deazaguanine synthas e OS=Beggiatoa alba B18LD OX=395493 GN=queE PE=3 SV=1
MTYHIKEIFYTLQGEGAQTGRASVFCRFTGCNLWSGQEIDRATATCQFCDTDFNGITGEGGGKFKTANELAAAIAQTWSAQQDARAQPYVVCTGGEPLLQLDSALVSALHRAGFSVAIETNGTLPAPAGIDWICVSPKANTQLVLTSGQELKLVYPQYHAMPERFAHLNFQHFFLQPLDNENHQLNTQQAIQYCLTHPQWRLSLQTHKLLGIP

SEQ ID NO: 28377 - protein, 213 aa, Beggiatoa leptomitoformis
  misc_feature (1)..(213): tr|A0A2N9YGU8|A0A2N9YGU8_9GAMM 7-carboxy-7-deazaguanine synthase OS=Beggiatoa leptomitoformis OX=288004 GN=que E PE=3 SV=1
MTYHVKEIFYTLQGEGAQTGRAAVFCRFAGCNLWSGNEADRATALCQFCDTDFNGTTGTGGGKFTTAEDLVTAITQTWQAKNNIHAQPYVVCTGGEPLLQIDNALITALHQANFNIAIETNGTQTAPTGIDWICVSPKARAPLILTAGHELKLVYPQEDALPEQFIDLDFQHFFLQPMDGNAHHHNTQLAIQYCLDHPQWRLCLQTHKLIGIP

SEQ ID NO: 28378 - protein, 209 aa, Beggiatoa sp.
  misc_feature (1)..(209): tr|A7C438|A7C438_9GAMM 7-carboxy-7-deazaguanine synthas e OS=Beggiatoa sp. PS OX=422289 GN=queE PE=3 SV=1
MSYSVKEIFYSLQGEGHQTGRAAIFCRFAGCNLWSGREEDRSIASCQFCDTNFIGTNGQNGGKFTSAQALAEKVATIGMMKHFPLIICTGGEPLLQLDEPLIKAFHHIGFEIAIETNGTLPAPPNIDWICVSPKGNAPLKLQTGNELKLVFPQPNAPPELFEQFDFQYFFLQPMDGPELKKNTQLALRYCLEHPQWRLSLQTHKLLGIP

SEQ ID NO: 28379 - protein, 211 aa, Beggiatoa sp.
  misc_feature (1)..(211): tr|A0A1W9L6V2|A0A1W9L6V2_9GAMM 7-carboxy-7-deazaguanine synthase OS=Beggiatoa sp. IS2 OX=1934247 GN=queE PE=3 SV=1
MTLMYTVKEIFYSLQGEGLHTGRATVFCRFAGCNLWSGREIDRNQAVCSFCDTDFVGTDGVGGGKFTSAHTLAAAIATTWSAGEHPYVVCTGGEPLLQLDESLCDALHQRGFTIGVETNGTLPAPKEIDWLCVSPKAHAPLRLSRGDELKLVFPQPAISPEHFGHLEFTYFFLQPLANRQWERNTQLALRYCLTHPQWRLSLQTHKLLGIR

SEQ ID NO: 28380 - protein, 211 aa, Beijerinckia indica
  misc_feature (1)..(211): tr|B2IGN6|B2IGN6_BEII9 7-carboxy-7-deazaguanine synthas e OS=Beijerinckia indica subsp. indica (strain ATCC 903 9 / DSM 1715 / NCIB 8712) OX=395963 GN=queE PE=3 SV=1
MSHYAVKEIFLTLQGEGAQAGRPAVFCRFTGCNLWSGREADRAQAICRFCDTDFVGMDGLGGGRFESASSLADAIETAWTAGPAHRYVVFTGGEPLLQLDETLIKEIHARGFTIAVETNGTIAPPPGLDWICVSPKAGAPLKITQGSELKLVFPQEALDPEEFRALSFQHFWLQPMDNANLARNTTEATAYCLAHPQWRLSLQTHKLIGIP

SEQ ID NO: 28381 - protein, 211 aa, Beijerinckiaceae bacterium
  misc_feature (1)..(211): tr|A0A2N8MDH5|A0A2N8MDH5_9RHIZ 7-carboxy-7-deazaguanine synthase OS=Beijerinckiaceae bacterium OX=1978229 GN=q ueE PE=3 SV=1
MSKYAVKEIFLTLQGEGANAGRAAVFCRFSGCNLWSGQEKDRDNANCGFCDTDFVGTDGPGGGSFASAETLATAIESVWTSGKENRFVVFTGGEPLLQLDEALIGAVHARGFDAAVETNGTLPPPQGLDWICVSPKAGAPLVATSGSELKLVFPQQGLGPEGLCGLAFSHFWLQPMDGCARAANTAAAIAYCLDHPRWRLSLQTHKFIGMP

SEQ ID NO: 28382 - protein, 212 aa, Beijerinckiaceae bacterium
  misc_feature (1)..(212): tr|A0A522GH30|A0A522GH30_9RHIZ 7-carboxy-7-deazaguanine synthase OS=Beijerinckiaceae bacterium OX=1978229 GN=q ueE PE=3 SV=1
MSVYQVKEIFRTLQGEGAQAGRAAVFCRFAGCNLWSGRDEDRERSPCWFCDTDFVGTDGTDGGKFRTPQELTAAIAKAWGDAPRDHAYVVFTGGEPLLQLDEALLETVHEAGFACGLETNGTLPIPQGVDWVCVSPKASTKLQARSGDELKLVFPQEDLPPETLEELAFTHFFLQPMDGPQLAEYTAAAVAYCQEHPRWRLSLQTHKWIGLR

SEQ ID NO: 28383 - protein, 208 aa, Belliella baltica
  misc_feature (1)..(208): tr|I3Z0Z2|I3Z0Z2_BELBD 7-carboxy-7-deazaguanine synthas e OS=Belliella baltica (strain DSM 15883 / CIP 108006 / LMG 21964 / BA134) OX=866536 GN=queE PE=3 SV=1
MEKKKEVEAGTMLPVMEAFYTIQGEGTFSGHPAYFIRLGGCDVGCVWCDVKDSWEAAKWPVLTIEDIVAEARQYPGRKVVITGGEPLMYNLNPLTTLLKKEGFTTHIETSGAHPFSGEFDWVCFSPKKFKAPHPSIYEVANELKVVIFHKSDFDFAEKHASQVNKACKLLLQPEWSKAKIFTNEIITYAKSHPNWNISLQTHKFMDIP

SEQ ID NO: 28384 - protein, 208 aa, Belliella buryatensis
  misc_feature (1)..(208): tr|A0A239DTP8|A0A239DTP8_9BACT 7-carboxy-7-deazaguanine synthase OS=Belliella buryatensis OX=1500549 GN=queE P E=3 SV=1
MEKRDVVAAGLMLPVMEAFYTIQGEGTFSGHPAYFIRLGGCDVGCVWCDVKDSWEAAKWPVLSIEDIVAEAKQYTGRKVVITGGEPLMYNLGPLTALLKSEGFSTHMETSGAHPFSGDFDWVCFSPKKFKAPHPSIYEHANELKVVIYHVSDFDFAEKHAALVQNDCQLLLQPEWSKAATFTSKIIDYVKFHPNWKISLQTHKFMDIP

SEQ ID NO: 28385 - protein, 208 aa, Belliella pelovolcani
  misc_feature (1)..(208): tr|A0A1N7MZ48|A0A1N7MZ48_9BACT 7-carboxy-7-deazaguanine synthase OS=Belliella pelovolcani OX=529505 GN=queE PE =3 SV=1
MEKRDAVAAGLMLPVMEAFYTIQGEGTFSGHPAYFIRLGGCDVGCVWCDVKDSWDAAKWPVLSIDEIVAGAKQYLGRKVVITGGEPLMYDLGPLTTLLKSEGFSTHIETSGAHPFSGDFDWVCFSPKKFKAPHPSIYEHANELKVVIYHQSDFDFAEKHAALVQNDCQLLLQPEWSKAATFTSKIIDYVKFHPNWKISLQTHKFMDIP

SEQ ID NO: 28386 - protein, 204 aa, Belnapia rosea
  misc_feature (1)..(204): tr|A0A1G6UF55|A0A1G6UF55_9PROT 7-carboxy-7-deazaguanine synthase OS=Belnapia rosea OX=938405 GN=queE PE=3 SV=1
MSYTVHEIFLTAQGEGANLGRTAVFIRFAGCNLWTGREEDRADAVCRFCDTEFRGGERYDAAGLVAAAAALWPAGAPGRFCVLTGGEPLLQVDAPLLAALRAAGFTIAVETNGTQPLPGPIDWVCVSPKANAPLALTAADELKLVFPQAGMDPTAFRDFPARERWLSPMDGPALTENTAAAAEYCLRHPEWRLNIQAHKSWGVR

SEQ ID NO: 28387 - protein, 210 aa, Bergeriella denitrificans
  misc_feature (1)..(210): tr|A0A378UJY5|A0A378UJY5_BERDE 7-carboxy-7-deazaguanine synthase OS=Bergeriella denitrificans OX=494 GN=queE P E=3 SV=1
MTEIRPADPQYRIVEIFESLQGEGYNTGMPAVFIRLGKCNLACSWCDTDYLTFKMLSLSEILGRLKNHTARNIIITGGEPTIQPHLDSLLDALKAQGYYLCIETNGLNPAPPQIDFISASPKACYAEKYAKQCIKTADEVRIVADGDVTAFAEEMERKIRARHYYLSPCEQNGEMNIYDTIRQIGLLNSRPDAPVHWQLSVQTHKWAGIE

SEQ ID NO: 28388 - protein, 210 aa, Bergeyella zoohelcum
  misc_feature (1)..(210): tr|A0A376BYZ8|A0A376BYZ8_9FLAO 7-carboxy-7-deazaguanine synthase OS=Bergeyella zoohelcum OX=1015 GN=queE PE=3 SV=1
MTKTQNNTALESGEMLPVMEHFYTIQGEGAYTGTPAYFIRLGGCDVGCHWCDVKESWDPNIHPLHNAREIADIAASYSKTIVLTGGEPLMWNLAPLTSRLKEKGCKIHIETSGAYPMSGHLDWITLSPKKTGLPLEEIYQKASELKVIIFNQHDFKFAEEQAAKVNENCMLYMQSEWSKRDKMYPEITDYILKNPQWRASVQTHKYLNIP

SEQ ID NO: 28389 - protein, 210 aa, Bergeyella zoohelcum; identical to SEQ ID NO: 28388
  misc_feature (1)..(210): tr|K1M543|K1M543_9FLAO 7-carboxy-7-deazaguanine synthas e OS=Bergeyella zoohelcum ATCC 43767 OX=883096 GN=queE PE=3 SV=1

SEQ ID NO: 28390 - protein, 223 aa, Bermanella marisrubri
  misc_feature (1)..(223): tr|Q1N1N5|Q1N1N5_9GAMM 7-carboxy-7-deazaguanine synthas e OS=Bermanella marisrubri OX=207949 GN=queE PE=3 SV=1
MAKSGFNVKEAFYTLQGEGARAGRASVFIRFSKCNLWNGKESGRGAAVCQFCDTDIVGTDGQNGGTYNQQALVELALSLWPQLTDDTKSKPYVVFTGGEPALQLTESLVSDFQQAGFECAVESNGTLPLPTNLDWVCISPKGTSEIVVKQCDELKLVYPQVDLSPDAVSGISASYFYLSPMADYGEQNSGMIIRENMQAATQYCLDHPQWRMSLQTHKLLGID

SEQ ID NO: 28391 - protein, 220 aa, Bermanella sp.
  misc_feature (1)..(220): tr|A0A1Y5D3U4|A0A1Y5D3U4_9GAMM 7-carboxy-7-deazaguanine synthase OS=Bermanella sp. 47_1433_sub80_T6 OX=1856278 GN=queE PE=3 SV=1
MASDLRIKEAFYTLQGEGARSGRASVFIRFSKCNLWNGRESGRAAALCQFCDTDITGIDGENGGVYSPSALLELALKLWPAGSDGMPYVVFTGGEPALQLTDSLVAAFKEAGFETAVESNGTLPLPKNLDWVCISPKGKSDVIIKQCDELKLVFPQDDLQPEQVNHISASHYFISPMAYYGENESSGMIVRENMQAATQYCLKHPKWRMSLQTHKLLGID

SEQ ID NO: 28392 - protein, 216 aa, Bermanella sp.
  misc_feature (1)..(216): tr|A0A2D4S1C4|A0A2D4S1C4_9GAMM 7-carboxy-7-deazaguanine synthase OS=Bermanella sp. OX=2024825 GN=queE PE=3 SV= 1
MFKVKEAFYTLQGEGARAGRASVFIRFSKCNLWNGKESGRKAAVCQFCDTDITGTDGENGGVYSQAELLNLALRLWPNTQHGSPYVVFTGGEPALQLTESLVDDFQQHRFECAVESNGTLPLPKNLDWVCISPKGKSDVIIKQCHELKLVYPQVDLSPDDINDIQADYYYLSPMADYGVENSGMIIRENMQSATQYCLDHPQWRMSLQTHKLLGIN

SEQ ID NO: 28393 - protein, 249 aa, Bernardetia litoralis
  misc_feature (1)..(249): tr|I4AI47|I4AI47_BERLS 7-carboxy-7-deazaguanine synthas e OS=Bernardetia litoralis (strain ATCC 23117 / DSM 679 4 / NBRC 15988 / NCIMB 1366 / Sio-4) OX=880071 GN=queE PE=3 SV=1
MHSFCAVEFAHLHRIIHFLTLNYETKMQTLSSSKIDESSISMKKTLGVSSDTTLPVMEAFYTLQGEGVFAGHAAYFIRLGGCDVGCFWCDVKESWDKEAHPQLSISQIVKEASSFPARLAIITGGEPLMHNLNELTEELKKEGFRIHIETSGAHPLSGTLDWITLSPKRFKKPLKDIYQKSHELKMVIYALSDLEWAQTEAKKVSDSCVLLIQPEWSKSEKNLPILIEFVKENPRWKLSLQTHKFMNIP

SEQ ID NO: 28394 - protein, 212 aa, Unknown
  misc_feature (1)..(212): tr|B6BW81|B6BW81_9PROT 7-carboxy-7-deazaguanine synthas e OS=beta proteobacterium KB13 OX=314607 GN=queE PE=3 S V=1
MSTLRINEIFYSIQGESSRIGKPTVFVRLTGCPMRCTYCDTAYAFHEGQQQEIEEIIQEIKQFDTNYVTVTGGEPLAQKNCIDLMNQLCELGYQVSLETGGALDIKDVHAKVKIILDVKTPKSNEDKNNFWPNLENIRTNDEIKFVIQDYEDFSWSMDIIKKYQLNQGQILFSPVYKVLANEQLAGWILKHQLNVRLQVQLHKILWGDKKGV

SEQ ID NO: 28395 - protein, 211 aa, Unknown
  misc_feature (1)..(211): tr|A0A2T0XB34|A0A2T0XB34_9PROT 7-carboxy-7-deazaguanine synthase OS=beta proteobacterium MWH-P2sevCIIIb OX=323 426 GN=queE PE=3 SV=1
MTYSVKEIFYTLQGEGAQAGMPAVFLRFAGCNLWTGRESERSTAVCQFCDTDFIGTDGINGNKFLNAASLAAKVASLWPQQSPDHRLVVCTGGEPLLQLDADAIHALHALGFRIAVETNGTIKAPEGIDWLCVSPKSDAPLNQISGQELKLVFPQIKARPELFEALDFEHFLLQPMDSNEQAANTRAAIQYCLDHPKWRLSLQTHKIIGIA

SEQ ID NO: 28396 - protein, 210 aa, Betaproteobacteria bacterium
  misc_feature (1)..(210): tr|A0A1Z8NWA4|A0A1Z8NWA4_9PROT 7-carboxy-7-deazaguanine synthase OS=Betaproteobacteria bacterium TMED22 OX=198 6845 GN=queE PE=3 SV=1
MYSVKEIVYTLQGEGAQSGRAAVFCRFSGCNLWSGREEDRLSADCSFCDTDFVGVNGVNGGKYRSSTVLADEVERQWLSGARARRYVVCTGGEPLLQLDRELIVEFHNRGFEVAIETNGTLPVPEGVDWVCVSPKGTVPVLAKSGDELKLVYPQIDVDPSLFLSWDFNHFFIQPKDGLDVELNTQLSIQFCKEHPQWRLGLQTHKIIGVE

SEQ ID NO: 28397 - protein, 215 aa, Betaproteobacteria bacterium
  misc_feature (1)..(215): tr|A0A3D0LSU2|A0A3D0LSU2_9PROT 7-carboxy-7-deazaguanine synthase OS=Betaproteobacteria bacterium OX=1891241 GN =queE PE=3 SV=1
MPLQPLRVNEIFFSLQGETSRAGLPTVFIRLTGCPLRCGYCDTRYAFTEGAPLSIDDILAQTDRYRCRTVTVTGGEPLAQKNCLPLLQSLCDAGYSVSLETSGALDVSGVDPRVSKILDIKTPGSGEAAKHRWENLSSMTRHDEFKLVLCDEADYRWAKQLLAEKQLTALAPVLFSAAQDQLSPTRLADWLLRDRLPVRLQIQLHKVLWGERRGR

SEQ ID NO: 28398 - protein, 204 aa, Bibersteinia trehalosi
  misc_feature (1)..(204): tr|A0A3R8NG82|A0A3R8NG82_BIBTR 7-carboxy-7-deazaguanine synthase OS=Bibersteinia trehalosi OX=47735 GN=queE PE =3 SV=1
MNTPQYRIVEIFETLQGEGFNTGMPSIFIRFGKCNLACPWCDTNYNQFEMKSLDEIMQIVRNFTAKNIIITGGEPTIQPDLEILLNQLKAEGYFIAIETNGLKPVPLQIDYIATSPKRLYQKNYLKHHIPYANEVRIVVDGDVQDFCEQIENTIKAERYYLSPCEKDGVMNMLETITQLGLLNQRPNKPKWQLSIQTHKIAGIE

SEQ ID NO: 28399 - protein, 204 aa, Bibersteinia trehalosi
  misc_feature (1)..(204): tr|A0A4V7IB02|A0A4V7IB02_BIBTR 7-carboxy-7-deazaguanine synthase OS=Bibersteinia trehalosi USDA-ARS-USMARC-188 OX=1263829 GN=queE PE=3 SV=1
MNTPQYRIVEIFETLQGEGFNTGMPSIFIRFGKCNLACPWCDTNYNQFEMKSLNEIMQTVRNFTAKNIIITGGEPTIQPDLEILLNQLKAEGYFIAIETNGLKPVPLQIDYIATSPKRLYQKNYLKHHIPYANEVRIVVDDDVLDFCEQIENTIKAERYYLSPCEKDGVMNMLETITQLGLLNQRLNKPKWQLSIQTHKIAGIE

SEQ ID NO: 28400 - protein, 213 aa, Bilophila sp.
  misc_feature (1)..(213): tr|G1V346|G1V346_9DELT 7-carboxy-7-deazaguanine synthas e OS=Bilophila sp. 4_1_30 OX=693988 GN=queE PE=3 SV=1
MAYRVKEIFYTLQGEGAQAGRPAVFCRFSGCNLWSGRPEDRATAKCRFCDTDFVGADAGVFATAEELAQTVAATFPVLDPQAYGGRKPYIVFTGGEPALQLTRELIDRLHALGFELGVESNGTLPLPEGLDWITVSPKGSNPLATTSGHELKLVWPQQGCSPEDFEDLDFRHFLLQPCDDPRNKANTRECIAYCLLHPRWSLGLQTHKWVGVR

SEQ ID NO: 28401 - protein, 213 aa, Bilophila wadsworthia
  misc_feature (1)..(213): tr|E5Y8H4|E5Y8H4_BILWA 7-carboxy-7-deazaguanine synthas e OS=Bilophila wadsworthia 3_1_6 OX=563192 GN=queE PE=3 SV=2
MAYRVKEIFYTLQGEGAQAGRPAVFCRFSGCNLWSGRPEDRATAKCRFCDTDFVGADAGVFATAEELAQTIAATFPVLAPQAYGGRKPYIVFTGGEPALQLTRELIDRLHALGFELGVESNGTLPLPEGLDWITVSPKGSNPLATTSGHELKLVWPQQGCSPEDFEDLDFRHFLLQPCDDPRNKANTRECIAYCLLHPRWSLGLQTHKWVGVR

SEQ ID NO: 28402 - protein, 223 aa, Biostraticola sp.
  misc_feature (1)..(223): tr|A0A4U2UPU1|A0A4U2UPU1_9ENTR 7-carboxy-7-deazaguanine synthase OS=Biostraticola sp. BGMRC 2031 OX=2575567 GN =queE PE=3 SV=1
MQYPLNELFQTLQGEGYFTGVPAIFIRLQGCPVGCSWCDTKHTWRVDPRREIPPGEIPLKTGDSDSWAAISAEAMLDLIARQGYTARHVVITGGEPCIHDLLPLTQILERRGFHCQIETSGTHPIRCSPRTWVTVSPKVGMRGALTVLPEALRRADEIKHPVARLRDIERLDALLAVLDDEKPRVIALQPVSRKDDATRLCIDTCIARNWRLSLQTHKYLNIA

SEQ ID NO: 28403 - protein, 277 aa, Biostraticola tofi
  misc_feature (1)..(277): tr|A0A4R3Z2G7|A0A4R3Z2G7_9ENTR 7-carboxy-7-deazaguanine synthase OS=Biostraticola tofi OX=466109 GN=queE PE=3 SV=1
MPGFPRDAAGNNPTDVNPLRRVFIFPPGLKTARWLFAGSGYNHVTNQTRESVNPMQYPLNEIFQTLQGEGYFTGVPAVFIRLQGCPVGCSWCDTKHTWEQDAEKEVPLGDIPLKTVDSEQWANVTPEAILEIIAEQGYTAQHVVITGGEPCIHDLTSLTHILEQHGFSCQIETSGTHEIRCTTQTWVTVSPKVNMRGGMEVQKHALQRADEIKHPVARERDIEHLDELLAMLTDDKQRVIALQPISQQDAATRLCIKTCIARNWRLSMQTHKYLHIA

SEQ ID NO: 28404 - protein, 206 aa, Bisgaardia hudsonensis
  misc_feature (1)..(206): tr|A0A4R2N0A8|A0A4R2N0A8_9PAST 7-carboxy-7-deazaguanine synthase OS=Bisgaardia hudsonensis OX=109472 GN=queE P E=3 SV=1
MNKKPITYNIVEIFESLQGEGFNTGMPCVFIRFGKCNLACPWCDTPYNQFHTMSLEEIYAKVRSFSAKNIIITGGEPTIQPQLETLLDKLKENGYFLAIETNGLKNVPPQIDYIATSPKRIYQKQYIKRHIDTAHEVRIVVDGNVIEFCQFIEKTIQATHYYLSPCEENGKMNMLDTITQLGILNQRKNKPHWQLSIQTHKMAKID

SEQ ID NO: 28405 - protein, 210 aa, Bizionia algoritergicola
  misc_feature (1)..(210): tr|A0A5D0QSM5|A0A5D0QSM5_9FLAO 7-carboxy-7-deazaguanine synthase OS=Bizionia algoritergicola OX=291187 GN=queE PE=3 SV=1
MTRSERQELLDKGLLLPLMEEFYTIQGEGFHKGTAAYFIRIGGCDVGCHWCDVKESWLAELHPPTETEKIVANAEKYSKTIVVTGGEPLMWDMTVLTNQLKAKGMQTHIETSGAYELTGAWDWICLSPKKLKLPTQRVYDNANELKVIVYNKDDFKFAEEQAAKVNKDCILYLQPEWSKRDKMVPEIVDYVMANPKWKVSLQTHKYLNIP

SEQ ID NO: 28406 - protein, 210 aa, Bizionia argentinensis
  misc_feature (1)..(210): tr|G2EAB7|G2EAB7_9FLAO 7-carboxy-7-deazaguanine synthas e OS=Bizionia argentinensis JUB59 OX=1046627 GN=queE PE =3 SV=1
MTKSERQELLDNGLLLPLMEEFYTIQGEGFHKGTAAYFIRIGGCDVGCHWCDVKESWLAELHPPTDVGKIVDNAEKHSKTIVVTGGEPLMWDMNPLTSQLKAKGLQTHIETSGAYELTGEWDWICLSPKKLKLPTQRAYEKAHELKVIVFNKDDFRFAEEQAAKVNKECILYLQPEWSNRDKMVPEIVDYVMRNPQWKVSLQTHKYLNIP

SEQ ID NO: 28407 - protein, 210 aa, Bizionia echini
  misc_feature (1)..(210): tr|A0A1I5CNV8|A0A1I5CNV8_9FLAO 7-carboxy-7-deazaguanine synthase OS=Bizionia echini OX=649333 GN=queE PE=3 SV= 1
MTRSERQELLDKGLLLPLMEEFYTIQGEGYHKGTAAYFIRIGGCDVGCHWCDVKESWLAELHPPTETDKIVANAEKYSKTIVVTGGEPLMWDMTQLTNQLKARGMQTHIETSGAYKLTGTWDWICLSPKKLKLPTEEVFKKAHELKCIIFNKDDFRFAEEQAAQVNKDCILYLQPEWSKREKMVPEIVDYVMANPKWKVSLQTHKYLNIP

SEQ ID NO: 28408 - protein, 210 aa, Bizionia myxarmorum
  misc_feature (1)..(210): tr|A0A5D0RHH8|A0A5D0RHH8_9FLAO 7-carboxy-7-deazaguanine synthase OS=Bizionia myxarmorum OX=291186 GN=queE PE=3 SV=1
MTKSERQELLDKGLLLPLMEEFYTIQGEGFHKGTAAYFIRIGGCDVGCHWCDVKESWLAELHPPTEIEKIVDNAEKYSKTIVVTGGEPLMWDMNPLTSQLKAKGLQTHIETSGAYELTGTWDWICLSPKKLKLPTQLVYDKAHELKVIIFNKDDFRFAEEQAAKVNKDCILYLQPEWSKRDKMVPDIVEYVMNNPQWKVSLQTHKYLNIP

SEQ ID NO: 28409 - protein, 209 aa, Bizionia paragorgiae
  misc_feature (1)..(209): tr|A0A1H3ZQ74|A0A1H3ZQ74_9FLAO 7-carboxy-7-deazaguanine synthase OS=Bizionia paragorgiae OX=283786 GN=queE PE= 3 SV=1
MTEEVKDLVNKGEMLPLMEEFYTIQGEGFHKGTAAYFIRLGGCDVGCHWCDVKESWNAELHPPTLTKDIVAQAKKYSDTIVVTGGEPLMWDMTALTTQLKAEGMQVHIETSGAYELSGTWDWVCLSPKKLKLPTQGVYDVANELKTIIYNKDDFKFAEEQAARVGKDCILYMQPEWSKSDKMIPEIVDYVMKNPKWKVSLQTHKYLNIP

SEQ ID NO: 28410 - protein, 209 aa, Bizionia saleffrena
  misc_feature (1)..(209): tr|A0A5D0QXQ0|A0A5D0QXQ0_9FLAO 7-carboxy-7-deazaguanine synthase OS=Bizionia saleffrena OX=291189 GN=queE PE=3 SV=1
MTEAVKDLVNKGEMLPLMEEFYTIQGEGFHKGTAAYFIRLGGCDVGCHWCDVKESWNAELHPPTATKDIVANAKKYSDTIVVTGGEPLMWDMTALTTQLKAQGMQVHIETSGAYQLTGEWDWVCLSPKKMKLPTQGVYDVANELKTIIYNKDDFKFAEEQAAKVGKDCILYMQPEWSKSDKMIPEIVNYVMKYPKWKVSLQTHKYLNIP

SEQ ID NO: 28411 - protein, 214 aa, Blastocatellia bacterium
  misc_feature (1)..(214): tr|A0A352F4C6|A0A352F4C6_9BACT 7-carboxy-7-deazaguanine synthase OS=Blastocatellia bacterium OX=2052146 GN=que E PE=3 SV=1
MLRITEIFRSIQGESTHAGRPCTFIRLTGCPMRCVWCDSEYTFSGGEHISLAQVMDQVKLFGCRLVEVTGGEPLAQQSCRELIAALCASDYEVLVETGGYLSTENLDPRASIILDVKCPASGEAERNHWPNLERLRADKDEVKFVIADSGDWAYAKKIIDEYDLIQRTNAVLISPAWGLIDLQELAESVAASGLEVRMQLQLHKYIWGPEARGV

SEQ ID NO: 28412 - protein, 214 aa, Blastocatellia bacterium
  misc_feature (1)..(214): tr|A0A3B9MP92|A0A3B9MP92_9BACT 7-carboxy-7-deazaguanine synthase OS=Blastocatellia bacterium OX=2052146 GN=que E PE=3 SV=1
MLRVTEIFCSIQGESTHAGRPCAFVRLTGCPMRCVWCDSEYTFTGGEHVGLDEVMDQVRAFGCKLVEVTGGDPLAQPEAFTLIERLCSEGYEVLVETGGFFSTAGVDARAKIILDVKCPSSGEEPRNHWPNLERLRPDKDEVKFVIVNIADWNYTKKIIERYDLSKRAKAVLISPAWGQIDLKDLAHWVSTSGLDVRMQLQLHKYVWGPEARGV

SEQ ID NO: 28413 - protein, 211 aa, Blastochloris viridis
  misc_feature (1)..(211): tr|A0A0H5BQJ2|A0A0H5BQJ2_BLAVI 7-carboxy-7-deazaguanine synthase OS=Blastochloris viridis OX=1079 GN=queE PE=3 SV=1
MAYAVKEMFYTLQGEGRNAGRAAVFCRFSGCNLWNGRQADRGRAVCTFCDTEFVGVDGAGGGGFGSAGELAAAVAATWPAGGSGTPLVVLTGGEPLLQVDAALIAALHEQGFEIAVETNGTIAPPPGLDWICVSPKAGAQLAVTAGDELKLVFPQHGAGPSRYETLAFTHFLLQPMDGPERERNTEAAVAYCLAHPRWQLSLQIHKILCIP

SEQ ID NO: 28414 - protein, 246 aa, Blastomonas fulva
  misc_feature (1)..(246): tr|A0A222WZC0|A0A222WZC0_9SPHN 7-carboxy-7-deazaguanine synthase OS=Blastomonas fulva OX=1550728 GN=queE PE=3 SV=1
MTSLRLATVHPGEPEIFHSLQGEGISLGRPSVFVRLSGCNLACLWCDTPYTWYFTGHNARHRGCETFVRRENSLTLDIAEVARRIAEFGCRHIVFTGGEPLLQQPALAALCALLGPDYHIEIESNGTVALTAAFDAHVDQLNLSPKLAHSGNAADLRVNETSLAGYARDPRAWFKFVVASPEDADEIDALASQYAIAAERILLMPEGTSPAVLQQRAHWLAPLCLDRGWRFTDRLHIHLYGDTRGT

SEQ ID NO: 28415 - protein, 246 aa, Blastomonas natatoria
  misc_feature (1)..(246): tr|A0A2V3V8G9|A0A2V3V8G9_9SPHN 7-carboxy-7-deazaguanine synthase OS=Blastomonas natatoria OX=34015 GN=queE PE= 3 SV=1
MQRLRLATIVAEEPEIFHSLQGEGISLGRPSVFVRLSGCNLACHWCDTPYTWFFDGHPGAHRGDRQYERRSNSVTLDVGDIAARIRAFDCHHIVFTGGEPLLQQPALAGLCALLGPDYHIEIESNGTVALTPGFASHVDQLNLSPKLGHSGNTDTARLNRDALAIHARDPRAWFKFVIADPDDAEEVAALAERFAIAAERIILMPEGTTPADLRARSAWLAPLCLDRGWRFTDRLHIHLYGDTRGT

SEQ ID NO: 28416 - protein, 246 aa, Blastomonas sp.
  misc_feature (1)..(246): tr|W9BS44|W9BS44_9SPHN 7-carboxy-7-deazaguanine synthas e OS=Blastomonas sp. CACIA14H2 OX=1419876 GN=queE PE=3 SV=1
MTRLRLATVRPQEPEIFHSLQGEGVSIGRPSVFVRLSGCNLACHWCDTPYTWFFEGHAGPHRGDRQYDRRANSVTLDIAEVVDRIRGFDCSHIVFTGGEPLLQQPALAALCERLGPDYHVEIESNGTVALTPGFAPCVHQLNLSPKLGHSGNAESARCNDAALAGYARDPRAWFKFVIAEPADAEEVSALADRHAIAPQRIILMPEGTDSATLHARSAWLAPLCLDRGWRFTDRLHIHLYGDTRGT

SEQ ID NO: 28417 - protein, 246 aa, Blastomonas sp.
  misc_feature (1)..(246): tr|A0A2D6H2B3|A0A2D6H2B3_9SPHN 7-carboxy-7-deazaguanine synthase OS=Blastomonas sp. OX=1909299 GN=queE PE=3 SV =1
MTRLRLATVRPGEPEIFHSLQGEGISMGRPSVFVRLSGCNLACHWCDTPYTWFFEGHAGPHRGEQRYDRRANSVTLDIAAVAAAVRQYDCPHIVFTGGEPLLQQPALAALCAMLGPAYHIEIESNGTVALTAGFAPHVHQINLSPKLGHSGNAESTRRKEDALAAYASDPRAWFKFVIADPADADEVAALAERFAIPAERIILMPEGTDSATLRSRTAWLAPLCLDRGWRFTDRLHIHLYGDTRGT

SEQ ID NO: 28418 - protein, 228 aa, Blastopirellula cremea
  misc_feature (1)..(228): tr|A0A368KU97|A0A368KU97_9PLAN 7-carboxy-7-deazaguanine synthase OS=Blastopirellula cremea OX=1031537 GN=queE PE=3 SV=1
MRIAEIYPSIQGEGLLTGEPSTFVRASGCNLRCWFCDTPHASWNPEGEDLSVAEILGRIELLDVSNVVLTGGEPMLFAELIPLCEGIRKSGRHITVETAGTLYLPLVCDLMSLSPKLSNSTPDAETYPRWSRRHEQTRQQMDVVQRLLDEFPYQLKFVIDRQTDCDEVLQYLSLLPGVERERVFVMPQGIEVSQLEAIGTWLEPWAKTHGLTVCHRRQIEWFGNVRGT

SEQ ID NO: 28419 - protein, 228 aa, Blastopirellula marina
  misc_feature (1)..(228): tr|A3ZZE4|A3ZZE4_9PLAN 7-carboxy-7-deazaguanine synthas e OS=Blastopirellula marina DSM 3645 OX=314230 GN=queE PE=3 SV=1
MRIAEIYRSIQGEGALTGVTSTFVRASGCNLRCWFCDTPHASWKPEGEDLSVAEILGRIALLDCDHVVLTGGEPMLFAEMIPLCEGIHVAGRHITIETAGTLYLPLTCDVMSISPKMSNSAPPLDDHPRWRRRHEQTRKAPEVIRQLIDEHAYQFKFVIDRPADAEEVLRYLDLYPQINRQTVFMMPQGTEAGELEAIRTWLEPWCDQHQLQFGPRRQIEWFGALRGT

SEQ ID NO: 28420 - protein, 228 aa, Blastopirellula marina
  misc_feature (1)..(228): tr|A0A2S8FDT8|A0A2S8FDT8_9PLAN 7-carboxy-7-deazaguanine synthase OS=Blastopirellula marina OX=124 GN=queE PE=3 SV=1
MRIAEIYRSVQGEGALTGVTSTFVRASGCNLRCWFCDTPHASWRPEGEDLSVAEILGRIALLDCDHVVLTGGEPMLFSEMIPLCEGIRDAGRHITIETAGTLYLPLPCDLMSISPKMSNSAPPLDDFPRWHRRHEQTRNAPDVILHLIAEHAYQFKFVIDRPADADEVLRYLDRFPQIDRSCVFMMPQGTELSELEATGKWLQPWCDEHQLQFGPRRQIEWYGAVRGT

SEQ ID NO: 28421 - protein, 228 aa, Blastopirellula sp.
  misc_feature (1)..(228): tr|A0A2G2JNY9|A0A2G2JNY9_9PLAN 7-carboxy-7-deazaguanine synthase OS=Blastopirellula sp. OX=2024826 GN=queE PE= 3 SV=1
MRVAEIYKSIQGEGRLTGTESVLVRASGCNLRCWFCDTPFASWHPEGEDLSVAEVLGRIELLNCQHVILTGGEPMLFAELIPLCEGIRQRGRHITIETAGTLYLPVVSDLMSISPKMKNSAPDPKEHARWHQRHEQSRKSPEVIRRLIDEYECQFKFVIDHLDDCGEVLAYLDEFLEINRDDVYLMPQGTTLEEITIKGEWLEPWCAENDLHYCPRRQIEWFGFVRGT

SEQ ID NO: 28422 - protein, 228 aa, Blastopirellula sp.
  misc_feature (1)..(228): tr|A0A2E0B0E5|A0A2E0B0E5_9PLAN 7-carboxy-7-deazaguanine synthase OS=Blastopirellula sp. OX=2024826 GN=queE PE= 3 SV=1
MKIAEIYESVQGEGFLTGTDSIFVRTSGCNLRCRFCDTPFTSWAPVGDELTIDQILAQIAPFAARHVVITGGEPLLHSDLVPLCSELAALDKHITIETAGTLSLDLKCDLMSISPKLSNSTPSMQLAESWREKHESNRFAPEVIRSLTNGYPYQFKFVVESPQDCLEIEEYLASFPNIDRQRVLLMPEGTDVDSLNATKQWLQPYCEQHNLHFCPRMQITWFGYERAT

SEQ ID NO: 28423 - protein, 206 aa, Blattabacterium cuenoti
  misc_feature (1)..(206): tr|M5AD37|M5AD37_9FLAO 7-carboxy-7-deazaguanine synthas e OS=Blattabacterium cuenoti BPAA OX=1229512 GN=queE PE =3 SV=1
MNEKISYPIKESFYSIQGEGHYYGIAAYFIRFGGCNIKCDWCDTKESWNIKQKDFLPIHKIIANVVNNNHQIKTVVITGGEPTMWNLSPLIKKLKKKGYRIHIETSGSYPIKEKYVDWITISPKKIKLPIRENYKKINELKIVISDENDFSFAEEQAAYIETTNCFLFLQPEWNNTFNILPKIISYIKKNPKWRISLQIHKMLNIP

SEQ ID NO: 28424 - protein, 206 aa, Blattabacterium cuenoti
  misc_feature (1)..(206): tr|A0A224AJZ2|A0A224AJZ2_9FLAO 7-carboxy-7-deazaguanine synthase OS=Blattabacterium cuenoti STAT OX=1457030 GN =queE PE=3 SV=1
MKKDISYPIKESFYSIQGEGFYYGIAAYFIRFGGCNIKCDWCDTKESWNIEKKDFISIHKIISNVVNNNHKIKTVIITGGEPTMWNLFPLIEKLKKKKYRIHIETSGSYPIKEKYVDWITISPKKIKLPIQENYKKINELKIIISDENDFLFAEEQASYIKSTNCFLFLQPEWNNISWILPKIVSYIKKNPKWRISLQIHKILNIP

SEQ ID NO: 28425 - protein, 203 aa, Blattabacterium sp.
  misc_feature (1)..(203): tr|I3QGB1|I3QGB1_9FLAO 7-carboxy-7-deazaguanine synthas e OS=Blattabacterium sp. (Blaberus giganteus) OX=118605 1 GN=queE PE=3 SV=1
MKEISYPIKESFYSIQGEGHFYGIAAYFIRFEGCNIKCDWCDTKESWNIKKKDFVPIHKIIANINNYKVKTVIITGGEPMMWDLYPLIKKLKKKEYRIHIETSGFYPIKEKYVDWITISPKKIKRPIQENYKKINELKIIISDENDFFFAEEQANYVKSKNCFLFLQPEWTNIFRIIPKIISYIKENPKWRISLQIHKMLNIP

SEQ ID NO: 28426 - protein, 203 aa, Blattabacterium sp.
  misc_feature (1)..(203): tr|G7SR62|G7SR62_9FLAO 7-carboxy-7-deazaguanine synthas e OS=Blattabacterium sp. (Mastotermes darwiniensis) str . MADAR OX=1074889 GN=queE PE=3 SV=1
MKSISFPIKETFYSLQGEGHYFGIAAYFIRFGGCNIQCDWCDTKYSWKIKKKDFLTISQIINNINNEKVKTIVITGGEPTMWDLSPLTRILKKKGYRIHVETSGSYPIDEKNIDWITLSPKKKKRPLEENYKKMNELKIIIDDESDFFFAEEQALYAKKNNCIFILQPEWKKTIKIIPKIISYIKNHPKWKISLQIHKILNIP

SEQ ID NO: 28427 - protein, 222 aa, Blautia luti
  misc_feature (1)..(222): tr|A0A564VXI1|A0A564VXI1_9FIRM 7-carboxy-7-deazaguanine synthase OS=Blautia luti OX=89014 GN=queE PE=3 SV=1
MSTYQVVEKFVSINGEGRRAGELAAFIRFKGCNLQCSYCDTSWANEPGCESERLTEEEILSWIRETGVKNVTLTGGEPLLRKGMEELIEAILEDPSRRVEIETNGSVDLKPYHILKKRPFFTMDYKAPDSGMEKEMLLSNLELLGSEDTLKFVVSSRRDMEKALEILEKYRLVGKTAVYFSPVFGRIQPVEIVDFLMEKKLNDVKLQIQLHKVIWDPQKRGV

SEQ ID NO: 28428 - protein, 222 aa, Blautia obeum
  misc_feature (1)..(222): tr|A0A367FV02|A0A367FV02_9FIRM 7-carboxy-7-deazaguanine synthase OS=Blautia obeum OX=40520 GN=queE PE=3 SV=1
MSTYQVVEKFVSINGEGRRAGELAAFIRFKGCNLQCSHCDTSWANEPGCESERLTEEEILSWIRETGVKNVTLTGGEPLLRKGMEELIEAILEDPSQRVEIETNGSVDLKPYHILKKRPSFTMDYKAPDSGMEKEMLLSNLELLGSEDTLKFVVSSRRDMEKALEILEKYRLVGKTAVYFSPVFGRIQPVEIVDFLMEKKLNDVKLQIQLHKVIWDPQKRGV

SEQ ID NO: 28429 - protein, 222 aa, Blautia obeum
  misc_feature (1)..(222): tr|A0A411ZLJ8|A0A411ZLJ8_9FIRM 7-carboxy-7-deazaguanine synthase OS=Blautia obeum OX=40520 GN=queE PE=3 SV=1
MSKYEVVEKFVSINGEGTKAGQLAVFIRFKGCNLKCKYCDTKWANEQDTLYQPMTEEEILDYVLSTGVKNVTLTGGEPLLRDDIEKVITALAENNLNVEIETNGSIFLDKIRKLHKENVTFTMDYKLSCSGMEQSMNLGNFDILNSNDTVKFVVGSREDLIKTKQIMEKYNLYGKCNLYISPVFGMIEPEEIVDFMKENVMNDVNMQIQLHKIIWSPDKKGV

SEQ ID NO: 28430 - protein, 267 aa, Blautia producta
  misc_feature (1)..(267): tr|A0A4P6M2J6|A0A4P6M2J6_9FIRM 7-carboxy-7-deazaguanine synthase OS=Blautia producta OX=33035 GN=queE_2 PE=4 S V=1
MHHCRLEEGQTGRCRVRKNVEGRIESVNYGRCTALALDPIEKKPLRRFYPGKKVLSVGSFGCNLSCPFCQNHEISMAGENGTDYIYLSPKELASQAEALRERGNIGAAFTYNEPLVGYEYVRDAAMEVRKRGMKNILVTNGAFTEETEEAVLPYIDAMNIDLKGFTEDYYEKLGGNLETVKAFIKKAVRACHVELTTLVVPGENNSVDEMRKLAEWVATLDCEIPLHVTRFFPRWKMRDREAADVGNVYQLAEEAGKYLKYVYTGNC

SEQ ID NO: 28431 - protein, 231 aa, Blautia producta
  misc_feature (1)..(231): tr|A0A4P6LRL7|A0A4P6LRL7_9FIRM 7-carboxy-7-deazaguanine synthase OS=Blautia producta OX=33035 GN=queE_1 PE=4 S V=1
MPINGFNKTTLLDYPGKIAATIFLGSCNFRCPFCHNSGLVLSPGEQPVIPMEDVLKVLKKRRGILEGVCITGGEPTLDKDIFCLVDKIKELGYPVKLDTNGSHPWILKKLINNKMIDMVAMDIKSSKESYSRVAGSKNLDLKPICESVDFLMSGSIPYEFRTTVVRELHTQEDFRSIGNWLAGCSAYYLQAYKDSPEVIRPGFSSYSKRDLDYFCLILSRTIPAVYIRGID

SEQ ID NO: 28432 - protein, 216 aa, Blautia sp.
  misc_feature (1)..(216): tr|A0A416NSX2|A0A416NSX2_9FIRM 7-carboxy-7-deazaguanine synthase OS=Blautia sp. AF22-5LB OX=2292964 GN=queE PE =3 SV=1
MKVVEKFTSINGEGTRAGELAVFIRFKGCNLRCSYCDTMWANEPECPYKEETPEEILNYVLGTGIHNVTLTGGEPLLQKDIRDLIHLLLQAGLQVEIETNGAVDLAAFCEERPVFTMDYKLPSSGCEDHMITENMELLEKNDTVKFVSGSQEDLLKALELIRTYDLTNRCHVYLSPVFGSIEPVQIVEFMLKHRLNGVRLQIQMHKVIWDPDERGV

SEQ ID NO: 28433 - protein, 216 aa, Blautia sp.
  misc_feature (1)..(216): tr|A0A373IQM8|A0A373IQM8_9FIRM 7-carboxy-7-deazaguanine synthase OS=Blautia sp. AM16-16B OX=2292969 GN=queE PE =3 SV=1
MKVVEKFTSINGEGTRAGELAVFIRFKGCNLRCSYCDTMWANEPECPYKEETPEEILNYVLGTGIHNVTLTGGEPLLQKDIRDLIHLLLQAGLQVEIETNGAVDLAAFCEERPVFTMDYKLPSSGCEDHMITENMELLEKNDTVKFVSGSQEDLLKALELIRTYDLTNRCHVYLSPVFGSIEPVQIVEFMLKHRLNGVRLQIQIHKVIWDPDKRGV

SEQ ID NO: 28434 - protein, 212 aa, Unknown
  misc_feature (1)..(212): tr|A0A1U9VD68|A0A1U9VD68_9RALS 7-carboxy-7-deazaguanine synthase OS=blood disease bacterium A2-HR MARDI OX=194 4648 GN=queE PE=3 SV=1
MTYAVKEIFYTLQGEGANTGRAAVFCRFAGCNLWSGREADRATAICQFCDTDFVGTDGTQGGKYPTADALADTVAAQWPADATGGQPLVVCTGGEPLLQLDRPLIDALHARGFEIAIETNGTLAVPDGIDWVCVSPKMGAELVVTRGDELKVVIPQQDQDLDAYERLDFRHFFLQPMDGPLARQNTALAVDLCQRRPRWHLSLQTHKMLGIR

SEQ ID NO: 28435 - protein, 212 aa, Unknown; identical to SEQ ID NO: 28434
  misc_feature (1)..(212): tr|G2ZJ30|G2ZJ30_9RALS 7-carboxy-7-deazaguanine synthas e OS=blood disease bacterium R229 OX=741978 GN=queE PE= 3 SV=1

SEQ ID NO: 28436 - protein, 213 aa, Bombella intestini
  misc_feature (1)..(213): tr|A0A1S8GNE9|A0A1S8GNE9_9PROT 7-carboxy-7-deazaguanine synthase OS=Bombella intestini OX=1539051 GN=queE PE=3 SV=1
MPYIVKELFATLQGEGAHSGRAAIFCRFTGCNLWSGREEDRYKAQCTFCDTDFIGTDGPGGGRFATAEALAAALDDCWQAHTADGTHRYVVFTGGEPLLQLDAALIAAVKARGFTIAVETNGSLLAPEGIDWVCVSPKPGQPLKQTHGHELKLVYPQQTLSPEQFAALDFQHFWLQPMDGPERLANTEKAVRYCQSHPQWRLSLQTHKLIGIP

SEQ ID NO: 28437 - protein, 210 aa, Bordetella ansorpii
  misc_feature (1)..(210): tr|A0A157RAM5|A0A157RAM5_9BORD 7-carboxy-7-deazaguanine synthase OS=Bordetella ansorpii OX=288768 GN=queE PE=3 SV=1
MTYAVKELFKTLQGEGAHAGRAAVFCRFAGCNLWSGRESDRATAACTFCDTDFIGTDGEGGGKFAQADLLADTLAATWGEGTDKRYVVFTGGEPLLQLDAELLAAVHARGFTVAIETNGTIQPPEGIDWICVSPKGKSPVVIERGNELKLVYPQLDARPEAFAHLDFQHFFLQPMDGPARAAHTERAVQYCMQHPQWRLSLQTHKYIGIP

SEQ ID NO: 28438 - protein, 210 aa, Bordetella ansorpii
  misc_feature (1)..(210): tr|A0A157SW01|A0A157SW01_9BORD 7-carboxy-7-deazaguanine synthase OS=Bordetella ansorpii OX=288768 GN=queE PE=3 SV=1
MTYAVKELFKTLQGEGAHAGRAAVFCRFAGCNLWSGRESDRATAACTFCDTDFIGTDGDGGGKFARADQLADTLAATWGEGMDQRYVVFTGGEPLLQLDAELLAAVHARGFTVAIETNGTIPPPEGIDWICVSPKGKSPVVIERGNELKLVYPQLDAQPEAFAHLDFQHFFLQPMDGPARAAHTERAVQYCMRHPQWRLSLQTHKYIGIP

SEQ ID NO: 28439 - protein, 210 aa, Bordetella avium
  misc_feature (1)..(210): tr|Q2KZU6|Q2KZU6_BORA1 7-carboxy-7-deazaguanine synthas e OS=Bordetella avium (strain 197N) OX=360910 GN=queE P E=3 SV=1
MTYSAKEIFKTLQGEGAQAGRAAVFCRFSGCNLWSGRESDRAAAACTFCDTDFVGSDGEGGGKFRDAQALADTIARTWGPDRAGRYVVFTGGEPLLQLDEALIDAVHAQGFTIAIETNGTLPVPAGVDWICVSPKGRAPVVQTRGQELKLVFPQVEAPPEAFAGLDFEHFFLQPLDSPLRRAHTEAAVQYCMAHPQWRLSVQTHKYIGIP

SEQ ID NO: 28440 - protein, 210 aa, Bordetella bronchialis
  misc_feature (1)..(210): tr|A0A193FZE1|A0A193FZE1_9BORD 7-carboxy-7-deazaguanine synthase OS=Bordetella bronchialis OX=463025 GN=queE P E=3 SV=1
MTYAVKEIFKTLQGEGAQAGRAAVFCRFAGCNLWSGRESDRATAACTFCDTDFVGTDGPGGGKFATADLLADALAAEWGSDTENRYVVFTGGEPLLQLDRALVDAVHARGFTIAIETNGTMQPPPGIDWICVSPKGTAPVVLRTGNELKLVYPQADARPEAFADLEFDHFFLQPMDGPARVANTQAIVEYCMRHPQWRLSLQTHKYIGIP

SEQ ID NO: 28441 - protein, 210 aa, Bordetella bronchiseptica
  misc_feature (1)..(210): tr|A0A0H3LUJ3|A0A0H3LUJ3_BORBR 7-carboxy-7-deazaguanine synthase OS=Bordetella bronchiseptica (strain ATCC BAA -588 / NCTC 13252 / RB50) OX=257310 GN=queE PE=3 SV=1
MAYSVKELFKTLQGEGAQAGRAAVFCRFAGCNLWTGRESDRAGAACTFCDTDFVGTDGQGGGKFADAAGLADAIAACWGEHPADRYVVFTGGEPLLQLDEALLQAVHAQGFTVAIETNGTLPPPPGIDWICVSPKGRAPVVVERGHELKLVFPQADARPEAFAHLAFEHFFLQPMDGPARAAHTAQAVQYCLDHPQWRLSLQTHKYIGIP

SEQ ID NO: 28442 - protein, 210 aa, Bordetella bronchiseptica; identical to SEQ ID NO: 28441
  misc_feature (1)..(210): tr|A0A4U9QRF7|A0A4U9QRF7_BORBO 7-carboxy-7-deazaguanine synthase OS=Bordetella bronchiseptica OX=518 GN=queE P E=3 SV=1

SEQ ID NO: 28443 - protein, 210 aa, Bordetella flabilis
  misc_feature (1)..(210): tr|A0A193GDB0|A0A193GDB0_9BORD 7-carboxy-7-deazaguanine synthase OS=Bordetella flabilis OX=463014 GN=queE PE=3 SV=1
MTYAAKEIFKTLQGEGAQAGRAAVFCRFAGCNLWSGRESDRATAACTFCDTDFVGTDGPGGGKFATADELADALVAEWGPGTNGRYVVFTGGEPLLQLDGALLDAVHARGFTVAIETNGTMEPPAGIDWICVSPKGKAPVLLRHGNELKLVYPQADARPEAFAGLEFDHFFLQPMDGPDRLANTTRAVEYCMQHPQWRLSLQTHKYIGIP

SEQ ID NO: 28444 - protein, 210 aa, Bordetella genomosp.
  misc_feature (1)..(210): tr|A0A261SAG8|A0A261SAG8_9BORD 7-carboxy-7-deazaguanine synthase OS=Bordetella genomosp. 10 OX=1416804 GN=queE PE=3 SV=1
MTYAAKEIFKTLQGEGAQAGRAAVFCRFAGCNLWSGRESDRAGAACTFCDTDFVGTDGPGGGKFSTPQALARTLAATWGPERDRRYVVFTGGEPLLQLDAALLDAVHAEGFEVAIETNGTLLPPPGIDWICVSPKGTAPVALRAGNELKLVYPQLDAPPESFAGLDFEHFFLQPMDGPQRVANTERAVRYCTQHPQWRLSLQTHKYIGIP

SEQ ID NO: 28445 - protein, 210 aa, Bordetella genomosp.
  misc_feature (1)..(210): tr|A0A261U3A6|A0A261U3A6_9BORD 7-carboxy-7-deazaguanine synthase OS=Bordetella genomosp. 4 OX=463044 GN=queE P E=3 SV=1
MTYSAKEIFKTLQGEGAQAGRAAVFCRFAGCNLWSGREADRASAACTFCDTDFVGTNGEGGGKFATAALLADTIAATWGPDTKDRYVVFTGGEPLLQLDEALLEAVHAHGFTVAIETNGTLPPPPGIDWICVSPKGTAPVVIERGHELKLVYPQANALPETYAHLDFEHFFLQPMDGPARAANTEQAVQYCLQHPQWRLSLQTHKYIGIP

SEQ ID NO: 28446 - protein, 210 aa, Bordetella hinzii
  misc_feature (1)..(210): tr|A0A0H4WD04|A0A0H4WD04_9BORD 7-carboxy-7-deazaguanine synthase OS=Bordetella hinzii OX=103855 GN=queE PE=3 S V=1
MTYSAKEIFKTLQGEGAQAGRAAVFCRFSGCNLWSGRESDRATAACTFCDTDFVGTDGQGGGKFRDAQALAETIARTWGPQTRDRYVVFTGGEPLLQLDEALIAAVHAQGFAIAIETNGTLPVPPGVDWICVSPKGRAPVVQTRGQELKLVFPQPDTPPEAFAGLDFEHFFLQPMDGPLRLANTEAAVSYCMAHPQWRLSVQTHKYIGIP

SEQ ID NO: 28447 - protein, 210 aa, Bordetella holmesii
  misc_feature (1)..(210): tr|A0A158M4Y2|A0A158M4Y2_9BORD 7-carboxy-7-deazaguanine synthase OS=Bordetella holmesii CDC-H585-BH OX=1331206 GN=queE PE=3 SV=1
MTYSAKEIFKTLQGEGAQAGRAAVFCRFSGCNLWSGRERDRATAACTFCDTDFVGTDGEGGGKFRDAAALAATLADTWGPETAGRYVVFTGGEPLLQLDAALIAAVHAQGFTIAIETNGTLPVPAGVDWICVSPKGKAPVVQTRGQELKLVFPQADTPPEAFANLDFEHFFLQPMDGPQRLANTEAAVTYCMAHPQWRLSVQTHKYIGIP

SEQ ID NO: 28448 - protein, 210 aa, Bordetella parapertussis
  misc_feature (1)..(210): tr|K0M9F0|K0M9F0_BORPB 7-carboxy-7-deazaguanine synthas e OS=Bordetella parapertussis (strain Bpp5) OX=1208660 GN=queE PE=3 SV=1
MAYSVKELFKTLQGEGAQAGRAAVFCRFAGCNLWTGRESDRAGAACTFCDTDFVGTDGQGGGKFADAAGLADAIAACWGEHPADRYVVFTGGEPLLQLDEALLQAVHAQGFTVAIETNGTLPPPPGIDWICVSPKGRAPVVVERGHELKLVFPQADARPEAFAHLAFEHFFLQPMDGPARAAHTTQAVQYCLDHPQWRLSLQTHKYIGIP

SEQ ID NO: 28449 - protein, 210 aa, Bordetella parapertussis; identical to SEQ ID NO: 28441
  misc_feature (1)..(210): tr|Q7W9U9|Q7W9U9_BORPA 7-carboxy-7-deazaguanine synthas e OS=Bordetella parapertussis (strain 12822 / ATCC BAA- 587 / NCTC 13253) OX=257311 GN=queE PE=3 SV=1

SEQ ID NO: 28450 - protein, 210 aa, Bordetella pertussis; identical to SEQ ID NO: 28448
  misc_feature (1)..(210): sp|Q7VVJ8|QUEE_BORPE 7-carboxy-7-deazaguanine synthase OS=Bordetella pertussis (strain Tohama I / ATCC BAA-589 / NCTC 13251) OX=257313 GN=queE PE=3 SV=1

SEQ ID NO: 28451 - protein, 210 aa, Bordetella pertussis; identical to SEQ ID NO: 28448
  misc_feature (1)..(210): tr|A0A171JVR7|A0A171JVR7_BORPT 7-carboxy-7-deazaguanine synthase OS=Bordetella pertussis 2356847 OX=1331248 GN =queE PE=3 SV=1

SEQ ID NO: 28452 - protein, 391 aa, Bordetella petrii
  misc_feature (1)..(391): tr|A9IPG0|A9IPG0_BORPD 7-carboxy-7-deazaguanine synthas e OS=Bordetella petrii (strain ATCC BAA-461 / DSM 12804 / CCUG 43448) OX=340100 GN=queE PE=3 SV=1
MARGGFFHGSVVGDLAAQPLDFAVQHLALHAAALRGAGGTRGPARPGRTRHGAHHLGEPLERLAAVLFLAAEGLRLDHDDAVLGHAAVGQRAQRLFDVRGQAGSTHVETQVNGAGHLVDVLAAGALGADHPELDIPLVQVQVFLDVIHRPPVYASRPAAATRAVPVKWRFGQGRPPGRGHRMTYSTKEIFKTLQGEGAQAGRAAVFCRFAGCNLWSGREADRAGAVCTFCDTDFVGTDGPGGGKFASAAQLADAIAAAWGPGTQDRYVVFTGGEPLLQLDAALLQAVHGHGFTVAIETNGTLPAPAGIDWICVSPKGSARVVIERGHELKLVYPQAEARPEAYAHLDFQHFFLQPMDGPARAANTQQAVQYCMQHPQWRLSLQTHKYIGIP

SEQ ID NO: 28453 - protein, 210 aa, Bordetella pseudohinzii
  misc_feature (1)..(210): tr|A0A0J6C913|A0A0J6C913_9BORD 7-carboxy-7-deazaguanine synthase OS=Bordetella pseudohinzii OX=1331258 GN=queE PE=3 SV=1
MTYSAKEIFKTLQGEGAQAGRAAVFCRFSGCNLWSGRESDRATAACTFCDTDFVGTDGEGGGKFRDAQALAEAIARAWGPQTHGRYVVFTGGEPLLQLDEALIAAVHAQGFTIAIETNGTLPVPPGVDWICVSPKGRAPVVQTRGQELKLVFPQADTPPEAFAGLDFEHFFLQPMDGPQRLANTEAAVSYCMAHPQWRLSVQTHKYIGIP

SEQ ID NO: 28454 - protein, 210 aa, Bordetella sp.
  misc_feature (1)..(210): tr|A0A0S1XXU2|A0A0S1XXU2_9BORD 7-carboxy-7-deazaguanine synthase OS=Bordetella sp. N OX=1746199 GN=queE PE=3 S V=1
MTYAAKEIFKTLQGEGAQAGRAAVFCRFAGCNLWSGRESDRASAACRFCDTDFVGTDGPGGGKFTTAQALAATLASTWGPDRAHRYVVFTGGEPLLQIDAALLDAVHAEGFEIAIETNGTLLPPPGIDWICVSPKGTAPVALRAGNELKLVYPQLDAPPASFAGLDFEHFFLQPMDGPDRVANTERAVQYCTQHPQWRLSLQTHKYIGIP

SEQ ID NO: 28455 - protein, 211 aa, Bordetella sp.
  misc_feature (1)..(211): tr|A0A2V1K725|A0A2V1K725_9BORD 7-carboxy-7-deazaguanine synthase OS=Bordetella sp. 3d-2-2 OX=2175229 GN=queE P E=3 SV=1
MTYAVKEIFYTLQGEGINAGRPAVFCRFAGCNLWSGREQDRADAVCRFCDTDFVGTDGENGGKYPHAADLVARIASLWPADDHAHRFVVCTGGEPMLQMDAALVDALHEAGFFVAIETNGTLPVLETIDWVCVSPKADAALVVERGNELKVVFPQENQPLAAYARLDFDYFLMQPMDGPSQALNTRLAIEWCKRHPQWRLSMQTHKYLNIP

SEQ ID NO: 28456 - protein, 223 aa, Bordetella trematum
  misc_feature (1)..(223): tr|A0A157SRS0|A0A157SRS0_9BORD 7-carboxy-7-deazaguanine synthase OS=Bordetella trematum OX=123899 GN=queE PE=3 SV=1
MPGLHLSAVLRPAMTYSAKEIFKTLQGEGAQAGRAAVFCRFSGCNLWSGRESDRAQAACTFCDTDFIGTDGPGGGKFRDAQALADTLARTWGDERAGRYVVFTGGEPLLQLDDALIAAVRAQGFTIALETNGTLPVPAGVDWICVSPKGSARIVQTHGQELKLVYPQAEAPPQAFAGLDFEHFFLQPMDNAQRLANTEAAVNYCMAHPQWRLSLQTHKYIGIP

SEQ ID NO: 28457 - protein, 243 aa, Bosea sp.
  misc_feature (1)..(243): tr|A0A085F0G7|A0A085F0G7_9BRAD 7-carboxy-7-deazaguanine synthase OS=Bosea sp. LC85 OX=1502851 GN=queE PE=3 SV= 1
MKGRIRISEIFGPTIQGEGPLIGRPTVFVRTGGCDYRCRWCDTLHAVLREYRDEWTLMTPTEILAQVEDLAGSVPVLVSLSGGNPALQPLASLIALGHQKGYTFALETQGSVPQPWFAALEWLMLSPKPPSSGMATDWQALDECITAGARGPRCVLKLAVFDDDDYAYARLVAKRYPALPIYLQVGNPAPSMTHAGPGSEEADIPDLMQRFRWLVDKVAADRWFTATVLPQLHVLAWGHRRGI

SEQ ID NO: 28458 - protein, 224 aa, Bowmanella sp.
  misc_feature (1)..(224): tr|A0A4Q9XJ12|A0A4Q9XJ12_9ALTE 7-carboxy-7-deazaguanine synthase OS=Bowmanella sp. JS7-9 OX=1605368 GN=queE PE =3 SV=1
MQTYKINEVFQSIQGEGAFTGVPSVFIRIQGCPVGCSWCDTKHTWTVDPELKTSSAAVLAKSEPDECWFEATALDLISLMETEGYKARHIIITGGEPCMYDLTSLTSALLDQGFSVQIETSGTFEVIADPRTWVTVSPKVGMQGGYAVLDQPLNVASEIKHPVAMQKHVDDLKALLARPACNSNALVYLQPISQQTRATELAVAQCIDNNWRLSLQTHKFIGIE

SEQ ID NO: 28459 - protein, 225 aa, Brachyspira sp.
  misc_feature (1)..(225): tr|R5H995|R5H995_9SPIR 7-carboxy-7-deazaguanine synthas e OS=Brachyspira sp. CAG:484 OX=1262759 GN=queE PE=3 SV =1
MTNKAKIREIFTSIQGEGPYVGTKQLFIRFCGCNLNCAYCDTDFEAAKSKDYTVEELINKINEYGEIFTISLTGGEPLCSAAFLKDFLPEIRKYGHKIYLETNATLPEALEKIVDSVDVVSADIKLKSSTGMNIDSAVYEKFYSLASKKECFAKVVFNEAISDEEINFCVSIAQKYGLLLILQPEMKGNDFSVTSEFSEIIFEKFYTKYSNIRLIPQVHKFINLR

SEQ ID NO: 28460 - protein, 233 aa, Bradymonadaceae bacterium
  misc_feature (1)..(233): tr|A0A3D8MT90|A0A3D8MT90_9DELT 7-carboxy-7-deazaguanine synthase OS=Bradymonadaceae bacterium TMQ3 OX=2283320 GN=queE PE=3 SV=1
MSLTTPAQRAADIAQERGTPEREERSWLRLTEIFFSIQGESSFAGMPCTFVRLSRCNLRCTWCDTTYSFNGGDRTEIDDIIDRLDAIGCKIVEITGGEPLLQRPVHTLMSRLCDLGYTVLIETSGSLDIAPIDERVHIIMDLKAPGSGEVDKNLFSNIAHLKPTDEVKFVLLNREDFDWAIATIEEHHLLEHAQIIFSPVHGELSGHELANWILESGKTIRLGLQIHKFLDVE

SEQ ID NO: 28461 - protein, 216 aa, Bradymonadales bacterium
  misc_feature (1)..(216): tr|A0A5B8XYT8|A0A5B8XYT8_9DELT 7-carboxy-7-deazaguanine synthase OS=Bradymonadales bacterium V1718 OX=2600177 GN=queE PE=3 SV=1
MSASQETQSLVRLTEIFYSIQGEGRASGRPCVFVRLSRCNLRCTWCDTTYSFKGGEKFTFDDVMAEVGKYPTKLVEITGGEPLLQPTVHPLMTAFADAGYEVMIETSGSLDISKIDPRVHIIMDLKAPGSSEEKRNLWANLEHLKPTDEVKIVILDQADYEWARDKVREHKLEERCHVIFSPVHGQMDGNALANWILEDGLNVRLGLQIHKFLSVE

SEQ ID NO: 28462 - protein, 212 aa, Bradymonadales bacterium
  misc_feature (1)..(212): tr|A0A5B8YAG0|A0A5B8YAG0_9DELT 7-carboxy-7-deazaguanine synthase OS=Bradymonadales bacterium YN101 OX=2292766 GN=queE PE=3 SV=1
MKDDQLRLTEIFYSIQGESTRAGLPCVFVRLSRCNLRCSWCDTPYSFKGGDKKSLDDIVAQVESYGCNLVEITGGEPLLQPDVHPLMTRLCDEGYEVLIETSGSLDIAPIDDRVRVIMDLKAPGSGEVEKNLWENIAELKPTDEVKIVVLDRQDFDWAVEACREHELFERVDEVHFSPVHGELDSNTLANWILEERLPVRLNLQIHKFMGVE

SEQ ID NO: 28463 - protein, 213 aa, Bradymonas sediminis
  misc_feature (1)..(213): tr|A0A2Z4FP66|A0A2Z4FP66_9DELT 7-carboxy-7-deazaguanine synthase OS=Bradymonas sediminis OX=1548548 GN=queE PE =3 SV=1
MTETTQLRLTEIFYSIQGESAAAGRPCVFVRLSRCNLRCTWCDTTYSFKGGDQSSFDAVLEEIAGYGCNLVEITGGEPLLQEAVLPFMTRLCDEGYEVLIETSGSLDISPIDDRVCVIMDFKAPGSGMVDKNLWSNVDALQSKDELKFVLLDRADFDWAVETCRERELFGRVKDVHFSPVHGVLDPSLLAEWILEEKLPVRLNLQVHKFLGVE

SEQ ID NO: 28464 - protein, 212 aa, Bradymonas sp.; identical to SEQ ID NO: 28462
  misc_feature (1)..(212): tr|A0A4Y6PVU3|A0A4Y6PVU3_9DELT 7-carboxy-7-deazaguanine synthase OS=Bradymonas sp. YN101 OX=2589075 GN=queE PE =3 SV=1

SEQ ID NO: 28465 - protein, 210 aa, Bradyrhizobiaceae bacterium
  misc_feature (1)..(210): tr|A0A257KRL2|A0A257KRL2_9BRAD 7-carboxy-7-deazaguanine synthase OS=Bradyrhizobiaceae bacterium PARB1 OX=20155 76 GN=queE PE=3 SV=1
MSYAVKEIFLTLQGEGAHAGRASVFCRFAGCNLWTGREQDRATAVCQFCDTDFVGMDGTLGGRYASAEALADTIAAQWVGPGDNRYVVLTGGEPLLQVNDELVAALHERGFEIGVETNGTVAPPAGIDWICVSPKAGADLVIRAGHELKLVYPQPAAMPEQFEALAFERFSLQPMDGADAISNTAQAVDYCLKHPQWRLSVQTHKTLGIR

SEQ ID NO: 28466 - protein, 210 aa, Bradyrhizobiaceae bacterium
  misc_feature (1)..(210): tr|A0A431QPE8|A0A431QPE8_9BRAD 7-carboxy-7-deazaguanine synthase OS=Bradyrhizobiaceae bacterium OX=2072420 GN= queE PE=3 SV=1
MSYAVKEIFMTLQGEGAQAGRAAVFCRFAGCNLWSGREADRATATCRFCDTDFVGTDGTFGGRYEDAAALAAAIAGQWTGGAADRYTILTGGEPLLQVDADLIAALHARDFAVGIETNGTLIPPDGIDWICVSPKAGAELKLQQGHELKLVYPQDGAEPERFADLAFQRFSLQPMDGPEAAANTARAIQYCQHHPQWRLSLQTHKMIGIR

SEQ ID NO: 28467 - protein, 210 aa, Bradyrhizobium arachidis
  misc_feature (1)..(210): tr|A0A1I7M196|A0A1I7M196_9BRAD 7-carboxy-7-deazaguanine synthase OS=Bradyrhizobium arachidis OX=858423 GN=queE PE=3 SV=1
MSYAVKEIFLTLQGEGAHAGRASVFCRFAGCNLWSGREADRTDAVCKFCDTDFVGTDGTLGGRYASAADLADTIAAQWTASNDNRYVVLTGGEPLLQVDADLIDALHARGFEIGVETNGTIAAPDGLDWICVSPKGGSELVQTRGHELKLVYPQALAAPETFEGLAFERFSLQPMDGPEVTENTARAIDYCLRHPQWRLSVQTHKSLGIR

SEQ ID NO: 28468 - protein, 210 aa, Bradyrhizobium betae
  misc_feature (1)..(210): tr|A0A4Q1VRR1|A0A4Q1VRR1_9BRAD 7-carboxy-7-deazaguanine synthase OS=Bradyrhizobium betae OX=244734 GN=queE PE= 3 SV=1
MSYAVKEIFLTLQGEGAHAGRASVFCRFAGCNLWSGREADRQDATCKFCDTDFVGTDGTLGGRYATAAELADTIAAQWTAASDNRYAVLTGGEPLLQVDGALIDALHARGFEIGVETNGTIEAPAGLDWICVSPKGGSELVQRRGHELKLVYPQALAAPETFEGLAFKRFSLQPMDGPDVIKNTAQAIDYCLRHPQWRLSVQTHKSLGIR

SEQ ID NO: 28469 - protein, 210 aa, Bradyrhizobium canariense
  misc_feature (1)..(210): tr|A0A1H2B1W4|A0A1H2B1W4_9BRAD 7-carboxy-7-deazaguanine synthase OS=Bradyrhizobium canariense OX=255045 GN=que E PE=3 SV=1
MSYAVKEIFLTLQGEGAHAGRAAVFCRFSGCNLWSGREQDRATATCRFCDTDFVGTDGTLGGRYGSAAELADTIAGQWMGAEANRYVVLTGGEPLLQVDTALIDALHGHRFSIGIETNGTIEPPDGMDWICVSPKAGAELVVRRGHELKLIYPQADAAPEAFVDLAFERFSLQPMDGPDVIENTARAVDYCLRHPQWRLSLQTHKTLGIR

SEQ ID NO: 28470 - protein, 210 aa, Bradyrhizobium canariense
  misc_feature (1)..(210): tr|A0A1X3GCI4|A0A1X3GCI4_9BRAD 7-carboxy-7-deazaguanine synthase OS=Bradyrhizobium canariense OX=255045 GN=que E PE=3 SV=1
MSYAVKEIFLTLQGEGAHAGRASVFCRFAGCNLWSGREADRQEATCKFCDTDFVGTNGTLGGRYGSAAELADTIAAQWTASTDNRYVVLTGGEPLLQVDTALVDALHARGFEIGVETNGTIAPPEGLDWICVSPKGGSDLVIRRGHELKLVYPQPLAMPEAFADLAFERFSLQPMDGPEVAQNTAGAIDYCLNHPQWRLSVQTHKSLGIR

SEQ ID NO: 28471 - protein, 210 aa, Bradyrhizobium centrolobii
  misc_feature (1)..(210): tr|A0A176YAG9|A0A176YAG9_9BRAD 7-carboxy-7-deazaguanine synthase OS=Bradyrhizobium centrolobii OX=1505087 GN=q ueE PE=3 SV=1
MSYAVKEIFLTLQGEGAHAGRASVFCRFAGCNLWSGREADRADAVCKFCDTDFVGTDGTLGGRYASATELADTIAAQWTGSADNRYVVLTGGEPLLQVDAALIEALHARGFEIGVETNGTVLPPEGLDWICVSPKGGSELVLRHGHELKLVYPQPLAAPEAFEGLAFERFSLQPMDGPEVAENTARAIDYCLRHPRWRLSVQTHKSLGIR

SEQ ID NO: 28472 - protein, 210 aa, Bradyrhizobium daqingense
  misc_feature (1)..(210): tr|A0A562L9C3|A0A562L9C3_9BRAD 7-carboxy-7-deazaguanine synthase OS=Bradyrhizobium daqingense OX=993502 GN=que E PE=3 SV=1
MSYAVKEIFLTLQGEGAHAGRASVFCRFAGCNLWSGREADRAEATCKFCDTDFVGTDGTLGGRYASAAELADTIASQWTGTAANRYVVLTGGEPLLQVDAALIEALHARGFEIGVETNGTIAAPDGLDWICVSPKGGSELVQRRGHELKLVYPQALAAPEAFEDLAFERFSLQPMDGPEVIQNTARAIDYCLRHPQWRLSVQTHKSLGIR

SEQ ID NO: 28473 - protein, 210 aa, Bradyrhizobium diazoefficiens
  misc_feature (1)..(210): sp|Q89SC0|QUEE_BRADU 7-carboxy-7-deazaguanine synthase OS=Bradyrhizobium diazoefficiens (strain JCM 10833 / IA M 13628 / NBRC 14792 / USDA 110) OX=224911 GN=queE PE=3 SV=1
MSYAVKEIFLTLQGEGAHAGRASVFCRFAGCNLWSGREADRQDATCKFCDTDFVGTDGTLGGRYASAVELADTIAAQWTASNDNRYVVLTGGEPLLQVDDALIDALHARGFEIGVETNGTIAAPDGLDWICVSPKGGSELVLRRGHELKLVYPQALAAPETFEGLAFERFSLQPMDGPEVAENTARAIDYCLRHPQWRLSVQTHKSLGIR

SEQ ID NO: 28474 - protein, 210 aa, Bradyrhizobium diazoefficiens; identical to SEQ ID NO: 28473
  misc_feature (1)..(210): tr|A0A0E4BT26|A0A0E4BT26_9BRAD 7-carboxy-7-deazaguanine synthase OS=Bradyrhizobium diazoefficiens OX=1355477 G N=queE PE=3 SV=1

SEQ ID NO: 28475 - protein, 210 aa, Bradyrhizobium elkanii
  misc_feature (1)..(210): tr|A0A0D1M7F8|A0A0D1M7F8_BRAEL 7-carboxy-7-deazaguanine synthase OS=Bradyrhizobium elkanii OX=29448 GN=queE PE =3 SV=1
MSYAVKEIFLTLQGEGAHAGRASVFCRFAGCNLWSGREQDRAGAVCRFCDTDFVGTDGTLGGRYADAAELAGTIAAQWTGGDADRYVVLTGGEPLLQVDTDLIEALHGHGFAIAIETNGTIAPPDGLDWICVSPKAASELVVRRGHELKLVYPQPENRPEDFAGLSFERFSLQPMDGPDVIENTERAIEYCLKHPQWRLSVQTHKTLGIR

SEQ ID NO: 28476 - protein, 210 aa, Bradyrhizobium elkanii
  misc_feature (1)..(210): tr|A0A4Q4JY03|A0A4Q4JY03_BRAEL 7-carboxy-7-deazaguanine synthase OS=Bradyrhizobium elkanii OX=29448 GN=queE PE =3 SV=1
MSYAVKEIFLTLQGEGAHAGRASVFCRFAGCNLWSGREQDRAGAVCKFCDTDFVGTDGTLGGRYATAEELAGAIAAQWTGGEADRYVVLTGGEPLLQVDAALIEALHGHGFAIAIETNGTIAPPDGLDWICVSPKATAELVVRKGHELKLVYPQMENTPEDFAGLAFERFSLQPMDGPDVMENTERAIAYCLKHPQWHLSVQTHKTLGIR

SEQ ID NO: 28477 - protein, 210 aa, Bradyrhizobium erythrophlei
  misc_feature (1)..(210): tr|A0A1M5JL09|A0A1M5JL09_9BRAD 7-carboxy-7-deazaguanine synthase OS=Bradyrhizobium erythrophlei OX=1437360 GN= queE PE=3 SV=1
MSYAVKEIFLTLQGEGAHAGRAAVFCRFAGCNLWSGREQDRANATCKFCDTDFVGTNGTLGGRYASAEALADTIAAQWTGTAGHRYTVLTGGEPLLQVDIALVDALHARGFAIGVETNGTIAPPDGVDWICVSPKAGSDLVIRRGHELKLIYPQEDAAPEAFVDLAFERFSLQPMDGPDVIENTARAVDYCLSHPQWRLSLQTHKTLGIR

SEQ ID NO: 28478 - protein, 210 aa, Bradyrhizobium erythrophlei
  misc_feature (1)..(210): tr|A0A1M5GQ81|A0A1M5GQ81_9BRAD 7-carboxy-7-deazaguanine synthase OS=Bradyrhizobium erythrophlei OX=1437360 GN= queE PE=3 SV=1
MSYAVKEIFLTLQGEGAHAGRAAVFCRFSGCNLWSGREQDRAGATCKFCDTDFVGTDGTLGGRYATSDDLADAVASQWAGERRYRYVVLTGGEPLLQVDAELIDALRARGFAIGLETNGTIELPDGVDWVCVSPKAGAELRVRRGDELKLVYPQAGAMPPAFADLAFERFSLQPMDGPDVAANTERAVNYCMRHPQWRLSVQTHKTLGIR

SEQ ID NO: 28479 - protein, 210 aa, Bradyrhizobium genosp.
  misc_feature (1)..(210): tr|A0A4V2E7E9|A0A4V2E7E9_9BRAD 7-carboxy-7-deazaguanine synthase OS=Bradyrhizobium genosp. SA-3 OX=508868 GN=q ueE PE=3 SV=1
MSYAVKEIFLTLQGEGAHAGRASVFCRFAGCNLWSGREADRSEATCKFCDTDFVGTDGTLGGRYASAAELADTIAAQWAASTANRYVVLTGGEPLLQVDAALIDALHARGFEIGVETNGTIAAPDGLDWICVSPKGGSELVLRRGHELKLVYPQALAAPEAFEGLAFERFSLQPMDGPEIAQNTARAIDYCLRHPQWRLSVQTHKSLGIR

SEQ ID NO: 28480 - protein, 210 aa, Bradyrhizobium guangdongense
  misc_feature (1)..(210): tr|A0A410VC57|A0A410VC57_9BRAD 7-carboxy-7-deazaguanine synthase OS=Bradyrhizobium guangdongense OX=1325090 GN =queE PE=3 SV=1
MSYAVKEIFLTLQGEGAHVGRASVFCRFAGCNLWSGREVDRAGATCQFCDTDFVGTDGTLGGRYASAVELADTIAAQWTAKANNRYVVLTGGEPLLQVDAALVEALRARGFEIGVETNGTMAAPDGLDWICVSPKGGSELVLRQGHELKLVYPQALAAPEAFEGLAFERFSLQPMDGPDVIENTARAIDYCLRHPQWRLSVQTHKSLGIR

SEQ ID NO: 28481 - protein, 210 aa, Bradyrhizobium guangzhouense
  misc_feature (1)..(210): tr|A0A4Q0RBE6|A0A4Q0RBE6_9BRAD 7-carboxy-7-deazaguanine synthase OS=Bradyrhizobium guangzhouense OX=1325095 GN =queE PE=3 SV=1
MSYAVKEIFLTLQGEGAHAGRASVFCRFAGCNLWSGREADRAGATCQFCDTDFVGTDGTLGGRYATAVELADTIAAQWTGPASNCYVVLTGGEPLLQVDDALVAALHAKGFEIGVETNGTVEAPEGLDWICVSPKGGSALVLRQGHELKLVYPQALAAPETFEGLAFERFSLQPMDGPEVIENTARAIDYCLRHPQWRLSVQTHKSLGIR

SEQ ID NO: 28482 - protein, 210 aa, Bradyrhizobium huanghuaihaiense
  misc_feature (1)..(210): tr|A0A562R0K2|A0A562R0K2_9BRAD 7-carboxy-7-deazaguanine synthase OS=Bradyrhizobium huanghuaihaiense OX=990078 GN=queE PE=3 SV=1
MSYAVKEIFLTLQGEGAHAGRASVFCRFAGCNLWSGREADRGDATCKFCDTDFVGTDGTLGGRYASAADLADTIAAQWTATAANRYVVLTGGEPLLQVDTALIEALHARGFEIGVETNGTIEAPEGLDWICVSPKGGSELVLRRGHELKLVYPQALAAPETFEGLAFERFSLQPMDGPEVAENTARAIDYCLHHPQWRLSVQTHKSLGIR

SEQ ID NO: 28483 - protein, 210 aa, Bradyrhizobium icense
  misc_feature (1)..(210): tr|A0A533J6T3|A0A533J6T3_9BRAD 7-carboxy-7-deazaguanine synthase OS=Bradyrhizobium icense OX=1274631 GN=queE P E=3 SV=1
MSYAVKEIFLTLQGEGAHAGRAAVFCRFSGCNLWSGREQDRTTATCQFCDTDFVGTDGTLGGRFATADELAGTISEQWTGEEANRYVVLTGGEPLLQVDQALIDALHRYGFAVAVETNGTIIPPDGMDWICVSPKAGATLVLKRGHELKLVYPQAGAQPEEFCGLDFERFSLQPMDGPDVAKNTADAIDYCLRHPLWRLSVQTHKTLGIR

SEQ ID NO: 28484 - protein, 210 aa, Bradyrhizobium icense
  misc_feature (1)..(210): tr|A0A1B1URB7|A0A1B1URB7_9BRAD 7-carboxy-7-deazaguanine synthase OS=Bradyrhizobium icense OX=1274631 GN=queE P E=3 SV=1
MSYAVKEIFLTLQGEGAHAGRAAVFCRFSGCNLWSGREQDRVSATCQFCDTDFVGTDGTLGGRYATADDLADTIAGQWTGENTNRYVVLTGGEPLLQVDPPFIDALHARGFAIGIETNGTIEPPEGMDWVCVSPKAGAELVVRRGHELKLVYPQAGAAPEDFAGLDFERFSLQPMDGPDVLENTARAVDYCLRHPQWRLSLQTHKTLGIR

SEQ ID NO: 28485 - protein, 211 aa, Bradyrhizobium japonicum
  misc_feature (1)..(211): tr|A0A1L3FLQ6|A0A1L3FLQ6_BRAJP 7-carboxy-7-deazaguanine synthase OS=Bradyrhizobium japonicum OX=375 GN=queE PE =3 SV=1
MSYAVKEIFLTLQGEGAHAGRASVFCRFAGCNLWSGREADREAATCKFCDTDFVGTDGTLGGRYASAAELADTIAAQWTATADSNRYVVLTGGEPLLQVDAALIDALHARGFEIGVETNGTIAAPDGLDWICVSPKGGSELVQRRGHELKLVYPQALAAPETFEDLAFERFSLQPMDGPEVAQNTVRAIDYCLRHPQWRLSVQTHKSLGIR

SEQ ID NO: 28486 - protein, 217 aa, Bradyrhizobium japonicum
  misc_feature (1)..(217): tr|A0A1Y2JLZ9|A0A1Y2JLZ9_BRAJP 7-carboxy-7-deazaguanine synthase OS=Bradyrhizobium japonicum OX=375 GN=queE PE =3 SV=1
MLPVNELFETVQGEATFTGMPSTFVRLQGCDVGCPWCDTKYTWELNHAPPDPLAIILGKIEPSPSFAAVSIDELVQTLSQSQSRHLVLTGGEPCMYDLTELSGRMIADGWTVQVETSGTEPIRIDPRAWVTVSPKLNMPGGMTFQAEAWQRANEIKMPIGKPADVEELLALVRLHGPALVWLQPLSMSKKATELCMEAARQNRWRISVQTHKFLGVR

SEQ ID NO: 28487 - protein, 210 aa, Bradyrhizobium jicamae
  misc_feature (1)..(210): tr|A0A0R3L2V2|A0A0R3L2V2_9BRAD 7-carboxy-7-deazaguanine synthase OS=Bradyrhizobium jicamae OX=280332 GN=queE P E=3 SV=1
MSYAVKEIFLTLQGEGAHAGRAAVFCRFAGCNLWTGREQDRATATCQFCDTDFVGTDGTLGGRYATADDLADTIAGQWTGDNTNRYVVLTGGEPLLQVDSAFIDALHARGFSIGIETNGTIEPPAGMDWVCVSPKAGAGLVVRRGHELKLVYPQAGAVPEDFAGLDFERFSLQPMDGPDVLDNTARAVDYCLRHPQWRLSLQTHKTLGIR

SEQ ID NO: 28488 - protein, 210 aa, Bradyrhizobium lablabi
  misc_feature (1)..(210): tr|A0A1M7DCF9|A0A1M7DCF9_9BRAD 7-carboxy-7-deazaguanine synthase OS=Bradyrhizobium lablabi OX=722472 GN=queE P E=3 SV=1
MSYAVKEIFLTLQGEGAHAGRAAVFCRFSGCNLWSGREQDRATATCQFCDTDFVGTDGTLGGRYASADQLADTIAAQWTGENTNRYVVLTGGEPLLQVDTAFIDALHARGFAIGIETNGTIEPPDGMDWVCVSPKAGAGLVVRSGHELKLVYPQAGARPEDFADLAFERFSLQPMDGPDAIENTARTVDYCLRHPQWRLSLQTHKTLGIR

SEQ ID NO: 28489 - protein, 210 aa, Bradyrhizobium lablabi
  misc_feature (1)..(210): tr|A0A0R3MBJ9|A0A0R3MBJ9_9BRAD 7-carboxy-7-deazaguanine synthase OS=Bradyrhizobium lablabi OX=722472 GN=queE P E=3 SV=1
MSYAVKEIFLTLQGEGAHAGRAAVFCRFAGCNLWTGREQDRASATCQFCDTDFVGTDGTLGGRYATADELADTIAGQWTGDNTNRYVVLTGGEPLLQVDSAFIDALHARGFSIGIETNGTIEPPAGMDWVCVSPKAGAGLVVRRGHELKLVYPQSGAAPEDFAGLDFERFSLQPMDGPDVIDNTARAVDYCLRHPQWRLSLQTHKTLGIR

SEQ ID NO: 28490 - protein, 210 aa, Bradyrhizobium liaoningense
  misc_feature (1)..(210): tr|A0A151FV34|A0A151FV34_9BRAD 7-carboxy-7-deazaguanine synthase OS=Bradyrhizobium liaoningense OX=43992 GN=qu eE PE=3 SV=1
MSYAVKEIFLTLQGEGAHAGRASVFCRFAGCNLWSGREADRADATCKFCDTDFVGTDGTLGGRYGSAVELADTIAAQWTASGGNRYVVLTGGEPLLQVDAELIEALHARGFEIGVETNGTIAAPDGLDWICVSPKGGSELVLRQGHELKLVYPQALAAPETFEDLAFERFSLQPMDGPEVIENTARAIEYCLRHPQWRLSVQTHKSLGIR

SEQ ID NO: 28491 - protein, 251 aa, Bradyrhizobium lupini
  misc_feature (1)..(251): tr|K5CQJ2|K5CQJ2_RHILU 7-carboxy-7-deazaguanine synthas e OS=Bradyrhizobium lupini HPC(L) OX=1229491 GN=queE PE =3 SV=1
MTAARQKSAAKDTTIRISEIFGPTIQGEGLLIGLPTVFVRTGGCDYRCSWCDTLHAVDSDYRDTWKPMPVDAIWQEVRRLSGGVPLTVSLSGGNPAIQPLGSLIAKGHGEGYRFALETQGSIAKNWFADLDHLVLSPKPPSSGMGTDWQAFEDCLAAAGEGPQVALKIVVFDDADYAYAKAASARFPYLPVYLQPGNHTPPPPDDDDARVDIDGVMERMLWLVDKVSEDRWFSARVLPQLHVLLWGNKRGV

SEQ ID NO: 28492 - protein, 210 aa, Bradyrhizobium macuxiense
  misc_feature (1)..(210): tr|A0A560LRQ6|A0A560LRQ6_9BRAD 7-carboxy-7-deazaguanine synthase OS=Bradyrhizobium macuxiense OX=1755647 GN=qu eE PE=3 SV=1
MSYAVKEIFLTLQGEGAHAGRASVFCRFAGCNLWSGREQDRAGAVCRFCDTDFVGTDGTLGGRYADAAELAGIIAAQWTGGEADRYVVLTGGEPLLQVDTALIEALHRHGFAIAIETNGTIAPPDGLDWICVSPKAASELVVRSGHELKLVYPQPENAPEDFAGLAFERFSLQPMDGPDVIENTERAIDYCLKHPQWRLSVQTHKTLGIR

SEQ ID NO: 28493 - protein, 211 aa, Bradyrhizobium macuxiense
  misc_feature (1)..(211): tr|A0A125Q9S2|A0A125Q9S2_9BRAD 7-carboxy-7-deazaguanine synthase OS=Bradyrhizobium macuxiense OX=1755647 GN=qu eE PE=3 SV=1
MGSYAVKEIFLTLQGEGIQAGRPAVFCRFAGCNLWSGREQDRHEAVCRFCDTDFVGTDGTKGGRYRDAQSLAEAIVSEWTAGEAHRLCVLTGGEPLLQVDDELVRALHGFGFRIAIETNGTLPAPAGIDWICVSPKSNARLTITRGHELKLVYPQTLAPPERFESMGFDNFLLQPMDGPDVVDHTRQAVAYCLNNPKWRLSIQTHKHLGIR

SEQ ID NO: 28494 - protein, 218 aa, Bradyrhizobium manausense
  misc_feature (1)..(218): tr|A0A0R3D215|A0A0R3D215_9BRAD 7-carboxy-7-deazaguanine synthase OS=Bradyrhizobium manausense OX=989370 GN=que E PE=3 SV=1
MLPVNEIFETIQGEACKSGTPSVFLRLQACPVRCPWCDSKHTWVADPANQVSIAEITAKVEDTNTWAMMSPREILLAVQGFRARHVVITGGEPAAYDLQPLTTLLIKSGFSVQVETSGTHAIQVHPCTWVTISPKIGMPGGLVVLDEALRRGNEIKHCVGKPADIEKLLALNIPREFMPMIWLQPLSQSRKATKLCIQEATARDWRVSIQTHKFLGVR

SEQ ID NO: 28495 - protein, 210 aa, Bradyrhizobium nanningense
  misc_feature (1)..(210): tr|A0A4Q0SGG1|A0A4Q0SGG1_9BRAD 7-carboxy-7-deazaguanine synthase OS=Bradyrhizobium nanningense OX=1325118 GN=q ueE PE=3 SV=1
MSYAVKEIFLTLQGEGAHAGRASVFCRFAGCNLWSGREADRLEATCKFCDTDFVGTDGTLGGRYGSAAELADTIAAQWRGTEANRYVVLTGGEPLLQVDTALIDALHARGFEIGVETNGTIAAPDGLDWICVSPKGGSELVLRQGHELKLVYPQALAAPETFENLAFERFSLQPMDGPEVIENTARAIDYCLRHPQWRLSVQTHKSLGIR

SEQ ID NO: 28496 - protein, 210 aa, Bradyrhizobium neotropicale
  misc_feature (1)..(210): tr|A0A176Z9Z1|A0A176Z9Z1_9BRAD 7-carboxy-7-deazaguanine synthase OS=Bradyrhizobium neotropicale OX=1497615 GN= queE PE=3 SV=1
MSYAVKEIFLTLQGEGAHAGRASVFCRFAGCNLWSGREADRADAVCKFCDTDFVGTDGTLGGRYATSAELADTIAAQWTGTGHNRYVVLTGGEPLLQLDDALIEALHARGFEIGVETNGTIAPPEGLDWICVSPKGGSELVLRQGHELKLVYPQPLAAPEAFEGLAFERFSLQPMDGPEVAENTARAIDYCLRHPQWRLSVQTHKSLGIR

SEQ ID NO: 28497 - protein, 210 aa, Bradyrhizobium oligotrophicum
  misc_feature (1)..(210): tr|M4ZDJ2|M4ZDJ2_9BRAD 7-carboxy-7-deazaguanine synthas e OS=Bradyrhizobium oligotrophicum S58 OX=1245469 GN=qu eE PE=3 SV=1
MSYAVKEIFMTLQGEGAQAGRAAVFCRFAGCNLWSGREADRATATCRFCDTDFVGTDGTLGGRYDSAAALADTIAGQWTGGAADRYTILTGGEPLLQVDADLIAALHAEGFAVGIETNGTLLPPEGIDWICVSPKAGAELKLRHGHELKLVYPQDGAAPEQFEALAFRRFSLQPMDGPDAAANTARAIDYCQHHPQWRLSLQTHKMIGIR

SEQ ID NO: 28498 - protein, 210 aa, Bradyrhizobium ottawaense
  misc_feature (1)..(210): tr|A0A2U8NZQ3|A0A2U8NZQ3_9BRAD 7-carboxy-7-deazaguanine synthase OS=Bradyrhizobium ottawaense OX=931866 GN=que E PE=3 SV=1
MSYAVKEIFLTLQGEGAHAGRASVFCRFAGCNLWSGREADRLEATCKFCDTDFVGTDGTFGGRYGSAAELADTIAAQWTAAAANRYVVLTGGEPLLQVDAALIEALHARGFEIGVETNGTIAAPEGLDWICVSPKGGSELVLRQGHELKLVYPQALAAPETFEGLAFERFSLQPMDGPEVIENTARAIDYCLHHPQWRLSVQTHKSLGIR

SEQ ID NO: 28499 - protein, 210 aa, Bradyrhizobium pachyrhizi
  misc_feature (1)..(210): tr|A0A0R3DBR6|A0A0R3DBR6_9BRAD 7-carboxy-7-deazaguanine synthase OS=Bradyrhizobium pachyrhizi OX=280333 GN=que E PE=3 SV=1
MSYAVKEIFLTLQGEGAHAGRASVFCRFAGCNLWSGREQDRAGAVCKFCDTDFVGTDGTLGGRYATAEELAGTIAAQWTGGEADRYVVLTGGEPLLQVDAALIDALHGHGFAIAIETNGTIVPPDGLDWICVSPKAAAELVIRKGHELKLVYPQMENAPEDFAGLVFERFSLQPMDGPDVIENTERAIAYCLKHPQWRLSVQTHKSLGIR

SEQ ID NO: 28500 - protein, 210 aa, Bradyrhizobium retamae
  misc_feature (1)..(210): tr|A0A0R3NCV4|A0A0R3NCV4_9BRAD 7-carboxy-7-deazaguanine synthase OS=Bradyrhizobium retamae OX=1300035 GN=queE PE=3 SV=1
MSYAVKEIFLTLQGEGAHAGRAAVFCRFSGCNLWSGREQDRVSATCQFCDTDFVGTDGTLGGRYATADELADTIAGQWTGENINRYVVLTGGEPLLQVDPPFIDALHARGFVIGIETNGTIEPPEGMDWVCVSPKAGADLVVRRGHELKLVYPQAGAAPEDFARLDFERFSLQPMDGPDVLENTARAVDYCLRHPQWRLSLQTHKTLGIR

SEQ ID NO: 28501 - protein, 210 aa, Bradyrhizobium rifense
  misc_feature (1)..(210): tr|A0A5D3KM86|A0A5D3KM86_9BRAD 7-carboxy-7-deazaguanine synthase OS=Bradyrhizobium rifense OX=515499 GN=queE P E=3 SV=1
MGYAVKEIFLTLQGEGAHAGRASVFCRFAGCNLWSGREADRAGATCQFCDTDFVGTDGTLGGRYATAVELADTITAQWTASTDNRYVVLTGGEPLLQVDDALVDALHARGFEIGVETNGTVAPPKGLDWICVSPKGGSELVLRQGHELKLVYPQALAAPETFESLAFERFSLQPMDGPEVAQNTARAIDYCLRHPQWRLSVQTHKSLGIR

SEQ ID NO: 28502 - protein, 210 aa, Bradyrhizobium sacchari
  misc_feature (1)..(210): tr|A0A560JG35|A0A560JG35_9BRAD 7-carboxy-7-deazaguanine synthase OS=Bradyrhizobium sacchari OX=1399419 GN=queE PE=3 SV=1
MSYAVKEIFLTLQGEGAHAGRASVFCRFAGCNLWSGREADRQSATCKFCDTDFVGTDGTLGGRYASAADLADTIAAQWTASKHNRYVVLTGGEPLLQVDDALIAALHARGFEIGVETNGTIAAPDGLDWICVSPKGGSELVLRRGHELKLVYPQALAAPETFEGFAFERFSLQPMDGPEVIQNTARAIDYCLQHPQWRLSVQTHKSLGIR

SEQ ID NO: 28503 - protein, 210 aa, Bradyrhizobium shewense
  misc_feature (1)..(210): tr|A0A1C3VD63|A0A1C3VD63_9BRAD 7-carboxy-7-deazaguanine synthase OS=Bradyrhizobium shewense OX=1761772 GN=queE PE=3 SV=1
MSYAVKEIFLTLQGEGAHAGRASVFCRFAGCNLWSGREADRLEATCKFCDTDFVGTDGTLGGRYGSAAELADTIAAQWTAAAANRYVVLTGGEPLLQVDAALIEALHARGFEIGVETNGTIAAPEGLDWICVSPKGGSELVLRQGHELKLVYPQALAAPETFEDLAFERFSLQPMDGPEVIENTARAIDYCLHHPQWRLSVQTHKSLGIR

SEQ ID NO: 28504 - protein, 210 aa, Bradyrhizobium sp.
  misc_feature (1)..(210): tr|A0A2U8Q771|A0A2U8Q771_9BRAD 7-carboxy-7-deazaguanine synthase OS=Bradyrhizobium sp. 3 85S1MB OX=1404367 GN= queE PE=3 SV=1
MSYAVKEIFLTLQGEGAHAGRASVFCRFAGCNLWSGREADRLEATCKFCDTDFVGTDGTLGGRYGSAAELADTIAAQWRATAANRYVVLTGGEPLLQVDAALIEALHARGFEIGVETNGTIAAPEGLDWICVSPKGGSELVLRQGHELKLVYPQALAAPEAFEDLAFERFSLQPMDGAEVIENTARAIDYCLRHPQWRLSVQTHKSLGIR

SEQ ID NO: 28505 - protein, 210 aa, Bradyrhizobium sp.
  misc_feature (1)..(210): tr|A0A1Q5QY46|A0A1Q5QY46_9BRAD 7-carboxy-7-deazaguanine synthase OS=Bradyrhizobium sp. NAS96.2 OX=1680160 GN=q ueE PE=3 SV=1
MSYAVKEIFLTLQGEGAHAGRASVFCRFAGCNLWSGREQDRAGAVCRFCDTDFVGTDGTLGGRYADAAELAGTIAAQWTGGEADRYVVLTGGEPLLQVDTALIEALHGHGFAIAIETNGTIAPPDGLDWICVSPKAASELVVRSGHELKLVYPQPENAPEDFAGLAFERFSLQPMDGPDVIENTERAIAYCLKHPQWRLSVQTHKTLGIR

SEQ ID NO: 28506 - protein, 210 aa, Bradyrhizobium stylosanthis
  misc_feature (1)..(210): tr|A0A560DBL0|A0A560DBL0_9BRAD 7-carboxy-7-deazaguanine synthase OS=Bradyrhizobium stylosanthis OX=1803665 GN= queE PE=3 SV=1
MSYAVKEIFLTLQGEGAHAGRASVFCRFAGCNLWSGREADRAEATCKFCDTDFVGTDGTLGGRYASAAELADTIAAQWTASTANRYVVLTGGEPLLQVDAALIEALHARGFEIGVETNGTIAAPEGLDWICVSPKGGSELVLRRGHELKLVYPQALAAPETFEGLAFERFSLQPMDGPEVAENTARAIDYCLQHPQWRLSVQTHKSLGIR

SEQ ID NO: 28507 - protein, 210 aa, Bradyrhizobium valentinum
  misc_feature (1)..(210): tr|A0A0R3LLB6|A0A0R3LLB6_9BRAD 7-carboxy-7-deazaguanine synthase OS=Bradyrhizobium valentinum OX=1518501 GN=qu eE PE=3 SV=1
MSYAVKEIFLTLQGEGAHAGRAAVFCRFSGCNLWSGREQDRASATCKFCDTDFVGTDGTLGGRYASAGELADTIAGQWTGENTNRYVVLTGGEPLLQVDSPFIDALHARGFSIGIETNGTIEPPDGMDWVCVSPKAGADLVVRRGHELKLVYPQAGAAPEDFAGLDFERFSLQPMDGPDVIENTARAVDYCLRHPQWRLSLQTHKTLGIR

SEQ ID NO: 28508 - protein, 210 aa, Bradyrhizobium vignae
  misc_feature (1)..(210): tr|A0A4Q0QPP2|A0A4Q0QPP2_9BRAD 7-carboxy-7-deazaguanine synthase OS=Bradyrhizobium vignae OX=1549949 GN=queE P E=3 SV=1
MSYAVKEIFLTLQGEGAHAGRASVFCRFAGCNLWSGREADRGEATCKFCDTDFVGTDGTLGGRYGSAAELADTIAAQWTASAANRYVVLTGGEPLLQVDAALVDALHARGFEIGVETNGTIAAPEGLDWICVSPKGGSELVLRRGHELKLVYPQALAMPEAFEDLAFERFSLQPMDGPEVVENTARAIDYCLRHPQWRLSVQTHKSLGIR

SEQ ID NO: 28509 - protein, 210 aa, Bradyrhizobium yuanmingense
  misc_feature (1)..(210): tr|A0A4E0QRC2|A0A4E0QRC2_9BRAD 7-carboxy-7-deazaguanine synthase OS=Bradyrhizobium yuanmingense OX=108015 GN=q ueE PE=3 SV=1
MSYAVKEIFLTLQGEGAHAGRASVFCRFAGCNLWSGREADRADATCKFCDTDFVGTDGTLGGRYGSAAELADTIAAQWTAAAANRYVVLTGGEPLLQVDAALIEALHERGFEIGVETNGTIAAPDGLDWICVSPKGGSELVLRQGHELKLVYPQALAMPEAFEDLAFERFSLQPMDGPEVIENTARAIDYCLHHPRWRLSVQTHKSLGIR

SEQ ID NO: 28510 - protein, 210 aa, Bradyrhizobium yuanmingense
  misc_feature (1)..(210): tr|A0A1C3WV24|A0A1C3WV24_9BRAD 7-carboxy-7-deazaguanine synthase OS=Bradyrhizobium yuanmingense OX=108015 GN=q ueE PE=3 SV=1
MSYAVKEIFLTLQGEGAHAGRASVFCRFAGCNLWSGRQADRADATCKFCDTDFVGTDGTLGGRYGSAAELADTIAAQWTAAAANRYVVLTGGEPLLQVDAALIEALHERGFEIGVETNGTIAAPDGLDWICVSPKGGSELVLRQGHELKLVYPQALAMPEAFEDLAFERFSLQPMDGPEIIENTARAIDYCLHHPQWRLSVQTHKSLGIR

SEQ ID NO: 28511 - protein, 210 aa, Bradyrhizobium zhanjiangense
  misc_feature (1)..(210): tr|A0A4Q0R1D7|A0A4Q0R1D7_9BRAD 7-carboxy-7-deazaguanine synthase OS=Bradyrhizobium zhanjiangense OX=1325107 GN =queE PE=3 SV=1
MSYAVKEIFLTLQGEGAHAGRASVFCRFAGCNLWSGREADRSEATCKFCDTDFVGTDGTLGGRYASAAELADTIAAQWAASTANRYVVLTGGEPLLQVDTALIDALHARVFEIGVETNGTIAAPAGLDWICVSPKGGSELVLRRGHELKLVYPQALAAPETYEGLAFERFSLQPMDGPEVAQNTARAIDYCLRHPQWRLSVQTHKSLGIR

SEQ ID NO: 28512 - protein, 210 aa, Bradyrhizobium zhanjiangense
  misc_feature (1)..(210): tr|A0A4Q0SQ11|A0A4Q0SQ11_9BRAD 7-carboxy-7-deazaguanine synthase OS=Bradyrhizobium zhanjiangense OX=1325107 GN =queE PE=3 SV=1
MNYAVKEIFLTLQGEGAHAGRASVFCRFAGCNLWSGREADRSEATCKFCDTDFVGTDGTLGGRYASAAELADTIAAQWAASTANRYVVLTGGEPLLQVDTALIDALHARGFEIGVETNGTIAAPAGLDWICVSPKGGSELVLRRGHELKLVYPQALAAPETYEGLAFERFSLQPMDGPEVAQNTARAIDYCLRHPQWRLSVQTHKSLGIR

SEQ ID NO: 28513 - protein, 223 aa, Brenneria alni
  misc_feature (1)..(223): tr|A0A421DP11|A0A421DP11_9GAMM 7-carboxy-7-deazaguanine synthase OS=Brenneria alni OX=71656 GN=queE PE=3 SV=1
MQYPINEVFQTLQGEGYFTGVPAVFVRLQGCPVGCSWCDTKHTWDKLAEREIPLDQVLIKTQESDGWGAARAEDILALMAGEGYTARHIVITGGEPCIHDLSALTLLLEKQGFSCQIETSGTHEIRCSPKTWVTVSPKVNMRGGMAVIDQALQRADEIKHPVARERDIDALDALLARLEDDKPRIVALQPISQKEEATKLCIATCIARNWRLSMQTHKYLNIA

SEQ ID NO: 28514 - protein, 223 aa, Brenneria goodwinii
  misc_feature (1)..(223): tr|A0A0G4JW73|A0A0G4JW73_9GAMM 7-carboxy-7-deazaguanine synthase OS=Brenneria goodwinii OX=1109412 GN=queE PE= 3 SV=1
MQYPINEMFQTLQGEGYFTGVPAVFVRLQGCPVGCSWCDTKHTWDKLAEREIPLDQVLVKTRESDGWGAASAEDVLALIDREGYTARHIVITGGEPCIHDLAPLTLLLEQQGFSCQIETSGTHEVRCSPKTWVTVSPKVNMRGGMAVIDQALHRADEIKHPVARERDIEDLDALLARLKDDKPRIVALQPISQKESATKLCIATCIARNWRLSMQTHKYLNIA

SEQ ID NO: 28515 - protein, 223 aa, Brenneria goodwinii
  misc_feature (1)..(223): tr|A0A250B932|A0A250B932_9GAMM 7-carboxy-7-deazaguanine synthase OS=Brenneria goodwinii OX=1109412 GN=queE PE= 3 SV=1
MQYPINEMFQTLQGEGYFTGVPAVFVRLQGCPVGCSWCDTKHTWDKLAEREIPLDQVLVKTRESDGWGAASAEDVLALIDREGYTARHIVITGGEPCIHDLAPLTLLLEQQGFSCQIETSGTHEVRCSPKTWVTVSPKVNMRGGMAVIDQALHRADEIKHPVARERDIEDLDALLARLKDDKPRIVALQPISQKESATKLCIGTCIARNWRLSMQTHKYLNIA

SEQ ID NO: 28516 - protein, 223 aa, Brenneria nigrifluens
  misc_feature (1)..(223): tr|A0A2U1UVE6|A0A2U1UVE6_9GAMM 7-carboxy-7-deazaguanine synthase OS=Brenneria nigrifluens DSM 30175 = ATCC 130 28 OX=1121120 GN=queE PE=3 SV=1
MQYPINEMFQTLQGEGYFTGVPAVFVRLQGCPVGCSWCDTKHTWDKLAQREIPLDQVLVKTQENDGWGAASAEDVLALIASEGYTARHIVITGGEPCIHDLAPLTLLLEKQGFSCQIETSGTHEVRCSPKTWVTVSPKVNMRGGMKVIDQALQRADEIKHPVARERDIEALDALLARLEDDKPRIVALQPISQKAEATKLCIATCIARNWRLSMQTHKYLHIA

SEQ ID NO: 28517 - protein, 223 aa, Brenneria roseae
  misc_feature (1)..(223): tr|A0A2U1U2K1|A0A2U1U2K1_9GAMM 7-carboxy-7-deazaguanine synthase OS=Brenneria roseae subsp. americana OX=15085 07 GN=queE PE=3 SV=1
MQYPINEVFQTLQGEGYFTGVPAVFVRLQGCPVGCSWCDTKHTWDKLADRETSLDEIIVKTQESDAWGAATSEDILALIAREGYTARHIVITGGEPCIHDLAPLTLLLEKHGFSCQIETSGTHDVRCSPKTWVTVSPKVNMRGGMKVIDQALQRADEIKHPVGRERDIEALDELLARLDDDKSRIVALQPISQKDEATKLCIATCIARNWRLSMQTHKYLNIA

SEQ ID NO: 28518 - protein, 223 aa, Brenneria rubrifaciens
  misc_feature (1)..(223): tr|A0A4P8QVC9|A0A4P8QVC9_9GAMM 7-carboxy-7-deazaguanine synthase OS=Brenneria rubrifaciens OX=55213 GN=queE PE =3 SV=1
MQYPINEVFQTLQGEGYFTGVPAVFVRLQGCPVGCSWCDTKHTWDKLADRETSLNEIVVKTQESDAWGAATAEDILALMSREGYTARHIVITGGEPCIHDLAPLTLLLEKYGFNCQIETSGTHEVRCSLNTWVTVSPKVNMRGGMQVRDQALQRADEIKHPVGRARDIEALDTLLARLNDDKPRVVALQPISQKDEATKLCIATCIARNWRLSMQTHKYLNIA

SEQ ID NO: 28519 - protein, 223 aa, Brenneria salicis
  misc_feature (1)..(223): tr|A0A366I2E4|A0A366I2E4_9GAMM 7-carboxy-7-deazaguanine synthase OS=Brenneria salicis ATCC 15712 = DSM 30166 O X=714314 GN=queE PE=3 SV=1
MQYPINEVFQTLQGEGYFTGVPAVFVRLQGCPVGCSWCDTKHTWDKLADRETSLDEIIVKTQESEAWGAASAEDILALMTRAGYTARHIVITGGEPCIHDLAPLTLLLEKHGFSCQIETSGTHEVRCSAKTWVTVSPKVNMRGGMKVLDQALQRADEIKHPVGRARDIVALDELLARLHDDKPRIVALQPISQKDEATRLCIETCIARNWRLSMQTHKYLNIA

SEQ ID NO: 28520 - protein, 223 aa, Brenneria sp.; identical to SEQ ID NO: 28516
  misc_feature (1)..(223): tr|G7LMK3|G7LMK3_9GAMM 7-carboxy-7-deazaguanine synthas e OS=Brenneria sp. EniD312 OX=598467 GN=queE PE=3 SV=1

SEQ ID NO: 28521 - protein, 223 aa, Brenneria sp.
  misc_feature (1)..(223): tr|A0A5J5FV45|A0A5J5FV45_9GAMM 7-carboxy-7-deazaguanine synthase QueE OS=Brenneria sp. L3-3HA OX=2590031 GN=qu eE PE=4 SV=1
MQYPINEMFQTLQGEGYFTGVPAIFVRLQGCPVGCSWCDTKHTWEKLQDRQIALEQVLVKTQESDRWGAARAQDILAALIEQGYTARHVVITGGEPCIHDLAPLTLLLEQQGFSCQIETSGTHEVRCSPRSWVTVSPKVNMRGGMVVLDQALARADEIKHPVARQRDIEALDALLARLKDDKPRVVALQPISQKEEATRLCIETCIARNWRLSMQTHKYLNIA

SEQ ID NO: 28522 - protein, 210 aa, Breoghania sp.
  misc_feature (1)..(210): tr|A0A346R009|A0A346R009_9RHIZ 7-carboxy-7-deazaguanine synthase OS=Breoghania sp. L-A4 OX=2304600 GN=queE PE= 3 SV=1
MSYAVKEIFKTLQGEGAQAGRAAVFCRFAGCNLWSGREQDRATAVCRFCDTDFIGTDGEGGGKFRDAAALVAAIAEAWGDDPNNRFIVFTGGEPLLQIDDALLAAAHACGFECAVETNGTIAPPEALDWVCVSPKDGADLVATRGHELKLVFPQPGLMPEAVAHLDFKTFWLQPMDGPDVAQNTAAAVAYCMAHPRWRLSLQTHKLIGIP

SEQ ID NO: 28523 - protein, 240 aa, Brevibacillus agri
  misc_feature (1)..(240): tr|A0A3M8AHG3|A0A3M8AHG3_9BACL 7-carboxy-7-deazaguanine synthase OS=Brevibacillus agri OX=51101 GN=queE PE=3 S V=1
MSIPVLEIFGPTIQGEGMVIGQKTMFVRTAGCDYRCSWCDSAFTWDGSAQDEIRQMTPEQIWAELERLGKNRFSHVTISGGNPALLAGMGELVSFLKERGIRTALETQGSRWQEWLPLIDDITLSPKPPSSGMNTDYAVLDRIVHALLEQKHPGLNLKVVVFDDADFAYARDIHRRYPAVPFFLQPGNSDLVSADTQELREKLLESFEWLIDQAMAAPDLNDAKVLPQLHALVWGNKRGV

SEQ ID NO: 28524 - protein, 239 aa, Brevibacillus brevis
  misc_feature (1)..(239): tr|C0ZJI7|C0ZJI7_BREBN 7-carboxy-7-deazaguanine synthas e OS=Brevibacillus brevis (strain 47 / JCM 6285 / NBRC 100599) OX=358681 GN=queE PE=3 SV=1
MIPVLEIFGPTIQGEGMVIGQKTMFVRTAGCDYRCNWCDSAFTWDGSARDEIRQMSPEAVWEELTRLGGDRFSHVTISGGNPALLAGIGDLISLLKEHGIRTAVETQGSKWQAWLPLIDDITLSPKPPSSGMQTDFQALDRIVHELLDQKHPGLSLKVVVFDDADFAYARTIHQRFPGVPFYLQPGNSDLTDADTPSLRDKLLESFEWLIDQAMETADMNDAKVLPQLHALVWGNKRGV

SEQ ID NO: 28525 - protein, 239 aa, Brevibacillus brevis
  misc_feature (1)..(239): tr|A0A291BQE1|A0A291BQE1_BREBE 7-carboxy-7-deazaguanine synthase OS=Brevibacillus brevis X23 OX=1200792 GN=que E PE=3 SV=1
MIPVLEIFGPTIQGEGMVIGQKTMFVRTAGCDYRCSWCDSAFTWDGSARDEIQQMSPEAIWEELTRLGGDRFSHVTISGGNPALLTGIGDLLTLLKEHGIRTAIETQGSKWQAWLPLIDDITISPKPPSSGMETDFQALDRIVHELLEQKHPGLSLKVVVFDDADFAYARTIHQRFPEVPFYLQPGNSDLTDADTPRLRDKLLESFEWLVDHAMATPDMNDAKVLPQLHALVWGNKRGV

SEQ ID NO: 28526 - protein, 241 aa, Brevibacillus choshinensis
  misc_feature (1)..(241): tr|A0A0Q3WJF5|A0A0Q3WJF5_BRECH 7-carboxy-7-deazaguanine synthase OS=Brevibacillus choshinensis OX=54911 GN=que E PE=3 SV=1
MSRIPVLEIFGPTIQGEGMVIGQKTMFVRTAGCDYRCSWCDSAFTWDGSARNEIKQMTAEEIWEELSLLGGDCFSHVTISGGNPALLESIGGLIELLKAHGIRSAVETQGSKWQDWLTQIDDVTISPKPPSSGMQTDFDVLDRIVANMLKANHPGVSLKVVVFDETDFEYARSIHRRYPSIPFYLQPGNADLVEANTAELRVKLLETFEWLINMAMAAPDLNDVKVLPQLHALVWGNKRGV

SEQ ID NO: 28527 - protein, 242 aa, Brevibacillus fluminis
  misc_feature (1)..(242): tr|A0A3M8DFP7|A0A3M8DFP7_9BACL 7-carboxy-7-deazaguanine synthase OS=Brevibacillus fluminis OX=511487 GN=queE P E=3 SV=1
MSNIPVLEIFGPTIQGEGMVIGQKTMFVRTAGCDYRCSWCDSAFTWDGTAQDQIRQLSPEDILAELRELAQDRFSHVTISGGNPALIKSIGGLVELLHANGIRTAIETQGTKWQDWLLEIDEVTISPKPPSSGMTTDFSLLDDMIEKLAANPRKNPFSLKVVVFDEQDFEHARTIHHRYPQVPFFLQVGNDDVHLADDEALRNQLLAKFEWLIDRTMVQSDMNDVKVLPQLHALMWGNKRGV

SEQ ID NO: 28528 - protein, 239 aa, Brevibacillus formosus
  misc_feature (1)..(239): tr|A0A4Y4I3R8|A0A4Y4I3R8_9BACL 7-carboxy-7-deazaguanine synthase OS=Brevibacillus formosus OX=54913 GN=queE PE =3 SV=1
MIPVLEIFGPTIQGEGMVIGQKTMFVRTAGCDYRCNWCDSAFTWDGSARDEIRQMSPEAVWEELTRLGGDRFSHVTISGGNPALLAGIGDLIALLKEHGIRTAVETQGSKWQPWLPQIDDITISPKPPSSGMDTDFQALDRIVHELLEQKHPGLSLKVVVFDDADFAYARAIHQRFPEVPFYLQPGNSDLTDADTPRLRDKLLESFEWLIDQAMSAPDMNDAKVLPQLHALVWGNKRGV

SEQ ID NO: 28529 - protein, 239 aa, Brevibacillus formosus
  misc_feature (1)..(239): tr|A0A220MK41|A0A220MK41_9BACL 7-carboxy-7-deazaguanine synthase OS=Brevibacillus formosus OX=54913 GN=queE PE =3 SV=1
MIPVLEIFGPTIQGEGMVIGQKTMFVRTAGCDYRCNWCDSAFTWDGSARDEIRQMSPEAVWEELTRLGGDRFSHVTISGGNPALLAGIGDLIALLKEHGIRTAVETQGSKWQPWLPLIDDITISPKPPSSGMETDFQALDRIVHELLEQKHPGLSLKVVVFDDADFAYARTIHQRFPEVPFYLQPGNSDLTDADTPRLRDKLLESFEWLIDQAMATPDMNDAKVLPQLHALVWGNKRGV

SEQ ID NO: 28530 - protein, 240 aa, Brevibacillus gelatini
  misc_feature (1)..(240): tr|A0A3M8BCG7|A0A3M8BCG7_9BACL 7-carboxy-7-deazaguanine synthase OS=Brevibacillus gelatini OX=1655277 GN=queE PE=3 SV=1
MSIPVLEIFGPTIQGEGMVIGQKTMFVRTAGCDYRCSWCDSAFTWDGSARDEIRQMTPEQIWSELERLAKGRFSHVTISGGNPALLPGMGELVSFLKERGIRTALETQGSRWQEWLPLIDDITISPKPPSSGMSTDYAMLDRIVHTLLEQKHAGLSLKVVVFDDADFAYARDIHRRYPTIPFFLQPGNSDLVSTDTRELREKLLESFEWLIDQSMAAPDLNDAKVLPQLHALVWGNKRGV

SEQ ID NO: 28531 - protein, 245 aa, Brevibacillus invocatus
  misc_feature (1)..(245): tr|A0A3M8C3M4|A0A3M8C3M4_9BACL 7-carboxy-7-deazaguanine synthase OS=Brevibacillus invocatus OX=173959 GN=queE PE=3 SV=1
MDDGVNPIPVLEIFGPTIQGEGMVIGQKTMFVRTAGCDYRCSWCDSAFTWDGSARDEIQLLSAEAIWQELYRLGEDRFSHVTISGGNPALIEGIGALVSLLQEKGIRTAVETQGSRWQDWLMQIDDVTISPKPPSSGMKTDLDMLDQIVHRLVDGGHDGVSLKVVVFNDEDFAYARRIHSRYPAVPFYLQPGNGDLTDANTDLLREKLLKSFEWLIDQAMSAADMNDAKVLPQLHALVWGNKRGV

SEQ ID NO: 28532 - protein, 247 aa, Brevibacillus laterosporus
  misc_feature (1)..(247): tr|A0A075R193|A0A075R193_BRELA 7-carboxy-7-deazaguanine synthase OS=Brevibacillus laterosporus LMG 15441 OX=10 42163 GN=queE PE=3 SV=1
MSSIPVLEIFGPTIQGEGMVIGQKTMFVRTAGCDYRCSWCDSAFTWDGSAKEQISMMTAEEIWNQLQELGKDCFSHVTISGGNPLLLAPLGELVQLLHSHNIRIGVETQGSRWQEWLAEVDDITLSPKPPSSGMTTNIDRLDEIVAKLTDNPLLSTDQQVSMKVVVFDNEDFQYAKELHQRYPQVPFYLQVGNPELADIEGEREDLRDQLLQSLEWLVDKVAMTKEFNNAKVLPQLHTLLWGNKRGV

SEQ ID NO: 28533 - protein, 229 aa, Brevibacillus laterosporus
  misc_feature (1)..(229): tr|H0UFU3|H0UFU3_BRELA 7-carboxy-7-deazaguanine synthas e OS=Brevibacillus laterosporus GI-9 OX=1118154 GN=queE PE=3 SV=1
MVIGQKTMFVRTAGCDYRCSWCDSAFTWDGSAKEQISMMTAEEIWNQLQELGKDCFSHVTISGGNPLLLAPLGELVQLLHSHNIRIGVETQGSRWQEWLAEVDDITLSPKPPSSGMTTNIDRLDEIVAKLTDNPLPSTDQHVSMKVVVFDDEDFQYAKELHQRYPQVPFYLQVGNPELADIEGEREDLRDRLLQSLEWLVDKVAMSKEFNNAKVLPQLHTLLWGNKRGV

SEQ ID NO: 28534 - protein, 239 aa, Brevibacillus nitrificans
  misc_feature (1)..(239): tr|A0A3M8CTQ5|A0A3M8CTQ5_9BACL 7-carboxy-7-deazaguanine synthase OS=Brevibacillus nitrificans OX=651560 GN=que E PE=3 SV=1
MIPVLEIFGPTIQGEGMVIGQKTMFVRTAGCDYRCSWCDSAFTWDGSAKDEIKQMTAEEIWEELFRLGKDCFSHVTISGGNPALLASIGGLVELLQSRGIRSAVETQGSKWQDWLAQIDDVTLSPKPPSSGMETDFDVLDQVVANLLEKGHSGVSLKVVIFDERDFEYARGIHRRYPGIPFYLQPGNADLVEANTEELRTKLLETFEWLINLAMAAPDLNDVKVLPQLHALVWGNKRGV

SEQ ID NO: 28535 - protein, 241 aa, Brevibacillus panacihumi
  misc_feature (1)..(241): tr|V6M3Y6|V6M3Y6_9BACL 7-carboxy-7-deazaguanine synthas e OS=Brevibacillus panacihumi W25 OX=1408254 GN=queE PE =3 SV=1
MSQIPVLEIFGPTIQGEGMVIGQKTMFVRTAGCDYRCSWCDSAFTWDGTARDEIRQMSPEAIWEELYRLGADRFSHVTISGGNPALIEGIGSLVSLLQEKGIRTAVETQGSRWQDWLMQIDDVTISPKPPSSGMQTDFDMLDQIVHRLVNGEHQGVSLKVVVFDDEDFAYARMIHRRYPQVPFYLQPGNSDLTDADTETLRDKLLHSFEWLIDQAMAAPDMNDAKVLPQLHALVWGNKRGV

SEQ ID NO: 28536 - protein, 241 aa, Brevibacillus panacihumi
  misc_feature (1)..(241): tr|A0A3M8CS85|A0A3M8CS85_9BACL 7-carboxy-7-deazaguanine synthase OS=Brevibacillus panacihumi OX=497735 GN=queE PE=3 SV=1
MSLIPILEIFGPTIQGEGMVIGQKTMFVRTAGCDYRCSWCDSAFTWDGTARDEIRQMSPEAVWEELYRLGADRFSHVTISGGNPALIEGIGSLISLLQEKGIRTAVETQGSRWQDWLAQIDDVTISPKPPSSGMQTDLDKLDQIVHRLIDGGHQGVSLKVVVFDDEDFSYARMIHRRYPQVPFFLQPGNGDLTDADTEQLRSKLLQSFEWLIDQAMAAPDMNDAKVLPQLHALVWGNKRGV

SEQ ID NO: 28537 - protein, 240 aa, Brevibacillus parabrevis
  misc_feature (1)..(240): tr|A0A4Y3PL85|A0A4Y3PL85_BREPA 7-carboxy-7-deazaguanine synthase OS=Brevibacillus parabrevis OX=54914 GN=queE PE=3 SV=1
MSIPVLEIFGPTIQGEGMVIGQKTMFVRTAGCDYRCSWCDSAFTWDGSARDEIKQLSVEEVWAELTRLGQDRFSHVTISGGNPALLAGMGELVSFLKERGIRTALETQGSRWQEWLPLIDDITISPKPPSSGMNTDYAVLDRIVGALTEQKHPGLSLKVVVFDDADFAYSRDIHRRYPAVPFFLQPGNSDLVSADTHELREKLLESFEWLIDQAMAAPDLNDAKVLPQLHALVWGNKRGV

SEQ ID NO: 28538 - protein, 241 aa, Brevibacillus reuszeri
  misc_feature (1)..(241): tr|A0A0K9YKH6|A0A0K9YKH6_9BACL 7-carboxy-7-deazaguanine synthase OS=Brevibacillus reuszeri OX=54915 GN=queE PE =3 SV=1
MSTIPVLEIFGPTIQGEGMVIGQKTMFVRTAGCDYRCSWCDSAFTWDGSARDEIQQMTAEDVYQELNRLGHDRFSHVTISGGNPALLASIGELVQLLKANDIRTAVETQGSRWQSWLHDIDDVTISPKPPSSGMSTDLDALDQIIHALVTRNHQGLSLKVVVFNEDDFAYAQSIHGRYPSIPFYLQPGNDDLTAANTSKLRDKLLESFEWLIERAMEAPDMNDVKVLPQLHALVWGNKRGV

SEQ ID NO: 28539 - protein, 246 aa, Brevibacillus sp.
  misc_feature (1)..(246): tr|A0A553KQI2|A0A553KQI2_9BACL 7-carboxy-7-deazaguanine synthase OS=Brevibacillus sp. LEMMJ03 OX=2595056 GN=qu eE PE=3 SV=1
MDVRVNTIPVLEIFGPTIQGEGMVIGQKTMFVRTAGCDYRCRWCDSAFTWDGSAAGEIRQMTPEEIWQELRRIGQDRFAHVTISGGNPALIANVGQLVRLLREQNIRTAVETQGSRWQDWLLLVDDVTISPKPPSSGMTTDFAALDAMVHALSGRTGDVHTSLKVVVFDEADFDYARQVHQRYPRVPFFLQAGNDDVAQADLAGLRDRLLAAYEWLIERTMTAADMNDVKVLPQLHALVWGNKRGV

SEQ ID NO: 28540 - protein, 241 aa, Brevibacillus sp.
  misc_feature (1)..(241): tr|A0A1I4CNY2|A0A1I4CNY2_9BACL 7-carboxy-7-deazaguanine synthase OS=Brevibacillus sp. OK042 OX=1884381 GN=queE PE=3 SV=1
MSRIPVLEIFGPTIQGEGMVIGQKTMFVRTAGCDYRCSWCDSAFTWDGSAKDEIKQMTAEEIWEELYRLGGDCFSHVTISGGNPALLASIGGLVELLQSRGIRSAVETQGSKWQDWLAQIDDVTLSPKPPSSGMQTDFDVLDQIVANLLCAKHNGVSLKVVIFDEADFEYARGIHRRYPSIPFYLQPGNADLVEANTEELRTKLLETFEWLINLAMAAPDLNDVKVLPQLHALVWGNKRGV

SEQ ID NO: 28541 - protein, 242 aa, [Brevibacterium] frigoritolerans
  misc_feature (1)..(242): tr|A0A4R6ABM9|A0A4R6ABM9_9BACI 7-carboxy-7-deazaguanine synthase OS=[Brevibacterium] frigoritolerans OX=450367 GN=queE PE=3 SV=1
MKKFPVLEIFGPTIQGEGMVIGQKTMFVRTAGCDYSCSWCDSAFTWDGSAKDDIRQLTAEEIWTELFALGGSHFSHVTISGGNPALLGNLNELIDLLHEKNVKVAIETQGSRLQPWFDQIDDLTISPKPPSSGMKTDFTKLDEIILYLRGKNRLYHASLKVVVFDEQDLEFAKMVHLKYPEIPFYLQVGNDLVHEPDDGKLISHLLTRYEWLIDRAVSEEGLNNARVLPQLHTLVWGNKRGV

SEQ ID NO: 28542 - protein, 242 aa, [Brevibacterium] frigoritolerans
  misc_feature (1)..(242): tr|A0A3Q9SE88|A0A3Q9SE88_9BACI 7-carboxy-7-deazaguanine synthase OS=[Brevibacterium] frigoritolerans OX=450367 GN=queE PE=3 SV=1
MSKLPVMEIFGPTIQGEGMVIGQKTMFVRTAGCDYSCSWCDSAFTWDGTGKEDTVQMTADEIWDELKRIGGSGFSFVTISGGNPALLKNLNGLITILHENKMKIGVETQGSRWQDWFLDIDELTISPKPPSSGMDTDFTVLDQIISNLANRNPENHVSLKIVVFNEEDYQYAKHVHGRYPDIPFYLQVGNDDSRTADDRQLISGLLKKYEELIDKVIADDELNDVKVLPQLHTYIWGNKRGV

SEQ ID NO: 28543 - protein, 232 aa, Brevifollis gellanilyticus
  misc_feature (1)..(232): tr|A0A512MEL7|A0A512MEL7_9BACT 7-carboxy-7-deazaguanine synthase OS=Brevifollis gellanilyticus OX=748831 GN=qu eE PE=3 SV=1
MRISEIFYSVQGEGVLTGVPSVFVRTSGCNLRCRWCDTPYASWQPEGPEMSPDEILAEIEKNPTRYVVVTGGEPMIAKGMREFIARLRELGKHVTVETAGTIMPEGCVVDLASLSPKLANSTPSEEKAGAAWVQRHEQTRLQPEVLKAWINESVDYQLKFVISTEADLHEAHDIVKSLGVPVPPEKVLLMPEGTTLEAMRTRYDLLINACKTFGHRLSPRLHIELFGNKRGT

SEQ ID NO: 28544 - protein, 249 aa, Brevirhabdus pacifica
  misc_feature (1)..(249): tr|A0A1U7DLW5|A0A1U7DLW5_9RHOB 7-carboxy-7-deazaguanine synthase OS=Brevirhabdus pacifica OX=1267768 GN=queE P E=3 SV=1
MPVRPAPTPQAERLRIAEIFGPTIQGEGALIGQPTVFVRAGGCDYRCVWCDSLHAVDSAYRHEWAAMDTGQVWDRVRQLSGDRPLTVTLSGGNPAIQDFGPLIETGRAAGYGFALETQGSVARDWFARLALLILSPKPPSSGETPDWAQFDACIAAGAGTRIVLKIVIFDEADYLWSREVAARYPDLPVYLQPGNHTPPPPEAEDAPIDMEGINDRMEWLVERALADGWFDAHILPQLHVLIWGNKRGV

SEQ ID NO: 28545 - protein, 256 aa, Brevirhabdus pacifica
  misc_feature (1)..(256): tr|A0A2M9DDR1|A0A2M9DDR1_9RHOB 7-carboxy-7-deazaguanine synthase OS=Brevirhabdus pacifica OX=1267768 GN=queE P E=3 SV=1
MTAQADPMPVRPAPTPQAERLRIAEIFGPTIQGEGALIGQPTVFVRAGGCDYRCVWCDSLHAVDSAYRHEWAAMDTGQVWDRVRQLSGDRPLTVTLSGGNPAIQDFGPLIETGRAAGYGFALETQGSVARDWFARLALLILSPKPPSSGETPDWAQFDACIAAGAGTRIVLKIVIFDEADYLWSREVAARYPDLPVYLQPGNHTPPPPEAEDAPIDMEGINDRMEWLVERALADGWFDAHILPQLHVLIWGNKRGV

SEQ ID NO: 28546 - protein, 210 aa, Brevundimonas abyssalis
  misc_feature (1)..(210): tr|U3AZ27|U3AZ27_9CAUL 7-carboxy-7-deazaguanine synthas e OS=Brevundimonas abyssalis TAR-001 OX=1391729 GN=queE PE=3 SV=1
MTYTVKEIFLTVQGEGGQAGRPAVFLRFSGCNLWSGREQDRATAVCSFCDTDFVGVGPDGGKFAAPEALADRVASLWRGGAGGPRLVVCTGGEPLLQLDPPLIAALHARGFEIAVETNGTVVAPDGLDWICVSPKADAPVLQTTGQELKLVYPQALARPEQFADMDFERFWLQPMDGPDTEANTAAAMDYCLQHPKWRLSVQTHKYIGVR

SEQ ID NO: 28547 - protein, 219 aa, Brevundimonas diminuta
  misc_feature (1)..(219): tr|A0A410P1M0|A0A410P1M0_BREDI 7-carboxy-7-deazaguanine synthase OS=Brevundimonas diminuta OX=293 GN=queE PE=3 SV=1
MLESVSVVRTYSAKEVFLTVQGEGGQAGRPAVFLRFAGCNLWSGLERDRAAAICTFCDTDFVGTNGDGGGKFRTPEAMADHVAAMWRGRDRDPKLVVCTGGEPLMQLDRPLIEALHARGFEIAVETNGTMSAPDGIDWICVSPKADAPVIQTSGQELKLVYPQAKAMPDRFENLDFERFWLQPMDGPDQAANTAAAIEYCLTHPKWRLSVQTHKYIGVR

SEQ ID NO: 28548 - protein, 211 aa, Brevundimonas diminuta
  misc_feature (1)..(211): tr|A0A1Z3M2F1|A0A1Z3M2F1_BREDI 7-carboxy-7-deazaguanine synthase OS=Brevundimonas diminuta OX=293 GN=queE PE=3 SV=1
MTYSAKEVFLTVQGEGGQAGRPAVFLRFAGCNLWSGLERDRATAICSFCDTDFVGVNGDGGGKFKTADLMANYVAGMWRGREGDPKLVVCTGGEPLMQLDTPLIDALHARGFEIAIESNGTLTAPDGIDWICISPKADAPVVQTSGQELKLVYPQPLAMPDRFESLDFQHFWLQPMDGPDQAANTAAAIEYCLTHPQWRLSVQTHKYIGVR

SEQ ID NO: 28549 - protein, 211 aa, Brevundimonas intermedia
  misc_feature (1)..(211): tr|A0A4Y9RUV2|A0A4Y9RUV2_9CAUL 7-carboxy-7-deazaguanine synthase OS=Brevundimonas intermedia OX=74315 GN=queE PE=3 SV=1
MTYSAKEVFLTVQGEGGQAGRPAVFLRFAGCNLWSGREQDRAAAVCSFCDTDFVGVDGDGGGKFATADLLADHVAAMWRGREGDPKLVVCTGGEPLLQLDPPLIQALHARGFEIAIESNGTLAAPDGIDWVCISPKADADVIQVTGQELKLVYPQAKAMPDRFERLDFERFWLQPMDGPDQAANTAAAIEYCLTHPQWRLSVQTHKYIGVR

SEQ ID NO: 28550 - protein, 211 aa, Brevundimonas naejangsanensis
  misc_feature (1)..(211): tr|A0A172YA37|A0A172YA37_9CAUL 7-carboxy-7-deazaguanine synthase OS=Brevundimonas naejangsanensis OX=588932 GN =queE PE=3 SV=1
MTYSAKEVFLTVQGEGGQAGRPAVFLRFAGCNLWSGLERDRAAAVCTFCDTDFVGVDGDGGGKFKTADLMADHVAGMWRGRHGDPKLVVCTGGEPLMQLDAPLIDALHARGFQIAIESNGTMAAPVGIDWICISPKADAPVVQTSGQELKLVFPQPLAMPDRFEHLDFEHFWLQPMDGPDQAANTAAAIEYCLTHPKWRLSVQTHKYIGVR

SEQ ID NO: 28551 - protein, 211 aa, Brevundimonas naejangsanensis
  misc_feature (1)..(211): tr|A0A494RNB0|A0A494RNB0_9CAUL 7-carboxy-7-deazaguanine synthase OS=Brevundimonas naejangsanensis OX=588932 GN =queE PE=3 SV=1
MTYSAKEVFLTVQGEGGQAGRPAVFLRFAGCNLWSGLERDRASAVCTFCDTDFVGTNGDGGGKFKTADLMADHVAGMWRGREGDPKLVVCTGGEPLMQLDAPLIEALHARGFEIAIESNGTLAAPKGIDWICISPKADAPVVQTSGQELKLVFPQALAMPDRFEHLDFERFWLQPMDGPDQAANTAAAIEYCLTHPQWRLSVQTHKYIGVR

SEQ ID NO: 28552 - protein, 211 aa, Brevundimonas nasdae
  misc_feature (1)..(211): tr|A0A0B4CYT8|A0A0B4CYT8_9CAUL 7-carboxy-7-deazaguanine synthase OS=Brevundimonas nasdae OX=172043 GN=queE PE= 3 SV=1
MTYSAKEVFLTVQGEGGQAGRPAVFLRFAGCNLWSGREQDRASAVCTFCDTDFVGVDGDGGGKFATPDLLADHVAAMWRGRDGDPKLVVCTGGEPLLQLDGPLIDALHARGFEIAIESNGTIAAPAGVDWICISPKADADVVQTRGAELKLVFPQLKAMPDRFEHLDFERFWLQPMDGPDQVENTAAAIEYCLTHPKWRLSVQTHKYIGVR

SEQ ID NO: 28553 - protein, 211 aa, Brevundimonas sp.
  misc_feature (1)..(211): tr|A0A1S6EU58|A0A1S6EU58_9CAUL 7-carboxy-7-deazaguanine synthase OS=Brevundimonas sp. LM2 OX=1938605 GN=queE P E=3 SV=1
MTYAVKETFLTVQGEGGQAGRPAVFLRFAGCNLWSGREQDRATAVCSFCDTLFVGTDGDGGGKFADAGALAGHVASFWIGRDGDPKLVVCTGGEPLLQLDTALIAALHDRGFDIAVETNGTLDVPTGVDWICVSPKAAAPVVQTSGQELKLVYPQPLAMPERFEDLVFERFWLQPMDGPDQVANTAAALDYCLRHPQWRLSVQTHKYIGVR

SEQ ID NO: 28554 - protein, 211 aa, Brevundimonas sp.
  misc_feature (1)..(211): tr|A0A0Q7T844|A0A0Q7T844_9CAUL 7-carboxy-7-deazaguanine synthase OS=Brevundimonas sp. Root1423 OX=1736462 GN=q ueE PE=3 SV=1
MTYSAKEVFLTVQGEGGQAGRPAVFLRFAGCNLWNGLERDRATAVCTFCDTDFVGVDGDGGGKFASAGALADHIDARWRGRAGDPKLVVCTGGEPLLQLDTPLIHALHARGFEIAIETNGTLAAPAGIDWICVSPKADAPVEQTSGQELKLVFPQAKAMPDRFEHLAFERFWLQPMDGPDQAANTAAAIDYCLTHPKWRLSVQTHKYIGVR

SEQ ID NO: 28555 - protein, 211 aa, Brevundimonas subvibrioides
  misc_feature (1)..(211): tr|D9QK64|D9QK64_BRESC 7-carboxy-7-deazaguanine synthas e OS=Brevundimonas subvibrioides (strain ATCC 15264 / D SM 4735 / LMG 14903 / NBRC 16000 / CB 81) OX=633149 GN= queE PE=3 SV=1
MTYSVKETFLTVQGEGGQAGRPAVFLRFAGCNLWSGREQDRAKAVCSFCDTEFVGTDGDGGGKFADAGVLSDHVASMWIGRDGDPKLVVCTGGEPLLQLDAPLIEALHARGFDIAVETNGTLAAPTGIDWVCVSPKAAAPVVQTSGQELKLVFPQALAMPHRFEALDFERFWLQPMDGPDQAANTAAALDYCLKNPKWRLSVQTHKYIGVR

SEQ ID NO: 28556 - protein, 211 aa, Brevundimonas subvibrioides
  misc_feature (1)..(211): tr|A0A258FIT7|A0A258FIT7_9CAUL 7-carboxy-7-deazaguanine synthase OS=Brevundimonas subvibrioides OX=74313 GN=qu eE PE=3 SV=1
MTYSVKETFLTIQGEGGQAGRPAVFLRFAGCNLWTGREQDRATAVCAFCDTDFVGTDGDGGGKFADADALADHVASFWIGRIGDPRLVVCTGGEPLLQLDAALIAALKTRSFEIAVETNGTLPAPDGIDWVCVSPKAAAPVVQTRGQELKLVYPQALAMPDRFEDLSFDRFWLQPMDGPDQTANTAAAIAYCLAHPKWRLSVQTHKYIGVR

SEQ ID NO: 28557 - protein, 215 aa, Brevundimonas vancanneytii
  misc_feature (1)..(215): tr|A0A4P1K6D8|A0A4P1K6D8_9CAUL 7-carboxy-7-deazaguanine synthase OS=Brevundimonas vancanneytii OX=1325724 GN=q ueE PE=3 SV=1
MGGRMTYSAKEVFLTVQGEGGQAGRPAVFLRFAGCNLWSGLERDRATAICTFCDTDFVGVNGDGGGKFKTADLMADHVAGMWRGREGDPKLVVCTGGEPLMQLDTSLIDALHARGFEIAIESNGTLVAPEGIDWICISPKADAPVVQTSGQELKLVYPQPLAMPERFESLDFQHFWLQPMDGPDQAANTAAAIEYCLTRPQWRLSVQTHKYIGVR

SEQ ID NO: 28558 - protein, 211 aa, Brevundimonas vesicularis
  misc_feature (1)..(211): tr|A0A1Z3UB60|A0A1Z3UB60_BREVE 7-carboxy-7-deazaguanine synthase OS=Brevundimonas vesicularis OX=41276 GN=queE PE=3 SV=1
MTYSAKEVFLTVQGEGGQAGRPAVFLRFAGCNLWSGREQDRASAVCTFCDTDFVGVDGDGGGKFASPDLLADHVAAMWRGRDGDPKLVVCTGGEPLLQLDAPLIDALHARGFEIAIESNGTLLAPEGVDWICISPKADADVVQTRGAELKLVFPQPKAMPDRFEHLDFERFWLQPMDGPDQVENTAAAIEYCLTHPQWRLSVQTHKYIGVR

SEQ ID NO: 28559 - protein, 211 aa, Brevundimonas vesicularis
  misc_feature (1)..(211): tr|A0A2X1B833|A0A2X1B833_BREVE 7-carboxy-7-deazaguanine synthase OS=Brevundimonas vesicularis OX=41276 GN=queE PE=3 SV=1
MTYSAKEVFLTVQGEGGQAGRPAVFLRFAGCNLWSGREQDRASAVCTFCDTDFVGVDGDGGGKFATPDLLANHVAAMWRGREGDPKLVVCTGGEPLLQLDAPLIDALHARGFEIAIESNGTIAAPDGVDWICISPKADADVVQTRGAELKLVFPQPKAMPDRFEHLDFERFWLQPMDGPDQVENTAAAIEYCLTHPQWRLSVQTHKYIGVR

SEQ ID NO: 28560 - protein, 211 aa, Brevundimonas viscosa
  misc_feature (1)..(211): tr|A0A1I6S1S1|A0A1I6S1S1_9CAUL 7-carboxy-7-deazaguanine synthase OS=Brevundimonas viscosa OX=871741 GN=queE PE =3 SV=1
MSYAAKEVFLTVQGEGGQAGRPAVFLRFAGCNLWNGLERDRAAAVCSFCDTDFVGTDGDGGGKFQTADALAEHVASMWRGREGDPKLVVCTGGEPLLQLDGPLIEALHARGFEIAVESNGTIVAPPGIDWICVSPKADAPVAQTSGQELKLVFPQPLAMPDRFEYLAFERFWLQPMDGPEREANTAAALDYCLAHPKWRLSVQTHKYIGVR

SEQ ID NO: 28561 - protein, 251 aa, Brucella abortus
  misc_feature (1)..(251): tr|D7H081|D7H081_BRUAO 7-carboxy-7-deazaguanine synthas e OS=Brucella abortus bv. 5 str. B3196 OX=520453 GN=que E PE=3 SV=1
MKPAMKPVMKPGPEIRISEIFGPTIQGEGVLIGEPTVFVRTGGCDYRCAWCDSLHAVESRFRHEWKPMSVEAIWHEVTALSQKRPLTVSLSGGNPAIQPLGALIKHGKFEGYRFALETQGSVAKDWFSRLDTLVLSPKPPSSAMETDWDMLAACIEAAGTGPRTVLKFVIFDEADYAYARTVSARHPQLPVYVQPGNHTPPPPDADDAAIDIDGIMRRMEWLVDKVIADGWFEAHVLPQLHVLIWGNRRGV

SEQ ID NO: 28562 - protein, 251 aa, Brucella abortus
  misc_feature (1)..(251): tr|Q57AT0|Q57AT0_BRUAB 7-carboxy-7-deazaguanine synthas e OS=Brucella abortus biovar 1 (strain 9-941) OX=262698 GN=queE PE=3 SV=1
MKPAMKPVMKPGPEIRISEIFGPTIQGEGVLIGEPTVFVRTGGCDYRCAWCDSLHAVESRFRHEWKPMSVEAIWHEVTALSQKRPLTVSLSGGNPAIQPLGALIKHGKAEGYRFALETQGSVAKDWFSRLDTLVLSPKPPSSAMETDWDMLAACIEAAGTGPRTVLKFVIFDEADYAYARTVSARHPQLPVYVQPGNHTPPPPDADDAAIDIDGIMRRMEWLVDKVIADGWFEAHVLPQLHVLIWGNRRGV

SEQ ID NO: 28563 - protein, 251 aa, Brucella canis; identical to SEQ ID NO: 28562
  misc_feature (1)..(251): tr|A9M961|A9M961_BRUC2 7-carboxy-7-deazaguanine synthas e OS=Brucella canis (strain ATCC 23365 / NCTC 10854) OX =483179 GN=queE PE=3 SV=1

SEQ ID NO: 28564 - protein, 252 aa, Brucella ceti
  misc_feature (1)..(252): tr|C0G804|C0G804_9RHIZ 7-carboxy-7-deazaguanine synthas e OS=Brucella ceti str. Cudo OX=595497 GN=queE PE=3 SV= 1
MMKPAMKPVMKPGPEIRISEIFGPTIQGEGVLIGEPTVFVRTGGCDYRCAWCDSLHAVESRFRHEWKPMSVEAIWHEVTALSQKRPLTVSLSGGNPAIQPLGALIKHGKAEGYRFALETQGSVAKDWFSRLDTLVLSPKPPSSAMETDWDMLAACIEAAGTGPRTVLKFVIFDEADYAYARTVSARHPQLPVYVQPGNHTPPPPDADDAAIDIDGIMRRMEWLVDKVIADGWFEAHVLPQLHVLIWGNRRGV

SEQ ID NO: 28565 - protein, 252 aa, Brucella melitensis; identical to SEQ ID NO: 28564
  misc_feature (1)..(252): tr|A0A4V0Z2D5|A0A4V0Z2D5_BRUML 7-carboxy-7-deazaguanine synthase OS=Brucella melitensis OX=29459 GN=queE PE=3 SV=1

SEQ ID NO: 28566 - protein, 243 aa, Brucella melitensis
  misc_feature (1)..(243): tr|Q8YJJ0|Q8YJJ0_BRUME 7-carboxy-7-deazaguanine synthas e OS=Brucella melitensis biotype 1 (strain 16M / ATCC 2 3456 / NCTC 10094) OX=224914 GN=queE PE=3 SV=1
MKPGPEIRISEIFGPTIQGEGVLIGEPTVFVRTGGCDYRWAWCDNLHAVESRFRHEWKPMSVEAIWHEVTALSQKRPLTVSLSGGNPAIQPLGALIKHGKAEGYRFALETQGSVAKDWFSRLDTLVLSPKPPSSAMETDWDMLAACIEAAGTGPRTVLKFVIFDEADYAYARTVSARHPQLPVYVQPGNHTPPPPDADDAAIDIDGIMRRMEWLVDKVIADGWFEAHVLPQLHVLIWGNRRGV

SEQ ID NO: 28567 - protein, 251 aa, Brucella microti; identical to SEQ ID NO: 28562
  misc_feature (1)..(251): tr|C7LEK3|C7LEK3_BRUMC 7-carboxy-7-deazaguanine synthas e OS=Brucella microti (strain CCM 4915) OX=568815 GN=qu eE PE=3 SV=1

SEQ ID NO: 28568 - protein, 252 aa, Brucella neotomae
  misc_feature (1)..(252): tr|A0A381B9V9|A0A381B9V9_BRUNE 7-carboxy-7-deazaguanine synthase OS=Brucella neotomae OX=29460 GN=queE PE=3 SV =1
MMKPAMKPVMKPGPEIRISEIFGPTIQGEGVLIGEPTVFVRTGGCDYRCAWCDSLHAVESRFRHEWKPMSVEAIWHEVTALSQKRPLTVSLSGGNPAIQPLGALIKHGKAEGYRFALETQGSVAKDWFSRLDTLVLSPKPPSSAMETDWDMLAACIEAAGTGPHTVLKFVIFDEADYAYARTVSARHPQLPVYVQPGNHTPPPPDADDAAIDIDGIMRRMEWLVDKVIADGWFEAHVLPQLHVLIWGNRRGV

SEQ ID NO: 28569 - protein, 252 aa, Brucella ovis
  misc_feature (1)..(252): tr|N8LU66|N8LU66_BRUOV 7-carboxy-7-deazaguanine synthas e OS=Brucella ovis IntaBari-2002-82-58 OX=1293916 GN=qu eE PE=3 SV=1
MMKPAMKPVMKPGPEIRISEIFGPTIQGEGVLIGEPTVFVRTGGCDYRCAWCDSLHAVESRFRHEWKPISVEAIWHEVTALSQKRPLTVSLSGGNPAIQPLGALIKHGKAEGYRFALETQGSVAKDWFSRLDTLVLSPKPPSSAMETDWDMLAACIEAAGTGPRTVLKFVIFDEADYAYARTVSARHPQLPVYVQPGNHTPPPPDADDAAIDIDGIMRRMEWLVDKVIADGWFEAHVLPQLHVLIWGNRRGV

SEQ ID NO: 28570 - protein, 247 aa, Brucella ovis
  misc_feature (1)..(247): tr|A0A0H3AQE3|A0A0H3AQE3_BRUO2 7-carboxy-7-deazaguanine synthase OS=Brucella ovis (strain ATCC 25840 / 63/290 / NCTC 10512) OX=444178 GN=queE PE=3 SV=1
MKPVMKPGPEIRISEIFGPTIQGEGVLIGEPTVFVRTGGCDYRCAWCDSLHAVESRFRHEWKPISVEAIWHEVTALSQKRPLTVSLSGGNPAIQPLGALIKHGKAEGYRFALETQGSVAKDWFSRLDTLVLSPKPPSSAMETDWDMLAACIEAAGTGPRTVLKFVIFDEADYAYARTVSARHPQLPVYVQPGNHTPPPPDADDAAIDIDGIMRRMEWLVDKVIADGWFEAHVLPQLHVLIWGNRRGV

SEQ ID NO: 28571 - protein, 251 aa, Brucella pinnipedialis
  misc_feature (1)..(251): tr|A0A0E1X170|A0A0E1X170_9RHIZ 7-carboxy-7-deazaguanine synthase OS=Brucella pinnipedialis M292/94/1 OX=520462 GN=queE PE=3 SV=1
MKPAMKPVMKPGPEIRISEIFGPTIQGEGVLIGEPTVFVRTGGCDYRCAWCDSLHAVESRFRHEWKPMSVEAIWHEVTALSQKRPLTVSLSGGNPAIQPLGTLIKHGKAEGYRFALETQGSVAKDWFSRLDTLVLSPKPPSSAMETDWDMLAACIEAAGTGPRTVLKFVIFDEADYAYARTVSARHPQLPVYVQPGNHTPPPPDADDAAIDIDGIMRRMEWLVDKVIADGWFEAHVLPQLHVLIWGNRRGV

SEQ ID NO: 28572 - protein, 280 aa, Brucella sp.
  misc_feature (1)..(280): tr|D6LQJ1|D6LQJ1_9RHIZ 7-carboxy-7-deazaguanine synthas e OS=Brucella sp. NVSL 07-0026 OX=520448 GN=queE PE=3 S V=1
MPCAMAGNLRSAGQRNTEDLGGIPARKTMMKPAMKPVMKPGPEIRISEIFGPTIQGEGVLIGEPTVFVRTGGCDYRCAWCDSLHAVESRFRHEWKPMSVEAIWHEVTALSQKRPLTVSLSGGNPAIQPLGALIKHGKAEGYRFALETQGSVAKDWFSRLDTLVLSPKPPSSAMETDWDMLAACIEAAGTGPRTVLKFVIFDEADYAYARTVSARHPQLPVYVQPGNHTPPPPDADDAAIDVDGIMRRTEWLVDKVIADGWFEAHVLPQLHVLIWGNRRGV

SEQ ID NO: 28573 - protein, 247 aa, Brucella sp.
  misc_feature (1)..(247): tr|A0A1P8S6U0|A0A1P8S6U0_9RHIZ 7-carboxy-7-deazaguanine synthase OS=Brucella sp. 09RB8910 OX=1844051 GN=queE P E=3 SV=1
MKPVMKPGPEIRISEIFGPTIQGEGVLIGEPTVFVRTGGCDYRCAWCDSLHAVESRFRHEWKPMSVEAIWHEVTALSQKRPLTVSLSGGNPAIQPLGALIEHGKAEGYRFALETQGSVAKDWFSRLDTLVLSPKPPSSAMETDWDMLAACIEAAGTGPRTVLKFVIFDEADYAYARAVSARHPQLPVYLQPGNHTPPPPDADDAAIDIDGIMRRMEWLVDKVIADGWFEAHVLPQLHVLIWGNRRGV

SEQ ID NO: 28574 - protein, 252 aa, Brucella suis; identical to SEQ ID NO: 28564
  misc_feature (1)..(252): tr|A0A4Z0F6N4|A0A4Z0F6N4_BRUSS 7-carboxy-7-deazaguanine synthase OS=Brucella suis OX=29461 GN=queE PE=3 SV=1

SEQ ID NO: 28575 - protein, 251 aa, Brucella suis; identical to SEQ ID NO: 28562
  misc_feature (1)..(251): tr|B0CIX7|B0CIX7_BRUSI 7-carboxy-7-deazaguanine synthas e OS=Brucella suis (strain ATCC 23445 / NCTC 10510) OX= 470137 GN=queE PE=3 SV=1

SEQ ID NO: 28576 - protein, 243 aa, Brucellaceae bacterium
  misc_feature (1)..(243): tr|A0A3P1V0V1|A0A3P1V0V1_9RHIZ 7-carboxy-7-deazaguanine synthase OS=Brucellaceae bacterium VT-16-1752 OX=24879 07 GN=queE PE=3 SV=1
MKPVSEIRISEIFGPTIQGEGVLIGEPTVFVRTGGCDYRCAWCDSLHAVESRFRHEWKSMGVEAIWHEVTALSENRPLTVSLSGGNPAIQPLGPLIAHGKKEAYRFALETQGSVAKDWFSALDTLVLSPKPPSSAMAFDPDALAACVEAAGPKPRTVLKFVIFDDADYAFAKHVSALYPHLPVYLQPGNHTPPPPETDDALIDIDGIMRRMEWLVDKVIADRWFEAHVLPQLHVLIWGNKRGV

SEQ ID NO: 28577 - protein, 193 aa, Brumimicrobium aurantiacum
  misc_feature (1)..(193): tr|A0A3E1EZ47|A0A3E1EZ47_9FLAO 7-carboxy-7-deazaguanine synthase OS=Brumimicrobium aurantiacum OX=1737063 GN=q ueE PE=3 SV=1
MESFYTIQGEGHYSGRAAYFIRTGGCDVGCVWCDVKESWEAENHPDTSLETLLSEVNTTSTDFVVVTGGEPAMYSIENLVIALQNEGKEVAIETSGCYPLDAKVDWYCFSPKKFKKPVPEAYEKAHELKVVIFNKSDFKWAEEHAEKINSECFLYLQPEWSKEEQMLPLIIEYVKNNPKWKISLQTHKYMNIP

SEQ ID NO: 28578 - protein, 193 aa, Brumimicrobium glaciale
  misc_feature (1)..(193): tr|A0A4Q4KRF7|A0A4Q4KRF7_9FLAO 7-carboxy-7-deazaguanine synthase OS=Brumimicrobium glaciale OX=200475 GN=queE PE=3 SV=1
MESFYTIQGEGHYSGRAAYFIRTGGCDVGCVWCDVKESWEAKDHPDTSLETLLDGVNSTPTDFVVITGGEPAMYPIETLVSALQDNYKEVAIETSGCYPLDAKVDWYCFSPKKFKKPVDEAYIKANELKIVIFNKNDFSWAEEHAAKVNDDCLLYLQPEWSKEAQMLPLIIDYVKDNPRWRISLQTHKYMNIP

SEQ ID NO: 28579 - protein, 193 aa, Brumimicrobium salinarum
  misc_feature (1)..(193): tr|A0A2I0R3B3|A0A2I0R3B3_9FLAO 7-carboxy-7-deazaguanine synthase OS=Brumimicrobium salinarum OX=2058658 GN=que E PE=3 SV=1
MESFYTIQGEGHYSGRAAYFIRTGGCDVGCVWCDVKESWEAENHPDTTLETLLEEVNTTNTNFVVVTGGEPAMYKIENLVSALQNEGKEVAIETSGCYPLDAKVDWYCFSPKKFKKPVEEAYEKANELKVVIFNKNDFKWAEEHAEKVNDDCLLYLQPEWSKEAQMLPLIIDYVKNHPQWKISLQTHKYMNIP

SEQ ID NO: 28580 - protein, 207 aa, Brumimicrobium sp.
  misc_feature (1)..(207): tr|A0A2U2XES5|A0A2U2XES5_9FLAO 7-carboxy-7-deazaguanine synthase OS=Brumimicrobium sp. C305 OX=2100725 GN=queE PE=3 SV=1
MENNIESKRTSWPVMESFYTIQGEGHYSGRAAYFIRTGGCDVGCVWCDVKESWEAENHPDTSLETLLEGVNATATDFVVITGGEPAMYPIETLVTALQDDYKEVAIETSGCYPLDAQVDWYCFSPKKFKKPVEEAYHKANELKIVIFNKSDFKWAEEHAAKVNDDCLLYLQPEWSKEAQILPLIIEYVKDNPKWKISLQTHKYMNIP

SEQ ID NO: 28581 - protein, 223 aa, Bryobacterales bacterium
  misc_feature (1)..(223): tr|A0A3D1B190|A0A3D1B190_9BACT 7-carboxy-7-deazaguanine synthase OS=Bryobacterales bacterium OX=2026791 GN=que E PE=3 SV=1
MKIAEIFYSVQGEGSLVGVPSVFIRTSGCNLRCSWCDTPYTSWHPEGEMMEVPAIMTVAQSFGARHAVVTGGEPMIAPGIRELTQALRAAGFHITIETAGTVLADVACDLMSISPKLANSTPEGPFAQQHERLRLQVDVLSQLTSRCSYQLKFVVRDPDDMSEINQLVQALGAGKEHVILMPEGIDRDTLRERGLWLAEICKQTGFRFSPRLHVDLYGNRRGV

SEQ ID NO: 28582 - protein, 215 aa, Bryocella elongata
  misc_feature (1)..(215): tr|A0A1H6CB88|A0A1H6CB88_9BACT 7-carboxy-7-deazaguanine synthase OS=Bryocella elongata OX=863522 GN=queE PE=3 SV=1
MAYSVKEIFYTLQGEGANAGRPSVFCRFAGCNLWTGREEDRASAICKFCDTDFIGTDGDGGGKFATARELAQAVAARWPASTESQRGKSQRFVVCTGGEPLLQLDAALIAALHEEGFVIAVETNGTVAVPDGIDWVCVSPKIGSKFIVERGQELKLVYPQEVDPDDFLKLDFENFYLQPKDGPDAAASLAATIDYCRAHPAWRLSLQTHKIIGIR

SEQ ID NO: 28583 - protein, 219 aa, Buchnera aphidicola
  misc_feature (1)..(219): sp|Q8K9D9|QUEE_BUCAP 7-carboxy-7-deazaguanine synthase OS=Buchnera aphidicola subsp. Schizaphis graminum (stra in Sg) OX=198804 GN=queE PE=3 SV=1
MYYPINEIFQTIQGEGYYTGTPSIFIRLQGCPVHCKWCDTKYTWKCNNEDQISYEKIIMKKKSNRKWSYMNVKEIILIIKIKKWTAKHIVITGGEPCLYNLLEITKELEKEDYKCQIETSGTELIKCSLNTWITLSPKINKKTLKTSILRSNEIKYPVLKKEDLFYLNSILKKIKNKKHNLIFLQPISQNEEALNICIKTCIIKNWRLSVQIHKYLKIR

SEQ ID NO: 28584 - protein, 219 aa, Buchnera aphidicola
  misc_feature (1)..(219): tr|A0A2U8DGD0|A0A2U8DGD0_9GAMM 7-carboxy-7-deazaguanine synthase OS=Buchnera aphidicola (Melanaphis sacchari) OX=2173854 GN=queE PE=3 SV=1
MKYPVNEIFQTIQGEGYYIGTPAIFIRLQGCKVACEWCDTKYTWKNSYENQILNEEIIKKEKSNKKWSYMTTQNIILIIKQLKWTAKHIVITGGEPCMYNLLDITTLLEEKGYFCQIETSGTELIECSLNTWVTLSPKQKKTTLKSSILRANEIKFPILIEQDFLYLKKILHMIKKRKNNLIFLQPISQNEKALAICIKKCTEKNWRLSIQIHKYLQIR

SEQ ID NO: 28585 - protein, 223 aa, Budvicia aquatica
  misc_feature (1)..(223): tr|A0A2C6DM13|A0A2C6DM13_9GAMM 7-carboxy-7-deazaguanine synthase OS=Budvicia aquatica OX=82979 GN=queE PE=3 SV =1
MLYPVNELFQTLQGEGYFTGVPAIFIRLQGCPVGCSWCDTKHTWEKVAEQQRPIGDILVKTEESDCWSGVTEQQLINILQQQQYTARHVVITGGEPCLYDLTPLTDLLEQHGFNCQIETSGTQQVSCSENTWVTVSPKVDMRGGLAVVAQALVRADEIKHPVARERDIEQLDELLATLTDDKPRVIALQPISQNPRSTELCIQTCIARNWRLSMQTHKYLNIA

SEQ ID NO: 28586 - protein, 210 aa, Burkholderia ambifaria
  misc_feature (1)..(210): tr|B1YPW8|B1YPW8_BURA4 7-carboxy-7-deazaguanine synthas e OS=Burkholderia ambifaria (strain MC40-6) OX=398577 G N=queE PE=3 SV=1
MTYAVKEIFYTLQGEGANAGRPAVFCRFAGCNLWSGREEDRAEAVCRFCDTDFVGTDGENGGKFKDAEALVATIAGLWPDGEAHRFVVCTGGEPMLQLDQPLVDALHAAGFEIAIETNGSLPVLETIDWICVSPKADAPLVVTKGNELKVVIPQDNQRLADYAKLDFEYFLVQPMDGPSRDLNTKLAIDWCKRHPQWRLSMQTHKYLNIP

SEQ ID NO: 28587 - protein, 210 aa, Burkholderia ambifaria; identical to SEQ ID NO: 28586
  misc_feature (1)..(210): tr|A0A2S9N4L7|A0A2S9N4L7_9BURK 7-carboxy-7-deazaguanine synthase OS=Burkholderia ambifaria OX=152480 GN=queE P E=3 SV=1

SEQ ID NO: 28588 - protein, 210 aa, Burkholderia anthina
  misc_feature (1)..(210): tr|A0A107SN49|A0A107SN49_9BURK 7-carboxy-7-deazaguanine synthase OS=Burkholderia anthina OX=179879 GN=queE PE= 3 SV=1
MTYAVKEIFYTLQGEGANAGRPAVFCRFAGCNLWSGREEDRAEAVCRFCDTDFVGTDGENGGKFKDAAALVATIAGLWPEGEAHRFVVCTGGEPMLQLDQPLVDALHAAGFEIAIETNGSLPVLESIDWICVSPKADAPLVVTKGNELKVVVPQDNQRLADYAKLDFEYFLVQPMDGPSRDLNTKLAIDWCKRHPQWRLSMQTHKYLNIP

SEQ ID NO: 28589 - protein, 210 aa, Burkholderia catarinensis
  misc_feature (1)..(210): tr|A0A1J9PS04|A0A1J9PS04_9BURK 7-carboxy-7-deazaguanine synthase OS=Burkholderia catarinensis OX=1108140 GN=qu eE PE=3 SV=1
MTYAVKEIFYTLQGEGANAGRPAVFCRFAGCNLWSGREEDRAEAVCRFCDTDFVGTDGENGGKFKDAEALVATIAGLWPDGEAHRFVVCTGGEPMLQLDQPLVDALHAAGFEIAIETNGSMPVLETIDWICVSPKADAPLVVTKGNELKVVIPQDNQRLADYAKLDFEYFLVQPMDGPSRDLNTKLAIDWCKRHPQWRLSMQTHKYLNIP

SEQ ID NO: 28590 - protein, 207 aa, Burkholderia cenocepacia
  misc_feature (1)..(207): tr|A2VUG8|A2VUG8_9BURK 7-carboxy-7-deazaguanine synthas e OS=Burkholderia cenocepacia PC184 OX=350702 GN=queE P E=3 SV=1
MTYAVKEIFYTLQGEGANAGRPAVFCRFAGCNLWSGREEDRAEAVCRFCDTDFVGTDGENGGKFKDAAALVATIAGLWPEGEANRFVVCTGGEPMLQLDQPLVDALHAAGFEIAIETNGSLPVLESIDWICVSPKADAPLVVTKGNELKGRRAAGQPAAGRLREARLRVFSRAADGRPVARPQHEARDRLVQSVIRSGGCRCRPTNI

SEQ ID NO: 28591 - protein, 210 aa, Burkholderia cenocepacia
  misc_feature (1)..(210): tr|A0A3N9G925|A0A3N9G925_9BURK 7-carboxy-7-deazaguanine synthase OS=Burkholderia cenocepacia OX=95486 GN=queE PE=3 SV=1
MTYAVKEIFYTLQGEGANAGRPAVFCRFAGCNLWSGREEDRAEAVCRFCDTDFVGTDGENGGKFKDAAALVATIAGLWPEGEANRFVVCTGGEPMLQLDQPLVDALHAAGFEIAIETNGSLPVLESIDWICVSPKADAPLVVTKGNELKVVVPQDNQRLADYAKLDFEYFLVQPMDGPSRDLNTKLAIDWCKRHPQWRLSMQTHKYLNIP

SEQ ID NO: 28592 - protein, 210 aa, Burkholderia cepacia
  misc_feature (1)..(210): tr|A0A0U4BZX9|A0A0U4BZX9_BURCE 7-carboxy-7-deazaguanine synthase OS=Burkholderia cepacia JBK9 OX=1395570 GN=qu eE PE=3 SV=1
MTYAVKEIFYTLQGEGANAGRPAVFCRFAGCNLWSGREEDRAEAVCRFCDTDFVGTDGENGGKFKDAEALVATIAGLWPEGEAHRFVVCTGGEPMLQLDQPLVDALHAAGFEIAIETNGSLPVLESIDWICVSPKADAPLVVTKGNELKVVIPQDNQRLADYAKLDFEYFLVQPMDGPSRDLNTKLAIDWCKRHPQWRLSMQTHKYLNIP

SEQ ID NO: 28593 - protein, 210 aa, Burkholderia cepacia; identical to SEQ ID NO: 28586
  misc_feature (1)..(210): tr|J7J346|J7J346_BURCE 7-carboxy-7-deazaguanine synthas e OS=Burkholderia cepacia GG4 OX=1009846 GN=queE PE=3 S V=1

SEQ ID NO: 28594 - protein, 210 aa, Burkholderia contaminans
  misc_feature (1)..(210): tr|A0A0G3Z0A4|A0A0G3Z0A4_9BURK 7-carboxy-7-deazaguanine synthase OS=Burkholderia contaminans OX=488447 GN=queE PE=3 SV=1
MTYAVKEIFYTLQGEGANAGRPAVFCRFAGCNLWSGREEDRAEAVCRFCDTDFVGTDGENGGKFKDAEALVATIAGLWPEGEAHRFVVCTGGEPMLQLDQPLVDALHAAGFEIAIETNGSLPVLESIDWICVSPKADAPLVVTKGNELKVVIPQDNQRLADYAKLDFEYYLVQPMDGPSRDLNTKLAIDWCKRHPQWRLSMQTHKYLNIP

SEQ ID NO: 28595 - protein, 210 aa, Burkholderia dabaoshanensis
  misc_feature (1)..(210): tr|A0A2N7VSS2|A0A2N7VSS2_9BURK 7-carboxy-7-deazaguanine synthase OS=Burkholderia dabaoshanensis OX=564714 GN=q ueE PE=3 SV=1
MTYAVKEIFYTLQGEGANAGRPAVFCRFAGCNLWSGREEDRASAVCRFCDTDFVGTDGENGGKYRDAEALAAKIASLWPEGEANRFVVCTGGEPMLQMDEPFVDALHAAGFEVAIETNGSLPVLESIDWVCVSPKADAPLVVTKGNELKVVVPQENQRLADYAALDFEYFLVQPMDGPAREMNTRLAIDWCKRHPRWRLSMQTHKYLNIP

SEQ ID NO: 28596 - protein, 210 aa, Burkholderia diffusa
  misc_feature (1)..(210): tr|A0A1B4BVZ2|A0A1B4BVZ2_9BURK 7-carboxy-7-deazaguanine synthase OS=Burkholderia diffusa OX=488732 GN=queE PE= 3 SV=1
MTYAVKEIFYTLQGEGANAGRPAVFCRFAGCNLWSGREEDRADAVCRFCDTDFVGTEGENGGKFKDAEALVATIAGLWPDGEAHRFVVCTGGEPMLQLDQPLVDALHAAGFEIAIETNGSLPVLETIDWICVSPKADAPLVVTKGNELKVVIPQDNQRLADYAKLDFEYFLVQPMDGPSRDLNTKLAIDWCKRHPQWRLSMQTHKYLNIP

SEQ ID NO: 28597 - protein, 210 aa, Burkholderia dolosa
  misc_feature (1)..(210): tr|A0A0D5J5L3|A0A0D5J5L3_9BURK 7-carboxy-7-deazaguanine synthase OS=Burkholderia dolosa AU0158 OX=350701 GN=qu eE PE=3 SV=1
MTYAVKEIFYTLQGEGANAGRPAVFCRFAGCNLWSGREEDRADAVCRFCDTDFVGTDGENGGKFKDAASLAAAIAALWPDGEAHRFVVCTGGEPMLQLDQPLVDALHAAGFEIAIETNGSLPVLDSIDWICVSPKADAPLVVTKGNELKVVIPQDNQRLADYAKLDFEYFLVQPMDGPSRDLNTKLAIDWCKRHPQWRLSMQTHKYLNIP

SEQ ID NO: 28598 - protein, 210 aa, Burkholderia gladioli
  misc_feature (1)..(210): tr|F2LGW6|F2LGW6_BURGS 7-carboxy-7-deazaguanine synthas e OS=Burkholderia gladioli (strain BSR3) OX=999541 GN=q ueE PE=3 SV=1
MTYTVKEIFYTLQGEGANAGRPAVFCRFAGCNLWTGREADRETAVCRFCDTDFVGTDGENGGKFKTPEQLAAMVASLWPEGEANRFVVCTGGEPMLQLDQPLVDALHAQGFEIAIETNGSLPVLETIDWICVSPKADAPLVVTKGHELKVVVPQDNQRLADYARLDFDYFLVQPMDGPSRDINTKLAIDWCKRHPQWRLSMQTHKYLNIP

SEQ ID NO: 28599 - protein, 210 aa, Burkholderia gladioli; identical to SEQ ID NO: 28598
  misc_feature (1)..(210): tr|A0A095HVU9|A0A095HVU9_BURGA 7-carboxy-7-deazaguanine synthase OS=Burkholderia gladioli OX=28095 GN=queE PE= 3 SV=1

SEQ ID NO: 28600 - protein, 210 aa, Burkholderia glumae
  misc_feature (1)..(210): tr|A0A2J9H6K7|A0A2J9H6K7_BURGL 7-carboxy-7-deazaguanine synthase OS=Burkholderia glumae OX=337 GN=queE PE=3 SV =1
MTYTVKEIFYTLQGEGANAGRPAVFCRFAGCNLWTGREADRDSAVCRFCDTDFVGTDGENGGKFRTPELLADQVAALWPAGEAHRFVVCTGGEPMLQLDQPLVDALHARGFEIAIETNGSLPVLDTIDWICVSPKADAPLVVTRGHELKVVIPQDNQRLADYARLDFEHFLVQPMDGPSRELNTRLAIDWCKRHPQWRLSMQTHKYLNIP

SEQ ID NO: 28601 - protein, 210 aa, Burkholderia glumae; identical to SEQ ID NO: 28600
  misc_feature (1)..(210): tr|C5AF28|C5AF28_BURGB 7-carboxy-7-deazaguanine synthas e OS=Burkholderia glumae (strain BGR1) OX=626418 GN=que E PE=3 SV=1

SEQ ID NO: 28602 - protein, 210 aa, Burkholderia insecticola
  misc_feature (1)..(210): tr|R4WSE8|R4WSE8_9BURK 7-carboxy-7-deazaguanine synthas e OS=Burkholderia insecticola OX=758793 GN=queE PE=3 SV =1
MTYAVKEIFYTLQGEGANAGRPAVFCRFAGCNLWSGREEDRADAVCQFCDTDFVGTDGENGGKFRTPAELVAKIASLWPEGAGHKFVVCTGGEPMLQIDQPFVDALHEAGFEMAIETNGSLPVLESIDWICVSPKADAPLVVTKGNELKVVVPQDNQRLAEYEKLDFDYFLVQPMDGPSRDINTKLAIDWCKRHPKWRLSMQTHKYLNIP

SEQ ID NO: 28603 - protein, 210 aa, Burkholderia lata; identical to SEQ ID NO: 28592
  misc_feature (1)..(210): tr|A0A3G3H8H4|A0A3G3H8H4_BURL3 7-carboxy-7-deazaguanine synthase OS=Burkholderia lata (strain ATCC 17760 / DSM 23089 / LMG 22485 / NCIMB 9086 / R18194 / 383) OX=4829 57 GN=queE PE=3 SV=1

SEQ ID NO: 28604 - protein, 210 aa, Burkholderia lata; identical to SEQ ID NO: 28594
  misc_feature (1)..(210): tr|Q39BV3|Q39BV3_BURL3 7-carboxy-7-deazaguanine synthas e OS=Burkholderia lata (strain ATCC 17760 / DSM 23089 / LMG 22485 / NCIMB 9086 / R18194 / 383) OX=482957 GN=qu eE PE=3 SV=1

SEQ ID NO: 28605 - protein, 210 aa, Burkholderia latens
  misc_feature (1)..(210): tr|A0A1B4NVK1|A0A1B4NVK1_9BURK 7-carboxy-7-deazaguanine synthase OS=Burkholderia latens OX=488446 GN=queE PE=3 SV=1
MTYAVKEIFYTLQGEGANAGRPAVFCRFAGCNLWSGREEDRADAVCRFCDTDFVGTDGENGGKFKDAEALVATIAALWPDGEAHRFVVCTGGEPMLQLDQPLVDALHAAGFEIAIETNGSLPVLDTIDWICVSPKADAPLVVTKGNELKVVIPQDNQRLADYAKLDFEYFLVQPMDGPSRDINTKLAIDWCKRHPQWRLSMQTHKYLNIP

SEQ ID NO: 28606 - protein, 210 aa, Burkholderia mallei
  misc_feature (1)..(210): tr|A0A0H2WJA6|A0A0H2WJA6_BURMA 7-carboxy-7-deazaguanine synthase OS=Burkholderia mallei (strain ATCC 23344) OX =243160 GN=queE PE=3 SV=1
MTYTVKEIFYTLQGEGANAGRPAVFCRFAGCNLWTGREADRDGAVCRFCDTDFVGTDGENGGKFKDAASLAARIASLWPAGEAYRFVVCTGGEPMLQLDQPLVDALHAAGFTIAIETNGSLPVLESIDWICVSPKADAPLVVTKGNELKVVVPQDNQRLADYAKLDFEHFLVQPMDGPSRELNTRLAIDWCKRHPRWRLSMQTHKYLNIP

SEQ ID NO: 28607 - protein, 210 aa, Burkholderia mallei; identical to SEQ ID NO: 28606
  misc_feature (1)..(210): tr|C4ASU0|C4ASU0_BURML 7-carboxy-7-deazaguanine synthas e OS=Burkholderia mallei GB8 horse 4 OX=320390 GN=queE PE=3 SV=1

SEQ ID NO: 28608 - protein, 210 aa, Burkholderia metallica
  misc_feature (1)..(210): tr|A0A1B4HXH3|A0A1B4HXH3_9BURK 7-carboxy-7-deazaguanine synthase OS=Burkholderia metallica OX=488729 GN=queE P E=3 SV=1
MTYAVKEIFYTLQGEGANAGRPAVFCRFAGCNLWSGREEDRAEAVCRFCDTDFVGTDGENGGKFKDAAALVATIAGLWPDGEAHRFVVCTGGEPMLQLDQPLVDALHAAGFEIAIETNGSLPVLESIDWICVSPKADAPLVVTKGNELKVVIPQDNQRLADYAKLDFEYFLVQPMDGPSRDLNTKLAIDWCKRHPQWRLSMQTHKYLNIP

SEQ ID NO: 28609 - protein, 210 aa, Burkholderia multivorans
  misc_feature (1)..(210): sp|A0A0H3KB22|QUEE_BURM1 7-carboxy-7-deazaguanine synth ase OS=Burkholderia multivorans (strain ATCC 17616 / 24 9) OX=395019 GN=queE PE=1 SV=1
MTYAVKEIFYTLQGEGANAGRPAVFCRFAGCNLWSGREEDRAQAVCRFCDTDFVGTDGENGGKFKDADALVATIAGLWPAGEAHRFVVCTGGEPMLQLDQPLVDALHAAGFGIAIETNGSLPVLESIDWICVSPKADAPLVVTKGNELKVVIPQDNQRLADYAKLDFEYFLVQPMDGPSRDLNTKLAIDWCKRHPQWRLSMQTHKYLNIP

SEQ ID NO: 28610 - protein, 210 aa, Burkholderia multivorans
  misc_feature (1)..(210): tr|A0A1W0ZJP5|A0A1W0ZJP5_9BURK 7-carboxy-7-deazaguanine synthase OS=Burkholderia multivorans OX=87883 GN=queE PE=3 SV=1
MTYAVKEIFYTLQGEGANAGRPAVFCRFAGCNLWSGREEDRAQAVCRFCDTDFVGTDGENGGKFKDADALVATIAGLWPDGEAHRFVVCTGGEPMLQLDQPLVDALHAAGFEIAIETNGSLPVLESIDWICVSPKADAPLVVTKGNELKVVIPQDNQRLADYAKLDFEYFLVQPMDGPSRDLNTKLAIDWCKRHPQWRLSMQTHKYLNIP

SEQ ID NO: 28611 - protein, 210 aa, Burkholderia novacaledonica
  misc_feature (1)..(210): tr|A0A2U3IBH6|A0A2U3IBH6_9BURK 7-carboxy-7-deazaguanine synthase OS=Burkholderia novacaledonica OX=1544861 GN= queE PE=3 SV=1
MTYAVKEIFYTLQGEGANAGRPAVFCRFAGCNLWSGREEDRADAVCQFCDTDFVGTDGENGGKYKTPAELVAKIASLWPEGAAHRFVVCTGGEPMLQIDQPFVNALHEAGFEMAIETNGSLPVLESIDWICVSPKADAPLVVTKGNELKVVVPQDNQRLAEYEKLDFEYFLVQPMDGPSRDINTKLAIDWCKRHPKWRLSMQTHKYLNIP

SEQ ID NO: 28612 - protein, 210 aa, Burkholderia oklahomensis
  misc_feature (1)..(210): tr|A0A381BTZ0|A0A381BTZ0_9BURK 7-carboxy-7-deazaguanine synthase OS=Burkholderia oklahomensis OX=342113 GN=que E PE=3 SV=1
MTYTVKEIFYTLQGEGANAGRPAVFCRFAGCNLWSGREEDRDGAVCRFCDTDFVGADGENGGKFKDAESLAAQIASLWPEGEAHRFVVCTGGEPMLQLDQALVDALHAAGFTIAIETNGSLPVLESIDWVCVSPKADAPLVVTKGNELKVVVPQDNQRLADYAKLDFEHFLVQPMDGPSRDFNTKLAIDWCKRHPKWRLSMQTHKYLNIP

SEQ ID NO: 28613 - protein, 210 aa, Burkholderia plantarii
  misc_feature (1)..(210): tr|A0A0B6RRU0|A0A0B6RRU0_9BURK 7-carboxy-7-deazaguanine synthase OS=Burkholderia plantarii OX=41899 GN=queE PE =3 SV=1
MTYTVKEIFYTLQGEGANAGRPAVFCRFAGCNLWTGREADRDSAVCRFCDTDFVGTDGENGGKFKTPELLADQVAALWPAGEAHRFVVCTGGEPMLQLDQPLVDALHARGFEIAIETNGSLPVLDTIDWICVSPKADAPLVVTRGHELKVVIPQDNQRLAEYAGLDFEYFLVQPMDGPSRDINTKLAIDWCKRHPQWRLSMQTHKYLNIP

SEQ ID NO: 28614 - protein, 210 aa, Burkholderia pseudomallei; identical to SEQ ID NO: 28606
  misc_feature (1)..(210): tr|A0A0E1S6H9|A0A0E1S6H9_BURPE 7-carboxy-7-deazaguanine synthase OS=Burkholderia pseudomallei 305 OX=425067 GN =queE PE=3 SV=1

SEQ ID NO: 28615 - protein, 210 aa, Burkholderia pseudomallei
  misc_feature (1)..(210): tr|A8E882|A8E882_BURPE 7-carboxy-7-deazaguanine synthas e OS=Burkholderia pseudomallei 406e OX=360118 GN=queE P E=3 SV=1
MTYTVKEIFYTLQGEGANAGRPAVFCRFAGCNLWTGREADRDGAVCRFCDTDFVGTDGENGGKFEDAASLAARIASLWPAGEAYRFVVCTGGEPMLQLDQPLVDALHAAGFTIAIETNGSLPVLESIDWICVSPKADAPLVVTKGNELKVVVPQDNQRLADYAKLDFEHFLVQPMDGPSRELNTRLAIDWCKRHPRWRLSMQTHKYLNIP

SEQ ID NO: 28616 - protein, 210 aa, Burkholderia pseudomultivorans
  misc_feature (1)..(210): tr|A0A132EF43|A0A132EF43_9BURK 7-carboxy-7-deazaguanine synthase OS=Burkholderia pseudomultivorans OX=1207504 GN=queE PE=3 SV=1
MTYAVKEIFYTLQGEGANAGRPAVFCRFAGCNLWSGREEDRAEAVCRFCDTDFVGTDGENGGKFKDADALVATIAGLWPDGEAHRFVVCTGGEPMLQLDQPLVDALHAAGFEIAIETNGSLPVLESIDWICVSPKADAPLVVTKGNELKVVIPQDNQRLADYAKLDFEYFLVQPMDGPSRDLNTKLAIDWCKRHPQWRLSMQTHKYLNIP

SEQ ID NO: 28617 - protein, 210 aa, Burkholderia puraquae
  misc_feature (1)..(210): tr|A0A1X1PAS2|A0A1X1PAS2_9BURK 7-carboxy-7-deazaguanine synthase OS=Burkholderia puraquae OX=1904757 GN=queE P E=3 SV=1
MTYAVKEIFYTLQGEGANAGRPAVFCRFAGCNLWSGREEDRADAVCRFCDTDFVGTDGENGGKFKDAEALVATIAGLWPEGEAHRFVVCTGGEPMLQLDQPLVDALHAAGFEIAIETNGSLPVLESIDWICVSPKADAPLVVTKGNELKVVIPQDNQRLADYAKLDFEYFLVQPMDGPSRDLNTKLAIDWCKRHPQWRLSMQTHKYLNIP

SEQ ID NO: 28618 - protein, 210 aa, Burkholderia pyrrocinia
  misc_feature (1)..(210): tr|A0A2Z5MXH0|A0A2Z5MXH0_BURPY 7-carboxy-7-deazaguanine synthase OS=Burkholderia pyrrocinia OX=60550 GN=queE P E=3 SV=1
MTYAVKEIFYTLQGEGANAGRPAVFCRFAGCNLWSGREEDRAEAVCRFCDTDFVGTDGENGGKFKDADALVATIAGLWPDGEAHRFVVCTGGEPMLQIDQPLVDALHAAGFEIAIETNGSLPVLESIDWICVSPKADAPLVVTKGNELKVVIPQDNQRLADYAKLDFEYFLVQPMDGPSRDLNTKLAIDWCKRHPQWRLSMQTHKYLNIP

SEQ ID NO: 28619 - protein, 210 aa, Burkholderia pyrrocinia
  misc_feature (1)..(210): tr|A0A318IK98|A0A318IK98_BURPY 7-carboxy-7-deazaguanine synthase OS=Burkholderia pyrrocinia OX=60550 GN=queE P E=3 SV=1
MTYAVKEIFYTLQGEGANAGRPAVFCRFAGCNLWSGREEDREEAVCRFCDTDFVGTDGENGGKFKDAEALVATIAGLWPDGEAHRFVVCTGGEPMLQLDQPLVDALHAAGFEIAIETNGSLPVLESIDWICVSPKADAPLVVTKGNELKVVIPQDNQRLADYAKLDFEYFLVQPMDGPSRDLNTKLAIDWCKRHPQWRLSMQTHKYLNIP

SEQ ID NO: 28620 - protein, 210 aa, Burkholderia reimsis; identical to SEQ ID NO: 28592
  misc_feature (1)..(210): tr|A0A365QSI6|A0A365QSI6_9BURK 7-carboxy-7-deazaguanine synthase OS=Burkholderia reimsis OX=2234132 GN=queE PE =3 SV=1

SEQ ID NO: 28621 - protein, 210 aa, Burkholderia seminalis
  misc_feature (1)..(210): tr|A0A103K2T9|A0A103K2T9_9BURK 7-carboxy-7-deazaguanine synthase OS=Burkholderia seminalis OX=488731 GN=queE P E=3 SV=1
MTYAVKEIFYTLQGEGANAGRPAVFCRFAGCNLWSGREEDRAEAVCRFCDTDFVGTDGENGGKFKDADALVATIAGLWPEGEAHRFVVCTGGEPMLQLDQPLVDALHAAGFEIAIETNGSLPVLESIDWICVSPKADAPLVVTKGNELKVVIPQDNQRLADYAKLDFEYFLVQPMDGPSRDLNTKLAIDWCKRHPQWRLSMQTHKYLNIP

SEQ ID NO: 28622 - protein, 210 aa, Burkholderia singularis
  misc_feature (1)..(210): tr|A0A118DNM1|A0A118DNM1_9BURK 7-carboxy-7-deazaguanine synthase OS=Burkholderia singularis OX=1503053 GN=queE PE=3 SV=1
MTYTVKEIFYTLQGEGANAGRPAVFCRFAGCNLWSGREADRASAVCRFCDTDFVGTDGENGGKFGDAETLAAKVASLWPADGAHRFVVCTGGEPMLQLDQPLVDALHAAGFEIAIETNGSLPVLDSIDWVCVSPKAGAPLVVTKGNELKVVVPQDNQRLADYAQLDFEHFLVQPMDGPARDFNTKLAIDWCKRHPQWRLSMQTHKYLNIP

SEQ ID NO: 28623 - protein, 210 aa, Burkholderia singularis
  misc_feature (1)..(210): tr|A0A238H1I0|A0A238H1I0_9BURK 7-carboxy-7-deazaguanine synthase OS=Burkholderia singularis OX=1503053 GN=queE PE=3 SV=1
MTYTVKEIFYTLQGEGANAGRPAVFCRFAGCNLWSGREADRASAVCRFCDTDFVGTDGENGGKFGDAETLAAKVASLWPTDGAHRFVVCTGGEPMLQLDQPLVDALHAAGFEIAIETNGSLPVLDSIDWVCVSPKAGAPLVVTKGNELKVVVPQDNQRLADYAQLDFEHFLVQPMDGPARDFNTKLAIDWCKRHPQWRLSMQTHKYLNIP

SEQ ID NO: 28624 - protein, 210 aa, Burkholderia sp.
  misc_feature (1)..(210): tr|A0A1N6KXK2|A0A1N6KXK2_9BURK 7-carboxy-7-deazaguanine synthase OS=Burkholderia sp. GAS332 OX=1882750 GN=queE PE=3 SV=1
MTYAVKEIFYTLQGEGANAGRPAVFCRFAGCNLWSGREEDRAEAVCRFCDTDFVGTDGENGGKYRTAEELVQMIASQWPEGEGERFVVCTGGEPMLQIDQPFVDALHAAGFEIAIETNGSLPVLETIDWICVSPKADAPLVVTKGNELKVVIPQDNQRLSEYAKLDFEYFLVQPMDGPSRDLNTKLAIDWCKRHPQWRLSMQTHKYLNIP

SEQ ID NO: 28625 - protein, 210 aa, Burkholderia sp.
  misc_feature (1)..(210): tr|A0A3N8IJE5|A0A3N8IJE5_9BURK 7-carboxy-7-deazaguanine synthase OS=Burkholderia sp. Bp8998 OX=2184557 GN=queE PE=3 SV=1
MTYAVKEIFYTLQGEGANAGRPAVFCRFAGCNLWSGREEDRADAVCRFCDTDFVGTDGENGGKFKDAEALVATIAGLWPDGEAHRFVVCTGGEPMLQLDQTLVDALHAAGFEIAIETNGSLPVLETIDWICVSPKADAPLVVTKGNELKVVIPQDNQRLADYAKLDFEYFLVQPMDGPSRDLNTKLAIDWCKRHPQWRLSMQTHKYLNIP

SEQ ID NO: 28626 - protein, 210 aa, Burkholderia stabilis
  misc_feature (1)..(210): tr|A0A1D7ZEQ6|A0A1D7ZEQ6_9BURK 7-carboxy-7-deazaguanine synthase OS=Burkholderia stabilis OX=95485 GN=queE PE= 3 SV=1
MTYAVKEIFYTLQGEGANAGRPAVFCRFAGCNLWSGREEDRAEAVCRFCDTDFVGTDGENGGKFKDAEALVATIAGLWPDGEAHRFVVCTGGEPMLQLDQPLVDALHAAGFEIAIETNGSLPVLESIDWICVSPKADAPLVVTKGNELKVVIPQDNQRLADYAKLDFEYFLVQPMDGPSRDLNTKLAIDWCKRHPQWRLSMQTHKYLNIP

SEQ ID NO: 28627 - protein, 210 aa, Burkholderia stabilis; identical to SEQ ID NO: 28592
  misc_feature (1)..(210): tr|A0A1Y1BGT9|A0A1Y1BGT9_9BURK 7-carboxy-7-deazaguanine synthase OS=Burkholderia stabilis OX=95485 GN=queE PE= 3 SV=1

SEQ ID NO: 28628 - protein, 210 aa, Burkholderia stagnalis
  misc_feature (1)..(210): tr|A0A3P0EXG7|A0A3P0EXG7_9BURK 7-carboxy-7-deazaguanine synthase OS=Burkholderia stagnalis OX=1503054 GN=queE PE=3 SV=1
MTYAVKEIFYTLQGEGANAGRPAVFCRFAGCNLWSGREEDRAEAVCRFCDTDFVGTDGENGGKFRDAAELAAKIASLWPDGEVHRFVVCTGGEPMLQLDQPLVDALHAQGFEIAIETNGSLPVLESIDWICVSPKADAPLVVTKGNELKVVIPQDNQRLADYAKLDFDYFLVQPMDGPSRDLNTKLAIDWCKRHPQWRLSMQTHKYLNIP

SEQ ID NO: 28629 - protein, 210 aa, Burkholderia stagnalis
  misc_feature (1)..(210): tr|A0A107TGI5|A0A107TGI5_9BURK 7-carboxy-7-deazaguanine synthase OS=Burkholderia stagnalis OX=1503054 GN=queE PE=3 SV=1
MTYAVKEIFYTLQGEGANAGRPAVFCRFAGCNLWSGREEDRAEAVCRFCDTDFVGTDGENGGKFRDAAELAAKIASLWPDGEAHRFVVCTGGEPMLQLDQPLVDALHAQGFEIAIETNGSLPVLESIDWICVSPKADAPLVVTKGNELKVVIPQDNQRLADYAKLDFDYFLVQPMDGPSRDLNTKLAIDWCKRHPQWRLSMQTHKYLNIP

SEQ ID NO: 28630 - protein, 210 aa, Burkholderia territorii
  misc_feature (1)..(210): tr|A0A105EFH4|A0A105EFH4_9BURK 7-carboxy-7-deazaguanine synthase OS=Burkholderia territorii OX=1503055 GN=queE PE=3 SV=1
MTYAVKEIFYTLQGEGANAGRPAVFCRFAGCNLWSGREEDRADAVCRFCDTDFVGTDGENGGKFKDAEALVATIAALWPDGEAHRFVVCTGGEPMLQLDQPLVDALHAAGFEIAIETNGSLPVLETIDWICVSPKADAPLVVTKGNELKVVIPQDNQRLADYAKLDFEYFLVQPMDGPSRDLNTKLAIDWCKRHPQWRLSMQTHKYLNIP

SEQ ID NO: 28631 - protein, 210 aa, Burkholderia thailandensis
  misc_feature (1)..(210): tr|Q2T2A3|Q2T2A3_BURTA 7-carboxy-7-deazaguanine synthas e OS=Burkholderia thailandensis (strain ATCC 700388 / D SM 13276 / CIP 106301 / E264) OX=271848 GN=queE PE=3 SV =1
MTYTVKEIFYTLQGEGANAGRPAVFCRFAGCNLWTGREADRGDAVCRFCDTDFVGTDGENGGKFKDAASLAAKIASLWPPGEAHRFVVCTGGEPMLQLDQPLVDALHAAGFTIAIETNGSLPVLESIDWICVSPKADAPLVVTKGNELKVVVPQDNQRLADYAKLDFEHFLVQPMDGPSRELNTKLAIDWCKRHPQWRLSMQTHKYLNIP

SEQ ID NO: 28632 - protein, 210 aa, Burkholderia thailandensis; identical to SEQ ID NO: 28631
  misc_feature (1)..(210): tr|A0A1B4JZN7|A0A1B4JZN7_BURTH 7-carboxy-7-deazaguanine synthase OS=Burkholderia thailandensis OX=57975 GN=que E PE=3 SV=1

SEQ ID NO: 28633 - protein, 210 aa, Burkholderia ubonensis
  misc_feature (1)..(210): tr|A0A124VGB5|A0A124VGB5_9BURK 7-carboxy-7-deazaguanine synthase OS=Burkholderia ubonensis OX=101571 GN=queE P E=3 SV=1
MTYAVKEIFYTLQGEGANAGRPAVFCRFAGCNLWSGREEDRAQALCRFCDTDFVGTDGENGGKFKDAAALAALVASLWPDGEAHRFVVCTGGEPMLQLDQPLVDALHAAGFEIAIETNGSLPVLESIDWICVSPKADAPLVVTKGNELKVVIPQDNQRLADYAKLDFDYFLVQPMDGPSRDLNTKLAIDWCKRHPQWRLSMQTHKYLNIP

SEQ ID NO: 28634 - protein, 210 aa, Burkholderia ubonensis
  misc_feature (1)..(210): tr|A0A104I624|A0A104I624_9BURK 7-carboxy-7-deazaguanine synthase OS=Burkholderia ubonensis OX=101571 GN=queE P E=3 SV=1
MTYAVKEIFYTLQGEGANAGRPAVFCRFAGCNLWSGREEDRAEAACRFCDTDFVGTDGENGGKFKDAAALAAQVASLWPDGEAHRFVVCTGGEPMLQLDQPLVDALHAAGFEIAIETNGSLPVLESIDWICVSPKADAPLVVTKGNELKVVIPQDNQRLADYAKLDFDYFLVQPMDGPSRDLNTKLAIDWCKRHPQWRLSMQTHKYLNIP

SEQ ID NO: 28635 - protein, 210 aa, Burkholderia vietnamiensis
  misc_feature (1)..(210): tr|A4JIU0|A4JIU0_BURVG 7-carboxy-7-deazaguanine synthas e OS=Burkholderia vietnamiensis (strain G4 / LMG 22486) OX=269482 GN=queE PE=3 SV=1
MTYAVKEIFYTLQGEGANAGRPAVFCRFAGCNLWSGREEDRADAVCRFCDTDFVGTDGENGGKFKDAAALVATIAGLWPHGEAHRFVVCTGGEPMLQIDQPLVDALHAAGFEIAIETNGSLPVLDTIDWICVSPKADAPLVVTKGNELKVVIPQDNQRLADYAKLDFEYFLVQPMDGPSRDINTKLAIDWCKRHPQWRLSMQTHKYLNIP

SEQ ID NO: 28636 - protein, 210 aa, Burkholderia vietnamiensis; identical to SEQ ID NO: 28635
  misc_feature (1)..(210): tr|A0A118GKM9|A0A118GKM9_BURVI 7-carboxy-7-deazaguanine synthase OS=Burkholderia vietnamiensis OX=60552 GN=que E PE=3 SV=1

SEQ ID NO: 28637 - protein, 212 aa, Burkholderiaceae bacterium
  misc_feature (1)..(212): tr|A0A0F0DEC9|A0A0F0DEC9_9BURK 7-carboxy-7-deazaguanine synthase OS=Burkholderiaceae bacterium 26 OX=1619951 G N=queE PE=3 SV=1
MTYAVKEIFYTLQGEGANTGRAAVFCRFAGCNLWSGREVDRATAVCQFCDTDFVGTDGTQGGKYTTADALADTVAAEWPANATGGKPLVICTGGEPLLQLDKPLIDALHARGFEIAIETNGTIAVPDGIDWVCVSPKMGSELVVTRGDELKVVIPQDGQDLDTYERLDFQHFFLQAMDGPLARQNTALAVELCQRRPRWRLSLQTHKMLGIR

SEQ ID NO: 28638 - protein, 215 aa, Burkholderiaceae bacterium
  misc_feature (1)..(215): tr|A0A4U8VGY7|A0A4U8VGY7_9BURK 7-carboxy-7-deazaguanine synthase OS=Burkholderiaceae bacterium PBA OX=795666 G N=queE PE=3 SV=1
MTYTVKEIFYTLQGEGANAGRAAVFCRFAGCNLWTGRERDRATAVCQFCDTDFVGTDGTLGGKYASAEALAAVVAAQWPAPLPDEAGGRPLVVCTGGEPLLQLDAPLIAALHAQGFEIAIETNGTLPVPEGVDWICVSPKMGAELVVTRGDELKVVIPQAGQDFAAYEALDFRHLLVQPMDGPLQRENTAAAVRFCQDHPRWRLSLQTHKLLGIR

SEQ ID NO: 28639 - protein, 220 aa, Burkholderiales bacterium
  misc_feature (1)..(220): tr|A0A1F4MS88|A0A1F4MS88_9BURK 7-carboxy-7-deazaguanine synthase OS=Burkholderiales bacterium RIFCSPLOWO2_12_F ULL_64_99 OX=1797568 GN=queE PE=3 SV=1
MTYSVKEIFYTLQGEGTHAGRPAVFCRMAGCNLWTGREADRASAVCQFCDTDFVGTDGLGGGKFDTAQALAARIASFWPDTPAGQQGQRFVVVTGGEPLLQLDAALIDALHAQGFEIAVETNGTIAAPEGLDWVCVSPKAGSKLVQTRGHELKVVVPQAGFTEADLLAFEQLDFQQLRVQAMDSAQPEARRQAMAWAVQWCLDHPRWLLSVQTHKSLGIR

SEQ ID NO: 28640 - protein, 211 aa, Burkholderiales bacterium
  misc_feature (1)..(211): tr|A0A1F4K2K2|A0A1F4K2K2_9BURK 7-carboxy-7-deazaguanine synthase OS=Burkholderiales bacterium RIFCSPLOWO2_12_F ULL_61_40 OX=1797566 GN=queE PE=3 SV=1
MMYSVKEIFYTLQGEGAHAGRPAVFCRFSGCNLWSGREADRASAVCRFCDTDFVGTDGTGGGKFADSEALAQAIDQQWPQHDTAHKYVVFTGGEPLLQLDAALIDNIHAHGFTIAIETNGTLAVPAGVDWVCVSPKLGSALVVERGNEIKVVIPQAGQNLADYAALDFSHFFVQAMDGPELAANLRLAIDTCKRNPQWRLSLQTHKLLQIP

SEQ ID NO: 28641 - protein, 223 aa, Buttiauxella agrestis
  misc_feature (1)..(223): tr|A0A085G431|A0A085G431_9ENTR 7-carboxy-7-deazaguanine synthase OS=Buttiauxella agrestis ATCC 33320 OX=100600 4 GN=ygcF PE=3 SV=1
MQYPINEMFQTLQGEGYFTGVPAIFIRLQGCPVGCAWCDTKHTWDKLADREVSLFSILAKTKETDKWGSATAEDLLAIFQRQDYTARHVVITGGEPCIHDLTPLTSLFEHHGYSCQIETSGTHEVRCTAGTWVTVSPKVNMRGGYDVLSQALERADEIKHPVGRMRDIEALDELLATLVDDKKRVIALQPISQKEDATRLCIETCIARNWRLSMQTHKYLNIA

SEQ ID NO: 28642 - protein, 223 aa, Buttiauxella agrestis
  misc_feature (1)..(223): tr|A0A381C3P3|A0A381C3P3_9ENTR 7-carboxy-7-deazaguanine synthase OS=Buttiauxella agrestis OX=82977 GN=queE PE= 3 SV=1
MQYPINEMFQTLQGEGYFTGVPAIFIRLQGCPVGCAWCDTKHTWDKLADREVSLFSILAKTKESDKWGSATAEDLLAIFQRQDYTARHVVITGGEPCIHDLTPLTSLFEHHGYSCQIETSGTHEVRCTAGTWVTVSPKVNMRGGYDVLSQALERADEIKHPVGRMRDIEALDELLATLVDDKKRVIALQPISQKEDATRLCIETCIARNWRLSMQTHKYLNIA

SEQ ID NO: 28643 - protein, 223 aa, Buttiauxella brennerae
  misc_feature (1)..(223): tr|A0A1B7ILK8|A0A1B7ILK8_9ENTR 7-carboxy-7-deazaguanine synthase OS=Buttiauxella brennerae ATCC 51605 OX=13542 51 GN=queE PE=3 SV=1
MQYPINEMFQTLQGEGYFTGVPAIFIRLQGCPVGCAWCDTKHTWDKLADREVSLFSILAKTKESDKWGSASAEDLLAIFQRQDYTARHVVITGGEPCIHDLTPLTSLFEHHGYSCQIETSGTHEVRCTAGTWVTVSPKVNMRGGYDVLSQALERADEIKHPVGRMRDIEALDELLATLMDDKKRIIALQPISQKEDATRLCIETCIGRNWRLSMQTHKYLNIA

SEQ ID NO: 28644 - protein, 223 aa, Buttiauxella gaviniae
  misc_feature (1)..(223): tr|A0A1B7I376|A0A1B7I376_9ENTR 7-carboxy-7-deazaguanine synthase OS=Buttiauxella gaviniae ATCC 51604 OX=135425 3 GN=queE PE=3 SV=1
MQYPINEMFQTLQGEGYFTGVPAIFIRLQGCPVGCAWCDTKHTWDKLADREVSLFSILAKTKESDKWGNASAEDLLAIFQRQDYTARHVVITGGEPCIHDLTPLTSLFEHHGYSCQIETSGTHEVRCTAGTWVTVSPKVNMRGGYDVLSQALERADEIKHPVGRMRDIEALDELLATLIDDKKRIIALQPISQKEDATRLCIETCIARNWRLSMQTHKYLNIA

SEQ ID NO: 28645 - protein, 223 aa, Buttiauxella izardii
  misc_feature (1)..(223): tr|A0A3A5JZB9|A0A3A5JZB9_9ENTR 7-carboxy-7-deazaguanine synthase OS=Buttiauxella izardii OX=82991 GN=queE PE=3 SV=1
MQYPINEMFQTLQGEGYFTGVPAIFIRLQGCPVGCAWCDTKHTWDKLADREVSLFSILAKTKETDKWGSASAEDLLAIFQRQDYTARHVVITGGEPCIHDLTPLTSLFEHHGYSCQIETSGTHEVRCTADTWVTVSPKVNMRGGYDVLSQALERADEIKHPVGRMRDIEALDELLATLVDDKKRVIALQPISQKEDATRLCIETCIARNWRFSMQTHKYLNIA

SEQ ID NO: 28646 - protein, 223 aa, Buttiauxella noackiae
  misc_feature (1)..(223): tr|A0A1B7HLX0|A0A1B7HLX0_9ENTR 7-carboxy-7-deazaguanine synthase OS=Buttiauxella noackiae ATCC 51607 OX=135425 5 GN=queE PE=3 SV=1
MQYPINEMFQTLQGEGYFTGVPAIFIRLQGCPVGCAWCDTKHTWDKLADREVSLFSILAKTKESDKWGNASAEDLLAIFQRQDYTARHVVITGGEPCIHDLTPLTSLFEHHGYSCQIETSGTHEVRCTAGTWVTVSPKVNMRGGYDVLSQALERADEIKHPVGRMRDVEALDELLATLVDDKKRIIALQPISQKEDATRLCIETCIARNWRLSMQTHKYLNIA

SEQ ID NO: 28647 - protein, 223 aa, Buttiauxella sp.; identical to SEQ ID NO: 28644
  misc_feature (1)..(223): tr|A0A4R8EYR6|A0A4R8EYR6_9ENTR 7-carboxy-7-deazaguanine synthase OS=Buttiauxella sp. BIGb0552 OX=2485120 GN=qu eE PE=3 SV=1

SEQ ID NO: 28648 - protein, 223 aa, Buttiauxella sp.
  misc_feature (1)..(223): tr|A0A4V0WTM7|A0A4V0WTM7_9ENTR 7-carboxy-7-deazaguanine synthase OS=Buttiauxella sp. A111 OX=2563088 GN=queE P E=3 SV=1
MQYPINEMFQTLQGEGYFTGVPAIFIRLQGCPVGCAWCDTKHTWDKLADREVSLFSILAKTKESDKWGNASAEDLLAIFQRQDYTARHVVITGGEPCIHDLTPLTALFEHHGYSCQIETSGTHEVRCTAGTWVTVSPKVNMRGGYDVLSQALERADEIKHPVGRLRDIEALDELLATLVDDKKRVIALQPISQKEDATRLCIETCIARNWRLSMQTHKYLNIA

SEQ ID NO: 28649 - protein, 223 aa, Buttiauxella warmboldiae; identical to SEQ ID NO: 28642
  misc_feature (1)..(223): tr|A0A3N5DQ11|A0A3N5DQ11_9ENTR 7-carboxy-7-deazaguanine synthase OS=Buttiauxella warmboldiae OX=82993 GN=queE PE=3 SV=1

SEQ ID NO: 28650 - protein, 222 aa, Butyricicoccus porcorum
  misc_feature (1)..(222): tr|A0A252F6Z2|A0A252F6Z2_9CLOT 7-carboxy-7-deazaguanine synthase OS=Butyricicoccus porcorum OX=1945634 GN=queE PE=3 SV=1
MAEFNVAETFVSINGEGVLAGQLSVFVRFTGCNLRCSFCDTMWANDADAPHTTMTTEEICEAVRKTGVHNVTLTGGEPLLRAGMAELLHRLTENPAQRVEIETNGSIDLTPFTGISSAISFTMDYKLPGSGMESHMRTENFALLTERDTVKFVAGSRADLERALEIIQTYDLTHRCHVYLSPVFGRIQPVEIVEFMQEHVLNDITMQLQMHKIIWDPDQRGV

SEQ ID NO: 28651 - protein, 271 aa, Butyricimonas faecalis
  misc_feature (1)..(271): tr|A0A3S9VQB1|A0A3S9VQB1_9BACT 7-carboxy-7-deazaguanine synthase OS=Butyricimonas faecalis OX=2093856 GN=queE PE=3 SV=1
MLHLAKDGIFPITKDKDGKLLKELPASGLHVPGTIQGEGKLNGIPSLFIRLAGCNLHCTWKTLAGNTCECDTAYAAFKVENSFSLPIREIIQIIGHNRGNIDHLVITGGEPFLQADKVKELCLQLKKEAHFHITVETNATLYVEECAQTIDFFSLSPKLSGSVPPTPYAEHHNNTRINIPAIQSFITHVRKNKKEFQLKFVYSGENDVSEIQALLRQLDGWANEDILLMPMGATPEELNLSIPKTLEHCIRNGWRFCDRLHISLFGNKQGV

SEQ ID NO: 28652 - protein, 271 aa, Butyricimonas sp.
  misc_feature (1)..(271): tr|A0A1Y3W4Z0|A0A1Y3W4Z0_9BACT 7-carboxy-7-deazaguanine synthase OS=Butyricimonas sp. An62 OX=1965649 GN=queE PE=3 SV=1
MLHLAKDGIFPIMKDKDGKLLKELPASGLHVAGTIQGEGKLNGIPSLFIRLAGCNLHCTWKTLAGNTCECDTAYAAFKVENSFSLPVEEIVRIIGHNRGNIDHIVITGGEPFLQADKVRALCLQLKKESHFHITVETNATLYVEECAEMIDFFSLSPKLSGSVPPAPHADHHDKTRINIPAIQSFITHARKNKKDFQLKFVYSGENDVIEIQALLKQLDGWAKEDILLMPMGASPEELSLSIPKTLEHCIRNGWRFCDRLHISLFGNKQGV

SEQ ID NO: 28653 - protein, 271 aa, Butyricimonas sp.
  misc_feature (1)..(271): tr|A0A3D2E087|A0A3D2E087_9BACT 7-carboxy-7-deazaguanine synthase OS=Butyricimonas sp. OX=1969738 GN=queE PE=3 SV=1
MLHLAKDGIFPITKDKDGKLLKELPASGLHVPGTIQGEGKLNGIPSLFIRLAGCNLHCTWKTLAGNTCECDTAYAAFKVENSFSLPIREIVQIIDHNRGNIDHIVITGGEPFLQADKVRELCMQLKKEPHFHMTVETNATIYVEECAGMIDFFSLSPKLSGSVPPAPYADHHNNTRINIPAIQSFITHARENKKDFQLKFVYSGENDVIEIQALLRQLDGWTNEDILLMPMGATPEELNLSIPKTLEHCIRNGWRFCDRLHISLFGNKQGV

SEQ ID NO: 28654 - protein, 271 aa, Butyricimonas synergistica
  misc_feature (1)..(271): tr|A0A1U7LAY4|A0A1U7LAY4_9BACT 7-carboxy-7-deazaguanine synthase OS=Butyricimonas synergistica OX=544644 GN=qu eE PE=3 SV=1
MLHLAKDGIFPITKDKDGKLLKELPASGLHVAGTIQGEGKLNGVPSLFIRLAGCNLHCTWKTLAGNTCECDTAYAAFKVENSFSLPVEEIVRIIGHNRGNIDHIVITGGEPFLQADKVRALCLQLKKESHFHITVETNATLYVEECAEMIDFFSLSPKLSGSVPPAPHMDHHNKTRINIPAIQSFITYARKNKKDFQLKFVYSGENEIIEIQALLKQLDGWGNEDILLMPMGATPEELSLSIPKTLEHCLRNGWRFCDRLHISLFGNKQGV

SEQ ID NO: 28655 - protein, 271 aa, Butyricimonas virosa
  misc_feature (1)..(271): tr|A0A413IML6|A0A413IML6_9BACT 7-carboxy-7-deazaguanine synthase OS=Butyricimonas virosa OX=544645 GN=queE PE= 3 SV=1
MLHLAKDGIFPITKDKDGKLLKELPASGLHVAGTIQGEGKLNGIPSLFIRLAGCNLHCTWKTLAGNTCECDTAYAAFKVENSFSLPIKEIVQIIGHNRGNIDHIVITGGEPFLQADKVRELCMQLKKEAHFHMTVETNATIYVEECAGMIDFFSLSPKLSGSVPPAPHADHHNNTRINIPAIQSFITHARENKKDFQLKFVYSGENDVIEIQALLRQLDGWTNEDILLMPMGATPEELNLSIPKTLEHCIRNGWRFCDRLHISLFGNKQGV

SEQ ID NO: 28656 - protein, 271 aa, Butyricimonas virosa; identical to SEQ ID NO: 28653
  misc_feature (1)..(271): tr|A0A415QRM1|A0A415QRM1_9BACT 7-carboxy-7-deazaguanine synthase OS=Butyricimonas virosa OX=544645 GN=queE PE= 3 SV=1

SEQ ID NO: 28657 - protein, 222 aa, Butyrivibrio crossotus
  misc_feature (1)..(222): tr|R5LZU2|R5LZU2_9FIRM 7-carboxy-7-deazaguanine synthas e OS=Butyrivibrio crossotus CAG:259 OX=1263062 GN=queE PE=3 SV=1
MAEYKVVETFVSINGEGRKAGELAFFLRLKGCNLDCSYCDTKWANKGDASFEIMDENEIYGLIKKSGIRNVTITGGEPLFRKDMAILLEILDNDKELSVEIETNGSVDLKPYLPVCKNISFTMDYKLPTSRMEEQMCLGNFEILRNIDTVKFVSGSIKDLEKAEKIIQKYDLCKRTKVYISPVFGNIDPADIVEFMKERKMNKVRLQLQLHKFIWDPDKKGV

SEQ ID NO: 28658 - protein, 222 aa, Butyrivibrio crossotus
  misc_feature (1)..(222): tr|D4RWH5|D4RWH5_9FIRM 7-carboxy-7-deazaguanine synthas e OS=Butyrivibrio crossotus DSM 2876 OX=511680 GN=queE PE=3 SV=1
MAEYKVVETFVSINGEGRKAGELAFFLRLKGCNLDCSYCDTKWANKGDASFEIMDENEIYGLIKKSGIRNVTITGGEPLFRKDMAILLELLDNDRELSVEIETNGSVDLKPYLPVCKNISFTMDYKLPTSRMEEQMCLGNFEILRNIDTVKFVSGSIKDLEKAEEIIQKYDLCKRTKVYISPVFGNIDPADIVEFMKERKMNKVRLQLQLHKFIWDPDKKGV

SEQ ID NO: 28659 - protein, 222 aa, Butyrivibrio fibrisolvens
  misc_feature (1)..(222): tr|D4IW46|D4IW46_BUTFI 7-carboxy-7-deazaguanine synthas e OS=Butyrivibrio fibrisolvens 16/4 OX=657324 GN=queE P E=3 SV=1
MSVYYVVEKFVSINGEGQHAGELAVFIRLRGCNLACSYCDTRWACSYEAPAEQMTEVEILDYVKSTGVNRVTLTGGEPLKARDIKDLLRAFAAEPNIKVEIETNGSVNIVPFAAIPNAPAFTLDYKLAGSGMEDEMDLSNFAFLQPKDSVKFVCSDVSELDKVCELVDTYGLAEKCTVLISPVFGRIDPADMVNYLIEHKRNDIRLQLQLHKFIWDPNKRGV

SEQ ID NO: 28660 - protein, 222 aa, Butyrivibrio sp.
  misc_feature (1)..(222): tr|A0A350RPY2|A0A350RPY2_9FIRM 7-carboxy-7-deazaguanine synthase OS=Butyrivibrio sp. OX=28121 GN=queE PE=3 SV= 1
MAEYKVVETFVSINGEGRKAGELAFFLRLKGCNLDCSYCDTKWANKGDASFEIMDENEIYGLIKKSGIRNVTITGGEPLFRKDMAILLEILDNDKELSVEIETNGSVDLKPYLPVCKNISFTMDYKLPTSRMEEQMCLGNFEILRNIDTVKFVSGSIKDLEKAEEIIQKYDLCKRTKVYISPVFGNIDPADIVEFMKERKMNKVRLQLQLHKFIWDPDKKGV

SEQ ID NO: 28661 - protein, 222 aa, Butyrivibrio sp.; identical to SEQ ID NO: 28658
  misc_feature (1)..(222): tr|A0A3C0J6T2|A0A3C0J6T2_9FIRM 7-carboxy-7-deazaguanine synthase OS=Butyrivibrio sp. OX=28121 GN=queE PE=3 SV= 1

SEQ ID NO: 28662 - protein, 228 aa, Bythopirellula goksoyri
  misc_feature (1)..(228): tr|A0A5B9QG48|A0A5B9QG48_9PLAN 7-carboxy-7-deazaguanine synthase OS=Bythopirellula goksoyri OX=1400387 GN=queE PE=3 SV=1
MKVAEIYKSVQGEGLLTGTPSVFVRASGCNLRCWFCDTPFTSWQPEGTDYAVDEIVAEIEEWDCQHVVLTGGEPMLFAELIPLAESLRASGRHITVETAGTLFLPVECDLMSISPKLSSSGPDAEQFPHWHRRHERQRFQPEVIAQLLEQHDYQLKFVIDHAGEIEEVEEFLSHFSGIQGDRVLLMPQGTTLEELQPRSAWLEPICIEHGWTFCPRKQIEWFGPVRGT

SEQ ID NO: 28663 - protein, 210 aa, Caballeronia arationis
  misc_feature (1)..(210): tr|A0A158CEL1|A0A158CEL1_9BURK 7-carboxy-7-deazaguanine synthase OS=Caballeronia arationis OX=1777142 GN=queE PE=3 SV=1
MTYAVKEIFYTLQGEGANAGRPAVFCRFAGCNLWSGREEDRADAVCQFCDTDFVGTDGENGGKYRTPADLVAVIASLWPEGEAHRFVVCTGGEPMLQIDQPIVDALHEAGFEIAIETNGSLPVLDTIDWICVSPKADAPLVVTKGNELKVVVPQDNQRLADYAKLDFEYFLVQPMDGPSRNINTKLAIDWCKRHPKWRLSMQTHKYLNIP

SEQ ID NO: 28664 - protein, 210 aa, Caballeronia arvi
  misc_feature (1)..(210): tr|A0A158HFE1|A0A158HFE1_9BURK 7-carboxy-7-deazaguanine synthase OS=Caballeronia arvi OX=1777135 GN=queE PE=3 SV=1
MTYAVKEIFYTLQGEGANAGRPAVFCRFAGCNLWSGREEDRADAVCQFCDTDFVGTDGENGGKYKTPAELVAKIASLWPEGAAHRFVVCTGGEPMLQIDQPFVDALHEAGFEMAIETNGSLPVLESIDWICVSPKADAPLVVTKGNELKVVVPQDNQRLAEYEKLDFDYFLVQPMDGPSRDINTKLAIDWCKRHPKWRLSMQTHKYLNIP

SEQ ID NO: 28665 - protein, 210 aa, Caballeronia calidae
  misc_feature (1)..(210): tr|A0A157Z756|A0A157Z756_9BURK 7-carboxy-7-deazaguanine synthase OS=Caballeronia calidae OX=1777139 GN=queE PE =3 SV=1
MTYAVKEIFYTLQGEGANAGRPAVFCRFAGCNLWSGREEDRADAVCQFCDTDFVGTDGENGGKYKTPAELVAKIAALWPEGAAHRFVVCTGGEPMLQIDQPFVDALHEAGFEMAIETNGSLPVLDSIDWICVSPKADAPLVVMKGNELKVVVPQDNQRLAEYEKLDFDYFLVQPMDGPSRDINTKLAIDWCKRHPKWRLSMQTHKYLNIP

SEQ ID NO: 28666 - protein, 210 aa, Caballeronia catudaia
  misc_feature (1)..(210): tr|A0A157Z668|A0A157Z668_9BURK 7-carboxy-7-deazaguanine synthase OS=Caballeronia catudaia OX=1777136 GN=queE P E=3 SV=1
MTYAVKEIFYTLQGEGANAGRPAVFCRFAGCNLWSGREEDRADAVCQFCDTDFVGTDGENGGKYKTPAELVAMIASLWPEGAAHRFVVCTGGEPMLQIDQPFVDALHEAGFEMAIETNGSLPVLESIDWICVSPKADAPLVVTKGNELKVVVPQDNQRLAEYEKLDFDYFLVQPMDGPSRDINTKLAIDWCKRHPKWRLSMQTHKYLNIP

SEQ ID NO: 28667 - protein, 210 aa, Caballeronia choica
  misc_feature (1)..(210): tr|A0A158FGT8|A0A158FGT8_9BURK 7-carboxy-7-deazaguanine synthase OS=Caballeronia choica OX=326476 GN=queE PE=3 SV=1
MTYAVKEIFYTLQGEGANAGRPAVFCRFAGCNLWSGREEDRAEAVCQFCDTDFVGTDGENGGKYRTPADLVAMIASLWPEGEAHKFVVCTGGEPMLQIDQPFVDALHDAGFEMAIETNGSLPVLDTIDWICVSPKADAPLVVTKGNELKVVVPQDNQRLADYAKLDFDYFLVQPMDGPSRDINTKLAIDWCKRHPKWRLSMQTHKYLNIP

SEQ ID NO: 28668 - protein, 210 aa, Caballeronia cordobensis
  misc_feature (1)..(210): tr|A0A158F1N2|A0A158F1N2_9BURK 7-carboxy-7-deazaguanine synthase OS=Caballeronia cordobensis OX=1353886 GN=que E PE=3 SV=1
MTYAVKEIFYTLQGEGANAGRPAVFCRFAGCNLWSGREEDRADAVCQFCDTDFVGTDGENGGKYKTPAELVAKIASLWPEGAAHKFVVCTGGEPMLQIDQPFVDALHEAGFEMAIETNGSLPVLESIDWICVSPKADAPLVVTKGNELKVVVPQDNQRLAEYEKLDFEYFLVQPMDGPSRDINTKLAIDWCKRHPKWRLSMQTHKYLNIP

SEQ ID NO: 28669 - protein, 210 aa, Caballeronia fortuita
  misc_feature (1)..(210): tr|A0A157Z6L8|A0A157Z6L8_9BURK 7-carboxy-7-deazaguanine synthase OS=Caballeronia fortuita OX=1777138 GN=queE P E=3 SV=1
MTYAVKEIFYTLQGEGANAGRPAVFCRFAGCNLWSGREEDRADAVCQFCDTDFVGTDGENGGKYRTPAELVAKIASLWPQGEAHKFVVCTGGEPMLQIDQPFVDALHEVGFEMAIETNGSLPVLESIDWICVSPKADAPLVVTKGNELKVVVPQDNQRLAEYEKLDFDYFLVQPMDNASRDINTKLAIDWCKRHPKWRLSMQTHKYLNIP

SEQ ID NO: 28670 - protein, 210 aa, Caballeronia glathei
  misc_feature (1)..(210): tr|A0A069PIZ0|A0A069PIZ0_9BURK 7-carboxy-7-deazaguanine synthase OS=Caballeronia glathei OX=60547 GN=queE PE=3 SV=1
MTYAVKEIFYTLQGEGANAGRPAVFCRFAGCNLWSGREEDRAEAVCRFCDTDFVGTDGENGGKYRTPADLVAMIASLWPEGEAHRFVVCTGGEPMLQIDQPFVDALHEAGFEIAIETNGSLPVLDTIDWICVSPKADAPLVVTKGNELKVIVPQENQRLADYAKLDFDYFLVQPMDGASRDINTRLAIDWCKRHPQWRLSMQTHKYLNIP

SEQ ID NO: 28671 - protein, 210 aa, Caballeronia glebae
  misc_feature (1)..(210): tr|A0A157ZQK6|A0A157ZQK6_9BURK 7-carboxy-7-deazaguanine synthase OS=Caballeronia glebae OX=1777143 GN=queE PE= 3 SV=1
MTYAVKEIFYTLQGEGANAGRPAVFCRFAGCNLWSGREEDRADAVCQFCDTDFVGTDGENGGKYKTPADLVAKIASLWPEGAAHKFVVCTGGEPMLQIDQPFVDALHEAGFEMAIETNGSLPVLDSIDWICVSPKADAPLVVTKGNELKVVVPQDNQRLADYEKLDFDYFLVQPMDGPSRDINTKLAIDWCKRHPKWRLSMQTHKYLNIP

SEQ ID NO: 28672 - protein, 210 aa, Caballeronia humi
  misc_feature (1)..(210): tr|A0A158GEE4|A0A158GEE4_9BURK 7-carboxy-7-deazaguanine synthase OS=Caballeronia humi OX=326474 GN=queE PE=3 S V=1
MTYAVKEIFYTLQGEGANAGRPAVFCRFAGCNLWSGREEDRADAVCQFCDTDFVGTDGENGGKYRTPADLVAMIASLWPEGEAHRFVVCTGGEPMLQIDQPFVDALHEAGFEIAIETNGSLPVLETIDWICVSPKADAPLVVTKGNELKVVVPQDNQRLADYAQLDFEYFLVQPMDGPSRDINTKLAIDWCKRHPKWRLSMQTHKYLNIP

SEQ ID NO: 28673 - protein, 210 aa, Caballeronia hypogeia
  misc_feature (1)..(210): tr|A0A157Z7G6|A0A157Z7G6_9BURK 7-carboxy-7-deazaguanine synthase OS=Caballeronia hypogeia OX=1777140 GN=queE P E=3 SV=1
MTYAVKEIFYTLQGEGANAGRPAVFCRFAGCNLWSGREEDRADAVCQFCDTDFVGTDGENGGKYKTPAELVAKIASLWPEGAAHKFVVCTGGEPMLQIDQPFVDALHEAGFEMAIETNGSLPVLESIDWICVSPKADAPLVVTKGNELKVVVPQDNQRLADYEKLDFQYFLVQPMDGPSRDINTKLAIDWCKRHPKWRLSMQTHKYLNIP

SEQ ID NO: 28674 - protein, 210 aa, Caballeronia jiangsuensis
  misc_feature (1)..(210): tr|A0A038GP18|A0A038GP18_9BURK 7-carboxy-7-deazaguanine synthase OS=Caballeronia jiangsuensis OX=1458357 GN=qu eE PE=3 SV=1
MTYAVKEIFYTLQGEGANAGRPAVFCRFAGCNLWSGREEDRADAVCQFCDTDFVGTDGENGGKYKTPAELVAKIASLWPEGAAHRFVVCTGGEPMLQIDQPFVDALHEAGFEMAIETNGSLPVLESIDWICVSPKADAPLVVTKGNELKVVVPQDNQRLADYEKLDFEYFLVQPMDGPSRDINTKLAIDWCKRHPKWRLSMQTHKYLNIP

SEQ ID NO: 28675 - protein, 210 aa, Caballeronia megalochromosomata
  misc_feature (1)..(210): tr|A0A149RNK9|A0A149RNK9_9BURK 7-carboxy-7-deazaguanine synthase OS=Caballeronia megalochromosomata OX=1399969 GN=queE PE=3 SV=1
MTYAVKEIFYTLQGEGANAGRPAVFCRFAGCNLWSGREEDRADAVCQFCDTDFVGTDGENGGKYRTPAELVAKIASLWPEGAAHKFVVCTGGEPMLQIDQPFVDALHEAGFEMAIETNGSLPVLESIDWICVSPKADAPLVVTKGNELKVVVPQDNQRLADYEKLDFEYFLVQPMDGPSRDINTKLAIDWCKRHPKWRLSMQTHKYLNIP

SEQ ID NO: 28676 - protein, 210 aa, Caballeronia mineralivorans
  misc_feature (1)..(210): tr|A0A0J1FT76|A0A0J1FT76_9BURK 7-carboxy-7-deazaguanine synthase OS=Caballeronia mineralivorans PML1(12) OX=90 8627 GN=queE PE=3 SV=1
MTYAVKEIFYTLQGEGANAGRPAVFCRFAGCNLWSGREEDRADAVCQFCDTDFVGTDGENGGKYRTPAELVAMIASQWPEGEAHKFVVCTGGEPMLQIDQPFVDALHAAGFEMAIETNGSLPVLDSIDWICVSPKAGAPLVVTKGNELKVVVPQDNQPLADYAKLDFQYFLVQPMDGPSRDINTKLAIDWCKRHPQWRLSMQTHKYLNIP

SEQ ID NO: 28677 - protein, 210 aa, Caballeronia pedi
  misc_feature (1)..(210): tr|A0A158A294|A0A158A294_9BURK 7-carboxy-7-deazaguanine synthase OS=Caballeronia pedi OX=1777141 GN=queE PE=3 SV=1
MTYAVKEIFYTLQGEGANAGRPAVFCRFAGCNLWSGREEDRADAVCQFCDTDFVGTDGENGGKYRTPAELVAKIASLWPEGAGHRFVVCTGGEPMLQIDQPFVDALHDAGFEMAIETNGSLPVLESIDWICVSPKADAPLVVTKGNELKVVVPQDNQRLAEYEKLDFEYFLVQPMDGPSRDINTKLAIDWCKRHPKWRLSMQTHKYLNIP

SEQ ID NO: 28678 - protein, 210 aa, Caballeronia peredens
  misc_feature (1)..(210): tr|A0A158FZX7|A0A158FZX7_9BURK 7-carboxy-7-deazaguanine synthase OS=Caballeronia peredens OX=1777132 GN=queE P E=3 SV=1
MTYAVKEIFYTLQGEGANAGRPAVFCRFAGCNLWSGREEDRADAVCQFCDTDFVGTDGENGGKFKTPAELVAKIASLWPEGAGHKFVVCTGGEPMLQIDQPFVDALHEAGFEMAIETNGSLPVLESIDWICVSPKADAPLVVTKGNELKVVVPQDNQRLAEYEKLDFDYFLVQPMDGPSRDLNTKLAIDWCKRHPKWRLSMQTHKYLNIP

SEQ ID NO: 28679 - protein, 210 aa, Caballeronia ptereochthonis
  misc_feature (1)..(210): tr|A0A158CVZ6|A0A158CVZ6_9BURK 7-carboxy-7-deazaguanine synthase OS=Caballeronia ptereochthonis OX=1777144 GN= queE PE=3 SV=1
MTYAVKEIFYTLQGEGANAGRPAVFCRFAGCNLWSGREEDRADAVCQFCDTDFVGTDGENGGKYRTPAELVAKIASLWPEGAAHRFVVCTGGEPMLQIDQPFVDALHEAGFEMAIETNGSLPVLESIDWICVSPKADAQLVVTKGNELKVVVPQDNQRLAEYEKLDFDYFLVQPMDGPSRDINTKLAIDWCKRHPKWRLSMQTHKYLNIP

SEQ ID NO: 28680 - protein, 210 aa, Caballeronia sordidicola
  misc_feature (1)..(210): tr|A0A242MJL7|A0A242MJL7_9BURK 7-carboxy-7-deazaguanine synthase OS=Caballeronia sordidicola OX=196367 GN=queE PE=3 SV=1
MTYAVKEIFYTLQGEGANAGRPAVFCRFAGCNLWSGREEDRAEAVCQFCDTDFVGTDGENGGKYKTPADLVAMIASQWPEGEAHKFVVCTGGEPMLQIDEPFVDALHAAGFEMAIETNGSMPVLDTIDWICVSPKAGAPLVVTKGNELKVVVPQDNQPLADYAKLDFEYFLVQPMDGPSRDINTKLAIDWCKRHPQWRLSMQTHKYLNIP

SEQ ID NO: 28681 - protein, 210 aa, Caballeronia sordidicola
  misc_feature (1)..(210): tr|A0A226WJR0|A0A226WJR0_9BURK 7-carboxy-7-deazaguanine synthase OS=Caballeronia sordidicola OX=196367 GN=queE PE=3 SV=1
MTYAVKEIFYTLQGEGANAGRPAVFCRFAGCNLWSGREEDRADAVCQFCDTDFVGTDGENGGKYRTPADLVAMIASQWPEGEAHKFVVCTGGEPMLQIDPPFVDALHAAGFEMAIETNGSLPVLDSIDWICVSPKAGAPLVVTRGNELKVVVPQDNQPLADYAKLDFEYFLVQPMDGPSRDINTKLAIDWCKRHPQWRLSMQTHKYLNIP

SEQ ID NO: 28682 - protein, 210 aa, Caballeronia telluris
  misc_feature (1)..(210): tr|A0A158J9J1|A0A158J9J1_9BURK 7-carboxy-7-deazaguanine synthase OS=Caballeronia telluris OX=326475 GN=queE PE =3 SV=1
MTYAVKEIFYTLQGEGANAGRPAVFCRFAGCNLWSGREEDRADAVCQFCDTDFVGTDGENGGKYRTPADLVAMIASLWPEGEAHKFVVCTGGEPMLQIDQPFVDALHEAGFEIAIETNGSLPVLDTIDWICVSPKADAPLVVTKGNELKVVVPQDNQRLADYAKLDFEYFLVQPMDGPSRDINTKLAIDWCKRHPKWRLSMQTHKYLNIP

SEQ ID NO: 28683 - protein, 210 aa, Caballeronia temeraria
  misc_feature (1)..(210): tr|A0A157ZIA6|A0A157ZIA6_9BURK 7-carboxy-7-deazaguanine synthase OS=Caballeronia temeraria OX=1777137 GN=queE PE=3 SV=1
MTYSVKEIFYTLQGEGANAGRPAVFCRFAGCNLWSGREEDRADAVCQFCDTDFVGTDGENGGKYKTPSELVAKIASLWPEGEAHKFVVCTGGEPMLQIDQPFVDALHEAGFEMAIETNGSLPVLESIDWICVSPKADAPLVVTKGNELKVVVPQDNQRLAEYEKLDFDYFLVQPMDNASRDINTKLAIDWCKRHPKWRLSMQTHKYLNIP

SEQ ID NO: 28684 - protein, 210 aa, Caballeronia terrestris
  misc_feature (1)..(210): tr|A0A158JFR0|A0A158JFR0_9BURK 7-carboxy-7-deazaguanine synthase OS=Caballeronia terrestris OX=1226301 GN=queE PE=3 SV=1
MTYAVKEIFYTLQGEGANAGRPAVFCRFAGCNLWSGREDDRADAVCQFCDTDFVGIDGENGGKFRTPADLVAMIASLWPEGEAHKFVVCTGGEPMLQIDQPFVDALHEAGFEIAIETNGSLPVLETIDWICVSPKADAPLVVTKGNELKVVVPQDNQRLADYAQLDFEYFLVQPMDGPSRDINTKLAIDWCKRHPKWRLSMQTHKYLNIP

SEQ ID NO: 28685 - protein, 210 aa, Caballeronia turbans
  misc_feature (1)..(210): tr|A0A158FHL8|A0A158FHL8_9BURK 7-carboxy-7-deazaguanine synthase OS=Caballeronia turbans OX=1777134 GN=queE PE =3 SV=1
MTYAVKEIFYTLQGEGANAGRPAVFCRFAGCNLWSGREEDRADAVCQFCDTDFVGTDGENGGKYKTPAELVAKIASLWPEGAAHRFVVCTGGEPMLQIDQPFVDALHEAGFEMAIETNGSLPVLESIDWICVSPKADAPLVVTKGNELKVVVPQDNQRLAQYEKLDFDYFLVQPMDGPSRDINTKLAIDWCKRHPKWRLSMQTHKYLNIP

SEQ ID NO: 28686 - protein, 210 aa, Caballeronia udeis
  misc_feature (1)..(210): tr|A0A3M0V530|A0A3M0V530_9BURK 7-carboxy-7-deazaguanine synthase OS=Caballeronia udeis OX=1232866 GN=queE PE=3 SV=1
MTYAVKEIFYTLQGEGANAGRPAVFCRFAGCNLWSGREEDRADAVCQFCDTDFVGTDGENGGKYRTPAELVAMIASQWPEGEAHQFVVCTGGEPMLQIDQPLVDALHAAGFEMAIETNGSLPVLDSIDWICVSPKAGAPLVVTKGNELKVVVPQDNQPLADYAKLDFQYFLVQPMDGPSRDINTKLAIDWCKRHPQWRLSMQTHKYLNIP

SEQ ID NO: 28687 - protein, 210 aa, Caballeronia udeis
  misc_feature (1)..(210): tr|A0A158F8X0|A0A158F8X0_9BURK 7-carboxy-7-deazaguanine synthase OS=Caballeronia udeis OX=1232866 GN=queE PE=3 SV=1
MTYAVKEIFYTLQGEGANAGRPAVFCRFAGCNLWSGREEDRADAVCQFCDTDFVGTDGENGGKYRTPAELVAMISSQWPEGEAHKFVVCTGGEPMLQIDPPFVDALHAAGFEMAIETNGSLPVLDSIDWICVSPKAGAPLVVTRGNELKVVVPQDNQPLADYAKLDFEYFLVQPMDGPSRDINTKLAIDWCKRHPQWRLSMQTHKYLNIP

SEQ ID NO: 28688 - protein, 250 aa, Caldalkalibacillus thermarum
  misc_feature (1)..(250): tr|F5L557|F5L557_CALTT 7-carboxy-7-deazaguanine synthas e OS=Caldalkalibacillus thermarum (strain TA2.A1) OX=98 6075 GN=queE PE=3 SV=1
MTLIRPPLVWKKRVYTAEEMARFSIPMVEIFETVEGEGLRAGFPTVFVRVFHCNLRCVWCDTPYSYAPAKPEFEATVAEIAQKVQTYTSRAICLTGGEPLIHGHKSAALIHFLSYLESFEDIHIETNGAIDLTPFAELRQQDPMWNKKVRFIMDYKLPGSGEMERMIHTNFDHLKEQDEIKFVIGSDEDFQCALEVMERYHQQGTVLMSPVWETMPPHKLVEKVLSHGLAHVKVSLQLHKIIWDPDKRGV

SEQ ID NO: 28689 - protein, 211 aa, Caldanaerobius fijiensis
  misc_feature (1)..(211): tr|A0A1M4ZPE4|A0A1M4ZPE4_9THEO 7-carboxy-7-deazaguanine synthase OS=Caldanaerobius fijiensis DSM 17918 OX=1121 256 GN=queE PE=3 SV=1
MLKVNEIFTSIQGESTSTGYLTVFVRLTGCNLRCSYCDTRYAYDEGQLMTVGQVYSDIARRGIKRVCITGGEPLLQPDVQRLIDMLEDYEVSIETNGSVDLSQFKLYDRHRFVMDMKVPSSGSSNSMNYENFNYLRSHDEIKFVIGNKSDYYWAKDVIKKYYKRGIITFSPVYGVIEPVEIVNWMIEDKLDNVRFQLQLHKYIWDPGIRGV

SEQ ID NO: 28690 - protein, 247 aa, Calderihabitans maritimus
  misc_feature (1)..(247): tr|A0A1Z5HXH6|A0A1Z5HXH6_9THEO 7-carboxy-7-deazaguanine synthase OS=Calderihabitans maritimus OX=1246530 GN=qu eE PE=3 SV=1
MRSPISEVFSSIQGEGLYVGRRQIFIRFAGCNLSCAYCDTIESRSGKVKYCNIEVKPGSAQYRQLPNPLSVEDLLDNIVDLLEFPHHSVSLTGGEPLLYHHFVRETGKRLKEKEQLIYLETNGTLPDRLAEVLPYVDIVSMDVKLPTHTGKSYWAEHKEFLNIARRKEVFVKIVVSASSPVEEIREAINLVAGVDYNIPLVLQPVTPVREEMDRCPGKWLMYLQDMALEKLAQVSVIPQTHRLVGVK

SEQ ID NO: 28691 - protein, 225 aa, Caldicellulosiruptor bescii
  misc_feature (1)..(225): tr|B9MMB5|B9MMB5_CALBD 7-carboxy-7-deazaguanine synthas e OS=Caldicellulosiruptor bescii (strain ATCC BAA-1888 / DSM 6725 / Z-1320) OX=521460 GN=queE PE=3 SV=1
MSDLYIKSENPIKFNVVEKFVSIEGEGIRSGYPAVFVRFAGCNLSCSWCDTKYANENPQYEQIGIDALLDFILSTGIKRVTLTGGEPLIQPHIYILIDRLIYEGFEVNIETNGSVSIKHVPRDAIITMDYKCPSSGMEDRMIVDNISLLGQKDVLKFVVGTYEDLKTAERIIKTFKPRCNIFFSPVFGMIKPAEIVKFLIENKLFDTRVQIQLHKIIWSENTRGV

SEQ ID NO: 28692 - protein, 217 aa, Caldicellulosiruptor changbaiensis
  misc_feature (1)..(217): tr|A0A3T0D391|A0A3T0D391_9FIRM 7-carboxy-7-deazaguanine synthase OS=Caldicellulosiruptor changbaiensis OX=1222 016 GN=queE PE=3 SV=1
MKKAKFKVVEKFVSIEGEGIRSGFPAIFLRFAGCNLNCSYCDTRYATQNPDYEEITLDQILEYVNSIGFKRVTLTGGEPLIQPHIHDLIDSLIKEGFEVNIETNGSVDIRYVNRNAIITMDYKCPSSGMEDKMLLENIKYLGKSDVLKFVVGTNQDLERAFEIIRLFEPSCNIYFSPVYGKIEPKEIVSFILSHKLQNCRVQLQLHKIIWPDREKGV

SEQ ID NO: 28693 - protein, 225 aa, Caldicellulosiruptor hydrothermalis
  misc_feature (1)..(225): tr|E4Q980|E4Q980_CALH1 7-carboxy-7-deazaguanine synthas e OS=Caldicellulosiruptor hydrothermalis (strain DSM 18 901 / VKM B-2411 / 108) OX=632292 GN=queE PE=3 SV=1
MSDLYIKSENPIKFNVVEKFVSIEGEGIRSGYPAVFVRFAGCNLRCSWCDTKYANENPEYEEIDIDNLMNFITSTGIKRVTLTGGEPLIQPYIYLLIDRLISEGFEVNIETNGSVSIKHVPRDAIITMDYKCPSSGMEDRMIVDNIHFLGQKDVLKFVVSTYEDLKTAERIIKTFKPRCNIFFSPVFGKIEPREIVKFVLENGLFDARVQLQLHKIIWPENSRGV

SEQ ID NO: 28694 - protein, 225 aa, Caldicellulosiruptor kristjanssonii
  misc_feature (1)..(225): tr|E4S6I4|E4S6I4_CALKI 7-carboxy-7-deazaguanine synthas e OS=Caldicellulosiruptor kristjanssonii (strain ATCC 7 00853 / DSM 12137 / I77R1B) OX=632335 GN=queE PE=3 SV=1
MLVQNAKSENPIKFNVVEKFVSIEGEGIRSGYPAVFVRFAGCNLSCSWCDTNYATENPKYEQIDIDTLLSFIASTGIKRVTLTGGEPLIQPYIYILIDRLIYEGFEVNIETNGSVSIKHVPRDAIITMDYKCPSSGMEDRMIVDNINFLGQKDVLKFVVGTYEDLKSAERIIKTFKPRCNIFFSPVFGKIEPREIVKFLLENELFDARLQLQLHKIIWSPDARGV

SEQ ID NO: 28695 - protein, 225 aa, Caldicellulosiruptor kronotskyensis
  misc_feature (1)..(225): tr|E4SHH2|E4SHH2_CALK2 7-carboxy-7-deazaguanine synthas e OS=Caldicellulosiruptor kronotskyensis (strain DSM 18 902 / VKM B-2412 / 2002) OX=632348 GN=queE PE=3 SV=1
MSDLYIKSENPFKFNVVEKFVSIEGEGIRSGYPAVFVRFAGCNLRCSWCDTKYANENPEYEEIDIDNLMNFITSTGIKRVTLTGGEPLIQPYIYLLIDRLISEGFEVNIETNGSVSIKHVPRDAIITMDYKCPSSGMEHRMIVNNIHLLGEKDVIKFVVATYEDLKTAERIIKTFKPRCNIYFSPVFGKIEPREIVKFVLENGLFEARVQLQLHKIIWSENSRGV

SEQ ID NO: 28696 - protein, 225 aa, Caldicellulosiruptor lactoaceticus
  misc_feature (1)..(225): tr|G2PWR2|G2PWR2_9FIRM 7-carboxy-7-deazaguanine synthas e OS=Caldicellulosiruptor lactoaceticus 6A OX=632516 GN =queE PE=3 SV=1
MSVQNTKSDNPIKFNVVEKFVSIEGEGIRSGYPAVFVRFAGCNLNCSWCDTRYANENPQYEQVDIDTLLNFISSTGIKRITLTGGEPLIQPYIYILIDRLIYEGFEVNIETNGSVSIKHVPRDAIITMDYKCPSSGMEDRMIVDNINFLGQKDVLKFVVGTYEDLKKAERIIKTFKPRCNIFFSPVFGKIEPREIVKFLLENELFDARLQLQLHKIIWSPDARGV

SEQ ID NO: 28697 - protein, 224 aa, Caldicellulosiruptor obsidiansis
  misc_feature (1)..(224): tr|D9THJ1|D9THJ1_CALOO 7-carboxy-7-deazaguanine synthas e OS=Caldicellulosiruptor obsidiansis (strain ATCC BAA- 2073 / strain OB47) OX=608506 GN=queE PE=3 SV=1
MLNLYNNEELIKFNVVEKFVSIEGEGIRSGYPAVFVRFAGCNLSCSWCDTKYATENPKYEQIDIDTLLNFIASTGIKRVTLTGGEPLIQPYIYILIDRLIYEGFEVNIETNGSVSIKCVPRDAIITMDYKCPSSGMEDRMIVDNINFLGQKDVLKFVVATHEDLKSAERIIKTFNPKCNIFFSPVFGKIEPAEIVKFLLENGLFDARVQLQLHKIIWSENSRGV

SEQ ID NO: 28698 - protein, 224 aa, Caldicellulosiruptor owensensis
  misc_feature (1)..(224): tr|E4Q2B4|E4Q2B4_CALOW 7-carboxy-7-deazaguanine synthas e OS=Caldicellulosiruptor owensensis (strain ATCC 70016 7 / DSM 13100 / OL) OX=632518 GN=queE PE=3 SV=1
MLNLYNNEDLIKFNVVEKFVSIEGEGIRSGYPAVFVRFAGCNLSCSWCDTKYATENPKYEQIDIDTLLSFIASSGIKRVTLTGGEPLIQPYIYILIDRLIYEGFEVNIETNGSVSIKHVPRNAIITMDYKCPSSGMEDRMIVDNIHFLGQKDVLKFVVGTYEDLKSAERIIKTFKPRCNIFFSPVFGKIEPAEIVKFLLENGLFDARVQLQLHKIIWSENSRGV

SEQ ID NO: 28699 - protein, 217 aa, Caldicellulosiruptor saccharolyticus
  misc_feature (1)..(217): tr|A4XFS3|A4XFS3_CALS8 7-carboxy-7-deazaguanine synthas e OS=Caldicellulosiruptor saccharolyticus (strain ATCC 43494 / DSM 8903 / Tp8T 6331) OX=351627 GN=queE PE=3 SV =1
MKKAKFKVVEKFVSIEGEGIRSGFPAIFLRFAGCNLNCSYCDTRYATQNPDYEEITLDQILEYVNSIGFKRVTLTGGEPLIQPHIHDLIDSLIKEGFEVNIETNGSVDIRYVNRNAIITMDYKCPSSGMEDKMLLENIKYLGKSDVLKFVVGTNQDLERAFEIIRLFEPSCNIYFSPVHGKIEPKEIVSFILSHKLQNCRLQLQLHKIIWPDRERGV

SEQ ID NO: 28700 - protein, 212 aa, Caldimicrobium thiodismutans
  misc_feature (1)..(212): tr|A0A2N7PK17|A0A2N7PK17_9BACT 7-carboxy-7-deazaguanine synthase OS=Caldimicrobium thiodismutans OX=1653476 GN =queE PE=3 SV=1
MSLKISEIFFSLQGEGPLIGVPTYFVRLFGCNLSCSWCDTPYAKEGSNYEKKEISEILLPWKENYALIPYVTITGGEPLLQEETLELIKAFLLEGAILVLETNGSLSIKNIPEEVIVIMDLKTPSSGMERFNNLENLQFLKKDDALKFVIKDERDFHWSLSVIEKYDLFSKTNCFFSPCEPFMPPEKLAKMILEVKRPIRFQIQLHKFLKIK

SEQ ID NO: 28701 - protein, 212 aa, Caldimicrobium thiodismutans
  misc_feature (1)..(212): tr|A0A0U5AW41|A0A0U5AW41_9BACT 7-carboxy-7-deazaguanine synthase OS=Caldimicrobium thiodismutans OX=1653476 GN =queE PE=3 SV=1
MNLKVSEIFFSIQGEGPWVGFPTFFVRLYGCNLACKWCDTPYAREGQDYKEMKPEEIIAFWKKNYPEIPYVTLTGGEPLLQDEIYILIDEFLQKGARVLLETNGALSIENVPEEVLVVMDLKTPSSGMENFNLYKNIYFLSEKDALKFVIKDEADFDWSLKIIEEFNLLSKVTCFFSPCAPFMSPKKLADLILKTKKPLRLQIQLHKFLNLK

SEQ ID NO: 28702 - protein, 237 aa, Calditerrivibrio nitroreducens
  misc_feature (1)..(237): tr|A0A2J6WPE3|A0A2J6WPE3_9BACT 7-carboxy-7-deazaguanine synthase OS=Calditerrivibrio nitroreducens OX=477976 G N=queE PE=3 SV=1
MPLQNTSSEGFIKEVFTSIQGEGKYVGALQLFVRLSGCSIGCKGCDTDYSFSDSFDLDGISVLSNPITAEKLSYIIYDHIKPNSIHSISITGGEPLLQKDFLKELIFYLKGYGYRIFLETSGFFIDRLNEVGDMVDIISLDFKLGESFGVEFSLDEIGKIKDEIKDKIYVKIVLKDSFDFVVGRKILDGLALLGKTEFYLHFFDNCIKTNKIIMNYFYSNGVDVFYVPQLHKLLEIK

SEQ ID NO: 28703 - protein, 237 aa, Calditerrivibrio nitroreducens
  misc_feature (1)..(237): tr|E4TF30|E4TF30_CALNY 7-carboxy-7-deazaguanine synthas e OS=Calditerrivibrio nitroreducens (strain DSM 19672 / NBRC 101217 / Yu37-1) OX=768670 GN=queE PE=3 SV=1
MPLLNTSSEGFIKEVFTSIQGEGKYVGALQLFVRFSGCSIGCKGCDTDYSFTDSFDFNGTSVLSNPIKPERLACIIYDHIKPNSIHSISITGGEPLLQKDFLKELIFYLKGYGYRIFLETSGFFIDRLNEVGDMVDIISLDFKLGESFGVEFSLDEIRKIKDEIKNKIYIKIVIKNNLDFVVGRKILDGLALLNKTEFYLHFYDNCIKINQGIMDYFYSNGVDVFYVPQLHKLLEIK

SEQ ID NO: 28704 - protein, 217 aa, Caldithrix abyssi
  misc_feature (1)..(217): tr|H1XNF0|H1XNF0_9BACT 7-carboxy-7-deazaguanine synthas e OS=Caldithrix abyssi DSM 13497 OX=880073 GN=queE PE=3 SV=1
MAGKDVLKINEIFYSIQGESTYAGLPCVFVRLTYCNLRCTYCDTEYAFYEGQEMGLDEIIARIKTYQCNLVEITGGEPLIQPAVYPLMERLLDNGFEVLLETGGHMDVSKVDQRVKRIMDVKCPSSGEAEKTHWPNMELLKNDDQVKFVIGDRKDFDYALEVLEKYNLLNRCPVLFSPVFGRLENGQLAEWILATQKPIRMQLQLHKYIWKPDQRGV

SEQ ID NO: 28705 - protein, 211 aa, Caldithrix sp.
  misc_feature (1)..(211): tr|A0A523I0H9|A0A523I0H9_9BACT 7-carboxy-7-deazaguanine synthase OS=Caldithrix sp. OX=1962856 GN=queE PE=3 SV= 1
MQITEIYHSIQGESRFAGLPCVFVRTTGCNLRCVWCDTEYSFYGGQKMSLDEIIKQVESYDCKLVEITGGEPLLQKEVPELALRLLSKNQTVLIETSGEQDISVLDKRVIKIMDLKCPGSGESHQNRWENLEHLTPEDEVKFVIKDRQDYEWSREVIKKHSLENRLRVLFSPVWDNLDLEDLAKWILQDKLNVRYQLQLHKFIWSPETKGV

SEQ ID NO: 28706 - protein, 211 aa, Caldithrix sp.
  misc_feature (1)..(211): tr|A0A523HLX0|A0A523HLX0_9BACT 7-carboxy-7-deazaguanine synthase OS=Caldithrix sp. OX=1962856 GN=queE PE=3 SV= 1
MRITEIYHSIQGESRFAGRPCVFVRTTGCNLRCVWCDTEYAFYGGAEMSLDQIVAKTDRFGCKLVEITGGEPLLQKDVPELAQLLVDRDYTVLVETSGERDISVLDKRVIKIMDLKCPGSGESHRNRWQNIAHLSAQDEVKFVVKDRKDYDWAVDVIKKRGLERRCHILISPVFSELAPDELVNWILQDGLDVRFQLQLHKLVWSPDTKGV

SEQ ID NO: 28707 - protein, 215 aa, Calditrichaeota bacterium
  misc_feature (1)..(215): tr|A0A3N9MRN9|A0A3N9MRN9_9BACT 7-carboxy-7-deazaguanine synthase OS=Calditrichaeota bacterium OX=2212469 GN=qu eE PE=3 SV=1
MPESLKINEIFFSIQGESTFAGLPCIFIRLAHCNLRCNYCDTEYAFYQGTEMTFAEILDKINQYSCNLVEVTGGEPLLQKNVLPFIRLLLDKGRRVLVETGGHMDISGIDERAVIIMDIKCPGSGESDKNLWDNIGYLKKTDQVKFVISHRQDYLWTKDIINKYQLTDNHEVLLSPVFGRIDNQELAEWIIKDQLPVRLQLQIHKYIWAPDRRGV

SEQ ID NO: 28708 - protein, 235 aa, Calditrichaeota bacterium
  misc_feature (1)..(235): tr|A0A3M1XE40|A0A3M1XE40_9BACT 7-carboxy-7-deazaguanine synthase OS=Calditrichaeota bacterium OX=2212469 GN=qu eE PE=3 SV=1
MKLPTPTRKIKPRVDETTLMVNEIFYSIQGESSHAGRPCLFVRLTYCNLRCSYCDTEYAFYEGQPRQIDSLLAEIVDHPCPVVEITGGEPLLQPAVFPLMKALCEAGKTVLLETSGSRPLEKVDPRVIKIVDFKCPSSGMAGKNLESNVNCLSPRDEVKFVVGTREDFDWAVAFVEKHRLASRVGWILFSPVWGQLPPLQLTEWLLGEPRLRALPSVRLQLQMHKFIWPPDQRGV

SEQ ID NO: 28709 - protein, 193 aa, Caloramator australicus
  misc_feature (1)..(193): tr|I7KVN5|I7KVN5_9CLOT 7-carboxy-7-deazaguanine synthas e OS=Caloramator australicus RC3 OX=857293 GN=queE PE=3 SV=1
MYRVNEIFHSVQGEGSYLGCPATFVRLSGCNLNCAWCDTDHSEKEFLTAEEIANRVDYEKVIITGGEPTIYDLKPLLLELKKRGKKTMLETNGTNPTDDIRHLLDWIVCSPKPETNWAINERCLFDELKYVVDGNFEPEIHIPKGIKEKYKDRIWLQPESSNFNLRSKEAFYFAMKDSSLRVGIQLHKIINVR

SEQ ID NO: 28710 - protein, 193 aa, Caloramator fervidus
  misc_feature (1)..(193): tr|A0A1H5WSU0|A0A1H5WSU0_9CLOT 7-carboxy-7-deazaguanine synthase OS=Caloramator fervidus OX=29344 GN=queE PE=3 SV=1
MYPISEIFSSIQGEGSFLGCPATFIRFSGCNLNCPWCDTDFSFKKYMTVDEIVSFVEYQKVIITGGEPTLYDLEPLLVKLKELGKIVMLETNGTNPTDKIRHLIDWIVCSPKPEVNWEINERCLFDELKYVVDGQFNPKLHIKEDIKQKYKDKIWLQPESSRFYERAKQAFEMAMKEPYLRVGLQMHKIINVR

SEQ ID NO: 28711 - protein, 193 aa, Caloramator mitchellensis
  misc_feature (1)..(193): tr|A0A0R3JYF3|A0A0R3JYF3_9CLOT 7-carboxy-7-deazaguanine synthase OS=Caloramator mitchellensis OX=908809 GN=que E PE=3 SV=1
MYKVAEIFHSVQGEGSFLGCPATFIRLSGCNLSCSWCDTDFSPKHDMTAKEIADIALCEKVVITGGEPTIYDLEPLLLELKNRGKVTMLETNGTNPTDNIRGLLDWIVCSPKPQNNWGINPGCMFDELKFVVDGQFNPKIHIKDEIKEMYKNRIWLQPESSMFKIRSKEAYEFAMEDMRLRVGIQLHKIIDVR

SEQ ID NO: 28712 - protein, 243 aa, Caloramator proteoclasticus
  misc_feature (1)..(243): tr|A0A1M4TRM5|A0A1M4TRM5_9CLOT 7-carboxy-7-deazaguanine synthase OS=Caloramator proteoclasticus DSM 10124 OX=1 121262 GN=queE PE=3 SV=1
MKREEFLNEKIPMVEIFNSISGEGITSGFLTTFVRVYGCNLRCSYCDTKYSYDGEYSLMAPIEILGEVNRLNCKRVIVTGGEPLEEEKIKRYIPLYLAQNGYEVRIETNGSVRLYDEDEIYQFTSKKERKNLFYTLDIKCPSSNMDKFNIFEENFKRLILGDEIKFVVGNVDDLDYSIDVVKRYKEYFKGVTLNFSPVFSKIEPSQIVDYLKIINKFFAENNLDVRLNLQLHKIIWDKDKRGV

SEQ ID NO: 28713 - protein, 193 aa, Caloramator quimbayensis
  misc_feature (1)..(193): tr|A0A1T4YGC5|A0A1T4YGC5_9CLOT 7-carboxy-7-deazaguanine synthase OS=Caloramator quimbayensis OX=1147123 GN=que E PE=3 SV=1
MYKISEIFSSVQGEGSYLGCPASFIRLAGCNLRCSWCDTDFSLKYVMTTQEIIDKIKYEKVIITGGEPTIYDLKPLLLELKKRGKVTMLETNGTNPTDDIRHLIDWIVCSPKPEKNWTINERCIFDELKYVVDGQFNPDKHIPKEIKEKYKDRIWLQIESSNFAVLAKEAFTFVMNDSALRVGLQLHKIIDVK

SEQ ID NO: 28714 - protein, 193 aa, Caloramator sp.
  misc_feature (1)..(193): tr|A0A5B7TDC9|A0A5B7TDC9_9CLOT 7-carboxy-7-deazaguanine synthase OS=Caloramator sp. E03 OX=2576307 GN=queE PE= 3 SV=1
MYKIAEIFNSVQGEGSYLGCPASFIRLSGCNLHCSWCDTDFSLKYIMTAEEIIDKIKYEKVIITGGEPTIYDLKPLLLELKKRSKVTMLETNGTNPTDDIRHLLDWIVCSPKPEKNWTINERCIFDELKYVVDGQFNPDKHIPKAIKEKYKDRIWLQPESSNLILRAKEAFDFSMNDNALRVGLQLHKIIDVK

SEQ ID NO: 28715 - protein, 210 aa, Caloranaerobacter azorensis
  misc_feature (1)..(210): tr|A0A096DQJ8|A0A096DQJ8_9CLOT 7-carboxy-7-deazaguanine synthase OS=Caloranaerobacter azorensis H53214 OX=1156 417 GN=queE PE=3 SV=1
MLKVNEIFLSIQGEGISTGLPTIFVRLTGCNLRCSYCDTTYSYNYGNHMTIQQVINKIESYGYKRVCITGGEPLLQKDIINLLEKLTDYEVNIETNGSIDISKYKLIEKHRLTMDVKTPTSNEHSKMRLSNFDYLRDNDEIKFVIGTFEDYNWSKEIIRKYYNKGIITFSPIYNMIEPKEIVNWILKDKLDVRFQLQLHKIIWNPDERGV

SEQ ID NO: 28716 - protein, 210 aa, Caloranaerobacter azorensis
  misc_feature (1)..(210): tr|A0A1M5RTW1|A0A1M5RTW1_9CLOT 7-carboxy-7-deazaguanine synthase OS=Caloranaerobacter azorensis DSM 13643 OX=1 121264 GN=queE PE=3 SV=1
MLKVNEIFLSIQGEGISTGLPTIFVRLTGCNLRCSYCDTTYSYNYGNHMTIQQVINKIESYGYKRVCITGGEPLLQKDIINLLEKLTDYEVNIETNGSIDISKYKLIEKHRFTMDVKTPTSNEHSKMRLSNFGYLRDNDEIKFVIGTFEDYNWSKEIIRKYYNKGIITFSPIYNMIEPKEIVNWILKDKLDVRFQLQLHKIIWNPDERGV

SEQ ID NO: 28717 - protein, 210 aa, Caloranaerobacter sp.
  misc_feature (1)..(210): tr|A0A0P8VK31|A0A0P8VK31_9CLOT 7-carboxy-7-deazaguanine synthase OS=Caloranaerobacter sp. TR13 OX=1302151 GN=q ueE PE=3 SV=1
MLRVNEIFLSIQGEGISTGLPTIFIRLTGCNLRCSYCDTIYSYNYGNLMTIEQIVDKIKNFDYKRICITGGEPLLQKDIIKLLEKLADYEVNIETNGSVDISKYKLIKKHRFTMDIKTPTSNEHKKMKLNNFNYLRDNDEIKFVIGTWEDYNWCKEIIKKYYKKGIITFSPIYNMIEPKEIVSWILQDRLDVRFQLQLHKIIWNPDERGV

SEQ ID NO: 28718 - protein, 265 aa, Calothrix brevissima
  misc_feature (1)..(265): tr|A0A1Z4JZ50|A0A1Z4JZ50_9CYAN 7-carboxy-7-deazaguanine synthase OS=Calothrix brevissima NIES-22 OX=1973478 GN =queE PE=3 SV=1
MTSKTTLNPTARLIEVFSAIQGEGLNVGTRQIFIRFAFCDLRCHFCDSAHTWNAPDTCNIEQTPGLRDFEVHSNPVSLPTLLQWVERQNIPFLHDSISLTGGEPLLHAPFLASFLPQVRSLTNLPIYLETGGHRPEQLAMLLPYLDSVGMDFKLPSVSGESYWQEHAQCLKLGYDSHLDVFVKIIISENTEPTELERSALLVADVSPEIPIFLQPVTPLADWQKLANKPILAPLPEQVLKWQALMKKFVHHVRVVPQTHKMLNQL

SEQ ID NO: 28719 - protein, 267 aa, Calothrix desertica
  misc_feature (1)..(267): tr|A0A433UZR2|A0A433UZR2_9CYAN 7-carboxy-7-deazaguanine synthase OS=Calothrix desertica PCC 7102 OX=232991 GN= queE PE=3 SV=1
MTAKTTVTTATTNARLVEVFSAIQGEGLNVGTRQIFIRFALCDLRCHFCDSSNTWNAPTTCRIERYPGLRDFEVYSNPVTLSMLVEWVERQNIPQLHDSISLTGGEPLLHASFLVEFLPQVRSATKLPIYLETGGHRSEQLAMVLPYLDSVGMDFKLESVSGEKRLVEHARFLQLCYDSQVEVFVKIIVSSSTDVEELKQAAQIVADINPSIPIFLQPVTPLISPTHAEKEIMAPEPDQVLVWQAMMKRIVKHVRVVPQTHKMLNQL

SEQ ID NO: 28720 - protein, 266 aa, Calothrix elsteri
  misc_feature (1)..(266): tr|A0A2A2TNE0|A0A2A2TNE0_9CYAN 7-carboxy-7-deazaguanine synthase OS=Calothrix elsteri CCALA 953 OX=987040 GN=q ueE PE=3 SV=1
MTENTNVTPNARLIEIFSGIQGEGLNVGTRQIFIRFALCDLRCHFCDSSSTWIAPNECKIERSPGLRDFEIHSNPVSLSMILEWVKRQNIPCLHDSISLTGGEPLLHASFLKEFLPQVRAATGLPIYLETGGHRPEQLMMVLPYIDSIGMDFKLNSVSGEKRFSEHARFLQLCNESQVETFVKIIISDRTDSMELERVAELLANVNPQIPVFLQPVTPLGESAQIVDAPIVLAPSPDQVLIWQGMMKRLVKQVRVVPQTHKMLNQL

SEQ ID NO: 28721 - protein, 265 aa, Calothrix parasitica
  misc_feature (1)..(265): tr|A0A1Z4LQD3|A0A1Z4LQD3_9CYAN 7-carboxy-7-deazaguanine synthase OS=Calothrix parasitica NIES-267 OX=1973488 G N=queE PE=3 SV=1
MTTKTTVNQTASLIEVFSAIQGEGLNVGTRQIFIRFAFCDLRCHFCDSAHTWNAPATCRIEQTPGSRDFEIFSNPVSLPMLIKWVERQNIPRLHDSISLTGGEPLLHARFLSKFLPQISLTTGLPIYLESGGHRPEQLATILPYLDSVGMDLKLPSVSGESRWQEHEKFLQICYEARTEVFVKIIISRDTDVAELKRSAELIAAVNAAIPVFLQPATPLTDVRQIKDSAVLTPTPKQVIDWQALMKNFLKSVRVIPQTHKMIDQL

SEQ ID NO: 28722 - protein, 265 aa, Calothrix sp.
  misc_feature (1)..(265): tr|A0A1Z4FQ18|A0A1Z4FQ18_9CYAN 7-carboxy-7-deazaguanine synthase OS=Calothrix sp. NIES-2098 OX=1954171 GN=queE PE=3 SV=1
MTAKTTVKPTARLIEVFSAIQGEGLNVGTRQIFVRFALCDLRCHFCDSAHTWNAPSTCKIERTPGLRDFEVHSNPVPLPILLEWVERQNLPSLHDSISLTGGEPLLHAPFLALFLPQVRDITNLPIYLETGGHRPEQLAIILPYLDSVGMDFKLPSVSGESYWQEHAECLKLCHDSHLNVFIKIIVSQTTDPTELERAALLVAAVSPEIPVFLQPVTPLADSEKLTAKSILAPSPDQVLKWQALMKKFVPHVRVVPQTHKMLNQL

SEQ ID NO: 28723 - protein, 275 aa, Calothrix sp.
  misc_feature (1)..(275): tr|A0A1Z4RBP3|A0A1Z4RBP3_9CYAN 7-carboxy-7-deazaguanine synthase OS=Calothrix sp. NIES-4101 OX=2005461 GN=queE PE=3 SV=1
MIDAAHRYHHMTANTTVIPTARLVELFSAIQGEGLNVGTRQIFIRFALCDLRCHFCDSANTWNAPTQCKIESYPGLRNFEIHSNPISLPVLLQWVERQNIPSLHDSISLTGGEPLLHASFLKEFLPQVRAATGLPIYLETGGHRPEQLAMVLPYIDSVGMDFKLASVSGEQRFSEHARFLQLCNDSQVETFVKIIISDRTDTGELERFAQLVADVNPEIPVFLQPVTPLVEPALVGGLVLLAPSPSQVLGWQTMMKRLVKQVRVIPQTHKMLHQL

SEQ ID NO: 28724 - protein, 210 aa, Camelimonas lactis
  misc_feature (1)..(210): tr|A0A4R2GWK9|A0A4R2GWK9_9RHIZ 7-carboxy-7-deazaguanine synthase OS=Camelimonas lactis OX=659006 GN=queE PE=3 SV=1
MTYAVKEIFKTLQGEGAQAGSAAVFCRFAGCNLWTGREEDRHKAVCQFCDTDFVGMDGEGGGRFASPAALLDAIEAAWGPGRVNRLIVFTGGEPLLQLDAPALAEAHRRGFRCAVETNGTIAAPEGLDWICVSPKAGADLAQRRGHELKLVFPQPTLMPDAVADLDFAHFFLQPMDGPDRAANTAAAVQWCMDHPQWRLSVQTHKVIGIP

SEQ ID NO: 28725 - protein, 232 aa, Caminibacter mediatlanticus
  misc_feature (1)..(232): tr|A0A4P9DQH7|A0A4P9DQH7_9PROT 7-carboxy-7-deazaguanine synthase OS=Caminibacter mediatlanticus TB-2 OX=391592 GN=queE PE=3 SV=1
MRENLLPISEIFYSIQGEGKYSGTPSIFVRVGGCNLTCPGFGNKGCDSYYAVDKSYKNEWKNFSIEEIKKEFSKYLKFNPHLVITGGEPTLYYEKLYPLIEWFSGEITIETNATIFIDFEKYPKYKDVTFAMSVKLSNSGEEYKKRVNKKAILNISKNAKKSFFKFVIDKDLKKEIEDITEGINLEIYCMPLGASKEELEKNAKFVFDFCLKNGYSYSDRIHIRLFGKKKGV

SEQ ID NO: 28726 - protein, 209 aa, Caminicella sporogenes
  misc_feature (1)..(209): tr|A0A1M6R8I8|A0A1M6R8I8_9CLOT 7-carboxy-7-deazaguanine synthase OS=Caminicella sporogenes DSM 14501 OX=112126 6 GN=queE PE=3 SV=1
MKVNEIFLSIQGEGVSTGFPTIFIRFTGCNLRCSFCDTKYSYEDGEEMSVEEIYNEVKKFKYKRVCITGGEPLLQEDLSKLLYLLKEYEVNIETNGSVDLGKYRLLPNHRFTMDMKVPSSMESKKMIFTNFKYLKDRDEIKFVIGTREDYEWAKEVIKKYYRKGIITFSPVFNKIEPKEIVNWILQDNLDVRFQLQIHKIIWEPDEKGV

SEQ ID NO: 28727 - protein, 249 aa, Campylobacter avium
  misc_feature (1)..(249): tr|A0A222MZL6|A0A222MZL6_9PROT 7-carboxy-7-deazaguanine synthase OS=Campylobacter avium LMG 24591 OX=522484 GN =queE PE=3 SV=1
MYIVEKFLSLQGEGKFSGKLAFFIRFAGCNINCVGFNVSKEKNAEVLIGCDTLRAVYTEHFKNEYENVNVNTLVKMIKDITKDKEIIIVITGGEPTLWHKNKKFIELMLELEQMKLEVHFESNASIYIDFDQYELYKNCIFAMSVKLSNSGVKQEQRINPKAIKAIVANSKDSFYKFVLDKNFIKSGEAQKEIKALLDIAKTQVYCMPMGQNNKELKINAKEVAKFCIENGYNYSDRLHIRLWGSKEGV

SEQ ID NO: 28728 - protein, 248 aa, Campylobacter blaseri
  misc_feature (1)..(248): tr|A0A2P8R1K1|A0A2P8R1K1_9PROT 7-carboxy-7-deazaguanine synthase OS=Campylobacter blaseri OX=2042961 GN=queE P E=3 SV=1
MLLKLVEWFYSIQGEGKYAGSSAIFFRFAGCNLRCRGFNVKQISPKTNEALVGCDTIRAVYTSHFEYENIDIASQLFKKIDSLKLNHKPIIVITGGEPLLHYKNSVFYEFVSRLLELEYEVHFETNGSIEVDFINFPNYKKCIFCISPKLSNSLEKNEKRLNYNALNTIKNSSKDSFYKFVISKEITLKDEILDIIKNAPNSVFCMPMSKNKKELEENAKYTFNFCLENGYNYSDRIHIRIFDDKDGI

SEQ ID NO: 28729 - protein, 247 aa, Campylobacter coli
  misc_feature (1)..(247): tr|W8L0N5|W8L0N5_CAMCO 7-carboxy-7-deazaguanine synthas e OS=Campylobacter coli RM4661 OX=1183379 GN=queE PE=3 SV=1
MQLVESFLSIQGEGKYSGKLAIFMRFAGCNFNCSGFGVKLIKNEKVLKGCDTIRAVFTKEFNEEYENLNASELFKRVLDLKKDFDPIVVITGGEPLIHHENPEFIYFIQTLLENNFEVHFESNGSIELDFEKYPFYKECIFALSVKLQNSGMSKERRLNINALKAFKQYAKDSFYKFVLNSSQLESSALEILEILEKAPNEIFCMPMGENEQNLKQNALKIAEFCIKNGYNYSDRIHIRLWNDKEGV

SEQ ID NO: 28730 - protein, 247 aa, Campylobacter coli
  misc_feature (1)..(247): tr|A0A3Z9W7G9|A0A3Z9W7G9_CAMCO 7-carboxy-7-deazaguanine synthase OS=Campylobacter coli OX=195 GN=queE PE=3 SV= 1
MQLVESFLSIQGEGKYSGKLSIFMRFAGCNFNCSGFGVKLIKNGKTLKGCDTIRAVFTKEFNEEYEILNASELFKRVLDLKKDFNPIVVITGGEPLIHHENPEFIDFIQALLKNNFEVHFESNGSIELDFEKYPFYKECVFALSVKLQNSGMGKEKRLNFNALKGFKHYAKDSFYKFVLNSSQLESLSLEILEILEKAPNEIFCMPMGENEQNLKQNALKIAEFCIKNGYNYSDRIHIRLWNDKEGV

SEQ ID NO: 28731 - protein, 251 aa, Campylobacter concisus
  misc_feature (1)..(251): tr|U2FNH3|U2FNH3_9PROT 7-carboxy-7-deazaguanine synthas e OS=Campylobacter concisus UNSW2 OX=1242965 GN=queE PE =3 SV=1
MSKELELVEAFLSIQGEGAYQGRLAVFLRFLGCNLNCSGFGVKTRSLKTGEELLGCDSIRAVFKGHFHHKTYSADEILSLVDGLCKGLEQKPIVVLTGGEPLIWHQNENFINLVRNLLINYEVHFETNGTILVDFDKFEIYKNCHFALGVKLANSGVSEQKRINLDAILAIKNNAKSSFLKFVLSRFDKSELDEILYIKNRANLPVWCMAMGANEDELGKNALKTAQFAIKHGFNYSERIHIRLWGDKEGV

SEQ ID NO: 28732 - protein, 251 aa, Campylobacter concisus
  misc_feature (1)..(251): tr|U2G889|U2G889_9PROT 7-carboxy-7-deazaguanine synthas e OS=Campylobacter concisus UNSW1 OX=1242967 GN=queE PE =3 SV=1
MSKELELIEAFLSIQGEGAYQGRLAIFLRFLGCNLNCSGFGVKTRSLKTGEELLGCDSIRAVFKGHFHHKRYSTDEILSLVDGLCKGLEQKPIVVLTGGEPLIWHQNENFINLVRNLLINYEVHFETNGTILVDFDKFEIYKNCHFALGVKLANSGVSEQKRINLDAILAIKDNAKSSFLKFVLSRFNKSELEEILYIKNRANLPVWCMAMGANEDELGKNALKTAEFAIKHGFNYSERIHIRLWGDKEGV

SEQ ID NO: 28733 - protein, 244 aa, Campylobacter cuniculorum
  misc_feature (1)..(244): tr|A0A1W6BUW0|A0A1W6BUW0_9PROT 7-carboxy-7-deazaguanine synthase OS=Campylobacter cuniculorum DSM 23162 = LMG 24588 OX=1121267 GN=queE PE=3 SV=1
MQVVESFLSIQGEGKFAGKLAVFIRFAGCNLNCIGFGVKRQKNGKILQGCDTLRAVFTKEFESQTYDSKSLFERVLELKKDFRVIIVITGGEPLIHHQDEEFINFIELLLNANLEVHFESNGSIELDFNKYPLYKKCIFALGIKLSNSGIAKEKRINFKAIESIVKNTQSFYKFVLDSKSIQRSASEIDEIVSQIPNEVYCMPLGENEDKLRANALKIVEFCIKNGYNYTDRIHIRLWGEQEGV

SEQ ID NO: 28734 - protein, 255 aa, Campylobacter curvus
  misc_feature (1)..(255): tr|A7GWA6|A7GWA6_CAMC5 7-carboxy-7-deazaguanine synthas e OS=Campylobacter curvus (strain 525.92) OX=360105 GN= queE PE=3 SV=2
MRDGGRGLELVESFLSVQGEGAYQGRLAVFLRFFGCNLNCIGFDVKTRSNKTGEILIGCDSARAVFKGHFKSKRYSSDEILSLVKNICKGLKTRPIVVLTGGEPLIHHKNENFINLVQNLLNLGFDVHFETNGTIEVNFAKFPVYKKCKFALGIKLANSGVSVDKRINVKAIEAICKNAKESFYKFVLSSPGDNDLEQILQVLKISDAPVWCMAMGASRSELEQNAPRVADFAIKHGFNYSERIHIRLWDKKEGV

SEQ ID NO: 28735 - protein, 241 aa, Campylobacter fetus
  misc_feature (1)..(241): tr|A0A0E1GK45|A0A0E1GK45_CAMFE 7-carboxy-7-deazaguanine synthase OS=Campylobacter fetus subsp. fetus 04/554 OX =1240980 GN=queE PE=3 SV=1
MVNVVEYFTSVQGEGKFSGRYSLFIRLGGCNLSCKGFGVKIKSPKTGEILVGCDTIKAVQTEHFEHNKFDFEALVNLVKETEFKPLIVITGGEPLLWYKDEDLIKFIQWCFEQNYEVHFETNGSIFVDFDKFKVYKKCKFAVSVKLAISGEPKSKRINQKALQAIFANADAFYKFVICRSELGEINEILELQNGEVWCMPLGKNISELSKNAKRVAEFCIKNGFNYSDRLHVRLWNDKEGV

SEQ ID NO: 28736 - protein, 241 aa, Campylobacter fetus
  misc_feature (1)..(241): tr|A0A0S4RX47|A0A0S4RX47_CAMFE 7-carboxy-7-deazaguanine synthase OS=Campylobacter fetus subsp. fetus OX=32019 GN=queE PE=3 SV=1
MVSVVEHFTSIQGEGKFSGRYSLFIRLGGCNLSCKGFGVKTRSLKTGEILVGCDTIKAVQTSHFEHSKFDYKTLVNLVKETEFKPLIVITGGEPLLWHKDEDLIKFAQWCFEQDYEVHFETNGTVFVDFDKFEVYKKSKFAVSVKLSISGEPKSKRINQKALQAIFANADAFYKFVICGSELDEINEILELQNGEVWCMPLGKDRFELGKNALNVAEFCIKNGFNYSDRLHVRLWNDKEGV

SEQ ID NO: 28737 - protein, 248 aa, Campylobacter geochelonis
  misc_feature (1)..(248): tr|A0A128ECZ4|A0A128ECZ4_9PROT 7-carboxy-7-deazaguanine synthase OS=Campylobacter geochelonis OX=1780362 GN=qu eE PE=3 SV=1
MLKLVEFFHSIQGEGKFAGKNAIFFRFAGCNLRCAGFGVKLNSLKTGEVLTGCDTIRAVYTSHFEYENITSKEALLSKFEELDLQNAKPIIVITGGEPLLHHKDEIFYAFISEVLARGFEVHFETNGSVEVDFARFNEYKKCVFCISPKLSNSGEKREKRLNFKALNLIKENAKDSFYKFVISSEFNLQSEILEITQAAPNEVFCMPLGKNKKELEKNAKFTFEFCLKNGYNYTDRLHIRIFDDKDGI

SEQ ID NO: 28738 - protein, 321 aa, Campylobacter gracilis
  misc_feature (1)..(321): tr|C8PF27|C8PF27_9PROT 7-carboxy-7-deazaguanine synthas e OS=Campylobacter gracilis RM3268 OX=553220 GN=queE PE =3 SV=1
MRLVESFLSIQGEGKYAGRLAFFFRFAGCNLRCAGFGGERVSPKTGEILRGCDTIRAVFTNHFEHEEILNLAQLLNKISNLSGSSCFAPACSAPGFCAAESFFESDTLNSAAAQTPPRPNGSAKNSLNLKSENSLNFAAQNSSNLNPQSSASPQSAKLHQKPIIIITGGEPMLHHKEALFYEFICELLARGYEVHFETNGTILVDFEKFPAYKSSVFAVSPKLSNSAEPRERRLNFAALRNLKQNAKDSFYKFVISPEFDAQPEIREILAACESEVYCMPRGADRRELESGAQFCVDFCLKNGYNYSDRLHIRIWGEKDGV

SEQ ID NO: 28739 - protein, 247 aa, Campylobacter helveticus
  misc_feature (1)..(247): tr|A0A1V0RHJ9|A0A1V0RHJ9_9PROT 7-carboxy-7-deazaguanine synthase OS=Campylobacter helveticus OX=28898 GN=queE PE=3 SV=1
MQIVESFLSVQGEGKFAGRLAVFVRFAGCNFNCVGFKVKRQKEGRELLGCDTIRAVFTKEYQKTYEDLNANELFARVLNLAKDFKPIIVITGGEPLIHHKKAEFLKFITLLLRAKFKVHFETNASIQIDFKKYPLYKKCVFSLGVKLSNSGISKDKRLNFKALKAFRKEAKKSFYKFVLDEGFLSKAKGEIEEILSVVKNEVYCMPLGENEEKLKKNALALVKFCLENGYNYSDRIHIRLWEDKEGV

SEQ ID NO: 28740 - protein, 247 aa, Campylobacter hepaticus
  misc_feature (1)..(247): tr|A0A424Z1C1|A0A424Z1C1_9PROT 7-carboxy-7-deazaguanine synthase OS=Campylobacter hepaticus OX=1813019 GN=queE PE=3 SV=1
MDLVESFLSIQGEGKYSGKLAIFMRFAGCNFNCSGFGVKISKNDKVLLGCDTIKAVFTKEFQKNYENLNAQKLFDRVIALKKHFNPIVVITGGEPLIHHENPEFINFIKMLIKANLQIHFESNGSIEIDFDKYPFYKKCIFALSVKLQNSGVAKNKRFNFKALKEIKMHAKDSFYKFVLDVKTLNHSSLEIEEIIKEVPNQIFCMPMGENEQCIRKNAQEIAEFCIKNGYNYSDRIHIRLWNDKEGV

SEQ ID NO: 28741 - protein, 247 aa, Campylobacter hominis
  misc_feature (1)..(247): tr|A7I088|A7I088_CAMHC 7-carboxy-7-deazaguanine synthas e OS=Campylobacter hominis (strain ATCC BAA-381 / LMG 1 9568 / NCTC 13146 / CH001A) OX=360107 GN=queE PE=3 SV=1
MLSLVESFASIQGEGKFAGRLAVFFRFAGCNLNCAGFNCELKSPKTGEILRGCDTIRAVKTAHFDYEKISTVSQLLDKIGTNFKNSLPIIVITGGEPLLNYANPLFYEFIDEILKRNFEVHFETNGTIFVDFQKFPLYKNCVFAVSVKLGNSKEPREKRLNFTALQNLKNNAKIFFYKFVICKNFDAKSEIYEILEHVYGEVWCMPLAKNREQLSQNALYCAEFCLQNGFNYSDRLHIRLWNDKNGV

SEQ ID NO: 28742 - protein, 241 aa, Campylobacter hyointestinalis
  misc_feature (1)..(241): tr|A0A172SP37|A0A172SP37_CAMHY 7-carboxy-7-deazaguanine synthase OS=Campylobacter hyointestinalis subsp. hyoin testinalis LMG 9260 OX=1031746 GN=queE PE=3 SV=1
MVRVVEHFTSIQGEGKFSGRYSLFIRLGGCNLSCKGFGVKTRSPKTGEILVGCDTIKAVQTSHFGHSKFDYKALVNLVKETEFKPLIVITGGEPLLWHKDEDLIKFAQWCFEQDYEVHFETNGTVFVDFDKFEVYKKSKFAVSVKLSISSEPKSKRINQKALQAIFANADAFYKFVICGSEIDEINEILELQNGEVWCMPLGKDRFELGKNALNVAEFCIKNGFNYSDRLHVRLWNDKEGV

SEQ ID NO: 28743 - protein, 241 aa, Campylobacter hyointestinalis; identical to SEQ ID NO: 28736
  misc_feature (1)..(241): tr|A0A2S5J4Z1|A0A2S5J4Z1_CAMHY 7-carboxy-7-deazaguanine synthase OS=Campylobacter hyointestinalis subsp. hyoin testinalis OX=91352 GN=queE PE=3 SV=1

SEQ ID NO: 28744 - protein, 241 aa, Campylobacter iguaniorum
  misc_feature (1)..(241): tr|A0A076F754|A0A076F754_9PROT 7-carboxy-7-deazaguanine synthase OS=Campylobacter iguaniorum OX=1244531 GN=que E PE=3 SV=1
MISVVEHFASIQGEGKFQGRYSFFIRLAGCNLSCKGFGCEMKSPKTGEILVGCDTIRAVAIKHFDYPKFDFVGLKNLVENLKFKPIIVLTGGEPLLWHKDVDLQKFIAWLLEREYEVHFETNGTVFVDFNQFEIYKKCKFAISPKLAISGEPKSKRLNQKALKSLFANASAFYKFVVRGDELDEIREILALQNGEVWCMPLGKNISELNANAINVANFCINHGFNYSDRLHIRLWNDKEGV

SEQ ID NO: 28745 - protein, 249 aa, Campylobacter insulaenigrae
  misc_feature (1)..(249): tr|A0A0A8H3S7|A0A0A8H3S7_9PROT 7-carboxy-7-deazaguanine synthase OS=Campylobacter insulaenigrae NCTC 12927 OX= 1031564 GN=queE PE=3 SV=1
MEIVETFLSIQGEGAYSGKLAIFVRFAGCNFNCIGFGVSKKKDDNILIGCDTIRAVFTKNFASTYKKYTAQELFNEVIFLKKDFNPIIVITGGEPLLYYKNEEFLKWIKLLLEQNFLLHFETNASIEIDFKKYPVYEKCYFSLGVKLSNSGVSKEKRINKKALQAFKKNAKGSFYKFVLDEDFIFNHQAQEEIREILTICENEVYCMPMGSNREEISKNALSVAEFCIKNGYNYSDRLHIRVWGDKEGV

SEQ ID NO: 28746 - protein, 223 aa, Campylobacter jejuni
  misc_feature (1)..(223): tr|A0A4U9P206|A0A4U9P206_CAMJU 7-carboxy-7-deazaguanine synthase OS=Campylobacter jejuni OX=197 GN=queE_2 PE=3 SV=1
MQYPINEMFETLQGEGYFTGVPAIFIRLQGCPVGCSWCDTKHTWDKIADREVDMQRILVKTEESDAWGNATSEQLLEVIAQQGYTARHVVITGGEPCIYDLTVLTSLLEKNGFSCQIETSGTHEVRCSVNTWVTVSPKVNMRGGYDILPQALKRADEVKHPVARQRDIDALDVLLETLTDSKARIIALQPISQKEEATRLCIATCIARNWRLSMQTHKYLNIA

SEQ ID NO: 28747 - protein, 247 aa, Campylobacter jejuni
  misc_feature (1)..(247): tr|A0A381D0J6|A0A381D0J6_CAMJU 7-carboxy-7-deazaguanine synthase OS=Campylobacter jejuni subsp. doylei OX=3202 1 GN=queE PE=3 SV=1
MQLVESFLSIQGEGKYNGKLAIFMRFAGCNFNCLGFNVKISKNDKTLIGCDTIRAVFTKDFKESYETLSTNELLKRVIKLKQGFNPIVVITGGEPLIHYENPEFIEFIQMLLKNKFEIHFESNGSIEIDFDRYPFYKECIFALSVKLQNSGIKKDKRLNFKALKAFKNYAKDSFYKFVLDANTLDNSFLEINEILKEAPNQIFCMPMGENEQNLKKNAQKIAEFCIKNGYNYSDRIHIRLWNDKEGV

SEQ ID NO: 28748 - protein, 241 aa, Campylobacter lanienae
  misc_feature (1)..(241): tr|A0A1X9SPD4|A0A1X9SPD4_9PROT 7-carboxy-7-deazaguanine synthase OS=Campylobacter lanienae NCTC 13004 OX=10317 53 GN=queE PE=3 SV=1
MVEVVEYFHSIQGEGRYQGKNAFFIRLAGCNLRCQGFGSIMKSPKNGEILLGCDTIKAAQSSHFSYEKFNFERLSSLLISLKHKPLIIITGGEPLLYHSDWDLIKFLEYAFSVGFSVQFESNGTIEIDFAKYPIYKKCTFAVSVKLSISGEPAHKRINKKALKSLFNNADCFYKFVTTANEFDEIKEILSIQNGEVWCMPLAKNQDELNQNAKSVASFAIKNGFNYSDRLHIRIWNDLDGV

SEQ ID NO: 28749 - protein, 241 aa, Campylobacter lanienae
  misc_feature (1)..(241): tr|A0A562Y0W7|A0A562Y0W7_9PROT 7-carboxy-7-deazaguanine synthase OS=Campylobacter lanienae OX=75658 GN=queE PE =3 SV=1
MVEVVEYFHSIQGEGRYQGKNAFFIRLAGCNLRCQGFGSIMKSPKNGEILLGCDTIKAAQSSHFIYEKFNFERLSSLLISLKHKPLIVITGGEPLLYHSDWDLIKFLEYAFSIGFSVQFESNGTIEIDFAKYPIYKKCTFALSVKLSISGEPAHKRINKKALKSLFNNTDCFYKFVTTANEFDEIKDILSIQNGEVWCMPLAKNQDELNQNAKSVASFAIKNGFNYSDRLHIRIWNDLDGV

SEQ ID NO: 28750 - protein, 249 aa, Campylobacter lari
  misc_feature (1)..(249): tr|B9KDV1|B9KDV1_CAMLR 7-carboxy-7-deazaguanine synthas e OS=Campylobacter lari (strain RM2100 / D67 / ATCC BAA -1060) OX=306263 GN=queE PE=3 SV=2
MEVVETFLSIQGEGKYSGNLAIFVRFAGCNFNCVGFGVKKEKDSKILLGCDTIRAVFTKEFKTCYKTYTSVKLFDEVLKLANSRKAIVVITGGEPLLNYQNKDFLCFINLLLENDFMVHFETNASIEIDFEKYPLYKKCYFALGVKLSNSGVKKEKRINEKALKAFKHYAKDSFYKFVLDKDFLQESKALNEINEILQICENEVFCMPMGSNEEEISKNALSVAEFCIKNGYNYSDRLHIRIWGDKEGV

SEQ ID NO: 28751 - protein, 249 aa, Campylobacter lari
  misc_feature (1)..(249): tr|A0A0A8I064|A0A0A8I064_CAMLA 7-carboxy-7-deazaguanine synthase OS=Campylobacter lari NCTC 11845 OX=1388749 G N=queE PE=3 SV=1
MEVVETFLSLQGEGKYSGNLAIFVRFAGCNFNCIGFGVKKEKYSKMLLGCDTIRAVFTKEFKTCYKTYTSAKLFDEVLKLANSRKVIVVITGGEPLLNYQNKDFLYFVNLLLENDFKVHFETNASIEIDFKKYPLYKKCYFALGVKLSNSGVKKEKRINEKALKAFKHYAKDSFYKFVLDKDFLQESKALGEINEILQICENEVFCMPMGSSEEEISKNALSVAEFCIKNGYNYSDRLHIRIWGDKEGV

SEQ ID NO: 28752 - protein, 249 aa, Campylobacter ornithocola
  misc_feature (1)..(249): tr|A0A1C2FU02|A0A1C2FU02_9PROT 7-carboxy-7-deazaguanine synthase OS=Campylobacter ornithocola OX=1848766 GN=qu eE PE=3 SV=1
MEIVETFLSLQGEGKYSGNLAIFVRFAGCNFNCIGFGVKKEKDSKILLGCDTIRAVLTKEFKACYKTYNAKELFDEVLKLVNLCKPIVVITGGEPLLNYQNKEFLCFISLLLEHNFKVHFETNASIEIDFEKYPLYKKCYFALGVKLSNSGVKKEKRINEKALEAFKNHAKGSFYKFVLDRDFLEENKALKEINEILQICENEVFCMPMGVNELEVSKNALSVAEFCIKNGYNYSDRLHIRIWGDKEGI

SEQ ID NO: 28753 - protein, 249 aa, Campylobacter peloridis
  misc_feature (1)..(249): tr|A0A0A8GUI4|A0A0A8GUI4_9PROT 7-carboxy-7-deazaguanine synthase OS=Campylobacter peloridis LMG 23910 OX=13887 53 GN=queE PE=3 SV=1
MEVVETFLSLQGEGKYSGNLAVFVRFAGCNFNCAGFGVKKQKNSKEFLGCDTIRAVFTKEFKNTYKFYEAKELFKELLKLAKDFKPIVVITGGEPLLNYKNADFLEFISLLLENDFIVHFETNASIEIDFEKYPLYKQCYFALGIKLSNSGVKKEKRINEKALKAFKKNAKDSFYKFVLDEKFIQENKALEEINEILQLCENEVFCMPMGAKEEEISKNSLSVAEFCIKNGYNYSDRLHIRIWGDKEGV

SEQ ID NO: 28754 - protein, 249 aa, Campylobacter peloridis
  misc_feature (1)..(249): tr|A0A5C7DZ19|A0A5C7DZ19_9PROT 7-carboxy-7-deazaguanine synthase OS=Campylobacter peloridis OX=488546 GN=queE PE=3 SV=1
MEVVETFLSLQGEGKYSGNLAVFVRFAGCNFNCVGFGVKKQKNSKEFLGCDTIRAVFTKEFKNTYKFYEAKELFKELLKLAKDFKPIVVITGGEPLLNYKNADFLEFISLLLENDFKVHFETNASIEIDFEKYPLYKQCYFALGIKLSNSGVKKEKRINEKALKAFKKNAKDSFYKFVLDEKFIQENKALEEINEILQLCENEVFCMPMGAKEEEISKNSLSVAEFCIKNGYNYSDRLHIRIWGDKEGV

SEQ ID NO: 28755 - protein, 251 aa, Campylobacter pinnipediorum
  misc_feature (1)..(251): tr|A0A1S6TPV8|A0A1S6TPV8_9PROT 7-carboxy-7-deazaguanine synthase OS=Campylobacter pinnipediorum subsp. pinnipe diorum OX=1660067 GN=queE PE=3 SV=1
MASLSLVEEFISIQGEGKYQGHLGIFLRFFGCNLNCYGFDVKQISNKTGDTLIGCDTIRAVFTSHFDATQIQTEDEILNLVNARIKDLKKLPMIVITGGEPLLHHKNKIFINLVSKLIDSGFKIQFETNSSIFVDFEKFPIYKKCSFAMSVKLKNSGEKYEKRINKEAIKAICENSYDSFYKFVILGKDKELDEINDILKIYNQDVWCMPMGSNKIELEKNALNVANFAIKNGFNYSDRMHIRIWDNKEGV

SEQ ID NO: 28756 - protein, 251 aa, Campylobacter pinnipediorum
  misc_feature (1)..(251): tr|A0A1S6U8A5|A0A1S6U8A5_9PROT 7-carboxy-7-deazaguanine synthase OS=Campylobacter pinnipediorum subsp. caledon icus OX=1874362 GN=queE PE=3 SV=1
MASLSLVEEFISIQGEGKYQGHLAIFLRFFGCNLNCYGFDVKQISNKTGDTLIGCDTIRAVFTSHFDATQIQTEDEILNLVNARIKGLKKLPMIVITGGEPLLHHKNKIFINLVSKLINSGFKIQFETNSSIFVDFEKFPIYKKCSFAMSVKLKNSGEKYEKRINKEAIKAICENSYDSFYKFVILGKDKELDEINDILKIYNQDVWCMPMGSNKIELEKNALNVANFAIKNGFNYSDRMHIRIWDNKEGV

SEQ ID NO: 28757 - protein, 254 aa, Campylobacter rectus
  misc_feature (1)..(254): tr|B9CYW0|B9CYW0_CAMRE 7-carboxy-7-deazaguanine synthas e OS=Campylobacter rectus RM3267 OX=553218 GN=queE PE=3 SV=1
MSLNLVENFLSIQGEGASSGRLAIFLRFAGCNLNCAGFGVRAISPKTGETLVGCDTVRAVFTGHFSYQKISRADELAKITQNLSVNLRQKPILVITGGEPLLHHKNRILLDFLDFATSEGYEPHFETNGTIEVDFARFEIYKKCRFAVSVKLENSGESEARRINATALKAIKQNAAGSFYKFVLDKKSVEDGSAIAQISRILGLCDADVFCMPQGYDKISLERNARAVAQFAIKHGFNYSDRLHIRLWGAKEGV

SEQ ID NO: 28758 - protein, 254 aa, Campylobacter rectus
  misc_feature (1)..(254): tr|A0A3P1X8T1|A0A3P1X8T1_CAMRE 7-carboxy-7-deazaguanine synthase OS=Campylobacter rectus OX=203 GN=queE PE=3 S V=1
MSLNLVESFLSIQGEGASSGRLAIFLRFAGCNLNCAGFGVRAISPKTGEILTGCDTVRAVFTGHFSYQKISRADELIKITQNLSVNLRQKPILVITGGEPLLHHKNRILLDFLNFATSEGYEPHFETNGTIEVDFAKFEIYKKCRFAVSVKLENSGESEARRINATALKAIKQNAAGSFYKFVLDKKSVEDGSAIAQISRILGICDADVFCMPQGYDKISLERNASAVAQFAIKHGFNYSDRLHIRLWGTKEGV

SEQ ID NO: 28759 - protein, 254 aa, Campylobacter showae
  misc_feature (1)..(254): tr|M3GWM9|M3GWM9_9PROT 7-carboxy-7-deazaguanine synthas e OS=Campylobacter showae CC57C OX=1073353 GN=queE PE=3 SV=1
MSLNLVESFLSIQGEGASSGRLAIFLRFAGCNLNCAGFGVRTVSPKTGETLTGCDTIRAVFTGHFSYQKITRADELIKITQNLSANLRRKPIIVITGGEPLLHHKSQILLDFLNFAISEGYEPHFETNGTIEVDFAKFEIYKKCRFAVSVKLENSGESEARRINASALKAIKQNSAGSFYKFVLDKKSAEDGSAIAQISRILEICDTEVFCMPQGYDKISLEQNARAVAQFTITHGFNYSDRLHIRLWGAKEGV

SEQ ID NO: 28760 - protein, 254 aa, Campylobacter showae
  misc_feature (1)..(254): tr|C6RE11|C6RE11_9PROT 7-carboxy-7-deazaguanine synthas e OS=Campylobacter showae RM3277 OX=553219 GN=queE PE=3 SV=1
MSLNLVESFLSIQGEGASSGRLAIFLRFAGCNLNCAGFGVRTVSPKTGETLTGCDTIRAVFTGHFSYQKITRADELIKIIQNLSANLRRKPIVVITGGEPLLHHKNQILLDFLNFATSEGYEAHFETNGTIEVDFGKFEIYKKCRFAVSVKLENSGESEARRINQVALKAIKQNSAGSFYKFVLDKKSAEDGSAIAQISRILELCDAEVFCMPQGYDKISLEQNALSVAQFAIKHGFNYSDRLHIRLWGAKEGV

SEQ ID NO: 28761 - protein, 247 aa, Campylobacter sp.
  misc_feature (1)..(247): tr|A0A2G4R6G1|A0A2G4R6G1_9PROT 7-carboxy-7-deazaguanine synthase OS=Campylobacter sp. 73/13 OX=1655501 GN=queE PE=3 SV=1
MQVVESFLSIQGEGKFAGNLAVFVRFSGCNFNCVGFNVKKQKEGKELVGCDTLRAVFTKEYQNTYSKFNARELFLRVLTLAKDFKPIVVITGGEPLIHHKKPEFLRFITLLLEAKFEVHFETNASIKIDFKKYPLYKKCIFALGIKLSNSGVSKEKRLNYKALKAFKKKAKKSFYKFVLEEKFLNKAEEEIEKILSVVKNEVYCMPLGENETKLKKNALALVNFCLKNGYNYTDRMHIRLWGDKEGV

SEQ ID NO: 28762 - protein, 241 aa, Campylobacter sp.
  misc_feature (1)..(241): tr|A0A1X9T342|A0A1X9T342_9PROT 7-carboxy-7-deazaguanine synthase OS=Campylobacter sp. RM8964 OX=1660074 GN=que E PE=3 SV=1
MVEVVEYFSSIQGEGKFQGKNAFFIRFGGCNLKCVGFGCSLRSPKTGEMLMGCDTIRAAQSSHFKYDKFDSQRLSGLLLGLKHKPLIVLTGGEPLIHHADRDLLKFLEYAISVGFNIQFETNGTIDVDFAKFPIYKKCTFAVSVKLALSGEPAHKRINKKALKSLFNNASCFYKFVTTGAELAEIKDILAIQNGEVWCMPLARDQNELEYNAKNVVNLCIENGFNYSDRLHIRIWNDLDGV

SEQ ID NO: 28763 - protein, 250 aa, Campylobacter sputorum
  misc_feature (1)..(250): tr|A0A381DIY0|A0A381DIY0_9PROT 7-carboxy-7-deazaguanine synthase OS=Campylobacter sputorum biovar sputorum OX= 32024 GN=queE PE=3 SV=1
MLSLVESFISIQGEGKYSGKYALFVRFAGCNLRCTGFGVNLKSLKTGEILVGCDTIKAVETSHFSYQNISNLQELLNLSVAKIPINLKPIVVITGGEPLIHHKNHIFCEFINYLLNHKFEVHFETNGSVFVDFDKFSFLKSCIFCVSIKLSNSGEIRQNRINLDALRAIKKNAKDSFYKFVLNAKDISNLSKEIKEILDIVPNEVYCMPMGATQTEIISNAAKVCDFCIKNGYNYTDRLHIRLWNDKEGV

SEQ ID NO: 28764 - protein, 249 aa, Campylobacter subantarcticus
  misc_feature (1)..(249): tr|A0A0A8HBE5|A0A0A8HBE5_9PROT 7-carboxy-7-deazaguanine synthase OS=Campylobacter subantarcticus LMG 24374 OX= 1388751 GN=queE PE=3 SV=1
MEVVETFLSLQGEGKYSGNLAVFVRFAGCNFNCIGFGAKKEQNSKILLGCDTIRAVFTQEFKACYQSYKTKELFDEVVKLANSHQAIVVITGGEPLLNYQKPEFLCFVNLLLKNDFKVHFETNASIEIDFEKYPLYKKCYFALGVKLSNSGVKKEKRINEKALRAFKKYPRDSFYKFVLDRDFLEENKALEEIKEILQICKNEVFCMPMGANGLEISKNALSVAEFCIKNGYNYSDRMHIRIWGDKEGV

SEQ ID NO: 28765 - protein, 247 aa, Campylobacter upsaliensis
  misc_feature (1)..(247): tr|A0A448KLS1|A0A448KLS1_CAMUP 7-carboxy-7-deazaguanine synthase OS=Campylobacter upsaliensis OX=28080 GN=queE PE=3 SV=1
MKVVESFLSIQGEGKFAGRLAVFVRFAGCNFNCVGFNVKKQKENRELVGCDTLRAVFTKEYQNTYENLNAKELFLRVLKMAKDLKPIIVITGGEPLLHHKKSEFLKFIKLLLEAKFEVHFETNASIRVDFKKYPLYKKCIFALGVKLSNSGVSKEKRLNYKALKAFKKEAKKSFYKFVLEEEFLSKAEEEIKEILSVVKNEVYCMPLGENEARLKKNALALVNFCLKNGYNYSDRTHIRLWGDKEGV

SEQ ID NO: 28766 - protein, 247 aa, Campylobacter upsaliensis
  misc_feature (1)..(247): tr|A0A3X8R3C1|A0A3X8R3C1_CAMUP 7-carboxy-7-deazaguanine synthase OS=Campylobacter upsaliensis OX=28080 GN=queE PE=3 SV=1
MKVVESFLSIQGEGKFAGRLAVFVRFAGCNFNCVGFNVKKQKEGRELVGCDTLRAVFTKEYQNTYENLNAKELFLRVLKMTKDLKPIIVITGGEPLLHHKKSEFLKFIKLLLEAKFEVHFETNASIRVDFKKYPLYKKCIFALGVKLSNSGVSKEKRLNYKALKAFKKEAKKSFYKFVLEEEFLSKAEGEIKEILSVVKNEVYCMPLGENETRLKKNALALVNFCLKNGYNYSDRTHIRLWGDKEGV

SEQ ID NO: 28767 - protein, 250 aa, Campylobacter ureolyticus
  misc_feature (1)..(250): tr|A0A2I1N8Q7|A0A2I1N8Q7_9PROT 7-carboxy-7-deazaguanine synthase OS=Campylobacter ureolyticus OX=827 GN=queE P E=3 SV=1
MSLNLVEVFHSIQGEGKYTGINAIFFRFAGCNLKCPGFNVVKISPKTGEALKGCDTIKAVFTSHFNYKKIDCVKTLLSKIPKLDYKPAIIITGGEPLIHHKNPIFYDFITEILHQGYEVHFETNGTIEIDFEKFPLYKNCIYAISTKLSISGETKEKRLNFKALNLLKQNTKECFYKFVISPDFNPNDEICEILNAIKDAKKSDVFCMPLAKNIDELKKNAKFAFNFCLENGYNYTDRVHIRIFNDKEGV

SEQ ID NO: 28768 - protein, 250 aa, Campylobacter ureolyticus
  misc_feature (1)..(250): tr|A0A0K1HHJ7|A0A0K1HHJ7_9PROT 7-carboxy-7-deazaguanine synthase OS=Campylobacter ureolyticus RIGS 9880 OX=103 2069 GN=queE PE=3 SV=1
MSLNLVEVFHSIQGEGKYTGTNAIFFRFAGCNLKCPGFNVIKISPKTGEALKGCDTIKAVFTSHFNYEKIECTKTLLSKIPKMYYKPAIIITGGEPLIHHKNPIFYDFISEILHQGYEVHFETNGTIEIDFEKFPLYKNCIYAISIKLSISGETKEKRLNFKALNLLKQNTKECFYKFVISPSFNPNDEICEILNDIKDAKKSDVFCMPLAKNIDELKKNAKFAFNFCLENGYNYTDRVHIRIFNDKEGV

SEQ ID NO: 28769 - protein, 249 aa, Campylobacter volucris
  misc_feature (1)..(249): tr|A0A5C8L0J0|A0A5C8L0J0_9PROT 7-carboxy-7-deazaguanine synthase OS=Campylobacter volucris OX=1031542 GN=queE PE=3 SV=1
MEIVETFLSIQGEGKYSGKLAIFVRFAGCNFNCVGFGVSKCKDDKIFVGCDTIRAVFVKEFASTYEKYNAKNLFEKINFLKKDFNPIVVITGGEPLIHYKNEEFIQFICLLLENNFCVHFETNASIELDFIKYSMYKDCYFALGVKLSNSGIIKEKRINQKALQNFKQYAKDSFYKFVLDENIILENKALIEIKEILQLCENEVFCMPMGSTQEEISKNALSVAEFCLKNGYNYSDRLHIRLWGDKEGV

SEQ ID NO: 28770 - protein, 249 aa, Campylobacter volucris
  misc_feature (1)..(249): tr|A0A5C7E1L0|A0A5C7E1L0_9PROT 7-carboxy-7-deazaguanine synthase OS=Campylobacter volucris OX=1031542 GN=queE PE=3 SV=1
MEIVETFLSIQGEGKYSGNLAIFVRFAGCNFNCVGFGVSKCKGDKIFVGCDTIKAVFVKEFASTYEKYNAKNLFEKINFLKKDFNPIVVITGGEPLIHYKNEEFVKFICLLLENNFCVHFETNASIELDFTKYSMYKDCHFALGVKLSNSGMIKEKRINQKALQNFKQYAKDSFYKFVLDENIILENKALMEIKEILQLCENEVFCMPMGNTQEEISKNALSVAEFCLKNGYNYSDRLHIRLWGDKEGV

SEQ ID NO: 28771 - protein, 254 aa, Campylobacteraceae bacterium
  misc_feature (1)..(254): tr|A0A1Y1RCF0|A0A1Y1RCF0_9PROT 7-carboxy-7-deazaguanine synthase OS=Campylobacteraceae bacterium 4484_4 OX=197 0775 GN=queE PE=3 SV=1
MIPLVEHFYSFQGEGKYAGTPSIFIRFGGCNLGCPGFNVESISPKDGSRLLGCDSIRAVKEAHFEEQWQKLTSSDELITIIKSYLKNLSFKPDIVFTGGEPLLYHQDPVLLETLEYFISRSHNVTIETNATILIDFDRYPIYKKITFAMSVKLSNSGEPYEKRIRPDTIRAICTHTKDSFFKFVLSKESLYESAKEIEEIRRLCPDIPVYCMPMGATAGELAKNDRAVAEFCIRHGYRYIDRMHIRLWDNEEGR

SEQ ID NO: 28772 - protein, 252 aa, Campylobacterales bacterium
  misc_feature (1)..(252): tr|A0A258X362|A0A258X362_9PROT 7-carboxy-7-deazaguanine synthase OS=Campylobacterales bacterium 16-40-21 OX=19 70501 GN=queE PE=3 SV=1
MLQLVEHFYSIQGEGKYTGVPSLFFRFGGCNLTCPGFGCRETAPDGTEVVGCDTAYAVDRKAFGELWQEVEELQTLIWIMNSYRLPPHVDIVLTGGEPLIYANEPVFVEFIDYLVAQGHRVTFETNATITPDFIRYPFYKEAVYALSVKLSNSGEPYDKRVKLEVLDWIIANTKGSFFKFTVDEPSLVSHIEAEIDEIIAKYPTTPVYCMPLGGDKSHIEANCEAVIEFCKRRGFIYSDRLHIRIWDQNHGV

SEQ ID NO: 28773 - protein, 218 aa, Scalindua sp.
  misc_feature (1)..(218): tr|A0A286TUL6|A0A286TUL6_9BACT 7-carboxy-7-deazaguanine synthase OS=Candiadtus Scalindua japonica OX=1284222 G N=queE PE=3 SV=1
MSKKEHHIRVNEIFKSIQGESTYAGIPCVFVRLTGCNLRCSYCDTTYAYNKGIEMSLSDIIGTINSYECRNVCITGGEPLLQENINNLINLLYKDSFNIYIETNGSLNIDTLPEGVVRIVDIKCPDSRMEPEIDWKNIKRLRQKDEVKFIISSKSDYEWAKGITKKHKIADRTTVLFGFVYGKLKPKTLAGWILKDGLDVRLHLQLHKIIWPDKIRGV

SEQ ID NO: 28774 - protein, 263 aa, Zixibacteria bacterium
  misc_feature (1)..(263): tr|A0A1F4YP86|A0A1F4YP86_9BACT 7-carboxy-7-deazaguanine synthase OS=candidate division Zixibacteria bacterium RBG_16_53_22 OX=1802787 GN=queE PE=3 SV=1
MFGKNMVAKNLGSLNGASLSVKEIFGSIQGEGSSAGCPAVFVRLAGCNLRCHFCDTDFESDAETLLVTDILCRVAEAAIYMGAPTVPLVVITGGEPLRQNITQLVKGLLENSIRVEVETAGTIMPPELAESLATFYRTGDFRLICSPKTPDINLLVALYCDTYKYVVQVGDGCFDEGTPCSNTQYKGGKREQLYHPGGAKWVSIFVQPMEEYKDAGWFDLLLGRERRAPDDEKTLANHAYAVKIAQRYGYRVSIQIHKLLGLP

SEQ ID NO: 28775 - protein, 230 aa, Unknown
  misc_feature (1)..(230): tr|A0A1F4U5I7|A0A1F4U5I7_9BACT 7-carboxy-7-deazaguanine synthase OS=candidate division WOR-1 bacterium RIFOXYC 2_FULL_46_14 OX=1802587 GN=queE PE=3 SV=1
MSGAQLHEIFSSIQGEGLYVGDRQLFIRFSGCNLSCDYCDSKEALTLQPQFKVEDKKIDNPVTAEKLLEIVSSFTKNKNLHSAISITGGEPLLQVDFLAKFLPELKIPVYLETNGTLPNHLSEIINHVNIISMDFKAGHAKEHFHFMEIAYTSGKELFVKFPVGPEVTTKDIDEAAGLISQISPLIPLVLQPLHPIKIKKDQLLSFQAVAKRKLERVKIIPQVHKILHMF

SEQ ID NO: 28776 - protein, 217 aa, Abyssubacteria bacterium
  misc_feature (1)..(217): tr|A0A3A4NVM1|A0A3A4NVM1_9BACT 7-carboxy-7-deazaguanine synthase OS=Candidatus Abyssubacteria bacterium SURF_5 OX=2093360 GN=queE PE=3 SV=1
MSLKINEIFFSIQGEARYAGFPCAFVRLTGCNLRCAYCDTRYAYDEGREMSLDQIQRALGRYPARLVEITGGEPLLQAETPQLITRLADDGYTVLLETNGTVSIEAVDSRAVIIMDIKCPDSGMADRTLWENIDILKPADEVKFVIGSRADYTWALDVIDRYRLAERHAVILSPAAGILEPRELAEWMLASPETARGNIRLQLQLHKLIWPHVERGV

SEQ ID NO: 28777 - protein, 219 aa, Abyssubacteria bacterium
  misc_feature (1)..(219): tr|A0A419EQ88|A0A419EQ88_9BACT 7-carboxy-7-deazaguanine synthase OS=Candidatus Abyssubacteria bacterium SURF_1 7 OX=2093361 GN=queE PE=3 SV=1
MKIHEIFFSIQGESSHAGVPCAFVRLTGCNLRCSYCDTRHAYEEGDEMTAEQVIERVGRFRAPLVEVTGGEPLLQPETPALVMALADRCYKVLIETNGSLPLKGIDERATVIMDLKCPGSGMSEHMLWENLDALRPHDEIKFVLTDRYDYDWALDIIKTHRLSERHVVHLSPAYGMLEPAELAAWMLEPLTDEALARGLNVRFQLQLHKYIWPGVERGV

SEQ ID NO: 28778 - protein, 219 aa, Accumulibacter sp.
  misc_feature (1)..(219): tr|A0A080M639|A0A080M639_9PROT 7-carboxy-7-deazaguanine synthase OS=Candidatus Accumulibacter sp. SK-02 OX=145 3999 GN=queE PE=3 SV=1
MKATARPLALKISEIFVSLQGESSRVGLPSVFIRLTGCPLRCVWCDTTYAFNGGQTMSLPEILAEVAHHALPHVCVTGGEPLAQPACLPLLSELSEAGHAVSLETSGALDIGGVDPRVSRIVDLKAPGSGEFHRNRWQNLALLTANDELKLVLKDRADYEWARQLIVDRQLAALCPVLLSPVEGELPAVTLADWILADRLPVRFQLQLHKVLWGKMRGR

SEQ ID NO: 28779 - protein, 219 aa, Accumulibacter aalborgensis
  misc_feature (1)..(219): tr|A0A1A8XFG6|A0A1A8XFG6_9PROT 7-carboxy-7-deazaguanine synthase OS=Candidatus Accumulibacter aalborgensis OX= 1860102 GN=queE PE=3 SV=1
MNASLRPLSLKISEIFLSLQGETSRAGLPTVFVRLTGCPLRCVWCDTAYAFSGGQTISLPEIIEQVACHGVNHVCVTGGEPLAQPACLPLLSALSDAGYAVSLETSGALDVAEVDARVSRIVDLKAPGSGEFGRNRWQNLALLTANDELKFVLKDRADYEWARQLVLDRRLAALCPLLFSPVDGELPAATLADWILADRLPVRFQLQLHKLLWGNIRGK

SEQ ID NO: 28780 - protein, 225 aa, Acididesulfobacter guangdongensis
  misc_feature (1)..(225): tr|A0A519BIW1|A0A519BIW1_9DELT 7-carboxy-7-deazaguanine synthase OS=Candidatus Acididesulfobacter guangdongens is OX=2597225 GN=queE PE=3 SV=1
MSKIKNNDEFILKVNDIFYSIQGESSFAGSPCFFVRLAGCNIRCPYCDTKEALTDTNAKLMHISDIITEIIKYGENVKLAEITGGEPLIQEGVYELMKRFLNLKYTVLVETNGTLSLKSIPDEVIKIMDIKCPSSGYADYNNVENLNYINKNDELKFIIGNIADYEFAKNFININRKIIKTEKIIFSAVDVAENQFSSHILAEKILSDRLNVKIGLQLHKFLDLK

SEQ ID NO: 28781 - protein, 222 aa, Acididesulfobacter diazotrophicus
  misc_feature (1)..(222): tr|A0A519BK86|A0A519BK86_9DELT 7-carboxy-7-deazaguanine synthase OS=Candidatus Acididesulfobacter diazotrophic us OX=2597226 GN=queE PE=3 SV=1
MNKIINNDDFFLKINDIFYSIQGESSFAGYPCFFVRLAGCNIKCPYCDTKEALTDINAKLFHISDIINEIITYGKNIKLVEITGGEPLMQSGVYELINRLLNLKYTVLLETNGTLSLKNVPDKVVKIMDVKCPSSGFEDYNNYKNLNFINKNDELKFVIGSNEDYEFAKNFINANKNVINTEKIIFSPVENHFAPHILADKILFDKLNVRIGLQLHKILNLK

SEQ ID NO: 28782 - protein, 210 aa, Acidulodesulfobacterium ferriphilum
  misc_feature (1)..(210): tr|A0A519BDQ4|A0A519BDQ4_9DELT 7-carboxy-7-deazaguanine synthase OS=Candidatus Acidulodesulfobacterium ferriph ilum OX=2597223 GN=queE PE=3 SV=1
MLFVNDIFYSIQGESSFAGYPCKFVRLAGCNLKCSYCDTEEALTTENSRKLSVSEIVNDLSKIGGKIRLVEITGGEPLIQEAVYGLFDELIKLNYTVLLETNGSIDLKSVPGHVVKIVDIKCPSSGFSHKNNYKNLDYITATDELKFVIGTEDDYAFAKDFLKNNLIKTSKIIFSAAFAAMPSKDLALKILKDELNVRLGIQLHKVLQLK

SEQ ID NO: 28783 - protein, 199 aa, Aegiribacteria bacterium
  misc_feature (1)..(199): tr|A0A1V4MZ32|A0A1V4MZ32_9BACT 7-carboxy-7-deazaguanine synthase OS=Candidatus Aegiribacteria bacterium MLS_C OX=1775674 GN=queE PE=3 SV=1
MPYRIKEMVHTIQGEGSNAGRVVVLCRFEGCNLSCDFCDTDHEGIDGPGGGEFGTGVEVAERAVSLWRGGPGMKAVLCTGGEPLLQLDAPLVEEFHRRGFSVLVETNGTLPLPTGVDFVCVSPKAPVLPVIRSGDELKLPFPLPGCDPGIFLGLDFRHFFIQPVWGRNYASSMRKAVEYCMEHPEWRISMQMHRYLGIP

SEQ ID NO: 28784 - protein, 269 aa, Amesbacteria bacterium
  misc_feature (1)..(269): tr|A0A0G1RH99|A0A0G1RH99_9BACT 7-carboxy-7-deazaguanine synthase OS=Candidatus Amesbacteria bacterium GW2011_G WA2_47_11 OX=1618357 GN=queE PE=3 SV=1
MKLLETDYRPTPEDKARIKILSDMFKVSGDGVFATLQGEGLTTKEGGTAGLPVVFLRLHFCNLTCGFPTGWQCDTRYTWNPRMEEFWKEPRDWSINQTAVNIRQAWRQNHPQIETGHRLVISGGEPLLQQGKIVELIRELSEFEIEIETNGTILPLPELEDCQFNCSPKLSGSGNSRKRRFHPDVITHIARLQKSWLKFVVTDLAELNEIRTIQQECQIPNEKIIVMPQGRSWESIQAQAQLLEPSVSERNWHIGYRHQLNWFGDQRGT

SEQ ID NO: 28785 - protein, 269 aa, Amesbacteria bacterium; identical to SEQ ID NO: 28784
  misc_feature (1)..(269): tr|A0A1F5A1Q7|A0A1F5A1Q7_9BACT 7-carboxy-7-deazaguanine synthase OS=Candidatus Amesbacteria bacterium RIFOXYD1 _FULL_47_9 OX=1797267 GN=queE PE=3 SV=1

SEQ ID NO: 28786 - protein, 189 aa, Aminicenantes bacterium
  misc_feature (1)..(189): tr|A0A1F5BYL0|A0A1F5BYL0_9BACT 7-carboxy-7-deazaguanine synthase OS=Candidatus Aminicenantes bacterium RBG_19F T_COMBO_58_17 OX=1797275 GN=queE PE=3 SV=1
MRQGEPTVFVRLAGCDRRCSFCDTKYAWEGGEDYAVDRIIENVQRIRRRFPVRWVCLTGGEPFMQDVRLLVRLLKRDNCRVQMETNGTRYYATAADWLTVSPKPKGYLVRPEFQRLAKEVKLVVNRELDLAVIRRIRTAFPGRTPVLLQPESNRRWSQKRALRLLKEAAAAHLDNIRISVQLHKIIGLR

SEQ ID NO: 28787 - protein, 225 aa, Aminicenantes bacterium
  misc_feature (1)..(225): tr|A0A524GND7|A0A524GND7_9BACT 7-carboxy-7-deazaguanine synthase OS=Candidatus Aminicenantes bacterium OX=2052 149 GN=queE PE=3 SV=1
MFIAETFTSLQGEGVLVGVPSFFIRTSGCNLRCRWCDTPYTSWLPEGDRRSLEDLVAEARASGVKHAVVTGGEPLLQREIGLLTRELRAAGLHVTVETAATVAPDFDCDLLSVSPKTANSDPQGVWRERHRRLCADREPLRSLLHRFPEYQIKFVVAEPDDLAEVLAVLEEIGGIDASRVLLMAEGRDAAEVAVKAGVVADLCSEHGFRYTPRLHLDLFGAGRGV

SEQ ID NO: 28788 - protein, 183 aa, Amulumruptor caecigallinarius
  misc_feature (1)..(183): tr|A0A4Q0U787|A0A4Q0U787_9BACT 7-carboxy-7-deazaguanine synthase OS=Candidatus Amulumruptor caecigallinarius O X=2109911 GN=queE PE=3 SV=1
MKQYRVNEIFYSLQGEGVHTGLPAVFVRFSGCNKRCGFCDTDFAAFTLMSAADIVAAVMHYPSDTVILTGGEPALQIDDALVVALHDAGRRIHVETNGSLPLPSGIDWVTCSPKDRDIRLLHADEVKVVFTGDDPQWAAELFDGAVLSLQPMSCLNTAATVDYIKSHPWWRLSLQTHKLIDIP

SEQ ID NO: 28789 - protein, 219 aa, Aquarickettsia rohweri
  misc_feature (1)..(219): tr|A0A429XSK2|A0A429XSK2_9RICK 7-carboxy-7-deazaguanine synthase OS=Candidatus Aquarickettsia rohweri OX=26025 74 GN=queE PE=3 SV=1
MFGTNAKLPFEKGDGNSLKIHSIFETIQGEGPYCGHQAIFVRLSGCNLACKFCDTDFDDYKLLLNTDILNKIKSFNQIKPLIVITGGEPFRQNISQLCTLLIQNNYKIQLETNGTLYSNIPKQVELVCSPKISNGKYSLIRDDILKQAIAIKFLISSNNISYSDISEVGQTKHNIPVYVQPMDEYNDKINHKNIILAQKIAKKHKAILSLQIHKILNID

SEQ ID NO: 28790 - protein, 209 aa, Atelocyanobacterium thalassa
  misc_feature (1)..(209): tr|A0A086CGF0|A0A086CGF0_9CHRO 7-carboxy-7-deazaguanine synthase OS=Candidatus Atelocyanobacterium thalassa is olate SIO64986 OX=1527444 GN=queE PE=3 SV=1
MEKSIQLNKNDLTTYPIAEIFHSIQGEGAWTGVSAFFIRLAGCNVGCPWCDQKESWKHKTFPKYSSKTLAIEAHKANASIIVITGGEPLMYNLFPLTNALQNLGMQVHLETSGSYPFSGNFDWITLSPKPFKIPHESIYDKASELKVIVANQKDFDWAEEQKNKTNSQSINFLQPEWNSDISSSLIYNYIRKHPEWRISLQTHKFLGIR

SEQ ID NO: 28791 - protein, 126 aa, Atribacteria bacterium
  misc_feature (1)..(126): tr|A0A1V5SVG5|A0A1V5SVG5_9BACT 7-carboxy-7-deazaguanine synthase OS=Candidatus Atribacteria bacterium ADurb.Bi n276 OX=1852833 GN=queE PE=4 SV=1
MKSIKLIECMNFTWQAEGDDCGKKMLLTRFKYCNRAHGYLEENGLHPCPFCDTITKMKIETESDYYIKDLQMMIEENNLALMISGGEPGFGLNLQSNGQSRRVHRYRQLLKPHSSREERVERFQNR

SEQ ID NO: 28792 - protein, 214 aa, Aureabacteria bacterium
  misc_feature (1)..(214): tr|A0A3A4R4B4|A0A3A4R4B4_9BACT 7-carboxy-7-deazaguanine synthase OS=Candidatus Aureabacteria bacterium SURF_26 OX=2093366 GN=queE PE=3 SV=1
MIFSVNEVFYSIQGESRFAGYPCVMVRFSGCNLSCSYCDTAYARDEAEEWDFNRLMESIDQFQCPLVELTGGEPLLQTNIQFLTEQLILKGYRVLIETNGSCDINTISPKVIFIMDVKCPGSGHTNVFCEKNLSYIKTDDELKFVLSGRSDYDWAKNFISHYGLWGKVNILFSPVWNKLNIRDLATWMLSDRLYSARLQLQLHKLIWGPDKRGV

SEQ ID NO: 28793 - protein, 221 aa, Azambacteria bacterium
  misc_feature (1)..(221): tr|A0A350QJJ1|A0A350QJJ1_9BACT 7-carboxy-7-deazaguanine synthase OS=Candidatus Azambacteria bacterium OX=20535 11 GN=queE PE=3 SV=1
MYKVNEIFETIQGEGSFTGAPAIFVRLQGCPVGCAWCDTKHTWTVNPDLQVAPQTLMAKSAETEQWSTFTAEQLLALFQENGYQAKHVVITGGEPCMYDLNPLCDTLHAVGYQTQIETSGTFEILVPSKSWVTVSPKVNMKGGYKVLQSALDRANEIKHPVAMDKHIEQLLQLLKQTDIGSKLIYLQPISQQAKATALAIAYCKKHNWRLSVQVHKYLGIE

SEQ ID NO: 28794 - protein, 264 aa, [Bacteroides] periocalifornicus
  misc_feature (1)..(264): tr|A0A0Q4AXQ4|A0A0Q4AXQ4_9BACT 7-carboxy-7-deazaguanine synthase OS=Candidatus [Bacteroides] periocalifornicus OX=1702214 GN=queE PE=3 SV=1
MPTKTLYLAPEGIFPLVGRTSGLTSLGLPFGGTLQGEGLLAGMPSLFIRLAGCNLRCTWTGHGGRTIACDTPQALAVSHGRGSTISELIGTLEGALGALTHLVITGGEPLTQAEGLVTLLKAIRQSPTLRLLHITLETNGTLFNAEVAKSVDLVSLSPKWNATPQGFSSRYIHVLQCWLDAKVLPNSLQLKFVVGSKEDEDQIANDILPHLNLCHHPPILVMPLGATPEELRLSAPYAVAAAIRQNWRFCPRLQVELWGNRAGT

SEQ ID NO: 28795 - protein, 223 aa, Baumannia cicadellinicola
  misc_feature (1)..(223): tr|A0A088MXV7|A0A088MXV7_9GAMM 7-carboxy-7-deazaguanine synthase OS=Candidatus Baumannia cicadellinicola OX=18 6490 GN=queE PE=3 SV=1
MQYPLNEICQTLQCEGYFTGVPAIFIRLQGCAVGCSWCDTQYTWHQNTMKQVTAEEMMLKKAHSCDWASLSTEDIIAIITQRGWTAIHVVITGGEPCMHDLLPLTYTLEQQKFRCQIETSGTQEIRCTPQTWVTVSPKINMRCGFQVLAQALSRSNEIKHPVARQRDIENLDKLLQTLNDGKQRVIALQPISQKKAATRLCINTCIARNWRLSIQLHKYINIS

SEQ ID NO: 28796 - protein, 240 aa, Beckwithbacteria bacterium
  misc_feature (1)..(240): tr|A0A1J5AZI5|A0A1J5AZI5_9BACT 7-carboxy-7-deazaguanine synthase OS=Candidatus Beckwithbacteria bacterium CG2_ 30_44_31 OX=1805035 GN=queE PE=3 SV=1
MPNMLKVSGDQVFATFQGEGITAGQPAVFLRLHYCNLACSWCDTKYTWDKTRKEFWQEPIDWSYPEAVTKIKAAWLQKFGLKTPDSKKRLVITGGEPLLQQAKIVKLLQFLPNWRVEIETNGTIIPLAELSNCQINCSPKLENSGNLLSLRFKSEVLKQINSLPNSWFKFVVVKAKDLEEIDEIVTCCALNPEKILIMPEGYTVETISEHLIQVKTEVQKRKWRVIQRNQIIWYGNKRRT

SEQ ID NO: 28797 - protein, 238 aa, Berkelbacteria bacterium
  misc_feature (1)..(238): tr|A0A554JAS8|A0A554JAS8_9BACT 7-carboxy-7-deazaguanine synthase OS=Candidatus Berkelbacteria bacterium Gr01-1 014_85 OX=2017150 GN=queE PE=3 SV=1
MSSLIQPSLAHLVVSGDGAFYTLQGEGATLGMPAVFLRLHHCNLDCNWCDAAYTWNRQLPAFVTERQKWTVETTAKRVQSLGANHCKRLVITGGEPLLQQRSIIQLLRYLPDWNIEFETNGTIKPVEQLCYCQFNCSPKLANSGIELARRFKPEVLAVINQLPKSWFKFVVTGPDDILEMEETYRPYIDAKKIILSPEGTDVATIHAVQRSVVELALSRGYRLTPRLHIELWGNERRK

SEQ ID NO: 28798 - protein, 211 aa, Brocadia sapporoensis
  misc_feature (1)..(211): tr|A0A1V6M088|A0A1V6M088_9BACT 7-carboxy-7-deazaguanine synthase OS=Candidatus Brocadia sapporoensis OX=392547 GN=queE PE=3 SV=1
MKINEIFKSIQGETSYAGLPCTFIRITGCNIRCSYCDTTYAYEEGTEMPIGSILEHVAEFKTKLACITGGEPLSDKDTPSLIEELLSINYTILVETNGSYDIRMIPQKAIKIMDIKCPDSGTSHLMHWQNVRYLTKRDEVKFVLHSRNDYEWAKNVIAEYRLSEVAQVLIGTVFNALPPRTVVQWILEDNLPVRFQLQLHKYIWDPQTRGV

SEQ ID NO: 28799 - protein, 211 aa, Brocadia caroliniensis
  misc_feature (1)..(211): tr|A0A1V4AV16|A0A1V4AV16_9BACT 7-carboxy-7-deazaguanine synthase OS=Candidatus Brocadia caroliniensis OX=10041 56 GN=queE PE=3 SV=1
MKINEIFKSIQGETSYAGLPCTFIRITGCNLRCSYCDTTYAYDEGTEMPISSILERVARYKTKLICITGGEPLADKDTPALINELLFGNYTVLVETNGSYDIRAIPQRAIKIMDIKCPDSKMSHLMHWQNIAYLTKSDELKFVLHSRGDYEWAKEVIEKYRLSEITKILIGTVFDILSPRMVAQWILEDNLNVRFQLQLHKYIWDPQTRGV

SEQ ID NO: 28800 - protein, 218 aa, Brocadiaceae bacterium
  misc_feature (1)..(218): tr|A0A5C6D564|A0A5C6D564_9BACT 7-carboxy-7-deazaguanine synthase OS=Candidatus Brocadiaceae bacterium S225 OX= 2528033 GN=queE PE=3 SV=1
MNKKEPLLRINEIFVSIQGESSYAGIPCIFVRLTGCNLRCSYCDTVYAYNEGSLMSLDEILQRVNGYESGNVCITGGEPLLQENISKLINLLKKNHYNVYIETNGSMNIDVLPKGIVRIVDIKCPGSGMEQEMDWQNIKRLKNKDEVKFIISSKEDYEWAKGITMKYKIRDTATVLFGLVHEKLKSKTLAGWILKDGLDVRLQLQLHKIIWQDKARGV

SEQ ID NO: 28801 - protein, 211 aa, Brocadiaceae bacterium
  misc_feature (1)..(211): tr|A0A5C6F385|A0A5C6F385_9BACT 7-carboxy-7-deazaguanine synthase OS=Candidatus Brocadiaceae bacterium B188 OX= 2528032 GN=queE PE=3 SV=1
MKINEIFKSIQGETSYAGLPCTFIRITGCNLRCSYCDTTYAYEKGTAMPIGSILERVAGFKTKLVCITGGEPLSDKDTPSLIEELLSINYTILVETNGSYDIRMIPQKAIKIMDIKCPDSGASHLMHWQNIRYLTKRDEIKFILCSRDDYEWAKGVIAEYRLSEVAQVLIGTVFNALPPRTVVQWILEDNLPVRFQLQLHKYIWDPQARGV

SEQ ID NO: 28802 - protein, 210 aa, Burkholderia pumila
  misc_feature (1)..(210): tr|A0A0J7JGP6|A0A0J7JGP6_9BURK 7-carboxy-7-deazaguanine synthase OS=Candidatus Burkholderia pumila OX=1090375 GN=queE PE=3 SV=1
MTYAVKEIFYTLQGEGANAGRPAVFCRFAGCNLWSGREEDRAEALCQFCDTDFVGTDGENGGKYRTPADLVGMIAALWPEGEANKFVVCTGGEPMLQIDQPFVDALHEAGFEIAIETNGSLPVDESIDWICVSPKADAPLVVTKGHELKVVVPQDNQHLSELEKLDFEYFLVQPMDGPSRDINTKLAIDWCKRHPKWRLSMQTHKYLNIS

SEQ ID NO: 28803 - protein, 210 aa, Burkholderia verschuerenii
  misc_feature (1)..(210): tr|A0A0L0M798|A0A0L0M798_9BURK 7-carboxy-7-deazaguanine synthase OS=Candidatus Burkholderia verschuerenii OX=2 42163 GN=queE PE=3 SV=1
MTYAVKEIFYTLQGEGANAGRPAVFCRFAGCNLWSGREEDRAEAVCQFCDTDFVGTDGENGGKYRTPADLVAMIASQWPEGEANKFVVCTGGEPMLQIDQPFVDALHDAGFEMAIETNGSLPVLESIDWICVSPKADAPLVVTKGNELKVVVPQDNQRLAELEKLDFEYFLVQPMDGPSRDINTKLAIDWCKRHPKWRLSMQTHKYLNIP

SEQ ID NO: 28804 - protein, 209 aa, Chryseobacterium massiliae
  misc_feature (1)..(209): tr|A0A3D9BFL6|A0A3D9BFL6_9FLAO 7-carboxy-7-deazaguanine synthase OS=Candidatus Chryseobacterium massiliae OX=2 04089 GN=queE PE=3 SV=1
MNLTEEILLKEGKMLPVMEHFYTLQGEGAHTGKAAYFIRLGGCDVGCHWCDVKESWDPNLHPLMNAADIAETAAKHCKTIVLTGGEPLMWNLDILTGKLKELGCSIHIETSGAYPMSGQIDWITLSPKKTGLPKEEIYTKAHELKVIVFNNNDFKFAEEQASKVSKNCTLYLQSEWSKRDDMYPKITDFILENPEWRASVQTHKYLNIP

SEQ ID NO: 28805 - protein, 210 aa, Cloacimonas sp.
  misc_feature (1)..(210): tr|A0A1V4R5W6|A0A1V4R5W6_9BACT 7-carboxy-7-deazaguanine synthase OS=Candidatus Cloacimonas sp. 4484_140 OX=195 6163 GN=queE PE=3 SV=1
MELSEIFYSLQGESSYAGLPCVFVRLAGCNLRCTYCDTKYAYEPKFLLSIDEILKKVEKYYPVKLIEITGGEPLLQADSIELMKLLINKKYDVLLETNNSISLKDIPQEVIKIVDFKTPSSGMCNSILWDNIKYFNGNDELKFVIADRQDFDWSLGIINKYDLIKHHILFSPVYEKLDRKELAEWIIETKLPIRLNIQLHKLLWGDSRGA

SEQ ID NO: 28806 - protein, 144 aa, Cloacimonas sp.
  misc_feature (1)..(144): tr|A0A3C1LMT5|A0A3C1LMT5_9BACT 7-carboxy-7-deazaguanine synthase (Fragment) OS=Candidatus Cloacimonas sp. OX=2 053534 GN=DCQ12_04730 PE=3 SV=1
MLQVIEVFASLQGESSYAGLPCVFIRLSGCNLRCNYCDTDYAFEGGEWLSVEQILSQVKKYGIPLVEVTGGEPLQQKESIQLMQALVKSGYQVLLETNGSLSIADVPAEVIRIIDYKLRGSGEGGSFAEANYQLLGDGGEIKFV

SEQ ID NO: 28807 - protein, 212 aa, Cloacimonetes bacterium
  misc_feature (1)..(212): tr|A0A1W9VQX9|A0A1W9VQX9_9BACT 7-carboxy-7-deazaguanine synthase OS=Candidatus Cloacimonetes bacterium 4572_65 OX=1972455 GN=queE PE=3 SV=1
MIQLIEIFCSVQGESSYVGYPCIFIRLAECNLRCNYCDTKYSYIADYSLSVEAIIEEVKRYHPIKLVEITGGEPLLQKEVYSLITQLERENFKVLLETNGSLPLDAVSKTVHKIVDVKCPDSGSKDSFCPSNLHTLNETDELKFVISSYDDYLWSKSYVIENNLLNSNVLFSAVFEKVEPKVLVDWIIQDRLNVRFQLQIHKYIWNPNKKGV

SEQ ID NO: 28808 - protein, 209 aa, Cloacimonetes bacterium
  misc_feature (1)..(209): tr|A0A2N2KZY2|A0A2N2KZY2_9BACT 7-carboxy-7-deazaguanine synthase OS=Candidatus Cloacimonetes bacterium HGW-Clo acimonetes-2 OX=2013734 GN=queE PE=3 SV=1
MMVTLEICEIFYSLQGESTYAGYPCIFIRLADCNLDCLYCDTRYSHAPGKRMTIPEIISEVQKYPAKLVELTGGEPVLQDEITELISALNELDYKILLETNGSLYLGEIQDYVIKIVDVKCPGSGEGESFMKWNMKFLKEHDELKFVLSTFYDYQFALKFIEDNALWGKTIHFSPVSRFLKAEDLALWILRDGLNVRLQLQLHKLLNIQ

SEQ ID NO: 28809 - protein, 240 aa, Coatesbacteria bacterium
  misc_feature (1)..(240): tr|A0A1W9S0F2|A0A1W9S0F2_9BACT 7-carboxy-7-deazaguanine synthase OS=Candidatus Coatesbacteria bacterium 4484_9 9 OX=1970774 GN=queE PE=3 SV=1
MGRKAYITEIFNSIEGEGLKVGTLSLFIRFAGCNLRCPPCDTQYAWEKKPEMCTIYLRKGEKKIKNPIDISTLIDIIFDYKSVERLVLTGGEPLLNAGYIEELAEQLQYDRDICVETNSTIPQGLARVITSISEVSCDIKLKSVWGLEQDTQRLKRFLKIAKKRLVWVKCVVKPDTPPREIEGVSQVVASVSPIIPLILHPMDNSGDFNLDTIATMIRGGLKHLKEVRFLPRIHRTLGLR

SEQ ID NO: 28810 - protein, 215 aa, Competibacteraceae bacterium
  misc_feature (1)..(215): tr|A0A3S0VV66|A0A3S0VV66_9GAMM 7-carboxy-7-deazaguanine synthase OS=Candidatus Competibacteraceae bacterium OX =2053538 GN=queE PE=3 SV=1
MRYSVKELFYTLQGEGAWSGRPAVFCRFVGCNLWSGREVDREKAICRFCDTEFVGADGPGGGKFATAEALASAIAARWPASQLPQARPYVVCTGGEPLLQLDDALIVALHDRGFAVAVETNGTLLAPLDLDWICVSPKANAPLRITHGDELKLVYPQAEPEAQPERFTDLTFRHFFLQPLDGPDLERHTQATIAYCLANPQWRLSLQTHKLLGIP

SEQ ID NO: 28811 - protein, 215 aa, Competibacteraceae bacterium
  misc_feature (1)..(215): tr|A0A433ILA2|A0A433ILA2_9GAMM 7-carboxy-7-deazaguanine synthase OS=Candidatus Competibacteraceae bacterium OX =2053538 GN=queE PE=3 SV=1
MSYAVKELFYTLQGEGAQAGRPAVFCRFAGCNLWSGREIDRAAAICRFCDTDFIGTDGPGGGRFATAAQLAQAIAGHWPATTLPGAQPYVVCTGGEPLLQLDAPLIEALHMAGFTVAVETNGTLPAPPGLDWICVSPKAGAPLRLTRGDELKLVYPQIEPEAQPTRFIDLDFRYFFLQPLDGSEREVHTQAAVAYCLAHPQWRLSLQTHKLLGIP

SEQ ID NO: 28812 - protein, 235 aa, Contendobacter odensis
  misc_feature (1)..(235): tr|A0A2G6PFM7|A0A2G6PFM7_9GAMM 7-carboxy-7-deazaguanine synthase OS=Candidatus Contendobacter odensis OX=14008 60 GN=queE PE=3 SV=1
MDKLIKISEIFGPTLQGEGVLIGQSTVFVRTGGCDYRCSWCDTPYAVKCEYRRDWVSMSAEQIFEEVSALSCGKPLMVSLSGGNPAIHPLQPLIDIGHTQGYRFGLETQGSVAQDWFKTLDVLTLSPKPPSSTMETDWKKLDDCIAAANGIPKTVLKMVVLDEEDYRYTREVASRYPALPVYLQPGNHKTEGDADLEGLNQRLLWLASRVNADQWFNVTILPQLHVLLWGNKRGV

SEQ ID NO: 28813 - protein, 216 aa, Cyclonatronum proteinivorum
  misc_feature (1)..(216): tr|A0A345UKQ8|A0A345UKQ8_9BACT 7-carboxy-7-deazaguanine synthase OS=Candidatus Cyclonatronum proteinivorum OX= 1457365 GN=queE PE=3 SV=1
MFLSGEQMISGTDVKDFDSVEYPIMEHFYTIQGEGAHSGRAAYFIRTAGCDVKCWWCDVKDSWDASKHPRLKTGMVADLAKASGAAFVVVTGGEPLLHDLLPLTSSLKARGLEVHIETSGSSPLSGQLDWITLSPKRFKKPVDEIYPYVDELKVVVLTKKDLTWAEEHAAKCPVGTRLLLQPEWDTPKSMPLIVDYVKANPQWGISLQTHKFLNVP

SEQ ID NO: 28814 - protein, 219 aa, Dactylopiibacterium carminicum
  misc_feature (1)..(219): tr|A0A272EQP9|A0A272EQP9_9RHOO 7-carboxy-7-deazaguanine synthase OS=Candidatus Dactylopiibacterium carminicum OX=857335 GN=queE PE=3 SV=1
MSSPRSSTRLRISEIFHSLQGESTRVGLPTVFVRLTGCPLRCVWCDTEYAFTGGQIRTLDDVLQEVAGHGAHYVCVTGGEPLAQKSCLVLLTALCDAGYSVSLETSGALDVADVDPRVSKIMDLKAPGSGEVSKNRLTNLAHIGLADEIKMVLADEADYLWAREMIATHRLSERCSVLVSPVQGKLDPQDLAAWVLRDRLAVRMQLQMHRIIWGERTGV

SEQ ID NO: 28815 - protein, 213 aa, Dadabacteria bacterium
  misc_feature (1)..(213): tr|A0A1F5IT46|A0A1F5IT46_9BACT 7-carboxy-7-deazaguanine synthase OS=Candidatus Dadabacteria bacterium RIFCSPHI GHO2_12_FULL_53_21 OX=1797756 GN=queE PE=3 SV=1
MNISEIFYSIQGEGVEIGLPTVFVRLFACDLRCSWCDTMYAVEGRDFKKMTVGEIRAGIAGFGCRRVCITGGEPLIQKDEAGELTEYLIKDGYRVVLETSGHKLPPPVFWTENCIISMDCKCPGSGMQERMDFGLFQKLRPQDQLKFVIADEADYEYAKQILSKYTIKANIIFQPAGGQGLGWLPERVIGDNLERVRVLPQLHKLIWGDKRGV

SEQ ID NO: 28816 - protein, 214 aa, Dadabacteria bacterium
  misc_feature (1)..(214): tr|A0A520V6S0|A0A520V6S0_9BACT 7-carboxy-7-deazaguanine synthase OS=Candidatus Dadabacteria bacterium OX=20803 03 GN=queE PE=3 SV=1
MKLKVSEIFCSIQGEGLDVGSPNIFLRLFGCNLRCSWCDSMYAVEGNDYENLSLDIILAKIRDLKYKKICITGGEPLLQQKTLVVLVENLLKDDYKIILETAGHIKPEGIFEDPNVLISMDCKCPESNMVDKSNISILKTLSNKDQIKFVIKDKSDYTFAKKIVLKEKFNAEVIFQPVYGSDSRLLVKHILEDKLNVRFVPQVHKFIWGDIKGV

SEQ ID NO: 28817 - protein, 217 aa, Deianiraea vastatrix
  misc_feature (1)..(217): tr|A0A5B8XI86|A0A5B8XI86_9RICK 7-carboxy-7-deazaguanine synthase OS=Candidatus Deianiraea vastatrix OX=2163644 GN=queE PE=3 SV=1
MFGKNPKRPPENTDGSLLFVQEIFPTIQAEGIFAGRPAIFIRLGGCNLACSFCDTEFENFSQMSLEDILAQVQKHQVQYSKINLIVITGGEPMRQNIIPLCNKLHKNFTVQIETNGTIYRNLPDFVKVICSPKIVNGKYTIPADGLQIDALKFLISASLEHYNKIPDWAFDFKEIFIQPMDEQDAQKNAANNALAVKIAMENNLKLSIQMHKFLQIP

SEQ ID NO: 28818 - protein, 213 aa, Delongbacteria bacterium
  misc_feature (1)..(213): tr|A0A2G6P7I2|A0A2G6P7I2_9BACT 7-carboxy-7-deazaguanine synthase OS=Candidatus Delongbacteria bacterium OX=204 4594 GN=queE PE=3 SV=1
MIKINEIFYSLQGESVYAGLPCIFVRLTGCNLRCSWCDTEYSFYNGDYLTLNEIEKKIKSFPSKLVEFTGGEPMLGYEKIKPLIDSLLSEGYTILMETNGTISIKNLDKRVVKIVDYKTVSSGESGKFLLENLKFLDKKDQIKFVVSTKEDFEDLLLFYGSNRENIKCEMLISKVGNSELTHEEIAKMIIDSKINFRYQVQLHKIIWGDKSGV

SEQ ID NO: 28819 - protein, 213 aa, Delongbacteria bacterium
  misc_feature (1)..(213): tr|A0A348NXN3|A0A348NXN3_9BACT 7-carboxy-7-deazaguanine synthase OS=Candidatus Delongbacteria bacterium OX=204 4594 GN=queE PE=3 SV=1
MAMIVNEIFESLQGESSYAGYPCLFIRLTGCNLRCTWCDTKYAYEDGKEIHCNEIVRLINSSKTDIIEFTGGEPLLQKDELIKVISGIDSSKTILLETNGSVSLEDIPERVVKIVDIKLTGSGEGKSFLFENLKYLTKIDEIKFVLRDIFDYNEFKEHYKNYELGRKCVILVSKVKDSSLTDREIAEMIIEDGLRVKYQIQLHKYIWNDERGR

SEQ ID NO: 28820 - protein, 254 aa, Dependentiae bacterium
  misc_feature (1)..(254): tr|A0A1V5UBF1|A0A1V5UBF1_9BACT 7-carboxy-7-deazaguanine synthase OS=Candidatus Dependentiae bacterium ADurb.Bi n246 OX=1852839 GN=queE PE=3 SV=1
MLEVNEIFGPTIQGEGKLVGNLSIFIRFGKCNFKCVGFNVEYETPSGVKKCACDSYYAVDMEFKNSWKSYENYLDIVNEVDKLLENCNYKNRVDIVITGGEPLLYWNNQEFQNLIKHYINKNHKLTIETNASLNIDFQEEYQKNILFSMSVKLSNSLEPLKKRVNKSTLTKILENTKESYLKFVIGNDFLENAIVEIEDILKNIPQCEVYLMPLGDSSETIDINSEKVVNLAIKYGFKYSDRLHIRIWNNKRGV

SEQ ID NO: 28821 - protein, 289 aa, Desantisbacteria bacterium
  misc_feature (1)..(289): tr|A0A2M6ZH87|A0A2M6ZH87_9BACT 7-carboxy-7-deazaguanine synthase OS=Candidatus Desantisbacteria bacterium CG07 _land_8_20_14_0_80_39_15 OX=1974549 GN=queE PE=3 SV=1
MTKGWLCEIFDSIQGEGIYLGVRQIFLRFAGCNLRCEYCDTPQALRRHKYCRAMSHESCVMSKIENPMTVDSIIFILKSYLSNIQYPGSNIYHSVSLTGGEPLLQVDFIKELIPQLKKLGLKIYLETNGVLPDALKKIVDEVDFIAMDIKLPTAIGQKLWKEHKKFLKQCAMNYTTTILDRKMKCALVFVKIVITPRTSGGEIKKAAELIAEVNREIPLVLQPDSKKRDSPRPAVAGAPTTSSVNSDGPQGQSLFYYQEIASRILKDVRIIPQLHNVSQAICHLSRPDT

SEQ ID NO: 28822 - protein, 241 aa, Desantisbacteria bacterium
  misc_feature (1)..(241): tr|A0A2M7JBZ6|A0A2M7JBZ6_9BACT 7-carboxy-7-deazaguanine synthase OS=Candidatus Desantisbacteria bacterium CG_4 _8_14_3_um_filter_40_12 OX=1974545 GN=queE PE=3 SV=1
MIEPKGNIVEIFKSIQGEGLWIGEGQIFLRLAGCNLSCKNCDTNYALEIPQKYKIEDNDYRNNPVTLTETIETIKSYGLFSTTVSVTGGEPLLQIDYLKMLLPILKSEGCKIYIETNATLPEQLALILPWIDIVSADIKLPSFTGEEDIPKEHREFLRIAKEKDLFVKVVVTDETIMNEISIAVDIVMGVDRNIPLVIQPAMKNGKLMENQERLFGFHDYAAKRLTTVRLIPQIHKLIGWK

SEQ ID NO: 28823 - protein, 212 aa, Desulfofervidus auxilii
  misc_feature (1)..(212): tr|A0A127AKQ4|A0A127AKQ4_9DELT 7-carboxy-7-deazaguanine synthase OS=Candidatus Desulfofervidus auxilii OX=1621 989 GN=queE PE=3 SV=1
MELKITELFYSIQGESSYIGLPCIFIRVCGCNLRCHYCDTKYAYHEGKYYSIEKIMKFVGKYHTKLVTITGGEPLLQPSVIPLTNCLLEKGYVVLVETNGSLPINVFSPKVIRVMDIKCPGSGMSNFMEWKNIDYLTIKDEVKFVLSDRDDYDWAKEIVLKYRLQRRCQVLFSPVFQKLSLSILAEWILSDQISVRLQPQLHKIIWGEIRRR

SEQ ID NO: 28824 - protein, 244 aa, Desulforudis sp.
  misc_feature (1)..(244): tr|A0A3A6N5K9|A0A3A6N5K9_9FIRM 7-carboxy-7-deazaguanine synthase OS=Candidatus Desulforudis sp. OX=2093368 GN= queE PE=3 SV=1
MTSGSIVEVFTSVQGEGPHVGYRQLFVRLAGCNLDCKYCDTDFRAAPTFRLEDDPGSGRFRKEANLVAPDVLVEYIARLKASDYHSVSFTGGEPLVQDAFLMEVLAAVKALGWRTYLETNGTLTTSLERLIALCDIVAMDIKLPSVTGRPLPQSHAGFLRVASAREVFVKVVVSEETSKAEIQVAARLIREVDQGIHLVIQPVTCRDRTGSIPARRILELQRTALGELKHVRVIPQTHHCAGMP

SEQ ID NO: 28825 - protein, 246 aa, Desulforudis audaxviator
  misc_feature (1)..(246): tr|A0A3S8S577|A0A3S8S577_9FIRM 7-carboxy-7-deazaguanine synthase OS=Candidatus Desulforudis audaxviator OX=471 827 GN=queE PE=3 SV=1
MTITAPVTEVFTSVQGEGPYLGCRHMFVRFAGCNLQCAYCDTPAPAGRRCRVENTPGRRVFTWYPNPVTVQMLLDWTSRAVAPHFHALALTGGEPLLHADFLESFLVGFREYGGRCYLETNGTLPEAMKRLARLVDIVAMDVKLPSMTGFPFPEAEHRRFLEAIGPAHAFVKVVVGSETTDAELDAVCALLSAGAGRTMLVLQPVTPVSGVRPAPPERLLEMQERCLARLPDVRVIPQVHRTLGVL

SEQ ID NO: 28826 - protein, 244 aa, Desulfosporosinus infrequens
  misc_feature (1)..(244): tr|A0A2U3LU42|A0A2U3LU42_9FIRM 7-carboxy-7-deazaguanine synthase OS=Candidatus Desulfosporosinus infrequens OX =2043169 GN=queE PE=3 SV=1
MLNLPITEIFSSIQGEGPYVGVRQIFLRLPKCNLRCPYCDTETTVPEQFRIETVPGSRYFDMMSNPISLEKLQELLFLTYDFSLHHSLSVTGGEPLLWVNELKVLLPFIRAKGLNIYLETNGTLPEHLHQVLPWVDVISMDIKLPFTGQTFWDVHETFLRYSLQKEVFVKIVIHKETTLKDLQNACDLIAGVDPTILTILQPVTETQGIMTPKPYQLLNWQSLFLKKLSNVRVIPQTHVFLGQL

SEQ ID NO: 28827 - protein, 255 aa, Dojkabacteria bacterium
  misc_feature (1)..(255): tr|A0A3M0YZS0|A0A3M0YZS0_9BACT 7-carboxy-7-deazaguanine synthase OS=Candidatus Dojkabacteria bacterium OX=2099 670 GN=queE PE=3 SV=1
MSVNIYKPTTEDRERIKHQFDKLKISGDGVFATLQGEGQTTGKPAVFLRLHFCNLHCSWCDTRYTWDKNSREFWQEPEDWSYGETAVRINNAWESVFPTNQEKRLVITGGEPLLQQRKIVNLLQRLPGWEIEIETNGTIMPIPELYTCQFNCSPKLENSGNPLQIRYKPEVLRVINNLSKSQFKFVVTKPLDLDEIDLIVSNCNLNPTKILIMPEGQTKKEVEIRYQMIKDAVEARGWGITLRNQLIWFGSKRRT

SEQ ID NO: 28828 - protein, 226 aa, Edwardsbacteria bacterium
  misc_feature (1)..(226): tr|A0A1F5RCI5|A0A1F5RCI5_9BACT 7-carboxy-7-deazaguanine synthase OS=Candidatus Edwardsbacteria bacterium GWF2_ 54_11 OX=1817851 GN=queE PE=3 SV=1
MKPTAKITEIFHSLQGEGIYLGDPTTFVRLAGCNLDCSYCDTPQAKDDGKATEMNVSEVLAKISAVTQPGQFVSFTGGEPLLQSGSLSAIIPVLKEKKFITYLETNGTLPRELAPLISGIEVISMDIKPPSACGEDLWDVQREFLTIAKEKAFVKMVVCDNTVPGEVERAAKMIADIDKKIIFILQPAEGRSAPDIQAVRRYQGLAGQFLTQVSIIRQMHKIWQIR

SEQ ID NO: 28829 - protein, 226 aa, Edwardsbacteria bacterium; identical to SEQ ID NO: 28828
  misc_feature (1)..(226): tr|A0A3D0J7C7|A0A3D0J7C7_9BACT 7-carboxy-7-deazaguanine synthase OS=Candidatus Edwardsbacteria bacterium OX=20 53551 GN=queE PE=3 SV=1

SEQ ID NO: 28830 - protein, 221 aa, Eisenbacteria bacterium
  misc_feature (1)..(221): tr|A0A1F5RN12|A0A1F5RN12_9BACT 7-carboxy-7-deazaguanine synthase OS=Candidatus Eisenbacteria bacterium RBG_16_ 71_46 OX=1817856 GN=queE PE=3 SV=1
MTDTLRISEVFLSIQGEGPSAGTPAHFVRLQGCDVGCRWCDTKYSWEFGGGREATPAAVIDEALALGAAPLLVVTGGEPLEHPGIAALLERGLAGWPRVEVETSGVAPPPLSHARLAWNVSPKLPAATGRWADTWRHTAAWLAEPNATFKIVVGDPPDPDDARRLVAEHRLPSGRVMLMPEGLTDEAVRRHALALAELCLREGFRLSPRLHVWMWGVRRGV

SEQ ID NO: 28831 - protein, 228 aa, Eisenbacteria bacterium
  misc_feature (1)..(228): tr|A0A538TNN9|A0A538TNN9_9BACT 7-carboxy-7-deazaguanine synthase OS=Candidatus Eisenbacteria bacterium OX=2212 470 GN=queE PE=3 SV=1
MERLPSFRVNEIFLSVQGEGLHVGERTVFVRFYGCPLHCVWCDQPEALTHTGVGRFEEMEPESVRGAVVGHPSTRRVCLTGGEPVIAPKASLLWLLRELKAAGYWISIETSGARVVEELFEWIDFWTVSPKGRSAETFDGDPVEQQVTRLRRFLSVPPEKRQFKFVIQDERDVEDAIAVLDALGYVGAVVLQPEHARGSGKALFESWPWDRYPGARLIPQTHKLSGLH

SEQ ID NO: 28832 - protein, 222 aa, Electronema sp.
  misc_feature (1)..(222): tr|A0A521G272|A0A521G272_9DELT 7-carboxy-7-deazaguanine synthase OS=Candidatus Electronema sp. GS OX=2005002 G N=queE PE=3 SV=1
MTDTLHISELFYSIQGESTRTGLPCAFVRLCGCNLRCTYCDSSYTWDEEGRRMSVAEVCAWLAQYPGVLVEITGGEPLLHEAVYPLMQELLAQGRAVLLETSGSLSIARVPAAVGVILDIKCPDSGMIEKNDWGNLALLQHRKAVGSTDEIKFVLSSEKDVTWAVQIVREQCLTQLAPVLFSPVMNKLSPARLAAMILPEQLPVRLQLQLHTQIWPRLNRGV

SEQ ID NO: 28833 - protein, 224 aa, Electrothrix aarhusiensis
  misc_feature (1)..(224): tr|A0A3S3R3P6|A0A3S3R3P6_9DELT 7-carboxy-7-deazaguanine synthase OS=Candidatus Electrothrix aarhusiensis OX=18 59131 GN=queE PE=3 SV=1
MPDSGSLLVSELFYSIQGESTRAGLPCAFVRLCVCNLRCSYCDSRYTWEEEGRVMSIEQVCTWLEDFPGALVEITGGEPLLQEAVYPLLQKLIAGGQEALLETGGSLSIERVPVEVGIILDIKSPDSGMMDRNHWPNIALLEQRQKAGSRDEIKFVLCSPADVAWAVDIVRQYKLTELVPVLFSPVIDRLSPAILADLILQEQLPIKLQLQLHTRIWPDAHRGV

SEQ ID NO: 28834 - protein, 224 aa, Electrothrix communis
  misc_feature (1)..(224): tr|A0A3S3UDY2|A0A3S3UDY2_9DELT 7-carboxy-7-deazaguanine synthase OS=Candidatus Electrothrix communis OX=185913 3 GN=queE PE=3 SV=1
MPDSDSLLVSELFYSIQGESTRAGLPCAFVRLCGCNLRCSYCDSRYTWEEEGNVMSIGQVFAWLEDFPGTLVEITGGEPLLQETVYPLLQKLTASGREVLLETGGSLSIERVPVEVGIILDVKAPDSGMTEQNHWPNLALLEQRQQAGSHDEVKFVLCSPEDVAWAVDIVRQHKLTELVPVIFSPVIGHLPPSLLADLVLQKQLPIRLQLQLHTQIWPDAPRGV

SEQ ID NO: 28835 - protein, 218 aa, Endobugula sertula
  misc_feature (1)..(218): tr|A0A1D2QLY7|A0A1D2QLY7_9GAMM 7-carboxy-7-deazaguanine synthase OS=Candidatus Endobugula sertula OX=62101 GN= queE PE=3 SV=1
MTKNSYSLKVTEIFLSIQGEAQTIGRPTVFIRLTGCPLRCHYCDSEYAFFGGERMTIEDIVLKVATYGVQYVCVTGGEPLAQANVKVLLTSLCNQQYNVSLETSGAMPISGIDPRVSIVMDLKTPASGEVEKNDYSNCALLKPADQVKFVICDRQDYEWALFKLNEYQLVDKVAEVLFSPSYGQMKSTDLVDWILEDRLPVRFQMQLHKALWGDKPGS

SEQ ID NO: 28836 - protein, 212 aa, Endolissoclinum sp.
  misc_feature (1)..(212): tr|A0A1Z9XYA2|A0A1Z9XYA2_9PROT 7-carboxy-7-deazaguanine synthase OS=Candidatus Endolissoclinum sp. TMED26 OX=1 986636 GN=queE PE=3 SV=1
MTFSVKETFYTLQGEGANAGRPAVFCRFSGCNLWSGLERDRAQAICRFCDTDFVGTNGAGGGKFRTAKDLAAHVQSFWPAAASAGAKLVVCTGGEPALQMTPELVAALHDFDFEIAIETNGTLALPDDIDWVCVSPKAGTELAVRSGQELKVIYPQAGLDLQQLITLPFRHHLLQPMDGASRQESEAASVQACLDDPRWRLSVQTHKYLGFA

SEQ ID NO: 28837 - protein, 295 aa, Endolissoclinum sp.
  misc_feature (1)..(295): tr|A0A1Z8SQC0|A0A1Z8SQC0_9PROT 7-carboxy-7-deazaguanine synthase OS=Candidatus Endolissoclinum sp. TMED37 OX=1 986638 GN=queE PE=3 SV=1
MNVKYSEIFHSFQGEAELAGKPSVWLRFFGCNLECNGFGQTNPADENTWDLPYKNLDVDKFKSVEELPVFSKGCDSSYSWSSKYKHLCPSVSVKEVCDKLEEQLPTGKFAPTLSGQTDTQLCFTGGEPMLRQKQIIAILEELDSRGNLPQTVTIETNATKPLSNELKAYIEAYTCRDDNRWHWAMSPKILHTSGEVDAVKPDVIGQYWDVEGNVSAILKFVCNGSKESWDEIEKALDDIDTVIYSSEFPDVWIMPAGATKEAQEDVVSIVQETMRRGYQVATRNHAYVFGNQIGT

SEQ ID NO: 28838 - protein, 232 aa, Enterovibrio luxaltus
  misc_feature (1)..(232): tr|A0A291BB73|A0A291BB73_9GAMM 7-carboxy-7-deazaguanine synthase OS=Candidatus Enterovibrio luxaltus OX=192712 8 GN=queE PE=3 SV=1
MVTFKFDCLSCMYNVNDIFETIQGEGTFTGIPAIFVRLQGCPVGCPWCDTKQTWNTLPSDERDFSTVVAKTDYSQLWTKVDTQKILEHLQANYTAKHVVITGGEPCIFDLQPLIYMLEAAGYRCQIETSGTYHVSVTDNTWVTVSPKINMRGKLPVLNTVLIRANEIKYTVGTVTDIEKLDRLLKGVNLRPDAEIALQPISQKSRTTALCIETCIKRNWRLSIQVHKYLDIT

SEQ ID NO: 28839 - protein, 199 aa, Enterovibrio escacola
  misc_feature (1)..(199): tr|A0A2A5T108|A0A2A5T108_9GAMM 7-carboxy-7-deazaguanine synthase OS=Candidatus Enterovibrio escacola OX=192712 7 GN=queE PE=3 SV=1
MFIRLQGCPVGCPWCDTRHTWGALPTDERNFETIISKTNDNSLWASINADIIALYVEQNYSSKHVVISGGEPCIYNLQPLTWRLESSGYRCQIETSGTYPVKSSKDTWVTVSPKINMRGKLPVLKCVLQRANEIKHPVATESDIEKLDTLLDGITLLDSIEITLQPINQKSRATALCIKTCIKRNWRLSIQIHKYLNII

SEQ ID NO: 28840 - protein, 246 aa, Eremiobacter sp.
  misc_feature (1)..(246): tr|A0A2W5XSB7|A0A2W5XSB7_9BACT 7-carboxy-7-deazaguanine synthase OS=Candidatus Eremiobacter sp. RRmetagenome_b in22 OX=2599629 GN=queE PE=3 SV=1
MPSAAGAGRLGRRGEKQRMITQTATLMVNETFVSIQGEGERIGAPALFIRLDKCPLRCSWCDTPYALAGDAGVERSVEELRVAAGSLRNVVITGGEPLLQDIRPLVAVLADRHVTVETSGTIFADLPAVSLFSISPKVGTSGYSPKLSVLRKYCATAAARMQLKFVIGEPGDFEEAVACIRQLGGAPLAMPIIFQPESTRAGSSASYLNFLEQLTQAVLARAELRPYDVRVLPQLHYLLWNGAPGR

SEQ ID NO: 28841 - protein, 191 aa, Eremiobacteraeota bacterium
  misc_feature (1)..(191): tr|A0A2W5X7J0|A0A2W5X7J0_9BACT 7-carboxy-7-deazaguanine synthase OS=Candidatus Eremiobacteraeota bacterium OX= 2052317 GN=queE PE=3 SV=1
MLQVNEIFYSFQGEGTHTGIPAVFVRLAGCNLSCRFCDTDYSLKALLGVDDVLAQVQTLSPECPTVILTGGEPLAQTQTPDLIDALARNGRRVHIESNGTVPVPLSEDVWLTVSPKERLHSSMAARANEIKLIVDERVPLEWLDQFPLATPAFLQPENNKPKNVALAMAAIAANPKRLRLSVQTHKLVGAR

SEQ ID NO: 28842 - protein, 223 aa, Erwinia haradaeae
  misc_feature (1)..(223): tr|A0A451DIG9|A0A451DIG9_9GAMM 7-carboxy-7-deazaguanine synthase OS=Candidatus Erwinia haradaeae OX=1922217 GN =queE PE=3 SV=1
MQYPINAIFQTLQGEGVYVGVPSIFIRLQGCPVGCQWCDTKYTWNKLSHKEISWESIPLKISNNNSWGLADTTEILDTITNLGWTAKHVVITGGEPCLYDLRPLSIALQATGLTCQIETSGTHAILCSMETWVTVSPKIKKNKNHSLLHQALKRADEIKHPVGRQRDIDALVNCIKTITDEKKRIILLQPINHITSAIQLCIKTCIQKNWRLSIQTHKYINIP

SEQ ID NO: 28843 - protein, 223 aa, Erwinia dacicola
  misc_feature (1)..(223): tr|A0A1E7Z406|A0A1E7Z406_9GAMM 7-carboxy-7-deazaguanine synthase OS=Candidatus Erwinia dacicola OX=252393 GN=q ueE PE=3 SV=1
MQYPINEMFQTLQGEGVYTGVPAIFIRLQGCPVGCSWCDTKHTWDKLTDRETSLGEILLKTVKTDAWGAADAAALLGVIRQHGWTAKHVVITGGEPCIHDLTPLTVALQDDGFSCQIETSGTHEVLCTPETWVTVSPKVNMCGGYDVLNQALILADEVKHPVARQRDVDALDDLLATLSDEKTRIIVLQPISQKDDATKLCIETCIARNWRLSMQAHKYLNIA

SEQ ID NO: 28844 - protein, 199 aa, Fermentibacteria bacterium
  misc_feature (1)..(199): tr|A0A496U997|A0A496U997_9BACT 7-carboxy-7-deazaguanine synthase OS=Candidatus Fermentibacteria bacterium OX=2 044591 GN=queE PE=3 SV=1
MADYRVKEMLLTLQGEGAKTGTAVVLLRFEGCNLKCSFCDTDFTGTDGEGGGVFATAQELADAVQKKWRSSLPLNVLCTGGEPLMQLDEKLIKEFHARGYNILLETNGTFVLPENPDWVCISPKAGTVTVLNAGDEIKIVFPQEGIDPRQYENMNFTHFWIQPMYNADYKQNLKASIDYCIAHPKWRLSLQTHRFTGMP

SEQ ID NO: 28845 - protein, 201 aa, Fermentibacteria bacterium
  misc_feature (1)..(201): tr|A0A2G6LVC7|A0A2G6LVC7_9BACT 7-carboxy-7-deazaguanine synthase OS=Candidatus Fermentibacteria bacterium OX=2 044591 GN=queE PE=3 SV=1
MCEKNYRIKEMYPTLQGEGYYTGRTVVLLRFQECNLSCSFCDTDFAGTDGPGGGVFSSPVELAEAVAEKWPGKTGIPAVLCTGGEPLLQLDEPLVEAFHSLGFQVLLETNGTFPVPGGVDWVCVSPKSDRCLLREGDELKIVWPSEAVDPDTWAETLFGHFWLQPKYDESYEYNLRLCIDRCLEDPRWRLSLQTHRYIGMP

SEQ ID NO: 28846 - protein, 209 aa, Filomicrobium marinum
  misc_feature (1)..(209): tr|A0A0D6JIW9|A0A0D6JIW9_9RHIZ 7-carboxy-7-deazaguanine synthase OS=Candidatus Filomicrobium marinum OX=160862 8 GN=queE PE=3 SV=1
MYHVKEIFLTLQGEGANAGRAAVFCRFAGCNLWSGREVDRSEATCQFCDTDFVGTDGTGGGRFGTAPDLASAILSNWAGGENERFVVLTGGEPMLQVDAALIDELHRLCFEVAIETNGTLPVPDIVDWICVSPKSGAKLQQIHGHELKLVYPQPGLDPEDLAYLDFGHRYVQPMDGPDLAANTAAAVAYCRKHPEWRLSLQTHKLIGIA

SEQ ID NO: 28847 - protein, 231 aa, Firestonebacteria bacterium
  misc_feature (1)..(231): tr|A0A1F5V2G4|A0A1F5V2G4_9BACT 7-carboxy-7-deazaguanine synthase OS=Candidatus Firestonebacteria bacterium RIF OXYC2_FULL_39_67 OX=1817861 GN=queE PE=3 SV=1
MSKTGFLDEIFVSYQGEGVFAGVRQVFIRFSLCNLKCSYCDTAAAGEIKGSFKAFGENFSNPVKALEVIKIVKRFKGLVHSVSLTGGEPLVQREFAVLLAAGLKRAGFKVYLETNGTLLQNLKSILPYTDVVAMDIKLPSSSGQKGLWEKHSKFIKAAEKKAFVKLVISEDTKPAEIIRAVKMAKRAIVILQPEYKSSIKKVVKLINSSRVFELGADVRLIPQIHRFIGIK

SEQ ID NO: 28848 - protein, 232 aa, Firestonebacteria bacterium
  misc_feature (1)..(232): tr|A0A1F5UC85|A0A1F5UC85_9BACT 7-carboxy-7-deazaguanine synthase OS=Candidatus Firestonebacteria bacterium RIF OXYA2_FULL_40_8 OX=1817859 GN=queE PE=3 SV=1
MNKKGFLDEIFVSWQGEGAFAGVRQIFIRFALCNLECSYCDTAAAGEIKESFSAFGKRKINNPVSIDDVLKIVKGFNSHVHSVSLTGGEPLVQGEFAALLAKGLKKSGFKVYLETNGTLSKHLKNILPFTDVVAMDIKLPSASGQKGLWKKHIKFLKLAGKKAFVKIVISDKTKPGDITKAVRLAKNRIIILQPEYRSNIRKVIKLIDKCRNFKSGVDIRLMPQIHRYIGIR

SEQ ID NO: 28849 - protein, 211 aa, Fischerbacteria bacterium
  misc_feature (1)..(211): tr|A0A1F5V5U6|A0A1F5V5U6_9BACT 7-carboxy-7-deazaguanine synthase OS=Candidatus Fischerbacteria bacterium RBG_1 3_37_8 OX=1817863 GN=queE PE=3 SV=1
MKEVLLVNDIFYSIQGESSFAGSRCIFIRLAGCNVKCEWCDTTYAYNEGCELTIGDILIKVGAWDCDLVEVTGGEPLLQEHSIQLMEELVAKGYRVLLETSGTESIMNVPQKVVIIMDIKCPSSGAVDKNKEDNIALLKSNDEIKFVIADRNDYEWAKEKVRSLREGGCTNVILFSPVRDCMNSNELALWILEDNLPVRLQLQLHKLAGMK

SEQ ID NO: 28850 - protein, 231 aa, Fokinia solitaria
  misc_feature (1)..(231): tr|A0A2U8BSJ2|A0A2U8BSJ2_9RICK 7-carboxy-7-deazaguanine synthase OS=Candidatus Fokinia solitaria OX=1802984 GN =queE PE=3 SV=1
MFGNNEKLNIENRDGKHLKVTEIFHTIQGEGPNAGRVAIFIRLSGCNLACSFCDTQFDKYVQLAIQDILEKVLEEKTKMYSDTEIQLNTHRILAVITGGEPFRQNIGILCQLLEENGFEVQIETNGTLYFEVPHNTTIVCSPKIVNNTYFPIRHDVLQKTIALKFIISSHLEGYGDIQEVGQQTFNIPVYVQPMDEYDQEKNSKNIDQAIKVAIKHNAIISMQLHKIMNIR

SEQ ID NO: 28851 - protein, 145 aa, Frackibacter sp.
  misc_feature (1)..(145): tr|A0A139CK96|A0A139CK96_9FIRM Queuosine biosynthesis p rotein QueE (Fragment) OS=Candidatus Frackibacter sp. T 328-2 OX=1785949 GN=AWU54_1554 PE=3 SV=1
MVNNIFSSIQGESIYSGFPTTFIRFTGCNLKCDYCDTTYAYEEGEELNTEAIMEQVEKLNNNYVCLTGGEPLLQEDVQQLINELTNYGYQISIETNGTVALDQFNLEEVKVVMDLKLPSSGEYRSELNVIDNNIRTLNNKDDLKF

SEQ ID NO: 28852 - protein, 217 aa, Frackibacter sp.
  misc_feature (1)..(217): tr|A0A1H7ZWL4|A0A1H7ZWL4_9FIRM 7-carboxy-7-deazaguanine synthase OS=Candidatus Frackibacter sp. WG12 OX=201797 7 GN=queE PE=3 SV=1
MLVNNIFSSIQGESIYSGFPTTFIRFTGCNLKCDYCDTTYAYEEGEELNTEAIMEQVEKLNNNYVCLTGGEPLLQEDVQQLINELTNYGYQISIETNGTVALDQFNLEEVKVVMDLKLPSSGEYRSELNVIDNNIRTLNNKDDLKFVTGSREDFQLARDLVIEKELQEKINIIFSPVFGQLSPEILVEWLVEETKLNQCRLQLQLHKVIWDEETKGV

SEQ ID NO: 28853 - protein, 227 aa, Fukatsuia symbiotica
  misc_feature (1)..(227): tr|A0A2U8I8G9|A0A2U8I8G9_9GAMM 7-carboxy-7-deazaguanine synthase OS=Candidatus Fukatsuia symbiotica OX=1878942 GN=queE PE=3 SV=1
MLYPINEIFQSLQGEGYFTNVPAIFIRLQGCPVGCSWCDTKHTWEKKNDREVDLQRIMVKNSVSDDWSNANELQLLNVLQEQGYSARHVIITGGEPCIYDLVPLTAELEKNGYRCQIETSGTHEVHCSAATWVTVSAKVDMRGGLKVLEQALQRADEIKHPVARERDIEQLDELLAKLHDDKKRIIALQPIGKENKQTDGATQLCIKTCIARNWRLSVQMHKYLNIA

SEQ ID NO: 28854 - protein, 219 aa, Gallionella acididurans
  misc_feature (1)..(219): tr|A0A139BXC4|A0A139BXC4_9PROT 7-carboxy-7-deazaguanine synthase OS=Candidatus Gallionella acididurans OX=1796 491 GN=queE PE=3 SV=1
MPHASMDVQLRITEIFHSLQGETSRVGLPTVFIRLTGCPLRCTYCDTAYAFSGGKNTSLTEILRQVVQFSPQYVTVTGGEPLAQKNCLPLLRALCDAGYTVSLETGGALDIGSVDARVMRVVDIKTPASGELEKNRWENLALLTGHDEIKFVLCDENDYQWAKKILQQHHLNEKCPVLFSPAHGMLNATQLADWILRDNLPVRMQVQLHKLLWNNEPGH

SEQ ID NO: 28855 - protein, 226 aa, Gastranaerophilales bacterium
  misc_feature (1)..(226): tr|A0A292RCQ7|A0A292RCQ7_9BACT 7-carboxy-7-deazaguanine synthase OS=Candidatus Gastranaerophilales bacterium H UM_9 OX=1916320 GN=queE PE=3 SV=1
MNNKAKIKEIFSSIQGEGLLVGVEQIFIRFCKCNLACKYCDTDFSSDYKEYSPQELADYLRNNFDFNKINSISLTGGEPLLWIDFLAEFLPLVDLPIYLETNGTIIKDVEKIIDSIDYVSADIKLPSCSGLINSFEKHDKFFETFCNSKATVFAKIVFDEKITDEEIKLATDLSKKYGFEIILQPKMIGDKMSINSAFIRKIFYKFLEYTKNVRVIPQVHKFLGVE

SEQ ID NO: 28856 - protein, 227 aa, Gastranaerophilales bacterium
  misc_feature (1)..(227): tr|A0A292SQ40|A0A292SQ40_9BACT 7-carboxy-7-deazaguanine synthase OS=Candidatus Gastranaerophilales bacterium H UM_21 OX=1916319 GN=queE PE=3 SV=1
MTRTAKVAEIFDSVQGEGPYIGYRQLFVRFCGCNLLCDYCDTEFDKGDDYTVAQLVEKIKSFKLEPLHSVSLTGGEPLLQYEFLKEFLPSLKQLGLKIYLETNGTMDRALDKVIEYIDIVSMDFKLDSSAKIGDLYSKHDAFLEICKKHSKDTFAKLVFDETIRDFEIDECVKLAQKYKIPVILQPKMDGDKIKVSHDKIVETFNKFSEKYHDTRLIGQVHKFFSIR

SEQ ID NO: 28857 - protein, 224 aa, Gastranaerophilus sp.
  misc_feature (1)..(224): tr|A0A2L2X5G7|A0A2L2X5G7_9BACT 7-carboxy-7-deazaguanine synthase OS=Candidatus Gastranaerophilus sp. (ex Terme s propinquus) OX=2029980 GN=queE PE=3 SV=1
MLNKAQIKEIFYGIQGEGPHVGEKHLFVRFCGCNLACAYCDTDYSQVGALEYTIDELYDAISPLKPAVLALTGGEPLLWGDFLASFFEKYGSKLGKIYLETNGTLSQELEKIADYVDIISADIKLKSATDEVADFADVVKFLEQATDREHVKCFVKIVFDKNITEGEISSVSLLAQKYKLPIVLQPKMPLELEGSSLEEIFEKFYKIYPNVRLVPQMHKFLNLK

SEQ ID NO: 28858 - protein, 221 aa, Glassbacteria bacterium
  misc_feature (1)..(221): tr|A0A1F5YUC8|A0A1F5YUC8_9BACT 7-carboxy-7-deazaguanine synthase OS=Candidatus Glassbacteria bacterium RIFCSPL OWO2_12_FULL_58_11 OX=1817867 GN=queE PE=3 SV=1
MSQIKGPQLLTVCETFVSLAGESGWQGLVSTFIRFSGCDVDCAWCDTAYARQEKGTPVSIGDIMSICRANRIRKVVLTGGEPLLQEELPELCRALLEEGFDVQVETSGTRLCDKLDSLVMKVLDIKPPSAKTEKGFHWGNLDLLGKRDEIKFVLADRKDYDWSLSIMRKCKLESRCKVLFSTVAGSLDPAELAGWMIEDGLSVRLQLQLHKLLWPSETRGK

SEQ ID NO: 28859 - protein, 210 aa, Glomeribacter gigasporarum
  misc_feature (1)..(210): tr|G2JAM3|G2JAM3_9BURK 7-carboxy-7-deazaguanine synthas e OS=Candidatus Glomeribacter gigasporarum BEG34 OX=107 0319 GN=queE PE=3 SV=1
MTYAVKEIFYTLQGEGANAGRPAVFCRFAGCNLWSGREEDRAGAMCRFCDTDFVGLDGENGGKYRTADALAAMIAALWPPHEARRFVVCTGGEPMLQLDNALIDALHRARFTVAIETNGTLPVLSSIDWICVSPKADTQLIVTQGNELKVVIPQDNQRLAEYEALDFAHFFVQPMDGPSRNINTRLAIDWCKRHPLWRLSIQTHKHLGIP

SEQ ID NO: 28860 - protein, 209 aa, Goldbacteria bacterium
  misc_feature (1)..(209): tr|A0A2N1W684|A0A2N1W684_9BACT 7-carboxy-7-deazaguanine synthase OS=Candidatus Goldbacteria bacterium HGW-Gold bacteria-1 OX=2013807 GN=queE PE=3 SV=1
MKKEKQLFVCELFEDLEGEGRFQGYPTFFIRLSECNLRCNWCDTKESYAKGKPYGITKLAKMASESDCCNISITGGEPLLQKSGVKVLIKALRKKCPGKKITVETNGSISVAGLNADNVSMDIKLLSSGVSEKMMLSNLKVLKPKDQVKLVAGSLADLRYAQAVLKKHRTKAEIIVQPVFGRIKFSAIREFILRRGLKWRAMVQLHKMK

SEQ ID NO: 28861 - protein, 254 aa, Gottesmanbacteria bacterium
  misc_feature (1)..(254): tr|A0A2H0NHC3|A0A2H0NHC3_9BACT Radical_SAM domain-conta ining protein (Fragment) OS=Candidatus Gottesmanbacteri a bacterium CG11_big_fil_rev_8_21_14_0_20_37_11 OX=1974 575 GN=COV53_03970 PE=3 SV=1
MKIYRPTVLDKQRIKPIPNMLKVSGDQVFATFQGEGITAGQPAVFLRLHYCNLACSWCDTKYTWDKTRKEFWQEPIDWSYPEAVTKIKAAWLQKFGLKTPDSKKRLVITGGEPLLQQAKIVKLLQFLPNWRVEIETNGTIIPLAELSNCQINCSPKLENSGNLLSLRFKSEVLKQINSLPNSWFKFVVVKAKDLEEIDEIVTCCALNPEKILIMPEGYTVETISEHLIQVKTEVQKRKWRVIQRNQIIWYGNKR

SEQ ID NO: 28862 - protein, 256 aa, Gottesmanbacteria bacterium
  misc_feature (1)..(256): tr|A0A1F6AVM3|A0A1F6AVM3_9BACT 7-carboxy-7-deazaguanine synthase OS=Candidatus Gottesmanbacteria bacterium RIF CSPLOWO2_01_FULL_46_21 OX=1798393 GN=queE PE=3 SV=1
MELYKATSEDKLFLRPKPDMLKVSGDQVFATLQGEGVTAGKPAVFLRLHFCNLACSWCDTKYTWDQNREEFWREPVDWSFSEATTNIGKAWTEKFGFEVPSFEKRLVVTGGEPLLQQKKIVSLLKLLPDWNIEIETNGTITPLPELQGCQINCSPKLENSGNLKNRRYRPETLKAINAMQNSWFKFVVTSEGDVTEIEEIVKECNLNPKKILIMPEGTTLNATTAHLKLVEEVVRRKAWSVTKRNQLVWFGDKRRT

SEQ ID NO: 28863 - protein, 224 aa, Gullanella endobia
  misc_feature (1)..(224): tr|A0A143WQV2|A0A143WQV2_9ENTR 7-carboxy-7-deazaguanine synthase OS=Candidatus Gullanella endobia OX=1070130 G N=queE PE=3 SV=1
MQYPLNEIFQTLQGEGYFTGVPAIFIRLQGCPVGCSWCDTKYTWKRNENNQVTLKEILSKTDSSNCWASLTVEEIIMLIAKKNWTARHIVITGGEPCLYNLIPLTCSLENQGFSCQIETSGTKEIYCTQKTWVTVSPKINMCKKLSISNQALNRSDEIKHPVARKCDIEKLDILLSTLKNDIKKRIISLQPISQKKRATCLCIETCIARNWRFSMQTHKYLNIA

SEQ ID NO: 28864 - protein, 223 aa, Hamiltonella defensa
  misc_feature (1)..(223): tr|A0A249DY35|A0A249DY35_9ENTR 7-carboxy-7-deazaguanine synthase OS=Candidatus Hamiltonella defensa (Bemisia t abaci) OX=672795 GN=queE PE=3 SV=1
MLYPINEIFQTLQGEGHFMGTPAIFIRLQGCPVACSWCDTKHTWEKKNEQQVDLFSILQKKTANDFWSHSNEQELLAVIRAQGYQASHVVITGGEPCLHDLTPLTQLLEQEGYFCQIETSGTHLVHCTPSCWVTVSPKINMRGGFKIQHQALERADELKHVIARKRDIETLDALIGNLKDRKKRIISLQPVSQKKSATQLCIDTCIERNWRLSVQMHKYLGIE

SEQ ID NO: 28865 - protein, 223 aa, Hamiltonella defensa
  misc_feature (1)..(223): tr|A0A2D3T015|A0A2D3T015_9ENTR 7-carboxy-7-deazaguanine synthase OS=Candidatus Hamiltonella defensa OX=138072 GN=queE PE=3 SV=1
MLYPINEIFQTLQGEGHFMGTPAIFIRLQGCPVGCSWCDTKHTWEKKNEQQVDLFSILQKKTANDFWSHSGEQNLLAVIRAQGYQASHVVITGGEPCLHDLTPLTQLLEQEGYFCQIETSGTHLVHCTPSCWVTVSPKINMRGGFKIQHQALERADELKHVVARKRDIETLDALIGNLKDRKKRIISLQPVSQKKSATQLCIDTCIERNWRLSVQMHKYLGIE

SEQ ID NO: 28866 - protein, 309 aa, Hydrogenedentes bacterium
  misc_feature (1)..(309): tr|A0A3M2FF05|A0A3M2FF05_9BACT 7-carboxy-7-deazaguanine synthase OS=Candidatus Hydrogenedentes bacterium OX=20 30809 GN=queE PE=3 SV=1
MAGDAAKNGHLLPDRVGPLMGETPLREPKGGVLYEPVFAGEMPTLPGWPVYRNLTLSTICHAPTVAFRWSLLYNPALMKKKDNTILIAELYTSLQGETRFVGLPSFFIRTAGCPLRCSWCDSPHAFSGGKRMTIREIVAQSLSGPEFVTVTGGEPLVQGAVPRLLSRLIEAKKSVLLETSGAFSIADLPPEIIVILDWKGQSSGEADRMLKDNLSRLRPHDELKFVIATEEDYRDARELLRSESLHRRCHVTFSWAFPPPDPHPLKPFPKEQRRISLAELAGRILEDRLPVRMIPQVHKFVWPEEGSGR

SEQ ID NO: 28867 - protein, 216 aa, Hydrogenedentes bacterium
  misc_feature (1)..(216): tr|A0A2A5DLX7|A0A2A5DLX7_9BACT 7-carboxy-7-deazaguanine synthase OS=Candidatus Hydrogenedentes bacterium OX=20 30809 GN=queE PE=3 SV=1
MDTTLLITETYKSIQGESTWVGLPCTFIRLARCNLRCRWCDTTYSFTGGDKRSIKTLLDECNDYGCSLVEITGGEPLAQAECPTLAQALIDAGYTVLVETSGSLPINVLPPECIRIMDLKCPGSGECDKNDWSNIEALTDRDEVKFVLASREDYEWARDVIRKHSLADRCQDILMSPVFGDIDPKDIVDWILEDALPVRFQLQLHKFVWPPDQKGV

SEQ ID NO: 28868 - protein, 228 aa, Hydrothermae bacterium
  misc_feature (1)..(228): tr|A0A496U4X9|A0A496U4X9_9BACT 7-carboxy-7-deazaguanine synthase OS=Candidatus Hydrothermae bacterium OX=22500 85 GN=queE PE=3 SV=1
MLLISEIFSSIQGEGPRSGVPSIFLRLGGCNLRCRYCDTAYSSFPEYRDQWLKLSTQKVVDKILKIKKREKNLVITGGEPLLQENALFLMLKIIHAEFATIEVETNGTIKPSRLLHIGSKLHFNVSPKLSNSGIRENLRLNPDALFFFSSMPGTIFKFVVKNRKDVNEVEEIIKKYGIRRENVYLMPLAKTKIALSRIASLIANEAIRIGVNYSDRLQIRLWEGERGK

SEQ ID NO: 28869 - protein, 288 aa, Izimaplasma sp.
  misc_feature (1)..(288): tr|A0A094IFI2|A0A094IFI2_9BACT 7-carboxy-7-deazaguanine synthase OS=Candidatus Izimaplasma sp. HR2 OX=1541960 GN=queE PE=4 SV=1
MEAMLYKPLTKLNVKCLVCRHYCVLKDGQRGICGVRENKAGTMHVLNYGKTVAASIDPIEKKPIHNYMKKSNTYSFAAVGCNMDCPWCQNYLISQSPKPYKHIEGMYITPEEHVYKAVHYRCPSISYTYSEPTIFLEYAYDTMKLAKAEGLKNIWVTNGYMSKETLDLVLPFLDAVNVDYKGQNGLYEKYSLGNAQAILENMRVMKEAGVHLEVTTLVIPGLNDKPEDILEIANDLKTYVGVDTPWHISRFFPAYKMKDIQVTPKDTLLIAKKIGQDVGFKNIYLGNI

SEQ ID NO: 28870 - protein, 211 aa, Jettenia caeni
  misc_feature (1)..(211): tr|I3INJ2|I3INJ2_9BACT 7-carboxy-7-deazaguanine synthas e OS=Candidatus Jettenia caeni OX=247490 GN=queE PE=3 S V=1
MKINEIFKSIQGETSYAGLPCTFIRITGCNLRCRYCDTTYAYEDGVEMSMNSILESIHDFSSNLVCITGGEPLSNEDTPLLIQRLLDKNYTVLVETNGSYDIRTIPEKAVTIMDIKCPGSTMSHTMHWQNIAYLRQSDEVKFVLASRDDYKWTKDVIQKYNLSEIAKVLLGTVFNTIAPRSVVQWILEDNLKVRFQLQLHKYIWEPHTRGV

SEQ ID NO: 28871 - protein, 211 aa, Jettenia ecosi
  misc_feature (1)..(211): tr|A0A533QA43|A0A533QA43_9BACT 7-carboxy-7-deazaguanine synthase OS=Candidatus Jettenia ecosi OX=2494326 GN=qu eE PE=3 SV=1
MKINEIFKSIQGETSYAGLPCAFIRITGCNLRCRYCDTTYAYEDGVEMSMNSILESIHDFSSNLVCITGGEPLSNEDTPLLIQRLLDKNYTVLVETNGSYDIRTIPEKAVKIMDIKCPGSTMSHTMHWQNIACLTQSDEVKFVLASRDDYEWAKDVIQKYNLSGIAKVLLGTVFNTISPRSVVQWILEDNLKVRFQLQLHKYIWEPHTRGV

SEQ ID NO: 28872 - protein, 236 aa, Kaiserbacteria bacterium
  misc_feature (1)..(236): tr|A0A2M7FC53|A0A2M7FC53_9BACT 7-carboxy-7-deazaguanine synthase OS=Candidatus Kaiserbacteria bacterium CG17_b ig_fil_post_rev_8_21_14_2_50_51_7 OX=1974613 GN=queE PE =3 SV=1
MTELKVHSIFPSFNGEVCHAGQGSSAIFVRLAGCNLAAAGHPCLWCDTPDAQTDWHSLSLPIGEVLNTVLDLGERIRNVTITGGEPLAQDGTLVLVKSLLAVDKHVSIETNGTLSIEPYAFRCKDLHFVMDYKPPSAGEAVFDSFLEENLSYLGEDDFVKIVVLTDQDLFSLSEMLMKARVNTKAKIAVGVPFNNPVLAKAIVDEVIQWRLDVTLNFQLHKIITPTIEGAVQGAYN

SEQ ID NO: 28873 - protein, 234 aa, Kapabacteria sp.
  misc_feature (1)..(234): tr|A0A1M3KXT3|A0A1M3KXT3_9BACT 7-carboxy-7-deazaguanine synthase OS='Candidatus Kapabacteria' thiocyanatum OX= 1895771 GN=queE PE=3 SV=1
MFVQPTREILPVDDPLTLGFNVNEIFYSIQGEGTRAGVPCTFVRLQGCKLRCVWCDTPYALDKRHRERSMTGADILAEIERIGCRFVEFTGGEPLEQINVFPLMALLCDKGYTVAVETGGHVDVSLLDRRIVRILDVKCPDSKMSSLNYWPNLDVLDANDEVKFVIASRDDYEWARDVVRKYALGERTAAVLFSCVFDAVPFVDLVNWILEDHLPVRFQLQVHKFVWDPQTRGV

SEQ ID NO: 28874 - protein, 241 aa, Kentron sp.
  misc_feature (1)..(241): tr|A0A450XJY7|A0A450XJY7_9GAMM 7-carboxy-7-deazaguanine synthase OS=Candidatus Kentron sp. MB OX=2138164 GN=qu eE PE=3 SV=1
MKQSTTEGRDQRPKRQPRPARATQDPRPLITEIFHSLQGETRTIGYPTAFIRFTGCPLRCAYCDTTYAFQGGRRISLPQILATIHPWQPRFVTVTGGEPLAQPACRPLITRLCDAGYQVSLETSGALDIALIDPRASIVMDLKTPGSGQEQSNHYPNLTRISPNDQIKFVLCDRHDYQWAKAKIAQFHLLQQCEVLFLPVQGKQGFDLPPADLADWILADRLPVRMQIQLHKHLWGDAPGR

SEQ ID NO: 28875 - protein, 208 aa, Kentron sp.
  misc_feature (1)..(208): tr|A0A450V5Z7|A0A450V5Z7_9GAMM 7-carboxy-7-deazaguanine synthase OS=Candidatus Kentron sp. H OX=2126337 GN=que E PE=3 SV=1
MGYPTLFVRLTGCPLRCRYCDTRYAFQGGRRMSLAEVLRAVRGITDPSGQPRFVTVTGGEPLAQPACRELLALLCEAGYRVSLETGGALDISGVDERVSIVMDIKTPGSGEMAANRPANLAALSHKDQVKFVICDRRDYEWARDRLAVSHIAARCEVLFLPVQGERESGQPPADALARELAEWILADRLPARLQIPLHKYLWGDVRGK

SEQ ID NO: 28876 - protein, 210 aa, Kinetoplastibacterium galatii
  misc_feature (1)..(210): tr|M1MAP5|M1MAP5_9PROT 7-carboxy-7-deazaguanine synthas e OS=Candidatus Kinetoplastibacterium galatii TCC219 OX =1208921 GN=queE PE=3 SV=1
MTYSVKEIFKTLQGEGFYTGRAAVFCRFTGCNFWNGNDLDRINAVCKFCDTDFVGINGCNGGKFRSASLLAREISRIWGEEYFGRYVVLTGGEPLLQLDSALLSELHNNGFEVGIETNGSIIPPKNVDWICVSPKDLNRMILREGNELKLVFPQNDICPDNFVDMNFQHFYLQPMYSDYLALNIDLAVNYCKNNPKWRLSLQTHKYIGIP

SEQ ID NO: 28877 - protein, 210 aa, Kinetoplastibacterium desouzaii
  misc_feature (1)..(210): tr|M1LU49|M1LU49_9PROT 7-carboxy-7-deazaguanine synthas e OS=Candidatus Kinetoplastibacterium desouzaii TCC079E OX=1208919 GN=queE PE=3 SV=1
MSYSVKEIFKSLQGEGFHTGRVAIFCRFSGCNLWNGKEYSKSSALCKFCDTDFVGTDGINGGKFKSADSLAQKILEEWGDGRDNRYVILTGGEPLLQVDIFLIEALHKINFTVAIETNGTIVPPNGIDWVCVSPKGSSNIILKEGNELKLVYPQLEIDPSIFLRWNFQYFFLQPLDDYNVKFNTKLTVDYCINNPKWRLSLQTHKYIGIP

SEQ ID NO: 28878 - protein, 221 aa, Kryptonium thompsoni
  misc_feature (1)..(221): tr|A0A0P1P5E0|A0A0P1P5E0_9BACT 7-carboxy-7-deazaguanine synthase OS=Candidatus Kryptonium thompsoni OX=1633631 GN=queE PE=3 SV=1
MKANKPENILTVNEIFFSIQGESSWMGFPCVFVRLTYCDLRCVWCDTEYAFYEGVDMTIDEIIEQVRSYNCNLVEITGGEPLFQENTLKLIEKLCDENFTVLLETGGHRDISKVDPRAHIIMDIKCPGSKMSHRNRWENIEYLSKKDEVKFVIKDRADYEWAKEIIKKFNLTERVKTVLFSPVFGEIEPVTLATWILEDKLPVRFQLQMHKYIWSPTARGV

SEQ ID NO: 28879 - protein, 195 aa, Lambdaproteobacteria bacterium
  misc_feature (1)..(195): tr|A0A1F6GLU7|A0A1F6GLU7_9PROT 7-carboxy-7-deazaguanine synthase OS=Candidatus Lambdaproteobacteria bacterium RIFOXYD2_FULL_56_26 OX=1817773 GN=queE PE=3 SV=1
MWVSEVFYSIQGEGAHMGRPAAFVRFFGCDLDCDFCDEPLHKTQKHRMSPKAVVEQLLGWPVRFVILTGGEPSLEDRNLFIGLLHSHGFEVAVETNGYEPDNIGTADWITYSPKDWDHIKTEPFYDELKLVCDIHSNKAQVLQIAALSKKPVFLQPKAQTDLLVSLANAEFCRQLILEQPKLRLSLGLQRFLRFK

SEQ ID NO: 28880 - protein, 196 aa, Lambdaproteobacteria bacterium
  misc_feature (1)..(196): tr|A0A1F6GAA7|A0A1F6GAA7_9PROT 7-carboxy-7-deazaguanine synthase OS=Candidatus Lambdaproteobacteria bacterium RIFOXYD2_FULL_50_16 OX=1817772 GN=queE PE=3 SV=1
MQVSEIFYSVQGEGSHQGRAAAFVRFFGCDLDCDFCDEPLHRSTQTQMSEGEILAAIEPWPSRLVVLTGGEPSLEDRNHLITILQQAGFEVAVETNGYSFENIQTANWITYSPKDWAQIHFDAPFSELKLVVQATDDPAQITQILTQSPAPVFLQPMSLAGDPAASKANVTFCLAQIKSHPDLRLSLGLQRFLGFH

SEQ ID NO: 28881 - protein, 211 aa, Latescibacteria bacterium
  misc_feature (1)..(211): tr|A0A3N5XSW5|A0A3N5XSW5_9BACT 7-carboxy-7-deazaguanine synthase OS=Candidatus Latescibacteria bacterium OX=20 53570 GN=queE PE=3 SV=1
MKVTEIYASLQGETTHAGRPSVLVRFTGCSLRCRYCDTAYAFYGGEESAPEEVADAVRAYGIGLVLLTGGEPLEQVELARLVSILLDRGHEVLIETGGHRPIAGIDSRAIKIVDVKCPGSGHDADVLWENFEALGPRDEIKFVLTGRADYEWAKETLRSRLGRWRGTVLFSAAEKRLAPADLAAWILEDRLPVRLQIQLHKVLWPDRDRGV

SEQ ID NO: 28882 - protein, 211 aa, Latescibacteria bacterium
  misc_feature (1)..(211): tr|A0A3B8MMR2|A0A3B8MMR2_9BACT 7-carboxy-7-deazaguanine synthase OS=Candidatus Latescibacteria bacterium OX=20 53570 GN=queE PE=3 SV=1
MSDIDSIPDASEHSRPVWNDGQILQINEIFYSIAGEGARVGQPTIFVRLAKCNLRCFFCDTEFDSFTEMSLQEIIDEVRIHTGEWVSLTGGEPLGQNIAPLCEALRRLGYRLHIETSGSLPPQTELFDLIEHWTVSPKRKRVVEGFERITELKYVVGKVFREDQVEEDRSELIYLQPESSKPEYIHKALEILQRHPTWRLSCRIHKMLHLP

SEQ ID NO: 28883 - protein, 210 aa, Liberibacter americanus
  misc_feature (1)..(210): tr|U6B5B3|U6B5B3_9RHIZ 7-carboxy-7-deazaguanine synthas e OS=Candidatus Liberibacter americanus str. Sao Paulo OX=1261131 GN=nrdG PE=3 SV=1
MKFYSVKEIFLTIQGEGAHAGRVSVFCRFTGCNLWSGREKDRSSAKCRFCDTDFVSIDGTKGGSYTSETLANAILSEWIGGKDNRYCVLTGGEPLLQVDTPLIDALHKRDFKIAIETNGTIKAPEGIDWICVSPKEGCDLKIKTGNELKLVFPQINAHPDNYSMFDFDRYSLQPMDGSDLAKNTNLTIEYCSKNPKWRVSIQMHKLIGVR

SEQ ID NO: 28884 - protein, 212 aa, Liberibacter europaeus
  misc_feature (1)..(212): tr|A0A2T4VX95|A0A2T4VX95_9RHIZ 7-carboxy-7-deazaguanine synthase OS=Candidatus Liberibacter europaeus OX=74485 9 GN=queE PE=3 SV=1
MKFYSVKEIFLTLQGEGADVGRVSVFCRFSGCNLWSGREKDRAYAQCRFCDTDFVGTNGTMGGRYSAEELADVIAGEWIGLENNEHRYCVLTGGEPLLQVDAPLIKALHQRNFEIAVETNGTIEPPEGIDWICVSPKGGCDIKIKKGNELKLVFPQLDAHPNRYSMFDFERFSLQPMDGIDLEKNTNLAIDYCFKHPQWRISMQVHKFIGIR

SEQ ID NO: 28885 - protein, 238 aa, Lindowbacteria bacterium
  misc_feature (1)..(238): tr|A0A1F6LJX7|A0A1F6LJX7_9BACT 7-carboxy-7-deazaguanine synthase OS=Candidatus Lindowbacteria bacterium RIFCSP LOWO2_12_FULL_62_27 OX=1817870 GN=queE PE=3 SV=1
MYISEIFRSFQGEGKLAGVPSVFVRTSGCNLRCVWCDTRYTSWEPEGSDRAVGDIMAEVRRLVREGEAPVRHAVVTGGEPTLEESLPELCSGLASEGFHVTIETNATRFLNLDAHLISLSPKLGNSSPLRSPAEIPKSHDALRNRPEVVRAYLDAYADPPARDCQIKFVIEREEDLAEVAEFERAANIPKDKILLMPQSVEPSDLARKTAWLVDLAAKRGYGFSPRLHIAKYGNRRGV

SEQ ID NO: 28886 - protein, 222 aa, Macondimonas diazotrophica
  misc_feature (1)..(222): tr|A0A4Z0F7U0|A0A4Z0F7U0_9GAMM 7-carboxy-7-deazaguanine synthase OS=Candidatus Macondimonas diazotrophica OX=2 305248 GN=queE PE=3 SV=1
MKTAHARLDQHLRVSEIFYSLQGEADSVGWPTVFIRLTGCPLRCSYCDTSYAFHGGTTIAIADVLTEVARYPVRHVCVTGGEPLAQGDACRALLAALCERRHVVSLETSGALSIAGIDSRVSRVVDVKSPGSGEMDRNHWSNLDLLTERDQLKFVLCDRRDYEWAMGQVTERALASRCMVWFSPVHGRLDPRRLAEWLLEDGLPVRMQIQLHKLLWGEAPGH

SEQ ID NO: 28887 - protein, 215 aa, Magnetobacterium bavaricum
  misc_feature (1)..(215): tr|A0A0F3GJQ7|A0A0F3GJQ7_9BACT 7-carboxy-7-deazaguanine synthase OS=Candidatus Magnetobacterium bavaricum OX=2 9290 GN=queE PE=3 SV=1
MQETLRVCEFFTSIQGESSYAGLPCVFVRLTGCNLRCSYCDTRYAYTEGTDVPVAQLLRDVQATNLRLVEITGGEPLLQDATPILIDGLIGMGLKTLIETNGSVNISRFNRGAIFIVDLKAPSSGMSDHNDLSNLKALSPTDEVKMVIANRDDYQWASDLIARHRLTQRCHVLLSSVAGELQPETLAAWILHDALDVRLNLQLHKYIYGADRRMV

SEQ ID NO: 28888 - protein, 215 aa, Magnetobacterium bavaricum
  misc_feature (1)..(215): tr|A0A0F3H057|A0A0F3H057_9BACT 7-carboxy-7-deazaguanine synthase OS=Candidatus Magnetobacterium bavaricum OX=2 9290 GN=queE PE=3 SV=1
MKETLRVCEFFTSIQGESSYAGLPCVFIRLTGCNLRCSYCDTRYAYTEGTDIAVVQLLRDVQATNIRLVEITGGEPLLQDAIPILIDGLIGMGLKTLVETNGSINIGHFNRDAVFIVDLKAPSSGMSDHNDLSNLKTLSPTDEVKMVLGNRDDYQWASDLIARYRLTQRCHVLLSPIVGELQPETLAAWILHDALDVRLNLQLHKYIYGADRRMV

SEQ ID NO: 28889 - protein, 211 aa, Magnetoglobus multicellularis
  misc_feature (1)..(211): tr|A0A1V1PDS6|A0A1V1PDS6_9DELT 7-carboxy-7-deazaguanine synthase OS=Candidatus Magnetoglobus multicellularis s tr. Araruama OX=890399 GN=queE PE=3 SV=1
MSICDTYKINEIFKSRQGEGFNTGKEVMFIRLSGCRMSCSWCDTDHKKYEIMSVGQICNLLTSDDTSDNILITGGEPTDQSLLPLLKKIRQHANWIGLETNGTNNISQYKEFFDYITVSPKTKGDLHPSSVLNADEVRIVTGIEVNLNYIKRMDKLMLPSTHRFLSPLSFLSLNKTETNLPYTISLLSQINQQSKNPWHLSIQTHKLIGIK

SEQ ID NO: 28890 - protein, 215 aa, Margulisbacteria bacterium
  misc_feature (1)..(215): tr|A0A1F6QBX7|A0A1F6QBX7_9BACT 7-carboxy-7-deazaguanine synthase OS=Candidatus Margulisbacteria bacterium GWE2 _39_32 OX=1817872 GN=queE PE=3 SV=1
MLINEIFSSIQGEGIYAGYRQIFIRFAGCNLSCDYCDEQHQEQRKYEIDALAKEVKQFTKSWHHSISLTGGEPLLQVDRIKQLIPLLPLPIYLETNGTLPQHFKEIADLVDIVSLDYKEGYENEFIDFLHIAKDKDVFVKYVVRKETNVKKLSDITSLISEISRDIPFILQPVTPYGKIKQGPRLEDLLRFYQTAKNHLSDVRVIPQTHKLMRIK

SEQ ID NO: 28891 - protein, 215 aa, Margulisbacteria bacterium; identical to SEQ ID NO: 28890
  misc_feature (1)..(215): tr|A0A2W4HU80|A0A2W4HU80_9BACT 7-carboxy-7-deazaguanine synthase OS=Candidatus Margulisbacteria bacterium OX=2 053573 GN=queE PE=3 SV=1

SEQ ID NO: 28892 - protein, 254 aa, Marinamargulisbacteria bacterium
  misc_feature (1)..(254): tr|A0A328RNV0|A0A328RNV0_9BACT 7-carboxy-7-deazaguanine synthase OS=Candidatus Marinamargulisbacteria bacteriu m SCGC AG-439-L15 OX=2184346 GN=queE PE=3 SV=1
MSKKENKELKVSETFYSIQGEGVSMGTPSIFLRLQGCNLTCGGPTTIQSKKIENGATWRCDTIEVWKKGEALTVDAILAQWENNNYLNHLSQGAHLVITGGEPLLQTTELEIFLEQLQKKLPKKGYFEIETNGTITPTKTIDKLISHYTVSPKLANSGMSLTSRIQKNTLEWFSKKQNAYFKFVISDISDITEIQSQLIQPFKISSQQVYLMPACDTKDTLLKQLPKIADLCKRNHYKLSSRLQLSIWDQTVGV

SEQ ID NO: 28893 - protein, 265 aa, Marinamargulisbacteria bacterium
  misc_feature (1)..(265): tr|A0A328RLM3|A0A328RLM3_9BACT 7-carboxy-7-deazaguanine synthase OS=Candidatus Marinamargulisbacteria bacteriu m SCGC AAA071-K20 OX=2184347 GN=queE PE=3 SV=1
MENPLFKISKATSRIMPHTLPVSESFYSIQGEGKCTGVPAVFLRLKGCNLSCGGINTIKTKSLDSGATWRCDTIEVWTKGETINIVDLLESWEQNGWLNHLKNGAHLVITGGEPLLWQDKLVKFLNDFKQFQSFLPFIEVETNGTITPTKKLDSFISQYNVSPKLKNSGMKKEDRLINEALTFFTESQKGYYKFVVSNQSDCDEITNSFIIPFKIPSQKIQLMPGAETKDDCLALSPQVVEWCKEKGLGFSSRLHLLLWDKKTGC

SEQ ID NO: 28894 - protein, 213 aa, Marinimicrobia bacterium
  misc_feature (1)..(213): tr|A0A2E6AXM3|A0A2E6AXM3_9BACT 7-carboxy-7-deazaguanine synthase OS=Candidatus Marinimicrobia bacterium OX=202 6760 GN=queE PE=3 SV=1
MKLKINEIFYSIQGESSYTGLPCVFIRLTYCNLRCSYCDSEYAFYEGRNMSFSDINTEIKKYPTKLAMITGGEPLLQKKSVDLMQLLIEDGYSVMLETSGSLSLENVPKEVIKIVDFKCPSSKMKHKNDWSILNDIDNKDEIKFVIGNEEDYNWSKSKIVKYNLNEKCQILFSPIYGSIDIKELCNWILNDGLNVRLQTQLHKLIWGPDKKGV

SEQ ID NO: 28895 - protein, 212 aa, Marinimicrobia bacterium
  misc_feature (1)..(212): tr|A0A4Y8I3C3|A0A4Y8I3C3_9BACT 7-carboxy-7-deazaguanine synthase OS=Candidatus Marinimicrobia bacterium MT.SAG .3 OX=2552982 GN=queE PE=3 SV=1
MLKISEIYSSIQGESSYQGLPCVFVRLTGCNLRCSWCDTAYAFFGGEEMSIDEILNDVKEKGISLVEITGGEPLIQEECYGLMTALCDEGMIVLLETGGSIDTVKVDERVKKIIDFKAPSSLMVDENDWNNVSRLTAGDELKFVIGDRADYDWSLEMIKEYELEEKTIINLSPVHNVLQPADLVKWVLEDGLDVRVNLQLHKYIWGEKAMGV

SEQ ID NO: 28896 - protein, 253 aa, Melainabacteria bacterium
  misc_feature (1)..(253): tr|A0A1F6RN25|A0A1F6RN25_9BACT 7-carboxy-7-deazaguanine synthase OS=Candidatus Melainabacteria bacterium RIFOX YA2_FULL_32_9 OX=1801611 GN=queE PE=3 SV=1
MTKNETNIIEIFSSIQGEGPYIGYRQLFIRFALCNLNCAYCDTAFSPEEYCKIEVCPGSGSFKQVKNPVTVEQLIHEIDRLNYFHHHSLSLTGGEPLLNSEFINNFLSEIQEIKANNNLKIYLETNGTLSEELIKVIKNIDIISMDFKLESSYGKTAPWDKHREFINIAQKNNKEIFAKVVVTSKIKPEEVSQIISLISGLGKKIPVILQPVFSKDKALIPEPVKVMEIQEALLKKLTDVRVIPQVHKYLSLL

SEQ ID NO: 28897 - protein, 226 aa, Melainabacteria bacterium
  misc_feature (1)..(226): tr|A0A327JH21|A0A327JH21_9BACT 7-carboxy-7-deazaguanine synthase OS=Candidatus Melainabacteria bacterium OX=20 52166 GN=queE PE=3 SV=1
MSISGENKVKIKEIFASVQGEGPYVGCEQIFVRFCDCNLNCNYCDTDFKGEKEYTANSLKEHIEKYDLSTVHSLSLTGGEPLIFSKFLNEFLPLVNVKKYLETNATLWKDLEKIEKHIDIISADIKLPSSTKIKPLWTLHDKFFETAKKYNKEIFAKVVFNDEITEDEIKNCIQLAKKHELELILQPQTKNNEILPKSTSKVFERFLSEYNHTRLIPQVHKYLGIE

SEQ ID NO: 28898 - protein, 213 aa, Methylomirabilis limnetica
  misc_feature (1)..(213): tr|A0A2T4TYH6|A0A2T4TYH6_9BACT 7-carboxy-7-deazaguanine synthase OS=Candidatus Methylomirabilis limnetica OX=2 033718 GN=queE PE=3 SV=1
MSLRVNEIFYSIQGESTYAGRPCVFVRLTGCNLRCRWCDTAYAFHEGESRSVEQALEQVRSYKCPLVEITGGEPLLQEDVYPLISRLLLEEYEVLIETGGSLSVDRLDPRVVKILDLKAPGSEMDPHNNFDNLRYLDRKDQIKFVVADRRDYEWAKQVMAEHTLAEKVQVLFSPVFGELHPGELAEWLLADRLAARLQIQLHKYLWEPSRRGV

SEQ ID NO: 28899 - protein, 214 aa, Methylomirabilis oxyfera
  misc_feature (1)..(214): tr|D5MMR5|D5MMR5_9BACT 7-carboxy-7-deazaguanine synthas e OS=Candidatus Methylomirabilis oxyfera OX=671143 GN=q ueE PE=3 SV=1
MMSLRVNEIFYSIQGESTYAGRPCVFVRLTGCNLRCRWCDTTYAFHEGEQRSIEQVLEQVRGYKCPLVEITGGEPLLQEAVHPLIDRLLLEGYEVLIETGGSLSIDRLDRRVVKILDLKAPGSGMDPHNNLENLRHLDRKDQIKFVVADRRDYEWARRVMAEHALAEKAHVLFSPVLGELHPRELAEWILTDRLNVRLQIQLHKYLWDPNRRGV

SEQ ID NO: 28900 - protein, 213 aa, Methylopumilus rimovensis
  misc_feature (1)..(213): tr|A0A5B8DH63|A0A5B8DH63_9PROT 7-carboxy-7-deazaguanine synthase OS=Candidatus Methylopumilus rimovensis OX=25 88535 GN=queE PE=3 SV=1
MTQLKIFEIFYSLQGESSRMGLPTIFIRLSGCPMRCHYCDTAYAFQGGSMMDIEDIMVSIKKYDTRYVTVTGGEPLAQKEVLKLLKTLADSNYEVSIETGGGLSIKEVDPRIKIILDIKTPESGEEKKNHWENLDIIDSKDEIKFVLCSREDYDWAKKILDQYKLTEKCSVLFSPVYQKLNVTDLGNWILKDQLHVRMQIQFHKLLWGEKPGV

SEQ ID NO: 28901 - protein, 213 aa, Methylopumilus universalis
  misc_feature (1)..(213): tr|A0A5B8CYX0|A0A5B8CYX0_9PROT 7-carboxy-7-deazaguanine synthase OS=Candidatus Methylopumilus universalis OX=2 588536 GN=queE PE=3 SV=1
MTQLKIFEIFYSLQGESSRIGWPTIFIRLSGCPMRCHYCDTAYAFQGGSMMDIEDIMTSIKKYDTRYVTVTGGEPLAQKEVHNLLKTLADSNYEVSIETGGGLSIKEVDPRIKIILDIKTPESGEEKKNHWENLEIIESKDEIKFVLCSREDYDWAKKIIDQYKLTQKCSVLFSPVYQKLDVTDLGNWILKDQLHVRMQIQLHKLLWGEKPGV

SEQ ID NO: 28902 - protein, 213 aa, Methyloumidiphilus alinensis
  misc_feature (1)..(213): tr|A0A2W4RPY4|A0A2W4RPY4_9GAMM 7-carboxy-7-deazaguanine synthase OS=Candidatus Methyloumidiphilus alinensis OX =2202197 GN=queE PE=3 SV=1
MGKLRITEIFLSIQGESSLVGWPTVFVRLTGCPLRCVYCDTAYAFSGGVICTIAEILEQVRSYKIRHVCVTGGEPLAQLDCLALLRALIGEGYEVSLETSGALDVAEVDRRVVKVLDLKTPSSGEEGKNLYANLSHLFPGDQVKFVIMNDDDYRWSVEKLLEYRLNERCEVLFSPAMGQQDPKELAEKILSDRLPVRFQLQLHKILWGNTPGR

SEQ ID NO: 28903 - protein, 253 aa, Microgenomates bacterium
  misc_feature (1)..(253): tr|A0A3A4ZKM3|A0A3A4ZKM3_9BACT 7-carboxy-7-deazaguanine synthase OS=Candidatus Microgenomates bacterium OX=209 3373 GN=queE PE=3 SV=1
MFGMNSLTKQYLDVQGDLHVNSIFNTFQGEGPFAGMPATFIRLQGCCLKCYFCDTAFDAGVCLSVDEIVRSIEQLNRESKRTPTRACHAFGNKHLVVITGGEPFVQNLVPLISALLDNNYAVQIETAGVLWYPHGGSLSWDMGLLCRQPECSIVVSPKTGKVAEEVCSLAKAWKYIIEHGKVSQEDGLPMESTQVKGTTRKLQRPFAGVPIYVQPCDSYDAAKNALNLKEAMNSAEKFGYILSIQQHKIIGVD

SEQ ID NO: 28904 - protein, 215 aa, Micropelagos thuwalensis
  misc_feature (1)..(215): tr|U2WUX8|U2WUX8_9PROT 7-carboxy-7-deazaguanine synthas e OS=Candidatus Micropelagos thuwalensis OX=1397666 GN= mhpD PE=3 SV=1
MTYSVKEMYYTLQGEGAQSGRPAVFCRFAGCNLWSGLETDRATATCTFCDTDFVGTDGENGGKFSTAEELADKIAALWPDKDALADAYVVFTGGEPLLQLDTKLLEACKAHGFETGVETNGTQIAPAHLDWVCVSPKPDSPLVQDSGHELKFIYPQETLSPHEFADYDFEHFFIQPMEVEDPGAYHHNIQASIVFCLQNPQWRLSLQTHKIIGIS

SEQ ID NO: 28905 - protein, 346 aa, Micropelagos thuwalensis
  misc_feature (1)..(346): tr|U2WUW1|U2WUW1_9PROT UDP-3-O-acylglucosamine N-acyltr ansferase OS=Candidatus Micropelagos thuwalensis OX=139 7666 GN=queE PE=3 SV=1
MVDSRFYPPGKTFSIAELAGFLNVEIKQGDGNASINGVSSLLDAQQSDIVFYNDVKYKNDLAVTRAGALLISAGDIDSIGDFPAAVLVVDDPYKSYALIAQKIFPDQAQAKPVVGVQAEQIHDDAIIGTNVEIGYGAVICAGAEIGEDTIIGANAVIGPGCVVGRRSVISANSVVQFALIGDDVHIHPNVSIGQDGFGYAPDFSGHVKIPQLGRVIIQNHVSIGVGSDIDRGTLSDTMIGEGTKLDNQVHVAHNVRIGRHCLIAGQVGFAGSTIIEDYVMSGGQAAFNGHIHVGKGARILGASVVVKSIPAGQEVAGYPARASSLWRKETALLGQLLRKRKTNKGE

SEQ ID NO: 28906 - protein, 232 aa, Muproteobacteria bacterium
  misc_feature (1)..(232): tr|A0A1F6TVD1|A0A1F6TVD1_9PROT 7-carboxy-7-deazaguanine synthase OS=Candidatus Muproteobacteria bacterium RBG_ 16_65_34 OX=1817760 GN=queE PE=3 SV=1
MTTLPKPDSRDRESAVLPVAERLRITEIFYSLQGEARTVGLPTAFVRLTGCPLRCGYCDTEYAFSGGEWMSLEDILARVSEYRPRYVTVTGGEPLAQRPCRELLRRLCDRDYEVSLETGGALEIGDIDPRVSIVMDLKTPGSGEERKNLYANIERLRPGDQVKFVICDREDYEWSRARLAEYRLDEICEVLFSPAYGQVSPTDLAEWILADRLPVRLQIQLHKLLWGEARGR

SEQ ID NO: 28907 - protein, 230 aa, Muproteobacteria bacterium
  misc_feature (1)..(230): tr|A0A1F6TWK1|A0A1F6TWK1_9PROT 7-carboxy-7-deazaguanine synthase OS=Candidatus Muproteobacteria bacterium RIFC SPLOWO2_01_FULL_60_18 OX=1817768 GN=queE PE=3 SV=1
MPPSETAAVTLRPGSSASDRLRITEIFYSLQGEARTVGYPTVFIRLTGCPLRCTYCDTEYAFYGGQWLDLDDILKRVAEHAPRYVTVTGGEPLAQRPCRELLVALCERGYEVSLETGGALDIAGIDPRVSIVMDLKTPGSGEEQRNLYANIAHLEKKDQVKFVICDRTDYEWSRAKLAEHRLDRICDVLFSPCYGQMNPTDLAEWILQDHLPVRMQIQLHKLLWNDARGR

SEQ ID NO: 28908 - protein, 199 aa, Nephrothrix sp.
  misc_feature (1)..(199): tr|A0A2B8A0T0|A0A2B8A0T0_9BACT 7-carboxy-7-deazaguanine synthase OS=Candidatus Nephrothrix sp. EaCA OX=2044729 GN=queE PE=3 SV=1
MKNLPVMEMFYSLQGEGCHQGSAAFFIRLGGCDVGCVWCDVKESWNENEHPVFSVERIVQEAKAAACKKVIVTGGEPTRHDLSELTRALKKEGKQTHLETAGVYPLTGEWDWICFSPKKFKTPERSVYEAAHELKIIVFHRSDLAWAEEHAKLTNENCHLYLQPEWSRAEEMLPLIVNYVKTEPRWKISLQQHKYIHIP

SEQ ID NO: 28909 - protein, 213 aa, Nitrosoglobus terrae
  misc_feature (1)..(213): tr|A0A1Q2SK27|A0A1Q2SK27_9GAMM 7-carboxy-7-deazaguanine synthase OS=Candidatus Nitrosoglobus terrae OX=1630141 GN=queE PE=3 SV=1
MSRLRITEIFYSLQGESRTVGYPTAFVRLTGCPLRCRYCDTDYAFQGGVWMNLEQIFTTVATFSTHYVTVTGGEPLAQPACLEFLAQLCNAEYETSLETSGALDISAVDPRVIKVMDLKTPGSGEENRNFYANLDYLLSHDQIKLVLCDREDYDWAKTILEKYRLFGRCEVLLSPSYNQLNPTVLAGWILEDHLPVRMQIQLHKYLWGEEPGR

SEQ ID NO: 28910 - protein, 211 aa, Nitrospira inopinata
  misc_feature (1)..(211): tr|A0A0S4KRX6|A0A0S4KRX6_9BACT 7-carboxy-7-deazaguanine synthase OS=Candidatus Nitrospira inopinata OX=1715989 GN=queE PE=3 SV=1
MRVTEIFHSIQGESTFAGLPCVFVRLTGCPLRCSWCDTDYAFYGGTERSIDSIIETVRAYGCPLVEVTGGEPLAQPDCGSLLSRLCDEGFTVLLETSGAVDTAPVDHRVRVVLDVKCPGSGMTNRMYWPNVERLRAQDEAKFVIADRRDYDWAKDIMARFDLNRRCVVLFSPVFGVLDPRRLAEWVLADRLPVRYQLQLHKFVWSPDMKGV

SEQ ID NO: 28911 - protein, 211 aa, Nitrospira nitrificans
  misc_feature (1)..(211): tr|A0A0S4L7D6|A0A0S4L7D6_9BACT 7-carboxy-7-deazaguanine synthase OS=Candidatus Nitrospira nitrificans OX=17429 73 GN=queE PE=3 SV=1
MRVTEIFHSVQGESTFAGLPCVFIRLTGCPLRCTWCDTDYAFFGGTDRSIDDILDRVRSYGCQLVEVTGGEPLAQPDAGTLLRRLCREGFTVLLETSGAVDTAIVDPSVRIILDVKCPGSGMTDRMHWPNVERLRPQDEAKFVMQDRSDYEWAKTILDRFRLTARCSVLFSPVFGALDPRQLAEWLLADRLPIRLQLQLHKHIWTPDMRGV

SEQ ID NO: 28912 - protein, 219 aa, Nitrotoga sp.
  misc_feature (1)..(219): tr|A0A3E1DJV3|A0A3E1DJV3_9PROT 7-carboxy-7-deazaguanine synthase OS=Candidatus Nitrotoga sp. LAW OX=2184310 GN =queE PE=3 SV=1
MITCSVSEQLRITEIFYSLQGETSRVGLPTVFVRLTGCPLRCSYCDTAYAFSGGQNMTIAGILTEVARYNTRYVTVTGGEPLAQKNSLSLLSALCNAGYEVSLETSGALDVSSVDVRVMKILDIKTPASGEVKKNLWSNLIALHAHDEIKFVLCDESDYIWAKQVLRERDLAGKFTVLFSPAQDRLSPTVLADWILRDSLPVRLQVQLHKLLWGSQQGK

SEQ ID NO: 28913 - protein, 219 aa, Nitrotoga sp.
  misc_feature (1)..(219): tr|A0A3E1D762|A0A3E1D762_9PROT 7-carboxy-7-deazaguanine synthase OS=Candidatus Nitrotoga sp. MKT OX=2184311 GN =queE PE=3 SV=1
MITCSVSEQLRITEIFYSLQGETSRVGLPTVFVRLTGCPLRCSYCDTAYAFSGGQNMTVAGILTEVARYNTRYVTVTGGEPLAQKNSLFLLSALCNAGYEVSLETSGALDVSSVDVRVMKVLDIKTPASGEVKKNLWSNLIALHAHDEIKFVLCDESDYIWAKQVLRERDLAGKFTVLFSPAQDQLSPTVLADWILRDSLPVRLQVQLHKLLWGSQQGK

SEQ ID NO: 28914 - protein, 460 aa, Omnitrophica bacterium
  misc_feature (1)..(460): tr|A0A1J4VN28|A0A1J4VN28_9BACT Multifunctional fusion p rotein OS=Candidatus Omnitrophica bacterium CG1_02_49_1 0 OX=1805289 GN=queE PE=3 SV=1
MKKKAVVLLSGGLDSATTLYLAKDQGYKCHSLVFDYGQRHKRELRSARKIAAAAGADYKVLKITLPWKGSSLLDKRGPLPRSDFKKRTGPKIPSTYVPGRNIIFLSFAISYAEAIGADVVFIGANAIDYSGYPDCRADFYRSFVETARLGTRRGREGKAVEVLTPLINKTKSDIVKLGTSLGVPYRYTWSCYRGGKAPCGRCDSCLLRAKGFKEAGLKDPLLKGLKADAAKAGITEIFSSIQGEGIFLGVKQIFVRFKKCNMACAYCDVPRELAPKVYGAGDLLGKIEELEKNKGPHHSISFTGGEPLLYADLLAEILPELKKRRFKVYLETNGTLPEELKKIIDHADVIAMDLKLPSSTGERSFWKEHAEFLKIASLKKVFVKVVVTPRTNKIDISKSIEIVKDVDGKIPLIIQPASPVFKDTKAISDNRLFEFLELASARGVSNTRIVPQLHKILGVR

SEQ ID NO: 28915 - protein, 223 aa, Omnitrophica bacterium
  misc_feature (1)..(223): tr|A0A2H0Y5Q6|A0A2H0Y5Q6_9BACT 7-carboxy-7-deazaguanine synthase OS=Candidatus Omnitrophica bacterium CG08_lan d_8_20_14_0_20_41_16 OX=1974743 GN=queE PE=3 SV=1
MKGKIAEVFDSVQGEGLYLGEKQIFVRFFGCNLSCRFCDTKLYSFSEYGPQELYERLKMYRKNYHSVCFTGGEPLVQKDFLKEISKLTHKDNLKNYLETNGTLPDALKDVIDYIDIVAMDFKFPSSTDLNSFWDAHRLFLEVASAKEVFIKAVICESTEEGDLIDALRLIREVAKNTILILQPDSGASSESLINKLDGFKDICRREKITTCVIPQVHKIMGLK

SEQ ID NO: 28916 - protein, 238 aa, Omnitrophus magneticus
  misc_feature (1)..(238): tr|A0A0F0CKH2|A0A0F0CKH2_9BACT 7-carboxy-7-deazaguanine synthase OS=Candidatus Omnitrophus magneticus OX=16099 69 GN=queE PE=3 SV=1
MALATKNAKISEIFLSYQGEGPFAGSRQLFVRFYGCDKTCAFCDTKFTSYKSFTPDSLLTKIFSFEDNYNELSITGGEPLEHSEFLIEFLKLYKTYKKNPVYLETNGLLPQELTTVIKYIDIIAMDFKLPSSAGEILPNNQDIWAIHKKFSEIAIQKKLIIKAVVTDKTKMQDIKEMGNIVISLKGALEVVLQPVTPVNDEVKAPDAEMLYYFKRYLEKIMGRDILAVGQLHKIFNIP

SEQ ID NO: 28917 - protein, 209 aa, Ornithobacterium hominis
  misc_feature (1)..(209): tr|A0A383TZ34|A0A383TZ34_9FLAO 7-carboxy-7-deazaguanine synthase OS=Candidatus Ornithobacterium hominis OX=249 7989 GN=queE PE=3 SV=1
MVSKNQELVETGEYLPIMEDFYTLQGEGAHTGKASYFIRIGGCDVGCHWCDVKESWDASKHPVTSIKTLIERIPENVKTVVLTGGEPSSYNLYPLTKLLKQRGFKIHMETSGSNEIRGHVDWICLSPKKLQRPVEKVINNAHELKCIIYNQNDFKFAEEYAAKVKESCELFLQPEWSKSKGIVPQIIHYILKNPKWKISIQTHKFLNIP

SEQ ID NO: 28918 - protein, 246 aa, Ozemobacter sibiricus
  misc_feature (1)..(246): tr|A0A367ZS65|A0A367ZS65_9BACT 7-carboxy-7-deazaguanine synthase OS=Candidatus Ozemobacter sibiricus OX=226812 4 GN=queE PE=3 SV=1
MTGRLVEVFPSIQGEGLQVGVMQLFIRFAGCNLACRHCDTVHLREAGATFPLQPWPGHRPRPLPNPVGVDELVAALEEAYPLDDFHSISMTGGEPLGQPAFLLRLVRRLQEKRRAVFIETNGTLPDPVPELVPYVSYWSVDLKLSKGWGLPGTILGKHRRFLAALPPEKTYLKLVIDANDDPEDVCRHLGDGRFRAFPLVIQPLATAQSTLMDWDSFSILEWMRLLRPFFREVRWIPQVHKLLRIP

SEQ ID NO: 28919 - protein, 211 aa, Pandoraea novymonadis
  misc_feature (1)..(211): tr|A0A2P6UYN9|A0A2P6UYN9_9BURK 7-carboxy-7-deazaguanine synthase OS=Candidatus Pandoraea novymonadis OX=180895 9 GN=queE PE=3 SV=1
MAYAVKEIFYTLQGEGANVGRPSVFCRFAGCNLWNGLEEDRAEAFCQFCDTDFVGTHGENGGKFRTPSDLVTQIVARWPEADQFNRFVVCTGGEPLLQLDAPLIDALHMENFKIAIETNGTQPVPAGIDWVCVSPKVGVPLVVTQGDELKVVVPQGGQLLKNYQELDFKYFYLQPMDGPLRERNTRLAIDYCKQDPRWSLSIQMHKYVNIP

SEQ ID NO: 28920 - protein, 223 aa, Pantoea carbekii
  misc_feature (1)..(223): tr|U3U201|U3U201_9GAMM 7-carboxy-7-deazaguanine synthas e OS=Candidatus Pantoea carbekii OX=1235990 GN=ygcF PE= 3 SV=1
MFYPINEIFQTLQGEGFYTGVPSLFIRLQGCPICCTWCDTKYTWKKLINRNNSLNAILLKKVKNDTWSNADLVTLIDTIQKKGWTARHVVITGGEPAIYDLYPLTHALEGLGFHCQIETSGTHKLKCSHNTWVTVSPKVNMHNGYPVLDQTLQRADEIKYPVLNAQDLEVLKKLLLRLGDSKKRIIALQPISLDETATKLCIKTCIDRNWLFSIQMHKYINIS

SEQ ID NO: 28921 - protein, 209 aa, Paraburkholderia kirkii
  misc_feature (1)..(209): tr|G4M7T8|G4M7T8_9BURK 7-carboxy-7-deazaguanine synthas e OS=Candidatus Paraburkholderia kirkii UZHbot1 OX=1055 526 GN=queE PE=3 SV=1
MTYAVKEIYYTLQGEGANAGRPAVFCRFAGCNLWSGREEDRADAVCQFCDTDFVGTDGENGGKYRTPAELVAKIASFWPEGAGHRFVVCTGGEPMLQIDEPFVDALHEAGFEMAIETNGSLPVLESIDWICVSPKADAPLVTKGNELKVVVPQDNQRLADYEKLDFDYFLVQPMDGPSRDINTKLAIDWCKRHPKWRLSMQTHKYLNIP

SEQ ID NO: 28922 - protein, 210 aa, Paraburkholderia kirkii
  misc_feature (1)..(210): tr|A0A0L0M0S8|A0A0L0M0S8_9BURK 7-carboxy-7-deazaguanine synthase OS=Candidatus Paraburkholderia kirkii OX=1988 22 GN=queE PE=3 SV=1
MTYAVKEIFYTLQGEGANAGRPAVFCRFAGCNLWSGREEDRADAVCQFCDTDFVGTDGESGGKYKTPAELVAKIASLWPEGAAHRFVVCTGGEPMLQIDLPFVDALHEAGFEMAIETNGSLPVLESIDWICVSPKADAPLVVTKGNELKVVVPQDNQRLAEYEKLDFDYFLMQPMDGPSRDINTKLAIDWCKRYPKWRLSMQTHKYLNIP

SEQ ID NO: 28923 - protein, 229 aa, Parcubacteria bacterium
  misc_feature (1)..(229): tr|A0A3M0WZA6|A0A3M0WZA6_9BACT 7-carboxy-7-deazaguanine synthase OS=Candidatus Parcubacteria bacterium OX=2053 309 GN=queE PE=3 SV=1
MSTETIVVSEIFKSIQGEGLRTGTPSVFVRLTGCNLMCGKGNATWTCDSIEVWKKGNRVAVQQLAQQVNDYKLNNIVVTGGEPLLQQTALSKFFSLLNQRIGIEIETNGTIKPLPDIDAHLPFYNVSIKLQNSGEEKKVRLISEAIKFLAECERSMFKFVVAEESDMREIQKIIDCFAIRQNKIMLMPAGSTRDELNRVSPLIAKLAIEQNYVYSDRTHIRIWDKATGV

SEQ ID NO: 28924 - protein, 295 aa, Pelagibacter sp.
  misc_feature (1)..(295): tr|A0A1Z9MM11|A0A1Z9MM11_9PROT 7-carboxy-7-deazaguanine synthase OS=Candidatus Pelagibacter sp. TMED202 OX=198 6810 GN=queE PE=3 SV=1
MEKLRYSEIFYSVQGEGRFVGVPSVFFRVFGCNFNCHGFGQGRDKSKWLKPEEMPYMTQDLSHVKHVRDLPVVEIGCDASASWASRYKHLVSWDTVDDIAVKVKQYTPNNKWTNDNGSDIHFIITGGEPMLWQRETQQLLRQPEFNDLKNLTIETNCTQPFKAEFERFLQGLVHGDYTKEPVHITWSTSPKLSISGEHWAKAIKPFVARQYHKIPNTHLYFKFVVQDEQDLEEVEMARKEYNELGVDADIYLMAVGATQEGQAKTSKQVADIALQNGYKYSPRLHVDLFGNKWGT

SEQ ID NO: 28925 - protein, 210 aa, Peregrinibacteria bacterium
  misc_feature (1)..(210): tr|A0A1F7AE91|A0A1F7AE91_9BACT 7-carboxy-7-deazaguanine synthase OS=Candidatus Peregrinibacteria bacterium RIF CSPLOWO2_02_FULL_39_10 OX=1801899 GN=queE PE=3 SV=1
MQVTEIFYSLQGEGLFLGIPAVFLRLNGCNLRCKWCDTKYALDPKNARQMTIDEITKIIKKYPAKHLVITGGEPLLQQKEILSLIKKLKNYYIEVETNGTIKSTLDNYVDLYSCSPKLAHAKTLNLPLQKFPGKKTFYKFVIEHPANIEEVKNFIRKYKIKKSRVLLMPLGTKEKELKERSKWLAELCKKEDLRFSPRLQITLWGTTRAR

SEQ ID NO: 28926 - protein, 213 aa, Peregrinibacteria bacterium
  misc_feature (1)..(213): tr|A0A2H0L002|A0A2H0L002_9BACT 7-carboxy-7-deazaguanine synthase OS=Candidatus Peregrinibacteria bacterium CG1 1_big_fil_rev_8_21_14_0_20_46_8 OX=1974793 GN=queE PE=3 SV=1
MILNEVFFSVQGEGVNIGKPAIFVRFGNCNLKCTWCDTKYTWDPAVADNVRVDLPELFGKIRAYDCKHLVITGGEPMLQQDVICAIREEFLDYYIEVETNGSFAATEKCAEAVDLFTVSYKTSNSGNAPYELKMFGLACVYKFVVDAVGDFEEIEAVIAKYKLPAEKIYLMPQGVTRDELLKKHDMLIARCKEKGYTFTPRLHILTWGAERRK

SEQ ID NO: 28927 - protein, 225 aa, Peribacteria bacterium
  misc_feature (1)..(225): tr|A0A1F7BMY8|A0A1F7BMY8_9BACT 7-carboxy-7-deazaguanine synthase OS=Candidatus Peribacteria bacterium RIFCSPHI GHO2_01_FULL_55_13 OX=1801917 GN=queE PE=3 SV=1
MVISEIFHSIQGEGPTTGRPAVFVRLGMCNLQCNFCDTPYTWKPGQEDYSDEANERIVEEIAKLLIAHPGTNMMIWTGGEPMLQQRDIVATIDYLKERIADRVLEHEVETNGTIAAHPELDKRIDRYNCSPKTAMSGNNTYSVRLRDYAKTIYKYVVGTKEHCEEALREIERQKLPRDRCFFMVLGTTAEEMLQRSPTIAEVCKKEGITLCIRLQSVLWNSARGV

SEQ ID NO: 28928 - protein, 216 aa, Phaeomarinobacter ectocarpi
  misc_feature (1)..(216): tr|X5MEM0|X5MEM0_9RHIZ 7-carboxy-7-deazaguanine synthas e OS=Candidatus Phaeomarinobacter ectocarpi OX=1458461 GN=queE PE=3 SV=1
MTYSVKEMFPTLQGEGGQAGRAAVFLRFAGCNLWTGREEDRADAVCTFCDTEFVGTDGDGGGKFSTPDDLAAAVTSKWQGGPAGRLVVCTGGEPLLQLDGPLIDALHTAGFEIAVETNGTLEAPEGKTGGIDWICVSPKANAPLVLTSGQELKLVYPQSEAEAQPERFETHDFQHFYLQPMDSPARDKNTQLAVSYCLSHPKWRLSLQSHKYIGIP

SEQ ID NO: 28929 - protein, 222 aa, Photodesmus blepharus
  misc_feature (1)..(222): tr|A0A084CM91|A0A084CM91_9GAMM 7-carboxy-7-deazaguanine synthase OS=Candidatus Photodesmus blepharus OX=117915 5 GN=queE PE=3 SV=1
MYTINEIFETIQGEGHFTGTPSVFIRFQKCLVRCTWCDTKQTWDASPKNERTLNEISTKPKGSSTWCASSSQEIVEAYRKQGFFSKHIVITGGEPCIYDLRPLSEKFEEIGCRCQIETSGTSEILTSKMTWVTVSPKVSKKQGLTVTNAALCRANEIKHLVKTRRDIEILDRLLSETNINENTVIALQPMSQNIRATKLCIEICIQRNWKLSVQTHKYLNIP

SEQ ID NO: 28930 - protein, 222 aa, Photodesmus katoptron
  misc_feature (1)..(222): tr|S3E084|S3E084_9GAMM 7-carboxy-7-deazaguanine synthas e OS=Candidatus Photodesmus katoptron Akat1 OX=1236703 GN=queE PE=3 SV=1
MYKVNDIFETIQGEGSLSGIPSVFVRLQGCTVGCSWCDTKDTWNVNFQNQCDLNEILNKTYPSESWCLSSAQEIIDVYRKRGFLAKHIVITGGEPCIYDLRPLLNGFEIIGCSCQIETSGTSEIRVSKRTWVTVSPKFLMKNKLPVLNSALYRADEIKYPVAVEKDIKKLDKLLSSIKISDKTIISLQPVSQKTHATELCIRTCIQRNWRLSIQSHKYLNIV

SEQ ID NO: 28931 - protein, 217 aa, Phycorickettsia trachydisci
  misc_feature (1)..(217): tr|A0A2P1P9D0|A0A2P1P9D0_9RICK 7-carboxy-7-deazaguanine synthase OS=Candidatus Phycorickettsia trachydisci OX= 2115978 GN=queE PE=3 SV=1
MFGNNPIRGLEKGSGDELFVQDIFLTIQGEGPFVGHAAVFMRLGGCNLACKFCDTEFESFTQIPIDKILEKILSFQTKLVVITGGEPMRQPIEKFCQLLLDNNLKVQIETNGTIFRNLPEKVHIVCSPKAPNGKYYKLREDMLRRINALKFLISTKFEAYKDVPDVGQSGYNIPTYVQPMDEYDAELNKQNTQHAIKLAQKFGYILSVQTHKFIGIP

SEQ ID NO: 28932 - protein, 211 aa, Phycosocius bacilliformis
  misc_feature (1)..(211): tr|A0A2P2E987|A0A2P2E987_9PROT 7-carboxy-7-deazaguanine synthase OS=Candidatus Phycosocius bacilliformis OX=14 45552 GN=queE PE=3 SV=1
MTYMVKECFYTLQGEGGQAGRPAVFLRFAGCNLWSGREQDRASAVCSFCDTDFVGTDGEGGGKFETAEALAAHVTALWPDPGQGRPYVVCTGGEPLLQLDEALIDALHAAGFEIAVETNGTHVAPPGIDWICVSPKATAPVVLTRGDELKLVYPQPTAMPDRFAKLDFTHFFLQPMDGPNKVANTQAAVDYCLAHPQWRLSLQTHKVLGIP

SEQ ID NO: 28933 - protein, 225 aa, Poribacteria bacterium
  misc_feature (1)..(225): tr|A0A2D6CYZ0|A0A2D6CYZ0_9BACT 7-carboxy-7-deazaguanine synthase OS=Candidatus Poribacteria bacterium OX=20267 81 GN=queE PE=3 SV=1
MKYSEVFHSIQGEGKLVGTPSVFVRTSFCNLRCAWCDTPYTSWEPEDRDISVDELLGAVANFGCRHVVITGGEPFIQERELAELCARLREGGKHVTVETNATVFAPVAADLISMSPKLRNSTPVGDTWEARHEDRRIAPDVIRAFLAAYECQVKFVLDAPDDIDEVHELRGRVPIAAEDIILMPQGLTADETQRRMAWLSEACTRHGYRLSPRMHVDIWGAKRGV

SEQ ID NO: 28934 - protein, 226 aa, Poribacteria bacterium
  misc_feature (1)..(226): tr|A0A3D2RSC4|A0A3D2RSC4_9BACT 7-carboxy-7-deazaguanine synthase OS=Candidatus Poribacteria bacterium OX=20267 81 GN=queE PE=3 SV=1
MKYSELFYTIQGEGILIGIPSVFLRTSYCNLRCIWCDTPYTSWKPEDKNISVNKAIEEITKYNCKHVVITGGEPFIQAKELVDLCYKLSKNGHHITIETNATVYEDVSAHLISMSPKLRNSNPKPDNHYYEMHQHKRIQTDVIHKFLDNYTCQLKFVMETPEDLEEIKCLQVEIGIPDEEIVLMPQGISTEETQAKQEWIIELCKQHGYRYSPRVHIDIWGNQRGV

SEQ ID NO: 28935 - protein, 219 aa, Propionivibrio aalborgensis
  misc_feature (1)..(219): tr|A0A1A8XJG6|A0A1A8XJG6_9RHOO 7-carboxy-7-deazaguanine synthase OS=Candidatus Propionivibrio aalborgensis OX= 1860101 GN=queE PE=3 SV=1
MVGSNNRLSLKVSEIFFSVQGESSRAGLPTVFVRLTGCPLRCVWCDTEYAFTGGQSMTLNRILEEVGTFKTRLVCVTGGEPLAQKNCLLLLTALCDSAYEVSLETSGAIDIAIVDPRVSRVVDLKAPGSGESGKNRWQNLELLTPHDELKFVIKDRTDYEWARNTIVENRLDTVCPVLFSPVQGAIEPRMLAEWILADRLPVRFQLQLHKLLWGNIRGK

SEQ ID NO: 28936 - protein, 220 aa, Pseudomonas adelgestsugas
  misc_feature (1)..(220): tr|A0A481QP19|A0A481QP19_9PSED 7-carboxy-7-deazaguanine synthase OS=Candidatus Pseudomonas adelgestsugas OX=13 02376 GN=queE PE=3 SV=1
MPVATMQNTLRITEIFYSLQGETRTAGLPTVFIRLTGCPLRCQYCDSAYAFSGGTVYTIDNIIEQVAYFKPRYACVTGGEPLAQPNSIQLLKRLCDTGYEVSLETSGALDISAVDLRVSRVVDLKTPDSKEAHRNLYDNIDLLTANDQVKFVICSRGDYNWATSKLIQYDLNRRAGEVLFSLSHDDLNARDLADWVVADNLPVRLQLQLHKYLWNNDPGR

SEQ ID NO: 28937 - protein, 213 aa, Raymondbacteria bacterium
  misc_feature (1)..(213): tr|A0A1F7FL05|A0A1F7FL05_9BACT 7-carboxy-7-deazaguanine synthase OS=Candidatus Raymondbacteria bacterium RIFOX YD12_FULL_49_13 OX=1817890 GN=queE PE=3 SV=1
MDLVVSEIFVSLQGESSEAGRRCAFVRLAGCNLDCAYCDTRYARTGGKKMTLAQVITAVEKLNCPLVEVTGGEPLHQPKSVDLMKALLKKGHEVLLETNGSCDLSPVPRRIKIIMDIKTPSSNMTQYNMLSNIRLLKRTDEIKFVITDKRDYSFSRQIIKKYKLDKKCRVLLSPEQTQGSAQHLAQWILNDKLNVRLNLQLHKIVWPGRKKGI

SEQ ID NO: 28938 - protein, 265 aa, Regiella insecticola
  misc_feature (1)..(265): tr|E0WR21|E0WR21_9ENTR 7-carboxy-7-deazaguanine synthas e OS=Candidatus Regiella insecticola LSR1 OX=663321 GN= queE PE=3 SV=1
MKFALGANKGVSQNMRGQFGEKITICNNHRSFLLLLEILMLYPINEIFQSLQGEGYFTNVPAIFIRLQGCPVACSWCDTKHTWDIKKDKEIDIQGITVKTVAKDTWSNANEQQLVAICKEKYQARHVVITGGEPCLYDLQPLTSLLEENGYRCQIETSGTHPVRCSTASWVTVSPKIGMKGGLKLLDQALQRADEIKHPVARERDIERLNNLLDKLNDGKKPVIALQPIRKTEKESEEATKLCIETCIKHNWRLSVQMHKYLKIR

SEQ ID NO: 28939 - protein, 271 aa, Roizmanbacteria bacterium
  misc_feature (1)..(271): tr|A0A2G9Y6L7|A0A2G9Y6L7_9BACT 7-carboxy-7-deazaguanine synthase OS=Candidatus Roizmanbacteria bacterium CG23_ combo_of_CG06-09_8_20_14_all_35_49 OX=1974863 GN=queE P E=3 SV=1
MGNSYEYGCLYKKRSMKIYRPTVLDKQRIKPIPNMLKVSGDQVFATFQGEGITAGQPAVFLRLHYCNLACSWCDTKYTWDKTRKEFWQEPIDWSYPEAVTKIKAAWLQKFGLKTPDSKKRLVITGGEPLLQQAKIVKLLQFLPNWRVEIETNGTIIPLAELSNCQINCSPKLENSGNLLSLRFKSEVLKQINSLPNSWFKFVVVKAKDLEEIDEIVTCCALNPEKILIMPEGYTVETISEHLIQVKTEVQKRKWRVIQRNQIIWYGNKRRT

SEQ ID NO: 28940 - protein, 276 aa, Roizmanbacteria bacterium
  misc_feature (1)..(276): tr|A0A1F7I248|A0A1F7I248_9BACT 7-carboxy-7-deazaguanine synthase OS=Candidatus Roizmanbacteria bacterium RIFCS PHIGHO2_12_FULL_39_8 OX=1802050 GN=queE PE=3 SV=1
MPLLAKKTEMKIKKNTKRASDFLKSKVPKKYKDFDKLRMMEECFKVSGDGVFYTVQGEGISTGLPSCFLRLHTCNLRCVWCDTWYTWNHNTKEFWTEFQDWTIEKTKEKIEKTWGCENSLIQKRLVITGGEPLIQKNKIDKLVELMPGWVFEVETNGTIMPTENMLKKFQFNCSPKLQNSLNPKAARIKKDVLIHLNKVNTMFKFVVTSAKDLEEIENDFIRPFSLDVNRIVVMPQGITSDELQINMRKIVEAVKKRGYRLMGRLQCEIWGGRRKV

SEQ ID NO: 28941 - protein, 228 aa, Rokubacteria bacterium
  misc_feature (1)..(228): tr|A0A0T5ZYY1|A0A0T5ZYY1_9BACT 7-carboxy-7-deazaguanine synthase OS=Candidatus Rokubacteria bacterium CSP1-6 O X=1640509 GN=queE PE=3 SV=1
MLQRADLRKSLTGRIAEVFFSIQGEGPTAGMPAVFVRLQGCSVGCAWCDTKYSWDPRAGREVALDEVVEEAAAFPCRRSVITGGEPLESSLFAPLVEALTTRGFTLEVETSGTLAPPAVAVAQWNVSVKLAGSGVPEAKRINPDAIREFLRLGAWWKFVVVDASNVAEVLRLAERFAIPRERILLMPEGVRREEILERSPWVWEECKRYGFRFSPRLHILLWGAKRGV

SEQ ID NO: 28942 - protein, 232 aa, Rokubacteria bacterium
  misc_feature (1)..(232): tr|A0A2V6R4H5|A0A2V6R4H5_9BACT 7-carboxy-7-deazaguanine synthase OS=Candidatus Rokubacteria bacterium OX=20536 07 GN=queE PE=3 SV=1
MWAMPTAAALRSNDLTLRVSEVFASIQGEGVTAGTPSVFVRLQGCAVGCAWCDTKYSWSPTGGRETTLASLMAEVTAAGCDNVVVTGGEPLEHPAFAPLVAALKQLGRRVEVETAGTRVPPEAPVDQWNVSLKLAHAGVAESTRLRPEAIERLRDLDAWFKFVVATPADLAEVMELQARYRLPSERILLMPLGMRRQEQETLTPAVVDWCRERGFRFSPRLHILIWGPRRGV

SEQ ID NO: 28943 - protein, 209 aa, Saccharicenans subterraneum
  misc_feature (1)..(209): tr|A0A3E2BNS2|A0A3E2BNS2_9BACT 7-carboxy-7-deazaguanine synthase OS=Candidatus Saccharicenans subterraneum OX= 2508984 GN=queE PE=3 SV=1
MLPPPTLKISEIFFSAAGEGLRQGQPTIFVRFSGCNLRCSFCDTKYAWKGGKELLPEEILDRIAPLKNRYKTNWVCLTGGEPLLQDVGALVRLLRRVSFRVHIETNGTRPVPVKPDWLTVSPKPPVYKITSDCLRLASEVKLVVTRSLKPGEIGRIREKFSENIPLLLQPQSHAAWSYKKAWKLYIQAIQEGLPNIRLSGQLHKIYGIK

SEQ ID NO: 28944 - protein, 245 aa, Saganbacteria bacterium
  misc_feature (1)..(245): tr|A0A2H0XXH1|A0A2H0XXH1_9BACT 7-carboxy-7-deazaguanine synthase OS=Candidatus Saganbacteria bacterium CG08_la nd_8_20_14_0_20_45_16 OX=2014293 GN=queE PE=3 SV=1
MSTTEAQLVDIFNSIQGEGLYVGERQIFVRLAGCNISCQYCDSESALQIPQEFTVETDPGMHKVQKFKNPTSVDQLVQLIEAFGKDFPVSLTGGEPLLQVDFLKNFLPKLKQKKYLETNGTLPDHLAEIIELIDVVAMDIKLASATGLSSYDKEHRRFLEVAYMKEVFVKIVFTKKSKIKEIDEAVRLIADVDEKIPLVLQPVTPHGAIKHRPLPDQIFAFYNVARRRLKTVRVIPQVHKVLGLS

SEQ ID NO: 28945 - protein, 218 aa, Scalindua brodae; identical to SEQ ID NO: 28800
  misc_feature (1)..(218): tr|A0A0B0ENF4|A0A0B0ENF4_9BACT 7-carboxy-7-deazaguanine synthase OS=Candidatus Scalindua brodae OX=237368 GN=q ueE PE=3 SV=1

SEQ ID NO: 28946 - protein, 216 aa, Scalindua sp.
  misc_feature (1)..(216): tr|A0A523CM97|A0A523CM97_9BACT 7-carboxy-7-deazaguanine synthase OS=Candidatus Scalindua sp. AMX11 OX=2555784 GN=queE PE=3 SV=1
MNESRLMVNELFMSIQGESSHAGIPCIFIRLTGCNLRCTYCDTTYAYDKGVEMSLQTIEEKIEAFHCKNICITGGEPLLQNNIKELIRVLLHLKYKVFVETNGSVNISLLPKNVIRVMDIKCPDSHMHGEMDWDNIERLRPNDDVKFVISTKDDYEWAKQITITYNLTSKSNVLFGVVYGTLEPRILAEFILRDKLDVRFQLQLHKYIWPNKTRGV

SEQ ID NO: 28947 - protein, 212 aa, Schekmanbacteria bacterium
  misc_feature (1)..(212): tr|A0A1F7RQY2|A0A1F7RQY2_9BACT 7-carboxy-7-deazaguanine synthase OS=Candidatus Schekmanbacteria bacterium RBG_ 16_38_10 OX=1817879 GN=queE PE=3 SV=1
MKICEIFYNIQGESTFSGLPCVFIRTSGCNLRCSYCDTRFAYEEGYEIKTGKILEKIKKFNCNLIEITGGEPLLQEEVYDFIEKSLEANYRILIETNGSILTNRLPKQVIKILDIKCPGSGQSEMMDLNNLSYLKMNDQVKFVIMDEGDYNWAKNLISENNLTSITENILFSSVYGILDPKKLAEWILKDNLNVRLQLQIHKIIWGSCMRGV

SEQ ID NO: 28948 - protein, 211 aa, Schekmanbacteria bacterium
  misc_feature (1)..(211): tr|A0A1F7RD82|A0A1F7RD82_9BACT 7-carboxy-7-deazaguanine synthase OS=Candidatus Schekmanbacteria bacterium GWA2 _38_11 OX=1817876 GN=queE PE=3 SV=1
MKICEIFYSIQGESTFSGFPCIFVRTSGCNLRCTYCDTKFAYEEGSEMTVNEIIERIKQYNCRMLEITGGEPLLQEDVYKLIERALKKKYKVLLETNGSLRINKLPVQVIKILDVKCPGSGQSDLMDFENLSYLNKEDQIKFVLSDRADYDWAKEIMLADNLINRVNVLLSPVFGSLELKKLAEWILADNLDVRFQIQLHKIIWDPCMRGV

SEQ ID NO: 28949 - protein, 204 aa, Schmidhempelia bombi
  misc_feature (1)..(204): tr|A0A484GCR2|A0A484GCR2_9GAMM 7-carboxy-7-deazaguanine synthase OS=Candidatus Schmidhempelia bombi str. Bimp OX=1387197 GN=queE PE=3 SV=1
MTKFNIVEIFESLQGEGYNTGMPAIFIRFAGCNLNCQWCDTNFRQYTKMTLEMILEKIALFESKNIIITGGEPTLQKYLPLLLSQLKKNGYFIAIESNGLGKIDPHFDYIALSPKFCYWNRYQTIQQPQIDEIRIVVEEKSDFYDFCLFIEKHFHAKRYYLSPCELDGQFNILATIQILGRINQGRTDNKWLLSFQTHKFANID

SEQ ID NO: 28950 - protein, 226 aa, Sodalis pierantonius
  misc_feature (1)..(226): tr|W0HHY6|W0HHY6_9GAMM 7-carboxy-7-deazaguanine synthas e OS=Candidatus Sodalis pierantonius str. SOPE OX=2342 GN=ygcF PE=3 SV=1
MQYPLNEIFQTLQGEGYFTGVPAIFIRLQGCPVGCSWCDTKHTWQQDETDHVPAGEIPLKTADSSRWASLTAEEMIAMIAMIAQQGWTARHVVITGGEPCLHDLMPLTHALEQQGFSCQIETSGTQDVHCTPQTWVTVSPKINMRGGLPVLAQALGRSDEIKHPVARQRDIDELDALLQTLHDTKQRVIALQPISQKEAATRLCIETCIARNWRLSMQTHKYLNIA

SEQ ID NO: 28951 - protein, 212 aa, Sulfobium mesophilum
  misc_feature (1)..(212): tr|A0A2U3QH80|A0A2U3QH80_9BACT 7-carboxy-7-deazaguanine synthase OS=Candidatus Sulfobium mesophilum OX=2016548 GN=queE PE=3 SV=1
MKICEIFTSIQGESTYAGLPCTFVRLSGCNLRCRYCDTKYSYYEGVEMSAEDIIGHVRAAGVPLVEITGGEPLLQQQDALLLVRDLLNEGYEVLVETNGSLSICEIDKRAVIILDVKTPGSGMSNQMDFSNFDCLKPSDEVKFVVCDRSDYDWAKDVVAEFRLKEKAKVLFSPAVGTIQPAELARWIINDKLDVRFNLQIHKYIFGPEERGV

SEQ ID NO: 28952 - protein, 223 aa, Sulfopaludibacter sp.
  misc_feature (1)..(223): tr|A0A2N9MHT4|A0A2N9MHT4_9BACT 7-carboxy-7-deazaguanine synthase OS=Candidatus Sulfopaludibacter sp. SbA3 OX=2 043164 GN=queE PE=3 SV=1
MKIAELFYSIQGEGSLVGVPSVFIRTSGCNLRCAWCDTPYTSWQPEGTELSLDQILDEVKAHPARHVVVTGGEPMIAPEILPLTERLRALGLHITIETAGTVFAPVACDLMSISPKLSNSTPAGSWSAQHNRLRIQPQVLAELMGRYDYQLKFVIARREDMEELRAIVQFLGARRECVILMPEGIDSERLRERGLWLAEICKEEGFRFSPRLHVDLWGNQRGV

SEQ ID NO: 28953 - protein, 223 aa, Sulfopaludibacter sp.
  misc_feature (1)..(223): tr|A0A2U3LWY6|A0A2U3LWY6_9BACT 7-carboxy-7-deazaguanine synthase OS=Candidatus Sulfopaludibacter sp. SbA4 OX=2 043165 GN=queE PE=3 SV=1
MKIAELFYSLQGEGSLVGVPSFFIRSSGCNLRCSWCDTPYTSWEPEGCDMTIRQILDEVKAHPARHVVVTGGEPMIASEIIPLTERLRGLGLHITIETAGTVFQPVACDLMSISPKLANSTPEGRWAAQHDRLRIQPETLAKLMERYEYQLKFVVEKPADLEEVRSLTESLAAPRERVILMPEGTDAEGLRQRGVWLAEICKDEGFRFSPRLHVDLYGNRRGV

SEQ ID NO: 28954 - protein, 226 aa, Sulfotelmatobacter sp.
  misc_feature (1)..(226): tr|A0A2N9N501|A0A2N9N501_9BACT 7-carboxy-7-deazaguanine synthase OS=Candidatus Sulfotelmatobacter sp. SbA7 OX= 2043160 GN=queE PE=3 SV=1
MQITEIYKSIQGESTHAGLPCVFVRLTGCNLRCSWCDSEYTFTGGHRMSMEEVLEQVEQLSPGGLVEITGGEPMLQEKEVVPLMQRLLDDGYTVLLETSGERPLQSVPKGVIKIVDVKCPHSGEPDTFDLENLEVISSGDEVKFVLSDRTDYEFARDFEARHELTRRVNAVLFSPAFTKDAHGGRDTSHCLLDPRELAEWMLADNVPARLGLQLHKFIWDPALKGV

SEQ ID NO: 28955 - protein, 227 aa, Sulfotelmatobacter kueseliae
  misc_feature (1)..(227): tr|A0A2U3L1K8|A0A2U3L1K8_9BACT 7-carboxy-7-deazaguanine synthase OS=Candidatus Sulfotelmatobacter kueseliae OX =2042962 GN=queE PE=3 SV=1
MQITEIYKSLQGESTYAGLPCVFVRLTGCNLRCTWCDSEYTFQGGRKMATEEVRDEVSRLNPGGGLVEITGGEPMLQEKEVVPLMQHLVNDGYRVLLETSGERPLERVPAGVVKIVDVKCPDSGEVGTFRVDNLKALTARDEVKFVLASRADYEFAREFIRQHNLAEEVNAVLFSPAFRKDGTGPHDSSQCLLDPKELAEWMIADNVPARLGLQLHKFIWDPARKGV

SEQ ID NO: 28956 - protein, 212 aa, Sulfotelmatomonas gaucii
  misc_feature (1)..(212): tr|A0A2N9LC67|A0A2N9LC67_9BACT 7-carboxy-7-deazaguanine synthase OS=Candidatus Sulfotelmatomonas gaucii OX=204 3161 GN=queE PE=3 SV=1
MSYAVKEIYYTLQGEGAQTGRPAVFCRFAGCNLWSGREQDRASAICKFCDTDFADTNGIGGGHFAVAEALAAAIERKWPADAGVPERFVVCTGGEPLLQLDADLIVALHKRGFEIAIETNGTIEAPEGLDWICVSPKAGAEFRQRSGDELKLIYPQPGADPTEFEGLPFRHFFLQPMDGPHRDENTTLALNYCLEHPRWRLSLQTHKIIGIP

SEQ ID NO: 28957 - protein, 252 aa, Sulfuricurvum sp.
  misc_feature (1)..(252): tr|K7SCK0|K7SCK0_9HELI 7-carboxy-7-deazaguanine synthas e OS=Candidatus Sulfuricurvum sp. RIFRC-1 OX=1249480 GN =queE PE=3 SV=1
MLYLVEHFYSVQGEGKYTGVPSLFFRFGGCNLKCEGFGCTERSPDGSEVLGCDTVYAVDRKAFGELWMEIEELQSLIWIMNGYRLPPHVDVVLTGGEPLIYANEPIFVEFIEYLIGQGHRVTFETNATIAPDFKRYPFYAQATYALSVKLSNSGEPLDKRVKPEAYGAIIANAKESFFKFTVDEPSLVSYIESEIDEIIALHPYTPVYCMPLGGDKAHIEANCEAVIEFCKRRGFIYSDRLHIRIWDQNHGV

SEQ ID NO: 28958 - protein, 166 aa, Sumerlaea chitinovorans
  misc_feature (1)..(166): tr|A0A2Z4Y550|A0A2Z4Y550_9BACT Queuosine Biosynthesis Q ueE Radical SAM OS=Candidatus Sumerlaea chitinovorans O X=2250252 GN=BRCON_1507 PE=4 SV=1
MVLSRILSQVHELGCPLVEVTGGEPLAQRECITLLHALLEQGYTVLLETSGAYSLREVPTEVHRIVDLKCPSSGEMHRNCWENISLLTLRDEVKFVVGTREDYEWAQDQIHQHRLFDRCGAVLFSPVWGQLAPRELASWLLADHLFAARLQIQLHKVIWPTESRGV

SEQ ID NO: 28959 - protein, 111 aa, Synechococcus spongiarum
  misc_feature (1)..(111): tr|A0A1T1D6Z6|A0A1T1D6Z6_9SYNE 7-carboxy-7-deazaguanine synthase QueE (Fragment) OS=Candidatus Synechococcus s pongiarum LMB bulk15N OX=1943583 GN=BV53_01140 PE=4 SV= 1
MSTGGLLRVVEHFHSIQGEGVHMGLSAVFLRLAGCSVGCPWCDTKESWPAHGHPLVPVERLVDTVRQARPALVVITGGEPLQQDLTSLCQALAPLAIPRHLETSGVAPLSG

SEQ ID NO: 28960 - protein, 207 aa, Synechococcus spongiarum
  misc_feature (1)..(207): tr|A0A1T1D207|A0A1T1D207_9SYNE 7-carboxy-7-deazaguanine synthase OS=Candidatus Synechococcus spongiarum LMB bu lk15M OX=1943582 GN=queE PE=3 SV=1
MSTGGLLRVVEHFHSIQGEGVHMGLSAVFLRLAGCSVGCPWCDTKESWPAHGHPLVPVERLVDTVRQARPALVVITGGEPLQQDLTSLCQALAPLAIPRHLETSGVAPLSGAFEWITLSPKRHHPPQPALLARCHELKVVIHEPADLDFAMAMATTCQNMCAASPGPQLCVQPGAGSATGAHLAIRHVKQYPQWRLSLQTHKWLGVR

SEQ ID NO: 28961 - protein, 247 aa, Syntrophonatronum acetioxidans
  misc_feature (1)..(247): tr|A0A424YFI5|A0A424YFI5_9FIRM 7-carboxy-7-deazaguanine synthase OS=Candidatus Syntrophonatronum acetioxidans OX=1795816 GN=queE PE=3 SV=1
MEAYLREIFSSFQGEGIFIGYRQVFLRFAGCNLNCFYCDTERGECPSFCCLEEKEGSGYFKKLPNPFKYNDLLKAINNFPLNKHHSLSLTGGEPLLHGEFLKDFLPLIKEQGNIKIFLETNGTLPDYLEIILPYIDIIAMDFKLPSSLKGKNYLKRHLKFLKMSLQKEAFIKIILTEHSREEEIVEFLTATREISDSVPVVFQPMVNPGNAYSSLSPEKILNFQSLGLDYYPGIRVIPQAHKILKCM

SEQ ID NO: 28962 - protein, 207 aa, Syntrophosphaera thermopropionivorans
  misc_feature (1)..(207): tr|A0A4V2ZQ46|A0A4V2ZQ46_9BACT 7-carboxy-7-deazaguanine synthase OS=Candidatus Syntrophosphaera thermopropioni vorans OX=2593015 GN=queE PE=3 SV=1
MSLNICEIFYSLQGESTYSGLPCIFIRLSGCNLRCSWCDTTYTWSNGKEMSIEQILQEIRKYPCSLVEITGGEPLLQKRTIELMEILHQEKYRILLETNGTQSLQNVPDYVVKIVDVKCPGSGFGESFLMENLNFLLPVDEIKFVLASREDYMFALNFIRNNALEDRILLFSPVIGHLAPETLAQWMLKDGVPAHLQFQLHKLLQLA

SEQ ID NO: 28963 - protein, 221 aa, Tachikawaea gelatinosa
  misc_feature (1)..(221): tr|A0A090BWG1|A0A090BWG1_9ENTR 7-carboxy-7-deazaguanine synthase OS=Candidatus Tachikawaea gelatinosa OX=14103 83 GN=queE PE=3 SV=1
MNYPINEVFQTLQGEGFYTGTPAIFIRMQYCQIKCNWCDTKYTWNKKNEKKISINNILKKKKKDQWCLANPQQLLNIILKKKWTARHLVITGGEPTKYDLRPLIYVFEKFGFFCQIETSGAYPIYCFKNTWVTVSPKKNIKKKSILTDSLLRANEIKYPVFSEKDISDLDFLLSILKNRKKYIVSLQPINQNNIATNICIKTCIARNWRLSVQMHKYLNLK

SEQ ID NO: 28964 - protein, 244 aa, Tagabacteria bacterium
  misc_feature (1)..(244): tr|A0A2M8L9G1|A0A2M8L9G1_9BACT 7-carboxy-7-deazaguanine synthase OS=Candidatus Tagabacteria bacterium CG10_big _fil_rev_8_21_14_0_10_40_13 OX=1975022 GN=queE PE=3 SV= 1
MVNKAALSNTLRVSGDLEFATLQGEGDSIGKPAVFLRLQMCNLKCKWCDTKYSWDQSTDEYWNGFQDWTYKKAANRVEMSWQDCFHTSPNKRLVITGGEPLLQQKGIEELVKLLPEYIVEIETNGTVAPNLNLSRKCQFNISPKLESSNNPLELRYKPEILKEFNKLKQSWFKFVVVSLEDFKEIDKIVYECDLRQNKIIIMPEGVTNEEVTKKLRIIHKEVCSRGWRLLPRFHLQLFGAKRRT

SEQ ID NO: 28965 - protein, 234 aa, Tectomicrobia bacterium
  misc_feature (1)..(234): tr|A0A1F7TRL7|A0A1F7TRL7_9BACT 7-carboxy-7-deazaguanine synthase OS=Candidatus Tectomicrobia bacterium RIFCSPL OWO2_12_FULL_69_37 OX=1802343 GN=queE PE=3 SV=1
MTHASATARALRFPLADPLFYSLQGEGATLGRPSVFARLMGCTVGCAWCDTKYSWAGPPAAELAGEEILAYCRERPGCQVVVTGGEPLESPFFEVLLAMLHEEGLRIEVETSGYLEPSLVALALADQWNVSPKLASAGIAEEKKPRSLGWLHRAKEPYLKFVLHKPAEIAEVDALLQSLGLAGWPPERVIISPGGKKRPEMEKRLLPLAEAALARGFRFTPRLHVLLWGDKRGV

SEQ ID NO: 28966 - protein, 234 aa, Tectomicrobia bacterium; identical to SEQ ID NO: 28965
  misc_feature (1)..(234): tr|A0A1F7THA9|A0A1F7THA9_9BACT 7-carboxy-7-deazaguanine synthase OS=Candidatus Tectomicrobia bacterium RIFCSPL OWO2_02_FULL_70_19 OX=1802342 GN=queE PE=3 SV=1

SEQ ID NO: 28967 - protein, 220 aa, Tenderia electrophaga
  misc_feature (1)..(220): tr|A0A0S2TI87|A0A0S2TI87_9GAMM 7-carboxy-7-deazaguanine synthase OS=Candidatus Tenderia electrophaga OX=174824 3 GN=queE PE=3 SV=1
METRSAQQTRLRITEIFYSLQGEARSVGFPTVFIRLTGCPLRCGYCDTSYAFQGGEWWLIDDILDEVTKYAARHVCVTGGEPLAQSACLELLQILCDKGFQVSLETSGALDVSQVDPRVSKVMDLKTPASGEQGRNRLENLEYMSAHDQLKFVICDRNDYLWAKEMIIRSELAERGEILMSPGYGVQDATELADWILQDRLPVRFQVQLHKILWGDEPGR

SEQ ID NO: 28968 - protein, 237 aa, Terasakiella magnetica
  misc_feature (1)..(237): tr|A0A1C3RLT2|A0A1C3RLT2_9RHIZ 7-carboxy-7-deazaguanine synthase OS=Candidatus Terasakiella magnetica OX=18679 52 GN=queE PE=3 SV=1
MSKPINICEIFGPTIQGEGAQIGRPTVFVRTAGCDYRCSWCDTLYAVDTAHANDWRKVMAADVMAEIEQLSQNTPMSVTLSGGNPAMQPLGELIELGQEKGYDFSMETQGSLARDWFSKLDNLTLSPKPPSSGIETDWSLFKDCVEAAGSKTNISLKIVIFDEADYKYAQLAAKLFPQLPLYLQAGNHMVDDQSDADIDGVLERLRWLAEKVAQDRWQKACVLPQLHVLAWGNKRAA

SEQ ID NO: 28969 - protein, 204 aa, Termititenax aidoneus
  misc_feature (1)..(204): tr|A0A388T956|A0A388T956_9BACT 7-carboxy-7-deazaguanine synthase OS=Candidatus Termititenax aidoneus OX=221852 4 GN=queE PE=4 SV=1
MLQIVSVRTDIQRRGLYAGQRQLLIEFALSNIASSLSGVEGNTGEGQAYEPEELLLAVKDEAKRKGEVICLTGGEPLLQINELLPLLESMPLPLYLETNATLPDRLPEIQPYVSLFGLKYTPDYQKEFLESLALLQKEETFVLLPIAKDTQLAAVESLAKLLSVIRRDLPVVIEPAAAVKNALALQTVALRYLQNVRVVPALRI

SEQ ID NO: 28970 - protein, 231 aa, Termititenax persephonae
  misc_feature (1)..(231): tr|A0A388TI61|A0A388TI61_9BACT 7-carboxy-7-deazaguanine synthase OS=Candidatus Termititenax persephonae OX=221 8525 GN=queE PE=3 SV=1
MIMQANIQEIFRSIQGEGFYAGTPTTFVRFSGCNLRCAYCDTKKSWRKTKYCAYQPVEFTRRWVRVPNEVAVADCADLILGLSPRGLVSFTGGEPLLHAGYIARVIKSLGGAYTYLIETNGTLPAAVRRLPDLPNIVYSIDIKNRGFVKFYQAVPRKSGKYVKIILTKKTEAEETLPTLREAGVSARTPIFLQPVDNKLDKKQLQKFMYILEKNGYTFKVIPQLHRFVHLK

SEQ ID NO: 28971 - protein, 212 aa, Thermochlorobacter aerophilum
  misc_feature (1)..(212): tr|A0A395M320|A0A395M320_9BACT 7-carboxy-7-deazaguanine synthase OS=Candidatus Thermochlorobacter aerophilum O X=1868324 GN=queE PE=3 SV=1
MLKVNEIFFSIQGESSQMGWPCVFVRLAECDLRCTYCDTEYAFYEGEMLSLEHIIEKVSSYGCKLVEITGGEPLLQSEVYELMTRLCDLGFSVMLETGGHILVDKVDARVKKIIDMKTPSSGMLRKNDYRNLEIAAPTDEIKFVIGSRLDYDWAKQVIEQYRLTERLTVLMSVVFGELSPQTLAEWILADRLPVRFQLQMHKYIWSPETRGV

SEQ ID NO: 28972 - protein, 212 aa, Thermochlorobacteriaceae bacterium
  misc_feature (1)..(212): tr|A0A081SIQ2|A0A081SIQ2_9BACT 7-carboxy-7-deazaguanine synthase OS=Candidatus Thermochlorobacteriaceae bacter ium GBChlB OX=1519464 GN=queE PE=3 SV=1
MLRINEIFYSIQGESSRMGLPCVFVRLTECNLRCTYCDTEYAFYEGTDRSLESIIDEVRAYNCNLVEITGGEPLLQAPVYELMTRLCDLGYEVMLETSGHILVDKVDPRVKKIIDMKSPTSGMLKKNDYRNLEIASPNDEIKFVLGSRLDYDWAKKVIEEYQLTEKLTVLMSVVFGDLAPQELAEWILADRLKVRFQLQMHKFIWSPETRGV

SEQ ID NO: 28973 - protein, 219 aa, Thermokryptus mobilis
  misc_feature (1)..(219): tr|A0A0S4MVI6|A0A0S4MVI6_9BACT 7-carboxy-7-deazaguanine synthase OS=Candidatus Thermokryptus mobilis OX=164342 8 GN=queE PE=3 SV=1
MRKGKNILTVNEIFFSIQGESSWMGMPCVFVRLTYCDLRCVWCDTEYAFYEGVDMTIDEVIEKVKSYNCGLVEITGGEPLLQENSLELMKRLCDEKFTVLLETGGHRDISVVDPRVHIIMDVKCPGSKMSHKNRWENISYLTKKDEVKFVIKDRVDYEWAKEVVNKYNLFERVGAVLFSPVFGEIEPSILAGWILEDRIPVRFQIQLHKYIWSPEARGV

SEQ ID NO: 28974 - protein, 213 aa, Thiodiazotropha endoloripes
  misc_feature (1)..(213): tr|A0A1E2US09|A0A1E2US09_9GAMM 7-carboxy-7-deazaguanine synthase OS=Candidatus Thiodiazotropha endoloripes OX= 1818881 GN=queE PE=3 SV=1
MSQLRITEIFVSLQGESNTVGLPTVFIRLTGCPLRCVYCDTEYAFSGGEKMPIESILQQLSNLRINRVCVTGGEPLAQAACTELMSGLCDAGYEVSLETSGALDISTVDPRVVRVIDLKTPGSGEVSKNRLTNLDCLREGDQLKFVISDRDDYEWSRAMLKDHELESRCEILFSPVHGKQNPTQLAEWILQDRLNVRFQMQLHKLLWDDQPGR

SEQ ID NO: 28975 - protein, 213 aa, Thiodictyon syntrophicum
  misc_feature (1)..(213): tr|A0A2K8U269|A0A2K8U269_9GAMM 7-carboxy-7-deazaguanine synthase OS=Candidatus Thiodictyon syntrophicum OX=116 6950 GN=queE PE=3 SV=1
MTYLVKEVFYSLQGEGARTGRAAVFCRFAGCNLWSGRDEDRSRAVCTFCDTDFRGTDGVGGGRYPDAARLAARVRAAWPAPAASGAVPYVVCTGGEPLLQLDPPLIAALHAQGFEIAVETNGTRTAPPGIDWVCVSPKAAAGLRLLAGQELKLVYPQADAPPERFTNLAFRHFFLQPMDGPDLAANTARAIAYCKAHPRWRLSLQTHKLLGIP

SEQ ID NO: 28976 - protein, 211 aa, Thioglobus sp.
  misc_feature (1)..(211): tr|A0A432TSQ6|A0A432TSQ6_9GAMM 7-carboxy-7-deazaguanine synthase OS=Candidatus Thioglobus sp. OX=2026721 GN=qu eE PE=3 SV=1
MVNLNINEIFYSLQGEAREVGLPTVFVRLTGCPLRCTYCDTEYAFKGNNMLSIDQILTEIKQYNTRYVCVTGGEPLAQIDCHVLLDALIKDGYQVSLETSGSIDIGAVNPGVSVVMDVKTPSSNESKHNKYDNIAKLKLKDQLKFVIGSKEDFDWSVDTMNQYPTEAGVLFSPVFEAVTPTQMADWILDKQLNVRMQVQMHKLLWGDEPGR

SEQ ID NO: 28977 - protein, 74 aa, Thioglobus sp.
  misc_feature (1)..(74): tr|A0A432TYM5|A0A432TYM5_9GAMM 7-carboxy-7-deazaguanine synthase QueE (Fragment) OS=Candidatus Thioglobus sp. OX=2026721 GN=DSZ18_04250 PE=4 SV=1
KLKDQLKFVIGSKEDFDWSVDTMNQYPTEAGVLFSPVFEAVTPTQLADWILDKQLNVRMQVQMHKLLWGDEPGR

SEQ ID NO: 28978 - protein, 205 aa, Thiomargarita nelsonii
  misc_feature (1)..(205): tr|A0A0A6S393|A0A0A6S393_9GAMM 7-carboxy-7-deazaguanine synthase OS=Candidatus Thiomargarita nelsonii OX=10031 81 GN=queE PE=3 SV=1
MSYSLKEIFYTLQGEGLHTGRAAVFCRFTGCNLWSGRENDRAKAVCQFCDTDFVGIDGGGKFATAQALVDKVVATWPSTGRPYVVCTGGEPLLQLDTPLIEAFHQAGFEIAIETNGTLPAPPEIDWICVSPKAPLVLESGDELKLVFPQPDAPPDKYQKLDFKYFFLQPMDGPQRELNTQLALRYCLAHPQWRLSLQTHKWLGIS

SEQ ID NO: 28979 - protein, 242 aa, Tokpelaia hoelldoblerii
  misc_feature (1)..(242): tr|A0A1U9JSK1|A0A1U9JSK1_9RHIZ 7-carboxy-7-deazaguanine synthase OS=Candidatus Tokpelaia hoelldoblerii OX=1902 579 GN=queE PE=3 SV=1
MNAAEMIRISEIFGPTIQGEGMLIGEPTVFVRTAGCDFRCSWCDTLHAVDSASRHTWRLLDVDTIWAEVRRLSGGKPLTISLSGGNPAIQPLEALLQKGRQEGYRFAMETQGSLFKPWFAQLDTLVVSPKPPSSNMENDWQTISRCLALSSVQTILKIPVLDETDYQFARMAGLRFPHVQTFLQPVNQTPPPLDETQPDGLDMDDILNRFRWLVERCMEDQWYDVRLLPQLHVLVWGNLKGV

SEQ ID NO: 28980 - protein, 234 aa, Wallbacteria bacterium
  misc_feature (1)..(234): tr|A0A352M5B9|A0A352M5B9_9BACT 7-carboxy-7-deazaguanine synthase OS=Candidatus Wallbacteria bacterium OX=20536 40 GN=queE PE=3 SV=1
MKKENDAKNLKFKVNEIFKSVQGESSYAGLNCAFVRLSGCNLRCSYCDTQYAYKYGRYLTAGEIIEKVDRLGAHIVELTGGEPLFQKDARLLIDALADYVEGRSALRPNAIAPRLLIETSGSLSIKGINPKAVIIMDIKTPSSGCAGMMEPENLKYIRPVDEIKFVIGDRDDYEYCKKIILDNSLTERCGVLLSAVYGRIKPEKIIGWMLKDCIDARFQLQMHKYVWPADKKGV

SEQ ID NO: 28981 - protein, 234 aa, Wallbacteria bacterium; identical to SEQ ID NO: 28980
  misc_feature (1)..(234): tr|A0A1F7WTK6|A0A1F7WTK6_9BACT 7-carboxy-7-deazaguanine synthase OS=Candidatus Wallbacteria bacterium GWC2_49_ 35 OX=1817813 GN=queE PE=3 SV=1

SEQ ID NO: 28982 - protein, 247 aa, Woesebacteria bacterium
  misc_feature (1)..(247): tr|A0A2H0BJH1|A0A2H0BJH1_9BACT 7-carboxy-7-deazaguanine synthase OS=Candidatus Woesebacteria bacterium CG22_co mbo_CG10-13_8_21_14_all_39_10 OX=1975059 GN=queE PE=3 S V=1
MTKSYKPTPDERLRLKLKPDQFKVSGDQVFFTIQGEGESIGKPAVFLRLHFCNLHCGWCDTGYTWNKNLKEFWQEGKNWSFQRVLQEVSGYPAKRLVITGGEPMLQQEKTGEFIKLIPDWEVEIETNGTIAPLPLLARKCQFNVSPKLGNSGNSLRVRYKPEVLKVFNALPKTTFKFVVQAERDLEEIGRIESECGLDPSKIIITPEGSTQNDIKNHALSVSEQVKQRGWRLLPRLQIMLWGKKRRL

SEQ ID NO: 28983 - protein, 247 aa, Woesebacteria bacterium; identical to SEQ ID NO: 28982
  misc_feature (1)..(247): tr|A0A2M7TP91|A0A2M7TP91_9BACT 7-carboxy-7-deazaguanine synthase OS=Candidatus Woesebacteria bacterium CG_4_10 _14_0_2_um_filter_39_14 OX=1975054 GN=queE PE=3 SV=1

SEQ ID NO: 28984 - protein, 210 aa, Candidimonas bauzanensis
  misc_feature (1)..(210): tr|A0A1M5ZIU4|A0A1M5ZIU4_9BURK 7-carboxy-7-deazaguanine synthase OS=Candidimonas bauzanensis OX=658167 GN=queE PE=3 SV=1
MTYSVKEIFLTLQGEGAQAGRPAVFCRFSGCNLWSGREQDRGTAQCQFCDTDFVGTDGTLGGKYKTTAQLADLLQAAWGGQERHRFVVFTGGEPLLQLDEALIAAVHERGFEIAVETNGTVLPPAGIDWLCTSPKAGTEWIVRQGQELKLVFPQAGMDPAEFEDLPFDEFWLQPMDGPDQAANTRAAIAYCLAHPRWRLSIQTHKLIGIR

SEQ ID NO: 28985 - protein, 210 aa, Candidimonas sp.
  misc_feature (1)..(210): tr|A0A432DJW2|A0A432DJW2_9BURK 7-carboxy-7-deazaguanine synthase OS=Candidimonas sp. SYP-B2681 OX=2497686 GN=q ueE PE=3 SV=1
MTYSVKEIFLTLQGEGAQAGRPAVFCRFSGCNLWTGREQDRAMAQCQFCDTDFVGTDGTLGGKYKTADELADLIQATWGVNPRHRFVVFTGGEPLLQLDTSLINALHEREFEIAVETNGTVLPPPGIDWLCTSPKAGTDWILRQGQELKLVFPQPGIDPADFEELPFDEFWLQPMDGPDQAANTQAAIEYCLSHPRWRLSIQTHKLIGIR

SEQ ID NO: 28986 - protein, 210 aa, Candidimonas sp.
  misc_feature (1)..(210): tr|A0A522GXR3|A0A522GXR3_9BURK 7-carboxy-7-deazaguanine synthase OS=Candidimonas sp. OX=1912597 GN=queE PE=3 S V=1
MTYAVKEIFKTLQGEGAHTGRAAVFCRFSGCNLWSGREEDRGKAQCQFCDTDFVGTDGTQGGKYPAPDILADRIESIWGGEADGRFVVFTGGEPLLQLNSQLIDALHARGFTIAVETNGTVQPPHGIDWLCVSPKAGTDWIVRNGDELKLVFPQFSLDPLELEKLEFDHFWLQPMDGLSQQANTNAAIEYCLNHSRWRLSTQTHKLIGIR

SEQ ID NO: 28987 - protein, 210 aa, Capnocytophaga canimorsus
  misc_feature (1)..(210): tr|F9YQM0|F9YQM0_CAPCC 7-carboxy-7-deazaguanine synthas e OS=Capnocytophaga canimorsus (strain 5) OX=860228 GN= queE PE=3 SV=1
MLKKEIQIAVDKGEMLPLMEAFYTIQGEGFHKGTAAYFIRVGGCDVGCHWCDVKESWNAEKHPPTHIEDIVKQANNHSKTIVVTGGEPLTWNMNPLTQKLKAVGLSTHIETSGAYPLSGDWDWICLSPKKLKPPTAEILQKANELKIIIYNKHDFVFAQEMAAKVASNCILYLQPEWSRREKVIPEIVDFVMNNPKWKVSLQTHKYLNIP

SEQ ID NO: 28988 - protein, 210 aa, Capnocytophaga canimorsus
  misc_feature (1)..(210): tr|A0A0B7H5V7|A0A0B7H5V7_9FLAO 7-carboxy-7-deazaguanine synthase OS=Capnocytophaga canimorsus OX=28188 GN=queE PE=3 SV=1
MLKKEIQIAVDKGEMLPLMEAFYTIQGEGFHKGTAAYFIRVGGCDVGCHWCDVKESWDAEKHPPTHIEDIVKQANNHSKTIVVTGGEPLTWNMNPLTQKLKAVGLSTHIETSGAYPLSGDWDWICLSPKKLKPPTVEILQKANELKIIIYNKHDFVFAQEMAAKVASNCILYLQPEWSRREKVIPEIVDFVMNNPKWKVSLQTHKYLNIP

SEQ ID NO: 28989 - protein, 210 aa, Capnocytophaga canis
  misc_feature (1)..(210): tr|A0A0B7I620|A0A0B7I620_9FLAO 7-carboxy-7-deazaguanine synthase OS=Capnocytophaga canis OX=1848903 GN=queE PE =3 SV=1
MLDKETQKAVDKGEMLPLMEAFYTIQGEGFYKGTAAYFIRVGGCDVGCHWCDVKESWDAEKHPPTHIEDIVNQSLKYSKTIVVTGGEPLMWNMFPLTQKLKEKGMKTHIETSGSHSLTGIWDWICLSPKKLRLPTSEIYQKANELKIIIYNSHDFIFAEEMASKVSDDCILYLQPEWSRRDKVIPEIVDFVMKNPKWKVSLQTHKYLNIP

SEQ ID NO: 28990 - protein, 210 aa, Capnocytophaga cynodegmi
  misc_feature (1)..(210): tr|A0A0B7HFI4|A0A0B7HFI4_9FLAO 7-carboxy-7-deazaguanine synthase OS=Capnocytophaga cynodegmi OX=28189 GN=queE PE=3 SV=1
MLDKETQKAVDKGEMLPLMEAFYTIQGEGYYKGSAAYFIRVGGCDVGCHWCDVKESWDAEKHPPTHIDTIVNEAVKYSDTIVITGGEPLMWNMFPLTQKLKDSGVKTHIETSGSHTLTGVWDWICLSPKKMKLPTPEIFGEANELKIIVYNNHDFIFAEEMASKVSEKCILYLQPEWSRREKVIPEIVDFVMKNPKWKVSLQTHKYLNIP

SEQ ID NO: 28991 - protein, 210 aa, Capnocytophaga cynodegmi
  misc_feature (1)..(210): tr|A0A0B7HSC0|A0A0B7HSC0_9FLAO 7-carboxy-7-deazaguanine synthase OS=Capnocytophaga cynodegmi OX=28189 GN=queE PE=3 SV=1
MLDKETQKAVDKGEMLPLMEAFYTIQGEGYYKGSAAYFIRVGGCDVGCHWCDVKESWDAEKHPPTHIDTIVNEAVKYSDTIVITGGEPLMWNMFPLTQKLKDSGVKTHIETSGSHTLTGVWDWICLSPKKMKLPTPEIFEEADELKIIVYNNHDFIFAEEMASKVSEKCILYLQPEWSRREKVIPEIVDFVMKNPKWKVSLQTHKYLNIP

SEQ ID NO: 28992 - protein, 200 aa, Capnocytophaga gingivalis
  misc_feature (1)..(200): tr|C2M6F0|C2M6F0_CAPGI 7-carboxy-7-deazaguanine synthas e OS=Capnocytophaga gingivalis OX=553178 GN=queE PE=3 S V=1
MDGTILPLMEDFYTIQGEGFYRGTAAYFIRLAGCDVGCHWCDVKESWDASVHPRVPIEEIAQRALAHSKTIIITGGEPLMYNLQPLTELLKSKGARTHIETSGAHPLTGVWDWICLSPKKNKRPLPEVHQRASELKMIIYNHHDFLFAEEMSALTQPDCIRYLQPEWSRRERMVPLIVDYVMENPQWKISLQMHKYLDIP

SEQ ID NO: 28993 - protein, 200 aa, Capnocytophaga gingivalis
  misc_feature (1)..(200): tr|A0A250FMY0|A0A250FMY0_9FLAO 7-carboxy-7-deazaguanine synthase OS=Capnocytophaga gingivalis OX=1017 GN=queE PE=3 SV=1
MDGTILPLMEDFYTIQGEGFYRGTAAYFIRLAGCDVGCHWCDVKESWDASVHPRVPIEEIAQRALAHSKTIIITGGEPLMYNLQPLTELLKSKGARTHIETSGAHPLTGVWDWICLSPKKNKRPLPEVHQQASELKMIIYNHHDFLFAEEMSALTQPDCIRYLQPEWSRRERMVPLIVDYVMENPQWKISLQMHKYLDIP

SEQ ID NO: 28994 - protein, 200 aa, Capnocytophaga granulosa
  misc_feature (1)..(200): tr|A0A381DXX7|A0A381DXX7_9FLAO 7-carboxy-7-deazaguanine synthase OS=Capnocytophaga granulosa OX=45242 GN=queE PE=3 SV=1
MSGELLPLMEAFYTIQGEGYYKGTAAYFIRLAGCDVGCHWCDVKESWDATAHPLVPIEQIAEQALTHSKTIIITGGEPLMYNLLPLTQLLRSHGARTHIETSGAHPLSGEWDWICLSPKKNKRPLSPIHQVANELKMVIYNHHDFLFAEEMSALTHADCIRYLQPEWSRREKMIPLMVDYVMEYPQWKISLQMHKYLDIP

SEQ ID NO: 28995 - protein, 210 aa, Capnocytophaga haemolytica
  misc_feature (1)..(210): tr|A0A125S450|A0A125S450_9FLAO 7-carboxy-7-deazaguanine synthase OS=Capnocytophaga haemolytica OX=45243 GN=que E PE=3 SV=1
MLSSQTQIALRKGEILPVMEAFYTLQGEGFYKGTAAYFIRLGGCDVGCHWCDVKESWEAEKHPILQVRDIVEEALKHSKTIIITGGEPLMWNLDLLTKYLKEGGARIHIETSGAHPLSGDLDWICLSPKKLKLPKEEVFAKTNELKMIIYNNNDFLFAEQMAAKVSSDCLLYLQPEWSKREKVIPKIVDYVMAHPQWKASLQMHKYLEIP

SEQ ID NO: 28996 - protein, 210 aa, Capnocytophaga leadbetteri
  misc_feature (1)..(210): tr|A0A250FB21|A0A250FB21_9FLAO 7-carboxy-7-deazaguanine synthase OS=Capnocytophaga leadbetteri OX=327575 GN=qu eE PE=3 SV=1
MLDEYKLTALHQGEALPLMEAFYSLQGEGYYKGSAAYFIRLGGCDVGCHWCDVKESWAAEAHPIVPVEDIAAEALKHSRLIIITGGEPLMWNLDKLTALLREGGARTHIETSGAHPLSGTWDWICLSPKKIKRPVGGVLQQANELKMVIYNNNDFLFAEEMAAQVSPDCLLYLQPEWSKSAIVIPKIVDYVMTHPQWRASLQMHKYLDIR

SEQ ID NO: 28997 - protein, 210 aa, Capnocytophaga leadbetteri
  misc_feature (1)..(210): tr|A0A2T5XYX9|A0A2T5XYX9_9FLAO 7-carboxy-7-deazaguanine synthase OS=Capnocytophaga leadbetteri OX=327575 GN=qu eE PE=3 SV=1
MLDEYKLTALHRGEALPLMEAFYSLQGEGYYKGSAAYFIRLGGCDVGCHWCDVKESWAAEAHPIVPVEDIAAEALKHSRLIIITGGEPLMWNLDKLTALLREGGARTHIETSGAHPLSGTWDWICLSPKKIKRPVGGVLQQASELKMVIYNNNDFLFAEEMAAQVSPDCLLYLQPEWSKSAIVIPKIVDYVMTHPQWRASLQMHKYLDIR

SEQ ID NO: 28998 - protein, 210 aa, Capnocytophaga ochracea
  misc_feature (1)..(210): tr|A0A2X2SLI6|A0A2X2SLI6_CAPOC 7-carboxy-7-deazaguanine synthase OS=Capnocytophaga ochracea OX=1018 GN=queE PE =3 SV=1
MLNKDTQIALQKGELLPLMEAFYTLQGEGFYKGTAAYFIRLGGCDVGCHWCDVKESWQAEAHPLVPIDTIVAEALAHSKTIIITGGEPLMWNLTLLTEKLRAGGARTHIETSGAHPLSGTWDWICLSPKKIKRPVGDVLQKANELKMVIYNNHDFIFAEEMASQVSPECLLYLQPEWSKRAEVMPKIVDYVMAHPQWKASLQMHKYLEIR

SEQ ID NO: 28999 - protein, 210 aa, Capnocytophaga ochracea
  misc_feature (1)..(210): tr|C7M7W1|C7M7W1_CAPOD 7-carboxy-7-deazaguanine synthas e OS=Capnocytophaga ochracea (strain ATCC 27872 / DSM 7 271 / JCM 12966 / NCTC 12371 / VPI 2845) OX=521097 GN=q ueE PE=3 SV=1
MLNKDTQIALQKGELLPLMEAFYTLQGEGFYKGTAAYFIRLGGCDVGCHWCDVKESWQAEAHPLVPVDTIVAEALAHSKTIIITGGEPLMWNLTLLTEKLRAGGARTHIETSGAHPLSGSWDWICLSPKKIKRPVGDVLQKANELKMVIYNNHDFIFAEEMAAQVSPECLLYLQPEWSKRAEVMPKIVDYVMAHPQWKASLQMHKYLDIR

SEQ ID NO: 29000 - protein, 210 aa, Capnocytophaga sp.
  misc_feature (1)..(210): tr|L1NM82|L1NM82_9FLAO 7-carboxy-7-deazaguanine synthas e OS=Capnocytophaga sp. oral taxon 380 str. F0488 OX=11 27693 GN=queE PE=3 SV=1
MLNKDTQIALQKGELLPLMEAFYTLQGEGFYKGTAAYFIRLGGCDVGCHWCDVKESWQAEAHPLVPIDTIVAEALAHSKTIIITGGEPLMWNLTLLTEKLRAGGARTHIETSGAHPLSGSWDWICLSPKKIKRPVGDVLQKANELKMVIYNNHDFIFAEEMASQVSPECLLYLQPEWSKRAEVMPKIVDYVMAHPQWKASLQMHKYLDIR

SEQ ID NO: 29001 - protein, 200 aa, Capnocytophaga sp.
  misc_feature (1)..(200): tr|U2AQJ7|U2AQJ7_9FLAO 7-carboxy-7-deazaguanine synthas e OS=Capnocytophaga sp. oral taxon 863 str. F0517 OX=12 27266 GN=queE PE=3 SV=1
MSGEMLPLMEAFYTIQGEGYHKGTAAYFIRLAGCDVGCHWCDVKESWDAAAHPLVSIEEIAQKALAHSKTIIITGGEPLMYNLSPLTQLLRSQGARTHIETSGAHPLSGEWDWICLSPKKNKRPLPLIHQRAHELKMVIYNHHDFLFAEEMAALTHPDCLRYLQPEWSRREKMIPLMVDYVMEHPQWKISLQMHKYLDIP

SEQ ID NO: 29002 - protein, 210 aa, Capnocytophaga sputigena
  misc_feature (1)..(210): tr|A0A250FJ22|A0A250FJ22_CAPSP 7-carboxy-7-deazaguanine synthase OS=Capnocytophaga sputigena OX=1019 GN=queE P E=3 SV=1
MLDKNTQVALQKGEILPLMEAFYSLQGEGFYKGTAAYFIRLGGCDVGCHWCDVKESWAAEAHPLVPVDTIVTDALAHSKTMIITGGEPLMWNLDLLTQKLRAAGARTHIETSGAHPLSGTFDWICLSPKKIKRPVGDVLQKANELKMVIYNNNDFLFAEEMAAQVSPDCLLYLQPEWSKRNKVIPKIVDYVMAHPQWKASLQMHKYLDIR

SEQ ID NO: 29003 - protein, 210 aa, Capnocytophaga sputigena
  misc_feature (1)..(210): tr|A0A250F1X6|A0A250F1X6_CAPSP 7-carboxy-7-deazaguanine synthase OS=Capnocytophaga sputigena OX=1019 GN=queE P E=3 SV=1
MLDKNTQVALQKGEILPLMEAFYSLQGEGFYKGTAAYFIRLGGCDVGCHWCDVKESWAAKAHPLVPVDTIVTDALAHSKTMIITGGEPLMWNLDLLTEKLRAAGARTHIETSGAHPLSGTFDWICLSPKKIKRPVGDVLQKANELKMVIYNNNDFLFAEEMAAQVSPDCLLYLQPEWSKRNKVIPKIVDYVMAHPQWKASLQMHKYLDIR

SEQ ID NO: 29004 - protein, 210 aa, Capnocytophaga stomatis
  misc_feature (1)..(210): tr|A0A250FZ61|A0A250FZ61_9FLAO 7-carboxy-7-deazaguanine synthase OS=Capnocytophaga stomatis OX=1848904 GN=queE PE=3 SV=1
MLDKETQKAVEKGEMLPLMEAFYTIQGEGYHKGSAAYFIRVGGCDVGCHWCDVKESWDAEKHPPTHIDTIVSEAVKYSKTIVITGGEPLMWNMFPLTEKLKENGVKTHIETSGSHPLTGVWDWICLSPKKMKLPTPEIFKEADELKIIVYNNHDFIFAEEMASKVSDKCILYLQPEWSRREKVIPEIVDFVMKNPKWKVSLQTHKYLNIP

SEQ ID NO: 29005 - protein, 232 aa, Capsulimonas corticalis
  misc_feature (1)..(232): tr|A0A402CT64|A0A402CT64_9BACT 7-carboxy-7-deazaguanine synthase OS=Capsulimonas corticalis OX=2219043 GN=queE PE=3 SV=1
MSSTLVLQPHNGRPYLGATPDPAAATRDAMAAAKSGALPLVEIFYSLQGEGLRTGQATVFVRFAGCNLACEFCDTDFRVQRLGTPEEIADEIASLAPDCRWVCFTGGEPTIQDLQALSDLLHARGYHLQMETNGTRPQPGWGIDHVTVSPKQPQGGRLDSWYEANAAEFKYVVDDDADLARALDGARGHGRMTFLQPNALNKDAVALCIEAVKAHPALFRLSLQTHKFLDIR

SEQ ID NO: 29006 - protein, 244 aa, Carboxydocella sporoproducens
  misc_feature (1)..(244): tr|A0A1T4LNU8|A0A1T4LNU8_9FIRM 7-carboxy-7-deazaguanine synthase OS=Carboxydocella sporoproducens DSM 16521 OX =1121270 GN=queE PE=3 SV=1
MQAAFLIEMMSSFQGEGTVVGLRQLFLRFAGCNLACAYCDTRYSLHAQETWKVEFPPGTGCWNILTNPVTVEQLLEQIKKFNPDKHHSLSLTGGEPLLHSDFLQEFLPKIKQMGWKIYLETNGTLVHNLKQVLDYIDIIAMDIKLESATGAPTPWEEHQKFLELAMNKSCFIKVVVNSRTDRREIGQVAQLGPERTIAIDIVLQPQTGSELPPANRWIEWQEILKPFYREVRIIPQTHKILGVL

SEQ ID NO: 29007 - protein, 244 aa, Carboxydocella thermautotrophica; identical to SEQ ID NO: 29006
  misc_feature (1)..(244): tr|A0A2R4N0C0|A0A2R4N0C0_9FIRM 7-carboxy-7-deazaguanine synthase OS=Carboxydocella thermautotrophica OX=178899 GN=queE PE=3 SV=1

SEQ ID NO: 29008 - protein, 238 aa, Carboxydothermus hydrogenoformans
  misc_feature (1)..(238): tr|Q3ADI3|Q3ADI3_CARHZ 7-carboxy-7-deazaguanine synthas e OS=Carboxydothermus hydrogenoformans (strain ATCC BAA -161 / DSM 6008 / Z-2901) OX=246194 GN=queE PE=3 SV=1
MANIVEIFPSLQGEGLYAGVSTLFIRFSGCNLNCSYCDTEDAREKRERFTVTKEDGSLLEFLNPVTPEKLVEILRENYDFTYFPQLALTGGEPLLHASFLKEFLPKLSYPGEVLLETNGTLPDKLNEVLNSVDIISQDFKLKPFIAEDCFTLHREFLQEASRKKVYVKMVISPEVQDSEFNGAINEIALVNSKIPLILQPVMPINYSLDFLFQKQKMALKKLWDVRIIPQVHKLLQLK

SEQ ID NO: 29009 - protein, 238 aa, Carboxydothermus islandicus
  misc_feature (1)..(238): tr|A0A1L8D4T0|A0A1L8D4T0_9THEO 7-carboxy-7-deazaguanine synthase OS=Carboxydothermus islandicus OX=661089 GN=q ueE PE=3 SV=1
MANIVEIFPSIQGEGLYAGVSTLFIRFSGCNLNCSYCDTEDAREKKERFTVKKEDGSLLEFLNPVTPEKLVEILRENYDFTYYPQLALTGGEPLLHSAFLKEFLRKLSYPGEVLLETNGTLPENLKEVLRYVDIVSQDYKLQPFVTNEYHAIHREFLRIAAAKKTYVKMVLSPEVEDRVFNEALESIAAVNSYIPLILQPVTPIAYSLDFILGKQKKALEKLWEVRVIPQIHKFLQLK

SEQ ID NO: 29010 - protein, 244 aa, Carboxydothermus pertinax
  misc_feature (1)..(244): tr|A0A1L8CUE9|A0A1L8CUE9_9THEO 7-carboxy-7-deazaguanine synthase OS=Carboxydothermus pertinax OX=870242 GN=que E PE=3 SV=1
MKLGESMASIVEIFPSIQGEGLSVGVSTLFIRFSGCNLNCSYCDTKYAKEEKEKFTVTKEDGTVLEFLNPVTPERLVEILRENYDFTYFPQLALTGGEPLLHASFLKDFLAKLSYPGDVLLETNGTLPEKLREVISYIDIVSQDYKFKPFVTEEFKAVHREFLRIAIYKKTYVKMVISPEVQDLPFNEAIDTIALVNSKIPLILQPVTPITYSLDFLFQKQKKALEKLWEVRLIPQVHKLLQIK

SEQ ID NO: 29011 - protein, 285 aa, Carboxylicivirga sp.
  misc_feature (1)..(285): tr|A0A553GN63|A0A553GN63_9BACT 7-carboxy-7-deazaguanine synthase OS=Carboxylicivirga sp. M1479 OX=2594476 GN=q ueE PE=3 SV=1
MEKLILAKEGVFPVTKDWHGGLLEDTPKTGLQIAGTIQGEGKLAGVPSLFIRLSGCNLRCIWQMEDGTYSRCDTRYASFQPNETIELEVDQVVDWVKHNIGNIKHVVITGGEPLLQRRGVADLCQKLKEQLNVHITVESNGSIFDEEVAKGVDLFSISPKLSNSVPSPEKLAIFGLKENAVFKKHNQKRLNIEALQSYIDLANSSNKELQLKFVVGRKNDFKEILSDFINQLNNCKPSDILLMPLGATKVEISRSAPMVLDMAIANGWRFSPRVHIELFGSKSGV

SEQ ID NO: 29012 - protein, 242 aa, Caryophanon tenue
  misc_feature (1)..(242): tr|A0A1C0YLB5|A0A1C0YLB5_9BACL 7-carboxy-7-deazaguanine synthase OS=Caryophanon tenue OX=33978 GN=queE PE=3 SV =1
MSKVPVIEMFGPTIQGEGMVIGQKTMFVRTAGCDYTCAWCDSAFTWDSSGKHLITHMTAEEIWEQLEAIGGKRFSFVTILGGNPALLKNLAPFITLLKQKNIQIGVETQGSKWQDWFYDIDELTISPKPPSSTMTTDFDILTTILHKLEQSTSSQRISLKVVVFTEEDYAYAKDVHTRYPDVPFFVQVGNDELMMVDEQQLTVYLLQKYERLIDCVMQDEEMNRVKVLPQLHALLWGNKRGV

SEQ ID NO: 29013 - protein, 219 aa, Catalinimonas alkaloidigena
  misc_feature (1)..(219): tr|A0A1G9GXG1|A0A1G9GXG1_9BACT 7-carboxy-7-deazaguanine synthase OS=Catalinimonas alkaloidigena OX=1075417 GN= queE PE=3 SV=1
MMITKTPTEQGESVVTRHAPSRDLPLMEAFYTLQGEGFHQGRAAYFIRLGGCDVGCHWCDVKESWDASRHPAVSVSQIVAGAAARPGRLAVITGGEPLMHPLDELCGALHEAGFRTHIETSGTHPLSGQWDWICFSPKKFKAPRPEILQKADELKVVIYHKSDLAWAESFAAQVRPDCHLFLQPEWDRREQMLPLMIDYVQQHPRWRVTLQSHKYLNIP

SEQ ID NO: 29014 - protein, 240 aa, Catellatospora citrea
  misc_feature (1)..(240): tr|A0A419XJR2|A0A419XJR2_9ACTN 7-carboxy-7-deazaguanine synthase OS=Catellatospora citrea OX=53366 GN=queE PE= 3 SV=1
MTALLAAMPHRPLLVSEIFGPTVQGEGPSTGRQALFIRLSRCNLTCGRCDTPYTWDWSRFDAAEQTQKISGEELVAWALGHPTRLVVISGGEPLIQQQLLDPVVRALAAAGREVEIETNGTFAPTTAVAGAVTAFNVSPKLASFAPSDDEPRRIVGAALKALEATGKARFKFVVSDPADLQEVASLQREFGLTEIWIMPEGAKPEQVIARTRQIADEVIERGWNLSTRLHVLVWGDTRGR

SEQ ID NO: 29015 - protein, 221 aa, Catenovulum agarivorans
  misc_feature (1)..(221): tr|W7QQS1|W7QQS1_9ALTE 7-carboxy-7-deazaguanine synthas e OS=Catenovulum agarivorans DS-2 OX=1328313 GN=queE PE =3 SV=1
MNYPVNEIFETIQGEGAKTGVPSVFLRLQGCPVGCSWCDTKHTWEVDKTKLTSIENVVDVSNTSDCWADLDENMLLSRLQKYSAKHIVITGGEPCMYDLRPLTALLHQNGFTTQIETSGTFEIYTHENTYVTVSPKVGMKGGYSVLVSALNRANEIKHPVATEQHIRDLQALLAKISHNQFVEVCLQPISQKKRATELAIAECIKHNWRLSVQMHKYLMID

SEQ ID NO: 29016 - protein, 221 aa, Catenovulum maritimum
  misc_feature (1)..(221): tr|A0A0J8GRP2|A0A0J8GRP2_9ALTE 7-carboxy-7-deazaguanine synthase OS=Catenovulum maritimum OX=1513271 GN=queE P E=3 SV=1
MNYPVNEIFETIQGEGCYTGVPAIFIRLQACPVGCAWCDTKHTWEKSESTQVKQSLVIDISNESDCWADFTENDILNLLAKYTAKHVVITGGEPCIYDLIPLTELLNNAGYSTQIETSGTFEIKTHANTYVTVSPKVNMKGGYEVLNSALNRANEIKHPVATQQHIDDLDELLAKIDDLTDKTVCLQPISQKKRATELVIQTCIKRNWRLSAQMHKYLFID

SEQ ID NO: 29017 - protein, 214 aa, Catenovulum sp.
  misc_feature (1)..(214): tr|A0A2S0VXA9|A0A2S0VXA9_9ALTE 7-carboxy-7-deazaguanine synthase OS=Catenovulum sp. CCB-QB4 OX=2172099 GN=queE PE=3 SV=1
MFETIQGEGAYTGTPSIFIRLQGCPVGCPWCDTQQTWYVEEKDKISAKDMLAKQGDSPTWSTLTVAEIMLVIEQQGYHAKHVVITGGEPCMYDLTELTTVLQTAGYQCQIETSGTFEIKTHTDTWVTLSPKVNMKGKYPILDTCLARANEIKHPVATEQHIIELEALLARGDFTKLIYLQPISQKSRATEFAIKTCIEKNWRLSIQTHKYLNIS

SEQ ID NO: 29018 - protein, 210 aa, Caulobacter flavus
  misc_feature (1)..(210): tr|A0A2N5CNM4|A0A2N5CNM4_9CAUL 7-carboxy-7-deazaguanine synthase OS=Caulobacter flavus OX=1679497 GN=queE PE=3 SV=1
MTYSVKEIFLTLQGEGGQAGKAAVFCRFSGCNLWTGREQDRHKAVCTFCDTDFVGTDGEGGGKFATADALADAVEAAWTGGPDDRLVVCTGGEPLLQLDAAIVEALHARGFQIAMESNGTLPAIDGIDWICVSPKADAPVVQTSGQELKLVFPQDKAMPERFADMDFERFYLQPMDGPDRDRNTQLAVAYCLAHPKWRLSVQTHKYLGLP

SEQ ID NO: 29019 - protein, 210 aa, Caulobacter henricii
  misc_feature (1)..(210): tr|A0A0N7JHV8|A0A0N7JHV8_9CAUL 7-carboxy-7-deazaguanine synthase OS=Caulobacter henricii OX=69395 GN=queE PE=3 SV=1
MTYSVKEIFLTLQGEGGQAGKAAVFCRFAGCNLWTGREQDRAKAVCTFCDTDFVGTDGEGGGKFATPELLADAVEAAWTGGAKDRLVVCTGGEPLLQLDPPAIAALHARGFMIAVESNGTVSAPEGIDWVCISPKADAPVIQTRGQELKLVYPQDKAMPERFESLDFERFYLQPMDGPDRDRNTQLAVAYCLSHPQWRLSVQTHKYLGLP

SEQ ID NO: 29020 - protein, 210 aa, Caulobacter mirabilis
  misc_feature (1)..(210): tr|A0A2D2B3P7|A0A2D2B3P7_9CAUL 7-carboxy-7-deazaguanine synthase OS=Caulobacter mirabilis OX=69666 GN=queE PE= 3 SV=1
MTYSVKEIFLTLQGEGGQAGKAAVFCRFAGCNLWTGREQDRAKAVCTFCDTDFVGVDGEGGGKFATPEALAAAVDAAWTGPQSDKLVVCTGGEPLLQLDPPLIEALHARGFMIAVETNGTIKAPPGIDWICVSPKADAEVVQTSGQELKLVYPQRGVDPERFAGLDFERFFLQPMDNTARQENTTAAVAYCLSHPRWRLSVQTHKYLGLP

SEQ ID NO: 29021 - protein, 210 aa, Caulobacter radicis
  misc_feature (1)..(210): tr|A0A2T9JRU1|A0A2T9JRU1_9CAUL 7-carboxy-7-deazaguanine synthase OS=Caulobacter radicis OX=2172650 GN=queE PE= 3 SV=1
MTYSVKEIFLTLQGEGGQAGKAAVFCRFSGCNLWTGREQDRAKAVCTFCDTDFVGTDGEGGGKFATADDLANAVEAAWTGGLDDRLVVCTGGEPLLQLDAAIVEALHARGFQIAMESNGTLPAIDGIDWICVSPKADAPVVQTSGQELKLVFPQEKAMPERFEAMDFERFYLQPMDGPDRDRNTQLAVAYCLAHPKWRLSVQTHKYLGLP

SEQ ID NO: 29022 - protein, 210 aa, Caulobacter radicis
  misc_feature (1)..(210): tr|A0A2T9JD48|A0A2T9JD48_9CAUL 7-carboxy-7-deazaguanine synthase OS=Caulobacter radicis OX=2172650 GN=queE PE= 3 SV=1
MTYSVKEIFLTLQGEGGQAGKAAVFCRFSGCNLWTGRERDRAKAVCTFCDTDFVGTDGEGGGKFATADDLANAVETAWTGGPDDRLVVCTGGEPLLQLDEAIVEALHKRGFQIAMESNGTLPAIDGIDWICVSPKADAPVVQTSGQELKLVFPQEKAMPERFEAMDFERFYLQPMDGPDRDRNTQLAVAYCLAHPKWRLSVQTHKYLGLP

SEQ ID NO: 29023 - protein, 210 aa, Caulobacter rhizosphaerae
  misc_feature (1)..(210): tr|A0A561NXM1|A0A561NXM1_9CAUL 7-carboxy-7-deazaguanine synthase OS=Caulobacter rhizosphaerae OX=2010972 GN=qu eE PE=3 SV=1
MTYTVKEIFLTLQGEGGQAGKAAVFCRFAGCNLWTGREQDRHKAVCTFCDTDFVGTDGEGGGKFATAHALAAAVEAAWTGGPDDRLVVCTGGEPLLQLDAAAIDALHARGFMIAVETNGTVVAPAGIDWVCVSPKADAPVVQTSGQELKLVYPQDKALPERFAGLDFERFYLQPMDGPDRERNTQLAVAYCLSHPQWRLSVQTHKYLGLP

SEQ ID NO: 29024 - protein, 210 aa, Caulobacter segnis
  misc_feature (1)..(210): tr|A0A2W5VQ82|A0A2W5VQ82_9CAUL 7-carboxy-7-deazaguanine synthase OS=Caulobacter segnis OX=88688 GN=queE PE=3 S V=1
MTYSVKEIFLTLQGEGGQAGKAAVFCRFSGCNLWSGREQDRAKAVCTFCDTDFVGTDGENGGKFSTAEDLAAAVEAQWTGGPDDRLVVCTGGEPFLQLDDAAIKALHARGFQIAVESNGTLPAPAGIDWICISPKADAPVVQTSGQELKLVFPQEKAMPERFADLDFERFYLQPMDGPERDRNTQLAVAYCLSHPQWRLSVQTHKYLGLP

SEQ ID NO: 29025 - protein, 210 aa, Caulobacter segnis
  misc_feature (1)..(210): tr|D5VI53|D5VI53_CAUST 7-carboxy-7-deazaguanine synthas e OS=Caulobacter segnis (strain ATCC 21756 / DSM 7131 / JCM 7823 / NBRC 15250 / LMG 17158 / TK0059) OX=509190 GN=queE PE=3 SV=1
MTYSVKEIFLTLQGEGGQAGKAAVFCRFSGCNLWSGREQDRAKAVCTFCDTDFVGTDGENGGKFATADDLAAAVEAQWTGGPDDRLVVCTGGEPFLQLDEAAIAALHARGFQIAVESNGTIQAPPEIDWICISPKADAPVVQTSGQELKLVFPQEKAMPERFADLDFERFYLQPMDGPDRDRNTQLAVAYCLSHPQWRLSVQTHKYLGLP

SEQ ID NO: 29026 - protein, 210 aa, Caulobacter sp.
  misc_feature (1)..(210): tr|A0A3S9VC63|A0A3S9VC63_9CAUL 7-carboxy-7-deazaguanine synthase OS=Caulobacter sp. FWC26 OX=69665 GN=queE PE= 3 SV=1
MTYSVKEVFLTLQGEGGQAGKAAVFCRFSGCNLWSGREQDRAKAVCTFCDTDFVGTDGENGGKFATAEDLAAAVEAQWRGGPDDRLVVCTGGEPFLQLDEAAIAALHARGFQIAVETNGTLQAPAGVDWICVSPKADAPVVQTSGQELKLVFPQEKAMPERFAGLDFERFYLQPMDGPDRDANTQLAVAYCLSHPQWRLSVQTHKYLGLP

SEQ ID NO: 29027 - protein, 210 aa, Caulobacter sp.
  misc_feature (1)..(210): tr|A0A0Q6UZ00|A0A0Q6UZ00_9CAUL 7-carboxy-7-deazaguanine synthase OS=Caulobacter sp. Root343 OX=1736520 GN=queE PE=3 SV=1
MTYSVKEIFLTLQGEGGQAGKAAVFCRFSGCNLWTGREQDRAKAVCTFCDTDFVGTDGENGGKFATADDLAAAVEAQWTGGPDDRLVVCTGGEPFLQLDEAAIAALHARGFQIAVESNGTLEAPAGIDWICISPKADAPVVQASGQELKLVFPQAKAMPERFAGLDFERFYLQPMDGPDRDRNTQLAVAYCLSHPQWRLSVQTHKYLGLP

SEQ ID NO: 29028 - protein, 210 aa, Caulobacter vibrioides
  misc_feature (1)..(210): sp|Q9A3P3|QUEE_CAUVC 7-carboxy-7-deazaguanine synthase OS=Caulobacter vibrioides (strain ATCC 19089 / CB15) OX =190650 GN=queE PE=3 SV=1
MTYSVKEIFLTLQGEGGQAGKAAVFCRFSGCNLWSGREQDRAKAVCTFCDTDFVGTDGENGGKFATAEDLAAAVEAQWTGGPDDRLVVCTGGEPFLQLDDAAIAALHARGFQIAVETNGTITAPAGVDWICVSPKADAPVVQTSGQELKLVFPQEKAMPERFAALDFERFYLQPMDGPDRDANTQLAVAYCLSHPQWRLSVQTHKYLGLP

SEQ ID NO: 29029 - protein, 210 aa, Caulobacter vibrioides
  misc_feature (1)..(210): tr|A0A290MR06|A0A290MR06_CAUVI 7-carboxy-7-deazaguanine synthase OS=Caulobacter vibrioides OX=155892 GN=queE P E=3 SV=1
MTYSVKEIFLTLQGEGGQAGKAAVFCRFSGCNLWSGREQDRAKAVCTFCDTDFVGTDGENGGKFATAEDLAAAVEAQWTGGPDDRLVVCTGGEPFLQLDAGAIAALHARGFQIAVETNGTIQAPAGVDWICVSPKADAPVVQTSGQELKLVFPQEKAMPERFADLDFERFYLQPMDGPDRDVNTQLAVAYCLSHPQWRLSVQTHKYLGLP

SEQ ID NO: 29030 - protein, 210 aa, Caulobacter zeae
  misc_feature (1)..(210): tr|A0A2N5D8I2|A0A2N5D8I2_9CAUL 7-carboxy-7-deazaguanine synthase OS=Caulobacter zeae OX=2055137 GN=queE PE=3 S V=1
MTYSVKEIFLTLQGEGGQAGKAAVFCRFSGCNLWTGREQDRAKAVCTFCDTDFVGTDGEGGGKFATADALADAVEAAWTGGPDDRLVVCTGGEPLLQLDAAIVEALHARGFQIAMESNGTLPAIDGIDWICVSPKADAPVVQTSGQELKLVFPQEKAMPERFEDMDFERFYLQPMDGPDRDRNTQLAVAYCLAHPKWRLSVQTHKYLGLP

SEQ ID NO: 29031 - protein, 210 aa, Caulobacteraceae bacterium
  misc_feature (1)..(210): tr|A0A4V1UGZ8|A0A4V1UGZ8_9CAUL 7-carboxy-7-deazaguanine synthase OS=Caulobacteraceae bacterium OX=1978230 GN=q ueE PE=3 SV=1
MSYAVKEIFLTLQGEGGQAGQPAVFCRFAGCNLWSGREEDRAAAVCTFCDTDFVGMDGEGGGRFATADLLAQAVEAAWIGGPDNRLVVCTGGEPLLQLDPVLIEALHARGFRIAMETNGTLKAPPGIDWICVSPKAQAQVVQTSGQELKLVYPQVGVDPASFEHLDFERFLLQPMDGPARVENTQAAIAYCLAHPRWRLSVQTHKYLGIP

SEQ ID NO: 29032 - protein, 210 aa, Caulobacteraceae bacterium
  misc_feature (1)..(210): tr|A0A4Q3S9W3|A0A4Q3S9W3_9CAUL 7-carboxy-7-deazaguanine synthase OS=Caulobacteraceae bacterium OX=1978230 GN=q ueE PE=3 SV=1
MNYAVKEIFLTLQGEGGQAGKAAVFCRFAGCNLWSGREKDRATAVCTFCDTDFVGTNGPGGGRFRSAEKLAEAVEAAWTGGPDDRLVVCTGGEPLLQLDAAAIEALHARGFAIAVETNGTLPAPAGIDWVCVSPKADAPVVQTRGQELKLVWPQPGVDPQRFAGLDFERFYLQPMDGPDREAATAACIAYCLSHPRWRLSTQTHKYLGIA

SEQ ID NO: 29033 - protein, 211 aa, Caulobacterales bacterium
  misc_feature (1)..(211): tr|A0A258FBA4|A0A258FBA4_9PROT 7-carboxy-7-deazaguanine synthase OS=Caulobacterales bacterium 32-69-10 OX=1970 503 GN=queE PE=3 SV=1
MTYSAKEVFLTVQGEGGQAGRPAVFLRFAGCNLWSGREQDRAIAVCSFCDTDFVGTDGDGGGKFATADLLADHVAAMWRGRAGDPKLVVCTGGEPLLQLDPPLIAALHARDFEVAIESNGTLAAPDGIDWICVSPKADADLIQVKGQELKLVYPQAKALPDRFEDLDFERFWLQPMDGPDQAANTAAAIEYCLTHPQWRLSVQTHKYIGVR

SEQ ID NO: 29034 - protein, 210 aa, Caulobacterales bacterium
  misc_feature (1)..(210): tr|A0A1Q3JJ86|A0A1Q3JJ86_9PROT 7-carboxy-7-deazaguanine synthase OS=Caulobacterales bacterium 68-7 OX=1895737 GN=queE PE=3 SV=1
MTYSVKEIFLTLQGEGGQAGRAAVFCRFAGCNLWTGREQDRAKAVCTFCDTDFVGTDGVGGGKFETADGLAAAVEATWIGGVEARLVVITGGEPMLQLDEALIAALHSRGFSIAVESNGTLVAPPGVDWLCISPKADSVIVQTSGQELKLVYPQPGVDPTRFEAMAFERFYLQPMDGPDREANTAAAVAYCLEHPRWRLSVQTHKYLGLP

SEQ ID NO: 29035 - protein, 181 aa, Caviibacterium pharyngocola
  misc_feature (1)..(181): tr|A0A2M8RW94|A0A2M8RW94_9PAST 7-carboxy-7-deazaguanine synthase OS=Caviibacterium pharyngocola OX=28159 GN=qu eE PE=3 SV=1
MSCIFIRFGKCNLACPWCDTNFNQFERLPLSRILQKVRSFSAKNIIITGGEPTIQPKLTALLAALKAEGYFLAIETNGLKNVPPQIDYIAVSPKRAYWEQYRRRHITAADEVRIVADENVVDFCQWVETHIRATNYYLSPCEINGEMNLLDVITQLGLLNTRRDKPLWRLSLQTHKLIGIE

SEQ ID NO: 29036 - protein, 241 aa, Cecembia calidifontis
  misc_feature (1)..(241): tr|A0A4Q7PAI4|A0A4Q7PAI4_9BACT 7-carboxy-7-deazaguanine synthase OS=Cecembia calidifontis OX=1187080 GN=queE P E=3 SV=1
MGVFLLDFFAATFCSNFAVQKKAVQSPASTKIEMDKTQKIREGLMLPLMEAFYTVQGEGIHTGVPAYFIRLGGCDVGCVWCDVKESWDAGKWPVLDIEEIVDQALVYPGRTVVITGGEPLMYNLGPLTALLKEKGFSTHIETSGAHPFSGNFDWVCFSPKKFKAPHPSIYAHADELKVVIYNKSDFDFAEKHAELVKQTCKKLIQPEWSKSGQLMESIVAFVKNHPNWKISLQTHKFMDIP

SEQ ID NO: 29037 - protein, 208 aa, Cecembia lonarensis
  misc_feature (1)..(208): tr|K1KZ25|K1KZ25_9BACT 7-carboxy-7-deazaguanine synthas e OS=Cecembia lonarensis LW9 OX=1225176 GN=queE PE=3 SV =1
MDKKLKIKEGLMLPVMEAFYTIQGEGMHAGNPAYFLRLGGCDVGCVWCDVKESWEAEKWPVLGIEEIVDQALIYPGRMIVITGGEPLMYNLDPLTALLKERGFTIHIETSGAHPFSGNFDWVCFSPKKFKAPHPSIYTKADELKVVIFHKSDFEFAEKHAALVNKACKKLLQPEWSKSTQMLEGIINYVKNHPDWKISLQTHKFMDIP

SEQ ID NO: 29038 - protein, 197 aa, Cecembia rubra
  misc_feature (1)..(197): tr|A0A2P8DWZ4|A0A2P8DWZ4_9BACT 7-carboxy-7-deazaguanine synthase OS=Cecembia rubra OX=1485585 GN=queE PE=3 SV= 1
MLPVMEAFYTVQGEGMHTGVPAYFIRLGGCDVGCVWCDVKESWEAEKWPILGIEEIVDHALIYPGRMVVITGGEPLMYNLDPLTTLLKERGFSTHIETSGAHPFSGHFDWVCFSPKKFKAPHPSIYENADELKVVIFHKSDFDFAEKHAALVKEDCKKLLQPEWSKSSQVMGAIVDYVKTHPNWKISLQTHKFMDIP

SEQ ID NO: 29039 - protein, 228 aa, Cedecea davisae
  misc_feature (1)..(228): tr|S3J0Z8|S3J0Z8_9ENTR 7-carboxy-7-deazaguanine synthas e OS=Cedecea davisae DSM 4568 OX=566551 GN=queE PE=3 SV =1
MTEIIMQYPINEMFQTLQGEGYFTGVPAIFIRLQGCPVGCAWCDTKHTWDKLADREVSLFSILAKTKESDKWGAGSAEDLLAVIGRQGYTARHVVITGGEPCIHDLTPLTELLEKNGFSCQIETSGTHEVRCSANTWVTVSPKVNMRGGYDILSQALERADEIKHPVGRMRDIEALDDLLATLTDEKSRIIALQPISQKEDATRLCIETCIARNWRLSMQTHKYLNIA

SEQ ID NO: 29040 - protein, 223 aa, Cedecea lapagei
  misc_feature (1)..(223): tr|A0A447UY19|A0A447UY19_9ENTR 7-carboxy-7-deazaguanine synthase OS=Cedecea lapagei OX=158823 GN=queE PE=3 SV= 1
MQYPINEMFQTLQGEGYFTGVPAIFIRLQGCPVGCAWCDTKHTWDKLADREVSLFSILAKTKESDKWGAGSAEELLAVIGRQGYTARHVVITGGEPCIHDLTPLTHLLEKNGFSCQIETSGTHEVRCTANTWVTVSPKVNMRGGYDILSQALERADEIKHPVGRMRDIEALDELLATLTDEKSRIIALQPISQKEDATRLCIETCIARNWRLSMQTHKYLNIA

SEQ ID NO: 29041 - protein, 223 aa, Cedecea lapagei
  misc_feature (1)..(223): tr|A0A2N0CSD1|A0A2N0CSD1_9ENTR 7-carboxy-7-deazaguanine synthase OS=Cedecea lapagei OX=158823 GN=queE PE=3 SV= 1
MQYPINEMFQTLQGEGYFTGVPAIFIRLQGCPVGCAWCDTKHTWDKLADREVSLFSILAKTKESDKWGAGSAEDLLAIIGRQGWTARHIVITGGEPCIHDLMPLTELLEKNGYSCQIETSGTHEVRCSHSTWVTVSPKVNMRGGYDVLSQALERADEIKHPVGRVRDIEALDELLATLTDEKQRIIALQPISQKDDATRLCIETCIARNWRLSMQTHKYLNIA

SEQ ID NO: 29042 - protein, 223 aa, Cedecea neteri
  misc_feature (1)..(223): tr|A0A089Q1K9|A0A089Q1K9_9ENTR 7-carboxy-7-deazaguanine synthase OS=Cedecea neteri OX=158822 GN=queE PE=3 SV=1
MQYPINEMFQTLQGEGYFTGVPAIFIRLQGCPVGCAWCDTKHTWDKLADREVSLFSILAKTKESDKWGAGSAEDLLAVIGRQGYTARHVVITGGEPCIHDLTPLTDLLEKNGFSCQIETSGTHEVRCTANTWVTVSPKVNMRGGYDILSQALERADEIKHPVGRMRDVEALDELLATLTDEKSRIIALQPISQKDDATRLCIETCIARNWRLSMQTHKYLNIA

SEQ ID NO: 29043 - protein, 223 aa, Cedecea neteri
  misc_feature (1)..(223): tr|A0A291DTT8|A0A291DTT8_9ENTR 7-carboxy-7-deazaguanine synthase OS=Cedecea neteri OX=158822 GN=queE PE=3 SV=1
MQYPINEMFQTLQGEGYFTGVPAIFIRLQGCPVGCAWCDTKHTWDKLADREVSLFSILAKTKESDKWGAASAEDLLAVIGRQGYTARHVVITGGEPCIHDLKPLTDLLEKNGFSCQIETSGTHEVRCTANTWVTVSPKVNMRGGYDILSQALERADEIKHPVGRMRDVEALDELLATLTDEKSRIIALQPISQKDDATRLCIETCIARNWRLSMQTHKYLNIA

SEQ ID NO: 29044 - protein, 223 aa, Cedecea sp.
  misc_feature (1)..(223): tr|A0A1X7KGF7|A0A1X7KGF7_9ENTR 7-carboxy-7-deazaguanine synthase OS=Cedecea sp. NFIX57 OX=1566286 GN=queE PE=3 SV=1
MQYPINEMFQTLQGEGYFTGVPAIFIRLQGCPVGCAWCDTKHTWDKLADREVSLFSILAKTKESDKWGAASAEDLLAVIGRQGYTARHVVITGGEPCIHDLTPLTDLLEKNGFSCQIETSGTHEVRCTANTWVTVSPKVNMRGGYDILSQALDRADEIKHPVGRMRDVEALDELLATLTDEKNRIIALQPISQKEDATRLCIETCIARNWRLSMQTHKYLNIA

SEQ ID NO: 29045 - protein, 222 aa, Celerinatantimonas diazotrophica
  misc_feature (1)..(222): tr|A0A4V2PRE6|A0A4V2PRE6_9GAMM 7-carboxy-7-deazaguanine synthase OS=Celerinatantimonas diazotrophica OX=412034 GN=queE PE=3 SV=1
MSDVIYRVNEVFETIQGEGFYSGTPAVFIRMQGCDVGCPWCDTKHTWTVALDDERSLAEINQPSGDRQRWAQASADELLVLIQSYQAKHIVITGGEPCWYDLKPLTAKLHDQGYMCQLETSGTYDIQIDERSFVTVSPKINMRGKRDVLASAMQRANEVKHPVGRQSDIDALDALLVHCPTEAQIALQPISQQKRATDLCIQTCIDRNWRLSVQLHKYIGVL

SEQ ID NO: 29046 - protein, 211 aa, Cellulomonas sp.
  misc_feature (1)..(211): tr|A0A1I3SYV8|A0A1I3SYV8_9CELL 7-carboxy-7-deazaguanine synthase OS=Cellulomonas sp. KH9 OX=1855324 GN=queE PE =3 SV=1
MTYKVKEIFYTLQGEGTHAGRPAVFCRFASCNLWTGREEDRARAVCQFCDTDFVGTDGPGGGRFKTARALAAAVGEKWPAAVDGDRMVVCTGGEPLLQLDTEAVEAFHAEGFYVAVETNGTRTPPTGVDWLCVSPKIGAPLVVTGGDELKLVYPQAGGDPAQFEHLDFGSFRLQPMDGPDVTENTTSAVDYCLEHPMWHLSMQTHKYLGIR

SEQ ID NO: 29047 - protein, 215 aa, Cellulophaga algicola
  misc_feature (1)..(215): tr|E6XCD7|E6XCD7_CELAD 7-carboxy-7-deazaguanine synthas e OS=Cellulophaga algicola (strain DSM 14237 / IC166 / ACAM 630) OX=688270 GN=queE PE=3 SV=1
MYLCKMVENDVLALVNKGEMLPLMEEFYTIQGEGFHKGTAAYFIRVGGCDVGCHWCDVKESWNADTHPPTATETIISNAAKYSDTIVITGGEPLTWDMGPLTKGLKARNLQTHIETSGAYPLTGVWDWICLSPKKNKLPEGRIYDEAHELKMIIFNKHDFIFAEEQAAKTNKECILYLQPEWSVRDKMVPLIVDYVMKNPKWKVSLQTHKYLNIP

SEQ ID NO: 29048 - protein, 210 aa, Cellulophaga baltica
  misc_feature (1)..(210): tr|A0A1G7EGJ1|A0A1G7EGJ1_9FLAO 7-carboxy-7-deazaguanine synthase OS=Cellulophaga baltica OX=76594 GN=queE PE=3 SV=1
MVENDVLTLVNKGEMLPLMEEFYTIQGEGFHKGTAAYFIRVGGCDVGCHWCDVKESWNADTHPPTATDTIISNAAKYSDTIVITGGEPLTWDMGPLTKGLKARNLQTHIETSGAYPLSGEWDWICLSPKKNKLPEGRIYDEAHELKMIIFNKHDFIFAEEQAAKTNKDCILYLQPEWSVRDKMVPLIVDYVMKNPKWKVSLQTHKYLNIP

SEQ ID NO: 29049 - protein, 210 aa, Cellulophaga baltica; identical to SEQ ID NO: 29048
  misc_feature (1)..(210): tr|A0A0A7K1R1|A0A0A7K1R1_9FLAO 7-carboxy-7-deazaguanine synthase OS=Cellulophaga baltica 18 OX=1348584 GN=queE PE=3 SV=1

SEQ ID NO: 29050 - protein, 215 aa, Cellulophaga fucicola
  misc_feature (1)..(215): tr|A0A1K1P2B4|A0A1K1P2B4_9FLAO 7-carboxy-7-deazaguanine synthase OS=Cellulophaga fucicola OX=76595 GN=queE PE= 3 SV=1
MYLCIMVKNEVLALVDKGEMLPLMEEFYTIQGEGFHKGTAAYFIRVGGCDVGCHWCDVKESWNAETHPPTTIKAIVDNAAKYSNTIVVTGGEPLTWNMVPLTDALKAKNLQTHIETSGAYTLTGTWDWICLSPKKNKLPEGIIYDKADELKMIIYNKNDFKFAEEQAAKVNKDCILYLQPEWSVKDKMTPLIVDFVMKNPQWKVSLQTHKYLNIP

SEQ ID NO: 29051 - protein, 215 aa, Cellulophaga lytica
  misc_feature (1)..(215): tr|F0RF37|F0RF37_CELLC 7-carboxy-7-deazaguanine synthas e OS=Cellulophaga lytica (strain ATCC 23178 / DSM 7489 / JCM 8516 / NBRC 14961 / NCIMB 1423 / VKM B-1433 / Cy l20) OX=867900 GN=queE PE=3 SV=1
MYLCIMVKNEVLALVDKGEMLPLMEEFYTIQGEGFHKGTAAYFIRVGGCDVGCHWCDVKESWNAATHPPTTIDAIVNNAAKYSNTIVVTGGEPLTWNMAPLTEALKAKNLQTHIETSGAYTLTGIWDWICLSPKKNKLPQGIIYDKADELKMIIYNKNDFKFAEEQAAKVNKDCILYLQPEWSVKDKMTPLIVDFVMKNPQWKVSLQTHKYLNIP

SEQ ID NO: 29052 - protein, 215 aa, Cellulophaga sp.
  misc_feature (1)..(215): tr|A0A559NBB6|A0A559NBB6_9FLAO 7-carboxy-7-deazaguanine synthase OS=Cellulophaga sp. RHA_52 OX=1250036 GN=queE PE=3 SV=1
MYLCIMVKNEVLALVDKGEMLPLMEEFYTIQGEGFHKGTAAYFIRVGGCDVGCHWCDVKESWNAATHPPTTIDAIVNNAAKYSNTIVVTGGEPLTWNMAPLTEALKAKKLQTHIETSGAYTLTGIWDWICLSPKKNKLPQGIIYDKADELKMIIYNKNDFKFAEEQAAKVNKDCILYLQPEWSVKDKMTPLIVDFVMKNPQWKVSLQTHKYLNIP

SEQ ID NO: 29053 - protein, 210 aa, Cellulophaga tyrosinoxydans
  misc_feature (1)..(210): tr|A0A1W2AR94|A0A1W2AR94_9FLAO 7-carboxy-7-deazaguanine synthase OS=Cellulophaga tyrosinoxydans OX=504486 GN=q ueE PE=3 SV=1
MIENDVLTLVNKGEMLPLMEEFYTIQGEGFHKGTAAYFIRVGGCDVGCHWCDVKESWNAETHPPTAIESIISNAAKYSDTIVITGGEPLTWDMGPLTLGLKERNLQTHIETSGAYPLSGVWDWICLSPKKNKLPEGEIYDKAHELKIIIFNKHDFIFAEEQAAKTNKNCILYLQPEWSVRDKMVPLIVDYVMKNPKWKVSLQTHKYLNIP

SEQ ID NO: 29054 - protein, 252 aa, Cellvibrio japonicus
  misc_feature (1)..(252): tr|B3PC23|B3PC23_CELJU 7-carboxy-7-deazaguanine synthas e OS=Cellvibrio japonicus (strain Ueda107) OX=498211 GN =queE PE=3 SV=1
MQGWASKSRRFWVHCASFVNRHLKHYLSSSGFPIASMTQASLKITEIFYSLQGEARTVGLPTVFVRLTGCPLRCGYCDSEYAFYGGERLSLDEILARVARYHPRHVCVTGGEPMAQRECVTLLKMLCDAGYGVSLETSGAMPLEDVDPRVSKVMDLKTPGSGEVGRNRWENIPLLGEQDQVKFVICNREDYEWARFKLDEYELASRAGEVLFSPSHGQVKPVELAEWILADNLPVRFQLQLHKLLWNDEPGH

SEQ ID NO: 29055 - protein, 216 aa, Cellvibrio mixtus
  misc_feature (1)..(216): tr|A0A266Q5M9|A0A266Q5M9_9GAMM 7-carboxy-7-deazaguanine synthase OS=Cellvibrio mixtus OX=39650 GN=queE PE=3 SV =1
MTQASLKITEIFYSLQGESNTVGLPTVFVRLTGCPLRCGYCDSEYAFYGGERLLIDDILAQVASFNPRYICVTGGEPLAQRECLTLLSALCDAGYSVSLETSGALPVDDVDPRVIKVMDLKTPGSGEVGRNRWENIPLLTAQDQIKFVICSREDYEWARFKVDEHQLVGRVAEVLFSPSFGQVTPLSLAEWILADNLPVRFQLQLHKLLWNDVPGH

SEQ ID NO: 29056 - protein, 216 aa, Cellvibrio sp.
  misc_feature (1)..(216): tr|A0A1U9NEZ6|A0A1U9NEZ6_9GAMM 7-carboxy-7-deazaguanine synthase OS=Cellvibrio sp. PSBB023 OX=1945512 GN=queE PE=3 SV=1
MTQASLKITEIFYSLQGESNTVGLPTVFVRLTGCPLRCGYCDSEYAFYGGERLLIDDILAKVASFNPRYICVTGGEPLAQRECLTLLSALCDAGYSVSLETSGALPVDDVDPRVIKVMDLKTPGSGEVGRNRWENIPLLTAQDQIKFVICSREDYEWARFKVDEYQLVGRVAEVLFSPSFGQVAPLSLAEWILADNLPVRFQLQLHKLLWNDVPGH

SEQ ID NO: 29057 - protein, 222 aa, Cellvibrio sp.
  misc_feature (1)..(222): tr|A0A5J6P151|A0A5J6P151_9GAMM 7-carboxy-7-deazaguanine synthase QueE OS=Cellvibrio sp. KY-YJ-3 OX=454662 GN=q ueE PE=4 SV=1
MTQTSTMTQASLKITEIFYSLQGESNTVGLPTVFVRLTGCPLRCGYCDSEYAFYGGERLSLDEILAKVASFNPRYICVTGGEPLAQRECLTLLGALCDAGYSVSLETSGALPVDDVDPRVVKVMDLKTPGSGEVGRNRWENIPLLSGQDQVKFVICSREDYEWARFKVDEHQLVGRVAEVLFSPSFGQVTPLSLAEWILADNLPVRFQLQLHKLLWNDVPGH

SEQ ID NO: 29058 - protein, 216 aa, Cellvibrionaceae bacterium
  misc_feature (1)..(216): tr|A0A545U9G9|A0A545U9G9_9GAMM 7-carboxy-7-deazaguanine synthase OS=Cellvibrionaceae bacterium R142 OX=2591008 GN=queE PE=3 SV=1
MSESALRITEIFYSLQGEARTVGRPTVFVRLTGCPLRCHYCDSEYAFYGGEKFTLDTILAKVAAYRPAFVCVTGGEPLAQPNCLPLLAALCDAGYEVSLETSGALSLQGIDARVVVVMDLKTPASGEVKRNDYGNLALLKPRDQVKFVICDRSDYEWARFKVSEYALERRVEDVLFSPSEGQLAPRELAEWILEDNLPVRFQLQVHKLLWGDQPGH

SEQ ID NO: 29059 - protein, 215 aa, Cellvibrionales bacterium
  misc_feature (1)..(215): tr|A0A1Z8Z964|A0A1Z8Z964_9GAMM 7-carboxy-7-deazaguanine synthase OS=Cellvibrionales bacterium TMED79 OX=198676 8 GN=queE PE=3 SV=1
MLSQLRITEIFHSLQGEARSAGLPTVFVRLTGCPLRCQYCDTEYAFSGGAMMSFDSILESVGSFDCKTICVTGGEPLAQAACNDLLNVLCDTGFDVSLETSGAMSIEDTPTAVSRVVDIKTPDSKESHRNLWTNVALLTPNDQVKFVICSREDYEWARFKLDEYALVSRVSDVLFSPSHHDIAASDLADWIVADRLPVRFQMQLHKILWNDEPGR

SEQ ID NO: 29060 - protein, 239 aa, Cellvibrionales bacterium
  misc_feature (1)..(239): tr|A0A2E8KH20|A0A2E8KH20_9GAMM 7-carboxy-7-deazaguanine synthase OS=Cellvibrionales bacterium OX=2026722 GN=qu eE PE=3 SV=1
MALFKPVSVVSQPLVTDLSLRVSEIFYSLQGESSWVGFPTVFVRLTGCPLRCSYCDTPYSFKGGSVKPLSVLIDEIDAYKTEYICVTGGEPLAQSNCIIFLTQLCDKGYKVSLETSGALDIADVDPRVKRIVDLKTPSSKELDKNRYENIPLLVPQDEVKFVICNREDFLWSVDIIHQYQLYDRVDNILFSPVFDVEGVIQREDDFNEQLLAQWILEGQLPVRMQMQMHKLIWGDESGR

SEQ ID NO: 29061 - protein, 243 aa, Centipeda periodontii
  misc_feature (1)..(243): tr|F5RP98|F5RP98_9FIRM 7-carboxy-7-deazaguanine synthas e OS=Centipeda periodontii DSM 2778 OX=888060 GN=nrdG2 PE=3 SV=1
MRENIIEIFSSIQGEGKYVGCRQIFVRLEGCNLDCTYCDTENEIGRHPVCMVEERAGTHELVPYENPLSVEQAAEIVARLVADVPHHSLSITGGEPLLHVPFIKELATHIDLPVFLETNGTLDRALAECIDCISHISMDLKLPDVLSAPVWDAHARFLEVARAKDVYVKVVVAADTCADDVERAAHLVAEIAPATLLILQPVTPYGGCTVPSPARLLELQRIALHHLTDVRVIPQTHRMMDLL

SEQ ID NO: 29062 - protein, 160 aa, Cesiribacter andamanensis
  misc_feature (1)..(160): tr|M7N228|M7N228_9BACT 7-carboxy-7-deazaguanine synthas e OS=Cesiribacter andamanensis AMV16 OX=1279009 GN=queE PE=4 SV=1
MEAITQLDETQCRFCVITGGEPLLHIDAPLIKALHEKGYEIAVETNGTVALQKNCWDAESQQLLPPDWIACSPKLGQQHLALEYFDELKLVVPSYQPRDFQEFLLRQRKHLRSGQLVPLLWLQPEDGPRLKESIQLAVTLALQDPAWRVGAQTHKLLNVE

SEQ ID NO: 29063 - protein, 230 aa, Cetia pacifica
  misc_feature (1)..(230): tr|A0A3N1YP77|A0A3N1YP77_9PROT 7-carboxy-7-deazaguanine synthase OS=Cetia pacifica OX=1424653 GN=queE PE=3 SV= 1
MKKIPISEIFYSIQGEGKYCGTPSVFVRVGGCNLRCPGFGDKGCDSYYAVDKRYQKEWELKSIEDIKTEIKKYLKFDPHLVITGGEPTLYFKELYPLIEWFEGQITIETNATIDIDFEKFPAYKKVAFAMSVKLSNSGEEYNKRVKKNVIKSYAKNAKKSFFKFVIDKDLKKEIEDITKNINLSIYCMPLGATKEELEKNAPFVFEFCLKNGYRYSDRIHIRLFGKKKGV

SEQ ID NO: 29064 - protein, 258 aa, Chamaesiphon minutus
  misc_feature (1)..(258): tr|K9UJE6|K9UJE6_CHAP6 7-carboxy-7-deazaguanine synthas e OS=Chamaesiphon minutus (strain ATCC 27169 / PCC 6605 ) OX=1173020 GN=queE PE=3 SV=1
MTALTANLIEIFSAIQGEGINVGTRQIFVRFGGCDLRCHYCDSQHTWQKQPTCQIEQTPGKRDFVTYDNPIEMSQLLEWVERQNQPHLHDSISITGGEPLLHSLFLAQFLPRVKELTHLPIYLETGGHRPSQLVQVLPYLDLVGMDIKLPSVSGETHWEKHAEFLRSSRDAGVDIFVKIIISQTTNPEELRQAARLVAEVNSQIVIFLQPMTALAQPHTNPTLTAPNPEQVLAWQALMKEYLPHIRVIPQTHKMIGQL

SEQ ID NO: 29065 - protein, 258 aa, Chamaesiphon polymorphus
  misc_feature (1)..(258): tr|A0A2T1GCW7|A0A2T1GCW7_9CYAN 7-carboxy-7-deazaguanine synthase OS=Chamaesiphon polymorphus CCALA 037 OX=2107 692 GN=queE PE=3 SV=1
MTALTANLIEIFSAIQGEGINVGTRQIFVRFGGCDLRCHYCDSQHTWQKQPTCEIEQTPGARDFVTHDNPIEMSQLLEWVDRQNQPQLHDSISITGGEPLLHAPFLAQFLPRVKELTHLPIYLETGGHRPSQLAQVLPYLDLVGMDIKLPSVSGETHWEKHAEFLRSCRDAGVDVFVKIIISQTTNPDELRQSARLVAEVNDKTIIFLQPMTALAQPHTNPNLTAPKPEQVLAWQALMKEYLPHIRVIPQTHKMIGQL

SEQ ID NO: 29066 - protein, 223 aa, Chania multitudinisentens
  misc_feature (1)..(223): tr|W0LG29|W0LG29_9GAMM 7-carboxy-7-deazaguanine synthas e OS=Chania multitudinisentens RB-25 OX=1441930 GN=queE PE=3 SV=1
MQYPINEMFQTLQGEGYFTGVPAIFIRLQGCPVGCSWCDTKHTWEKGAEREVDMQRILLKTTESDTWGSAKAEQLLRVVHQQGYTARHIVITGGEPCIYDLLPLTTLFESHGYACQIETSGTHEIFCSPNTWVTVSPKVKMRGGLTVLDQALRRADEIKHPVGRERDIAALDELLATLHDKKRRIIALQPISQKEEATRLCIETCIARNWRLSMQTHKYLNIA

SEQ ID NO: 29067 - protein, 246 aa, Chelativorans sp.
  misc_feature (1)..(246): tr|Q11B07|Q11B07_CHESB 7-carboxy-7-deazaguanine synthas e OS=Chelativorans sp. (strain BNC1) OX=266779 GN=queE PE=3 SV=1
MTSDKSETHIRVAEIFGPTIQGEGPLIGLPTVFVRTGGCDYRCAWCDSLHAVDTQYRHDWEPMTAKAVWEKVQVLSANTPLMVSLSGGNPAIQPLGDLIALGKSSGYRFALETQGSLAREWFSELDVLIISPKPPSSGMEMDWQRLSDCIARAGEGTEVALKIVIFDEADYAFARAVSARHGGLPLYLQPGNHTPPPADAHYAPIDIEGVMRRMRWLINKVAADAWFSVRVLPQLHVLVWGNKRGV

SEQ ID NO: 29068 - protein, 205 aa, Chelonobacter oris
  misc_feature (1)..(205): tr|A0A0A3AMD9|A0A0A3AMD9_9PAST 7-carboxy-7-deazaguanine synthase OS=Chelonobacter oris OX=505317 GN=queE PE=3 SV=1
MTAEIEYNIVEIFESLQGEGFNTGMPSIFIRFGKCNLACPWCDTNYNQFERWTFSRILRQVRSYGAKNIIITGGEPTIQPKLESLLDRLKADGYFLAIETNGLKTIPPQIDYIATSPKLLYQHKYRQRCIPSADEVRIVNDGDILPFCEQIERQIQAKHYYLSPCEQQGEMNLLDTVRKLGQLNQRLNGRKWQLSLQTHKLLGIE

SEQ ID NO: 29069 - protein, 215 aa, Chishuiella changwenlii
  misc_feature (1)..(215): tr|A0A1M6YX05|A0A1M6YX05_9FLAO 7-carboxy-7-deazaguanine synthase OS=Chishuiella changwenlii OX=1434701 GN=queE PE=3 SV=1
MIHIASTTAEEQDLIKEGKLLPVMEHFYTIQGEGMYTGVASYFIRLGGCDVGCHWCDVKDSWDAEKHPLTDVDELVELATSQAKTIIITGGEPLMWDLTYLTKKLHEKGARIHIETSGAYPLSGEIDWVCLSPKKTMLPLDDVCEAAHELKCIIFNQHDFQFAEEQAARVGENCTLFLQTEWGKREKNLPLIIDYVKENPKWRYSLQTHKYLDIP

SEQ ID NO: 29070 - protein, 214 aa, Chitinimonas sp.
  misc_feature (1)..(214): tr|A0A2G3K1Q0|A0A2G3K1Q0_9BURK 7-carboxy-7-deazaguanine synthase OS=Chitinimonas sp. BJB300 OX=1559339 GN=queE PE=3 SV=1
MSQSLRITEIFFSLQGETSRLGLPTVFVRLTGCPLRCGYCDSAYAFHGGERMSLTAIVKEVAKHGTPYVCVTGGEPLAQAGCHDLLTRLCDAGYSVSLETSGHLPIETVDPRVSRIVDIKTPGSGEVEKNLWANLNHLNARDELKFVLVHRHDYEWARDLLLDNHLQTLCPVIFSPVWESLPPRDLAEWVIADKLPVRVQVQLHKILWGDKPGV

SEQ ID NO: 29071 - protein, 215 aa, Chitinimonas sp.
  misc_feature (1)..(215): tr|A0A516SFG0|A0A516SFG0_9MICO 7-carboxy-7-deazaguanine synthase OS=Chitinimonas sp. R3-44 OX=2594795 GN=queE PE=3 SV=1
MSATRLRITEIFFSLQGETSRLGLPTVFVRLTGCPLRCGYCDSAYAFHGGKLQSLDDIVAEVASHGTPYVCVTGGEPLAQAACHDLLRRLCDDGFSVSLETSGHLPIETVDPRVSRIVDIKTPGSGEVEKNLWENLPHLNARDELKFVLVHRHDYEWARDLLLDNGLHTLCPVLFSPVWESLKPADLAQWVLADKLPVRVQVQLHKILWGDKPGV

SEQ ID NO: 29072 - protein, 214 aa, Chitinimonas taiwanensis
  misc_feature (1)..(214): tr|A0A1K2H4Q8|A0A1K2H4Q8_9BURK 7-carboxy-7-deazaguanine synthase OS=Chitinimonas taiwanensis DSM 18899 OX=1121 279 GN=queE PE=3 SV=1
MSQSLRITEIFHSLQGETSRLGLPTVFVRLTGCPLRCGYCDSAYAFHGGERMSISAILEEVARHGTPYVCVTGGEPLAQAGCHDLLKRLCDAGFSVSLETSGHLPIETVDARVSRIVDIKTPGSGEVEKNLWTNLNHLGAHDELKFVLVHRHDYEWARDLLLDNGLHTLCPVIFSPVWESLPPRELAEWVIADKLPVRVQVQLHKILWGDKPGV

SEQ ID NO: 29073 - protein, 215 aa, Chitiniphilus sp.
  misc_feature (1)..(215): tr|A0A4V6WIC5|A0A4V6WIC5_9NEIS 7-carboxy-7-deazaguanine synthase OS=Chitiniphilus sp. HX-2-15 OX=2571148 GN=qu eE PE=3 SV=1
MRSASLRISEIFHSLQGETSRIGLPTVFVRLTGCPLRCTWCDSAYAFHGGETMTIADILEKVAGYDARHVCVTGGEPLAQKPVHQLLRDLCDAGYSVSLETSGALPVNEVDARVSRIVDLKAPGSGETEKNLWSNLDMLGANDEIKFVLAGREDYEWARTVIRDRNLEQVAPILFSPVWDSLPPARLADWVLEDKLPVRMQVQLHKILWGEKPGV

SEQ ID NO: 29074 - protein, 221 aa, Chitinivibrio alkaliphilus
  misc_feature (1)..(221): tr|U7D6T5|U7D6T5_9BACT 7-carboxy-7-deazaguanine synthas e OS=Chitinivibrio alkaliphilus ACht1 OX=1313304 GN=que E PE=3 SV=1
MPPITSDSPVSTLTVCELFTSLQGESTHAGRVCSFIRLAGCNLRCHYCDTTYSYGGGQRKSFQELLAWLATEKTSLVEITGGEPLCQDAVVDFSALLLQQGYEVLVETNGTWDVSVLPGEVQKIIDYKLPGSGATTPFFRENFSHISSRDEVKFVISDRADYECAKEIVQNQDIAGEVLFSPVEQSCSLKGLAEWIVEDRLRVRLGVQLHKVIWGSDTKGV

SEQ ID NO: 29075 - protein, 208 aa, Chitinophaga arvensicola
  misc_feature (1)..(208): tr|A0A1I0QTU7|A0A1I0QTU7_9BACT 7-carboxy-7-deazaguanine synthase OS=Chitinophaga arvensicola OX=29529 GN=queE PE=3 SV=1
MSVLTKNINTDTLPLMERFYTIQGEGYHQGRAAYFIRLGGCDVGCVWCDVKDSWDADKHPQVAVADMVSEAAAYPGRIAVITGGEPLLHNLDSLTRTLHKQGFQTHIETSGSSPLSGKWDWITLSPKKFKAPLPEICKVAHELKVVIFNKTDFAWAEKYAALAGKHCKLYLQPEWERSAEMTPLITEYIKDHPEWTMSLQIHKYINVP

SEQ ID NO: 29076 - protein, 206 aa, Chitinophaga barathri
  misc_feature (1)..(206): tr|A0A3N4MTZ5|A0A3N4MTZ5_9BACT 7-carboxy-7-deazaguanine synthase OS=Chitinophaga barathri OX=1647451 GN=queE P E=3 SV=1
MQSTIIQTAALPVMESFYTLQGEGFHQGKAAYFIRLGGCDVGCVWCDVKESWDADKHPQIAISDLVREAAANPGRIAVITGGEPLMHNLDGLTKALHKAGFRNHIETSGSSPLSGSWDWITLSPKKFKAPLAEVCAQAHELKIIIYNKSDFAWAEKYAAMAGKHCRLYLQPEWSRAAEMTPLIVDYVKDNPQWQISLQIHKYINVP

SEQ ID NO: 29077 - protein, 193 aa, Chitinophaga caeni
  misc_feature (1)..(193): tr|A0A291R0X3|A0A291R0X3_9BACT 7-carboxy-7-deazaguanine synthase OS=Chitinophaga caeni OX=2029983 GN=queE PE=3 SV=1
MEAFYTLQGEGFYQGQAAYFIRLGGCDVGCHWCDVKDSWDIDKHPRQAVREIVDTAASQPGRIAVITGGEPLLHDLTLLTKYLHKAGFRTHIETSGSSPISGSLDWITLSPKKFKAPLTEVTQRAHELKVVIYNKSDFAWAEKYAAQTNKHCKLYLQPEWSRAAEMTPLIVDYIKENPQWQLSLQIHKYINVP

SEQ ID NO: 29078 - protein, 205 aa, Chitinophaga costaii
  misc_feature (1)..(205): tr|A0A1C4BX53|A0A1C4BX53_9BACT 7-carboxy-7-deazaguanine synthase OS=Chitinophaga costaii OX=1335309 GN=queE PE =3 SV=1
MTTLQLTDTLPVMEDFYTLQGEGMYQGQAAYFIRLGGCDVGCHWCDVKESWDENKHPQVAITDLVAKAAAFPGRLAVITGGEPLLHNLDVLCTTLHAAGFRTHMETSGSSPLSGDWDWITLSPKKFKAPLPAVSAAAHELKVVIFNKADFAWAEEHAALAGHHCKLYLQPEWSKADAMTPLIVDYIKAHPQWQLSLQTHKYINVP

SEQ ID NO: 29079 - protein, 206 aa, Chitinophaga cymbidii
  misc_feature (1)..(206): tr|A0A512RJZ7|A0A512RJZ7_9BACT 7-carboxy-7-deazaguanine synthase OS=Chitinophaga cymbidii OX=1096750 GN=queE P E=3 SV=1
MSTTAVHTVTLPVMESFYTIQGEGFHQGKAAYFIRLGGCDVGCVWCDVKESWDADKHPQRAIPDLVREAAAHPGRIAVITGGEPLMHNLHELTGALHTAGFRTHMETSGSSPLSGDWDWITLSPKKFKAPLNEVCQQAHELKIVVYNKSDFAWAEKYAAMVGKQCRLYLQPEWSRAAEMTPLIIDYVKDHPQWQISLQVHKYINVP

SEQ ID NO: 29080 - protein, 193 aa, Chitinophaga dinghuensis
  misc_feature (1)..(193): tr|A0A327VM61|A0A327VM61_9BACT 7-carboxy-7-deazaguanine synthase OS=Chitinophaga dinghuensis OX=1539050 GN=que E PE=3 SV=1
MERFYTIQGEGLYQGRAAYFIRLGGCDVGCHWCDVKDSWDADKHPQLTIDNIVSEAASYPGRIAVITGGEPLLHQLDGLTKALHKQGFRTHMETSGSSPLSGNWDWITLSPKKFKAPLPEVCKAASELKVVIFNKSDFAWAEKHAAMVGKNCRLYLQPEWSKSAEMLPLIIDYIKDNPQWQLSLQVHKYINVP

SEQ ID NO: 29081 - protein, 208 aa, Chitinophaga eiseniae
  misc_feature (1)..(208): tr|A0A1T4Q8W2|A0A1T4Q8W2_9BACT 7-carboxy-7-deazaguanine synthase OS=Chitinophaga eiseniae OX=634771 GN=queE PE =3 SV=1
MSVITTNIKTSTLPVMESFYTLQGEGYYQGKAAYFIRLGGCDVGCHWCDVKESWDAAKHPQREIVDIVEEAASHPGRLAVITGGEPLMHHLDALTKALHKKGFRTHMETSGSSPLSGSWDWITLSPKKFKAPLPEVCRVASELKVVIFNKSDFAWAEKYAALVGKQCKLYLAPEWDRSAEMTPLIIDYIKDHPEWGLSLQVHKYINVP

SEQ ID NO: 29082 - protein, 209 aa, Chitinophaga filiformis
  misc_feature (1)..(209): tr|A0A1G7GJP6|A0A1G7GJP6_CHIFI 7-carboxy-7-deazaguanine synthase OS=Chitinophaga filiformis OX=104663 GN=queE PE=3 SV=1
MSTTTADIATSLQLPVMERFYTLQGEGNYQGQAAYFIRLGGCDVGCHWCDVKDSWDASRHPLIAISELVQDAAVHPGRIAVITGGEPLMHNLDALTDALHKEGFRTHMETSGSSPLSGHWDWITLSPKKFKAPLPEICGVAHELKVVIFNKTDFAWAEKYAALAGSHCKLYLQPEWDRAAEITPLIIYYIKENPQWQLSLQVHKYINVP

SEQ ID NO: 29083 - protein, 193 aa, Chitinophaga flava
  misc_feature (1)..(193): tr|A0A365Y7A2|A0A365Y7A2_9BACT 7-carboxy-7-deazaguanine synthase OS=Chitinophaga flava OX=2259036 GN=queE PE=3 SV=1
MESFYTLQGEGFHQGRAAYFIRLGGCDVGCHWCDVKDSWDASRHPQREVADIVEEAAAHPGRIAVITGGEPLLHNLDALTKALHKKGFHTHMETSGSSPLSGSWDWITLSPKKFKAPLPEICKVAHELKVVIFNKSDFAWAEKYAALVGKDCRLYLQTEWERGAEMTPLIVDYIKDHPEWTLSLQSHKYIHVP

SEQ ID NO: 29084 - protein, 208 aa, Chitinophaga ginsengisegetis
  misc_feature (1)..(208): tr|A0A1T5NLQ2|A0A1T5NLQ2_9BACT 7-carboxy-7-deazaguanine synthase OS=Chitinophaga ginsengisegetis OX=393003 GN= queE PE=3 SV=1
MSVTTINISTDTLPLMERFYTIQGEGYHQGRAAYFIRLGGCDVGCVWCDVKDSWDADKHPQVAVSDIVTEAAAYPGRIAVVTGGEPLLHNLDALTRSLHKQGFHTHIETSGSSPLSGKWDWITLSPKKFKAPLPEICKAAHELKVVIFNKTDFAWAEKYAALAGKHCKLYLQPEWERSAEMTPLITEYIKDHPEWTMSLQIHKYINVP

SEQ ID NO: 29085 - protein, 193 aa, Chitinophaga ginsengisoli
  misc_feature (1)..(193): tr|A0A2P8GGK3|A0A2P8GGK3_9BACT 7-carboxy-7-deazaguanine synthase OS=Chitinophaga ginsengisoli OX=363837 GN=que E PE=3 SV=1
MERFYTLQGEGNYQGQAAYFIRLGGCDVGCHWCDVKDSWDASRHPLLAISDLVKDAAVHPGRIAVITGGEPLMHNLDALTDALHKEGFRTHMETSGSSPLSGHWDWITLSPKKFKAPLPEICGLAHELKVVIFNKTDFAWAEKYAALAGPHCKLYLQPEWDRAAEITPLIIDYIKENPQWQLSLQVHKYINVP

SEQ ID NO: 29086 - protein, 210 aa, Chitinophaga japonensis
  misc_feature (1)..(210): tr|A0A562TAW6|A0A562TAW6_CHIJA 7-carboxy-7-deazaguanine synthase OS=Chitinophaga japonensis OX=104662 GN=queE PE=3 SV=1
MSTTITHSNVQTETLPVMERFYTLQGEGFYQGQAAYFIRLGGCDVGCHWCDVKDSWDAARHPVLPVTELAAEAAQHPGRIAVITGGEPLMHNLDALCQALHQQGFRTHIETSGSSPLSGQWDWITLSPKKFKAPLPEICAQANELKVVIFNKTDFAWAEKYAALAGKDCKLYLQPEWDRAAEMTPLIIDYIKAHPEWQLSLQVHKYINVP

SEQ ID NO: 29087 - protein, 207 aa, Chitinophaga jiangningensis
  misc_feature (1)..(207): tr|A0A1M6W1M1|A0A1M6W1M1_9BACT 7-carboxy-7-deazaguanine synthase OS=Chitinophaga jiangningensis OX=1419482 GN= queE PE=3 SV=1
MSVLISNSTSTLPVMEQFYTIQGEGLYQGKAAYFIRLGGCDVGCHWCDVKESWDADKHPQLTIDSIVQEAAANPGRIAVITGGEPLMHRLDALTKALHKKGFRTHMETSGSSPLSGSWDWITLSPKKFKAPLPEVCKAANELKVVIFNKSDFAWAEKHAAMVDKSCRLYLQPEWGKSAEMTPLIIDYIKDNPQWQLSLQIHKYINVP

SEQ ID NO: 29088 - protein, 206 aa, Chitinophaga niabensis
  misc_feature (1)..(206): tr|A0A1N6HCV5|A0A1N6HCV5_9BACT 7-carboxy-7-deazaguanine synthase OS=Chitinophaga niabensis OX=536979 GN=queE P E=3 SV=1
MQSTVIHTATLPVMESFYTIQGEGFHQGKAAYFIRLGGCDVGCVWCDVKESWDADKHPQRDITGMVQEAAAHPGRIAVITGGEPLMHHLDGLTKALHKAGFRNHIETSGSSPLSGSWDWITLSPKKFKAPLPEACKQANELKIVIYNKSDFAWAEKYAALVGKQCKLYLQPEWSRAAEMTPHIIDYVKDNPQWQISLQVHKYINVP

SEQ ID NO: 29089 - protein, 208 aa, Chitinophaga niastensis
  misc_feature (1)..(208): tr|A0A2P8HVC1|A0A2P8HVC1_9BACT 7-carboxy-7-deazaguanine synthase OS=Chitinophaga niastensis OX=536980 GN=queE PE=3 SV=1
MSVITTNINTSTLPVMERFYTIQGEGYHQGRAAYFVRLGGCDVGCVWCDVKDSWDAEKHPQVPVTDIVAEAAKFPGRIAVITGGEPLLHQLDVLTKTLHKQGFQTHIETSGSSPLSGSWDWITLSPKKFKAPLPDICKAAHELKVVIFNKTDFAWAEKYAALAGKHCKLYLQPEWERSAEMTPLIIDYIKDNPQWTMSLQIHKYINVP

SEQ ID NO: 29090 - protein, 201 aa, Chitinophaga parva
  misc_feature (1)..(201): tr|A0A2T7BNI7|A0A2T7BNI7_9BACT 7-carboxy-7-deazaguanine synthase OS=Chitinophaga parva OX=2169414 GN=queE PE=3 SV=1
MTTLALPVMEDFYTLQGEGMYQGQAAYFVRLGGCDVGCHWCDVKESWDESKHPRIAIDAIVAKAAAHPGRLAVITGGEPLLHNLDALCDALHAAGFRTHMETSGSSPLSGHWDWITLSPKKFKAPLPEVSVAAHELKVVVFNKSDFAWAEEHAALAGPHCKLYLQPEWSKADAMTPLIVDYIKAHPQWQLSLQTHKYINVP

SEQ ID NO: 29091 - protein, 193 aa, Chitinophaga pinensis
  misc_feature (1)..(193): tr|A0A561J1F7|A0A561J1F7_9BACT 7-carboxy-7-deazaguanine synthase OS=Chitinophaga pinensis OX=79329 GN=queE PE= 3 SV=1
MERFYTIQGEGNYQGCAAYFIRLGGCDVGCHWCDVKDSWEADRHPQLELTDIVSEAASYPGRIAVITGGEPLMHNLDALTADLHAAGFRTHIETSGSSPLSGNWDWITLSPKKFKAPLPDICALANELKVVIFNKSDFAWAEKYAALAGPHCKLYIQPEWNKAAEMTPLIIDYIKDNPKWQLSLQVHKYINVP

SEQ ID NO: 29092 - protein, 209 aa, Chitinophaga pinensis
  misc_feature (1)..(209): tr|C7PR94|C7PR94_CHIPD 7-carboxy-7-deazaguanine synthas e OS=Chitinophaga pinensis (strain ATCC 43595 / DSM 258 8 / NCIB 11800 / UQM 2034) OX=485918 GN=queE PE=3 SV=1
MSTITADTATSLQLPVMERFYTLQGEGNYQGQAAYFIRLGGCDVGCHWCDVKESWDASRHPLIAISELVRDAAVHPGRIAVITGGEPLMHNLDPLTDALHAASFRTHMETSGSSPLSGHWDWITLSPKKFKAPLPEVCEVAHELKVVIFNKSDFAWAEKYAALAGPHCKLYLQPEWEKSAQVTPLIIDYIKENPKWQLSLQTHKYINVP

SEQ ID NO: 29093 - protein, 208 aa, Chitinophaga polysaccharea
  misc_feature (1)..(208): tr|A0A561Q5B7|A0A561Q5B7_9BACT 7-carboxy-7-deazaguanine synthase OS=Chitinophaga polysaccharea OX=1293035 GN=q ueE PE=3 SV=1
MSVITTNIKTDTLPLMERFYTIQGEGYHQGRAAYFIRLGGCDVGCVWCDVKESWDADKHPQVSITDIATEAARYPGRIAVVTGGEPLLHNLDALTKALHKQGFKTHMETSGSSPLSGSWDWITLSPKKFKAPLPEVCKAAHELKVVIYNKTDFAWAEKYAALAGKNCKLYLQPEWERSAEMTPLITEYIKDHPEWTMSLQIHKYINVP

SEQ ID NO: 29094 - protein, 214 aa, Chitinophaga rupis
  misc_feature (1)..(214): tr|A0A1H8BMW3|A0A1H8BMW3_9BACT 7-carboxy-7-deazaguanine synthase OS=Chitinophaga rupis OX=573321 GN=queE PE=3 SV=1
MIKTMPITTTNNNTPTTALPVMESFYTIQGEGYHQGRAAYFIRLGGCDVGCHWCDVKDSWDAAKHPVINITDIVNEAAQHPGRIAVITGGEPLMHNLDTLCKTLHKQGFRTHMETSGSSSLSGQWDWITLSPKKFKAPLPEVCKQAHELKVVIFNKTDFAWAEKYAAQVNKHCKLYLQPEWSKAAEITPLIIDYIKDNPQWELSLQIHKYINVP

SEQ ID NO: 29095 - protein, 208 aa, Chitinophaga sancti
  misc_feature (1)..(208): tr|A0A1K1RE41|A0A1K1RE41_9BACT 7-carboxy-7-deazaguanine synthase OS=Chitinophaga sancti OX=1004 GN=queE PE=3 S V=1
MSTTATYQHVRTLPVMERFYTIQGEGNYQGCAAYFIRLGGCDVGCHWCDVKDSWEADRHPQLELTDLVSEAASYPGRIAVITGGEPLMHNLDALTADLHAAGFRTHIETSGSSPLSGNWDWITLSPKKFKAPLPEICALANELKVVIFNKSDFAWAEKYAALAGPHCKLYIQPEWNKAAEMTPLIIDYIKDHPKWQLSLQVHKYINVP

SEQ ID NO: 29096 - protein, 207 aa, Chitinophaga skermanii
  misc_feature (1)..(207): tr|A0A327Q3W1|A0A327Q3W1_9BACT 7-carboxy-7-deazaguanine synthase OS=Chitinophaga skermanii OX=331697 GN=queE P E=3 SV=1
MDTSIATNNRTLPVMEYFYTIQGEGFYQGQAAYFIRLGGCDVGCHWCDVKESWDADKHPKYDVADIVSQAAQFPGRIAVITGGEPLMHNLDALTSALHEAGFRTHIETSGSSPLSGSLDWITLSPKKFKAPLEEVNRAAHELKVVIFNKSDFAWAEKHAALASPGCKLYLQPEWSKAKEMTPLIVDYIKDHPQWQLSLQVHKYINVP

SEQ ID NO: 29097 - protein, 193 aa, Chitinophaga sp.
  misc_feature (1)..(193): tr|A0A5B9WWA7|A0A5B9WWA7_9BACT 7-carboxy-7-deazaguanine synthase OS=Chitinophaga sp. XS-30 OX=2604421 GN=queE PE=3 SV=1
MESFYTIQGEGFHQGKAAYFIRLGGCDVGCVWCDVKESWDADKHPQVPVMEIVQEAAAFPGRIAVITGGEPLMHNLDGLTKSLHKTGFRTHIETSGSSPMSGNWDWITLSPKKFKAPLDEVCKQAHELKIVVYHKSDFAWAEKYAAQVGKQCKLYLQPEWSRAAEMTPLIIDYVKDHPQWQISLQIHKYINVP

SEQ ID NO: 29098 - protein, 210 aa, Chitinophaga sp.
  misc_feature (1)..(210): tr|A0A5B2VLT1|A0A5B2VLT1_9BACT 7-carboxy-7-deazaguanine synthase OS=Chitinophaga sp. BN140078 OX=2607653 GN=qu eE PE=3 SV=1
MSLVVTNTNIQTTTLPVMERFYTIQGEGYHQGRAAYFIRLGGCDVGCHWCDVKDSWDAAKHPKLAISDIVREAAQHPGRIAVITGGEPLMHNLDALCDTLHEQGFRTHIETSGSSPLSGQWDWITLSPKKFKAPLPEICQQAHELKVVIFNKTDFAWAEKYAALAGGHCRLYLQPEWEKAAEMTPLIIDYIKEHPEWELSLQIHKYINVP

SEQ ID NO: 29099 - protein, 208 aa, Chitinophaga terrae
  misc_feature (1)..(208): tr|A0A1H4DCV6|A0A1H4DCV6_9BACT 7-carboxy-7-deazaguanine synthase OS=Chitinophaga terrae Kim and Jung 2007 OX=4 08074 GN=queE PE=3 SV=1
MSAVLTNIKSTALPVMESFYTIQGEGFYQGHAAYFIRLGGCDVGCVWCDVKESWDASKHPSVEIADIVTTAAANPGHIAVITGGEPLMHQLDELTTALQNAGLRTHIETSGSSPLSGKWDWITLSPKKFKAPLQEACDAANELKVVIYNKTDFAWAEKYAALVKPDCKLYLQPEWSKSAAMTPLIIDYVKANPQWTLCLQIHKYINVP

SEQ ID NO: 29100 - protein, 204 aa, Chitinophagaceae bacterium
  misc_feature (1)..(204): tr|A0A3C1NML7|A0A3C1NML7_9BACT 7-carboxy-7-deazaguanine synthase OS=Chitinophagaceae bacterium OX=1869212 GN=q ueE PE=3 SV=1
MEHFYTLQGEGFHQGRAAYFIRLGGCDVGCVWCDVKESWDANAHPRVRIDEILQYIHSGTQIFVQDNHSKTKPFVVVTGGEPLMHNLDELTAAIRTAGYPAHIETSGAHPLSGRWDWICVSPKKFKAPLDEVLAHADELKVVIYHPSDFEWAEKHAQKVKPGCLLYLQPEWDRSEKMTGLIVDYIKYHPEWRLSLQIHKYIHVP

SEQ ID NO: 29101 - protein, 202 aa, Chitinophagaceae bacterium
  misc_feature (1)..(202): tr|A0A3C0INP8|A0A3C0INP8_9BACT 7-carboxy-7-deazaguanine synthase OS=Chitinophagaceae bacterium OX=1869212 GN=q ueE PE=3 SV=1
MEHFYTLQGEGFHQGRAAYFIRLGGCDVGCFWCDVKDSWDASKHPQYAVATIVDMATTAIAAEQKNTEVKPIIVITGGEPLMHDLTTLTQAFQQLGFETNIETSGSSPMSGSWDWVCLSPKKFKAPLPEVLPLANELKVVIYNKTDFEWAEQFAAQVSKHCKLYLQPEWDKRDAVLPLIINYIKANPQWRLSAQVHKYISVP

SEQ ID NO: 29102 - protein, 214 aa, Chlamydia sp.
  misc_feature (1)..(214): tr|A0A1M3B7J9|A0A1M3B7J9_9CHLA 7-carboxy-7-deazaguanine synthase OS=Chlamydia sp. 32-24 OX=1895742 GN=queE PE= 3 SV=1
MDLSLIEIFKSVQGETSFTGLPTTFIRLAACNLRCSWCDTTYSFGKGTPFTLDSIIEQTKLFACKHVCITGGEPLLQKNVYFLMQKLCDENYIVSLETSGSLLIDEVDPRVNVILDIKCPKSLMEHKNEWKNIALLKSHDEVKFVIQDFEDYSYAKNICEKYQLFTKVKEVLFSPVFEKLATHELVEWILKDNLPVRLNLQIHKFIWDPLTKGV

SEQ ID NO: 29103 - protein, 210 aa, Chloracidobacterium sp.
  misc_feature (1)..(210): tr|A0A257B2R9|A0A257B2R9_9BACT 7-carboxy-7-deazaguanine synthase OS=Chloracidobacterium sp. CP2_5A OX=2012633 GN=queE PE=3 SV=1
MRITEIFFSIQGESSYAGLPCAFVRTTGCDLRCAWCDSEYTFTGGTHLSVEEIVERLRAYPTRLVELTGGEPLLQKDIHALADCLLEEGYTVLIETGGHRDVSGLDPRIIKILDIKCPGSGMAEKNLWSNLDYVTRRDEVKFVLADMADYFWAREILRIYRLEQRASVLFSTVFGVERRPIVERILADGLQVRFQAQLHKLIWPADARGV

SEQ ID NO: 29104 - protein, 210 aa, Chloracidobacterium thermophilum
  misc_feature (1)..(210): tr|G2LFE7|G2LFE7_CHLTF 7-carboxy-7-deazaguanine synthas e OS=Chloracidobacterium thermophilum (strain B) OX=981 222 GN=queE PE=3 SV=1
MRITEIFFSIQGESSYAGLPCAFVRTTGCDLRCTWCDSEYTFTGGTHMSVEEILERIRAYPTRLVELTGGEPLLQKDIYELAGRLLDEGYTVLIETGGHRDVSRLDPRIIKIMDIKCPGSGMVEKNLWSNLDHITRRDEVKFVLADLADYFWAREILRIYRLEQRTNVLFSTVFGVEQRPIVERLLADGLQVRFQTQLHKLIWPADMRGV

SEQ ID NO: 29105 - protein, 210 aa, Chloracidobacterium thermophilum
  misc_feature (1)..(210): tr|A8DK01|A8DK01_9BACT 7-carboxy-7-deazaguanine synthas e OS=Chloracidobacterium thermophilum OX=458033 GN=queE PE=3 SV=1
MRITEIFFSIQGESSYAGLPCAFVRTTGCDLRCTWCDSEYTFTGGTHMSVEEILERVRAYPTRLVELTGGEPLLQKDIYELSERLLEEGYTVLIETGGHRDVSRLDPRIVKILDIKCPGSGMVEKNLWSNLDYITRRDEVKFVLADLNDYFWAREILRIYRLEQRTNVLFSTVFGVERRPIVERILADGLQVRFQTQLHKLIWPADMRGV

SEQ ID NO: 29106 - protein, 220 aa, Chlorobaculum limnaeum
  misc_feature (1)..(220): tr|A0A1D8D0J5|A0A1D8D0J5_CHLLM 7-carboxy-7-deazaguanine synthase OS=Chlorobaculum limnaeum OX=274537 GN=queE P E=3 SV=1
MSTETTLCVSEIFHSIQGESSFAGWPCAFVRLAGCGHGCRYCDTAYAEEAGTAMTVEQIVRRALAFEAPCVEVTGGEPLLQPGAFELLSTLCDHHPAVLLETGGFLPVERVDPRVHAIIDIKAPSSGVAAENCATNFALALDTPERFEFKIVVASREDYEWAKSYIAGHDLPGKCSIIFGPVFGHLEPRLLAEWILRDRLPVRMQLQLHKYIWNPDARGV

SEQ ID NO: 29107 - protein, 219 aa, Chlorobaculum parvum
  misc_feature (1)..(219): tr|B3QQA7|B3QQA7_CHLP8 7-carboxy-7-deazaguanine synthas e OS=Chlorobaculum parvum (strain NCIB 8327) OX=517417 GN=queE PE=3 SV=1
MTTATISISEIFHSIQGESSFAGWPCAFVRLAGCGHGCNYCDTTYAEEAGTAMTIDEVVRRALTFDAPIVEVTGGEPLLQPEVYPLLSALCDKGAKVLLETGGFLPVNRVDPRVHTIIDIKTPSSGVAEQNCMDNIPLALASPKRFEFKIVVASEEDYLWARDFITKQGLLGKCTLIFGTVFGQLEPRLLAEWILRDRLPVRMQLQLHKYIWNPETRGV

SEQ ID NO: 29108 - protein, 220 aa, Chlorobaculum sp.
  misc_feature (1)..(220): tr|A0A4Q1DFL9|A0A4Q1DFL9_9CHLB 7-carboxy-7-deazaguanine synthase OS=Chlorobaculum sp. 24CR OX=2508878 GN=queE PE=3 SV=1
MSTETTLRVSEIFHSIQGESSRVGWPCAFVRLAGCGHGCRYCDTAYAEEAGTAMTVEQIVRRVLAFDAPCVEVTGGEPLLQPGAFELLAELCDRHPVVLLETGGFLPVERVDPRVHAIIDIKAPSSGVAAENCATNFALALDTPERFEFKIVVASREDYEWAKSYIAGHGLPGKCSIIFGPVFGHLEPRLLAEWILRDRLPVRMQLQFHKYIWQPDARGV

SEQ ID NO: 29109 - protein, 220 aa, Chlorobaculum tepidum
  misc_feature (1)..(220): sp|Q8KFK8|QUEE_CHLTE 7-carboxy-7-deazaguanine synthase OS=Chlorobaculum tepidum (strain ATCC 49652 / DSM 12025 / NBRC 103806 / TLS) OX=194439 GN=queE PE=3 SV=1
MSTEAPLNISEIFYSIQGESSFAGWPCAFVRLAGCGHGCRYCDTTYAEEPGTAMTIDEIMHRVLAFDAPCVEVTGGEPLLQSGTFGLLSALCDRHPVVLLETGGFLPVDRVDPRVHAIIDIKAPSSGVMEHNCAANFTLALNEPERFEFKIVVASEADYLWAKSYIAGHGILGKCSIIFGPVFGQLEPRLLAEWMLRDRLPVRMQLQLHKYIWNPDARGV

SEQ ID NO: 29110 - protein, 220 aa, Chlorobaculum thiosulfatiphilum
  misc_feature (1)..(220): tr|A0A5C4S4B5|A0A5C4S4B5_CHLTI 7-carboxy-7-deazaguanine synthase OS=Chlorobaculum thiosulfatiphilum OX=115852 GN=queE PE=3 SV=1
MSTETTLRVSEIFHSIQGESSLAGWPCAFVRLAGCGHGCRYCDTAYAKEAGTVMTVEQIVRRALAFDAPCIEVTGGEPLLQPGAFELLSELCDRHPVVLLETGGFLPVERVDPRVHAIIDIKAPSSGVAAENCATNFALALDTPERFEFKIVVASREDYEWAKSYIAGHGLPGKCSIIFGPVFGHLEPRLLAEWILRDRLPVRMQLQLHKYIWQPDARGV

SEQ ID NO: 29111 - protein, 200 aa, Chlorobi bacterium
  misc_feature (1)..(200): tr|A0A3M1LXC8|A0A3M1LXC8_9BACT Radical SAM protein (Fra gment) OS=Chlorobi bacterium OX=2268192 GN=D6747_02535 PE=3 SV=1
RAGMPCTFIRLQGCSLRCAWCDTPYALDHRTPEHVLTAAEVLERVEQIGTPFVELTGGEPLEQLASFRLIEWLCDRGYTVAIETGGHISIEHVDRRAICIVDVKCPDSRMAPLNYMPNLSLLRPQDEVKFVIASRQDYQWARALIEEHKLAENVAAVLLSPAFGLLEPRVLAEWILADRAPVRLQLQMHKFIWDPSMRGV

SEQ ID NO: 29112 - protein, 159 aa, Chlorobi bacterium
  misc_feature (1)..(159): tr|A0A136K8M0|A0A136K8M0_9BACT 7-carboxy-7-deazaguanine synthase OS=Chlorobi bacterium OLB4 OX=1617411 GN=queE PE=4 SV=1
MYGEKLIDLCNELRKVNPGIHITLETNGTYPGKYLESFDLISVSPKLASSVPIDTSHRESHERQRINPDALKQINSLHRLGLVDVQWKFVYTGVSDVGEIKQFQILSGFRNSDVYLMPEGITGNELELKRMETAETAIRHGWNYTDRLHIMIWGNKRGV

SEQ ID NO: 29113 - protein, 226 aa, Chlorobium chlorochromatii
  misc_feature (1)..(226): tr|Q3AT97|Q3AT97_CHLCH 7-carboxy-7-deazaguanine synthas e OS=Chlorobium chlorochromatii (strain CaD3) OX=340177 GN=queE PE=3 SV=1
MSQNALNALRISEIFYSIQGEAFFAGFPCAFIRLAGCGHGCNYCDTSYAEEKGELMAQAEIIKQALSYHAPIIEITGGEPLLQPAVYPLMEELCNRGEQVLLETGGFLSVEKVDKRVHKIIDLKAPSSGVAEKNNPANIRLALEAAPEEQRRFEFKMVIANREDYEWAKTLLEEHHIAAASTVTMGTVFGALSPTQLAEWILHDRLPVRLQLQLHKYLWEPSRHGV

SEQ ID NO: 29114 - protein, 224 aa, Chlorobium ferrooxidans
  misc_feature (1)..(224): tr|Q0YUM3|Q0YUM3_9CHLB 7-carboxy-7-deazaguanine synthas e OS=Chlorobium ferrooxidans DSM 13031 OX=377431 GN=que E PE=3 SV=1
MSTPTLNISEIFHSIQGESSYAGWPCTFIRLAGCGHGCRHCDTAYAEHPGREMNIEEIIERVVELGAPLVEITGGEPLLQEEVYPLMEKLCNRWKERVLLETGGFLSVAKADPRVHKIIDLKPPSTGVSDKNNPENIALALKQKDHANRLIELKIVVADREDYLWARELLTRTGLPDACTVMMGVAFGMLEPVNLANWILEDRLNVRMQLQLHKYIWDPGRRGV

SEQ ID NO: 29115 - protein, 220 aa, Chlorobium limicola
  misc_feature (1)..(220): tr|B3EEJ5|B3EEJ5_CHLL2 7-carboxy-7-deazaguanine synthas e OS=Chlorobium limicola (strain DSM 245 / NBRC 103803 / 6330) OX=290315 GN=queE PE=3 SV=1
MTISISEIFHSIQGESSFAGWPCAFVRLAGCGHGCRYCDTTYAEKPGTEMETDEIFEKIDEIGAQLVEITGGEPLLQKEVYPLMERLCDRKEKVLLETGGFLSVAKVDQRVHKIIDLKAPSSGVCNKNNPQNIELAMRSGKAEISSFEFKIVVADREDYLWARTMLTDTGLAEACTVMLGVVFGKLEPERLAQWILEDRIRVRMQLQLHKYIWPPEMRGV

SEQ ID NO: 29116 - protein, 223 aa, Chlorobium phaeobacteroides
  misc_feature (1)..(223): tr|A1BHW5|A1BHW5_CHLPD 7-carboxy-7-deazaguanine synthas e OS=Chlorobium phaeobacteroides (strain DSM 266) OX=29 0317 GN=queE PE=3 SV=1
MILKELSISEIFHSIQGESSFAGWPCAFVRLAGCGNGCNFCDTTYAETDGFMLEIPDIIMQTQAFRAPIIEITGGEPLLQPAVYPLMQQLCNLGETVLLETGGFLSVDKVDSRVHKIIDLKPPSSGVCERNCPENITLALHAGKKLSQTFEFKIVVASREDYDWAKALLLQHQLYCSCIVMMGVIHEKLEPSTLAEWILRDRLPVRMQLQLHKYIWPLATRGT

SEQ ID NO: 29117 - protein, 223 aa, Chlorobium phaeobacteroides
  misc_feature (1)..(223): tr|B3ELV5|B3ELV5_CHLPB 7-carboxy-7-deazaguanine synthas e OS=Chlorobium phaeobacteroides (strain BS1) OX=331678 GN=queE PE=3 SV=1
MSETVLINEIFRSIQGESTFAGTPCTFIRLSGCDSACRWCDTRYASVENGTAMTLSEIERRADGFRTSLVEITGGEPLQQEPVYALMQQLCDKGHTVLLETGGFLPVDRVDPRVHKIIDLKAPSSGESGRICTSNIELAVSAAEPLKKSFEFKLLLASREDYDWAVDLLNRYRLNQHCTVLMGTVFNKLHPAELAAWILEDNLNVRLQLQLHKYIWPPDMRGV

SEQ ID NO: 29118 - protein, 223 aa, Chlorobium phaeovibrioides
  misc_feature (1)..(223): tr|A4SDE4|A4SDE4_CHLPM 7-carboxy-7-deazaguanine synthas e OS=Chlorobium phaeovibrioides (strain DSM 265 / 1930) OX=290318 GN=queE PE=3 SV=1
MNEALLKISEIFRSIQGESSYAGWPCAFIRLAGCSHNCRYCDSLYARNTEERLTTREVVSRALALKTEIIEITGGEPLEQPGVHQLMTELCNTGRKVLLETGGFIPVAGIDPRVHKIIDLKPPSSGESGKNCMENITLAFKAGKELQKSFEFKMVVADRNDYLWSRDLLRMHPLQKSCTVLMGVVAGELAPAQLADWILEDGLRVRMQLQLHKLLWPERTRGA

SEQ ID NO: 29119 - protein, 223 aa, Chlorobium phaeovibrioides; identical to SEQ ID NO: 29118
  misc_feature (1)..(223): tr|A0A3S0N9T0|A0A3S0N9T0_CHLPH 7-carboxy-7-deazaguanine synthase OS=Chlorobium phaeovibrioides OX=1094 GN=queE PE=3 SV=1

SEQ ID NO: 29120 - protein, 223 aa, Chlorobium sp.
  misc_feature (1)..(223): tr|A0A4R0QJU0|A0A4R0QJU0_9CHLB 7-carboxy-7-deazaguanine synthase OS=Chlorobium sp. N1 OX=2491138 GN=queE PE=3 SV=1
MMEQMLDISEIFHSIQGESSYAGWPCTFIRLAGCSHTCRYCDTLYAKTAERRMSIAETIDEARRHRPHLIEVTGGEPLEQPSVHHLLRALCDGGGTILLETGGFLSVRDVDPRVHKVIDLKPPSSGCAEENCMENVELALAAVTAERKRFEFKIVAADRRDYLWAQELLTRTRLAEACTVMMGPVWGVLQPSELAGWILRDRLHVRMQLQLHRHIWPARERGV

SEQ ID NO: 29121 - protein, 223 aa, Chlorobium sp.
  misc_feature (1)..(223): tr|A0A533TCS2|A0A533TCS2_CHLSQ 7-carboxy-7-deazaguanine synthase OS=Chlorobium sp. OX=1095 GN=queE PE=3 SV=1
MSATTLGISEIFHSIQGEGSYAGWPCAFIRLAGCGHGCAGCDTGYAEEKGITLEREEIIQKALTFQPPCIEITGGEPLLQPAVYPLMTQLCDLDQKVLLETGGFISVEKVDTRVHKIIDLKPPSSGVAEQNHPDNIRLALAAEPPHRHTFEFKIVIAGKEDYEWATSLLQKHQLTDSFTVMMGVAFGKLDPAELAEWMLRDRLRARLQLQLHKYLWEPSRRGV

SEQ ID NO: 29122 - protein, 231 aa, Chloroflexi bacterium
  misc_feature (1)..(231): tr|A0A2N5K918|A0A2N5K918_9CHLR 7-carboxy-7-deazaguanine synthase OS=Chloroflexi bacterium OX=2026724 GN=queE P E=3 SV=1
MNVMEIYRSVQGEGTLMGVPTTFVRFFACNLRCAWCDTKYSWSVREGGWWDKLSPIDVALEVERLGARHVVLTGGEPTLQHELSTLAQLLKAHDHHLTVETNATIFPAAVVPLIDLWSLSPKLGSAGEAYLRHAVIERFLDTLRPDQQQWKFVVRDDIDEAGLRDLLQRYPVFARRQLPIVLQPEGDVASENYPAALERLTERVRAPFWDDYYVRVLPQMHVIVWGRRRLV

SEQ ID NO: 29123 - protein, 252 aa, Chloroflexi bacterium
  misc_feature (1)..(252): tr|A0A535F8H3|A0A535F8H3_9CHLR 7-carboxy-7-deazaguanine synthase OS=Chloroflexi bacterium OX=2026724 GN=queE P E=3 SV=1
MATDRGTNTAIHNIMISECFGPTLQGEGALVGRPTVFVRTGGCDYKCSWCDTLYAVLPEYKADWHAMTTEEVFAEIQRLSGYKPILVTLSGGNPAIQPLGDLLDLGHSHGYTFAIETQGSVAQSWFAKLDYLTLSPKPPSSKQITRWERLDRCITYARHGRDGRQPEICLKIVVFDNEDYAYAKDVAARYPNLPVYLQAGNHTPPHIAQEIDIPGILNRLDWLIQRVTQDQWYSVTVLPQLHTLLWGNKRGV

SEQ ID NO: 29124 - protein, 254 aa, Chlorogloea sp.
  misc_feature (1)..(254): tr|A0A2T1EKJ9|A0A2T1EKJ9_9CHRO 7-carboxy-7-deazaguanine synthase OS=Chlorogloea sp. CCALA 695 OX=2107693 GN=qu eE PE=3 SV=1
MSNKTARLIEVFSAIQGEGLNVGTRQIFIRFAICDLRCNYCDSAHTWVTPAEYRIEVHPGLRDFEVYSNPVELTTLLKFVERQNVPLLHDSISLTGGEPLLHAPFLKEFLPEVRSLTNLPIYLETGGHRPEQLLTILPYLDSVGMDLKLPSVSGESHWQAHAQFLQSCYNSQIEVFVKIIISSQTDVAELERAANLVAAVSPEIIIYLQPVTPLEVGTMFAPTPEQVLTWQALMKKWIKQVRVVPQTHKMLQQL

SEQ ID NO: 29125 - protein, 199 aa, Chlorogloeopsis fritschii
  misc_feature (1)..(199): tr|A0A3S0XNX4|A0A3S0XNX4_CHLFR 7-carboxy-7-deazaguanine synthase OS=Chlorogloeopsis fritschii PCC 6912 OX=2111 65 GN=queE PE=3 SV=1
MFLIHETFQETIQGEGYWTGSVCDFIRLYGCPVKCHFCDSSYSSGGSHIQYTRRTLEDLVSELKSSMVVISGGEPFVNKQLSLLVDELLVHNKRVHIETSGAFWQEIPPRVWVTVSPKEYVSPKYPVDERMWQRANEIKIVISDGSEVDFYKDKLSECSLIFLQPEWGNPNSLQLTLGLLRENPQYRLSLQTHKYIGVS

SEQ ID NO: 29126 - protein, 265 aa, Chlorogloeopsis fritschii
  misc_feature (1)..(265): tr|A0A3S1FRA3|A0A3S1FRA3_CHLFR 7-carboxy-7-deazaguanine synthase OS=Chlorogloeopsis fritschii PCC 6912 OX=2111 65 GN=queE PE=3 SV=1
MTTKTVTKPTARLIEVFSAIQGEGLNVGTRQIFIRFALCDLRCHFCDSAHTWSTPTTCRIERSPGLRDFEIYSNPVSLTQLIEWVKRQNILPLHDSISLTGGEPLLHAQFLVEFLPQVRTVTGLPIYLETGGHRPEQLANILPYLDSVGMDFKLPSVSGESHWQEHAKFLQLCYESQVEVFVKIIVSDKTDPTDLEDAGLLVAEVSPQIPIFLQPVTPLAASEQLTQNPIFAPAPEQVLIWQALMKRFVKQVRVVPQTHKMLNQL

SEQ ID NO: 29127 - protein, 219 aa, Chloroherpeton thalassium
  misc_feature (1)..(219): tr|B3QS64|B3QS64_CHLT3 7-carboxy-7-deazaguanine synthas e OS=Chloroherpeton thalassium (strain ATCC 35110 / GB- 78) OX=517418 GN=queE PE=3 SV=1
MLKVNEIFHSIQGESSKAGWPCVFIRLSGCDLRCSYCDTGYAFFDGKEFSQEEILEQVAFYKTRLVEITGGEPLLQPNVYPLMTALCEAGYEVLLETGGHHDVEKVDPRVYKIIDIKTPSSEMSEWNCYRNLELSIAEAKSGVLKTEFKIVLSSEGDYRWAKNLIERYDLARFVPVIFSAAFGALHPRQIAEWILADHLPVRLQLQLHKYIWPADMRGV

SEQ ID NO: 29128 - protein, 204 aa, Chondrocystis sp.
  misc_feature (1)..(204): tr|A0A1Z4RW69|A0A1Z4RW69_9CHRO 7-carboxy-7-deazaguanine synthase OS=Chondrocystis sp. NIES-4102 OX=2005460 GN= queE PE=3 SV=1
MNTTTQAITYPIVETFHSIQGEGYWTGVSAFFIRLGGCDVHCPWCDTKHSWNAQRHPLKSTEELSKIAKQVNPAIVVITGGEPLMHNLYPLTTELHNAGMQVHLETSGAHPLSGDFDWITFSPKQFKAPDKSIYKYAKELKVVITNEYDLQWAKQQAALVPKTAFCYLQPEWNSPQSQKLILNYIFQNPQWRMSLQTHKLLEIQ

SEQ ID NO: 29129 - protein, 212 aa, Chondromyces apiculatus
  misc_feature (1)..(212): tr|A0A017SUX4|A0A017SUX4_9DELT 7-carboxy-7-deazaguanine synthase OS=Chondromyces apiculatus DSM 436 OX=1192034 GN=queE PE=3 SV=1
MSYFVKELFYSLQGEGLRAGRPAVFCRFTGCNLWTGREEDRARAVCRFCDTQFVGTDGQGGGQFATAADLVRAVAATWPGKAAGGKPYVVCTGGEPLLQLDEALITGLHDAGFEVAVETNGTRKAPRGIDWICVSPKAGAEVVLRSGNELKLVFPQEDAMPERFEHLDFEHFLLQPMDGLRRQRHTELAVRYCLEHPRWRLSLQTHKILNIP

SEQ ID NO: 29130 - protein, 212 aa, Chondromyces crocatus
  misc_feature (1)..(212): tr|A0A0K1EDX3|A0A0K1EDX3_CHOCO 7-carboxy-7-deazaguanine synthase OS=Chondromyces crocatus OX=52 GN=queF PE=3 S V=1
MAYFVKEIFYTLQGEGLRAGRPAVFCRFTGCNLWTGREEDRSRAICRFCDTQFVGTDGPGGGQFATAGALARAVAAAWPQGVSGGKPYVVCTGGEPLLQLDEPVISALHDEGFEVAVETNGTRPAPRGIDWICVSPKAGTELSLRSGHELKLVFPQEGAEPERYEHLAFEHFLLQPMDGPRRERHTELAVRYCLEHPRWRLSLQTHKILQIP

SEQ ID NO: 29131 - protein, 215 aa, Chromatiaceae bacterium
  misc_feature (1)..(215): tr|A0A3D4S0N3|A0A3D4S0N3_9GAMM 7-carboxy-7-deazaguanine synthase OS=Chromatiaceae bacterium OX=2049432 GN=queE PE=3 SV=1
MSYSVKECFYTLQGEGARAGRAAVFCRFSGCNLWTGREQDRAAAICNFCDTDFRGTDGDGGGRFDTPEALASYVQGFWQPDRAIASGARPYLVCTGGEPLLQLDRALIRALHARAFEIALETNGTLPVPDGVDWICVSPKADAQLVQTSGHELKLVFPQPLAMPERFETLSFRHWFLQPMDGPMLAANTAAAVDYCMAHPRWRLSLQLHKILEIR

SEQ ID NO: 29132 - protein, 221 aa, Chromatiales bacterium
  misc_feature (1)..(221): tr|A0A1S9D1R4|A0A1S9D1R4_9GAMM 7-carboxy-7-deazaguanine synthase OS=Chromatiales bacterium USCg_Taylor OX=1934 255 GN=queE_2 PE=3 SV=1
MPATVHKSSPEASLRVTEIFLSLQGESSRVGLPTVFVRLTGCPLRCHYCDTAYAFHGGTRLPFNTILERITEYHARYVTVTGGEPLAQPGCPALLQQLCDLGYRVSLETSGALDIRSVDKRVMKVMDLKTPGSGEAGKNDYLNIQYLAANDEVKFVIRDRNDYDWAKEIMQRFSFPCEILFSPSSGEINPAQMAEWILEDRLPVRFQIQLHKVIWGEIPGR

SEQ ID NO: 29133 - protein, 213 aa, Chromatiales bacterium
  misc_feature (1)..(213): tr|A0A524KGY8|A0A524KGY8_9GAMM 7-carboxy-7-deazaguanine synthase OS=Chromatiales bacterium OX=2026725 GN=queE PE=3 SV=1
MSDLRITEIFHSLQGESRPVGYPTAFVRLTGCPLRCGYCDTAYAFHGGQRLKIPDVLARIVDFQVRHVCVTGGEPLAQPACLDLLTALCDTGYLVSLETSGALDITAVDRRVAVVLDLKTPASGECARNLWSNLPHLKRDDQVKFVICNRTDYDWACEQLHRHDLTSRCEVLFSPAWDEQPARELADWILADRLPVRFQVQLHKYLWGNVPGH

SEQ ID NO: 29134 - protein, 210 aa, Chromatium okenii
  misc_feature (1)..(210): tr|A0A2S7XMF5|A0A2S7XMF5_9GAMM 7-carboxy-7-deazaguanine synthase OS=Chromatium okenii OX=61644 GN=queE PE=3 SV =1
MTYHLKEMFYSLQGEGAQVGRPAIFCRFTGCNLWSGREVDRAQAKCRFCDTDFRGTNGINGGRYADVDALVQKICALWPNTAVRPYIICTGGEPLLQLDAALIAALRQRECEIAVETNGTLPAPAGLNWICVSPKAGAPLRQTSGDELKLVYPQYAALPEQFTGLAFRYFFLQPLADANCAAHTAQAIDYCKSHPQWRLSIQTHKLLDIP

SEQ ID NO: 29135 - protein, 225 aa, Chromatocurvus halotolerans
  misc_feature (1)..(225): tr|A0A4R2KWR8|A0A4R2KWR8_9GAMM 7-carboxy-7-deazaguanine synthase OS=Chromatocurvus halotolerans OX=1132028 GN= queE PE=3 SV=1
MAHVNTAVHQSATVLRITEIFYSLQGEARTVGRPTVFVRLTGCPLRCVYCDTAYAFTGGTMMALTQVISEVAAYQPRYVTVTGGEPLAQPACLPLLSALCDAGYEVSLETSGALPVQAVDPRVVKVLDLKTPASGEAHRNDYRNVSCLAPHDQVKFVVCDREDYEWARFKLDEYSLADRVGDVLLSPSHEQLAPRELAEWILADNLPVRLQLQLHKLLWNDEPGH

SEQ ID NO: 29136 - protein, 230 aa, Chromatocurvus sp.
  misc_feature (1)..(230): tr|A0A2N5Y6L3|A0A2N5Y6L3_9GAMM 7-carboxy-7-deazaguanine synthase OS=Chromatocurvus sp. F02 OX=1905677 GN=queE PE=3 SV=1
MTTLLSPLSQSVSTSAALTLRITEIFYSLQGEARTVGLPTVFVRLTGCPLRCVYCDTAYAFSGGEMQSLEQIVTAVAAYQPRYVTVTGGEPLAQKNCLPLLVALCDAGYEVSLETSGALPVAGVDPRVCKVLDLKTPASAECHRNDYGNIALLTRNDQVKFVICDREDYEWARFKLDEYQLPGRVSDVLFSPSHGQLHGRDLAQWILDDRLPVRLQLQLHKLLWDDAPGH

SEQ ID NO: 29137 - protein, 217 aa, Chromobacterium amazonense
  misc_feature (1)..(217): tr|A0A1S1XBB1|A0A1S1XBB1_9NEIS 7-carboxy-7-deazaguanine synthase OS=Chromobacterium amazonense OX=1382803 GN=q ueE PE=3 SV=1
MPSRNSVTTYTVKEIFYTLQGEGRQAGRAAVFCRFAGCNLWSGREEDRAKAICQFCDTDFVGAGPDGGKFDGAAALAARIASEWPEDAGGVRYVVCTGGEPLLQLDSELIDALHAEGFEIAVETNGTVAAPPGIDWICVSPKAGAELKQLSGNELKLVYPQAAQLPDTVAHLDFDTFYLQPMDGPDLAAHTRAAIAYCMAHPKWRLSVQTHKMVNIR

SEQ ID NO: 29138 - protein, 211 aa, Chromobacterium haemolyticum
  misc_feature (1)..(211): tr|A0A1W0CG28|A0A1W0CG28_9NEIS 7-carboxy-7-deazaguanine synthase OS=Chromobacterium haemolyticum OX=394935 GN= queE PE=3 SV=1
MTTYTVKEIFYTLQGEGRQAGRAAVFCRFAGCNLWSGREEDRAKAVCQFCDTDFVGVGPDGGKFKSAAALAERIASEWPAGAGGTPYVVCTGGEPLLQLDAQLIAELHQRGFEVAVETNGTVVAPPGLDWICVSPKAGAELLLRSGDELKLVYPQATQMPETVEQLDFDTFYLQPMDGPNLAANTRAAIAYCMTHPRWRLSVQTHKVTNIR

SEQ ID NO: 29139 - protein, 211 aa, Chromobacterium haemolyticum
  misc_feature (1)..(211): tr|A0A1W0D3N4|A0A1W0D3N4_9NEIS 7-carboxy-7-deazaguanine synthase OS=Chromobacterium haemolyticum OX=394935 GN= queE PE=3 SV=1
MTTYTVKEIFYTLQGEGRQAGRAAVFCRFAGCNLWSGREEDRAKAVCQFCDTDFVGVGPDGGKFKSAAALAERIASEWPTGAGGTPYVVCTGGEPLLQLDAELIAELHRLGFEVAVETNGTVAAPPGLDWICVSPKAGAELLLRSGDELKLVYPQATQMPETVEQLDFDTFYLQPMDGPNLAANTRAAIAYCMTHPRWRLSVQTHKVTNIR

SEQ ID NO: 29140 - protein, 249 aa, Chromobacterium sp.
  misc_feature (1)..(249): tr|A0A2T5NKM4|A0A2T5NKM4_9NEIS 7-carboxy-7-deazaguanine synthase OS=Chromobacterium sp. Panama OX=2161826 GN=q ueE PE=3 SV=1
MYHVYIPLFRSFSPCLALARKIVNTFYACPFITFRERAVTTYTVKEIFYTLQGEGRQAGRAAVFCRFSGCNLWSGREEDRAKAVCQFCDTDFVGVGPDGGKFKSAAALAERIAAEWPAGAGGAPYVVCTGGEPLLQLDAELIAELHRLGFEVAVETNGTVAAPPGLDWICVSPKAGAELLLQSGDELKLVYPQATQTPESVEQLDFDTFYLQPMDGPNLAANTRAAIAYCMAHPRWRLSVQTHKVTNIR

SEQ ID NO: 29141 - protein, 211 aa, Chromobacterium sp.
  misc_feature (1)..(211): tr|A0A344UG41|A0A344UG41_9NEIS 7-carboxy-7-deazaguanine synthase OS=Chromobacterium sp. IIBBL 274-1 OX=2202142 GN=queE PE=3 SV=1
MTTYTIKEIFYTLQGEGRQAGRAAVFCRFAGCNLWSGREEDRAKAVCQFCDTDFVGAGPDGGKFDGAAALAARIAAEWPQGAGGVPYVVCTGGEPLLQLDAALIDALHAEGFEIAVETNGTIAAPEGIDWICVSPKAGSELQQCSGDELKLVYPQIAQLPETVAHLDFGTFYLQPMDGPQLADNTRAAIAYCMAHPQWRLSVQTHKVVDIR

SEQ ID NO: 29142 - protein, 211 aa, Chromobacterium sphagni
  misc_feature (1)..(211): tr|A0A1S1X129|A0A1S1X129_9NEIS 7-carboxy-7-deazaguanine synthase OS=Chromobacterium sphagni OX=1903179 GN=queE PE=3 SV=1
MTTYTVKEIFYTLQGEGRQAGRAAVFCRFAGCNLWSGREEDRGKAVCQFCDTDFVGTGPDGGKFSGAAKLAARIASEWPEDAGGVRYVVCTGGEPLLQLDEALIRALHAEGFEVAVETNGTIAAPAGLDWICVSPKAGSELKQLSGNELKLVYPQQAQLPETVSHLDFDTFYLQPMDGPDIAANTRAAIEYCMAHPKWRLSVQTHKVVHIR

SEQ ID NO: 29143 - protein, 211 aa, Chromobacterium vaccinii
  misc_feature (1)..(211): tr|A0A1D9LFG3|A0A1D9LFG3_9NEIS 7-carboxy-7-deazaguanine synthase OS=Chromobacterium vaccinii OX=1108595 GN=que E PE=3 SV=1
MTTYTVKEIFYTLQGEGRQAGRAAVFCRFAGCNLWSGREEDRAKAVCQFCDTDFVGAGPDGGKFDGAAALAARIAAEWPQDAGGAPYVVCTGGEPLLQLDAELVDALHAEGFEIAVETNGTVAAPAGLDWICVSPKAGSELKQRAGDELKLVYPQATQMPETVAHLDFGAFYLQPMDGPDLTANTRAAIAYCMAHPQWRLSVQTHKVVNIR

SEQ ID NO: 29144 - protein, 211 aa, Chromobacterium vaccinii
  misc_feature (1)..(211): tr|A0A2L2BFU8|A0A2L2BFU8_9NEIS 7-carboxy-7-deazaguanine synthase OS=Chromobacterium vaccinii OX=1108595 GN=que E PE=3 SV=1
MTTYTVKEIFYTLQGEGRQAGRAAVFCRFAGCNLWSGREEDRAKAVCQFCDTDFVGAGPDGGKFDGAAALAARIAAEWPKDAGGAPYVVCTGGEPLLQLDPELVDALHAEGFEIAVETNGTVAAPAGLDWICVSPKAGSELKQRAGDELKLVYPQATQLPETVAHLDFGTFYLQPMDGPDLAANTRAAIAYCMAHPQWRLSVQTHKVVNIR

SEQ ID NO: 29145 - protein, 211 aa, Chromobacterium violaceum
  misc_feature (1)..(211): tr|A0A1R0MK85|A0A1R0MK85_CHRVL 7-carboxy-7-deazaguanine synthase OS=Chromobacterium violaceum OX=536 GN=queE P E=3 SV=1
MTTYTVKEIFYTLQGEGRQAGRAAVFCRFAGCNLWSGREEDRAKAVCQFCDTDFVGAGPDGGKFDGAAALAARIAAEWPKDAGGSPYVVCTGGEPLLQLDAELIDALHAQGFEIAVETNGTVAAPAGLDWICVSPKAGAQLKQRAGDELKLVYPQAAQMPETVADLDFGTFYLQPMDGPELAANTRAAIAYCMAHPQWRLSVQTHKVVDIR

SEQ ID NO: 29146 - protein, 211 aa, Chromobacterium violaceum
  misc_feature (1)..(211): tr|A0A381FVP0|A0A381FVP0_CHRVL 7-carboxy-7-deazaguanine synthase OS=Chromobacterium violaceum OX=536 GN=queE P E=3 SV=1
MTTYTVKEIFYTLQGEGRQAGRAAVFCRFAGCNLWSGREEDRAKAVCQFCDTDFVGAGPDGGKFDGAAALAARIAAEWPQDVGGAPYVVCTGGEPLLQLDAELVDALHAEGFEIAVETNGTVAAPAGLDWICVSPKAGSELKQRAGDELKLVYPQATQMPETVAHLDFGAFYLQPMDGPDLAANTRAAIAYCMAHPQWRLSVQTHKVVNIR

SEQ ID NO: 29147 - protein, 214 aa, Chromohalobacter canadensis
  misc_feature (1)..(214): tr|A0A285VVH4|A0A285VVH4_9GAMM 7-carboxy-7-deazaguanine synthase OS=Chromohalobacter canadensis OX=141389 GN=q ueE PE=3 SV=1
MYSVKEAFYTLQGEGARAGRASVFCRFTGCNLWSGRERDRATSHCRFCDTDFVGTDGQNGGRFENAQALATHLMSLWPHAQEAAVPYVVFTGGEPLLQLDTPLIEAMHAQGFEIAVETNGTLTPPDGIDWLCVSPKGEAALRITQGDELKLVFPQSDAMPEHFTHLAFRHFFLQPMDLAPRGGRGTTMEDTVAYCLDHPQWRLALQTHKIAGID

SEQ ID NO: 29148 - protein, 214 aa, Chromohalobacter japonicus
  misc_feature (1)..(214): tr|A0A1Q8TB26|A0A1Q8TB26_9GAMM 7-carboxy-7-deazaguanine synthase OS=Chromohalobacter japonicus OX=223900 GN=qu eE PE=3 SV=1
MYSVKEAFYTLQGEGARAGRASVFCRFTGCNLWSGRERDRATSHCRFCDTDFIGTDGQHGGRFADAQALANHLMSLWPHAQEAAAPYVVFTGGEPLLQLDTPLIEAMHAQGFEIAVETNGTLPSPDGIDWLCVSPKGDATLRITQGDELKLVFPQSDAMPEQFTHLAFKHFYLQPMDLSPRGGQGTTMKDTVSYCLAHPQWRLSLQTHKIAGID

SEQ ID NO: 29149 - protein, 214 aa, Chromohalobacter marismortui
  misc_feature (1)..(214): tr|A0A4R7NPX8|A0A4R7NPX8_9GAMM 7-carboxy-7-deazaguanine synthase OS=Chromohalobacter marismortui OX=42055 GN=q ueE PE=3 SV=1
MYSVKEAFYTLQGEGARAGRASVFCRFTGCNLWSGRERDRATSHCRFCDTDFIGTDGQHGGRFADAQALAAHLMSLWPHDQDVGVPYVVFTGGEPLLQLDTPLIDAMHAQGVEIAVETNGTLTPPDGIDWLCVSPKGDAPLRITQGDELKLVFPQSDAMPEHFTHLAFTHFFLQPMDLVPRGGQGTTMRETVSYCLAHPTWRLSLQTHKIAGID

SEQ ID NO: 29150 - protein, 215 aa, Chromohalobacter salexigens
  misc_feature (1)..(215): tr|A0A317QWM2|A0A317QWM2_CHRSL 7-carboxy-7-deazaguanine synthase OS=Chromohalobacter salexigens OX=158080 GN=q ueE PE=3 SV=1
MYSVKEAFYTLQGEGARAGRASVFCRFTGCNLWSGRERDRAQSRCRFCDTDFVGTDGQNGGRFADAHALATHLHRLWPGTDDTAATPYVVFTGGEPLLQLDTALITAMHAHGFEVAVETNGTLTPPDGIDWLCVSPKGDAPLRITQGDELKLVYPQDDAPPANFTHLDFAHFFLQPMDLAPRGGQGTTMTDTVAYCLDHPQWRLALQTHKIAGID

SEQ ID NO: 29151 - protein, 215 aa, Chromohalobacter salexigens
  misc_feature (1)..(215): tr|Q1QVW8|Q1QVW8_CHRSD 7-carboxy-7-deazaguanine synthas e OS=Chromohalobacter salexigens (strain DSM 3043 / ATC C BAA-138 / NCIMB 13768) OX=290398 GN=queE PE=3 SV=1
MYSVKEAFYTLQGEGARAGRASVFCRFTGCNLWSGRERDRAQSRCRFCDTDFVGTDGQNGGRFADAHALATHLHRLWPGTDDTAATPYVVFTGGEPLLQLDTALITAMRAHGFEVAVETNGTLTPPDGIDWLCVSPKGDAPLRITQGDELKLVYPQDDAPPANFTHLDFAHFFLQPMDLAPRGGQGTTMTDTVAYCLDHPQWRLALQTHKIAGID

SEQ ID NO: 29152 - protein, 205 aa, Chroococcales cyanobacterium
  misc_feature (1)..(205): tr|A0A3N5J311|A0A3N5J311_9CHRO 7-carboxy-7-deazaguanine synthase OS=Chroococcales cyanobacterium metabat2.561 OX=2485785 GN=queE PE=3 SV=1
MKTVSINHCTYPVVETFHSLQGEGFWTGSNAFFLRLGGCDVYCPWCDQKESWNAQRYPQKSLGELVEMAKDANPAMVVITGGEPLMHNLDPLTRELKNQGLRVHLETSGAHPFTGVFDWVTFSPKTYKMPDPSIYAQVNELKIVVAHPEDLDWAAMQESKLSEGVIKYLQPEWNKVESKELVFNYVLRHPQWRLSLQTHKFLGVR

SEQ ID NO: 29153 - protein, 258 aa, Chroococcales cyanobacterium
  misc_feature (1)..(258): tr|A0A2G7GGD4|A0A2G7GGD4_9CHRO 7-carboxy-7-deazaguanine synthase OS=Chroococcales cyanobacterium IPPAS B-1203 OX=2049454 GN=queE PE=3 SV=1
MTTTTRLIEVFSAIQGEGLNVGTRQIFIRFALCDLRCRFCDSAHTWTVPSTCHIERSPGLRDFELYDNPVSLDLLLQWVQQLDVPGLHDSISLTGGEPLLHSTFLLKFLPQLQKYTGLPIYLETGGHRPQQLAVVLPHLDSVGMDLKLPSVSGESHWQEHAEFLQLCYQANVEIFVKVIVSSETDIAELHQAAELVANVSPEIPLFLQPVTPLNNIQKSDQVIFAPTPAQVLTWQAKIKQMLKHVRVVPQTHKMLNQL

SEQ ID NO: 29154 - protein, 258 aa, Chroococcidiopsis cubana
  misc_feature (1)..(258): tr|A0A433VJG4|A0A433VJG4_9CYAN 7-carboxy-7-deazaguanine synthase OS=Chroococcidiopsis cubana SAG 39.79 OX=3880 85 GN=queE PE=3 SV=1
MTTARLIEIFSAIQGEGLNVGTRQIFIRFALCDLRCHFCDSAHTWSVPSTCRVERSPGLRDFETHPNPVPLNTLLTWIERQNSPGLHDSISLTGGEPLLHAPFLVEFLPLVRRATGLPIYLETGGHRPQQLQLILPYLDSVGMDIKLPSVSGEDRWNEHAEFLQACYPADIEVFIKAIVSSQTDLGDLAKAAKLVASVNPEIPVFLQPATPLTPSQQFGGIPIQAPTPAQVLHWQALMKQELKQVRVIPQTHKMLNQL

SEQ ID NO: 29155 - protein, 258 aa, Chroococcidiopsis sp.
  misc_feature (1)..(258): tr|A0A2P8QLX5|A0A2P8QLX5_9CYAN 7-carboxy-7-deazaguanine synthase OS=Chroococcidiopsis sp. CCALA 051 OX=869949 GN=queE PE=3 SV=1
MTTARLIEIFSAIQGEGLNVGTRQIFIRFALCDLRCHFCDSAHTWSVPSTCRVERSPGLRDFETHPNPVPLNTLLTWIERQNSPGLHDSISLTGGEPLLHAPFLVEFLPLVRRATGLPIYLETGGHRPQQLQLILPYLDSVGMDLKLPSVSGEDRWNEHAEFLQACHQADVEVFIKAIVSSQTDLGDLAKAAKLVASVNPEIPVFLQPATPLTPSQQFGGIPIQAPTPAQVLHWQAMMKRELKRVRVIPQTHKMLNQL

SEQ ID NO: 29156 - protein, 266 aa, Chroococcidiopsis sp.
  misc_feature (1)..(266): tr|A0A2S6VA93|A0A2S6VA93_9CYAN 7-carboxy-7-deazaguanine synthase OS=Chroococcidiopsis sp. TS-821 OX=1378066 GN =queE PE=3 SV=1
MSVITTAETTTARLIEVFSAIQGEGLNVGTRQIFIRFALCDLRCHFCDSAHTWSVPRTYRVERSPGLRDFETYDNPVALDLLLQWVQRLNTPGLHDSISLTGGEPLLHSAFLVQFLPQVQKSTGLPIYLESGGHRPQQLAMVLPHLNSVGMDFKLPSVSGENYWQEHAEFLQRCYKSDVEVFIKVIVSAATDVAELHRAAELVAAVDPEIVLFLQPVTPLASTQQHSQTDFAAPTPAQVLTWQAEMKRLLKHVRVVPQTHKMLNQL

SEQ ID NO: 29157 - protein, 258 aa, Chroococcidiopsis thermalis
  misc_feature (1)..(258): tr|K9TUT2|K9TUT2_CHRTP 7-carboxy-7-deazaguanine synthas e OS=Chroococcidiopsis thermalis (strain PCC 7203) OX=2 51229 GN=queE PE=3 SV=1
MTTARLIEIFSAIQGEGLNVGTRQIFIRFALCDLRCHFCDSAHTWSVPSTCRVERSPGLRDFETHPNPVPLNTLLTWIERQNSPGLHDSISLTGGEPLLHAPFLVEFLPLVRRATGLPIYLETGGHRPQQLQLILPYLDSVGMDIKLPSVSGEDRWNEHAEFLQACHQADIEVFIKAIVSSQTDLGDLAKAAKLVASVNPEIPVFLQPATPLTPSQQFGGIPIQAPTPAQVLHWQAMMKRELKQVRVIPQTHKMLNQL

SEQ ID NO: 29158 - protein, 265 aa, Chroogloeocystis siderophila
  misc_feature (1)..(265): tr|A0A1U7HM24|A0A1U7HM24_9CHRO 7-carboxy-7-deazaguanine synthase OS=Chroogloeocystis siderophila 5.2 s.c.1 OX= 247279 GN=queE PE=3 SV=1
MSVTTTETTTARLVEVFSAIQGEGLNVGTRQIFIRFALCDLRCHFCDSAHTWSVPRTYRVERSPGLRDFETYDNPVSLDLLLKWVQQLNVPGLHDSISLTGGEPLLHSAFLLQFLPQVQKRTGLPIYLETGGHHPQRLALVLPHLNSVGMDLKLPSVSGESYWQEHATFLQRCYKSGVEVFVKVIVSAETDSTELHQAAELVADVNPEIVLFLQPVTPLESVQRHSKINFSAPTPAQVLTWQAEMKRSLKHVRVVPQTHKLLNQL

SEQ ID NO: 29159 - protein, 209 aa, Chryseobacterium angstadtii
  misc_feature (1)..(209): tr|A0A0J7ILP5|A0A0J7ILP5_9FLAO 7-carboxy-7-deazaguanine synthase OS=Chryseobacterium angstadtii OX=558151 GN=q ueE PE=3 SV=1
MNKEEDILLKEGKMLPVMEHFYTLQGEGAHTGKASYFIRLGGCDVGCHWCDVKESWDPNLHPLMNAEEIAETAAKHCKTIVLTGGEPLMWNLDILTSKLKELGCTIHIETSGAYPMSGHIDWITLSPKKTGLPKEEIYEKASELKVIIFNQHDFTFAQEQAAKVSANCKLYMQSEWSKRDEMYPKITDFILAHPEWQASVQTHKYLNIP

SEQ ID NO: 29160 - protein, 210 aa, Chryseobacterium antarcticum
  misc_feature (1)..(210): tr|A0A448NTM0|A0A448NTM0_9FLAO 7-carboxy-7-deazaguanine synthase OS=Chryseobacterium antarcticum OX=266748 GN= queE PE=3 SV=1
MTKEEEDILLKEGKMLPVMEHFYTIQGEGAHTGKAAYFIRLGGCDVGCHWCDVKESWDPTLHPLMNTEEIAETAARFCKTIVLTGGEPLMWNLEILTNRLKELGCVIHIETSGAYEMSGTLDWITLSPKKTGLPKPAIYAKANELKMIVFNNNDLKFAEEQAAKVSENCVLYLQSEWSKRDEIYPKITDFVLANPKWQTSVQTHKYLNIP

SEQ ID NO: 29161 - protein, 209 aa, Chryseobacterium aquaticum
  misc_feature (1)..(209): tr|A0A0Q3HVL7|A0A0Q3HVL7_9FLAO 7-carboxy-7-deazaguanine synthase OS=Chryseobacterium aquaticum OX=452084 GN=qu eE PE=3 SV=1
MNKEQDILLNEGKMLPVMEHFYTIQGEGAHTGKAAYFIRLGGCDVGCHWCDVKESWNPDLHPLMNAEEIAETAAKHCKIVVLTGGEPLMWNLNILTSKLKELGCTIHIETSGAYPMSGQLDWITLSPKKTGLPKEEIYAKAHELKMIIFNNNDFKFAEEQAAKVSENCRLYLQSEWSKRDEMYPKITDFILANPRWQASVQTHKYLNIP

SEQ ID NO: 29162 - protein, 209 aa, Chryseobacterium aquifrigidense
  misc_feature (1)..(209): tr|A0A543E4M4|A0A543E4M4_9FLAO 7-carboxy-7-deazaguanine synthase OS=Chryseobacterium aquifrigidense OX=558021 GN=queE PE=3 SV=1
MNKEEDILLKEGKMLPVMEHFYTLQGEGAHTGKAAYFIRLGGCDVGCHWCDVKESWNPDLHPLMNAEEIAETAAKHCKTIVLTGGEPLMWNLDILTSKLKELGCTVHIETSGAYPMSGQLDWITLSPKKTGLPKEEIYQKAHELKVIIFNQHDFTFAQEQASKVSENCKLYLQSEWSKRDDMYPKITDFILEHPEWQASVQTHKYLNIP

SEQ ID NO: 29163 - protein, 210 aa, Chryseobacterium arachidiradicis
  misc_feature (1)..(210): tr|A0A420DDU7|A0A420DDU7_9FLAO 7-carboxy-7-deazaguanine synthase OS=Chryseobacterium arachidiradicis OX=161728 2 GN=queE PE=3 SV=1
MTKEEEDILLKEGKMLPVMEHFYTIQGEGFHAGKAAYFIRLGGCDVGCHWCDVKESWDPKLHPLMNTEEIAETAAKYCKTIVLTGGEPLMWNLEILTSKLKELGCTIHIETSGAYPISGHLDWITLSPKKTGLPLADIYQKASELKMIIFNQNDFKFAQEQGEKVNENCVLYLQSEWSKRDAMYPKITDFILEHPKWRSSIQTHKYLNIP

SEQ ID NO: 29164 - protein, 209 aa, Chryseobacterium arachidis
  misc_feature (1)..(209): tr|A0A1M5E9G4|A0A1M5E9G4_9FLAO 7-carboxy-7-deazaguanine synthase OS=Chryseobacterium arachidis OX=1416778 GN=q ueE PE=3 SV=1
MNLTEEILLKEGKMLPVMEHFYTLQGEGAYTGKAAYFIRLGGCDVGCHWCDVKESWDPNLHPLMNAEEIAETAAKHCKTIVLTGGEPLMWNLDILTSKLKELGCTIHIETSGAYPMSGQIDWITLSPKKTGLPKEEIYAKAHELKVIVFNNNDFKFAQEQAAKVSENCTLYLQSEWSKRDEMYPKITDFILENPEWRASVQTHKYLNIP

SEQ ID NO: 29165 - protein, 209 aa, Chryseobacterium arthrosphaerae
  misc_feature (1)..(209): tr|A0A1B8ZAV5|A0A1B8ZAV5_9FLAO 7-carboxy-7-deazaguanine synthase OS=Chryseobacterium arthrosphaerae OX=651561 GN=queE PE=3 SV=1
MNKEQDILLKEGKMLPVMEHFYTLQGEGAHTGKAAYFIRLGGCDVGCHWCDVKESWDPELHPLMDAAEIAETAASHCKTIVLTGGEPLMWNLDILTSRLKELGCTIHIETSGAYPMSGHLDWITLSPKKTGLPKEEIYQQANELKVIIFNQHDFTFAQEQAAKVSDHCRLYLQSEWSKRNDMYPKITDFILEHPEWQASVQTHKYLNIP

SEQ ID NO: 29166 - protein, 209 aa, Chryseobacterium arthrosphaerae
  misc_feature (1)..(209): tr|A0A3S0Q8A8|A0A3S0Q8A8_9FLAO 7-carboxy-7-deazaguanine synthase OS=Chryseobacterium arthrosphaerae OX=651561 GN=queE PE=3 SV=1
MNKEQDILLKEGKMLPVMEHFYTLQGEGAHTGKAAYFIRLGGCDVGCHWCDVKESWDPELHPLMNAAEIAETAASHCKTIVLTGGEPLMWNLDILTSRLKELECTIHIETSGAYPMSGHLDWITLSPKKTGLPKEEIYQQANELKVIIFNQHDFTFAQEQAAKVSDHCRLYLQSEWSKRNDMYPKITDFILEHPEWQASVQTHKYLNIP

SEQ ID NO: 29167 - protein, 209 aa, Chryseobacterium artocarpi
  misc_feature (1)..(209): tr|A0A1B8ZA76|A0A1B8ZA76_9FLAO 7-carboxy-7-deazaguanine synthase OS=Chryseobacterium artocarpi OX=1414727 GN=q ueE PE=3 SV=1
MNKEQDILLKEGKMLPVMEHFYTLQGEGAHTGKAAYFIRLGGCDVGCHWCDVKESWDPELHPLMDAVEIAETAAKHCKTIVLTGGEPLTWNLEILTSKLKELGCTIHIETSGAYPMSGHLDWITLSPKKTGLPKEEIYQKAHELKVIVFNNHDFEFAQEQALKVSENCKLYLQSEWSKRNDMYPKITDFILEHPEWQASVQTHKYLNIP

SEQ ID NO: 29168 - protein, 209 aa, Chryseobacterium balustinum
  misc_feature (1)..(209): tr|A0A3G6TUT8|A0A3G6TUT8_9FLAO 7-carboxy-7-deazaguanine synthase OS=Chryseobacterium balustinum OX=246 GN=queE PE=3 SV=1
MNKEEDILLKEGKMLPVMEHFYTIQGEGAHTGKAAYFIRLGGCDVGCHWCDVKESWDPTLHPLMNAEEIAETAAKHCKTIVLTGGEPLMWNLDILTSKLKELGCTIHIETSGAYPLSGQIDWITLSPKKTGLPKEEIYAKAHELKMIVFNNNDFKFAEEQATKVSESCKLYLQSEWSKRDEMYPKMTDFILAKPRWQASVQTHKYLNIP

SEQ ID NO: 29169 - protein, 209 aa, Chryseobacterium bernardetii
  misc_feature (1)..(209): tr|A0A3G6U751|A0A3G6U751_9FLAO 7-carboxy-7-deazaguanine synthase OS=Chryseobacterium bernardetii OX=1241978 GN =queE PE=3 SV=1
MNKEQDILLKEGKMLPVMEHFYTLQGEGAHTGKAAYFIRLGGCDVGCHWCDVKESWDPELHPLMDAVEIAETAAKHCKTIVLTGGEPLTWNLEILTSRLKELGCTIHIETSGAYPMSGHLDWITLSPKKTGLPKEEIYQKAHELKVIVFNNHDFAFAQEQAAKVSENCKLYLQSEWSKRNDMYPKITDFILEHPEWQASVQTHKYLNIP

SEQ ID NO: 29170 - protein, 210 aa, Chryseobacterium bovis
  misc_feature (1)..(210): tr|A0A1U7PV21|A0A1U7PV21_9FLAO 7-carboxy-7-deazaguanine synthase OS=Chryseobacterium bovis DSM 19482 OX=112128 4 GN=queE PE=3 SV=1
MTKEQEDLLLKEGKMLPVMEHFYTIQGEGFHAGKAAYFIRLGGCDVGCHWCDVKESWDPTLHPLMDAVEIAETAAKYCKTIVLTGGEPLMWNLEILTSKLKELGCTIHIETSGAYPMSGQLDWITLSPKKTGLPLQDIYQKASELKVIIFNNNDFKFAQEQAEKVSETCELYLQSEWSKRDANYPKITDFILEHPRWRSSIQTHKYLNIP

SEQ ID NO: 29171 - protein, 209 aa, Chryseobacterium carnipullorum
  misc_feature (1)..(209): tr|A0A3G6NHQ8|A0A3G6NHQ8_9FLAO 7-carboxy-7-deazaguanine synthase OS=Chryseobacterium carnipullorum OX=1124835 GN=queE PE=3 SV=1
MNKEEDILLKEGKMLPVMEHFYTLQGEGAHTGKASYFIRLGGCDVGCHWCDVKESWDPNLHPLMNAEEIAETAAKHCKTIVLTGGEPLMWNLDILTSKLKELGCTIHIETSGAYPLSGQIDWITLSPKKTGLPKEEIYEKASELKVIIFNQHDFTFAQEQAAKVSEQCKLYMQSEWSKRDEMYPKITDFILAHPEWQASVQTHKYLNIP

SEQ ID NO: 29172 - protein, 209 aa, Chryseobacterium carnipullorum
  misc_feature (1)..(209): tr|A0A1M7ABD5|A0A1M7ABD5_9FLAO 7-carboxy-7-deazaguanine synthase OS=Chryseobacterium carnipullorum OX=1124835 GN=queE PE=3 SV=1
MNKEEDILLKEGKMLPVMEHFYTLQGEGAHTGKASYFIRLGGCDVGCHWCDVKESWDPNLHPLMNAEEIAETAAKHCKTIVLTGGEPLMWNLDILTSKLKELGCTIHIETSGAYPLSGQIDWITLSPKKTGLPKEEIYEKASELKVIIFNQHDFTFAQEQAAKVSENCKLYMQSEWSKRDEMYPKITDFILAHPEWQASVQTHKYLNIP

SEQ ID NO: 29173 - protein, 210 aa, Chryseobacterium carnis
  misc_feature (1)..(210): tr|A0A3G8XLL9|A0A3G8XLL9_9FLAO 7-carboxy-7-deazaguanine synthase OS=Chryseobacterium carnis OX=1241979 GN=queE PE=3 SV=1
MTKEEENILLEQGKMLPVMEHFYTLQGEGAHTGKAAYFIRLGGCDVGCHWCDVKESWDPNLHPLMSTEEIAETAARHCKTIVLTGGEPLMWNLEILTNRLKELGCEIHIETSGAYEMSGTLDWITLSPKKTGLPKPAIYEKASELKMIIFNQNDFKFAEEQAAKVSENCVLYLQSEWSKRDQMYPKITDFILANPKWHASVQTHKYLNIP

SEQ ID NO: 29174 - protein, 210 aa, Chryseobacterium chaponense
  misc_feature (1)..(210): tr|A0A1N7L0B2|A0A1N7L0B2_9FLAO 7-carboxy-7-deazaguanine synthase OS=Chryseobacterium chaponense OX=713588 GN=q ueE PE=3 SV=1
MTKEEENILLKEGKMLPVMEHFYTIQGEGAHTGKAAYFIRLGGCDVGCHWCDVKESWDPNLHPLLSTQEIAETAAKHCKTIVLTGGEPLMWNLDFLTSKLKELGCEIHIETSGAYEMSGTLDWITLSPKKTGLPKPSIYSKASELKMIIFNNNDFKFAEEQAAKVSENCKLYLQSEWSKREEIYPKITDFILANPKWQASVQTHKYLNIP

SEQ ID NO: 29175 - protein, 209 aa, Chryseobacterium contaminans
  misc_feature (1)..(209): tr|A0A1M7HK98|A0A1M7HK98_9FLAO 7-carboxy-7-deazaguanine synthase OS=Chryseobacterium contaminans OX=1423959 GN =queE PE=3 SV=1
MNKEQDILLKEGKMLPVMEHFYTLQGEGAHTGKAAYFIRLGGCDVGCHWCDVKESWDPELHPLMDAVEIAETAAKHCKTIVLTGGEPLTWNLEILTSKLKELGCTIHIETSGAYPMSGHLDWITLSPKKTGLPKEEIYQKAHELKVIIFNNHDFAFAQEQAAKVSENCKLYLQSEWSKRNDMYPKITDFILEHPEWQASVQTHKYLNIP

SEQ ID NO: 29176 - protein, 209 aa, Chryseobacterium culicis
  misc_feature (1)..(209): tr|A0A2S9CKX0|A0A2S9CKX0_9FLAO 7-carboxy-7-deazaguanine synthase OS=Chryseobacterium culicis OX=680127 GN=queE PE=3 SV=1
MNKEEDILLKEGKMLPVMEHFYTLQGEGAHTGKAAYFIRLGGCDVGCHWCDVKESWDPELHPLMNAEEIAETAAKHCKTIVLTGGEPLMWNLDILTSKLKELGCTVHIETSGAYPMSGHLDWITLSPKKTGLPKEEIYQKANELKVIIFNQHDFTFAQEQASKVSENCKLYLQSEWSKRDDMYPKITDFILENPEWQASVQTHKYLNIP

SEQ ID NO: 29177 - protein, 209 aa, Chryseobacterium culicis
  misc_feature (1)..(209): tr|A0A1H6I2J0|A0A1H6I2J0_9FLAO 7-carboxy-7-deazaguanine synthase OS=Chryseobacterium culicis OX=680127 GN=queE PE=3 SV=1
MNKEEDILLKEGKMLPVMEHFYTLQGEGAHTGKAAYFIRLGGCDVGCHWCDVKESWNPELHPLMNAVEIAEMAAKHSKTIVLTGGEPLMWNLDLLTSRLKELGCTVHIETSGAYPMSGQLDWITLSPKKTGLPKEEIYQKAHELKVIIFNQHDFTFAQEQAAKVSENCRLYLQSEWSKRDDMYPKITDFILEHPEWQASVQTHKYLNIP

SEQ ID NO: 29178 - protein, 209 aa, Chryseobacterium daecheongense
  misc_feature (1)..(209): tr|A0A3N0VTT4|A0A3N0VTT4_9FLAO 7-carboxy-7-deazaguanine synthase OS=Chryseobacterium daecheongense OX=192389 G N=queE PE=3 SV=1
MNKEEDILLKEGKMLPVMEHFYTLQGEGAHTGKAAYFIRLGGCDVGCHWCDVKESWNPDLHPLMNTEEIAEIAAKHCKTIVLTGGEPLMWNLDILTSKLKELGCTIHIETSGAYPMSGQLDWITLSPKKTGLPKEEIYAKANELKVIIFNNHDFTFAEEQAAKVSDSCKLYLQSEWSKRDEMYPKITDFILAHPEWQASVQTHKYLNIP

SEQ ID NO: 29179 - protein, 209 aa, Chryseobacterium defluvii
  misc_feature (1)..(209): tr|A0A495SB93|A0A495SB93_9FLAO 7-carboxy-7-deazaguanine synthase OS=Chryseobacterium defluvii OX=160396 GN=que E PE=3 SV=1
MNKEEDILLKEGKMLPVMEHFYTLQGEGAHTGKAAYFIRLGGCDVGCHWCDVKESWNPDLHPLMNAEEIAETAAKHCKTIVLTGGEPLMWNLDILTSRLKELGCSIHIETSGAYPMSGHLDWITLSPKKTGLPKEEIYQRANELKVIIFNNHDFTFAEEQAAKVSENCKLYLQSEWSKRDEMYPKITDFILAHPEWQASVQTHKYLNIP

SEQ ID NO: 29180 - protein, 209 aa, Chryseobacterium elymi
  misc_feature (1)..(209): tr|A0A3D9D338|A0A3D9D338_9FLAO 7-carboxy-7-deazaguanine synthase OS=Chryseobacterium elymi OX=395936 GN=queE P E=3 SV=1
MNKEEDILLKEGKMLPVMEHFYTLQGEGAHTGKASYFIRLGGCDVGCHWCDVKESWDPNLHPLMNAEEIAETAAKHSKTIVLTGGEPLMWNLDILTSKLKELGCTIHIETSGAYPLSGQIDWITLSPKKTGLPKEEIYEKASELKVIIFNQHDFTFAQEQASKVSENCRLYMQSEWSKRDEMYPKITDFILAHPEWQASVQTHKYLNIP

SEQ ID NO: 29181 - protein, 209 aa, Chryseobacterium flavum
  misc_feature (1)..(209): tr|A0A3D9CRA6|A0A3D9CRA6_9FLAO 7-carboxy-7-deazaguanine synthase OS=Chryseobacterium flavum OX=415851 GN=queE PE=3 SV=1
MNKEEDILLKEGKMLPVMEHFYTLQGEGAHTGKAAYFIRLGGCDVGCHWCDVKESWDPDLHPLMDAAEIAETAAKHCKTIVLTGGEPLMWNLEILTSKLKELGCTIHIETSGAYPMSGHLDWITLSPKKTGLPKEEIYQKANELKVIVFNNHDFTFAEEQAAKVSESCRLYLQSEWSKRNDMYPKITDFILEHPEWQASVQTHKYLNIP

SEQ ID NO: 29182 - protein, 209 aa, Chryseobacterium formosense
  misc_feature (1)..(209): tr|A0A085Z1Y3|A0A085Z1Y3_9FLAO 7-carboxy-7-deazaguanine synthase OS=Chryseobacterium formosense OX=236814 GN=q ueE PE=3 SV=1
MNKEEDILLKEGKMLPVMEHFYTIQGEGAHTGKAAYFIRLGGCDVGCHWCDVKESWDPTLHPLMNAEEIAETAAKHCKTIVLTGGEPLMWNLDILTSKLKELGCTIHIETSGAYPMSGQLDWITLSPKKTGLPKEEIYAKAHELKVIIFNNNDFIFAQEQAEKVSENCRLYLQSEWSKRDAMYPKMTDFILENPRWQASVQTHKYLNIP

SEQ ID NO: 29183 - protein, 209 aa, Chryseobacterium frigidisoli
  misc_feature (1)..(209): tr|A0A1I3I1G6|A0A1I3I1G6_9FLAO 7-carboxy-7-deazaguanine synthase OS=Chryseobacterium frigidisoli OX=1125876 GN =queE PE=3 SV=1
MTDLEKIRLESGELLPVMEHFYTIQGEGAYTGKAAYFIRLGGCDVGCHWCDVKESWDPAKHPLMETSQIAEIAASNCKTIVLTGGEPLMWNLNPLTQQLKNLGCTIHIETSGAYEMSGILDWITLSPKKTGLPKNDIYEVAHELKVIIFNNNDFIFAAEQAEKVNDNCKLYLQSEWSKRDEMYPKMTDFVMKNPKWQVSVQTHKYLNIP

SEQ ID NO: 29184 - protein, 209 aa, Chryseobacterium gallinarum
  misc_feature (1)..(209): tr|A0A0G3M5P6|A0A0G3M5P6_9FLAO 7-carboxy-7-deazaguanine synthase OS=Chryseobacterium gallinarum OX=1324352 GN= queE PE=3 SV=1
MNKEQDILLKEGKMLPVMEHFYTLQGEGAHTGKAAYFIRLGGCDVGCHWCDVKESWDPDLHPLMDATAIAETAAKHCKTIVLTGGEPLMWNLDILTSRLKELGCSIHIETSGAYPMSGQLDWITLSPKKTGLPKEEIYQKANELKVIIFNNHDFTFAQEQAARVSENCKLYLQSEWSKRNDMYPKITDFILEHPEWQASVQTHKYLNIP

SEQ ID NO: 29185 - protein, 209 aa, Chryseobacterium gambrini
  misc_feature (1)..(209): tr|A0A1N7PP61|A0A1N7PP61_9FLAO 7-carboxy-7-deazaguanine synthase OS=Chryseobacterium gambrini OX=373672 GN=que E PE=3 SV=1
MNLTEEILLKEGKMLPVMEHFYTLQGEGAHTGKAAYFIRLGGCDVGCHWCDVKESWDPNLHPLMNAEAIAETAAKHCKTIVLTGGEPLMWNLDILTGKLKELGCSIHIETSGAYPMSGQIDWITLSPKKTGLPKEEIYAKAHELKVIVFNNNDFKFAEEQAAKVSENCTLYLQSEWSKRDEMYPKITDFILEHPEWRASVQTHKYLNIP

SEQ ID NO: 29186 - protein, 209 aa, Chryseobacterium geocarposphaerae
  misc_feature (1)..(209): tr|A0A2M9C2Z4|A0A2M9C2Z4_9FLAO 7-carboxy-7-deazaguanine synthase OS=Chryseobacterium geocarposphaerae OX=14167 76 GN=queE PE=3 SV=1
MNKEEDILLKEGKMLPVMEHFYTLQGEGAHTGKAAYFIRLGGCDVGCHWCDVKESWDPNLHPLMNAKEIAETAAKHCKTIVLTGGEPLMWNLDILTSKLKELGCTIHIETSGAYPMSGHIDWITLSPKKTGLPKEEIYAKAHELKVIVFNNNDFKFAQEQAAKVTENCTLYLQSEWSKRDEMYPKITDFILENPQWRASVQTHKYLNIP

SEQ ID NO: 29187 - protein, 209 aa, Chryseobacterium glaciei
  misc_feature (1)..(209): tr|A0A172XVF6|A0A172XVF6_9FLAO 7-carboxy-7-deazaguanine synthase OS=Chryseobacterium glaciei OX=1685010 GN=que E PE=3 SV=1
MNKEEDILLKEGKMLPVMEHFYTLQGEGAHTGKASYFIRLGGCDVGCHWCDVKESWDPTLHPLMNAEEIAETAAKHCKTVVLTGGEPLMWNLDILTSKLKELGCTIHIETSGAYPMSGHIDWITLSPKKTGLPKEEIYEKASELKVIVFNNNDLKFAEEQAAKVSANCRLYLQSEWSKRDEMYPKITDFILEHPEWQASVQTHKYLNIP

SEQ ID NO: 29188 - protein, 209 aa, Chryseobacterium gleum
  misc_feature (1)..(209): tr|A0A4U8WFN5|A0A4U8WFN5_9FLAO 7-carboxy-7-deazaguanine synthase OS=Chryseobacterium gleum OX=250 GN=queE PE=3 SV=1
MNLTEEILLKEGKMLPVMEHFYTLQGEGAHTGKAAYFIRLGGCDVGCHWCDVKESWDPNLHPLMNAEDIAETAAKHCKTIVLTGGEPLMWNLDILTGKLKELGCSIHIETSGAYPMSGQIDWITLSPKKTGLPKEEIYAKAHELKVIVFNNNDFKFAQEQAAKVSENCMLYLQSEWSKRDEMYPKITDFILEHPEWRASVQTHKYLNIP

SEQ ID NO: 29189 - protein, 209 aa, Chryseobacterium gleum
  misc_feature (1)..(209): tr|A0A3S4N4T2|A0A3S4N4T2_9FLAO 7-carboxy-7-deazaguanine synthase OS=Chryseobacterium gleum OX=250 GN=queE PE=3 SV=1
MNKEEDILLKEGKMLPVMEHFYTLQGEGAHTGKAAYFIRLGGCDVGCHWCDVKESWDPELHPLMNAEEIAETAARHCKTIVLTGGEPLMWNLDILTSKLKELGCTIHIETSGAYPMSGHLDWITLSPKKTGLPKEEIYQKANELKVIIFNHHDFTFAQEQAAKVSENCKLYLQSEWSKRNDMYPKITDFILEHPEWQASVQTHKYLNIP

SEQ ID NO: 29190 - protein, 209 aa, Chryseobacterium greenlandense; identical to SEQ ID NO: 29161
  misc_feature (1)..(209): tr|A0A101CJN5|A0A101CJN5_9FLAO 7-carboxy-7-deazaguanine synthase OS=Chryseobacterium greenlandense OX=345663 G N=queE PE=3 SV=1

SEQ ID NO: 29191 - protein, 209 aa, Chryseobacterium hagamense
  misc_feature (1)..(209): tr|A0A511YKQ1|A0A511YKQ1_9FLAO 7-carboxy-7-deazaguanine synthase OS=Chryseobacterium hagamense OX=395935 GN=qu eE PE=3 SV=1
MKTEEDILLKEGKMLPVMEHFYTLQGEGAHTGKAAYFIRLGGCDVGCHWCDVKESWDPNLHPLMNAEEIAETAARHCKTIVLTGGEPLMWNLDILTSRLKALGCTVHIETSGAYPMSGQIDWITLSPKKTGLPKEEIYARAHELKVIVFNNNDFKFAQEQAAKVSANCTLYLQSEWSKRDEMYPKITDFILEHPEWRASVQTHKYLNIP

SEQ ID NO: 29192 - protein, 209 aa, Chryseobacterium haifense
  misc_feature (1)..(209): tr|A0A246B9H2|A0A246B9H2_9FLAO 7-carboxy-7-deazaguanine synthase OS=Chryseobacterium haifense DSM 19056 OX=145 0526 GN=queE PE=3 SV=1
MKEEENILLNEGKMLPVMEHFYTLQGEGSHTGKAAYFIRLGGCDVGCHWCDVKESWDPNLHPLMNTEEIAQTAAKYCKTIVLTGGEPLMWNLVPLTTRLKELGCTIHIETSGAYDMSGILDWITLSPKKNGLPKEEIYAKASELKVIVFNNNDFKFAEEQAAKVSENCKLYLQSEWSKRNEMYPKITDFILANPKWQASVQTHKYLNIP

SEQ ID NO: 29193 - protein, 209 aa, Chryseobacterium haifense
  misc_feature (1)..(209): tr|A0A3G6T0N0|A0A3G6T0N0_9FLAO 7-carboxy-7-deazaguanine synthase OS=Chryseobacterium haifense OX=421525 GN=que E PE=3 SV=1
MKEEENILLNEGKMLPVMEHFYTLQGEGSHTGKAAYFIRLGGCDVGCHWCDVKESWDPNLHPLMNTEEIAKTAAKYCKTIVLTGGEPLMWNLVPLTTRLKELGCTIHIETSGAYDMSGILDWITLSPKKTGLPKEEIYAKASELKVIVFNNNDFKFAEEQAAKVSENCKLYLQSEWSKRNEMYPKITDFILANPKWQASVQTHKYLNIP

SEQ ID NO: 29194 - protein, 210 aa, Chryseobacterium halperniae
  misc_feature (1)..(210): tr|A0A085BME5|A0A085BME5_9FLAO 7-carboxy-7-deazaguanine synthase OS=Chryseobacterium halperniae OX=421072 GN=q ueE PE=3 SV=1
MTKEQEDILLKEGRMLPVMEHFYTIQGEGFHAGKAAYFIRLGGCDVGCHWCDVKESWDPTLHPLMNTEEIAETAAKLCKTIVLTGGEPLMWNLDILTSKLKELGCTIHIETSGAYPMSGHLDWITLSPKKTGLPLADIYNVASELKMIIFNQNDFKFAEEQGNKVNANCELYLQSEWSKRDAMYPKITDFILENPRWRSSIQTHKYLNIP

SEQ ID NO: 29195 - protein, 210 aa, Chryseobacterium hispanicum
  misc_feature (1)..(210): tr|A0A3D9D2P2|A0A3D9D2P2_9FLAO 7-carboxy-7-deazaguanine synthase OS=Chryseobacterium hispanicum OX=358687 GN=q ueE PE=3 SV=1
MTKEEENILLKEGKMLPVMEHFYTIQGEGFHAGKAAYFIRLGGCDVGCHWCDVKESWDPTLHPLMDTVEIAETVAKYCKTIVLTGGEPLMWNLDILTSKLKELGCTIHIETSGAYPMSGHLDWITLSPKKTGLPLADIYKEASELKMIIFNQNDFKFAEEQASKVSDSCELYLQSEWSKRDANYPKITDFILENPRWRSSIQTHKYLNIP

SEQ ID NO: 29196 - protein, 210 aa, Chryseobacterium hominis
  misc_feature (1)..(210): tr|A0A1H6JZK3|A0A1H6JZK3_9FLAO 7-carboxy-7-deazaguanine synthase OS=Chryseobacterium hominis OX=420404 GN=queE PE=3 SV=1
MTKEQEELLLKQGKMLPVMEHFYTIQGEGFHAGKAAYFIRLGGCDVGCHWCDVKESWDPKLHPLMDATEIAETAAKHCTTIVLTGGEPLMWNLEILTSRLKELGCTIHIETSGAYPMSGHLDWITLSPKKTGLPLEDIYKVASELKMIIFNNNDFKFAQEQQAKTNDSCVLYLQSEWSKRDVMYPKITDFILENPEWRSSIQTHKYLNIP

SEQ ID NO: 29197 - protein, 210 aa, Chryseobacterium hominis
  misc_feature (1)..(210): tr|A0A3N0X515|A0A3N0X515_9FLAO 7-carboxy-7-deazaguanine synthase OS=Chryseobacterium hominis OX=420404 GN=queE PE=3 SV=1
MTKEQEELLLKQGKMLPVMEHFYTIQGEGFHAGKAAYFIRLGGCDVGCHWCDVKESWNPKLHPLMDATEIAETAAKYCKTIVLTGGEPLMWNLEILTSRLKELGCTIHIETSGAYPMSGHLDWITLSPKKTGLPLEDIYKVASELKMIIFNNNDFKFAQEQQAKTNDNCVLYLQSEWSKRDAMYPKITDFILENPEWRSSIQTHKYLNIP

SEQ ID NO: 29198 - protein, 209 aa, Chryseobacterium humi
  misc_feature (1)..(209): tr|A0A1H5ULY4|A0A1H5ULY4_9FLAO 7-carboxy-7-deazaguanine synthase OS=Chryseobacterium humi OX=493375 GN=queE PE =3 SV=1
MTDSEKIELEKGISLPVMEHFYTIQGEGAHTGKAAYFIRLGGCDVGCHWCDVKESWDPNLHPLMKTEKIAEIAASNCKTIVLTGGEPLMWNLDPLTKKLKDLGCTIHIETSGAYKMSGILDWITLSPKKTGLPKPEIYKKAQELKVIIFNNNDFKFAEEQAEKVEDGCKLYLQSEWSKRAEMYPKMTDFVMKNPKWQVSVQTHKYLNIP

SEQ ID NO: 29199 - protein, 210 aa, Chryseobacterium hungaricum
  misc_feature (1)..(210): tr|A0A1G7FAL0|A0A1G7FAL0_9FLAO 7-carboxy-7-deazaguanine synthase OS=Chryseobacterium hungaricum OX=454006 GN=q ueE PE=3 SV=1
MTKEEENILLNEGKMLPVMEHFYTIQGEGYHAGKAAYFIRLGGCDVGCHWCDVKESWDPKLHPLMNTVEIAETAAKYCKTIVLTGGEPLMWNLEILTSKLKELGCTIHIETSGAYPMSGHLDWITLSPKKTGLPLEEIYSKASELKMIIFNNNDFKFAQEQGEKVNGDCELYLQSEWSKRDAMYPKITDFILENPKWRSSIQTHKYLNIP

SEQ ID NO: 29200 - protein, 209 aa, Chryseobacterium indologenes
  misc_feature (1)..(209): tr|A0A0N0IWI1|A0A0N0IWI1_9FLAO 7-carboxy-7-deazaguanine synthase OS=Chryseobacterium indologenes OX=253 GN=que E PE=3 SV=1
MNKEQDILLKEGKMLPVMEHFYTLQGEGAHTGKAAYFIRLGGCDVGCHWCDVKESWNPDLHPLMNAEEIAETAAKHCKTIVLTGGEPLMWNLDILTSKLKELGCSIHIETSGAYPMSGQLDWITLSPKKTGLPKEEIYQKANELKVIIFNNHDFTFAQEQAAKVSENCRLYMQSEWSRRDEMYPKITDFILAHPEWQASVQTHKYLNIP

SEQ ID NO: 29201 - protein, 209 aa, Chryseobacterium indologenes
  misc_feature (1)..(209): tr|A0A1Z3W5P9|A0A1Z3W5P9_9FLAO 7-carboxy-7-deazaguanine synthase OS=Chryseobacterium indologenes OX=253 GN=que E PE=3 SV=1
MNKDQDILLKEGKMLPVMEHFYTLQGEGAHTGKAAYFIRLGGCDVGCHWCDVKESWDPDLHPLMNAEDIAETAAKHCKTIVLTGGEPLMWNLDLLTSKLKELGCTIHIETSGAYPMSGQLDWITLSPKKTGLPKEEIYQKANELKVIVFNNHDLTFAQEQAAKVSENCKLYLQSEWSKRNEMYPKITDFILEHPEWQASVQTHKYLNIP

SEQ ID NO: 29202 - protein, 209 aa, Chryseobacterium indoltheticum
  misc_feature (1)..(209): tr|A0A381F5P9|A0A381F5P9_9FLAO 7-carboxy-7-deazaguanine synthase OS=Chryseobacterium indoltheticum OX=254 GN=q ueE PE=3 SV=1
MNKEEDILLKEGKMLPVMEHFYTIQGEGAHTGKAAYFIRLGGCDVGCHWCDVKESWNPTLHPLINAEEIAETAAKHCKIVVLTGGEPLMWNLDILTSKLKELGCTIHIETSGAYPLSGQIDWITLSPKKTGLPKEEIYAKAHELKMIVFNNNDFKFADEQASKVSENCRLYLQSEWSKRDEMYPKITDFILANPRWQASVQTHKYLNIP

SEQ ID NO: 29203 - protein, 209 aa, Chryseobacterium indoltheticum
  misc_feature (1)..(209): tr|A0A3G6N1V1|A0A3G6N1V1_9FLAO 7-carboxy-7-deazaguanine synthase OS=Chryseobacterium indoltheticum OX=254 GN=q ueE PE=3 SV=1
MNKEEGILLKEGKMLPVMEHFYTIQGEGAHTGKAAYFIRLGGCDVGCHWCDVKESWDPTLHPLMNAEEIAETAAKHCKIVVLTGGEPLMWNLDILTSKLKELGCTIHIETSGAYPLSGQIDWITLSPKKTGLPKEEIYDKAHELKMIVFNNNDFKFADEQASKVSENCRLYLQSEWSKRDEMYPKITDFILANPRWQASVQTHKYLNIP

SEQ ID NO: 29204 - protein, 209 aa, Chryseobacterium jejuense
  misc_feature (1)..(209): tr|A0A2X2V6T0|A0A2X2V6T0_9FLAO 7-carboxy-7-deazaguanine synthase OS=Chryseobacterium jejuense OX=445960 GN=que E PE=3 SV=1
MNKEQDILLKEGKMLPVMEHFYTLQGEGAHTGKAAYFIRLGGCDVGCHWCDVKESWNPELHPLMDAVEIAETAAKHCKTIVLTGGEPLTWNLEILTSKLKELGCTIHIETSGAYPMSGHLDWITLSPKKTGLPKEEIYQNAHELKVIIFNNHDFEFAQEQAAKVSENCKLYLQSEWSKRDDMYPKITDFILEHPEWQASVQTHKYLNIP

SEQ ID NO: 29205 - protein, 210 aa, Chryseobacterium jeonii
  misc_feature (1)..(210): tr|A0A0C1D678|A0A0C1D678_9FLAO 7-carboxy-7-deazaguanine synthase OS=Chryseobacterium jeonii OX=266749 GN=queE PE=3 SV=1
MTKEEENILLKEGKMLPVMEYFYTIQGEGAHTGKAAYFIRLGGCDVGCHWCDVKESWDPNLHPLLSTDEIAQTAAKHCKTIVLTGGEPLMWNLDFLTARLKELGCEIHIETSGAYEMSGTLDWITLSPKKTGLPKPAIYAEASELKMIIFNNNDFKFAEEQAAKVSENCKLYLQSEWSKREEIYPKITDFILANPKWQASVQTHKYLNIP

SEQ ID NO: 29206 - protein, 209 aa, Chryseobacterium joostei
  misc_feature (1)..(209): tr|A0A1N7JTU6|A0A1N7JTU6_9FLAO 7-carboxy-7-deazaguanine synthase OS=Chryseobacterium joostei OX=112234 GN=queE PE=3 SV=1
MNKEQDILLKEGKMLPVMEHFYTLQGEGAHTGKAAYFIRLGGCDVGCHWCDVKESWNPELHPLMDAAEIAETAAKHCKTIVLTGGEPLTWNLEILTSKLKELGCTIHIETSGAYPMSGHLDWITLSPKKTGLPKEEIYHNANELKVIVFNNHDFEFAQEQAAKVSENCKLYLQSEWSKRDEMYPKITDFILEHPEWQASVQTHKYLNIP

SEQ ID NO: 29207 - protein, 209 aa, Chryseobacterium koreense
  misc_feature (1)..(209): tr|A0A0J7J1Q6|A0A0J7J1Q6_9FLAO 7-carboxy-7-deazaguanine synthase OS=Chryseobacterium koreense CCUG 49689 OX=13 04281 GN=queE PE=3 SV=1
MTNEEEILLNQGRMLPVMEHFYTLQGEGAHTGKAAYFIRLGGCDVGCHWCDVKESWNPELHPLMDAEEVAKTAAKYCKTIVLTGGEPLMYNLDVLTQKLKELGCEIHIETSGAYEMSGILDWITLSPKKTKLPTEEIYAEANELKMIVYNQSDFKFAEEQAAKVSEDCVLYLQSEWSKRNEMYPKITDFILAHPKWKASVQTHKYLNIP

SEQ ID NO: 29208 - protein, 209 aa, Chryseobacterium kwangjuense
  misc_feature (1)..(209): tr|A0A135WF95|A0A135WF95_9FLAO 7-carboxy-7-deazaguanine synthase OS=Chryseobacterium kwangjuense OX=267125 GN= queE PE=3 SV=1
MNKEEDILLKEGKMLPVMEHFYTLQGEGAHTGKASYFIRLGGCDVGCHWCDVKESWDPNLHPLMNAEEIAETAAKHCKTIVLTGGEPLMWNLDILTGKLKELGCTIHIETSGAYPMSGQIDWITLSPKKTGLPKEEIYEKASELKVIIFNQHDFTFAQEQAAKVSKNCKLYMQSEWSKRDEMYPKITDFILAHPEWQASVQTHKYLNIP

SEQ ID NO: 29209 - protein, 209 aa, Chryseobacterium lactis
  misc_feature (1)..(209): tr|A0A3G6RX32|A0A3G6RX32_9FLAO 7-carboxy-7-deazaguanine synthase OS=Chryseobacterium lactis OX=1241981 GN=queE PE=3 SV=1
MNKEQDILLKEGKMLPVMEHFYTLQGEGAHTGKAAYFIRLGGCDVGCHWCDVKESWDPELHPLMNTTEIAETAAKHCKTIVLTGGEPLMWNLDILTSKLKELGCTVHIETSGAYPMSGQLDWITLSPKKTGLPKEEIYQKANELKVIIFNNHDFAFAEEQAAKVSENCKLYLQSEWSKRNDMYPKITDFILEHPEWQASVQTHKYLNIP

SEQ ID NO: 29210 - protein, 209 aa, Chryseobacterium lathyri
  misc_feature (1)..(209): tr|A0A511YDA0|A0A511YDA0_9FLAO 7-carboxy-7-deazaguanine synthase OS=Chryseobacterium lathyri OX=395933 GN=queE PE=3 SV=1
MNKEEDILLKEGKMLPVMEHFYTLQGEGAHTGKASYFIRLGGCDVGCHWCDVKESWDPNLHPLMNAEEIAETAAKHSKTIVLTGGEPLMWNLDILTSKLKELGCTIHIETSGAYPLSGQIDWITLSPKKTGLPKEEIYKKASELKVIIFNQHDFTFAQEQAAKVSENCKLYMQSEWSKRDEMYPKITDFILAHPEWQASVQTHKYLNIP

SEQ ID NO: 29211 - protein, 209 aa, Chryseobacterium limigenitum
  misc_feature (1)..(209): tr|A0A1K2IM23|A0A1K2IM23_9FLAO 7-carboxy-7-deazaguanine synthase OS=Chryseobacterium limigenitum OX=1612149 GN =queE PE=3 SV=1
MNKEEDILLKEGKMLPVMEHFYTLQGEGAHTGKASYFIRLGGCDVGCHWCDVKESWDPTLHPLMNAEEIAETAAKHCKTIVLTGGEPLMWNLDILTSKLKELGCTIHIETSGAYPMSGHIDWITLSPKKTGLPKEEIYEKASELKVIVFNNNDLKFAQEQAAKVSANCRLYLQSEWSKRDEMYPKITDFILEHPEWQASVQTHKYLNIP

SEQ ID NO: 29212 - protein, 209 aa, Chryseobacterium luteum
  misc_feature (1)..(209): tr|A0A085ZYF1|A0A085ZYF1_9FLAO 7-carboxy-7-deazaguanine synthase OS=Chryseobacterium luteum OX=421531 GN=queE PE=3 SV=1
MNKEEDILLKEGKMLPVMEHFYTLQGEGAHTGKASYFIRLGGCDVGCHWCDVKESWDPNLHPLMNAEEIAETAAKHCKTIVLTGGEPLMWNLDILTSKLKELGCTIHIETSGAYPMSGQIDWITLSPKKTGLPKEEIYEKASELKVIIFNQHDFTFAQEQAAKVSENCKLYMQSEWSKRDEMYPKITDFILAHPEWQASVQTHKYLNIP

SEQ ID NO: 29213 - protein, 210 aa, Chryseobacterium molle
  misc_feature (1)..(210): tr|A0A1M6Q555|A0A1M6Q555_9FLAO 7-carboxy-7-deazaguanine synthase OS=Chryseobacterium molle OX=216903 GN=queE P E=3 SV=1
MTKEEEDILLQEGKMLPVMEHFYTIQGEGFHAGKAAYFIRLGGCDVGCHWCDVKESWDPKLHPLMNTEEIAETAARYCKTIVLTGGEPLMWNLEILTSKLKELGCTIHIETSGAYPMSGHLDWITLSPKKTGLPLADIYKEASELKMIIFNQNDFKFAQEQGGKVNDKCELYLQSEWSKRDVMYPKITDFILEHPKWRSSIQTHKYLNIP

SEQ ID NO: 29214 - protein, 209 aa, Chryseobacterium mucoviscidosis
  misc_feature (1)..(209): tr|A0A202C443|A0A202C443_9FLAO 7-carboxy-7-deazaguanine synthase OS=Chryseobacterium mucoviscidosis OX=1945581 GN=queE PE=3 SV=1
MNLTEEILLKEGKMLPVMEHFYTLQGEGAHTGKAAYFIRLGGCDVGCHWCDVKESWDPNLHPLMNAEEIAETAAKHCKTIVLTGGEPLMWNLDILTGKLKELGCSIHIETSGAYPISGQIDWITLSPKKTGLPKEEIYAKAHELKVIVFNNNDFKFAEEQAAKVSENCTLYLQSEWSKRDEMYPKITDFILENPEWRASVQTHKYLNIP

SEQ ID NO: 29215 - protein, 209 aa, Chryseobacterium nakagawai
  misc_feature (1)..(209): tr|A0A448LP88|A0A448LP88_9FLAO 7-carboxy-7-deazaguanine synthase OS=Chryseobacterium nakagawai OX=1241982 GN=q ueE PE=3 SV=1
MNKEQDILLKEGKMLPVMEHFYTLQGEGAHTGKAAYFIRLAGCDVGCHWCDVKESWDPELHPLMNAEEIAETAAKHCKTVVLTGGEPLTWNLEVLTSKLKELGCTIHIETSGAYPMSGHLDWITLSPKKTGLPKDEIYQKAHELKVIVFNNHDFAFAQEQAAKVSESCKLYLQSEWSKRDDMYPKITDFILEHPEWQASVQTHKYLNIP

SEQ ID NO: 29216 - protein, 209 aa, Chryseobacterium nakagawai
  misc_feature (1)..(209): tr|A0A3N2EE13|A0A3N2EE13_9FLAO 7-carboxy-7-deazaguanine synthase OS=Chryseobacterium nakagawai OX=1241982 GN=q ueE PE=3 SV=1
MNKEQDILLKEGKMLPVMEHFYTLQGEGAHTGKAAYFIRLGGCDVGCHWCDVKESWDPKLHPLMDAVEIAETAAKHCKTIVLTGGEPLTWNLEILTSKLKELGCTIHIETSGAYPMSGQLDWITLSPKKTGLPKEEIYQKAHELKVIVFNHHDFTFAQEQAAKVSENCKLYLQSEWSKRDDIYPKITDFILEHPEWQASVQTHKYLNIP

SEQ ID NO: 29217 - protein, 209 aa, Chryseobacterium nematophagum
  misc_feature (1)..(209): tr|A0A3M7LGA7|A0A3M7LGA7_9FLAO 7-carboxy-7-deazaguanine synthase OS=Chryseobacterium nematophagum OX=2305228 G N=queE PE=3 SV=1
MNKEEDILLKEGKMLPVMEHFYTLQGEGAHTGKAAYFIRLGGCDVGCHWCDVKESWNPDLHPLMSTEDIAETAAKHCKTIVLTGGEPLMWNLEILTSKLKELGCTIHIETSGAYPMSGHLDWITLSPKKTGLPKEEIYKKAHELKVIVFNNNDFIFAEEQAAKVSDSCRLYLQSEWSKRDEMYPKITDFILENPEWQASVQTHKYLNIP

SEQ ID NO: 29218 - protein, 209 aa, Chryseobacterium nematophagum
  misc_feature (1)..(209): tr|A0A3M7TCL0|A0A3M7TCL0_9FLAO 7-carboxy-7-deazaguanine synthase OS=Chryseobacterium nematophagum OX=2305228 G N=queE PE=3 SV=1
MNKEEDILLKEGKMLPVMEHFYTLQGEGAHTGKAAYFIRLGGCDVGCHWCDVKESWNPDLHPLMSTEDIAETAAKHCKTIVLTGGEPLMWNLEILTSKLKELGCTIHIETSGAYPMSGHLDWITLSPKKTGLPKEEIYKKAHELKVIVFNNNDFIFAEEQAAKVSDSCKLYLQSEWSKRDEMYPKITNFILEHPEWQASVQTHKYLNIP

SEQ ID NO: 29219 - protein, 209 aa, Chryseobacterium oleae
  misc_feature (1)..(209): tr|A0A1I5BDE5|A0A1I5BDE5_9FLAO 7-carboxy-7-deazaguanine synthase OS=Chryseobacterium oleae OX=491207 GN=queE P E=3 SV=1
MNKEEDILLKEGKMLPVMEHFYTIQGEGAHTGKAAYFIRLGGCDVGCHWCDVKESWDPTLHPLMNAEEIAETAAKHCKIIVLTGGEPLMWNLDILTSKLKELGCTIHIETSGAYPLSGQIDWITLSPKKTGLPKEEIYAKAHELKMIIFNNNDFKFADEQAAKVSENCRLYLQSEWSKRDEMYPKITDFILAHPEWQASVQTHKYLNIP

SEQ ID NO: 29220 - protein, 209 aa, Chryseobacterium oncorhynchi
  misc_feature (1)..(209): tr|A0A316WIX4|A0A316WIX4_9FLAO 7-carboxy-7-deazaguanine synthase OS=Chryseobacterium oncorhynchi OX=741074 GN= queE PE=3 SV=1
MNKEQDILLKEGKMLPVMEHFYTLQGEGAHTGKAAYFIRLGGCDVGCHWCDVKESWDPELHPLMDAAEIAETAAKHCKTIVLTGGEPLTWNLEILTSKLKELGCTIHIETSGAYPMSGHLDWITLSPKKTGLPKEEIYQKANELKMIVFNNHDFEFAKEQAAKVSENCKLYLQSEWSKRDDMYPKITDFILEHPEWQASVQTHKYLNIP

SEQ ID NO: 29221 - protein, 209 aa, Chryseobacterium oranimense
  misc_feature (1)..(209): tr|A0A1M5W081|A0A1M5W081_9FLAO 7-carboxy-7-deazaguanine synthase OS=Chryseobacterium oranimense OX=421058 GN=q ueE PE=3 SV=1
MNKEEDILLKEGKMLPVMEHFYTLQGEGAHTGKASYFIRLGGCDVGCHWCDVKESWDPNLHPLMNAEEIAETAAKHCKTIVLTGGEPLMWNLDILTGKLKELGCTIHIETSGAYPMSGQIDWITLSPKKTGLPKEEIYQKASELKVIIFNQHDFTFAQEQAAKVSADCKLYMQSEWSKRDEMYPKITDFILAHPEWQASVQTHKYLNIP

SEQ ID NO: 29222 - protein, 209 aa, Chryseobacterium piperi
  misc_feature (1)..(209): tr|A0A086ARI9|A0A086ARI9_9FLAO 7-carboxy-7-deazaguanine synthase OS=Chryseobacterium piperi OX=558152 GN=queE PE=3 SV=1
MNKEEDILLKEGKMLPVMEHFYTLQGEGAHTGKAAYFIRLGGCDVGCHWCDVKESWNPDLHPLMNAEEIAETAAKHCKTIVLTGGEPLMWNLDILTSRLKDLGCTIHIETSGAYPVSGQLDWITLSPKKTGLPKEEVYEKASELKVIIFNNHDFSFAQEQAAKVSKDCKLYLQSEWSKRDEMYPKITDFILENPEWQASVQTHKYLNIP

SEQ ID NO: 29223 - protein, 209 aa, Chryseobacterium piscicola
  misc_feature (1)..(209): tr|A0A1N7K4L8|A0A1N7K4L8_9FLAO 7-carboxy-7-deazaguanine synthase OS=Chryseobacterium piscicola OX=551459 GN=qu eE PE=3 SV=1
MDLVEDILLKEGKMLPVMEHFYTIQGEGAHTGKAAYFIRLGGCDVGCHWCDVKESWDPKLHPLMNAEEIAETAAKHCKIVVLTGGEPLMWNLEVLTGKLKELGCTVHIETSGAYPMSGQLDWITLSPKKTGLPKEEIYHKAHELKVIVFNNNDLKFAEEQAAKVSENCKLYLQSEWSKREEIYPKITDFILGNPRWQASVQTHKYLNIP

SEQ ID NO: 29224 - protein, 209 aa, Chryseobacterium piscium
  misc_feature (1)..(209): tr|A0A3D9BR57|A0A3D9BR57_9FLAO 7-carboxy-7-deazaguanine synthase OS=Chryseobacterium piscium OX=333702 GN=queE PE=3 SV=1
MNKEEDILLKEGKMLPVMEHFYTIQGEGAHTGKAAYFIRLGGCDVGCHWCDVKESWDPTLHPLMNAEEIAETAAKHCKIVVLTGGEPLMWNLDILTSKLKELGCTIHIETSGAYPLSGQIDWITLSPKKTGLPKEEIYAKAHELKMIVFNNNDFKFAEEQAAKVSENCRLYLQSEWSKRDEMYPKITDFILANPRWQASVQTHKYLNIP

SEQ ID NO: 29225 - protein, 209 aa, Chryseobacterium polytrichastri
  misc_feature (1)..(209): tr|A0A1M6YLA6|A0A1M6YLA6_9FLAO 7-carboxy-7-deazaguanine synthase OS=Chryseobacterium polytrichastri OX=1302687 GN=queE PE=3 SV=1
MNKEEDILLKEGKMLPVMEHFYTLQGEGAHTGKASYFIRLGGCDVGCHWCDVKESWDPTLHPLMNAEEIAETAAKHCKTVVLTGGEPLMWNLDILTSKLKELGCTIHIETSGAYPMSGHIDWITLSPKKTGLPKEEIYEKASELKVIVFNNNDLKFAEEQAAKVSANCKLYLQSEWSKRDEMYPKITDFILAHPEWQASVQTHKYLNIP

SEQ ID NO: 29226 - protein, 209 aa, Chryseobacterium rhizoplanae
  misc_feature (1)..(209): tr|A0A521E952|A0A521E952_9FLAO 7-carboxy-7-deazaguanine synthase OS=Chryseobacterium rhizoplanae OX=1609531 GN =queE PE=3 SV=1
MNKEEDILLKEGKMLPVMEHFYTLQGEGAHTGKAAYFIRLGGCDVGCHWCDVKESWNPELHPLMNTVEIAETAAKHCKTIVLTGGEPLMWNLDILTSRLKELGCTVHIETSGAYPMSGQLDWITLSPKKTGLPKEEIYQKAHELKVIIFNQHDFTFAQEQASKVSENCKLYLQSEWSKRDEMYPKITDFILEHPEWQASVQTHKYLNIP

SEQ ID NO: 29227 - protein, 209 aa, Chryseobacterium rhizosphaerae
  misc_feature (1)..(209): tr|A0A3D9DIM0|A0A3D9DIM0_9FLAO 7-carboxy-7-deazaguanine synthase OS=Chryseobacterium rhizosphaerae OX=395937 G N=queE PE=3 SV=1
MNKEEDILLKEGKMLPVMEHFYTLQGEGAHTGKAAYFIRLGGCDVGCHWCDVKESWDPELHPLMNATEIAETAAKHCKTVVLTGGEPLMWNLEILTSKLKELGCTIHIETSGAYPMSGHLDWITLSPKKTGLPKEEIYQKAHELKVIIFNNNDFKFAEEQAAKVSDKCRLYLQSEWSKRNDMYPKITDFILEHPEWQASVQTHKYLNIP

SEQ ID NO: 29228 - protein, 209 aa, Chryseobacterium scophthalmum
  misc_feature (1)..(209): tr|A0A1N6H5T8|A0A1N6H5T8_9FLAO 7-carboxy-7-deazaguanine synthase OS=Chryseobacterium scophthalmum OX=59733 GN= queE PE=3 SV=1
MNKEEDILLKEGKMLPVMEHFYTIQGEGAHTGKAAYFIRLGGCDVGCHWCDVKESWDPTLHPLMNAEEIAETAAKHCKIVVLTGGEPLMWNLDILTSKLKELGCTIHIETSGAYPLSGQIDWITLSPKKTGLPKEEIYAKAHELKMIVFNNNDFKFADEQAAKVSENCRLYLQSEWSKRDEMYPKITDFILANPRWQASVQTHKYLNIP

SEQ ID NO: 29229 - protein, 209 aa, Chryseobacterium sediminis
  misc_feature (1)..(209): tr|A0A5B2TNL0|A0A5B2TNL0_9FLAO 7-carboxy-7-deazaguanine synthase OS=Chryseobacterium sediminis OX=1679494 GN=q ueE PE=3 SV=1
MNKEEDILLKEGKMLPVMEHFYTLQGEGAHTGKAAYFIRLGGCDVGCHWCDVKESWDPELHPLMNAAEIAETAAKHCKTVVLTGGEPLMWNLDILTSKLKELGCTVHIETSGAYPMSGHLDWITLSPKKTGLPKEEIYQKAHELKVIIFNQHDFTFAQEQASKVSENCKLYLQSEWSKRDDMYPKITDFILKHPEWQASVQTHKYLNIP

SEQ ID NO: 29230 - protein, 209 aa, Chryseobacterium shandongense
  misc_feature (1)..(209): tr|A0A3G6MSZ1|A0A3G6MSZ1_9FLAO 7-carboxy-7-deazaguanine synthase OS=Chryseobacterium shandongense OX=1493872 G N=queE PE=3 SV=1
MDLVEDILLKEGKMLPVMEHFYTLQGEGAHTGKAAYFIRLGGCDVGCHWCDVKESWDPNLHPLMNAEEIAETAARHCKTIVLTGGEPLMWNLDILTSKLKELGCSIHIETSGAYPMSGHIDWITLSPKKTGLPKEEIYQKAHELKVIVFNNNDFKFAQEQARKVSENCTLYLQSEWSKRDEMYPKITDFILQHPKWRASVQTHKYLNIP

SEQ ID NO: 29231 - protein, 209 aa, Chryseobacterium shandongense
  misc_feature (1)..(209): tr|A0A3G6QBC3|A0A3G6QBC3_9FLAO 7-carboxy-7-deazaguanine synthase OS=Chryseobacterium shandongense OX=1493872 G N=queE PE=3 SV=1
MDLVEDILLKEGKMLPVMEHFYTLQGEGAHTGKAAYFIRLGGCDVGCHWCDVKESWDPNLHPLMNAEEIAETAARHCKTIVLTGGEPLMWNLDILTSKLKELGCSIHIETSGAYPMSGHIDWITLSPKKTGLPKEEIYQKAHELKVIVFNNNDFKFAQEQATKVSENCTLYLQSEWSKRDEMYPKITDFILQHPKWRASVQTHKYLNIP

SEQ ID NO: 29232 - protein, 209 aa, Chryseobacterium shigense; identical to SEQ ID NO: 29171
  misc_feature (1)..(209): tr|A0A376EUY3|A0A376EUY3_9FLAO 7-carboxy-7-deazaguanine synthase OS=Chryseobacterium shigense OX=297244 GN=que E PE=3 SV=1

SEQ ID NO: 29233 - protein, 209 aa, Chryseobacterium shigense
  misc_feature (1)..(209): tr|A0A1N7J5W4|A0A1N7J5W4_9FLAO 7-carboxy-7-deazaguanine synthase OS=Chryseobacterium shigense OX=297244 GN=que E PE=3 SV=1
MNKEEDILLKEGKMLPVMEHFYTLQGEGAHTGKASYFIRLGGCDVGCHWCDVKESWDPNLHPLMNAEEIAETAAKHCKTIVLTGGEPLMWNLDILTSKLKELGCTIHIETSGAYPLSGQIDWITLSPKKTGLPKEEIYQQASELKVIIFNQHDFTFAQEQAAKVSEKCRLYMQSEWSKRDEMYPKITDFILAHPEWQASVQTHKYLNIP

SEQ ID NO: 29234 - protein, 209 aa, Chryseobacterium soldanellicola
  misc_feature (1)..(209): tr|A0A1H1BCP7|A0A1H1BCP7_9FLAO 7-carboxy-7-deazaguanine synthase OS=Chryseobacterium soldanellicola OX=311333 GN=queE PE=3 SV=1
MDLIEDILLKEGKMLPVMEHFYTLQGEGAHTGKASYFIRLGGCDVGCHWCDVKESWDPNLHPLMNAEEIAETAAKHCKTIVLTGGEPLMWNLDILTSKLKELGCTVHIETSGAYPMSGQIDWITLSPKKTGLPKEEIYAKASELKVIVFNNNDFKFAEEQAAKVSENCTLYLQSEWSKRDEMYPKITDFILEHPKWRASVQTHKYLNIP

SEQ ID NO: 29235 - protein, 209 aa, Chryseobacterium soli
  misc_feature (1)..(209): tr|A0A086ACV2|A0A086ACV2_9FLAO 7-carboxy-7-deazaguanine synthase OS=Chryseobacterium soli OX=445961 GN=queE PE =3 SV=1
MNKEEDILLKEGKMLPVMEHFYTLQGEGAHTGKAAYFIRLGGCDVGCHWCDVKESWNPDLHPLMHAEEIAETAAKHCKTIVLTGGEPLMWNLDVLTSKLKELGCTIHIETSGAYPMSGQLDWITLSPKKTGLPKEEIYQKANELKVIAFNNNDFAFAQEQASKVSEHCRLYLQSEWSKRDEMYPKITDFILAHPEWQASVQTHKYLNIP

SEQ ID NO: 29236 - protein, 210 aa, Chryseobacterium solincola
  misc_feature (1)..(210): tr|A0A0C1EU12|A0A0C1EU12_9FLAO 7-carboxy-7-deazaguanine synthase OS=Chryseobacterium solincola OX=510955 GN=qu eE PE=3 SV=1
MTKEEENILLKEGKMLPVMEHFYTIQGEGAHTGKAAYFIRLGGCDVGCHWCDVKESWNPDLHPLLNAEEIAQTAAKNCKTIVLTGGEPLMWNLQFLTARLKELGCTIHIETSGAYEMSGHLDWITLSPKKTGLPKPAIYERASELKMIIFNNNDFKFAEEQAAKVSENCVLYLQSEWSKRNEMYPKITDYILANPKWQASVQTHKYLNIP

SEQ ID NO: 29237 - protein, 209 aa, Chryseobacterium sp.
  misc_feature (1)..(209): tr|A0A3G6PJN6|A0A3G6PJN6_9FLAO 7-carboxy-7-deazaguanine synthase OS=Chryseobacterium sp. G0186 OX=2487064 GN=q ueE PE=3 SV=1
MNKEQDILLKEGKMLPVMEHFYTLQGEGAHTGKAAYFIRLGGCDVGCHWCDVKESWDPELHPLMDAMEIAETAAKHCKTIVLTGGEPLTWNLEILTSKLKELGCTIHIETSGAYPMSGHLDWITLSPKKTGLPKEEIYQKAHELKVIVFNNHDFEFAQEQAAKVSENCKLYLQSEWSKRDDMYPKITDFILAHPEWQASVQTHKYLNIP

SEQ ID NO: 29238 - protein, 209 aa, Chryseobacterium sp.
  misc_feature (1)..(209): tr|A0A316X045|A0A316X045_9FLAO 7-carboxy-7-deazaguanine synthase OS=Chryseobacterium sp. ISE14 OX=475075 GN=qu eE PE=3 SV=1
MNKDQDILLKEGKMLPVMEHFYTLQGEGAHTGKAAYFIRLGGCDVGCHWCDVKESWDPDLHPLMNATEIAETAAKHCKTIVLTGGEPLMWNLETLTSKLKELGCTIHIETSGAYPMSGQLDWITLSPKKTGLPKEEIYLKANELKVIVFNHHDFTFAEEQAAKVSENCKLYLQSEWSKRNDMYPKITDFILEHPEWQASVQTHKYLNIP

SEQ ID NO: 29239 - protein, 209 aa, Chryseobacterium taeanense
  misc_feature (1)..(209): tr|A0A1G8HC51|A0A1G8HC51_9FLAO 7-carboxy-7-deazaguanine synthase OS=Chryseobacterium taeanense OX=311334 GN=qu eE PE=3 SV=1
MDLIEDILLKEGKMLPVMEHFYTLQGEGAHTGKAAYFIRLGGCDVGCHWCDVKESWDPNLHPLMNAEEIAETAAKHCKTIVLTGGEPLMWNLDVLTSRLKELGCTIHIETSGAYPMSGHIDWITLSPKKTGLPKEEIYQKAHELKVIVFNNNDFKFAEEQAAKVSDNCTLYLQSEWSKRDEMYPKITDFILEHPEWRASVQTHKYLNIP

SEQ ID NO: 29240 - protein, 209 aa, Chryseobacterium taichungense
  misc_feature (1)..(209): tr|A0A1H8AZA9|A0A1H8AZA9_9FLAO 7-carboxy-7-deazaguanine synthase OS=Chryseobacterium taichungense OX=295069 GN =queE PE=3 SV=1
MNLVEDILLKEGKMLPVMEHFYTLQGEGAHTGKAAYFIRLGGCDVGCHWCDVKESWDPNLHPLMNAEEIAETAARHCKTIVLTGGEPLMWNLDILTSKLKELGCTVHIETSGAYPMSGQIDWITLSPKKTGLPKEEIYQKAHELKVIIFNNNDFKFAQEQASKVSKNCTLYLQSEWSKRDEMYPKITDFILEHPKWRASVQTHKYLNIP

SEQ ID NO: 29241 - protein, 209 aa, Chryseobacterium taihuense
  misc_feature (1)..(209): tr|A0A1G9NDR5|A0A1G9NDR5_9FLAO 7-carboxy-7-deazaguanine synthase OS=Chryseobacterium taihuense OX=1141221 GN=q ueE PE=3 SV=1
MNLTEEILLKEGKMLPVMEHFYTLQGEGAHTGKAAYFIRLGGCDVGCHWCDVKESWDPNLHPLMNAEEIAETAAKHCKTIVLTGGEPLMWNLDILTGKLKELGCSIHIETSGAYPMSGQIDWITLSPKKTGLPKEEIYAKAHELKVIVFNNNDFKFAQEQAAKVSENCTLYLQSEWSKRDEMYPKITDFILEHPEWRASVQTHKYLNIP

SEQ ID NO: 29242 - protein, 209 aa, Chryseobacterium taiwanense
  misc_feature (1)..(209): tr|A0A0B4CMC7|A0A0B4CMC7_9FLAO 7-carboxy-7-deazaguanine synthase OS=Chryseobacterium taiwanense OX=363331 GN=q ueE PE=3 SV=1
MKIEEDILLKEGKMLPVMEHFYTLQGEGAHTGKAAYFIRLGGCDVGCHWCDVKESWDPNLHPLMNAEEIAETAAKHCKTIVLTGGEPLMWNLDILTSKLKELGCTVHIETSGAYPMSGHIDWITLSPKKTGLPKEEIYANAHELKVIVFNNNDFKFAQEQAAKVSENCTLYLQSEWSKRDEMYPKITDFILENPEWRASVQTHKYLNIP

SEQ ID NO: 29243 - protein, 209 aa, Chryseobacterium takakiae
  misc_feature (1)..(209): tr|A0A1M4X1L5|A0A1M4X1L5_9FLAO 7-carboxy-7-deazaguanine synthase OS=Chryseobacterium takakiae OX=1302685 GN=qu eE PE=3 SV=1
MNLIEDILLKEGKMLPVMEHFYTLQGEGAYTGKAAYFIRLGGCDVGCHWCDVKESWDPNLHPLMNAEEIAETAAKHCKTIVLTGGEPLMWNLDILTSKLKELGCSIHIETSGAYPLSGHIDWITLSPKKTGLPKEEIYQKAHELKVIVFNNNDFKFAQEQGSKVSENCTLYLQSEWSKRDEMYPKITDFILEHPEWRASVQTHKYLNIP

SEQ ID NO: 29244 - protein, 210 aa, Chryseobacterium taklimakanense
  misc_feature (1)..(210): tr|A0A3G8WG38|A0A3G8WG38_9FLAO 7-carboxy-7-deazaguanine synthase OS=Chryseobacterium taklimakanense OX=536441 GN=queE PE=3 SV=1
MTKEEQDILLKEGKMLPVMEHFYTIQGEGAHTGKAAYFIRLGGCDVGCHWCDVKESWDPDVHPLMDVEGVAETAASYCKTIVLTGGEPLMWNLDVLTSKLKELGCQIHIETSGAYPMSGQLDWITLSPKKTGLPLDEIYSQAQELKVIIFNNHDFQFAEEQAAKVSENCKLYLQSEWSKRDAMYPKITDFILANPKWQASVQTHKYLNIP
